United States Patent Application Publication US 2018/0305689 A1 - sequence listing, part 114

SEQ ID NO: 1613788 - RNA, 19 nt, Artificial Sequence
  Description of Artificial Sequence: Synthetic oligonucleotide
  Antisense strand to SEQ ID NO: 1613787
aaccauccuggacacugag

SEQ ID NO: 1613789 - RNA, 19 nt, Artificial Sequence
  Description of Artificial Sequence: Synthetic oligonucleotide
  Sense strand starting at position 2430 of SEQ ID NO: 1560634
cccugagcugcucaucgau

SEQ ID NO: 1613790 - RNA, 19 nt, Artificial Sequence
  Description of Artificial Sequence: Synthetic oligonucleotide
  Antisense strand to SEQ ID NO: 1613789
aucgaugagcagcucaggg

SEQ ID NO: 1613791 - RNA, 19 nt, Artificial Sequence
  Description of Artificial Sequence: Synthetic oligonucleotide
  Sense strand starting at position 2524 of SEQ ID NO: 1560634
gugccuggucugugucaca

SEQ ID NO: 1613792 - RNA, 19 nt, Artificial Sequence
  Description of Artificial Sequence: Synthetic oligonucleotide
  Antisense strand to SEQ ID NO: 1613791
ugugacacagaccaggcac

SEQ ID NO: 1613793 - RNA, 19 nt, Artificial Sequence
  Description of Artificial Sequence: Synthetic oligonucleotide
  Sense strand starting at position 3189 of SEQ ID NO: 1560634
guggcaucuguauguagac

SEQ ID NO: 1613794 - RNA, 19 nt, Artificial Sequence
  Description of Artificial Sequence: Synthetic oligonucleotide
  Antisense strand to SEQ ID NO: 1613793
gucuacauacagaugccac

SEQ ID NO: 1613795 - RNA, 19 nt, Artificial Sequence
  Description of Artificial Sequence: Synthetic oligonucleotide
  Sense strand starting at position 3312 of SEQ ID NO: 1560634
agccuuaaugccgagugau

SEQ ID NO: 1613796 - RNA, 19 nt, Artificial Sequence
  Description of Artificial Sequence: Synthetic oligonucleotide
  Antisense strand to SEQ ID NO: 1613795
aucacucggcauuaaggcu

SEQ ID NO: 1613797 - RNA, 19 nt, Artificial Sequence
  Description of Artificial Sequence: Synthetic oligonucleotide
  Sense strand starting at position 3315 of SEQ ID NO: 1560634
cuuaaugccgagugaugag

SEQ ID NO: 1613798 - RNA, 19 nt, Artificial Sequence
  Description of Artificial Sequence: Synthetic oligonucleotide
  Antisense strand to SEQ ID NO: 1613797
cucaucacucggcauuaag

SEQ ID NO: 1613799 - RNA, 19 nt, Artificial Sequence
  Description of Artificial Sequence: Synthetic oligonucleotide
  Sense strand starting at position 3478 of SEQ ID NO: 1560634
cugaucauguagguuaaga

SEQ ID NO: 1613800 - RNA, 19 nt, Artificial Sequence
  Description of Artificial Sequence: Synthetic oligonucleotide
  Antisense strand to SEQ ID NO: 1613799
ucuuaaccuacaugaucag

SEQ ID NO: 1613801 - RNA, 19 nt, Artificial Sequence
  Description of Artificial Sequence: Synthetic oligonucleotide
  Sense strand starting at position 3537 of SEQ ID NO: 1560634
ggagguguugcaggccgaa

SEQ ID NO: 1613802 - RNA, 19 nt, Artificial Sequence
  Description of Artificial Sequence: Synthetic oligonucleotide
  Antisense strand to SEQ ID NO: 1613801
uucggccugcaacaccucc

SEQ ID NO: 1613803 - RNA, 19 nt, Artificial Sequence
  Description of Artificial Sequence: Synthetic oligonucleotide
  Sense strand starting at position 3558 of SEQ ID NO: 1560634
agugaaggucgugaucaac

SEQ ID NO: 1613804 - RNA, 19 nt, Artificial Sequence
  Description of Artificial Sequence: Synthetic oligonucleotide
  Antisense strand to SEQ ID NO: 1613803
guugaucacgaccuucacu

SEQ ID NO: 1613805 - RNA, 19 nt, Artificial Sequence
  Description of Artificial Sequence: Synthetic oligonucleotide
  Sense strand starting at position 3564 of SEQ ID NO: 1560634
ggucgugaucaacgcagua

SEQ ID NO: 1613806 - RNA, 19 nt, Artificial Sequence
  Description of Artificial Sequence: Synthetic oligonucleotide
  Antisense strand to SEQ ID NO: 1613805
uacugcguugaucacgacc

SEQ ID NO: 1613807 - RNA, 19 nt, Artificial Sequence
  Description of Artificial Sequence: Synthetic oligonucleotide
  Sense strand starting at position 3566 of SEQ ID NO: 1560634
ucgugaucaacgcaguaua

SEQ ID NO: 1613808 - RNA, 19 nt, Artificial Sequence
  Description of Artificial Sequence: Synthetic oligonucleotide
  Antisense strand to SEQ ID NO: 1613807
uauacugcguugaucacga

SEQ ID NO: 1613809 - RNA, 19 nt, Artificial Sequence
  Description of Artificial Sequence: Synthetic oligonucleotide
  Sense strand starting at position 3577 of SEQ ID NO: 1560634
gcaguauaccucuggaggu

SEQ ID NO: 1613810 - RNA, 19 nt, Artificial Sequence
  Description of Artificial Sequence: Synthetic oligonucleotide
  Antisense strand to SEQ ID NO: 1613809
accuccagagguauacugc

SEQ ID NO: 1613811 - RNA, 19 nt, Artificial Sequence
  Description of Artificial Sequence: Synthetic oligonucleotide
  Sense strand starting at position 3579 of SEQ ID NO: 1560634
aguauaccucuggagguua

SEQ ID NO: 1613812 - RNA, 19 nt, Artificial Sequence
  Description of Artificial Sequence: Synthetic oligonucleotide
  Antisense strand to SEQ ID NO: 1613811
uaaccuccagagguauacu

SEQ ID NO: 1613813 - RNA, 19 nt, Artificial Sequence
  Description of Artificial Sequence: Synthetic oligonucleotide
  Sense strand starting at position 3591 of SEQ ID NO: 1560634
gagguuacaugaguaaaca

SEQ ID NO: 1613814 - RNA, 19 nt, Artificial Sequence
  Description of Artificial Sequence: Synthetic oligonucleotide
  Antisense strand to SEQ ID NO: 1613813
uguuuacucauguaaccuc

SEQ ID NO: 1613815 - RNA, 19 nt, Artificial Sequence
  Description of Artificial Sequence: Synthetic oligonucleotide
  Sense strand starting at position 3628 of SEQ ID NO: 1560634
ugcagaauguuguccaacu

SEQ ID NO: 1613816 - RNA, 19 nt, Artificial Sequence
  Description of Artificial Sequence: Synthetic oligonucleotide
  Antisense strand to SEQ ID NO: 1613815
aguuggacaacauucugca

SEQ ID NO: 1613817 - RNA, 19 nt, Artificial Sequence
  Description of Artificial Sequence: Synthetic oligonucleotide
  Sense strand starting at position 3629 of SEQ ID NO: 1560634
gcagaauguuguccaacug

SEQ ID NO: 1613818 - RNA, 19 nt, Artificial Sequence
  Description of Artificial Sequence: Synthetic oligonucleotide
  Antisense strand to SEQ ID NO: 1613817
caguuggacaacauucugc

SEQ ID NO: 1613819 - RNA, 19 nt, Artificial Sequence
  Description of Artificial Sequence: Synthetic oligonucleotide
  Sense strand starting at position 3630 of SEQ ID NO: 1560634
cagaauguuguccaacuga

SEQ ID NO: 1613820 - RNA, 19 nt, Artificial Sequence
  Description of Artificial Sequence: Synthetic oligonucleotide
  Antisense strand to SEQ ID NO: 1613819
ucaguuggacaacauucug

SEQ ID NO: 1613821 - RNA, 19 nt, Artificial Sequence
  Description of Artificial Sequence: Synthetic oligonucleotide
  Sense strand starting at position 3657 of SEQ ID NO: 1560634
gucugcuucccagagggaa

SEQ ID NO: 1613822 - RNA, 19 nt, Artificial Sequence
  Description of Artificial Sequence: Synthetic oligonucleotide
  Antisense strand to SEQ ID NO: 1613821
uucccucugggaagcagac

SEQ ID NO: 1613823 - RNA, 19 nt, Artificial Sequence
  Description of Artificial Sequence: Synthetic oligonucleotide
  Sense strand starting at position 3698 of SEQ ID NO: 1560634
agcgaaguguuucuuguaa

SEQ ID NO: 1613824 - RNA, 19 nt, Artificial Sequence
  Description of Artificial Sequence: Synthetic oligonucleotide
  Antisense strand to SEQ ID NO: 1613823
uuacaagaaacacuucgcu

SEQ ID NO: 1613825 - RNA, 19 nt, Artificial Sequence
  Description of Artificial Sequence: Synthetic oligonucleotide
  Sense strand starting at position 3723 of SEQ ID NO: 1560634
acagcugaagcuuguuagu

SEQ ID NO: 1613826 - RNA, 19 nt, Artificial Sequence
  Description of Artificial Sequence: Synthetic oligonucleotide
  Antisense strand to SEQ ID NO: 1613825
acuaacaagcuucagcugu

SEQ ID NO: 1613827 - RNA, 19 nt, Artificial Sequence
  Description of Artificial Sequence: Synthetic oligonucleotide
  Sense strand starting at position 3725 of SEQ ID NO: 1560634
agcugaagcuuguuaguaa

SEQ ID NO: 1613828 - RNA, 19 nt, Artificial Sequence
  Description of Artificial Sequence: Synthetic oligonucleotide
  Antisense strand to SEQ ID NO: 1613827
uuacuaacaagcuucagcu

SEQ ID NO: 1613829 - RNA, 19 nt, Artificial Sequence
  Description of Artificial Sequence: Synthetic oligonucleotide
  Sense strand starting at position 3732 of SEQ ID NO: 1560634
gcuuguuaguaauaauaug

SEQ ID NO: 1613830 - RNA, 19 nt, Artificial Sequence
  Description of Artificial Sequence: Synthetic oligonucleotide
  Antisense strand to SEQ ID NO: 1613829
cauauuauuacuaacaagc

SEQ ID NO: 1613831 - RNA, 19 nt, Artificial Sequence
  Description of Artificial Sequence: Synthetic oligonucleotide
  Sense strand starting at position 3968 of SEQ ID NO: 1560634
gacggucucaagugguaac

SEQ ID NO: 1613832 - RNA, 19 nt, Artificial Sequence
  Description of Artificial Sequence: Synthetic oligonucleotide
  Antisense strand to SEQ ID NO: 1613831
guuaccacuugagaccguc

SEQ ID NO: 1613833 - RNA, 19 nt, Artificial Sequence
  Description of Artificial Sequence: Synthetic oligonucleotide
  Sense strand starting at position 3969 of SEQ ID NO: 1560634
acggucucaagugguaaca

SEQ ID NO: 1613834 - RNA, 19 nt, Artificial Sequence
  Description of Artificial Sequence: Synthetic oligonucleotide
  Antisense strand to SEQ ID NO: 1613833
uguuaccacuugagaccgu

SEQ ID NO: 1613835 - RNA, 19 nt, Artificial Sequence
  Description of Artificial Sequence: Synthetic oligonucleotide
  Sense strand starting at position 420 of SEQ ID NO: 1560635
gauagagauucccaguaac

SEQ ID NO: 1613836 - RNA, 19 nt, Artificial Sequence
  Description of Artificial Sequence: Synthetic oligonucleotide
  Antisense strand to SEQ ID NO: 1613835
guuacugggaaucucuauc

SEQ ID NO: 1613837 - RNA, 19 nt, Artificial Sequence
  Description of Artificial Sequence: Synthetic oligonucleotide
  Sense strand starting at position 462 of SEQ ID NO: 1560635
uagccagcccucgaucauu

SEQ ID NO: 1613838 - RNA, 19 nt, Artificial Sequence
  Description of Artificial Sequence: Synthetic oligonucleotide
  Antisense strand to SEQ ID NO: 1613837
aaugaucgagggcuggcua

SEQ ID NO: 1613839 - RNA, 19 nt, Artificial Sequence
  Description of Artificial Sequence: Synthetic oligonucleotide
  Sense strand starting at position 545 of SEQ ID NO: 1560635
aagagauucccugaguagc

SEQ ID NO: 1613840 - RNA, 19 nt, Artificial Sequence
  Description of Artificial Sequence: Synthetic oligonucleotide
  Antisense strand to SEQ ID NO: 1613839
gcuacucagggaaucucuu

SEQ ID NO: 1613841 - RNA, 19 nt, Artificial Sequence
  Description of Artificial Sequence: Synthetic oligonucleotide
  Sense strand starting at position 641 of SEQ ID NO: 1560635
uggugacccucuccacaua

SEQ ID NO: 1613842 - RNA, 19 nt, Artificial Sequence
  Description of Artificial Sequence: Synthetic oligonucleotide
  Antisense strand to SEQ ID NO: 1613841
uauguggagagggucacca

SEQ ID NO: 1613843 - RNA, 19 nt, Artificial Sequence
  Description of Artificial Sequence: Synthetic oligonucleotide
  Sense strand starting at position 911 of SEQ ID NO: 1560635
guucuuaucccucaagaag

SEQ ID NO: 1613844 - RNA, 19 nt, Artificial Sequence
  Description of Artificial Sequence: Synthetic oligonucleotide
  Antisense strand to SEQ ID NO: 1613843
cuucuugagggauaagaac

SEQ ID NO: 1613845 - RNA, 19 nt, Artificial Sequence
  Description of Artificial Sequence: Synthetic oligonucleotide
  Sense strand starting at position 1501 of SEQ ID NO: 1560635
ccgaguccauggguuucaa

SEQ ID NO: 1613846 - RNA, 19 nt, Artificial Sequence
  Description of Artificial Sequence: Synthetic oligonucleotide
  Antisense strand to SEQ ID NO: 1613845
uugaaacccauggacucgg

SEQ ID NO: 1613847 - RNA, 19 nt, Artificial Sequence
  Description of Artificial Sequence: Synthetic oligonucleotide
  Sense strand starting at position 1647 of SEQ ID NO: 1560635
ucuagucacuggccucaaa

SEQ ID NO: 1613848 - RNA, 19 nt, Artificial Sequence
  Description of Artificial Sequence: Synthetic oligonucleotide
  Antisense strand to SEQ ID NO: 1613847
uuugaggccagugacuaga

SEQ ID NO: 1613849 - RNA, 19 nt, Artificial Sequence
  Description of Artificial Sequence: Synthetic oligonucleotide
  Sense strand starting at position 2163 of SEQ ID NO: 1560635
ggcgaauacugagugagag

SEQ ID NO: 1613850 - RNA, 19 nt, Artificial Sequence
  Description of Artificial Sequence: Synthetic oligonucleotide
  Antisense strand to SEQ ID NO: 1613849
cucucacucaguauucgcc

SEQ ID NO: 1613851 - RNA, 19 nt, Artificial Sequence
  Description of Artificial Sequence: Synthetic oligonucleotide
  Sense strand starting at position 2236 of SEQ ID NO: 1560635
gcggacucugcgucuguaa

SEQ ID NO: 1613852 - RNA, 19 nt, Artificial Sequence
  Description of Artificial Sequence: Synthetic oligonucleotide
  Antisense strand to SEQ ID NO: 1613851
uuacagacgcagaguccgc

SEQ ID NO: 1613853 - RNA, 19 nt, Artificial Sequence
  Description of Artificial Sequence: Synthetic oligonucleotide
  Sense strand starting at position 2237 of SEQ ID NO: 1560635
cggacucugcgucuguaau

SEQ ID NO: 1613854 - RNA, 19 nt, Artificial Sequence
  Description of Artificial Sequence: Synthetic oligonucleotide
  Antisense strand to SEQ ID NO: 1613853
auuacagacgcagaguccg

SEQ ID NO: 1613855 - RNA, 19 nt, Artificial Sequence
  Description of Artificial Sequence: Synthetic oligonucleotide
  Sense strand starting at position 2287 of SEQ ID NO: 1560635
gauguugaauuuggaaauu

SEQ ID NO: 1613856 - RNA, 19 nt, Artificial Sequence
  Description of Artificial Sequence: Synthetic oligonucleotide
  Antisense strand to SEQ ID NO: 1613855
aauuuccaaauucaacauc

SEQ ID NO: 1613857 - RNA, 19 nt, Artificial Sequence
  Description of Artificial Sequence: Synthetic oligonucleotide
  Sense strand starting at position 2354 of SEQ ID NO: 1560635
gauggaugucaauagggcu

SEQ ID NO: 1613858 - RNA, 19 nt, Artificial Sequence
  Description of Artificial Sequence: Synthetic oligonucleotide
  Antisense strand to SEQ ID NO: 1613857
agcccuauugacauccauc

SEQ ID NO: 1613859 - RNA, 19 nt, Artificial Sequence
  Description of Artificial Sequence: Synthetic oligonucleotide
  Sense strand starting at position 2360 of SEQ ID NO: 1560635
ugucaauagggcugaaagu

SEQ ID NO: 1613860 - RNA, 19 nt, Artificial Sequence
  Description of Artificial Sequence: Synthetic oligonucleotide
  Antisense strand to SEQ ID NO: 1613859
acuuucagcccuauugaca

SEQ ID NO: 1613861 - RNA, 19 nt, Artificial Sequence
  Description of Artificial Sequence: Synthetic oligonucleotide
  Sense strand starting at position 2474 of SEQ ID NO: 1560635
gaagaagauuugggaguca

SEQ ID NO: 1613862 - RNA, 19 nt, Artificial Sequence
  Description of Artificial Sequence: Synthetic oligonucleotide
  Antisense strand to SEQ ID NO: 1613861
ugacucccaaaucuucuuc

SEQ ID NO: 1613863 - RNA, 19 nt, Artificial Sequence
  Description of Artificial Sequence: Synthetic oligonucleotide
  Sense strand starting at position 2749 of SEQ ID NO: 1560635
gggcuauguguagagcuuu

SEQ ID NO: 1613864 - RNA, 19 nt, Artificial Sequence
  Description of Artificial Sequence: Synthetic oligonucleotide
  Antisense strand to SEQ ID NO: 1613863
aaagcucuacacauagccc

SEQ ID NO: 1613865 - RNA, 19 nt, Artificial Sequence
  Description of Artificial Sequence: Synthetic oligonucleotide
  Sense strand starting at position 2798 of SEQ ID NO: 1560635
gaauguucucugugggagg

SEQ ID NO: 1613866 - RNA, 19 nt, Artificial Sequence
  Description of Artificial Sequence: Synthetic oligonucleotide
  Antisense strand to SEQ ID NO: 1613865
ccucccacagagaacauuc

SEQ ID NO: 1613867 - RNA, 19 nt, Artificial Sequence
  Description of Artificial Sequence: Synthetic oligonucleotide
  Sense strand starting at position 2800 of SEQ ID NO: 1560635
auguucucugugggaggau

SEQ ID NO: 1613868 - RNA, 19 nt, Artificial Sequence
  Description of Artificial Sequence: Synthetic oligonucleotide
  Antisense strand to SEQ ID NO: 1613867
auccucccacagagaacau

SEQ ID NO: 1613869 - RNA, 19 nt, Artificial Sequence
  Description of Artificial Sequence: Synthetic oligonucleotide
  Sense strand starting at position 2826 of SEQ ID NO: 1560635
gcauauguguaguuggaug

SEQ ID NO: 1613870 - RNA, 19 nt, Artificial Sequence
  Description of Artificial Sequence: Synthetic oligonucleotide
  Antisense strand to SEQ ID NO: 1613869
cauccaacuacacauaugc

SEQ ID NO: 1613871 - RNA, 19 nt, Artificial Sequence
  Description of Artificial Sequence: Synthetic oligonucleotide
  Sense strand starting at position 2846 of SEQ ID NO: 1560635
gcccuuaguggacagagua

SEQ ID NO: 1613872 - RNA, 19 nt, Artificial Sequence
  Description of Artificial Sequence: Synthetic oligonucleotide
  Antisense strand to SEQ ID NO: 1613871
uacucuguccacuaagggc

SEQ ID NO: 1613873 - RNA, 19 nt, Artificial Sequence
  Description of Artificial Sequence: Synthetic oligonucleotide
  Sense strand starting at position 2924 of SEQ ID NO: 1560635
uggcuuguaagaugcugaa

SEQ ID NO: 1613874 - RNA, 19 nt, Artificial Sequence
  Description of Artificial Sequence: Synthetic oligonucleotide
  Antisense strand to SEQ ID NO: 1613873
uucagcaucuuacaagcca

SEQ ID NO: 1613875 - RNA, 19 nt, Artificial Sequence
  Description of Artificial Sequence: Synthetic oligonucleotide
  Sense strand starting at position 2928 of SEQ ID NO: 1560635
uuguaagaugcugaagacu

SEQ ID NO: 1613876 - RNA, 19 nt, Artificial Sequence
  Description of Artificial Sequence: Synthetic oligonucleotide
  Antisense strand to SEQ ID NO: 1613875
agucuucagcaucuuacaa

SEQ ID NO: 1613877 - RNA, 19 nt, Artificial Sequence
  Description of Artificial Sequence: Synthetic oligonucleotide
  Sense strand starting at position 3008 of SEQ ID NO: 1560635
gguggaaugcugcaucaug

SEQ ID NO: 1613878 - RNA, 19 nt, Artificial Sequence
  Description of Artificial Sequence: Synthetic oligonucleotide
  Antisense strand to SEQ ID NO: 1613877
caugaugcagcauuccacc

SEQ ID NO: 1613879 - RNA, 19 nt, Artificial Sequence
  Description of Artificial Sequence: Synthetic oligonucleotide
  Sense strand starting at position 3191 of SEQ ID NO: 1560635
gcaggcugauuccugaguu

SEQ ID NO: 1613880 - RNA, 19 nt, Artificial Sequence
  Description of Artificial Sequence: Synthetic oligonucleotide
  Antisense strand to SEQ ID NO: 1613879
aacucaggaaucagccugc

SEQ ID NO: 1613881 - RNA, 19 nt, Artificial Sequence
  Description of Artificial Sequence: Synthetic oligonucleotide
  Sense strand starting at position 3199 of SEQ ID NO: 1560635
auuccugaguucuuggguu

SEQ ID NO: 1613882 - RNA, 19 nt, Artificial Sequence
  Description of Artificial Sequence: Synthetic oligonucleotide
  Antisense strand to SEQ ID NO: 1613881
aacccaagaacucaggaau

SEQ ID NO: 1613883 - RNA, 19 nt, Artificial Sequence
  Description of Artificial Sequence: Synthetic oligonucleotide
  Sense strand starting at position 3203 of SEQ ID NO: 1560635
cugaguucuuggguuggga

SEQ ID NO: 1613884 - RNA, 19 nt, Artificial Sequence
  Description of Artificial Sequence: Synthetic oligonucleotide
  Antisense strand to SEQ ID NO: 1613883
ucccaacccaagaacucag

SEQ ID NO: 1613885 - RNA, 19 nt, Artificial Sequence
  Description of Artificial Sequence: Synthetic oligonucleotide
  Sense strand starting at position 3205 of SEQ ID NO: 1560635
gaguucuuggguugggacu

SEQ ID NO: 1613886 - RNA, 19 nt, Artificial Sequence
  Description of Artificial Sequence: Synthetic oligonucleotide
  Antisense strand to SEQ ID NO: 1613885
agucccaacccaagaacuc

SEQ ID NO: 1613887 - RNA, 19 nt, Artificial Sequence
  Description of Artificial Sequence: Synthetic oligonucleotide
  Sense strand starting at position 3351 of SEQ ID NO: 1560635
gaugauauguccucugugu

SEQ ID NO: 1613888 - RNA, 19 nt, Artificial Sequence
  Description of Artificial Sequence: Synthetic oligonucleotide
  Antisense strand to SEQ ID NO: 1613887
acacagaggacauaucauc

SEQ ID NO: 1613889 - RNA, 19 nt, Artificial Sequence
  Description of Artificial Sequence: Synthetic oligonucleotide
  Sense strand starting at position 3424 of SEQ ID NO: 1560635
ucuacuaugucccugacuu

SEQ ID NO: 1613890 - RNA, 19 nt, Artificial Sequence
  Description of Artificial Sequence: Synthetic oligonucleotide
  Antisense strand to SEQ ID NO: 1613889
aagucagggacauaguaga

SEQ ID NO: 1613891 - RNA, 19 nt, Artificial Sequence
  Description of Artificial Sequence: Synthetic oligonucleotide
  Sense strand starting at position 3425 of SEQ ID NO: 1560635
cuacuaugucccugacuuc

SEQ ID NO: 1613892 - RNA, 19 nt, Artificial Sequence
  Description of Artificial Sequence: Synthetic oligonucleotide
  Antisense strand to SEQ ID NO: 1613891
gaagucagggacauaguag

SEQ ID NO: 1613893 - RNA, 19 nt, Artificial Sequence
  Description of Artificial Sequence: Synthetic oligonucleotide
  Sense strand starting at position 3462 of SEQ ID NO: 1560635
gaguauuugcuucgacagg

SEQ ID NO: 1613894 - RNA, 19 nt, Artificial Sequence
  Description of Artificial Sequence: Synthetic oligonucleotide
  Antisense strand to SEQ ID NO: 1613893
ccugucgaagcaaauacuc

SEQ ID NO: 1613895 - RNA, 19 nt, Artificial Sequence
  Description of Artificial Sequence: Synthetic oligonucleotide
  Sense strand starting at position 3534 of SEQ ID NO: 1560635
auguccauccucuguauga

SEQ ID NO: 1613896 - RNA, 19 nt, Artificial Sequence
  Description of Artificial Sequence: Synthetic oligonucleotide
  Antisense strand to SEQ ID NO: 1613895
ucauacagaggauggacau

SEQ ID NO: 1613897 - RNA, 19 nt, Artificial Sequence
  Description of Artificial Sequence: Synthetic oligonucleotide
  Sense strand starting at position 3536 of SEQ ID NO: 1560635
guccauccucuguaugaga

SEQ ID NO: 1613898 - RNA, 19 nt, Artificial Sequence
  Description of Artificial Sequence: Synthetic oligonucleotide
  Antisense strand to SEQ ID NO: 1613897
ucucauacagaggauggac

SEQ ID NO: 1613899 - RNA, 19 nt, Artificial Sequence
  Description of Artificial Sequence: Synthetic oligonucleotide
  Sense strand starting at position 3742 of SEQ ID NO: 1560635
gagauagcccaguaaacuc

SEQ ID NO: 1613900 - RNA, 19 nt, Artificial Sequence
  Description of Artificial Sequence: Synthetic oligonucleotide
  Antisense strand to SEQ ID NO: 1613899
gaguuuacugggcuaucuc

SEQ ID NO: 1613901 - RNA, 19 nt, Artificial Sequence
  Description of Artificial Sequence: Synthetic oligonucleotide
  Sense strand starting at position 3819 of SEQ ID NO: 1560635
gaccaucuacgcugagaug

SEQ ID NO: 1613902 - RNA, 19 nt, Artificial Sequence
  Description of Artificial Sequence: Synthetic oligonucleotide
  Antisense strand to SEQ ID NO: 1613901
caucucagcguagaugguc

SEQ ID NO: 1613903 - RNA, 19 nt, Artificial Sequence
  Description of Artificial Sequence: Synthetic oligonucleotide
  Sense strand starting at position 3844 of SEQ ID NO: 1560635
ucugcauucuguucuuaag

SEQ ID NO: 1613904 - RNA, 19 nt, Artificial Sequence
  Description of Artificial Sequence: Synthetic oligonucleotide
  Antisense strand to SEQ ID NO: 1613903
cuuaagaacagaaugcaga

SEQ ID NO: 1613905 - RNA, 19 nt, Artificial Sequence
  Description of Artificial Sequence: Synthetic oligonucleotide
  Sense strand starting at position 3846 of SEQ ID NO: 1560635
ugcauucuguucuuaaggu

SEQ ID NO: 1613906 - RNA, 19 nt, Artificial Sequence
  Description of Artificial Sequence: Synthetic oligonucleotide
  Antisense strand to SEQ ID NO: 1613905
accuuaagaacagaaugca

SEQ ID NO: 1613907 - RNA, 19 nt, Artificial Sequence
  Description of Artificial Sequence: Synthetic oligonucleotide
  Sense strand starting at position 3937 of SEQ ID NO: 1560635
agaucuucccuguguugga

SEQ ID NO: 1613908 - RNA, 19 nt, Artificial Sequence
  Description of Artificial Sequence: Synthetic oligonucleotide
  Antisense strand to SEQ ID NO: 1613907
uccaacacagggaagaucu

SEQ ID NO: 1613909 - RNA, 19 nt, Artificial Sequence
  Description of Artificial Sequence: Synthetic oligonucleotide
  Sense strand starting at position 3941 of SEQ ID NO: 1560635
cuucccuguguuggaguaa

SEQ ID NO: 1613910 - RNA, 19 nt, Artificial Sequence
  Description of Artificial Sequence: Synthetic oligonucleotide
  Antisense strand to SEQ ID NO: 1613909
uuacuccaacacagggaag

SEQ ID NO: 1613911 - RNA, 19 nt, Artificial Sequence
  Description of Artificial Sequence: Synthetic oligonucleotide
  Sense strand starting at position 3950 of SEQ ID NO: 1560635
guuggaguaacccacugau

SEQ ID NO: 1613912 - RNA, 19 nt, Artificial Sequence
  Description of Artificial Sequence: Synthetic oligonucleotide
  Antisense strand to SEQ ID NO: 1613911
aucaguggguuacuccaac

SEQ ID NO: 1613913 - RNA, 19 nt, Artificial Sequence
  Description of Artificial Sequence: Synthetic oligonucleotide
  Sense strand starting at position 3953 of SEQ ID NO: 1560635
ggaguaacccacugaucuu

SEQ ID NO: 1613914 - RNA, 19 nt, Artificial Sequence
  Description of Artificial Sequence: Synthetic oligonucleotide
  Antisense strand to SEQ ID NO: 1613913
aagaucaguggguuacucc

SEQ ID NO: 1613915 - RNA, 19 nt, Artificial Sequence
  Description of Artificial Sequence: Synthetic oligonucleotide
  Sense strand starting at position 53 of SEQ ID NO: 1560636
gaaugaagucccggucaug

SEQ ID NO: 1613916 - RNA, 19 nt, Artificial Sequence
  Description of Artificial Sequence: Synthetic oligonucleotide
  Antisense strand to SEQ ID NO: 1613915
caugaccgggacuucauuc

SEQ ID NO: 1613917 - RNA, 19 nt, Artificial Sequence
  Description of Artificial Sequence: Synthetic oligonucleotide
  Sense strand starting at position 110 of SEQ ID NO: 1560636
aagagaacgcgcugguaaa

SEQ ID NO: 1613918 - RNA, 19 nt, Artificial Sequence
  Description of Artificial Sequence: Synthetic oligonucleotide
  Antisense strand to SEQ ID NO: 1613917
uuuaccagcgcguucucuu

SEQ ID NO: 1613919 - RNA, 19 nt, Artificial Sequence
  Description of Artificial Sequence: Synthetic oligonucleotide
  Sense strand starting at position 123 of SEQ ID NO: 1560636
gguaaaggucuuggcagag

SEQ ID NO: 1613920 - RNA, 19 nt, Artificial Sequence
  Description of Artificial Sequence: Synthetic oligonucleotide
  Antisense strand to SEQ ID NO: 1613919
cucugccaagaccuuuacc

SEQ ID NO: 1613921 - RNA, 19 nt, Artificial Sequence
  Description of Artificial Sequence: Synthetic oligonucleotide
  Sense strand starting at position 145 of SEQ ID NO: 1560636
cggguugggagaugugauu

SEQ ID NO: 1613922 - RNA, 19 nt, Artificial Sequence
  Description of Artificial Sequence: Synthetic oligonucleotide
  Antisense strand to SEQ ID NO: 1613921
aaucacaucucccaacccg

SEQ ID NO: 1613923 - RNA, 19 nt, Artificial Sequence
  Description of Artificial Sequence: Synthetic oligonucleotide
  Sense strand starting at position 224 of SEQ ID NO: 1560636
cuucgucauccucaagacu

SEQ ID NO: 1613924 - RNA, 19 nt, Artificial Sequence
  Description of Artificial Sequence: Synthetic oligonucleotide
  Antisense strand to SEQ ID NO: 1613923
agucuugaggaugacgaag

SEQ ID NO: 1613925 - RNA, 19 nt, Artificial Sequence
  Description of Artificial Sequence: Synthetic oligonucleotide
  Sense strand starting at position 368 of SEQ ID NO: 1560636
ggagcucugaaauguucca

SEQ ID NO: 1613926 - RNA, 19 nt, Artificial Sequence
  Description of Artificial Sequence: Synthetic oligonucleotide
  Antisense strand to SEQ ID NO: 1613925
uggaacauuucagagcucc

SEQ ID NO: 1613927 - RNA, 19 nt, Artificial Sequence
  Description of Artificial Sequence: Synthetic oligonucleotide
  Sense strand starting at position 421 of SEQ ID NO: 1560636
acauaaaguuucuugucua

SEQ ID NO: 1613928 - RNA, 19 nt, Artificial Sequence
  Description of Artificial Sequence: Synthetic oligonucleotide
  Antisense strand to SEQ ID NO: 1613927
uagacaagaaacuuuaugu

SEQ ID NO: 1613929 - RNA, 19 nt, Artificial Sequence
  Description of Artificial Sequence: Synthetic oligonucleotide
  Sense strand starting at position 446 of SEQ ID NO: 1560636
accagcuagugaguaguaa

SEQ ID NO: 1613930 - RNA, 19 nt, Artificial Sequence
  Description of Artificial Sequence: Synthetic oligonucleotide
  Antisense strand to SEQ ID NO: 1613929
uuacuacucacuagcuggu

SEQ ID NO: 1613931 - RNA, 19 nt, Artificial Sequence
  Description of Artificial Sequence: Synthetic oligonucleotide
  Sense strand starting at position 570 of SEQ ID NO: 1560636
acucaaaccugcucgcuaa

SEQ ID NO: 1613932 - RNA, 19 nt, Artificial Sequence
  Description of Artificial Sequence: Synthetic oligonucleotide
  Antisense strand to SEQ ID NO: 1613931
uuagcgagcagguuugagu

SEQ ID NO: 1613933 - RNA, 19 nt, Artificial Sequence
  Description of Artificial Sequence: Synthetic oligonucleotide
  Sense strand starting at position 584 of SEQ ID NO: 1560636
gcuaaugauucugcuccuu

SEQ ID NO: 1613934 - RNA, 19 nt, Artificial Sequence
  Description of Artificial Sequence: Synthetic oligonucleotide
  Antisense strand to SEQ ID NO: 1613933
aaggagcagaaucauuagc

SEQ ID NO: 1613935 - RNA, 19 nt, Artificial Sequence
  Description of Artificial Sequence: Synthetic oligonucleotide
  Sense strand starting at position 809 of SEQ ID NO: 1560636
gccuuaccucuggacagaa

SEQ ID NO: 1613936 - RNA, 19 nt, Artificial Sequence
  Description of Artificial Sequence: Synthetic oligonucleotide
  Antisense strand to SEQ ID NO: 1613935
uucuguccagagguaaggc

SEQ ID NO: 1613937 - RNA, 19 nt, Artificial Sequence
  Description of Artificial Sequence: Synthetic oligonucleotide
  Sense strand starting at position 880 of SEQ ID NO: 1560636
gagauacuuccaggucuuu

SEQ ID NO: 1613938 - RNA, 19 nt, Artificial Sequence
  Description of Artificial Sequence: Synthetic oligonucleotide
  Antisense strand to SEQ ID NO: 1613937
aaagaccuggaaguaucuc

SEQ ID NO: 1613939 - RNA, 19 nt, Artificial Sequence
  Description of Artificial Sequence: Synthetic oligonucleotide
  Sense strand starting at position 1317 of SEQ ID NO: 1560636
uccuuagaugcccgagacu

SEQ ID NO: 1613940 - RNA, 19 nt, Artificial Sequence
  Description of Artificial Sequence: Synthetic oligonucleotide
  Antisense strand to SEQ ID NO: 1613939
agucucgggcaucuaagga

SEQ ID NO: 1613941 - RNA, 19 nt, Artificial Sequence
  Description of Artificial Sequence: Synthetic oligonucleotide
  Sense strand starting at position 1466 of SEQ ID NO: 1560636
gaggaagccucagaaagau

SEQ ID NO: 1613942 - RNA, 19 nt, Artificial Sequence
  Description of Artificial Sequence: Synthetic oligonucleotide
  Antisense strand to SEQ ID NO: 1613941
aucuuucugaggcuuccuc

SEQ ID NO: 1613943 - RNA, 19 nt, Artificial Sequence
  Description of Artificial Sequence: Synthetic oligonucleotide
  Sense strand starting at position 1899 of SEQ ID NO: 1560636
cuucuugacucaccaguuu

SEQ ID NO: 1613944 - RNA, 19 nt, Artificial Sequence
  Description of Artificial Sequence: Synthetic oligonucleotide
  Antisense strand to SEQ ID NO: 1613943
aaacuggugagucaagaag

SEQ ID NO: 1613945 - RNA, 19 nt, Artificial Sequence
  Description of Artificial Sequence: Synthetic oligonucleotide
  Sense strand starting at position 2006 of SEQ ID NO: 1560636
agcucacucugcucugaga

SEQ ID NO: 1613946 - RNA, 19 nt, Artificial Sequence
  Description of Artificial Sequence: Synthetic oligonucleotide
  Antisense strand to SEQ ID NO: 1613945
ucucagagcagagugagcu

SEQ ID NO: 1613947 - RNA, 19 nt, Artificial Sequence
  Description of Artificial Sequence: Synthetic oligonucleotide
  Sense strand starting at position 2008 of SEQ ID NO: 1560636
cucacucugcucugagaug

SEQ ID NO: 1613948 - RNA, 19 nt, Artificial Sequence
  Description of Artificial Sequence: Synthetic oligonucleotide
  Antisense strand to SEQ ID NO: 1613947
caucucagagcagagugag

SEQ ID NO: 1613949 - RNA, 19 nt, Artificial Sequence
  Description of Artificial Sequence: Synthetic oligonucleotide
  Sense strand starting at position 2039 of SEQ ID NO: 1560636
augcuuauuucugggaaac

SEQ ID NO: 1613950 - RNA, 19 nt, Artificial Sequence
  Description of Artificial Sequence: Synthetic oligonucleotide
  Antisense strand to SEQ ID NO: 1613949
guuucccagaaauaagcau

SEQ ID NO: 1613951 - RNA, 19 nt, Artificial Sequence
  Description of Artificial Sequence: Synthetic oligonucleotide
  Sense strand starting at position 2041 of SEQ ID NO: 1560636
gcuuauuucugggaaacuc

SEQ ID NO: 1613952 - RNA, 19 nt, Artificial Sequence
  Description of Artificial Sequence: Synthetic oligonucleotide
  Antisense strand to SEQ ID NO: 1613951
gaguuucccagaaauaagc

SEQ ID NO: 1613953 - RNA, 19 nt, Artificial Sequence
  Description of Artificial Sequence: Synthetic oligonucleotide
  Sense strand starting at position 2132 of SEQ ID NO: 1560636
gcccgagauccugagauau

SEQ ID NO: 1613954 - RNA, 19 nt, Artificial Sequence
  Description of Artificial Sequence: Synthetic oligonucleotide
  Antisense strand to SEQ ID NO: 1613953
auaucucaggaucucgggc

SEQ ID NO: 1613955 - RNA, 19 nt, Artificial Sequence
  Description of Artificial Sequence: Synthetic oligonucleotide
  Sense strand starting at position 2143 of SEQ ID NO: 1560636
ugagauaucuggucaucug

SEQ ID NO: 1613956 - RNA, 19 nt, Artificial Sequence
  Description of Artificial Sequence: Synthetic oligonucleotide
  Antisense strand to SEQ ID NO: 1613955
cagaugaccagauaucuca

SEQ ID NO: 1613957 - RNA, 19 nt, Artificial Sequence
  Description of Artificial Sequence: Synthetic oligonucleotide
  Sense strand starting at position 2146 of SEQ ID NO: 1560636
gauaucuggucaucuguua

SEQ ID NO: 1613958 - RNA, 19 nt, Artificial Sequence
  Description of Artificial Sequence: Synthetic oligonucleotide
  Antisense strand to SEQ ID NO: 1613957
uaacagaugaccagauauc

SEQ ID NO: 1613959 - RNA, 19 nt, Artificial Sequence
  Description of Artificial Sequence: Synthetic oligonucleotide
  Sense strand starting at position 2215 of SEQ ID NO: 1560636
ccaagucuccucugcaaag

SEQ ID NO: 1613960 - RNA, 19 nt, Artificial Sequence
  Description of Artificial Sequence: Synthetic oligonucleotide
  Antisense strand to SEQ ID NO: 1613959
cuuugcagaggagacuugg

SEQ ID NO: 1613961 - RNA, 19 nt, Artificial Sequence
  Description of Artificial Sequence: Synthetic oligonucleotide
  Sense strand starting at position 2233 of SEQ ID NO: 1560636
gcugauuucuguccaaggu

SEQ ID NO: 1613962 - RNA, 19 nt, Artificial Sequence
  Description of Artificial Sequence: Synthetic oligonucleotide
  Antisense strand to SEQ ID NO: 1613961
accuuggacagaaaucagc

SEQ ID NO: 1613963 - RNA, 19 nt, Artificial Sequence
  Description of Artificial Sequence: Synthetic oligonucleotide
  Sense strand starting at position 2351 of SEQ ID NO: 1560636
uuggcuucucacgaugaag

SEQ ID NO: 1613964 - RNA, 19 nt, Artificial Sequence
  Description of Artificial Sequence: Synthetic oligonucleotide
  Antisense strand to SEQ ID NO: 1613963
cuucaucgugagaagccaa

SEQ ID NO: 1613965 - RNA, 19 nt, Artificial Sequence
  Description of Artificial Sequence: Synthetic oligonucleotide
  Sense strand starting at position 2362 of SEQ ID NO: 1560636
cgaugaagugguggacauu

SEQ ID NO: 1613966 - RNA, 19 nt, Artificial Sequence
  Description of Artificial Sequence: Synthetic oligonucleotide
  Antisense strand to SEQ ID NO: 1613965
aauguccaccacuucaucg

SEQ ID NO: 1613967 - RNA, 19 nt, Artificial Sequence
  Description of Artificial Sequence: Synthetic oligonucleotide
  Sense strand starting at position 2389 of SEQ ID NO: 1560636
ggaaaugauuugugugacu

SEQ ID NO: 1613968 - RNA, 19 nt, Artificial Sequence
  Description of Artificial Sequence: Synthetic oligonucleotide
  Antisense strand to SEQ ID NO: 1613967
agucacacaaaucauuucc

SEQ ID NO: 1613969 - RNA, 19 nt, Artificial Sequence
  Description of Artificial Sequence: Synthetic oligonucleotide
  Sense strand starting at position 2392 of SEQ ID NO: 1560636
aaugauuugugugacucuu

SEQ ID NO: 1613970 - RNA, 19 nt, Artificial Sequence
  Description of Artificial Sequence: Synthetic oligonucleotide
  Antisense strand to SEQ ID NO: 1613969
aagagucacacaaaucauu

SEQ ID NO: 1613971 - RNA, 19 nt, Artificial Sequence
  Description of Artificial Sequence: Synthetic oligonucleotide
  Sense strand starting at position 2754 of SEQ ID NO: 1560636
ccagcaaccugauuauaga

SEQ ID NO: 1613972 - RNA, 19 nt, Artificial Sequence
  Description of Artificial Sequence: Synthetic oligonucleotide
  Antisense strand to SEQ ID NO: 1613971
ucuauaaucagguugcugg

SEQ ID NO: 1613973 - RNA, 19 nt, Artificial Sequence
  Description of Artificial Sequence: Synthetic oligonucleotide
  Sense strand starting at position 2824 of SEQ ID NO: 1560636
gaauauuuaucguagcacu

SEQ ID NO: 1613974 - RNA, 19 nt, Artificial Sequence
  Description of Artificial Sequence: Synthetic oligonucleotide
  Antisense strand to SEQ ID NO: 1613973
agugcuacgauaaauauuc

SEQ ID NO: 1613975 - RNA, 19 nt, Artificial Sequence
  Description of Artificial Sequence: Synthetic oligonucleotide
  Sense strand starting at position 3177 of SEQ ID NO: 1560636
aggccuaauaccuggguaa

SEQ ID NO: 1613976 - RNA, 19 nt, Artificial Sequence
  Description of Artificial Sequence: Synthetic oligonucleotide
  Antisense strand to SEQ ID NO: 1613975
uuacccagguauuaggccu

SEQ ID NO: 1613977 - RNA, 19 nt, Artificial Sequence
  Description of Artificial Sequence: Synthetic oligonucleotide
  Sense strand starting at position 3178 of SEQ ID NO: 1560636
ggccuaauaccuggguaac

SEQ ID NO: 1613978 - RNA, 19 nt, Artificial Sequence
  Description of Artificial Sequence: Synthetic oligonucleotide
  Antisense strand to SEQ ID NO: 1613977
guuacccagguauuaggcc

SEQ ID NO: 1613979 - RNA, 19 nt, Artificial Sequence
  Description of Artificial Sequence: Synthetic oligonucleotide
  Sense strand starting at position 3179 of SEQ ID NO: 1560636
gccuaauaccuggguaaca

SEQ ID NO: 1613980 - RNA, 19 nt, Artificial Sequence
  Description of Artificial Sequence: Synthetic oligonucleotide
  Antisense strand to SEQ ID NO: 1613979
uguuacccagguauuaggc

SEQ ID NO: 1613981 - RNA, 19 nt, Artificial Sequence
  Description of Artificial Sequence: Synthetic oligonucleotide
  Sense strand starting at position 3180 of SEQ ID NO: 1560636
ccuaauaccuggguaacaa

SEQ ID NO: 1613982 - RNA, 19 nt, Artificial Sequence
  Description of Artificial Sequence: Synthetic oligonucleotide
  Antisense strand to SEQ ID NO: 1613981
uuguuacccagguauuagg

SEQ ID NO: 1613983 - RNA, 19 nt, Artificial Sequence
  Description of Artificial Sequence: Synthetic oligonucleotide
  Sense strand starting at position 3675 of SEQ ID NO: 1560636
aagugcaugugucuaccua

SEQ ID NO: 1613984 - RNA, 19 nt, Artificial Sequence
  Description of Artificial Sequence: Synthetic oligonucleotide
  Antisense strand to SEQ ID NO: 1613983
uagguagacacaugcacuu

SEQ ID NO: 1613985 - RNA, 19 nt, Artificial Sequence
  Description of Artificial Sequence: Synthetic oligonucleotide
  Sense strand starting at position 3679 of SEQ ID NO: 1560636
gcaugugucuaccuaguag

SEQ ID NO: 1613986 - RNA, 19 nt, Artificial Sequence
  Description of Artificial Sequence: Synthetic oligonucleotide
  Antisense strand to SEQ ID NO: 1613985
cuacuagguagacacaugc

SEQ ID NO: 1613987 - RNA, 19 nt, Artificial Sequence
  Description of Artificial Sequence: Synthetic oligonucleotide
  Sense strand starting at position 3721 of SEQ ID NO: 1560636
gauacccacugauaggauu

SEQ ID NO: 1613988 - RNA, 19 nt, Artificial Sequence
  Description of Artificial Sequence: Synthetic oligonucleotide
  Antisense strand to SEQ ID NO: 1613987
aauccuaucaguggguauc

SEQ ID NO: 1613989 - RNA, 19 nt, Artificial Sequence
  Description of Artificial Sequence: Synthetic oligonucleotide
  Sense strand starting at position 3940 of SEQ ID NO: 1560636
ugacuugcauuugucugau

SEQ ID NO: 1613990 - RNA, 19 nt, Artificial Sequence
  Description of Artificial Sequence: Synthetic oligonucleotide
  Antisense strand to SEQ ID NO: 1613989
aucagacaaaugcaaguca

SEQ ID NO: 1613991 - RNA, 19 nt, Artificial Sequence
  Description of Artificial Sequence: Synthetic oligonucleotide
  Sense strand starting at position 3949 of SEQ ID NO: 1560636
uuugucugaugauuaacga

SEQ ID NO: 1613992 - RNA, 19 nt, Artificial Sequence
  Description of Artificial Sequence: Synthetic oligonucleotide
  Antisense strand to SEQ ID NO: 1613991
ucguuaaucaucagacaaa

SEQ ID NO: 1613993 - RNA, 19 nt, Artificial Sequence
  Description of Artificial Sequence: Synthetic oligonucleotide
  Sense strand starting at position 3950 of SEQ ID NO: 1560636
uugucugaugauuaacgaa

SEQ ID NO: 1613994 - RNA, 19 nt, Artificial Sequence
  Description of Artificial Sequence: Synthetic oligonucleotide
  Antisense strand to SEQ ID NO: 1613993
uucguuaaucaucagacaa

SEQ ID NO: 1613995 - RNA, 19 nt, Artificial Sequence
  Description of Artificial Sequence: Synthetic oligonucleotide
  Sense strand starting at position 427 of SEQ ID NO: 1560637
cugaguucugaccagagug

SEQ ID NO: 1613996 - RNA, 19 nt, Artificial Sequence
  Description of Artificial Sequence: Synthetic oligonucleotide
  Antisense strand to SEQ ID NO: 1613995
cacucuggucagaacucag

SEQ ID NO: 1613997 - RNA, 19 nt, Artificial Sequence
  Description of Artificial Sequence: Synthetic oligonucleotide
  Sense strand starting at position 946 of SEQ ID NO: 1560637
gguggaucacagcgaguaa

SEQ ID NO: 1613998 - RNA, 19 nt, Artificial Sequence
  Description of Artificial Sequence: Synthetic oligonucleotide
  Antisense strand to SEQ ID NO: 1613997
uuacucgcugugauccacc

SEQ ID NO: 1613999 - RNA, 19 nt, Artificial Sequence
  Description of Artificial Sequence: Synthetic oligonucleotide
  Sense strand starting at position 947 of SEQ ID NO: 1560637
guggaucacagcgaguaau

SEQ ID NO: 1614000 - RNA, 19 nt, Artificial Sequence
  Description of Artificial Sequence: Synthetic oligonucleotide
  Antisense strand to SEQ ID NO: 1613999
auuacucgcugugauccac

SEQ ID NO: 1614001 - RNA, 19 nt, Artificial Sequence
  Description of Artificial Sequence: Synthetic oligonucleotide
  Sense strand starting at position 950 of SEQ ID NO: 1560637
gaucacagcgaguaaugga

SEQ ID NO: 1614002 - RNA, 19 nt, Artificial Sequence
  Description of Artificial Sequence: Synthetic oligonucleotide
  Antisense strand to SEQ ID NO: 1614001
uccauuacucgcugugauc

SEQ ID NO: 1614003 - RNA, 19 nt, Artificial Sequence
  Description of Artificial Sequence: Synthetic oligonucleotide
  Sense strand starting at position 2418 of SEQ ID NO: 1560637
acgggacuucuuggaagag

SEQ ID NO: 1614004 - RNA, 19 nt, Artificial Sequence
  Description of Artificial Sequence: Synthetic oligonucleotide
  Antisense strand to SEQ ID NO: 1614003
cucuuccaagaagucccgu

SEQ ID NO: 1614005 - RNA, 19 nt, Artificial Sequence
  Description of Artificial Sequence: Synthetic oligonucleotide
  Sense strand starting at position 3044 of SEQ ID NO: 1560637
gccggaucaugcgguucaa

SEQ ID NO: 1614006 - RNA, 19 nt, Artificial Sequence
  Description of Artificial Sequence: Synthetic oligonucleotide
  Antisense strand to SEQ ID NO: 1614005
uugaaccgcaugauccggc

SEQ ID NO: 1614007 - RNA, 19 nt, Artificial Sequence
  Description of Artificial Sequence: Synthetic oligonucleotide
  Sense strand starting at position 3131 of SEQ ID NO: 1560637
agcagacucuucccagaac

SEQ ID NO: 1614008 - RNA, 19 nt, Artificial Sequence
  Description of Artificial Sequence: Synthetic oligonucleotide
  Antisense strand to SEQ ID NO: 1614007
guucugggaagagucugcu

SEQ ID NO: 1614009 - RNA, 19 nt, Artificial Sequence
  Description of Artificial Sequence: Synthetic oligonucleotide
  Sense strand starting at position 3521 of SEQ ID NO: 1560637
gcuguauacuucugggaaa

SEQ ID NO: 1614010 - RNA, 19 nt, Artificial Sequence
  Description of Artificial Sequence: Synthetic oligonucleotide
  Antisense strand to SEQ ID NO: 1614009
uuucccagaaguauacagc

SEQ ID NO: 1614011 - RNA, 19 nt, Artificial Sequence
  Description of Artificial Sequence: Synthetic oligonucleotide
  Sense strand starting at position 3568 of SEQ ID NO: 1560637
gcaucaucuccugguccuu

SEQ ID NO: 1614012 - RNA, 19 nt, Artificial Sequence
  Description of Artificial Sequence: Synthetic oligonucleotide
  Antisense strand to SEQ ID NO: 1614011
aaggaccaggagaugaugc

SEQ ID NO: 1614013 - RNA, 19 nt, Artificial Sequence
  Description of Artificial Sequence: Synthetic oligonucleotide
  Sense strand starting at position 314 of SEQ ID NO: 1560638
auuguuaggcugcaucaca

SEQ ID NO: 1614014 - RNA, 19 nt, Artificial Sequence
  Description of Artificial Sequence: Synthetic oligonucleotide
  Antisense strand to SEQ ID NO: 1614013
ugugaugcagccuaacaau

SEQ ID NO: 1614015 - RNA, 19 nt, Artificial Sequence
  Description of Artificial Sequence: Synthetic oligonucleotide
  Sense strand starting at position 352 of SEQ ID NO: 1560638
ucuauccaguuguuagaaa

SEQ ID NO: 1614016 - RNA, 19 nt, Artificial Sequence
  Description of Artificial Sequence: Synthetic oligonucleotide
  Antisense strand to SEQ ID NO: 1614015
uuucuaacaacuggauaga

SEQ ID NO: 1614017 - RNA, 19 nt, Artificial Sequence
  Description of Artificial Sequence: Synthetic oligonucleotide
  Sense strand starting at position 425 of SEQ ID NO: 1560638
agccguaugguugagguaa

SEQ ID NO: 1614018 - RNA, 19 nt, Artificial Sequence
  Description of Artificial Sequence: Synthetic oligonucleotide
  Antisense strand to SEQ ID NO: 1614017
uuaccucaaccauacggcu

SEQ ID NO: 1614019 - RNA, 19 nt, Artificial Sequence
  Description of Artificial Sequence: Synthetic oligonucleotide
  Sense strand starting at position 523 of SEQ ID NO: 1560638
cccagucuugcaggauaga

SEQ ID NO: 1614020 - RNA, 19 nt, Artificial Sequence
  Description of Artificial Sequence: Synthetic oligonucleotide
  Antisense strand to SEQ ID NO: 1614019
ucuauccugcaagacuggg

SEQ ID NO: 1614021 - RNA, 19 nt, Artificial Sequence
  Description of Artificial Sequence: Synthetic oligonucleotide
  Sense strand starting at position 524 of SEQ ID NO: 1560638
ccagucuugcaggauagaa

SEQ ID NO: 1614022 - RNA, 19 nt, Artificial Sequence
  Description of Artificial Sequence: Synthetic oligonucleotide
  Antisense strand to SEQ ID NO: 1614021
uucuauccugcaagacugg

SEQ ID NO: 1614023 - RNA, 19 nt, Artificial Sequence
  Description of Artificial Sequence: Synthetic oligonucleotide
  Sense strand starting at position 532 of SEQ ID NO: 1560638
gcaggauagaaauguguga

SEQ ID NO: 1614024 - RNA, 19 nt, Artificial Sequence
  Description of Artificial Sequence: Synthetic oligonucleotide
  Antisense strand to SEQ ID NO: 1614023
ucacacauuucuauccugc

SEQ ID NO: 1614025 - RNA, 19 nt, Artificial Sequence
  Description of Artificial Sequence: Synthetic oligonucleotide
  Sense strand starting at position 534 of SEQ ID NO: 1560638
aggauagaaaugugugacu

SEQ ID NO: 1614026 - RNA, 19 nt, Artificial Sequence
  Description of Artificial Sequence: Synthetic oligonucleotide
  Antisense strand to SEQ ID NO: 1614025
agucacacauuucuauccu

SEQ ID NO: 1614027 - RNA, 19 nt, Artificial Sequence
  Description of Artificial Sequence: Synthetic oligonucleotide
  Sense strand starting at position 536 of SEQ ID NO: 1560638
gauagaaaugugugacuaa

SEQ ID NO: 1614028 - RNA, 19 nt, Artificial Sequence
  Description of Artificial Sequence: Synthetic oligonucleotide
  Antisense strand to SEQ ID NO: 1614027
uuagucacacauuucuauc

SEQ ID NO: 1614029 - RNA, 19 nt, Artificial Sequence
  Description of Artificial Sequence: Synthetic oligonucleotide
  Sense strand starting at position 558 of SEQ ID NO: 1560638
gaagcaucgaucugagaag

SEQ ID NO: 1614030 - RNA, 19 nt, Artificial Sequence
  Description of Artificial Sequence: Synthetic oligonucleotide
  Antisense strand to SEQ ID NO: 1614029
cuucucagaucgaugcuuc

SEQ ID NO: 1614031 - RNA, 19 nt, Artificial Sequence
  Description of Artificial Sequence: Synthetic oligonucleotide
  Sense strand starting at position 604 of SEQ ID NO: 1560638
aggagcaugcuauacauua

SEQ ID NO: 1614032 - RNA, 19 nt, Artificial Sequence
  Description of Artificial Sequence: Synthetic oligonucleotide
  Antisense strand to SEQ ID NO: 1614031
uaauguauagcaugcuccu

SEQ ID NO: 1614033 - RNA, 19 nt, Artificial Sequence
  Description of Artificial Sequence: Synthetic oligonucleotide
  Sense strand starting at position 650 of SEQ ID NO: 1560638
ccaggauauugguuuguuu

SEQ ID NO: 1614034 - RNA, 19 nt, Artificial Sequence
  Description of Artificial Sequence: Synthetic oligonucleotide
  Antisense strand to SEQ ID NO: 1614033
aaacaaaccaauauccugg

SEQ ID NO: 1614035 - RNA, 19 nt, Artificial Sequence
  Description of Artificial Sequence: Synthetic oligonucleotide
  Sense strand starting at position 766 of SEQ ID NO: 1560638
caaaguagacauugguaca

SEQ ID NO: 1614036 - RNA, 19 nt, Artificial Sequence
  Description of Artificial Sequence: Synthetic oligonucleotide
  Antisense strand to SEQ ID NO: 1614035
uguaccaaugucuacuuug

SEQ ID NO: 1614037 - RNA, 19 nt, Artificial Sequence
  Description of Artificial Sequence: Synthetic oligonucleotide
  Sense strand starting at position 795 of SEQ ID NO: 1560638
gguacauaauuugggauga

SEQ ID NO: 1614038 - RNA, 19 nt, Artificial Sequence
  Description of Artificial Sequence: Synthetic oligonucleotide
  Antisense strand to SEQ ID NO: 1614037
ucaucccaaauuauguacc

SEQ ID NO: 1614039 - RNA, 19 nt, Artificial Sequence
  Description of Artificial Sequence: Synthetic oligonucleotide
  Sense strand starting at position 796 of SEQ ID NO: 1560638
guacauaauuugggaugaa

SEQ ID NO: 1614040 - RNA, 19 nt, Artificial Sequence
  Description of Artificial Sequence: Synthetic oligonucleotide
  Antisense strand to SEQ ID NO: 1614039
uucaucccaaauuauguac

SEQ ID NO: 1614041 - RNA, 19 nt, Artificial Sequence
  Description of Artificial Sequence: Synthetic oligonucleotide
  Sense strand starting at position 818 of SEQ ID NO: 1560638
ugauaaagcuccuuagaag

SEQ ID NO: 1614042 - RNA, 19 nt, Artificial Sequence
  Description of Artificial Sequence: Synthetic oligonucleotide
  Antisense strand to SEQ ID NO: 1614041
cuucuaaggagcuuuauca

SEQ ID NO: 1614043 - RNA, 19 nt, Artificial Sequence
  Description of Artificial Sequence: Synthetic oligonucleotide
  Sense strand starting at position 819 of SEQ ID NO: 1560638
gauaaagcuccuuagaagu

SEQ ID NO: 1614044 - RNA, 19 nt, Artificial Sequence
  Description of Artificial Sequence: Synthetic oligonucleotide
  Antisense strand to SEQ ID NO: 1614043
acuucuaaggagcuuuauc

SEQ ID NO: 1614045 - RNA, 19 nt, Artificial Sequence
  Description of Artificial Sequence: Synthetic oligonucleotide
  Sense strand starting at position 865 of SEQ ID NO: 1560638
accaucuacccaugguuua

SEQ ID NO: 1614046 - RNA, 19 nt, Artificial Sequence
  Description of Artificial Sequence: Synthetic oligonucleotide
  Antisense strand to SEQ ID NO: 1614045
uaaaccauggguagauggu

SEQ ID NO: 1614047 - RNA, 19 nt, Artificial Sequence
  Description of Artificial Sequence: Synthetic oligonucleotide
  Sense strand starting at position 895 of SEQ ID NO: 1560638
aaauucuaccuucguggaa

SEQ ID NO: 1614048 - RNA, 19 nt, Artificial Sequence
  Description of Artificial Sequence: Synthetic oligonucleotide
  Antisense strand to SEQ ID NO: 1614047
uuccacgaagguagaauuu

SEQ ID NO: 1614049 - RNA, 19 nt, Artificial Sequence
  Description of Artificial Sequence: Synthetic oligonucleotide
  Sense strand starting at position 896 of SEQ ID NO: 1560638
aauucuaccuucguggaaa

SEQ ID NO: 1614050 - RNA, 19 nt, Artificial Sequence
  Description of Artificial Sequence: Synthetic oligonucleotide
  Antisense strand to SEQ ID NO: 1614049
uuuccacgaagguagaauu

SEQ ID NO: 1614051 - RNA, 19 nt, Artificial Sequence
  Description of Artificial Sequence: Synthetic oligonucleotide
  Sense strand starting at position 977 of SEQ ID NO: 1560638
acauaauuauuggugugaa

SEQ ID NO: 1614052 - RNA, 19 nt, Artificial Sequence
  Description of Artificial Sequence: Synthetic oligonucleotide
  Antisense strand to SEQ ID NO: 1614051
uucacaccaauaauuaugu

SEQ ID NO: 1614053 - RNA, 19 nt, Artificial Sequence
  Description of Artificial Sequence: Synthetic oligonucleotide
  Sense strand starting at position 1027 of SEQ ID NO: 1560638
gugguuugcuauuugugaa

SEQ ID NO: 1614054 - RNA, 19 nt, Artificial Sequence
  Description of Artificial Sequence: Synthetic oligonucleotide
  Antisense strand to SEQ ID NO: 1614053
uucacaaauagcaaaccac

SEQ ID NO: 1614055 - RNA, 19 nt, Artificial Sequence
  Description of Artificial Sequence: Synthetic oligonucleotide
  Sense strand starting at position 1028 of SEQ ID NO: 1560638
ugguuugcuauuugugaaa

SEQ ID NO: 1614056 - RNA, 19 nt, Artificial Sequence
  Description of Artificial Sequence: Synthetic oligonucleotide
  Antisense strand to SEQ ID NO: 1614055
uuucacaaauagcaaacca

SEQ ID NO: 1614057 - RNA, 19 nt, Artificial Sequence
  Description of Artificial Sequence: Synthetic oligonucleotide
  Sense strand starting at position 1082 of SEQ ID NO: 1560638
cuggcuuaaucauuaguac

SEQ ID NO: 1614058 - RNA, 19 nt, Artificial Sequence
  Description of Artificial Sequence: Synthetic oligonucleotide
  Antisense strand to SEQ ID NO: 1614057
guacuaaugauuaagccag

SEQ ID NO: 1614059 - RNA, 19 nt, Artificial Sequence
  Description of Artificial Sequence: Synthetic oligonucleotide
  Sense strand starting at position 1083 of SEQ ID NO: 1560638
uggcuuaaucauuaguacu

SEQ ID NO: 1614060 - RNA, 19 nt, Artificial Sequence
  Description of Artificial Sequence: Synthetic oligonucleotide
  Antisense strand to SEQ ID NO: 1614059
aguacuaaugauuaagcca

SEQ ID NO: 1614061 - RNA, 19 nt, Artificial Sequence
  Description of Artificial Sequence: Synthetic oligonucleotide
  Sense strand starting at position 1085 of SEQ ID NO: 1560638
gcuuaaucauuaguacuga

SEQ ID NO: 1614062 - RNA, 19 nt, Artificial Sequence
  Description of Artificial Sequence: Synthetic oligonucleotide
  Antisense strand to SEQ ID NO: 1614061
ucaguacuaaugauuaagc

SEQ ID NO: 1614063 - RNA, 19 nt, Artificial Sequence
  Description of Artificial Sequence: Synthetic oligonucleotide
  Sense strand starting at position 1123 of SEQ ID NO: 1560638
ccagauauuuguuacuuug

SEQ ID NO: 1614064 - RNA, 19 nt, Artificial Sequence
  Description of Artificial Sequence: Synthetic oligonucleotide
  Antisense strand to SEQ ID NO: 1614063
caaaguaacaaauaucugg

SEQ ID NO: 1614065 - RNA, 19 nt, Artificial Sequence
  Description of Artificial Sequence: Synthetic oligonucleotide
  Sense strand starting at position 1133 of SEQ ID NO: 1560638
guuacuuuguaauuugagu

SEQ ID NO: 1614066 - RNA, 19 nt, Artificial Sequence
  Description of Artificial Sequence: Synthetic oligonucleotide
  Antisense strand to SEQ ID NO: 1614065
acucaaauuacaaaguaac

SEQ ID NO: 1614067 - RNA, 19 nt, Artificial Sequence
  Description of Artificial Sequence: Synthetic oligonucleotide
  Sense strand starting at position 1255 of SEQ ID NO: 1560638
uauucuuaggcuugguaua

SEQ ID NO: 1614068 - RNA, 19 nt, Artificial Sequence
  Description of Artificial Sequence: Synthetic oligonucleotide
  Antisense strand to SEQ ID NO: 1614067
uauaccaagccuaagaaua

SEQ ID NO: 1614069 - RNA, 19 nt, Artificial Sequence
  Description of Artificial Sequence: Synthetic oligonucleotide
  Sense strand starting at position 1260 of SEQ ID NO: 1560638
uuaggcuugguauacuauu

SEQ ID NO: 1614070 - RNA, 19 nt, Artificial Sequence
  Description of Artificial Sequence: Synthetic oligonucleotide
  Antisense strand to SEQ ID NO: 1614069
aauaguauaccaagccuaa

SEQ ID NO: 1614071 - RNA, 19 nt, Artificial Sequence
  Description of Artificial Sequence: Synthetic oligonucleotide
  Sense strand starting at position 1267 of SEQ ID NO: 1560638
ugguauacuauuuguaugu

SEQ ID NO: 1614072 - RNA, 19 nt, Artificial Sequence
  Description of Artificial Sequence: Synthetic oligonucleotide
  Antisense strand to SEQ ID NO: 1614071
acauacaaauaguauacca

SEQ ID NO: 1614073 - RNA, 19 nt, Artificial Sequence
  Description of Artificial Sequence: Synthetic oligonucleotide
  Sense strand starting at position 1268 of SEQ ID NO: 1560638
gguauacuauuuguauguu

SEQ ID NO: 1614074 - RNA, 19 nt, Artificial Sequence
  Description of Artificial Sequence: Synthetic oligonucleotide
  Antisense strand to SEQ ID NO: 1614073
aacauacaaauaguauacc

SEQ ID NO: 1614075 - RNA, 19 nt, Artificial Sequence
  Description of Artificial Sequence: Synthetic oligonucleotide
  Sense strand starting at position 1472 of SEQ ID NO: 1560638
aucgaugcuccagaaugau

SEQ ID NO: 1614076 - RNA, 19 nt, Artificial Sequence
  Description of Artificial Sequence: Synthetic oligonucleotide
  Antisense strand to SEQ ID NO: 1614075
aucauucuggagcaucgau

SEQ ID NO: 1614077 - RNA, 19 nt, Artificial Sequence
  Description of Artificial Sequence: Synthetic oligonucleotide
  Sense strand starting at position 1481 of SEQ ID NO: 1560638
ccagaaugaugcccucuua

SEQ ID NO: 1614078 - RNA, 19 nt, Artificial Sequence
  Description of Artificial Sequence: Synthetic oligonucleotide
  Antisense strand to SEQ ID NO: 1614077
uaagagggcaucauucugg

SEQ ID NO: 1614079 - RNA, 19 nt, Artificial Sequence
  Description of Artificial Sequence: Synthetic oligonucleotide
  Sense strand starting at position 2058 of SEQ ID NO: 1560638
cagagcugccagggauaau

SEQ ID NO: 1614080 - RNA, 19 nt, Artificial Sequence
  Description of Artificial Sequence: Synthetic oligonucleotide
  Antisense strand to SEQ ID NO: 1614079
auuaucccuggcagcucug

SEQ ID NO: 1614081 - RNA, 19 nt, Artificial Sequence
  Description of Artificial Sequence: Synthetic oligonucleotide
  Sense strand starting at position 2224 of SEQ ID NO: 1560638
gacuacauuucccagagga

SEQ ID NO: 1614082 - RNA, 19 nt, Artificial Sequence
  Description of Artificial Sequence: Synthetic oligonucleotide
  Antisense strand to SEQ ID NO: 1614081
uccucugggaaauguaguc

SEQ ID NO: 1614083 - RNA, 19 nt, Artificial Sequence
  Description of Artificial Sequence: Synthetic oligonucleotide
  Sense strand starting at position 3233 of SEQ ID NO: 1560638
ggagaaaguugauaaggau

SEQ ID NO: 1614084 - RNA, 19 nt, Artificial Sequence
  Description of Artificial Sequence: Synthetic oligonucleotide
  Antisense strand to SEQ ID NO: 1614083
auccuuaucaacuuucucc

SEQ ID NO: 1614085 - RNA, 19 nt, Artificial Sequence
  Description of Artificial Sequence: Synthetic oligonucleotide
  Sense strand starting at position 3239 of SEQ ID NO: 1560638
aguugauaaggauguuucu

SEQ ID NO: 1614086 - RNA, 19 nt, Artificial Sequence
  Description of Artificial Sequence: Synthetic oligonucleotide
  Antisense strand to SEQ ID NO: 1614085
agaaacauccuuaucaacu

SEQ ID NO: 1614087 - RNA, 19 nt, Artificial Sequence
  Description of Artificial Sequence: Synthetic oligonucleotide
  Sense strand starting at position 3448 of SEQ ID NO: 1560638
gagcgcggccucuuugaau

SEQ ID NO: 1614088 - RNA, 19 nt, Artificial Sequence
  Description of Artificial Sequence: Synthetic oligonucleotide
  Antisense strand to SEQ ID NO: 1614087
auucaaagaggccgcgcuc

SEQ ID NO: 1614089 - RNA, 19 nt, Artificial Sequence
  Description of Artificial Sequence: Synthetic oligonucleotide
  Sense strand starting at position 3761 of SEQ ID NO: 1560638
gggauuggucccgggcuaa

SEQ ID NO: 1614090 - RNA, 19 nt, Artificial Sequence
  Description of Artificial Sequence: Synthetic oligonucleotide
  Antisense strand to SEQ ID NO: 1614089
uuagcccgggaccaauccc

SEQ ID NO: 1614091 - RNA, 19 nt, Artificial Sequence
  Description of Artificial Sequence: Synthetic oligonucleotide
  Sense strand starting at position 3973 of SEQ ID NO: 1560638
uuucuuggccgugagagaa

SEQ ID NO: 1614092 - RNA, 19 nt, Artificial Sequence
  Description of Artificial Sequence: Synthetic oligonucleotide
  Antisense strand to SEQ ID NO: 1614091
uucucucacggccaagaaa

SEQ ID NO: 1614093 - RNA, 19 nt, Artificial Sequence
  Description of Artificial Sequence: Synthetic oligonucleotide
  Sense strand starting at position 297 of SEQ ID NO: 1560639
agugcaacuuggucucaaa

SEQ ID NO: 1614094 - RNA, 19 nt, Artificial Sequence
  Description of Artificial Sequence: Synthetic oligonucleotide
  Antisense strand to SEQ ID NO: 1614093
uuugagaccaaguugcacu

SEQ ID NO: 1614095 - RNA, 19 nt, Artificial Sequence
  Description of Artificial Sequence: Synthetic oligonucleotide
  Sense strand starting at position 409 of SEQ ID NO: 1560639
ccaacagauccuugagauu

SEQ ID NO: 1614096 - RNA, 19 nt, Artificial Sequence
  Description of Artificial Sequence: Synthetic oligonucleotide
  Antisense strand to SEQ ID NO: 1614095
aaucucaaggaucuguugg

SEQ ID NO: 1614097 - RNA, 19 nt, Artificial Sequence
  Description of Artificial Sequence: Synthetic oligonucleotide
  Sense strand starting at position 412 of SEQ ID NO: 1560639
acagauccuugagauuugu

SEQ ID NO: 1614098 - RNA, 19 nt, Artificial Sequence
  Description of Artificial Sequence: Synthetic oligonucleotide
  Antisense strand to SEQ ID NO: 1614097
acaaaucucaaggaucugu

SEQ ID NO: 1614099 - RNA, 19 nt, Artificial Sequence
  Description of Artificial Sequence: Synthetic oligonucleotide
  Sense strand starting at position 422 of SEQ ID NO: 1560639
gagauuuguuuagaagagu

SEQ ID NO: 1614100 - RNA, 19 nt, Artificial Sequence
  Description of Artificial Sequence: Synthetic oligonucleotide
  Antisense strand to SEQ ID NO: 1614099
acucuucuaaacaaaucuc

SEQ ID NO: 1614101 - RNA, 19 nt, Artificial Sequence
  Description of Artificial Sequence: Synthetic oligonucleotide
  Sense strand starting at position 431 of SEQ ID NO: 1560639
uuagaagagucuggagagu

SEQ ID NO: 1614102 - RNA, 19 nt, Artificial Sequence
  Description of Artificial Sequence: Synthetic oligonucleotide
  Antisense strand to SEQ ID NO: 1614101
acucuccagacucuucuaa

SEQ ID NO: 1614103 - RNA, 19 nt, Artificial Sequence
  Description of Artificial Sequence: Synthetic oligonucleotide
  Sense strand starting at position 433 of SEQ ID NO: 1560639
agaagagucuggagaguga

SEQ ID NO: 1614104 - RNA, 19 nt, Artificial Sequence
  Description of Artificial Sequence: Synthetic oligonucleotide
  Antisense strand to SEQ ID NO: 1614103
ucacucuccagacucuucu

SEQ ID NO: 1614105 - RNA, 19 nt, Artificial Sequence
  Description of Artificial Sequence: Synthetic oligonucleotide
  Sense strand starting at position 480 of SEQ ID NO: 1560639
ugcucugccaguuaggaga

SEQ ID NO: 1614106 - RNA, 19 nt, Artificial Sequence
  Description of Artificial Sequence: Synthetic oligonucleotide
  Antisense strand to SEQ ID NO: 1614105
ucuccuaacuggcagagca

SEQ ID NO: 1614107 - RNA, 19 nt, Artificial Sequence
  Description of Artificial Sequence: Synthetic oligonucleotide
  Sense strand starting at position 659 of SEQ ID NO: 1560639
caaggcucuuagucugaaa

SEQ ID NO: 1614108 - RNA, 19 nt, Artificial Sequence
  Description of Artificial Sequence: Synthetic oligonucleotide
  Antisense strand to SEQ ID NO: 1614107
uuucagacuaagagccuug

SEQ ID NO: 1614109 - RNA, 19 nt, Artificial Sequence
  Description of Artificial Sequence: Synthetic oligonucleotide
  Sense strand starting at position 661 of SEQ ID NO: 1560639
aggcucuuagucugaaaug

SEQ ID NO: 1614110 - RNA, 19 nt, Artificial Sequence
  Description of Artificial Sequence: Synthetic oligonucleotide
  Antisense strand to SEQ ID NO: 1614109
cauuucagacuaagagccu

SEQ ID NO: 1614111 - RNA, 19 nt, Artificial Sequence
  Description of Artificial Sequence: Synthetic oligonucleotide
  Sense strand starting at position 662 of SEQ ID NO: 1560639
ggcucuuagucugaaauga

SEQ ID NO: 1614112 - RNA, 19 nt, Artificial Sequence
  Description of Artificial Sequence: Synthetic oligonucleotide
  Antisense strand to SEQ ID NO: 1614111
ucauuucagacuaagagcc

SEQ ID NO: 1614113 - RNA, 19 nt, Artificial Sequence
  Description of Artificial Sequence: Synthetic oligonucleotide
  Sense strand starting at position 694 of SEQ ID NO: 1560639
accggaaugacuuguucuc

SEQ ID NO: 1614114 - RNA, 19 nt, Artificial Sequence
  Description of Artificial Sequence: Synthetic oligonucleotide
  Antisense strand to SEQ ID NO: 1614113
gagaacaagucauuccggu

SEQ ID NO: 1614115 - RNA, 19 nt, Artificial Sequence
  Description of Artificial Sequence: Synthetic oligonucleotide
  Sense strand starting at position 696 of SEQ ID NO: 1560639
cggaaugacuuguucucua

SEQ ID NO: 1614116 - RNA, 19 nt, Artificial Sequence
  Description of Artificial Sequence: Synthetic oligonucleotide
  Antisense strand to SEQ ID NO: 1614115
uagagaacaagucauuccg

SEQ ID NO: 1614117 - RNA, 19 nt, Artificial Sequence
  Description of Artificial Sequence: Synthetic oligonucleotide
  Sense strand starting at position 700 of SEQ ID NO: 1560639
augacuuguucucuacagu

SEQ ID NO: 1614118 - RNA, 19 nt, Artificial Sequence
  Description of Artificial Sequence: Synthetic oligonucleotide
  Antisense strand to SEQ ID NO: 1614117
acuguagagaacaagucau

SEQ ID NO: 1614119 - RNA, 19 nt, Artificial Sequence
  Description of Artificial Sequence: Synthetic oligonucleotide
  Sense strand starting at position 701 of SEQ ID NO: 1560639
ugacuuguucucuacagua

SEQ ID NO: 1614120 - RNA, 19 nt, Artificial Sequence
  Description of Artificial Sequence: Synthetic oligonucleotide
  Antisense strand to SEQ ID NO: 1614119
uacuguagagaacaaguca

SEQ ID NO: 1614121 - RNA, 19 nt, Artificial Sequence
  Description of Artificial Sequence: Synthetic oligonucleotide
  Sense strand starting at position 703 of SEQ ID NO: 1560639
acuuguucucuacaguauu

SEQ ID NO: 1614122 - RNA, 19 nt, Artificial Sequence
  Description of Artificial Sequence: Synthetic oligonucleotide
  Antisense strand to SEQ ID NO: 1614121
aauacuguagagaacaagu

SEQ ID NO: 1614123 - RNA, 19 nt, Artificial Sequence
  Description of Artificial Sequence: Synthetic oligonucleotide
  Sense strand starting at position 709 of SEQ ID NO: 1560639
ucucuacaguauucucaga

SEQ ID NO: 1614124 - RNA, 19 nt, Artificial Sequence
  Description of Artificial Sequence: Synthetic oligonucleotide
  Antisense strand to SEQ ID NO: 1614123
ucugagaauacuguagaga

SEQ ID NO: 1614125 - RNA, 19 nt, Artificial Sequence
  Description of Artificial Sequence: Synthetic oligonucleotide
  Sense strand starting at position 808 of SEQ ID NO: 1560639
gcucuacuauuucucguaa

SEQ ID NO: 1614126 - RNA, 19 nt, Artificial Sequence
  Description of Artificial Sequence: Synthetic oligonucleotide
  Antisense strand to SEQ ID NO: 1614125
uuacgagaaauaguagagc

SEQ ID NO: 1614127 - RNA, 19 nt, Artificial Sequence
  Description of Artificial Sequence: Synthetic oligonucleotide
  Sense strand starting at position 821 of SEQ ID NO: 1560639
ucguaauuauugccuucua

SEQ ID NO: 1614128 - RNA, 19 nt, Artificial Sequence
  Description of Artificial Sequence: Synthetic oligonucleotide
  Antisense strand to SEQ ID NO: 1614127
uagaaggcaauaauuacga

SEQ ID NO: 1614129 - RNA, 19 nt, Artificial Sequence
  Description of Artificial Sequence: Synthetic oligonucleotide
  Sense strand starting at position 822 of SEQ ID NO: 1560639
cguaauuauugccuucuaa

SEQ ID NO: 1614130 - RNA, 19 nt, Artificial Sequence
  Description of Artificial Sequence: Synthetic oligonucleotide
  Antisense strand to SEQ ID NO: 1614129
uuagaaggcaauaauuacg

SEQ ID NO: 1614131 - RNA, 19 nt, Artificial Sequence
  Description of Artificial Sequence: Synthetic oligonucleotide
  Sense strand starting at position 860 of SEQ ID NO: 1560639
aucuuuauugccugucuca

SEQ ID NO: 1614132 - RNA, 19 nt, Artificial Sequence
  Description of Artificial Sequence: Synthetic oligonucleotide
  Antisense strand to SEQ ID NO: 1614131
ugagacaggcaauaaagau

SEQ ID NO: 1614133 - RNA, 19 nt, Artificial Sequence
  Description of Artificial Sequence: Synthetic oligonucleotide
  Sense strand starting at position 1081 of SEQ ID NO: 1560639
agaacacucucuggcaaau

SEQ ID NO: 1614134 - RNA, 19 nt, Artificial Sequence
  Description of Artificial Sequence: Synthetic oligonucleotide
  Antisense strand to SEQ ID NO: 1614133
auuugccagagaguguucu

SEQ ID NO: 1614135 - RNA, 19 nt, Artificial Sequence
  Description of Artificial Sequence: Synthetic oligonucleotide
  Sense strand starting at position 1116 of SEQ ID NO: 1560639
guauuugucuaagaaagga

SEQ ID NO: 1614136 - RNA, 19 nt, Artificial Sequence
  Description of Artificial Sequence: Synthetic oligonucleotide
  Antisense strand to SEQ ID NO: 1614135
uccuuucuuagacaaauac

SEQ ID NO: 1614137 - RNA, 19 nt, Artificial Sequence
  Description of Artificial Sequence: Synthetic oligonucleotide
  Sense strand starting at position 1140 of SEQ ID NO: 1560639
uucugaucccagugaggcu

SEQ ID NO: 1614138 - RNA, 19 nt, Artificial Sequence
  Description of Artificial Sequence: Synthetic oligonucleotide
  Antisense strand to SEQ ID NO: 1614137
agccucacugggaucagaa

SEQ ID NO: 1614139 - RNA, 19 nt, Artificial Sequence
  Description of Artificial Sequence: Synthetic oligonucleotide
  Sense strand starting at position 1270 of SEQ ID NO: 1560639
uucuaugaccggcguucua

SEQ ID NO: 1614140 - RNA, 19 nt, Artificial Sequence
  Description of Artificial Sequence: Synthetic oligonucleotide
  Antisense strand to SEQ ID NO: 1614139
uagaacgccggucauagaa

SEQ ID NO: 1614141 - RNA, 19 nt, Artificial Sequence
  Description of Artificial Sequence: Synthetic oligonucleotide
  Sense strand starting at position 1280 of SEQ ID NO: 1560639
ggcguucuaaaguggauaa

SEQ ID NO: 1614142 - RNA, 19 nt, Artificial Sequence
  Description of Artificial Sequence: Synthetic oligonucleotide
  Antisense strand to SEQ ID NO: 1614141
uuauccacuuuagaacgcc

SEQ ID NO: 1614143 - RNA, 19 nt, Artificial Sequence
  Description of Artificial Sequence: Synthetic oligonucleotide
  Sense strand starting at position 1281 of SEQ ID NO: 1560639
gcguucuaaaguggauaau

SEQ ID NO: 1614144 - RNA, 19 nt, Artificial Sequence
  Description of Artificial Sequence: Synthetic oligonucleotide
  Antisense strand to SEQ ID NO: 1614143
auuauccacuuuagaacgc

SEQ ID NO: 1614145 - RNA, 19 nt, Artificial Sequence
  Description of Artificial Sequence: Synthetic oligonucleotide
  Sense strand starting at position 1292 of SEQ ID NO: 1560639
uggauaauccuaggcucau

SEQ ID NO: 1614146 - RNA, 19 nt, Artificial Sequence
  Description of Artificial Sequence: Synthetic oligonucleotide
  Antisense strand to SEQ ID NO: 1614145
augagccuaggauuaucca

SEQ ID NO: 1614147 - RNA, 19 nt, Artificial Sequence
  Description of Artificial Sequence: Synthetic oligonucleotide
  Sense strand starting at position 1293 of SEQ ID NO: 1560639
ggauaauccuaggcucauc

SEQ ID NO: 1614148 - RNA, 19 nt, Artificial Sequence
  Description of Artificial Sequence: Synthetic oligonucleotide
  Antisense strand to SEQ ID NO: 1614147
gaugagccuaggauuaucc

SEQ ID NO: 1614149 - RNA, 19 nt, Artificial Sequence
  Description of Artificial Sequence: Synthetic oligonucleotide
  Sense strand starting at position 1329 of SEQ ID NO: 1560639
ucuaacggauccuaagaaa

SEQ ID NO: 1614150 - RNA, 19 nt, Artificial Sequence
  Description of Artificial Sequence: Synthetic oligonucleotide
  Antisense strand to SEQ ID NO: 1614149
uuucuuaggauccguuaga

SEQ ID NO: 1614151 - RNA, 19 nt, Artificial Sequence
  Description of Artificial Sequence: Synthetic oligonucleotide
  Sense strand starting at position 1360 of SEQ ID NO: 1560639
aggacuuuggcucaagguu

SEQ ID NO: 1614152 - RNA, 19 nt, Artificial Sequence
  Description of Artificial Sequence: Synthetic oligonucleotide
  Antisense strand to SEQ ID NO: 1614151
aaccuugagccaaaguccu

SEQ ID NO: 1614153 - RNA, 19 nt, Artificial Sequence
  Description of Artificial Sequence: Synthetic oligonucleotide
  Sense strand starting at position 1384 of SEQ ID NO: 1560639
gcuaguggugagcagacaa

SEQ ID NO: 1614154 - RNA, 19 nt, Artificial Sequence
  Description of Artificial Sequence: Synthetic oligonucleotide
  Antisense strand to SEQ ID NO: 1614153
uugucugcucaccacuagc

SEQ ID NO: 1614155 - RNA, 19 nt, Artificial Sequence
  Description of Artificial Sequence: Synthetic oligonucleotide
  Sense strand starting at position 1413 of SEQ ID NO: 1560639
ugcacccuucgagaaacuu

SEQ ID NO: 1614156 - RNA, 19 nt, Artificial Sequence
  Description of Artificial Sequence: Synthetic oligonucleotide
  Antisense strand to SEQ ID NO: 1614155
aaguuucucgaagggugca

SEQ ID NO: 1614157 - RNA, 19 nt, Artificial Sequence
  Description of Artificial Sequence: Synthetic oligonucleotide
  Sense strand starting at position 1538 of SEQ ID NO: 1560639
ccucgauaaucuugauaaa

SEQ ID NO: 1614158 - RNA, 19 nt, Artificial Sequence
  Description of Artificial Sequence: Synthetic oligonucleotide
  Antisense strand to SEQ ID NO: 1614157
uuuaucaagauuaucgagg

SEQ ID NO: 1614159 - RNA, 19 nt, Artificial Sequence
  Description of Artificial Sequence: Synthetic oligonucleotide
  Sense strand starting at position 1627 of SEQ ID NO: 1560639
ggcgugagcgccguuauga

SEQ ID NO: 1614160 - RNA, 19 nt, Artificial Sequence
  Description of Artificial Sequence: Synthetic oligonucleotide
  Antisense strand to SEQ ID NO: 1614159
ucauaacggcgcucacgcc

SEQ ID NO: 1614161 - RNA, 19 nt, Artificial Sequence
  Description of Artificial Sequence: Synthetic oligonucleotide
  Sense strand starting at position 2395 of SEQ ID NO: 1560639
ccgggauucgucugcgcau

SEQ ID NO: 1614162 - RNA, 19 nt, Artificial Sequence
  Description of Artificial Sequence: Synthetic oligonucleotide
  Antisense strand to SEQ ID NO: 1614161
augcgcagacgaaucccgg

SEQ ID NO: 1614163 - RNA, 19 nt, Artificial Sequence
  Description of Artificial Sequence: Synthetic oligonucleotide
  Sense strand starting at position 3308 of SEQ ID NO: 1560639
aauguuagguuagugcaua

SEQ ID NO: 1614164 - RNA, 19 nt, Artificial Sequence
  Description of Artificial Sequence: Synthetic oligonucleotide
  Antisense strand to SEQ ID NO: 1614163
uaugcacuaaccuaacauu

SEQ ID NO: 1614165 - RNA, 19 nt, Artificial Sequence
  Description of Artificial Sequence: Synthetic oligonucleotide
  Sense strand starting at position 3342 of SEQ ID NO: 1560639
gggaccaguugcugaaacu

SEQ ID NO: 1614166 - RNA, 19 nt, Artificial Sequence
  Description of Artificial Sequence: Synthetic oligonucleotide
  Antisense strand to SEQ ID NO: 1614165
aguuucagcaacugguccc

SEQ ID NO: 1614167 - RNA, 19 nt, Artificial Sequence
  Description of Artificial Sequence: Synthetic oligonucleotide
  Sense strand starting at position 3390 of SEQ ID NO: 1560639
ggacuaaacugucacauuc

SEQ ID NO: 1614168 - RNA, 19 nt, Artificial Sequence
  Description of Artificial Sequence: Synthetic oligonucleotide
  Antisense strand to SEQ ID NO: 1614167
gaaugugacaguuuagucc

SEQ ID NO: 1614169 - RNA, 19 nt, Artificial Sequence
  Description of Artificial Sequence: Synthetic oligonucleotide
  Sense strand starting at position 3414 of SEQ ID NO: 1560639
ggaccugugagcuguauuc

SEQ ID NO: 1614170 - RNA, 19 nt, Artificial Sequence
  Description of Artificial Sequence: Synthetic oligonucleotide
  Antisense strand to SEQ ID NO: 1614169
gaauacagcucacaggucc

SEQ ID NO: 1614171 - RNA, 19 nt, Artificial Sequence
  Description of Artificial Sequence: Synthetic oligonucleotide
  Sense strand starting at position 3416 of SEQ ID NO: 1560639
accugugagcuguauucuu

SEQ ID NO: 1614172 - RNA, 19 nt, Artificial Sequence
  Description of Artificial Sequence: Synthetic oligonucleotide
  Antisense strand to SEQ ID NO: 1614171
aagaauacagcucacaggu

SEQ ID NO: 1614173 - RNA, 19 nt, Artificial Sequence
  Description of Artificial Sequence: Synthetic oligonucleotide
  Sense strand starting at position 10 of SEQ ID NO: 1560640
agugcaacuuggucucaaa

SEQ ID NO: 1614174 - RNA, 19 nt, Artificial Sequence
  Description of Artificial Sequence: Synthetic oligonucleotide
  Antisense strand to SEQ ID NO: 1614173
uuugagaccaaguugcacu

SEQ ID NO: 1614175 - RNA, 19 nt, Artificial Sequence
  Description of Artificial Sequence: Synthetic oligonucleotide
  Sense strand starting at position 122 of SEQ ID NO: 1560640
ccaacagauccuugagauu

SEQ ID NO: 1614176 - RNA, 19 nt, Artificial Sequence
  Description of Artificial Sequence: Synthetic oligonucleotide
  Antisense strand to SEQ ID NO: 1614175
aaucucaaggaucuguugg

SEQ ID NO: 1614177 - RNA, 19 nt, Artificial Sequence
  Description of Artificial Sequence: Synthetic oligonucleotide
  Sense strand starting at position 125 of SEQ ID NO: 1560640
acagauccuugagauuugu

SEQ ID NO: 1614178 - RNA, 19 nt, Artificial Sequence
  Description of Artificial Sequence: Synthetic oligonucleotide
  Antisense strand to SEQ ID NO: 1614177
acaaaucucaaggaucugu

SEQ ID NO: 1614179 - RNA, 19 nt, Artificial Sequence
  Description of Artificial Sequence: Synthetic oligonucleotide
  Sense strand starting at position 135 of SEQ ID NO: 1560640
gagauuuguuuagaagagu

SEQ ID NO: 1614180 - RNA, 19 nt, Artificial Sequence
  Description of Artificial Sequence: Synthetic oligonucleotide
  Antisense strand to SEQ ID NO: 1614179
acucuucuaaacaaaucuc

SEQ ID NO: 1614181 - RNA, 19 nt, Artificial Sequence
  Description of Artificial Sequence: Synthetic oligonucleotide
  Sense strand starting at position 144 of SEQ ID NO: 1560640
uuagaagagucuggagagu

SEQ ID NO: 1614182 - RNA, 19 nt, Artificial Sequence
  Description of Artificial Sequence: Synthetic oligonucleotide
  Antisense strand to SEQ ID NO: 1614181
acucuccagacucuucuaa

SEQ ID NO: 1614183 - RNA, 19 nt, Artificial Sequence
  Description of Artificial Sequence: Synthetic oligonucleotide
  Sense strand starting at position 146 of SEQ ID NO: 1560640
agaagagucuggagaguga

SEQ ID NO: 1614184 - RNA, 19 nt, Artificial Sequence
  Description of Artificial Sequence: Synthetic oligonucleotide
  Antisense strand to SEQ ID NO: 1614183
ucacucuccagacucuucu

SEQ ID NO: 1614185 - RNA, 19 nt, Artificial Sequence
  Description of Artificial Sequence: Synthetic oligonucleotide
  Sense strand starting at position 193 of SEQ ID NO: 1560640
ugcucugccaguuaggaga

SEQ ID NO: 1614186 - RNA, 19 nt, Artificial Sequence
  Description of Artificial Sequence: Synthetic oligonucleotide
  Antisense strand to SEQ ID NO: 1614185
ucuccuaacuggcagagca

SEQ ID NO: 1614187 - RNA, 19 nt, Artificial Sequence
  Description of Artificial Sequence: Synthetic oligonucleotide
  Sense strand starting at position 372 of SEQ ID NO: 1560640
caaggcucuuagucugaaa

SEQ ID NO: 1614188 - RNA, 19 nt, Artificial Sequence
  Description of Artificial Sequence: Synthetic oligonucleotide
  Antisense strand to SEQ ID NO: 1614187
uuucagacuaagagccuug

SEQ ID NO: 1614189 - RNA, 19 nt, Artificial Sequence
  Description of Artificial Sequence: Synthetic oligonucleotide
  Sense strand starting at position 374 of SEQ ID NO: 1560640
aggcucuuagucugaaaug

SEQ ID NO: 1614190 - RNA, 19 nt, Artificial Sequence
  Description of Artificial Sequence: Synthetic oligonucleotide
  Antisense strand to SEQ ID NO: 1614189
cauuucagacuaagagccu

SEQ ID NO: 1614191 - RNA, 19 nt, Artificial Sequence
  Description of Artificial Sequence: Synthetic oligonucleotide
  Sense strand starting at position 375 of SEQ ID NO: 1560640
ggcucuuagucugaaauga

SEQ ID NO: 1614192 - RNA, 19 nt, Artificial Sequence
  Description of Artificial Sequence: Synthetic oligonucleotide
  Antisense strand to SEQ ID NO: 1614191
ucauuucagacuaagagcc

SEQ ID NO: 1614193 - RNA, 19 nt, Artificial Sequence
  Description of Artificial Sequence: Synthetic oligonucleotide
  Sense strand starting at position 407 of SEQ ID NO: 1560640
accggaaugacuuguucuc

SEQ ID NO: 1614194 - RNA, 19 nt, Artificial Sequence
  Description of Artificial Sequence: Synthetic oligonucleotide
  Antisense strand to SEQ ID NO: 1614193
gagaacaagucauuccggu

SEQ ID NO: 1614195 - RNA, 19 nt, Artificial Sequence
  Description of Artificial Sequence: Synthetic oligonucleotide
  Sense strand starting at position 409 of SEQ ID NO: 1560640
cggaaugacuuguucucua

SEQ ID NO: 1614196 - RNA, 19 nt, Artificial Sequence
  Description of Artificial Sequence: Synthetic oligonucleotide
  Antisense strand to SEQ ID NO: 1614195
uagagaacaagucauuccg

SEQ ID NO: 1614197 - RNA, 19 nt, Artificial Sequence
  Description of Artificial Sequence: Synthetic oligonucleotide
  Sense strand starting at position 413 of SEQ ID NO: 1560640
augacuuguucucuacagu

SEQ ID NO: 1614198 - RNA, 19 nt, Artificial Sequence
  Description of Artificial Sequence: Synthetic oligonucleotide
  Antisense strand to SEQ ID NO: 1614197
acuguagagaacaagucau

SEQ ID NO: 1614199 - RNA, 19 nt, Artificial Sequence
  Description of Artificial Sequence: Synthetic oligonucleotide
  Sense strand starting at position 414 of SEQ ID NO: 1560640
ugacuuguucucuacagua

SEQ ID NO: 1614200 - RNA, 19 nt, Artificial Sequence
  Description of Artificial Sequence: Synthetic oligonucleotide
  Antisense strand to SEQ ID NO: 1614199
uacuguagagaacaaguca

SEQ ID NO: 1614201 - RNA, 19 nt, Artificial Sequence
  Description of Artificial Sequence: Synthetic oligonucleotide
  Sense strand starting at position 416 of SEQ ID NO: 1560640
acuuguucucuacaguauu

SEQ ID NO: 1614202 - RNA, 19 nt, Artificial Sequence
  Description of Artificial Sequence: Synthetic oligonucleotide
  Antisense strand to SEQ ID NO: 1614201
aauacuguagagaacaagu

SEQ ID NO: 1614203 - RNA, 19 nt, Artificial Sequence
  Description of Artificial Sequence: Synthetic oligonucleotide
  Sense strand starting at position 422 of SEQ ID NO: 1560640
ucucuacaguauucucaga

SEQ ID NO: 1614204 - RNA, 19 nt, Artificial Sequence
  Description of Artificial Sequence: Synthetic oligonucleotide
  Antisense strand to SEQ ID NO: 1614203
ucugagaauacuguagaga

SEQ ID NO: 1614205 - RNA, 19 nt, Artificial Sequence
  Description of Artificial Sequence: Synthetic oligonucleotide
  Sense strand starting at position 521 of SEQ ID NO: 1560640
gcucuacuauuucucguaa

SEQ ID NO: 1614206 - RNA, 19 nt, Artificial Sequence
  Description of Artificial Sequence: Synthetic oligonucleotide
  Antisense strand to SEQ ID NO: 1614205
uuacgagaaauaguagagc

SEQ ID NO: 1614207 - RNA, 19 nt, Artificial Sequence
  Description of Artificial Sequence: Synthetic oligonucleotide
  Sense strand starting at position 534 of SEQ ID NO: 1560640
ucguaauuauugccuucua

SEQ ID NO: 1614208 - RNA, 19 nt, Artificial Sequence
  Description of Artificial Sequence: Synthetic oligonucleotide
  Antisense strand to SEQ ID NO: 1614207
uagaaggcaauaauuacga

SEQ ID NO: 1614209 - RNA, 19 nt, Artificial Sequence
  Description of Artificial Sequence: Synthetic oligonucleotide
  Sense strand starting at position 535 of SEQ ID NO: 1560640
cguaauuauugccuucuaa

SEQ ID NO: 1614210 - RNA, 19 nt, Artificial Sequence
  Description of Artificial Sequence: Synthetic oligonucleotide
  Antisense strand to SEQ ID NO: 1614209
uuagaaggcaauaauuacg

SEQ ID NO: 1614211 - RNA, 19 nt, Artificial Sequence
  Description of Artificial Sequence: Synthetic oligonucleotide
  Sense strand starting at position 573 of SEQ ID NO: 1560640
aucuuuauugccugucuca

SEQ ID NO: 1614212 - RNA, 19 nt, Artificial Sequence
  Description of Artificial Sequence: Synthetic oligonucleotide
  Antisense strand to SEQ ID NO: 1614211
ugagacaggcaauaaagau

SEQ ID NO: 1614213 - RNA, 19 nt, Artificial Sequence
  Description of Artificial Sequence: Synthetic oligonucleotide
  Sense strand starting at position 794 of SEQ ID NO: 1560640
agaacacucucuggcaaau

SEQ ID NO: 1614214 - RNA, 19 nt, Artificial Sequence
  Description of Artificial Sequence: Synthetic oligonucleotide
  Antisense strand to SEQ ID NO: 1614213
auuugccagagaguguucu

SEQ ID NO: 1614215 - RNA, 19 nt, Artificial Sequence
  Description of Artificial Sequence: Synthetic oligonucleotide
  Sense strand starting at position 829 of SEQ ID NO: 1560640
guauuugucuaagaaagga

SEQ ID NO: 1614216 - RNA, 19 nt, Artificial Sequence
  Description of Artificial Sequence: Synthetic oligonucleotide
  Antisense strand to SEQ ID NO: 1614215
uccuuucuuagacaaauac

SEQ ID NO: 1614217 - RNA, 19 nt, Artificial Sequence
  Description of Artificial Sequence: Synthetic oligonucleotide
  Sense strand starting at position 853 of SEQ ID NO: 1560640
uucugaucccagugaggcu

SEQ ID NO: 1614218 - RNA, 19 nt, Artificial Sequence
  Description of Artificial Sequence: Synthetic oligonucleotide
  Antisense strand to SEQ ID NO: 1614217
agccucacugggaucagaa

SEQ ID NO: 1614219 - RNA, 19 nt, Artificial Sequence
  Description of Artificial Sequence: Synthetic oligonucleotide
  Sense strand starting at position 983 of SEQ ID NO: 1560640
uucuaugaccggcguucua

SEQ ID NO: 1614220 - RNA, 19 nt, Artificial Sequence
  Description of Artificial Sequence: Synthetic oligonucleotide
  Antisense strand to SEQ ID NO: 1614219
uagaacgccggucauagaa

SEQ ID NO: 1614221 - RNA, 19 nt, Artificial Sequence
  Description of Artificial Sequence: Synthetic oligonucleotide
  Sense strand starting at position 993 of SEQ ID NO: 1560640
ggcguucuaaaguggauaa

SEQ ID NO: 1614222 - RNA, 19 nt, Artificial Sequence
  Description of Artificial Sequence: Synthetic oligonucleotide
  Antisense strand to SEQ ID NO: 1614221
uuauccacuuuagaacgcc

SEQ ID NO: 1614223 - RNA, 19 nt, Artificial Sequence
  Description of Artificial Sequence: Synthetic oligonucleotide
  Sense strand starting at position 994 of SEQ ID NO: 1560640
gcguucuaaaguggauaau

SEQ ID NO: 1614224 - RNA, 19 nt, Artificial Sequence
  Description of Artificial Sequence: Synthetic oligonucleotide
  Antisense strand to SEQ ID NO: 1614223
auuauccacuuuagaacgc

SEQ ID NO: 1614225 - RNA, 19 nt, Artificial Sequence
  Description of Artificial Sequence: Synthetic oligonucleotide
  Sense strand starting at position 1005 of SEQ ID NO: 1560640
uggauaauccuaggcucau

SEQ ID NO: 1614226 - RNA, 19 nt, Artificial Sequence
  Description of Artificial Sequence: Synthetic oligonucleotide
  Antisense strand to SEQ ID NO: 1614225
augagccuaggauuaucca

SEQ ID NO: 1614227 - RNA, 19 nt, Artificial Sequence
  Description of Artificial Sequence: Synthetic oligonucleotide
  Sense strand starting at position 1006 of SEQ ID NO: 1560640
ggauaauccuaggcucauc

SEQ ID NO: 1614228 - RNA, 19 nt, Artificial Sequence
  Description of Artificial Sequence: Synthetic oligonucleotide
  Antisense strand to SEQ ID NO: 1614227
gaugagccuaggauuaucc

SEQ ID NO: 1614229 - RNA, 19 nt, Artificial Sequence
  Description of Artificial Sequence: Synthetic oligonucleotide
  Sense strand starting at position 1042 of SEQ ID NO: 1560640
ucuaacggauccuaagaaa

SEQ ID NO: 1614230 - RNA, 19 nt, Artificial Sequence
  Description of Artificial Sequence: Synthetic oligonucleotide
  Antisense strand to SEQ ID NO: 1614229
uuucuuaggauccguuaga

SEQ ID NO: 1614231 - RNA, 19 nt, Artificial Sequence
  Description of Artificial Sequence: Synthetic oligonucleotide
  Sense strand starting at position 1073 of SEQ ID NO: 1560640
aggacuuuggcucaagguu

SEQ ID NO: 1614232 - RNA, 19 nt, Artificial Sequence
  Description of Artificial Sequence: Synthetic oligonucleotide
  Antisense strand to SEQ ID NO: 1614231
aaccuugagccaaaguccu

SEQ ID NO: 1614233 - RNA, 19 nt, Artificial Sequence
  Description of Artificial Sequence: Synthetic oligonucleotide
  Sense strand starting at position 1097 of SEQ ID NO: 1560640
gcuaguggugagcagacaa

SEQ ID NO: 1614234 - RNA, 19 nt, Artificial Sequence
  Description of Artificial Sequence: Synthetic oligonucleotide
  Antisense strand to SEQ ID NO: 1614233
uugucugcucaccacuagc

SEQ ID NO: 1614235 - RNA, 19 nt, Artificial Sequence
  Description of Artificial Sequence: Synthetic oligonucleotide
  Sense strand starting at position 1126 of SEQ ID NO: 1560640
ugcacccuucgagaaacuu

SEQ ID NO: 1614236 - RNA, 19 nt, Artificial Sequence
  Description of Artificial Sequence: Synthetic oligonucleotide
  Antisense strand to SEQ ID NO: 1614235
aaguuucucgaagggugca

SEQ ID NO: 1614237 - RNA, 19 nt, Artificial Sequence
  Description of Artificial Sequence: Synthetic oligonucleotide
  Sense strand starting at position 1251 of SEQ ID NO: 1560640
ccucgauaaucuugauaaa

SEQ ID NO: 1614238 - RNA, 19 nt, Artificial Sequence
  Description of Artificial Sequence: Synthetic oligonucleotide
  Antisense strand to SEQ ID NO: 1614237
uuuaucaagauuaucgagg

SEQ ID NO: 1614239 - RNA, 19 nt, Artificial Sequence
  Description of Artificial Sequence: Synthetic oligonucleotide
  Sense strand starting at position 1340 of SEQ ID NO: 1560640
ggcgugagcgccguuauga

SEQ ID NO: 1614240 - RNA, 19 nt, Artificial Sequence
  Description of Artificial Sequence: Synthetic oligonucleotide
  Antisense strand to SEQ ID NO: 1614239
ucauaacggcgcucacgcc

SEQ ID NO: 1614241 - RNA, 19 nt, Artificial Sequence
  Description of Artificial Sequence: Synthetic oligonucleotide
  Sense strand starting at position 2108 of SEQ ID NO: 1560640
ccgggauucgucugcgcau

SEQ ID NO: 1614242 - RNA, 19 nt, Artificial Sequence
  Description of Artificial Sequence: Synthetic oligonucleotide
  Antisense strand to SEQ ID NO: 1614241
augcgcagacgaaucccgg

SEQ ID NO: 1614243 - RNA, 19 nt, Artificial Sequence
  Description of Artificial Sequence: Synthetic oligonucleotide
  Sense strand starting at position 3021 of SEQ ID NO: 1560640
aauguuagguuagugcaua

SEQ ID NO: 1614244 - RNA, 19 nt, Artificial Sequence
  Description of Artificial Sequence: Synthetic oligonucleotide
  Antisense strand to SEQ ID NO: 1614243
uaugcacuaaccuaacauu

SEQ ID NO: 1614245 - RNA, 19 nt, Artificial Sequence
  Description of Artificial Sequence: Synthetic oligonucleotide
  Sense strand starting at position 3055 of SEQ ID NO: 1560640
gggaccaguugcugaaacu

SEQ ID NO: 1614246 - RNA, 19 nt, Artificial Sequence
  Description of Artificial Sequence: Synthetic oligonucleotide
  Antisense strand to SEQ ID NO: 1614245
aguuucagcaacugguccc

SEQ ID NO: 1614247 - RNA, 19 nt, Artificial Sequence
  Description of Artificial Sequence: Synthetic oligonucleotide
  Sense strand starting at position 3103 of SEQ ID NO: 1560640
ggacuaaacugucacauuc

SEQ ID NO: 1614248 - RNA, 19 nt, Artificial Sequence
  Description of Artificial Sequence: Synthetic oligonucleotide
  Antisense strand to SEQ ID NO: 1614247
gaaugugacaguuuagucc

SEQ ID NO: 1614249 - RNA, 19 nt, Artificial Sequence
  Description of Artificial Sequence: Synthetic oligonucleotide
  Sense strand starting at position 3127 of SEQ ID NO: 1560640
ggaccugugagcuguauuc

SEQ ID NO: 1614250 - RNA, 19 nt, Artificial Sequence
  Description of Artificial Sequence: Synthetic oligonucleotide
  Antisense strand to SEQ ID NO: 1614249
gaauacagcucacaggucc

SEQ ID NO: 1614251 - RNA, 19 nt, Artificial Sequence
  Description of Artificial Sequence: Synthetic oligonucleotide
  Sense strand starting at position 3129 of SEQ ID NO: 1560640
accugugagcuguauucuu

SEQ ID NO: 1614252 - RNA, 19 nt, Artificial Sequence
  Description of Artificial Sequence: Synthetic oligonucleotide
  Antisense strand to SEQ ID NO: 1614251
aagaauacagcucacaggu

SEQ ID NO: 1614253 - RNA, 19 nt, Artificial Sequence
  Description of Artificial Sequence: Synthetic oligonucleotide
  Sense strand starting at position 204 of SEQ ID NO: 1560641
agugcaacuuggucucaaa

SEQ ID NO: 1614254 - RNA, 19 nt, Artificial Sequence
  Description of Artificial Sequence: Synthetic oligonucleotide
  Antisense strand to SEQ ID NO: 1614253
uuugagaccaaguugcacu

SEQ ID NO: 1614255 - RNA, 19 nt, Artificial Sequence
  Description of Artificial Sequence: Synthetic oligonucleotide
  Sense strand starting at position 316 of SEQ ID NO: 1560641
ccaacagauccuugagauu

SEQ ID NO: 1614256 - RNA, 19 nt, Artificial Sequence
  Description of Artificial Sequence: Synthetic oligonucleotide
  Antisense strand to SEQ ID NO: 1614255
aaucucaaggaucuguugg

SEQ ID NO: 1614257 - RNA, 19 nt, Artificial Sequence
  Description of Artificial Sequence: Synthetic oligonucleotide
  Sense strand starting at position 319 of SEQ ID NO: 1560641
acagauccuugagauuugu

SEQ ID NO: 1614258 - RNA, 19 nt, Artificial Sequence
  Description of Artificial Sequence: Synthetic oligonucleotide
  Antisense strand to SEQ ID NO: 1614257
acaaaucucaaggaucugu

SEQ ID NO: 1614259 - RNA, 19 nt, Artificial Sequence
  Description of Artificial Sequence: Synthetic oligonucleotide
  Sense strand starting at position 329 of SEQ ID NO: 1560641
gagauuuguuuagaagagu

SEQ ID NO: 1614260 - RNA, 19 nt, Artificial Sequence
  Description of Artificial Sequence: Synthetic oligonucleotide
  Antisense strand to SEQ ID NO: 1614259
acucuucuaaacaaaucuc

SEQ ID NO: 1614261 - RNA, 19 nt, Artificial Sequence
  Description of Artificial Sequence: Synthetic oligonucleotide
  Sense strand starting at position 338 of SEQ ID NO: 1560641
uuagaagagucuggagagu

SEQ ID NO: 1614262 - RNA, 19 nt, Artificial Sequence
  Description of Artificial Sequence: Synthetic oligonucleotide
  Antisense strand to SEQ ID NO: 1614261
acucuccagacucuucuaa

SEQ ID NO: 1614263 - RNA, 19 nt, Artificial Sequence
  Description of Artificial Sequence: Synthetic oligonucleotide
  Sense strand starting at position 340 of SEQ ID NO: 1560641
agaagagucuggagaguga

SEQ ID NO: 1614264 - RNA, 19 nt, Artificial Sequence
  Description of Artificial Sequence: Synthetic oligonucleotide
  Antisense strand to SEQ ID NO: 1614263
ucacucuccagacucuucu

SEQ ID NO: 1614265 - RNA, 19 nt, Artificial Sequence
  Description of Artificial Sequence: Synthetic oligonucleotide
  Sense strand starting at position 387 of SEQ ID NO: 1560641
ugcucugccaguuaggaga

SEQ ID NO: 1614266 - RNA, 19 nt, Artificial Sequence
  Description of Artificial Sequence: Synthetic oligonucleotide
  Antisense strand to SEQ ID NO: 1614265
ucuccuaacuggcagagca

SEQ ID NO: 1614267 - RNA, 19 nt, Artificial Sequence
  Description of Artificial Sequence: Synthetic oligonucleotide
  Sense strand starting at position 566 of SEQ ID NO: 1560641
caaggcucuuagucugaaa

SEQ ID NO: 1614268 - RNA, 19 nt, Artificial Sequence
  Description of Artificial Sequence: Synthetic oligonucleotide
  Antisense strand to SEQ ID NO: 1614267
uuucagacuaagagccuug

SEQ ID NO: 1614269 - RNA, 19 nt, Artificial Sequence
  Description of Artificial Sequence: Synthetic oligonucleotide
  Sense strand starting at position 568 of SEQ ID NO: 1560641
aggcucuuagucugaaaug

SEQ ID NO: 1614270 - RNA, 19 nt, Artificial Sequence
  Description of Artificial Sequence: Synthetic oligonucleotide
  Antisense strand to SEQ ID NO: 1614269
cauuucagacuaagagccu

SEQ ID NO: 1614271 - RNA, 19 nt, Artificial Sequence
  Description of Artificial Sequence: Synthetic oligonucleotide
  Sense strand starting at position 569 of SEQ ID NO: 1560641
ggcucuuagucugaaauga

SEQ ID NO: 1614272 - RNA, 19 nt, Artificial Sequence
  Description of Artificial Sequence: Synthetic oligonucleotide
  Antisense strand to SEQ ID NO: 1614271
ucauuucagacuaagagcc

SEQ ID NO: 1614273 - RNA, 19 nt, Artificial Sequence
  Description of Artificial Sequence: Synthetic oligonucleotide
  Sense strand starting at position 601 of SEQ ID NO: 1560641
accggaaugacuuguucuc

SEQ ID NO: 1614274 - RNA, 19 nt, Artificial Sequence
  Description of Artificial Sequence: Synthetic oligonucleotide
  Antisense strand to SEQ ID NO: 1614273
gagaacaagucauuccggu

SEQ ID NO: 1614275 - RNA, 19 nt, Artificial Sequence
  Description of Artificial Sequence: Synthetic oligonucleotide
  Sense strand starting at position 603 of SEQ ID NO: 1560641
cggaaugacuuguucucua

SEQ ID NO: 1614276 - RNA, 19 nt, Artificial Sequence
  Description of Artificial Sequence: Synthetic oligonucleotide
  Antisense strand to SEQ ID NO: 1614275
uagagaacaagucauuccg

SEQ ID NO: 1614277 - RNA, 19 nt, Artificial Sequence
  Description of Artificial Sequence: Synthetic oligonucleotide
  Sense strand starting at position 607 of SEQ ID NO: 1560641
augacuuguucucuacagu

SEQ ID NO: 1614278 - RNA, 19 nt, Artificial Sequence
  Description of Artificial Sequence: Synthetic oligonucleotide
  Antisense strand to SEQ ID NO: 1614277
acuguagagaacaagucau

SEQ ID NO: 1614279 - RNA, 19 nt, Artificial Sequence
  Description of Artificial Sequence: Synthetic oligonucleotide
  Sense strand starting at position 608 of SEQ ID NO: 1560641
ugacuuguucucuacagua

SEQ ID NO: 1614280 - RNA, 19 nt, Artificial Sequence
  Description of Artificial Sequence: Synthetic oligonucleotide
  Antisense strand to SEQ ID NO: 1614279
uacuguagagaacaaguca

SEQ ID NO: 1614281 - RNA, 19 nt, Artificial Sequence
  Description of Artificial Sequence: Synthetic oligonucleotide
  Sense strand starting at position 610 of SEQ ID NO: 1560641
acuuguucucuacaguauu

SEQ ID NO: 1614282 - RNA, 19 nt, Artificial Sequence
  Description of Artificial Sequence: Synthetic oligonucleotide
  Antisense strand to SEQ ID NO: 1614281
aauacuguagagaacaagu

SEQ ID NO: 1614283 - RNA, 19 nt, Artificial Sequence
  Description of Artificial Sequence: Synthetic oligonucleotide
  Sense strand starting at position 616 of SEQ ID NO: 1560641
ucucuacaguauucucaga

SEQ ID NO: 1614284 - RNA, 19 nt, Artificial Sequence
  Description of Artificial Sequence: Synthetic oligonucleotide
  Antisense strand to SEQ ID NO: 1614283
ucugagaauacuguagaga

SEQ ID NO: 1614285 - RNA, 19 nt, Artificial Sequence
  Description of Artificial Sequence: Synthetic oligonucleotide
  Sense strand starting at position 715 of SEQ ID NO: 1560641
gcucuacuauuucucguaa

SEQ ID NO: 1614286 - RNA, 19 nt, Artificial Sequence
  Description of Artificial Sequence: Synthetic oligonucleotide
  Antisense strand to SEQ ID NO: 1614285
uuacgagaaauaguagagc

SEQ ID NO: 1614287 - RNA, 19 nt, Artificial Sequence
  Description of Artificial Sequence: Synthetic oligonucleotide
  Sense strand starting at position 728 of SEQ ID NO: 1560641
ucguaauuauugccuucua

SEQ ID NO: 1614288 - RNA, 19 nt, Artificial Sequence
  Description of Artificial Sequence: Synthetic oligonucleotide
  Antisense strand to SEQ ID NO: 1614287
uagaaggcaauaauuacga

SEQ ID NO: 1614289 - RNA, 19 nt, Artificial Sequence
  Description of Artificial Sequence: Synthetic oligonucleotide
  Sense strand starting at position 729 of SEQ ID NO: 1560641
cguaauuauugccuucuaa

SEQ ID NO: 1614290 - RNA, 19 nt, Artificial Sequence
  Description of Artificial Sequence: Synthetic oligonucleotide
  Antisense strand to SEQ ID NO: 1614289
uuagaaggcaauaauuacg

SEQ ID NO: 1614291 - RNA, 19 nt, Artificial Sequence
  Description of Artificial Sequence: Synthetic oligonucleotide
  Sense strand starting at position 767 of SEQ ID NO: 1560641
aucuuuauugccugucuca

SEQ ID NO: 1614292 - RNA, 19 nt, Artificial Sequence
  Description of Artificial Sequence: Synthetic oligonucleotide
  Antisense strand to SEQ ID NO: 1614291
ugagacaggcaauaaagau

SEQ ID NO: 1614293 - RNA, 19 nt, Artificial Sequence
  Description of Artificial Sequence: Synthetic oligonucleotide
  Sense strand starting at position 988 of SEQ ID NO: 1560641
agaacacucucuggcaaau

SEQ ID NO: 1614294 - RNA, 19 nt, Artificial Sequence
  Description of Artificial Sequence: Synthetic oligonucleotide
  Antisense strand to SEQ ID NO: 1614293
auuugccagagaguguucu

SEQ ID NO: 1614295 - RNA, 19 nt, Artificial Sequence
  Description of Artificial Sequence: Synthetic oligonucleotide
  Sense strand starting at position 1023 of SEQ ID NO: 1560641
guauuugucuaagaaagga

SEQ ID NO: 1614296 - RNA, 19 nt, Artificial Sequence
  Description of Artificial Sequence: Synthetic oligonucleotide
  Antisense strand to SEQ ID NO: 1614295
uccuuucuuagacaaauac

SEQ ID NO: 1614297 - RNA, 19 nt, Artificial Sequence
  Description of Artificial Sequence: Synthetic oligonucleotide
  Sense strand starting at position 1047 of SEQ ID NO: 1560641
uucugaucccagugaggcu

SEQ ID NO: 1614298 - RNA, 19 nt, Artificial Sequence
  Description of Artificial Sequence: Synthetic oligonucleotide
  Antisense strand to SEQ ID NO: 1614297
agccucacugggaucagaa

SEQ ID NO: 1614299 - RNA, 19 nt, Artificial Sequence
  Description of Artificial Sequence: Synthetic oligonucleotide
  Sense strand starting at position 1177 of SEQ ID NO: 1560641
uucuaugaccggcguucua

SEQ ID NO: 1614300 - RNA, 19 nt, Artificial Sequence
  Description of Artificial Sequence: Synthetic oligonucleotide
  Antisense strand to SEQ ID NO: 1614299
uagaacgccggucauagaa

SEQ ID NO: 1614301 - RNA, 19 nt, Artificial Sequence
  Description of Artificial Sequence: Synthetic oligonucleotide
  Sense strand starting at position 1187 of SEQ ID NO: 1560641
ggcguucuaaaguggauaa

SEQ ID NO: 1614302 - RNA, 19 nt, Artificial Sequence
  Description of Artificial Sequence: Synthetic oligonucleotide
  Antisense strand to SEQ ID NO: 1614301
uuauccacuuuagaacgcc

SEQ ID NO: 1614303 - RNA, 19 nt, Artificial Sequence
  Description of Artificial Sequence: Synthetic oligonucleotide
  Sense strand starting at position 1188 of SEQ ID NO: 1560641
gcguucuaaaguggauaau

SEQ ID NO: 1614304 - RNA, 19 nt, Artificial Sequence
  Description of Artificial Sequence: Synthetic oligonucleotide
  Antisense strand to SEQ ID NO: 1614303
auuauccacuuuagaacgc

SEQ ID NO: 1614305 - RNA, 19 nt, Artificial Sequence
  Description of Artificial Sequence: Synthetic oligonucleotide
  Sense strand starting at position 1199 of SEQ ID NO: 1560641
uggauaauccuaggcucau

SEQ ID NO: 1614306 - RNA, 19 nt, Artificial Sequence
  Description of Artificial Sequence: Synthetic oligonucleotide
  Antisense strand to SEQ ID NO: 1614305
augagccuaggauuaucca

SEQ ID NO: 1614307 - RNA, 19 nt, Artificial Sequence
  Description of Artificial Sequence: Synthetic oligonucleotide
  Sense strand starting at position 1200 of SEQ ID NO: 1560641
ggauaauccuaggcucauc

SEQ ID NO: 1614308 - RNA, 19 nt, Artificial Sequence
  Description of Artificial Sequence: Synthetic oligonucleotide
  Antisense strand to SEQ ID NO: 1614307
gaugagccuaggauuaucc

SEQ ID NO: 1614309 - RNA, 19 nt, Artificial Sequence
  Description of Artificial Sequence: Synthetic oligonucleotide
  Sense strand starting at position 1236 of SEQ ID NO: 1560641
ucuaacggauccuaagaaa

SEQ ID NO: 1614310 - RNA, 19 nt, Artificial Sequence
  Description of Artificial Sequence: Synthetic oligonucleotide
  Antisense strand to SEQ ID NO: 1614309
uuucuuaggauccguuaga

SEQ ID NO: 1614311 - RNA, 19 nt, Artificial Sequence
  Description of Artificial Sequence: Synthetic oligonucleotide
  Sense strand starting at position 1267 of SEQ ID NO: 1560641
aggacuuuggcucaagguu

SEQ ID NO: 1614312 - RNA, 19 nt, Artificial Sequence
  Description of Artificial Sequence: Synthetic oligonucleotide
  Antisense strand to SEQ ID NO: 1614311
aaccuugagccaaaguccu

SEQ ID NO: 1614313 - RNA, 19 nt, Artificial Sequence
  Description of Artificial Sequence: Synthetic oligonucleotide
  Sense strand starting at position 1291 of SEQ ID NO: 1560641
gcuaguggugagcagacaa

SEQ ID NO: 1614314 - RNA, 19 nt, Artificial Sequence
  Description of Artificial Sequence: Synthetic oligonucleotide
  Antisense strand to SEQ ID NO: 1614313
uugucugcucaccacuagc

SEQ ID NO: 1614315 - RNA, 19 nt, Artificial Sequence
  Description of Artificial Sequence: Synthetic oligonucleotide
  Sense strand starting at position 1320 of SEQ ID NO: 1560641
ugcacccuucgagaaacuu

SEQ ID NO: 1614316 - RNA, 19 nt, Artificial Sequence
  Description of Artificial Sequence: Synthetic oligonucleotide
  Antisense strand to SEQ ID NO: 1614315
aaguuucucgaagggugca

SEQ ID NO: 1614317 - RNA, 19 nt, Artificial Sequence
  Description of Artificial Sequence: Synthetic oligonucleotide
  Sense strand starting at position 1445 of SEQ ID NO: 1560641
ccucgauaaucuugauaaa

SEQ ID NO: 1614318 - RNA, 19 nt, Artificial Sequence
  Description of Artificial Sequence: Synthetic oligonucleotide
  Antisense strand to SEQ ID NO: 1614317
uuuaucaagauuaucgagg

SEQ ID NO: 1614319 - RNA, 19 nt, Artificial Sequence
  Description of Artificial Sequence: Synthetic oligonucleotide
  Sense strand starting at position 1534 of SEQ ID NO: 1560641
ggcgugagcgccguuauga

SEQ ID NO: 1614320 - RNA, 19 nt, Artificial Sequence
  Description of Artificial Sequence: Synthetic oligonucleotide
  Antisense strand to SEQ ID NO: 1614319
ucauaacggcgcucacgcc

SEQ ID NO: 1614321 - RNA, 19 nt, Artificial Sequence
  Description of Artificial Sequence: Synthetic oligonucleotide
  Sense strand starting at position 2302 of SEQ ID NO: 1560641
ccgggauucgucugcgcau

SEQ ID NO: 1614322 - RNA, 19 nt, Artificial Sequence
  Description of Artificial Sequence: Synthetic oligonucleotide
  Antisense strand to SEQ ID NO: 1614321
augcgcagacgaaucccgg

SEQ ID NO: 1614323 - RNA, 19 nt, Artificial Sequence
  Description of Artificial Sequence: Synthetic oligonucleotide
  Sense strand starting at position 3215 of SEQ ID NO: 1560641
aauguuagguuagugcaua

SEQ ID NO: 1614324 - RNA, 19 nt, Artificial Sequence
  Description of Artificial Sequence: Synthetic oligonucleotide
  Antisense strand to SEQ ID NO: 1614323
uaugcacuaaccuaacauu

SEQ ID NO: 1614325 - RNA, 19 nt, Artificial Sequence
  Description of Artificial Sequence: Synthetic oligonucleotide
  Sense strand starting at position 3249 of SEQ ID NO: 1560641
gggaccaguugcugaaacu

SEQ ID NO: 1614326 - RNA, 19 nt, Artificial Sequence
  Description of Artificial Sequence: Synthetic oligonucleotide
  Antisense strand to SEQ ID NO: 1614325
aguuucagcaacugguccc

SEQ ID NO: 1614327 - RNA, 19 nt, Artificial Sequence
  Description of Artificial Sequence: Synthetic oligonucleotide
  Sense strand starting at position 3297 of SEQ ID NO: 1560641
ggacuaaacugucacauuc

SEQ ID NO: 1614328 - RNA, 19 nt, Artificial Sequence
  Description of Artificial Sequence: Synthetic oligonucleotide
  Antisense strand to SEQ ID NO: 1614327
gaaugugacaguuuagucc

SEQ ID NO: 1614329 - RNA, 19 nt, Artificial Sequence
  Description of Artificial Sequence: Synthetic oligonucleotide
  Sense strand starting at position 3321 of SEQ ID NO: 1560641
ggaccugugagcuguauuc

SEQ ID NO: 1614330 - RNA, 19 nt, Artificial Sequence
  Description of Artificial Sequence: Synthetic oligonucleotide
  Antisense strand to SEQ ID NO: 1614329
gaauacagcucacaggucc

SEQ ID NO: 1614331 - RNA, 19 nt, Artificial Sequence
  Description of Artificial Sequence: Synthetic oligonucleotide
  Sense strand starting at position 3323 of SEQ ID NO: 1560641
accugugagcuguauucuu

SEQ ID NO: 1614332 - RNA, 19 nt, Artificial Sequence
  Description of Artificial Sequence: Synthetic oligonucleotide
  Antisense strand to SEQ ID NO: 1614331
aagaauacagcucacaggu

SEQ ID NO: 1614333 - RNA, 19 nt, Artificial Sequence
  Description of Artificial Sequence: Synthetic oligonucleotide
  Sense strand starting at position 76 of SEQ ID NO: 1560642
cucguacugccuugagguu

SEQ ID NO: 1614334 - RNA, 19 nt, Artificial Sequence
  Description of Artificial Sequence: Synthetic oligonucleotide
  Antisense strand to SEQ ID NO: 1614333
aaccucaaggcaguacgag

SEQ ID NO: 1614335 - RNA, 19 nt, Artificial Sequence
  Description of Artificial Sequence: Synthetic oligonucleotide
  Sense strand starting at position 150 of SEQ ID NO: 1560642
ggccucugcucacauacau

SEQ ID NO: 1614336 - RNA, 19 nt, Artificial Sequence
  Description of Artificial Sequence: Synthetic oligonucleotide
  Antisense strand to SEQ ID NO: 1614335
auguaugugagcagaggcc

SEQ ID NO: 1614337 - RNA, 19 nt, Artificial Sequence
  Description of Artificial Sequence: Synthetic oligonucleotide
  Sense strand starting at position 304 of SEQ ID NO: 1560642
cccacuuacccaggaugau

SEQ ID NO: 1614338 - RNA, 19 nt, Artificial Sequence
  Description of Artificial Sequence: Synthetic oligonucleotide
  Antisense strand to SEQ ID NO: 1614337
aucauccuggguaaguggg

SEQ ID NO: 1614339 - RNA, 19 nt, Artificial Sequence
  Description of Artificial Sequence: Synthetic oligonucleotide
  Sense strand starting at position 709 of SEQ ID NO: 1560642
ugaggcuuguguccagcaa

SEQ ID NO: 1614340 - RNA, 19 nt, Artificial Sequence
  Description of Artificial Sequence: Synthetic oligonucleotide
  Antisense strand to SEQ ID NO: 1614339
uugcuggacacaagccuca

SEQ ID NO: 1614341 - RNA, 19 nt, Artificial Sequence
  Description of Artificial Sequence: Synthetic oligonucleotide
  Sense strand starting at position 988 of SEQ ID NO: 1560642
cuuugccacuguuguuaua

SEQ ID NO: 1614342 - RNA, 19 nt, Artificial Sequence
  Description of Artificial Sequence: Synthetic oligonucleotide
  Antisense strand to SEQ ID NO: 1614341
uauaacaacaguggcaaag

SEQ ID NO: 1614343 - RNA, 19 nt, Artificial Sequence
  Description of Artificial Sequence: Synthetic oligonucleotide
  Sense strand starting at position 990 of SEQ ID NO: 1560642
uugccacuguuguuauaga

SEQ ID NO: 1614344 - RNA, 19 nt, Artificial Sequence
  Description of Artificial Sequence: Synthetic oligonucleotide
  Antisense strand to SEQ ID NO: 1614343
ucuauaacaacaguggcaa

SEQ ID NO: 1614345 - RNA, 19 nt, Artificial Sequence
  Description of Artificial Sequence: Synthetic oligonucleotide
  Sense strand starting at position 1014 of SEQ ID NO: 1560642
ccgauggucucguuguagu

SEQ ID NO: 1614346 - RNA, 19 nt, Artificial Sequence
  Description of Artificial Sequence: Synthetic oligonucleotide
  Antisense strand to SEQ ID NO: 1614345
acuacaacgagaccaucgg

SEQ ID NO: 1614347 - RNA, 19 nt, Artificial Sequence
  Description of Artificial Sequence: Synthetic oligonucleotide
  Sense strand starting at position 1015 of SEQ ID NO: 1560642
cgauggucucguuguagua

SEQ ID NO: 1614348 - RNA, 19 nt, Artificial Sequence
  Description of Artificial Sequence: Synthetic oligonucleotide
  Antisense strand to SEQ ID NO: 1614347
uacuacaacgagaccaucg

SEQ ID NO: 1614349 - RNA, 19 nt, Artificial Sequence
  Description of Artificial Sequence: Synthetic oligonucleotide
  Sense strand starting at position 1063 of SEQ ID NO: 1560642
acaagagaucagugcaugu

SEQ ID NO: 1614350 - RNA, 19 nt, Artificial Sequence
  Description of Artificial Sequence: Synthetic oligonucleotide
  Antisense strand to SEQ ID NO: 1614349
acaugcacugaucucuugu

SEQ ID NO: 1614351 - RNA, 19 nt, Artificial Sequence
  Description of Artificial Sequence: Synthetic oligonucleotide
  Sense strand starting at position 1142 of SEQ ID NO: 1560642
ggacaagggucucaaauuc

SEQ ID NO: 1614352 - RNA, 19 nt, Artificial Sequence
  Description of Artificial Sequence: Synthetic oligonucleotide
  Antisense strand to SEQ ID NO: 1614351
gaauuugagacccuugucc

SEQ ID NO: 1614353 - RNA, 19 nt, Artificial Sequence
  Description of Artificial Sequence: Synthetic oligonucleotide
  Sense strand starting at position 1246 of SEQ ID NO: 1560642
agcagcuguuucuuaccua

SEQ ID NO: 1614354 - RNA, 19 nt, Artificial Sequence
  Description of Artificial Sequence: Synthetic oligonucleotide
  Antisense strand to SEQ ID NO: 1614353
uagguaagaaacagcugcu

SEQ ID NO: 1614355 - RNA, 19 nt, Artificial Sequence
  Description of Artificial Sequence: Synthetic oligonucleotide
  Sense strand starting at position 1249 of SEQ ID NO: 1560642
agcuguuucuuaccuacua

SEQ ID NO: 1614356 - RNA, 19 nt, Artificial Sequence
  Description of Artificial Sequence: Synthetic oligonucleotide
  Antisense strand to SEQ ID NO: 1614355
uaguagguaagaaacagcu

SEQ ID NO: 1614357 - RNA, 19 nt, Artificial Sequence
  Description of Artificial Sequence: Synthetic oligonucleotide
  Sense strand starting at position 1266 of SEQ ID NO: 1560642
uaauaagaccugugugcaa

SEQ ID NO: 1614358 - RNA, 19 nt, Artificial Sequence
  Description of Artificial Sequence: Synthetic oligonucleotide
  Antisense strand to SEQ ID NO: 1614357
uugcacacaggucuuauua

SEQ ID NO: 1614359 - RNA, 19 nt, Artificial Sequence
  Description of Artificial Sequence: Synthetic oligonucleotide
  Sense strand starting at position 1268 of SEQ ID NO: 1560642
auaagaccugugugcaaga

SEQ ID NO: 1614360 - RNA, 19 nt, Artificial Sequence
  Description of Artificial Sequence: Synthetic oligonucleotide
  Antisense strand to SEQ ID NO: 1614359
ucuugcacacaggucuuau

SEQ ID NO: 1614361 - RNA, 19 nt, Artificial Sequence
  Description of Artificial Sequence: Synthetic oligonucleotide
  Sense strand starting at position 1273 of SEQ ID NO: 1560642
accugugugcaagacauca

SEQ ID NO: 1614362 - RNA, 19 nt, Artificial Sequence
  Description of Artificial Sequence: Synthetic oligonucleotide
  Antisense strand to SEQ ID NO: 1614361
ugaugucuugcacacaggu

SEQ ID NO: 1614363 - RNA, 19 nt, Artificial Sequence
  Description of Artificial Sequence: Synthetic oligonucleotide
  Sense strand starting at position 1511 of SEQ ID NO: 1560642
ugaggucacuugcuagaac

SEQ ID NO: 1614364 - RNA, 19 nt, Artificial Sequence
  Description of Artificial Sequence: Synthetic oligonucleotide
  Antisense strand to SEQ ID NO: 1614363
guucuagcaagugaccuca

SEQ ID NO: 1614365 - RNA, 19 nt, Artificial Sequence
  Description of Artificial Sequence: Synthetic oligonucleotide
  Sense strand starting at position 1589 of SEQ ID NO: 1560642
agaaguuagucggcgggau

SEQ ID NO: 1614366 - RNA, 19 nt, Artificial Sequence
  Description of Artificial Sequence: Synthetic oligonucleotide
  Antisense strand to SEQ ID NO: 1614365
aucccgccgacuaacuucu

SEQ ID NO: 1614367 - RNA, 19 nt, Artificial Sequence
  Description of Artificial Sequence: Synthetic oligonucleotide
  Sense strand starting at position 1590 of SEQ ID NO: 1560642
gaaguuagucggcgggauu

SEQ ID NO: 1614368 - RNA, 19 nt, Artificial Sequence
  Description of Artificial Sequence: Synthetic oligonucleotide
  Antisense strand to SEQ ID NO: 1614367
aaucccgccgacuaacuuc

SEQ ID NO: 1614369 - RNA, 19 nt, Artificial Sequence
  Description of Artificial Sequence: Synthetic oligonucleotide
  Sense strand starting at position 1591 of SEQ ID NO: 1560642
aaguuagucggcgggauuu

SEQ ID NO: 1614370 - RNA, 19 nt, Artificial Sequence
  Description of Artificial Sequence: Synthetic oligonucleotide
  Antisense strand to SEQ ID NO: 1614369
aaaucccgccgacuaacuu

SEQ ID NO: 1614371 - RNA, 19 nt, Artificial Sequence
  Description of Artificial Sequence: Synthetic oligonucleotide
  Sense strand starting at position 1601 of SEQ ID NO: 1560642
gcgggauuugggcgcgagu

SEQ ID NO: 1614372 - RNA, 19 nt, Artificial Sequence
  Description of Artificial Sequence: Synthetic oligonucleotide
  Antisense strand to SEQ ID NO: 1614371
acucgcgcccaaaucccgc

SEQ ID NO: 1614373 - RNA, 19 nt, Artificial Sequence
  Description of Artificial Sequence: Synthetic oligonucleotide
  Sense strand starting at position 2680 of SEQ ID NO: 1560642
cgguuaucgguacuuuguu

SEQ ID NO: 1614374 - RNA, 19 nt, Artificial Sequence
  Description of Artificial Sequence: Synthetic oligonucleotide
  Antisense strand to SEQ ID NO: 1614373
aacaaaguaccgauaaccg

SEQ ID NO: 1614375 - RNA, 19 nt, Artificial Sequence
  Description of Artificial Sequence: Synthetic oligonucleotide
  Sense strand starting at position 2681 of SEQ ID NO: 1560642
gguuaucgguacuuuguua

SEQ ID NO: 1614376 - RNA, 19 nt, Artificial Sequence
  Description of Artificial Sequence: Synthetic oligonucleotide
  Antisense strand to SEQ ID NO: 1614375
uaacaaaguaccgauaacc

SEQ ID NO: 1614377 - RNA, 19 nt, Artificial Sequence
  Description of Artificial Sequence: Synthetic oligonucleotide
  Sense strand starting at position 2685 of SEQ ID NO: 1560642
aucgguacuuuguuauacu

SEQ ID NO: 1614378 - RNA, 19 nt, Artificial Sequence
  Description of Artificial Sequence: Synthetic oligonucleotide
  Antisense strand to SEQ ID NO: 1614377
aguauaacaaaguaccgau

SEQ ID NO: 1614379 - RNA, 19 nt, Artificial Sequence
  Description of Artificial Sequence: Synthetic oligonucleotide
  Sense strand starting at position 2688 of SEQ ID NO: 1560642
gguacuuuguuauacugua

SEQ ID NO: 1614380 - RNA, 19 nt, Artificial Sequence
  Description of Artificial Sequence: Synthetic oligonucleotide
  Antisense strand to SEQ ID NO: 1614379
uacaguauaacaaaguacc

SEQ ID NO: 1614381 - RNA, 19 nt, Artificial Sequence
  Description of Artificial Sequence: Synthetic oligonucleotide
  Sense strand starting at position 2703 of SEQ ID NO: 1560642
uguauuugauuaugcagga

SEQ ID NO: 1614382 - RNA, 19 nt, Artificial Sequence
  Description of Artificial Sequence: Synthetic oligonucleotide
  Antisense strand to SEQ ID NO: 1614381
uccugcauaaucaaauaca

SEQ ID NO: 1614383 - RNA, 19 nt, Artificial Sequence
  Description of Artificial Sequence: Synthetic oligonucleotide
  Sense strand starting at position 2815 of SEQ ID NO: 1560642
caggguguuugaugaugca

SEQ ID NO: 1614384 - RNA, 19 nt, Artificial Sequence
  Description of Artificial Sequence: Synthetic oligonucleotide
  Antisense strand to SEQ ID NO: 1614383
ugcaucaucaaacacccug

SEQ ID NO: 1614385 - RNA, 19 nt, Artificial Sequence
  Description of Artificial Sequence: Synthetic oligonucleotide
  Sense strand starting at position 2818 of SEQ ID NO: 1560642
gguguuugaugaugcaaga

SEQ ID NO: 1614386 - RNA, 19 nt, Artificial Sequence
  Description of Artificial Sequence: Synthetic oligonucleotide
  Antisense strand to SEQ ID NO: 1614385
ucuugcaucaucaaacacc

SEQ ID NO: 1614387 - RNA, 19 nt, Artificial Sequence
  Description of Artificial Sequence: Synthetic oligonucleotide
  Sense strand starting at position 3447 of SEQ ID NO: 1560642
cugcacugacccugaguau

SEQ ID NO: 1614388 - RNA, 19 nt, Artificial Sequence
  Description of Artificial Sequence: Synthetic oligonucleotide
  Antisense strand to SEQ ID NO: 1614387
auacucagggucagugcag

SEQ ID NO: 1614389 - RNA, 19 nt, Artificial Sequence
  Description of Artificial Sequence: Synthetic oligonucleotide
  Sense strand starting at position 3448 of SEQ ID NO: 1560642
ugcacugacccugaguauu

SEQ ID NO: 1614390 - RNA, 19 nt, Artificial Sequence
  Description of Artificial Sequence: Synthetic oligonucleotide
  Antisense strand to SEQ ID NO: 1614389
aauacucagggucagugca

SEQ ID NO: 1614391 - RNA, 19 nt, Artificial Sequence
  Description of Artificial Sequence: Synthetic oligonucleotide
  Sense strand starting at position 3450 of SEQ ID NO: 1560642
cacugacccugaguauuga

SEQ ID NO: 1614392 - RNA, 19 nt, Artificial Sequence
  Description of Artificial Sequence: Synthetic oligonucleotide
  Antisense strand to SEQ ID NO: 1614391
ucaauacucagggucagug

SEQ ID NO: 1614393 - RNA, 19 nt, Artificial Sequence
  Description of Artificial Sequence: Synthetic oligonucleotide
  Sense strand starting at position 3460 of SEQ ID NO: 1560642
gaguauugacccugaguga

SEQ ID NO: 1614394 - RNA, 19 nt, Artificial Sequence
  Description of Artificial Sequence: Synthetic oligonucleotide
  Antisense strand to SEQ ID NO: 1614393
ucacucagggucaauacuc

SEQ ID NO: 1614395 - RNA, 19 nt, Artificial Sequence
  Description of Artificial Sequence: Synthetic oligonucleotide
  Sense strand starting at position 3461 of SEQ ID NO: 1560642
aguauugacccugagugac

SEQ ID NO: 1614396 - RNA, 19 nt, Artificial Sequence
  Description of Artificial Sequence: Synthetic oligonucleotide
  Antisense strand to SEQ ID NO: 1614395
gucacucagggucaauacu

SEQ ID NO: 1614397 - RNA, 19 nt, Artificial Sequence
  Description of Artificial Sequence: Synthetic oligonucleotide
  Sense strand starting at position 3496 of SEQ ID NO: 1560642
cccugaugcuuggcaguga

SEQ ID NO: 1614398 - RNA, 19 nt, Artificial Sequence
  Description of Artificial Sequence: Synthetic oligonucleotide
  Antisense strand to SEQ ID NO: 1614397
ucacugccaagcaucaggg

SEQ ID NO: 1614399 - RNA, 19 nt, Artificial Sequence
  Description of Artificial Sequence: Synthetic oligonucleotide
  Sense strand starting at position 3675 of SEQ ID NO: 1560642
gauauauggguccgucuuc

SEQ ID NO: 1614400 - RNA, 19 nt, Artificial Sequence
  Description of Artificial Sequence: Synthetic oligonucleotide
  Antisense strand to SEQ ID NO: 1614399
gaagacggacccauauauc

SEQ ID NO: 1614401 - RNA, 19 nt, Artificial Sequence
  Description of Artificial Sequence: Synthetic oligonucleotide
  Sense strand starting at position 3700 of SEQ ID NO: 1560642
ugggccucuuccuuauuua

SEQ ID NO: 1614402 - RNA, 19 nt, Artificial Sequence
  Description of Artificial Sequence: Synthetic oligonucleotide
  Antisense strand to SEQ ID NO: 1614401
uaaauaaggaagaggccca

SEQ ID NO: 1614403 - RNA, 19 nt, Artificial Sequence
  Description of Artificial Sequence: Synthetic oligonucleotide
  Sense strand starting at position 3734 of SEQ ID NO: 1560642
cagagaugguccucggcuu

SEQ ID NO: 1614404 - RNA, 19 nt, Artificial Sequence
  Description of Artificial Sequence: Synthetic oligonucleotide
  Antisense strand to SEQ ID NO: 1614403
aagccgaggaccaucucug

SEQ ID NO: 1614405 - RNA, 19 nt, Artificial Sequence
  Description of Artificial Sequence: Synthetic oligonucleotide
  Sense strand starting at position 3800 of SEQ ID NO: 1560642
cuguccaauuucgagagua

SEQ ID NO: 1614406 - RNA, 19 nt, Artificial Sequence
  Description of Artificial Sequence: Synthetic oligonucleotide
  Antisense strand to SEQ ID NO: 1614405
uacucucgaaauuggacag

SEQ ID NO: 1614407 - RNA, 19 nt, Artificial Sequence
  Description of Artificial Sequence: Synthetic oligonucleotide
  Sense strand starting at position 3823 of SEQ ID NO: 1560642
ggcugucuccuggguaauc

SEQ ID NO: 1614408 - RNA, 19 nt, Artificial Sequence
  Description of Artificial Sequence: Synthetic oligonucleotide
  Antisense strand to SEQ ID NO: 1614407
gauuacccaggagacagcc

SEQ ID NO: 1614409 - RNA, 19 nt, Artificial Sequence
  Description of Artificial Sequence: Synthetic oligonucleotide
  Sense strand starting at position 3824 of SEQ ID NO: 1560642
gcugucuccuggguaaucu

SEQ ID NO: 1614410 - RNA, 19 nt, Artificial Sequence
  Description of Artificial Sequence: Synthetic oligonucleotide
  Antisense strand to SEQ ID NO: 1614409
agauuacccaggagacagc

SEQ ID NO: 1614411 - RNA, 19 nt, Artificial Sequence
  Description of Artificial Sequence: Synthetic oligonucleotide
  Sense strand starting at position 3828 of SEQ ID NO: 1560642
ucuccuggguaaucucaaa

SEQ ID NO: 1614412 - RNA, 19 nt, Artificial Sequence
  Description of Artificial Sequence: Synthetic oligonucleotide
  Antisense strand to SEQ ID NO: 1614411
uuugagauuacccaggaga

SEQ ID NO: 1614413 - RNA, 19 nt, Artificial Sequence
  Description of Artificial Sequence: Synthetic oligonucleotide
  Sense strand starting at position 2 of SEQ ID NO: 1560643
uaugauaaugaagguugua

SEQ ID NO: 1614414 - RNA, 19 nt, Artificial Sequence
  Description of Artificial Sequence: Synthetic oligonucleotide
  Antisense strand to SEQ ID NO: 1614413
uacaaccuucauuaucaua

SEQ ID NO: 1614415 - RNA, 19 nt, Artificial Sequence
  Description of Artificial Sequence: Synthetic oligonucleotide
  Sense strand starting at position 5 of SEQ ID NO: 1560643
gauaaugaagguuguaauc

SEQ ID NO: 1614416 - RNA, 19 nt, Artificial Sequence
  Description of Artificial Sequence: Synthetic oligonucleotide
  Antisense strand to SEQ ID NO: 1614415
gauuacaaccuucauuauc

SEQ ID NO: 1614417 - RNA, 19 nt, Artificial Sequence
  Description of Artificial Sequence: Synthetic oligonucleotide
  Sense strand starting at position 7 of SEQ ID NO: 1560643
uaaugaagguuguaauccu

SEQ ID NO: 1614418 - RNA, 19 nt, Artificial Sequence
  Description of Artificial Sequence: Synthetic oligonucleotide
  Antisense strand to SEQ ID NO: 1614417
aggauuacaaccuucauua

SEQ ID NO: 1614419 - RNA, 19 nt, Artificial Sequence
  Description of Artificial Sequence: Synthetic oligonucleotide
  Sense strand starting at position 443 of SEQ ID NO: 1560643
gugacucccuaccaggaua

SEQ ID NO: 1614420 - RNA, 19 nt, Artificial Sequence
  Description of Artificial Sequence: Synthetic oligonucleotide
  Antisense strand to SEQ ID NO: 1614419
uauccugguagggagucac

SEQ ID NO: 1614421 - RNA, 19 nt, Artificial Sequence
  Description of Artificial Sequence: Synthetic oligonucleotide
  Sense strand starting at position 672 of SEQ ID NO: 1560643
agcucugaguccgguggaa

SEQ ID NO: 1614422 - RNA, 19 nt, Artificial Sequence
  Description of Artificial Sequence: Synthetic oligonucleotide
  Antisense strand to SEQ ID NO: 1614421
uuccaccggacucagagcu

SEQ ID NO: 1614423 - RNA, 19 nt, Artificial Sequence
  Description of Artificial Sequence: Synthetic oligonucleotide
  Sense strand starting at position 806 of SEQ ID NO: 1560643
ugagguguuggccagggau

SEQ ID NO: 1614424 - RNA, 19 nt, Artificial Sequence
  Description of Artificial Sequence: Synthetic oligonucleotide
  Antisense strand to SEQ ID NO: 1614423
aucccuggccaacaccuca

SEQ ID NO: 1614425 - RNA, 19 nt, Artificial Sequence
  Description of Artificial Sequence: Synthetic oligonucleotide
  Sense strand starting at position 1075 of SEQ ID NO: 1560643
gggagcuguccucaaagca

SEQ ID NO: 1614426 - RNA, 19 nt, Artificial Sequence
  Description of Artificial Sequence: Synthetic oligonucleotide
  Antisense strand to SEQ ID NO: 1614425
ugcuuugaggacagcuccc

SEQ ID NO: 1614427 - RNA, 19 nt, Artificial Sequence
  Description of Artificial Sequence: Synthetic oligonucleotide
  Sense strand starting at position 1082 of SEQ ID NO: 1560643
guccucaaagcacgaauaa

SEQ ID NO: 1614428 - RNA, 19 nt, Artificial Sequence
  Description of Artificial Sequence: Synthetic oligonucleotide
  Antisense strand to SEQ ID NO: 1614427
uuauucgugcuuugaggac

SEQ ID NO: 1614429 - RNA, 19 nt, Artificial Sequence
  Description of Artificial Sequence: Synthetic oligonucleotide
  Sense strand starting at position 1083 of SEQ ID NO: 1560643
uccucaaagcacgaauaau

SEQ ID NO: 1614430 - RNA, 19 nt, Artificial Sequence
  Description of Artificial Sequence: Synthetic oligonucleotide
  Antisense strand to SEQ ID NO: 1614429
auuauucgugcuuugagga

SEQ ID NO: 1614431 - RNA, 19 nt, Artificial Sequence
  Description of Artificial Sequence: Synthetic oligonucleotide
  Sense strand starting at position 1092 of SEQ ID NO: 1560643
cacgaauaauccgagugga

SEQ ID NO: 1614432 - RNA, 19 nt, Artificial Sequence
  Description of Artificial Sequence: Synthetic oligonucleotide
  Antisense strand to SEQ ID NO: 1614431
uccacucggauuauucgug

SEQ ID NO: 1614433 - RNA, 19 nt, Artificial Sequence
  Description of Artificial Sequence: Synthetic oligonucleotide
  Sense strand starting at position 1251 of SEQ ID NO: 1560643
gccacugccucccagagaa

SEQ ID NO: 1614434 - RNA, 19 nt, Artificial Sequence
  Description of Artificial Sequence: Synthetic oligonucleotide
  Antisense strand to SEQ ID NO: 1614433
uucucugggaggcaguggc

SEQ ID NO: 1614435 - RNA, 19 nt, Artificial Sequence
  Description of Artificial Sequence: Synthetic oligonucleotide
  Sense strand starting at position 2023 of SEQ ID NO: 1560643
gcggauuacacggauccaa

SEQ ID NO: 1614436 - RNA, 19 nt, Artificial Sequence
  Description of Artificial Sequence: Synthetic oligonucleotide
  Antisense strand to SEQ ID NO: 1614435
uuggauccguguaauccgc

SEQ ID NO: 1614437 - RNA, 19 nt, Artificial Sequence
  Description of Artificial Sequence: Synthetic oligonucleotide
  Sense strand starting at position 2988 of SEQ ID NO: 1560643
cgaguuggauuagauaaag

SEQ ID NO: 1614438 - RNA, 19 nt, Artificial Sequence
  Description of Artificial Sequence: Synthetic oligonucleotide
  Antisense strand to SEQ ID NO: 1614437
cuuuaucuaauccaacucg

SEQ ID NO: 1614439 - RNA, 19 nt, Artificial Sequence
  Description of Artificial Sequence: Synthetic oligonucleotide
  Sense strand starting at position 3087 of SEQ ID NO: 1560643
gccggauucuuucucggga

SEQ ID NO: 1614440 - RNA, 19 nt, Artificial Sequence
  Description of Artificial Sequence: Synthetic oligonucleotide
  Antisense strand to SEQ ID NO: 1614439
ucccgagaaagaauccggc

SEQ ID NO: 1614441 - RNA, 19 nt, Artificial Sequence
  Description of Artificial Sequence: Synthetic oligonucleotide
  Sense strand starting at position 3089 of SEQ ID NO: 1560643
cggauucuuucucgggaga

SEQ ID NO: 1614442 - RNA, 19 nt, Artificial Sequence
  Description of Artificial Sequence: Synthetic oligonucleotide
  Antisense strand to SEQ ID NO: 1614441
ucucccgagaaagaauccg

SEQ ID NO: 1614443 - RNA, 19 nt, Artificial Sequence
  Description of Artificial Sequence: Synthetic oligonucleotide
  Sense strand starting at position 3090 of SEQ ID NO: 1560643
ggauucuuucucgggagac

SEQ ID NO: 1614444 - RNA, 19 nt, Artificial Sequence
  Description of Artificial Sequence: Synthetic oligonucleotide
  Antisense strand to SEQ ID NO: 1614443
gucucccgagaaagaaucc

SEQ ID NO: 1614445 - RNA, 19 nt, Artificial Sequence
  Description of Artificial Sequence: Synthetic oligonucleotide
  Sense strand starting at position 3091 of SEQ ID NO: 1560643
gauucuuucucgggagacg

SEQ ID NO: 1614446 - RNA, 19 nt, Artificial Sequence
  Description of Artificial Sequence: Synthetic oligonucleotide
  Antisense strand to SEQ ID NO: 1614445
cgucucccgagaaagaauc

SEQ ID NO: 1614447 - RNA, 19 nt, Artificial Sequence
  Description of Artificial Sequence: Synthetic oligonucleotide
  Sense strand starting at position 3109 of SEQ ID NO: 1560643
ggaguaaugcgucaggccu

SEQ ID NO: 1614448 - RNA, 19 nt, Artificial Sequence
  Description of Artificial Sequence: Synthetic oligonucleotide
  Antisense strand to SEQ ID NO: 1614447
aggccugacgcauuacucc

SEQ ID NO: 1614449 - RNA, 19 nt, Artificial Sequence
  Description of Artificial Sequence: Synthetic oligonucleotide
  Sense strand starting at position 3111 of SEQ ID NO: 1560643
aguaaugcgucaggccuaa

SEQ ID NO: 1614450 - RNA, 19 nt, Artificial Sequence
  Description of Artificial Sequence: Synthetic oligonucleotide
  Antisense strand to SEQ ID NO: 1614449
uuaggccugacgcauuacu

SEQ ID NO: 1614451 - RNA, 19 nt, Artificial Sequence
  Description of Artificial Sequence: Synthetic oligonucleotide
  Sense strand starting at position 3547 of SEQ ID NO: 1560643
ggagguuuguaccuguaaa

SEQ ID NO: 1614452 - RNA, 19 nt, Artificial Sequence
  Description of Artificial Sequence: Synthetic oligonucleotide
  Antisense strand to SEQ ID NO: 1614451
uuuacagguacaaaccucc

SEQ ID NO: 1614453 - RNA, 19 nt, Artificial Sequence
  Description of Artificial Sequence: Synthetic oligonucleotide
  Sense strand starting at position 3679 of SEQ ID NO: 1560643
gcugguggacucuaagaag

SEQ ID NO: 1614454 - RNA, 19 nt, Artificial Sequence
  Description of Artificial Sequence: Synthetic oligonucleotide
  Antisense strand to SEQ ID NO: 1614453
cuucuuagaguccaccagc

SEQ ID NO: 1614455 - RNA, 19 nt, Artificial Sequence
  Description of Artificial Sequence: Synthetic oligonucleotide
  Sense strand starting at position 3682 of SEQ ID NO: 1560643
gguggacucuaagaaguag

SEQ ID NO: 1614456 - RNA, 19 nt, Artificial Sequence
  Description of Artificial Sequence: Synthetic oligonucleotide
  Antisense strand to SEQ ID NO: 1614455
cuacuucuuagaguccacc

SEQ ID NO: 1614457 - RNA, 19 nt, Artificial Sequence
  Description of Artificial Sequence: Synthetic oligonucleotide
  Sense strand starting at position 3822 of SEQ ID NO: 1560643
cggcuuggcucucuggaga

SEQ ID NO: 1614458 - RNA, 19 nt, Artificial Sequence
  Description of Artificial Sequence: Synthetic oligonucleotide
  Antisense strand to SEQ ID NO: 1614457
ucuccagagagccaagccg

SEQ ID NO: 1614459 - RNA, 19 nt, Artificial Sequence
  Description of Artificial Sequence: Synthetic oligonucleotide
  Sense strand starting at position 3843 of SEQ ID NO: 1560643
gaaaguuaugacugccaag

SEQ ID NO: 1614460 - RNA, 19 nt, Artificial Sequence
  Description of Artificial Sequence: Synthetic oligonucleotide
  Antisense strand to SEQ ID NO: 1614459
cuuggcagucauaacuuuc

SEQ ID NO: 1614461 - RNA, 19 nt, Artificial Sequence
  Description of Artificial Sequence: Synthetic oligonucleotide
  Sense strand starting at position 3962 of SEQ ID NO: 1560643
ugggaagaauccuggagug

SEQ ID NO: 1614462 - RNA, 19 nt, Artificial Sequence
  Description of Artificial Sequence: Synthetic oligonucleotide
  Antisense strand to SEQ ID NO: 1614461
cacuccaggauucuuccca

SEQ ID NO: 1614463 - RNA, 19 nt, Artificial Sequence
  Description of Artificial Sequence: Synthetic oligonucleotide
  Sense strand starting at position 224 of SEQ ID NO: 1560644
gugucugguugggcugaua

SEQ ID NO: 1614464 - RNA, 19 nt, Artificial Sequence
  Description of Artificial Sequence: Synthetic oligonucleotide
  Antisense strand to SEQ ID NO: 1614463
uaucagcccaaccagacac

SEQ ID NO: 1614465 - RNA, 19 nt, Artificial Sequence
  Description of Artificial Sequence: Synthetic oligonucleotide
  Sense strand starting at position 352 of SEQ ID NO: 1560644
cgcuuuagggcucaacaca

SEQ ID NO: 1614466 - RNA, 19 nt, Artificial Sequence
  Description of Artificial Sequence: Synthetic oligonucleotide
  Antisense strand to SEQ ID NO: 1614465
uguguugagcccuaaagcg

SEQ ID NO: 1614467 - RNA, 19 nt, Artificial Sequence
  Description of Artificial Sequence: Synthetic oligonucleotide
  Sense strand starting at position 580 of SEQ ID NO: 1560644
cucacucugcagugugaua

SEQ ID NO: 1614468 - RNA, 19 nt, Artificial Sequence
  Description of Artificial Sequence: Synthetic oligonucleotide
  Antisense strand to SEQ ID NO: 1614467
uaucacacugcagagugag

SEQ ID NO: 1614469 - RNA, 19 nt, Artificial Sequence
  Description of Artificial Sequence: Synthetic oligonucleotide
  Sense strand starting at position 795 of SEQ ID NO: 1560644
gccacuuugcaguaaacaa

SEQ ID NO: 1614470 - RNA, 19 nt, Artificial Sequence
  Description of Artificial Sequence: Synthetic oligonucleotide
  Antisense strand to SEQ ID NO: 1614469
uuguuuacugcaaaguggc

SEQ ID NO: 1614471 - RNA, 19 nt, Artificial Sequence
  Description of Artificial Sequence: Synthetic oligonucleotide
  Sense strand starting at position 882 of SEQ ID NO: 1560644
gggcucauagccugucaga

SEQ ID NO: 1614472 - RNA, 19 nt, Artificial Sequence
  Description of Artificial Sequence: Synthetic oligonucleotide
  Antisense strand to SEQ ID NO: 1614471
ucugacaggcuaugagccc

SEQ ID NO: 1614473 - RNA, 19 nt, Artificial Sequence
  Description of Artificial Sequence: Synthetic oligonucleotide
  Sense strand starting at position 1473 of SEQ ID NO: 1560644
gcacaaugacagugacaca

SEQ ID NO: 1614474 - RNA, 19 nt, Artificial Sequence
  Description of Artificial Sequence: Synthetic oligonucleotide
  Antisense strand to SEQ ID NO: 1614473
ugugucacugucauugugc

SEQ ID NO: 1614475 - RNA, 19 nt, Artificial Sequence
  Description of Artificial Sequence: Synthetic oligonucleotide
  Sense strand starting at position 1985 of SEQ ID NO: 1560644
gggcgucucauuugcauag

SEQ ID NO: 1614476 - RNA, 19 nt, Artificial Sequence
  Description of Artificial Sequence: Synthetic oligonucleotide
  Antisense strand to SEQ ID NO: 1614475
cuaugcaaaugagacgccc

SEQ ID NO: 1614477 - RNA, 19 nt, Artificial Sequence
  Description of Artificial Sequence: Synthetic oligonucleotide
  Sense strand starting at position 2040 of SEQ ID NO: 1560644
ggcguguuagcaucgauug

SEQ ID NO: 1614478 - RNA, 19 nt, Artificial Sequence
  Description of Artificial Sequence: Synthetic oligonucleotide
  Antisense strand to SEQ ID NO: 1614477
caaucgaugcuaacacgcc

SEQ ID NO: 1614479 - RNA, 19 nt, Artificial Sequence
  Description of Artificial Sequence: Synthetic oligonucleotide
  Sense strand starting at position 2041 of SEQ ID NO: 1560644
gcguguuagcaucgauugu

SEQ ID NO: 1614480 - RNA, 19 nt, Artificial Sequence
  Description of Artificial Sequence: Synthetic oligonucleotide
  Antisense strand to SEQ ID NO: 1614479
acaaucgaugcuaacacgc

SEQ ID NO: 1614481 - RNA, 19 nt, Artificial Sequence
  Description of Artificial Sequence: Synthetic oligonucleotide
  Sense strand starting at position 2042 of SEQ ID NO: 1560644
cguguuagcaucgauugua

SEQ ID NO: 1614482 - RNA, 19 nt, Artificial Sequence
  Description of Artificial Sequence: Synthetic oligonucleotide
  Antisense strand to SEQ ID NO: 1614481
uacaaucgaugcuaacacg

SEQ ID NO: 1614483 - RNA, 19 nt, Artificial Sequence
  Description of Artificial Sequence: Synthetic oligonucleotide
  Sense strand starting at position 2045 of SEQ ID NO: 1560644
guuagcaucgauuguagga

SEQ ID NO: 1614484 - RNA, 19 nt, Artificial Sequence
  Description of Artificial Sequence: Synthetic oligonucleotide
  Antisense strand to SEQ ID NO: 1614483
uccuacaaucgaugcuaac

SEQ ID NO: 1614485 - RNA, 19 nt, Artificial Sequence
  Description of Artificial Sequence: Synthetic oligonucleotide
  Sense strand starting at position 2050 of SEQ ID NO: 1560644
caucgauuguaggaaggaa

SEQ ID NO: 1614486 - RNA, 19 nt, Artificial Sequence
  Description of Artificial Sequence: Synthetic oligonucleotide
  Antisense strand to SEQ ID NO: 1614485
uuccuuccuacaaucgaug

SEQ ID NO: 1614487 - RNA, 19 nt, Artificial Sequence
  Description of Artificial Sequence: Synthetic oligonucleotide
  Sense strand starting at position 2271 of SEQ ID NO: 1560644
cuccuugccuugucauaua

SEQ ID NO: 1614488 - RNA, 19 nt, Artificial Sequence
  Description of Artificial Sequence: Synthetic oligonucleotide
  Antisense strand to SEQ ID NO: 1614487
uauaugacaaggcaaggag

SEQ ID NO: 1614489 - RNA, 19 nt, Artificial Sequence
  Description of Artificial Sequence: Synthetic oligonucleotide
  Sense strand starting at position 2274 of SEQ ID NO: 1560644
cuugccuugucauauauua

SEQ ID NO: 1614490 - RNA, 19 nt, Artificial Sequence
  Description of Artificial Sequence: Synthetic oligonucleotide
  Antisense strand to SEQ ID NO: 1614489
uaauauaugacaaggcaag

SEQ ID NO: 1614491 - RNA, 19 nt, Artificial Sequence
  Description of Artificial Sequence: Synthetic oligonucleotide
  Sense strand starting at position 2815 of SEQ ID NO: 1560644
agggacagguucccugaau

SEQ ID NO: 1614492 - RNA, 19 nt, Artificial Sequence
  Description of Artificial Sequence: Synthetic oligonucleotide
  Antisense strand to SEQ ID NO: 1614491
auucagggaaccugucccu

SEQ ID NO: 1614493 - RNA, 19 nt, Artificial Sequence
  Description of Artificial Sequence: Synthetic oligonucleotide
  Sense strand starting at position 2816 of SEQ ID NO: 1560644
gggacagguucccugaaug

SEQ ID NO: 1614494 - RNA, 19 nt, Artificial Sequence
  Description of Artificial Sequence: Synthetic oligonucleotide
  Antisense strand to SEQ ID NO: 1614493
cauucagggaaccuguccc

SEQ ID NO: 1614495 - RNA, 19 nt, Artificial Sequence
  Description of Artificial Sequence: Synthetic oligonucleotide
  Sense strand starting at position 2826 of SEQ ID NO: 1560644
cccugaaugugacccucaa

SEQ ID NO: 1614496 - RNA, 19 nt, Artificial Sequence
  Description of Artificial Sequence: Synthetic oligonucleotide
  Antisense strand to SEQ ID NO: 1614495
uugagggucacauucaggg

SEQ ID NO: 1614497 - RNA, 19 nt, Artificial Sequence
  Description of Artificial Sequence: Synthetic oligonucleotide
  Sense strand starting at position 2879 of SEQ ID NO: 1560644
aguauaccucauugauacu

SEQ ID NO: 1614498 - RNA, 19 nt, Artificial Sequence
  Description of Artificial Sequence: Synthetic oligonucleotide
  Antisense strand to SEQ ID NO: 1614497
aguaucaaugagguauacu

SEQ ID NO: 1614499 - RNA, 19 nt, Artificial Sequence
  Description of Artificial Sequence: Synthetic oligonucleotide
  Sense strand starting at position 2918 of SEQ ID NO: 1560644
ccuugaaugugauccagug

SEQ ID NO: 1614500 - RNA, 19 nt, Artificial Sequence
  Description of Artificial Sequence: Synthetic oligonucleotide
  Antisense strand to SEQ ID NO: 1614499
cacuggaucacauucaagg

SEQ ID NO: 1614501 - RNA, 19 nt, Artificial Sequence
  Description of Artificial Sequence: Synthetic oligonucleotide
  Sense strand starting at position 2928 of SEQ ID NO: 1560644
gauccagugugacaccaaa

SEQ ID NO: 1614502 - RNA, 19 nt, Artificial Sequence
  Description of Artificial Sequence: Synthetic oligonucleotide
  Antisense strand to SEQ ID NO: 1614501
uuuggugucacacuggauc

SEQ ID NO: 1614503 - RNA, 19 nt, Artificial Sequence
  Description of Artificial Sequence: Synthetic oligonucleotide
  Sense strand starting at position 3297 of SEQ ID NO: 1560644
ggacucauauaagauccaa

SEQ ID NO: 1614504 - RNA, 19 nt, Artificial Sequence
  Description of Artificial Sequence: Synthetic oligonucleotide
  Antisense strand to SEQ ID NO: 1614503
uuggaucuuauaugagucc

SEQ ID NO: 1614505 - RNA, 19 nt, Artificial Sequence
  Description of Artificial Sequence: Synthetic oligonucleotide
  Sense strand starting at position 3320 of SEQ ID NO: 1560644
cucugaaugugaccaugaa

SEQ ID NO: 1614506 - RNA, 19 nt, Artificial Sequence
  Description of Artificial Sequence: Synthetic oligonucleotide
  Antisense strand to SEQ ID NO: 1614505
uucauggucacauucagag

SEQ ID NO: 1614507 - RNA, 19 nt, Artificial Sequence
  Description of Artificial Sequence: Synthetic oligonucleotide
  Sense strand starting at position 3334 of SEQ ID NO: 1560644
augaaugacuccuggauga

SEQ ID NO: 1614508 - RNA, 19 nt, Artificial Sequence
  Description of Artificial Sequence: Synthetic oligonucleotide
  Antisense strand to SEQ ID NO: 1614507
ucauccaggagucauucau

SEQ ID NO: 1614509 - RNA, 19 nt, Artificial Sequence
  Description of Artificial Sequence: Synthetic oligonucleotide
  Sense strand starting at position 3357 of SEQ ID NO: 1560644
uccagugacuccuuaaugu

SEQ ID NO: 1614510 - RNA, 19 nt, Artificial Sequence
  Description of Artificial Sequence: Synthetic oligonucleotide
  Antisense strand to SEQ ID NO: 1614509
acauuaaggagucacugga

SEQ ID NO: 1614511 - RNA, 19 nt, Artificial Sequence
  Description of Artificial Sequence: Synthetic oligonucleotide
  Sense strand starting at position 3420 of SEQ ID NO: 1560644
agaugugacucccaaauag

SEQ ID NO: 1614512 - RNA, 19 nt, Artificial Sequence
  Description of Artificial Sequence: Synthetic oligonucleotide
  Antisense strand to SEQ ID NO: 1614511
cuauuugggagucacaucu

SEQ ID NO: 1614513 - RNA, 19 nt, Artificial Sequence
  Description of Artificial Sequence: Synthetic oligonucleotide
  Sense strand starting at position 3805 of SEQ ID NO: 1560644
ugggcaucaccauauauca

SEQ ID NO: 1614514 - RNA, 19 nt, Artificial Sequence
  Description of Artificial Sequence: Synthetic oligonucleotide
  Antisense strand to SEQ ID NO: 1614513
ugauauauggugaugccca

SEQ ID NO: 1614515 - RNA, 19 nt, Artificial Sequence
  Description of Artificial Sequence: Synthetic oligonucleotide
  Sense strand starting at position 1 of SEQ ID NO: 1560645
aucucaggcuccuauguaa

SEQ ID NO: 1614516 - RNA, 19 nt, Artificial Sequence
  Description of Artificial Sequence: Synthetic oligonucleotide
  Antisense strand to SEQ ID NO: 1614515
uuacauaggagccugagau

SEQ ID NO: 1614517 - RNA, 19 nt, Artificial Sequence
  Description of Artificial Sequence: Synthetic oligonucleotide
  Sense strand starting at position 12 of SEQ ID NO: 1560645
cuauguaacugagaccuca

SEQ ID NO: 1614518 - RNA, 19 nt, Artificial Sequence
  Description of Artificial Sequence: Synthetic oligonucleotide
  Antisense strand to SEQ ID NO: 1614517
ugaggucucaguuacauag

SEQ ID NO: 1614519 - RNA, 19 nt, Artificial Sequence
  Description of Artificial Sequence: Synthetic oligonucleotide
  Sense strand starting at position 355 of SEQ ID NO: 1560645
cuaaguagcugagaauaaa

SEQ ID NO: 1614520 - RNA, 19 nt, Artificial Sequence
  Description of Artificial Sequence: Synthetic oligonucleotide
  Antisense strand to SEQ ID NO: 1614519
uuuauucucagcuacuuag

SEQ ID NO: 1614521 - RNA, 19 nt, Artificial Sequence
  Description of Artificial Sequence: Synthetic oligonucleotide
  Sense strand starting at position 1007 of SEQ ID NO: 1560645
ggguuccauuuauggucau

SEQ ID NO: 1614522 - RNA, 19 nt, Artificial Sequence
  Description of Artificial Sequence: Synthetic oligonucleotide
  Antisense strand to SEQ ID NO: 1614521
augaccauaaauggaaccc

SEQ ID NO: 1614523 - RNA, 19 nt, Artificial Sequence
  Description of Artificial Sequence: Synthetic oligonucleotide
  Sense strand starting at position 1008 of SEQ ID NO: 1560645
gguuccauuuauggucaua

SEQ ID NO: 1614524 - RNA, 19 nt, Artificial Sequence
  Description of Artificial Sequence: Synthetic oligonucleotide
  Antisense strand to SEQ ID NO: 1614523
uaugaccauaaauggaacc

SEQ ID NO: 1614525 - RNA, 19 nt, Artificial Sequence
  Description of Artificial Sequence: Synthetic oligonucleotide
  Sense strand starting at position 1042 of SEQ ID NO: 1560645
gccuaacacguuuccguau

SEQ ID NO: 1614526 - RNA, 19 nt, Artificial Sequence
  Description of Artificial Sequence: Synthetic oligonucleotide
  Antisense strand to SEQ ID NO: 1614525
auacggaaacguguuaggc

SEQ ID NO: 1614527 - RNA, 19 nt, Artificial Sequence
  Description of Artificial Sequence: Synthetic oligonucleotide
  Sense strand starting at position 1048 of SEQ ID NO: 1560645
cacguuuccguauucugua

SEQ ID NO: 1614528 - RNA, 19 nt, Artificial Sequence
  Description of Artificial Sequence: Synthetic oligonucleotide
  Antisense strand to SEQ ID NO: 1614527
uacagaauacggaaacgug

SEQ ID NO: 1614529 - RNA, 19 nt, Artificial Sequence
  Description of Artificial Sequence: Synthetic oligonucleotide
  Sense strand starting at position 1051 of SEQ ID NO: 1560645
guuuccguauucuguagau

SEQ ID NO: 1614530 - RNA, 19 nt, Artificial Sequence
  Description of Artificial Sequence: Synthetic oligonucleotide
  Antisense strand to SEQ ID NO: 1614529
aucuacagaauacggaaac

SEQ ID NO: 1614531 - RNA, 19 nt, Artificial Sequence
  Description of Artificial Sequence: Synthetic oligonucleotide
  Sense strand starting at position 1053 of SEQ ID NO: 1560645
uuccguauucuguagauau

SEQ ID NO: 1614532 - RNA, 19 nt, Artificial Sequence
  Description of Artificial Sequence: Synthetic oligonucleotide
  Antisense strand to SEQ ID NO: 1614531
auaucuacagaauacggaa

SEQ ID NO: 1614533 - RNA, 19 nt, Artificial Sequence
  Description of Artificial Sequence: Synthetic oligonucleotide
  Sense strand starting at position 1055 of SEQ ID NO: 1560645
ccguauucuguagauauua

SEQ ID NO: 1614534 - RNA, 19 nt, Artificial Sequence
  Description of Artificial Sequence: Synthetic oligonucleotide
  Antisense strand to SEQ ID NO: 1614533
uaauaucuacagaauacgg

SEQ ID NO: 1614535 - RNA, 19 nt, Artificial Sequence
  Description of Artificial Sequence: Synthetic oligonucleotide
  Sense strand starting at position 3546 of SEQ ID NO: 1560645
auaccuuaguuugcucaua

SEQ ID NO: 1614536 - RNA, 19 nt, Artificial Sequence
  Description of Artificial Sequence: Synthetic oligonucleotide
  Antisense strand to SEQ ID NO: 1614535
uaugagcaaacuaagguau

SEQ ID NO: 1614537 - RNA, 19 nt, Artificial Sequence
  Description of Artificial Sequence: Synthetic oligonucleotide
  Sense strand starting at position 3589 of SEQ ID NO: 1560645
agggucgccugccauaaau

SEQ ID NO: 1614538 - RNA, 19 nt, Artificial Sequence
  Description of Artificial Sequence: Synthetic oligonucleotide
  Antisense strand to SEQ ID NO: 1614537
auuuauggcaggcgacccu

SEQ ID NO: 1614539 - RNA, 19 nt, Artificial Sequence
  Description of Artificial Sequence: Synthetic oligonucleotide
  Sense strand starting at position 3598 of SEQ ID NO: 1560645
ugccauaaaugcggaaaca

SEQ ID NO: 1614540 - RNA, 19 nt, Artificial Sequence
  Description of Artificial Sequence: Synthetic oligonucleotide
  Antisense strand to SEQ ID NO: 1614539
uguuuccgcauuuauggca

SEQ ID NO: 1614541 - RNA, 19 nt, Artificial Sequence
  Description of Artificial Sequence: Synthetic oligonucleotide
  Sense strand starting at position 3615 of SEQ ID NO: 1560645
caguuaaauggcgauggga

SEQ ID NO: 1614542 - RNA, 19 nt, Artificial Sequence
  Description of Artificial Sequence: Synthetic oligonucleotide
  Antisense strand to SEQ ID NO: 1614541
ucccaucgccauuuaacug

SEQ ID NO: 1614543 - RNA, 19 nt, Artificial Sequence
  Description of Artificial Sequence: Synthetic oligonucleotide
  Sense strand starting at position 3617 of SEQ ID NO: 1560645
guuaaauggcgaugggaau

SEQ ID NO: 1614544 - RNA, 19 nt, Artificial Sequence
  Description of Artificial Sequence: Synthetic oligonucleotide
  Antisense strand to SEQ ID NO: 1614543
auucccaucgccauuuaac

SEQ ID NO: 1614545 - RNA, 19 nt, Artificial Sequence
  Description of Artificial Sequence: Synthetic oligonucleotide
  Sense strand starting at position 3618 of SEQ ID NO: 1560645
uuaaauggcgaugggaaua

SEQ ID NO: 1614546 - RNA, 19 nt, Artificial Sequence
  Description of Artificial Sequence: Synthetic oligonucleotide
  Antisense strand to SEQ ID NO: 1614545
uauucccaucgccauuuaa

SEQ ID NO: 1614547 - RNA, 19 nt, Artificial Sequence
  Description of Artificial Sequence: Synthetic oligonucleotide
  Sense strand starting at position 3639 of SEQ ID NO: 1560645
augggaacucaaugguguu

SEQ ID NO: 1614548 - RNA, 19 nt, Artificial Sequence
  Description of Artificial Sequence: Synthetic oligonucleotide
  Antisense strand to SEQ ID NO: 1614547
aacaccauugaguucccau

SEQ ID NO: 1614549 - RNA, 19 nt, Artificial Sequence
  Description of Artificial Sequence: Synthetic oligonucleotide
  Sense strand starting at position 3895 of SEQ ID NO: 1560645
cagaguggccguugggaau

SEQ ID NO: 1614550 - RNA, 19 nt, Artificial Sequence
  Description of Artificial Sequence: Synthetic oligonucleotide
  Antisense strand to SEQ ID NO: 1614549
auucccaacggccacucug

SEQ ID NO: 1614551 - RNA, 19 nt, Artificial Sequence
  Description of Artificial Sequence: Synthetic oligonucleotide
  Sense strand starting at position 3907 of SEQ ID NO: 1560645
ugggaaucuggguguugca

SEQ ID NO: 1614552 - RNA, 19 nt, Artificial Sequence
  Description of Artificial Sequence: Synthetic oligonucleotide
  Antisense strand to SEQ ID NO: 1614551
ugcaacacccagauuccca

SEQ ID NO: 1614553 - RNA, 19 nt, Artificial Sequence
  Description of Artificial Sequence: Synthetic oligonucleotide
  Sense strand starting at position 58 of SEQ ID NO: 1560646
guugguggguaucuguaau

SEQ ID NO: 1614554 - RNA, 19 nt, Artificial Sequence
  Description of Artificial Sequence: Synthetic oligonucleotide
  Antisense strand to SEQ ID NO: 1614553
auuacagauacccaccaac

SEQ ID NO: 1614555 - RNA, 19 nt, Artificial Sequence
  Description of Artificial Sequence: Synthetic oligonucleotide
  Sense strand starting at position 99 of SEQ ID NO: 1560646
ggacgagauucgcuugaac

SEQ ID NO: 1614556 - RNA, 19 nt, Artificial Sequence
  Description of Artificial Sequence: Synthetic oligonucleotide
  Antisense strand to SEQ ID NO: 1614555
guucaagcgaaucucgucc

SEQ ID NO: 1614557 - RNA, 19 nt, Artificial Sequence
  Description of Artificial Sequence: Synthetic oligonucleotide
  Sense strand starting at position 329 of SEQ ID NO: 1560646
gguucaugcugagcucagu

SEQ ID NO: 1614558 - RNA, 19 nt, Artificial Sequence
  Description of Artificial Sequence: Synthetic oligonucleotide
  Antisense strand to SEQ ID NO: 1614557
acugagcucagcaugaacc

SEQ ID NO: 1614559 - RNA, 19 nt, Artificial Sequence
  Description of Artificial Sequence: Synthetic oligonucleotide
  Sense strand starting at position 605 of SEQ ID NO: 1560646
gggagucaucaacggaacu

SEQ ID NO: 1614560 - RNA, 19 nt, Artificial Sequence
  Description of Artificial Sequence: Synthetic oligonucleotide
  Antisense strand to SEQ ID NO: 1614559
aguuccguugaugacuccc

SEQ ID NO: 1614561 - RNA, 19 nt, Artificial Sequence
  Description of Artificial Sequence: Synthetic oligonucleotide
  Sense strand starting at position 875 of SEQ ID NO: 1560646
cagcauuggaggcgauaca

SEQ ID NO: 1614562 - RNA, 19 nt, Artificial Sequence
  Description of Artificial Sequence: Synthetic oligonucleotide
  Antisense strand to SEQ ID NO: 1614561
uguaucgccuccaaugcug

SEQ ID NO: 1614563 - RNA, 19 nt, Artificial Sequence
  Description of Artificial Sequence: Synthetic oligonucleotide
  Sense strand starting at position 1397 of SEQ ID NO: 1560646
cgauguggucgaugagguu

SEQ ID NO: 1614564 - RNA, 19 nt, Artificial Sequence
  Description of Artificial Sequence: Synthetic oligonucleotide
  Antisense strand to SEQ ID NO: 1614563
aaccucaucgaccacaucg

SEQ ID NO: 1614565 - RNA, 19 nt, Artificial Sequence
  Description of Artificial Sequence: Synthetic oligonucleotide
  Sense strand starting at position 1552 of SEQ ID NO: 1560646
cggaucugguuguuuccaa

SEQ ID NO: 1614566 - RNA, 19 nt, Artificial Sequence
  Description of Artificial Sequence: Synthetic oligonucleotide
  Antisense strand to SEQ ID NO: 1614565
uuggaaacaaccagauccg

SEQ ID NO: 1614567 - RNA, 19 nt, Artificial Sequence
  Description of Artificial Sequence: Synthetic oligonucleotide
  Sense strand starting at position 1559 of SEQ ID NO: 1560646
gguuguuuccaaggaucag

SEQ ID NO: 1614568 - RNA, 19 nt, Artificial Sequence
  Description of Artificial Sequence: Synthetic oligonucleotide
  Antisense strand to SEQ ID NO: 1614567
cugauccuuggaaacaacc

SEQ ID NO: 1614569 - RNA, 19 nt, Artificial Sequence
  Description of Artificial Sequence: Synthetic oligonucleotide
  Sense strand starting at position 1698 of SEQ ID NO: 1560646
gaugguguuccgggagaga

SEQ ID NO: 1614570 - RNA, 19 nt, Artificial Sequence
  Description of Artificial Sequence: Synthetic oligonucleotide
  Antisense strand to SEQ ID NO: 1614569
ucucucccggaacaccauc

SEQ ID NO: 1614571 - RNA, 19 nt, Artificial Sequence
  Description of Artificial Sequence: Synthetic oligonucleotide
  Sense strand starting at position 1734 of SEQ ID NO: 1560646
ggucauguuggcgaagucu

SEQ ID NO: 1614572 - RNA, 19 nt, Artificial Sequence
  Description of Artificial Sequence: Synthetic oligonucleotide
  Antisense strand to SEQ ID NO: 1614571
agacuucgccaacaugacc

SEQ ID NO: 1614573 - RNA, 19 nt, Artificial Sequence
  Description of Artificial Sequence: Synthetic oligonucleotide
  Sense strand starting at position 2139 of SEQ ID NO: 1560646
guuccauaggauggugaga

SEQ ID NO: 1614574 - RNA, 19 nt, Artificial Sequence
  Description of Artificial Sequence: Synthetic oligonucleotide
  Antisense strand to SEQ ID NO: 1614573
ucucaccauccuauggaac

SEQ ID NO: 1614575 - RNA, 19 nt, Artificial Sequence
  Description of Artificial Sequence: Synthetic oligonucleotide
  Sense strand starting at position 2507 of SEQ ID NO: 1560646
ucucuauacugguugauag

SEQ ID NO: 1614576 - RNA, 19 nt, Artificial Sequence
  Description of Artificial Sequence: Synthetic oligonucleotide
  Antisense strand to SEQ ID NO: 1614575
cuaucaaccaguauagaga

SEQ ID NO: 1614577 - RNA, 19 nt, Artificial Sequence
  Description of Artificial Sequence: Synthetic oligonucleotide
  Sense strand starting at position 2508 of SEQ ID NO: 1560646
cucuauacugguugauaga

SEQ ID NO: 1614578 - RNA, 19 nt, Artificial Sequence
  Description of Artificial Sequence: Synthetic oligonucleotide
  Antisense strand to SEQ ID NO: 1614577
ucuaucaaccaguauagag

SEQ ID NO: 1614579 - RNA, 19 nt, Artificial Sequence
  Description of Artificial Sequence: Synthetic oligonucleotide
  Sense strand starting at position 2511 of SEQ ID NO: 1560646
uauacugguugauagaaua

SEQ ID NO: 1614580 - RNA, 19 nt, Artificial Sequence
  Description of Artificial Sequence: Synthetic oligonucleotide
  Antisense strand to SEQ ID NO: 1614579
uauucuaucaaccaguaua

SEQ ID NO: 1614581 - RNA, 19 nt, Artificial Sequence
  Description of Artificial Sequence: Synthetic oligonucleotide
  Sense strand starting at position 2683 of SEQ ID NO: 1560646
gguuuaaggcccuggcuau

SEQ ID NO: 1614582 - RNA, 19 nt, Artificial Sequence
  Description of Artificial Sequence: Synthetic oligonucleotide
  Antisense strand to SEQ ID NO: 1614581
auagccagggccuuaaacc

SEQ ID NO: 1614583 - RNA, 19 nt, Artificial Sequence
  Description of Artificial Sequence: Synthetic oligonucleotide
  Sense strand starting at position 2752 of SEQ ID NO: 1560646
ugugaccuccagcaaguau

SEQ ID NO: 1614584 - RNA, 19 nt, Artificial Sequence
  Description of Artificial Sequence: Synthetic oligonucleotide
  Antisense strand to SEQ ID NO: 1614583
auacuugcuggaggucaca

SEQ ID NO: 1614585 - RNA, 19 nt, Artificial Sequence
  Description of Artificial Sequence: Synthetic oligonucleotide
  Sense strand starting at position 2779 of SEQ ID NO: 1560646
cucugauucucgguuucuu

SEQ ID NO: 1614586 - RNA, 19 nt, Artificial Sequence
  Description of Artificial Sequence: Synthetic oligonucleotide
  Antisense strand to SEQ ID NO: 1614585
aagaaaccgagaaucagag

SEQ ID NO: 1614587 - RNA, 19 nt, Artificial Sequence
  Description of Artificial Sequence: Synthetic oligonucleotide
  Sense strand starting at position 2823 of SEQ ID NO: 1560646
ggccuuacuucugugagga

SEQ ID NO: 1614588 - RNA, 19 nt, Artificial Sequence
  Description of Artificial Sequence: Synthetic oligonucleotide
  Antisense strand to SEQ ID NO: 1614587
uccucacagaaguaaggcc

SEQ ID NO: 1614589 - RNA, 19 nt, Artificial Sequence
  Description of Artificial Sequence: Synthetic oligonucleotide
  Sense strand starting at position 2824 of SEQ ID NO: 1560646
gccuuacuucugugaggau

SEQ ID NO: 1614590 - RNA, 19 nt, Artificial Sequence
  Description of Artificial Sequence: Synthetic oligonucleotide
  Antisense strand to SEQ ID NO: 1614589
auccucacagaaguaaggc

SEQ ID NO: 1614591 - RNA, 19 nt, Artificial Sequence
  Description of Artificial Sequence: Synthetic oligonucleotide
  Sense strand starting at position 2928 of SEQ ID NO: 1560646
ucaucaagugcuuaauaug

SEQ ID NO: 1614592 - RNA, 19 nt, Artificial Sequence
  Description of Artificial Sequence: Synthetic oligonucleotide
  Antisense strand to SEQ ID NO: 1614591
cauauuaagcacuugauga

SEQ ID NO: 1614593 - RNA, 19 nt, Artificial Sequence
  Description of Artificial Sequence: Synthetic oligonucleotide
  Sense strand starting at position 2955 of SEQ ID NO: 1560646
auagaacagugcccuauua

SEQ ID NO: 1614594 - RNA, 19 nt, Artificial Sequence
  Description of Artificial Sequence: Synthetic oligonucleotide
  Antisense strand to SEQ ID NO: 1614593
uaauagggcacuguucuau

SEQ ID NO: 1614595 - RNA, 19 nt, Artificial Sequence
  Description of Artificial Sequence: Synthetic oligonucleotide
  Sense strand starting at position 2957 of SEQ ID NO: 1560646
agaacagugcccuauuauu

SEQ ID NO: 1614596 - RNA, 19 nt, Artificial Sequence
  Description of Artificial Sequence: Synthetic oligonucleotide
  Antisense strand to SEQ ID NO: 1614595
aauaauagggcacuguucu

SEQ ID NO: 1614597 - RNA, 19 nt, Artificial Sequence
  Description of Artificial Sequence: Synthetic oligonucleotide
  Sense strand starting at position 2966 of SEQ ID NO: 1560646
cccuauuauugagaguaag

SEQ ID NO: 1614598 - RNA, 19 nt, Artificial Sequence
  Description of Artificial Sequence: Synthetic oligonucleotide
  Antisense strand to SEQ ID NO: 1614597
cuuacucucaauaauaggg

SEQ ID NO: 1614599 - RNA, 19 nt, Artificial Sequence
  Description of Artificial Sequence: Synthetic oligonucleotide
  Sense strand starting at position 2972 of SEQ ID NO: 1560646
uauugagaguaaguacuuu

SEQ ID NO: 1614600 - RNA, 19 nt, Artificial Sequence
  Description of Artificial Sequence: Synthetic oligonucleotide
  Antisense strand to SEQ ID NO: 1614599
aaaguacuuacucucaaua

SEQ ID NO: 1614601 - RNA, 19 nt, Artificial Sequence
  Description of Artificial Sequence: Synthetic oligonucleotide
  Sense strand starting at position 2976 of SEQ ID NO: 1560646
gagaguaaguacuuugaaa

SEQ ID NO: 1614602 - RNA, 19 nt, Artificial Sequence
  Description of Artificial Sequence: Synthetic oligonucleotide
  Antisense strand to SEQ ID NO: 1614601
uuucaaaguacuuacucuc

SEQ ID NO: 1614603 - RNA, 19 nt, Artificial Sequence
  Description of Artificial Sequence: Synthetic oligonucleotide
  Sense strand starting at position 2978 of SEQ ID NO: 1560646
gaguaaguacuuugaaauc

SEQ ID NO: 1614604 - RNA, 19 nt, Artificial Sequence
  Description of Artificial Sequence: Synthetic oligonucleotide
  Antisense strand to SEQ ID NO: 1614603
gauuucaaaguacuuacuc

SEQ ID NO: 1614605 - RNA, 19 nt, Artificial Sequence
  Description of Artificial Sequence: Synthetic oligonucleotide
  Sense strand starting at position 3073 of SEQ ID NO: 1560646
ggcuguaauuucuuaaucu

SEQ ID NO: 1614606 - RNA, 19 nt, Artificial Sequence
  Description of Artificial Sequence: Synthetic oligonucleotide
  Antisense strand to SEQ ID NO: 1614605
agauuaagaaauuacagcc

SEQ ID NO: 1614607 - RNA, 19 nt, Artificial Sequence
  Description of Artificial Sequence: Synthetic oligonucleotide
  Sense strand starting at position 3074 of SEQ ID NO: 1560646
gcuguaauuucuuaaucug

SEQ ID NO: 1614608 - RNA, 19 nt, Artificial Sequence
  Description of Artificial Sequence: Synthetic oligonucleotide
  Antisense strand to SEQ ID NO: 1614607
cagauuaagaaauuacagc

SEQ ID NO: 1614609 - RNA, 19 nt, Artificial Sequence
  Description of Artificial Sequence: Synthetic oligonucleotide
  Sense strand starting at position 3089 of SEQ ID NO: 1560646
ucuguaaauugggaugaua

SEQ ID NO: 1614610 - RNA, 19 nt, Artificial Sequence
  Description of Artificial Sequence: Synthetic oligonucleotide
  Antisense strand to SEQ ID NO: 1614609
uaucaucccaauuuacaga

SEQ ID NO: 1614611 - RNA, 19 nt, Artificial Sequence
  Description of Artificial Sequence: Synthetic oligonucleotide
  Sense strand starting at position 3098 of SEQ ID NO: 1560646
ugggaugauaauuguacca

SEQ ID NO: 1614612 - RNA, 19 nt, Artificial Sequence
  Description of Artificial Sequence: Synthetic oligonucleotide
  Antisense strand to SEQ ID NO: 1614611
ugguacaauuaucauccca

SEQ ID NO: 1614613 - RNA, 19 nt, Artificial Sequence
  Description of Artificial Sequence: Synthetic oligonucleotide
  Sense strand starting at position 3100 of SEQ ID NO: 1560646
ggaugauaauuguaccauc

SEQ ID NO: 1614614 - RNA, 19 nt, Artificial Sequence
  Description of Artificial Sequence: Synthetic oligonucleotide
  Antisense strand to SEQ ID NO: 1614613
gaugguacaauuaucaucc

SEQ ID NO: 1614615 - RNA, 19 nt, Artificial Sequence
  Description of Artificial Sequence: Synthetic oligonucleotide
  Sense strand starting at position 3243 of SEQ ID NO: 1560646
acaucagagucuuccaguu

SEQ ID NO: 1614616 - RNA, 19 nt, Artificial Sequence
  Description of Artificial Sequence: Synthetic oligonucleotide
  Antisense strand to SEQ ID NO: 1614615
aacuggaagacucugaugu

SEQ ID NO: 1614617 - RNA, 19 nt, Artificial Sequence
  Description of Artificial Sequence: Synthetic oligonucleotide
  Sense strand starting at position 3341 of SEQ ID NO: 1560646
ucacaucuuuggguacaca

SEQ ID NO: 1614618 - RNA, 19 nt, Artificial Sequence
  Description of Artificial Sequence: Synthetic oligonucleotide
  Antisense strand to SEQ ID NO: 1614617
uguguacccaaagauguga

SEQ ID NO: 1614619 - RNA, 19 nt, Artificial Sequence
  Description of Artificial Sequence: Synthetic oligonucleotide
  Sense strand starting at position 3467 of SEQ ID NO: 1560646
gucaguucccaucacaaca

SEQ ID NO: 1614620 - RNA, 19 nt, Artificial Sequence
  Description of Artificial Sequence: Synthetic oligonucleotide
  Antisense strand to SEQ ID NO: 1614619
uguugugaugggaacugac

SEQ ID NO: 1614621 - RNA, 19 nt, Artificial Sequence
  Description of Artificial Sequence: Synthetic oligonucleotide
  Sense strand starting at position 3612 of SEQ ID NO: 1560646
ggccuuagguggcuuugau

SEQ ID NO: 1614622 - RNA, 19 nt, Artificial Sequence
  Description of Artificial Sequence: Synthetic oligonucleotide
  Antisense strand to SEQ ID NO: 1614621
aucaaagccaccuaaggcc

SEQ ID NO: 1614623 - RNA, 19 nt, Artificial Sequence
  Description of Artificial Sequence: Synthetic oligonucleotide
  Sense strand starting at position 3718 of SEQ ID NO: 1560646
ggagaaguggacuggcaaa

SEQ ID NO: 1614624 - RNA, 19 nt, Artificial Sequence
  Description of Artificial Sequence: Synthetic oligonucleotide
  Antisense strand to SEQ ID NO: 1614623
uuugccaguccacuucucc

SEQ ID NO: 1614625 - RNA, 19 nt, Artificial Sequence
  Description of Artificial Sequence: Synthetic oligonucleotide
  Sense strand starting at position 3743 of SEQ ID NO: 1560646
gagacagauugggagagaa

SEQ ID NO: 1614626 - RNA, 19 nt, Artificial Sequence
  Description of Artificial Sequence: Synthetic oligonucleotide
  Antisense strand to SEQ ID NO: 1614625
uucucucccaaucugucuc

SEQ ID NO: 1614627 - RNA, 19 nt, Artificial Sequence
  Description of Artificial Sequence: Synthetic oligonucleotide
  Sense strand starting at position 3774 of SEQ ID NO: 1560646
aaagaugagucugaaagga

SEQ ID NO: 1614628 - RNA, 19 nt, Artificial Sequence
  Description of Artificial Sequence: Synthetic oligonucleotide
  Antisense strand to SEQ ID NO: 1614627
uccuuucagacucaucuuu

SEQ ID NO: 1614629 - RNA, 19 nt, Artificial Sequence
  Description of Artificial Sequence: Synthetic oligonucleotide
  Sense strand starting at position 3882 of SEQ ID NO: 1560646
gagacaguauuagagagaa

SEQ ID NO: 1614630 - RNA, 19 nt, Artificial Sequence
  Description of Artificial Sequence: Synthetic oligonucleotide
  Antisense strand to SEQ ID NO: 1614629
uucucucuaauacugucuc

SEQ ID NO: 1614631 - RNA, 19 nt, Artificial Sequence
  Description of Artificial Sequence: Synthetic oligonucleotide
  Sense strand starting at position 3980 of SEQ ID NO: 1560646
guccuaccaucucugaguu

SEQ ID NO: 1614632 - RNA, 19 nt, Artificial Sequence
  Description of Artificial Sequence: Synthetic oligonucleotide
  Antisense strand to SEQ ID NO: 1614631
aacucagagaugguaggac

SEQ ID NO: 1614633 - RNA, 19 nt, Artificial Sequence
  Description of Artificial Sequence: Synthetic oligonucleotide
  Sense strand starting at position 92 of SEQ ID NO: 1560647
cuaugauugcgccaccaca

SEQ ID NO: 1614634 - RNA, 19 nt, Artificial Sequence
  Description of Artificial Sequence: Synthetic oligonucleotide
  Antisense strand to SEQ ID NO: 1614633
ugugguggcgcaaucauag

SEQ ID NO: 1614635 - RNA, 19 nt, Artificial Sequence
  Description of Artificial Sequence: Synthetic oligonucleotide
  Sense strand starting at position 132 of SEQ ID NO: 1560647
gugacucugucucuccaaa

SEQ ID NO: 1614636 - RNA, 19 nt, Artificial Sequence
  Description of Artificial Sequence: Synthetic oligonucleotide
  Antisense strand to SEQ ID NO: 1614635
uuuggagagacagagucac

SEQ ID NO: 1614637 - RNA, 19 nt, Artificial Sequence
  Description of Artificial Sequence: Synthetic oligonucleotide
  Sense strand starting at position 162 of SEQ ID NO: 1560647
aagaaauggucagagaaau

SEQ ID NO: 1614638 - RNA, 19 nt, Artificial Sequence
  Description of Artificial Sequence: Synthetic oligonucleotide
  Antisense strand to SEQ ID NO: 1614637
auuucucugaccauuucuu

SEQ ID NO: 1614639 - RNA, 19 nt, Artificial Sequence
  Description of Artificial Sequence: Synthetic oligonucleotide
  Sense strand starting at position 217 of SEQ ID NO: 1560647
ggcuuuagacguggucaga

SEQ ID NO: 1614640 - RNA, 19 nt, Artificial Sequence
  Description of Artificial Sequence: Synthetic oligonucleotide
  Antisense strand to SEQ ID NO: 1614639
ucugaccacgucuaaagcc

SEQ ID NO: 1614641 - RNA, 19 nt, Artificial Sequence
  Description of Artificial Sequence: Synthetic oligonucleotide
  Sense strand starting at position 220 of SEQ ID NO: 1560647
uuuagacguggucagagau

SEQ ID NO: 1614642 - RNA, 19 nt, Artificial Sequence
  Description of Artificial Sequence: Synthetic oligonucleotide
  Antisense strand to SEQ ID NO: 1614641
aucucugaccacgucuaaa

SEQ ID NO: 1614643 - RNA, 19 nt, Artificial Sequence
  Description of Artificial Sequence: Synthetic oligonucleotide
  Sense strand starting at position 226 of SEQ ID NO: 1560647
cguggucagagaugguaaa

SEQ ID NO: 1614644 - RNA, 19 nt, Artificial Sequence
  Description of Artificial Sequence: Synthetic oligonucleotide
  Antisense strand to SEQ ID NO: 1614643
uuuaccaucucugaccacg

SEQ ID NO: 1614645 - RNA, 19 nt, Artificial Sequence
  Description of Artificial Sequence: Synthetic oligonucleotide
  Sense strand starting at position 409 of SEQ ID NO: 1560647
agagacacguggucagaaa

SEQ ID NO: 1614646 - RNA, 19 nt, Artificial Sequence
  Description of Artificial Sequence: Synthetic oligonucleotide
  Antisense strand to SEQ ID NO: 1614645
uuucugaccacgugucucu

SEQ ID NO: 1614647 - RNA, 19 nt, Artificial Sequence
  Description of Artificial Sequence: Synthetic oligonucleotide
  Sense strand starting at position 551 of SEQ ID NO: 1560647
agcagagauguucgagaug

SEQ ID NO: 1614648 - RNA, 19 nt, Artificial Sequence
  Description of Artificial Sequence: Synthetic oligonucleotide
  Antisense strand to SEQ ID NO: 1614647
caucucgaacaucucugcu

SEQ ID NO: 1614649 - RNA, 19 nt, Artificial Sequence
  Description of Artificial Sequence: Synthetic oligonucleotide
  Sense strand starting at position 556 of SEQ ID NO: 1560647
agauguucgagaugaucag

SEQ ID NO: 1614650 - RNA, 19 nt, Artificial Sequence
  Description of Artificial Sequence: Synthetic oligonucleotide
  Antisense strand to SEQ ID NO: 1614649
cugaucaucucgaacaucu

SEQ ID NO: 1614651 - RNA, 19 nt, Artificial Sequence
  Description of Artificial Sequence: Synthetic oligonucleotide
  Sense strand starting at position 607 of SEQ ID NO: 1560647
cagagauuaucagagggca

SEQ ID NO: 1614652 - RNA, 19 nt, Artificial Sequence
  Description of Artificial Sequence: Synthetic oligonucleotide
  Antisense strand to SEQ ID NO: 1614651
ugcccucugauaaucucug

SEQ ID NO: 1614653 - RNA, 19 nt, Artificial Sequence
  Description of Artificial Sequence: Synthetic oligonucleotide
  Sense strand starting at position 610 of SEQ ID NO: 1560647
agauuaucagagggcauca

SEQ ID NO: 1614654 - RNA, 19 nt, Artificial Sequence
  Description of Artificial Sequence: Synthetic oligonucleotide
  Antisense strand to SEQ ID NO: 1614653
ugaugcccucugauaaucu

SEQ ID NO: 1614655 - RNA, 19 nt, Artificial Sequence
  Description of Artificial Sequence: Synthetic oligonucleotide
  Sense strand starting at position 716 of SEQ ID NO: 1560647
gggcaucagugagugagaa

SEQ ID NO: 1614656 - RNA, 19 nt, Artificial Sequence
  Description of Artificial Sequence: Synthetic oligonucleotide
  Antisense strand to SEQ ID NO: 1614655
uucucacucacugaugccc

SEQ ID NO: 1614657 - RNA, 19 nt, Artificial Sequence
  Description of Artificial Sequence: Synthetic oligonucleotide
  Sense strand starting at position 717 of SEQ ID NO: 1560647
ggcaucagugagugagaaa

SEQ ID NO: 1614658 - RNA, 19 nt, Artificial Sequence
  Description of Artificial Sequence: Synthetic oligonucleotide
  Antisense strand to SEQ ID NO: 1614657
uuucucacucacugaugcc

SEQ ID NO: 1614659 - RNA, 19 nt, Artificial Sequence
  Description of Artificial Sequence: Synthetic oligonucleotide
  Sense strand starting at position 767 of SEQ ID NO: 1560647
ggcaucaaugagugagaga

SEQ ID NO: 1614660 - RNA, 19 nt, Artificial Sequence
  Description of Artificial Sequence: Synthetic oligonucleotide
  Antisense strand to SEQ ID NO: 1614659
ucucucacucauugaugcc

SEQ ID NO: 1614661 - RNA, 19 nt, Artificial Sequence
  Description of Artificial Sequence: Synthetic oligonucleotide
  Sense strand starting at position 816 of SEQ ID NO: 1560647
ggcaucagugagugagaga

SEQ ID NO: 1614662 - RNA, 19 nt, Artificial Sequence
  Description of Artificial Sequence: Synthetic oligonucleotide
  Antisense strand to SEQ ID NO: 1614661
ucucucacucacugaugcc

SEQ ID NO: 1614663 - RNA, 19 nt, Artificial Sequence
  Description of Artificial Sequence: Synthetic oligonucleotide
  Sense strand starting at position 991 of SEQ ID NO: 1560647
aagagugguggacagcaau

SEQ ID NO: 1614664 - RNA, 19 nt, Artificial Sequence
  Description of Artificial Sequence: Synthetic oligonucleotide
  Antisense strand to SEQ ID NO: 1614663
auugcuguccaccacucuu

SEQ ID NO: 1614665 - RNA, 19 nt, Artificial Sequence
  Description of Artificial Sequence: Synthetic oligonucleotide
  Sense strand starting at position 997 of SEQ ID NO: 1560647
gguggacagcaaugucaaa

SEQ ID NO: 1614666 - RNA, 19 nt, Artificial Sequence
  Description of Artificial Sequence: Synthetic oligonucleotide
  Antisense strand to SEQ ID NO: 1614665
uuugacauugcuguccacc

SEQ ID NO: 1614667 - RNA, 19 nt, Artificial Sequence
  Description of Artificial Sequence: Synthetic oligonucleotide
  Sense strand starting at position 1073 of SEQ ID NO: 1560647
agagcuggugaaugaugau

SEQ ID NO: 1614668 - RNA, 19 nt, Artificial Sequence
  Description of Artificial Sequence: Synthetic oligonucleotide
  Antisense strand to SEQ ID NO: 1614667
aucaucauucaccagcucu

SEQ ID NO: 1614669 - RNA, 19 nt, Artificial Sequence
  Description of Artificial Sequence: Synthetic oligonucleotide
  Sense strand starting at position 1111 of SEQ ID NO: 1560647
cacagaugucagcgauggu

SEQ ID NO: 1614670 - RNA, 19 nt, Artificial Sequence
  Description of Artificial Sequence: Synthetic oligonucleotide
  Antisense strand to SEQ ID NO: 1614669
accaucgcugacaucugug

SEQ ID NO: 1614671 - RNA, 19 nt, Artificial Sequence
  Description of Artificial Sequence: Synthetic oligonucleotide
  Sense strand starting at position 1120 of SEQ ID NO: 1560647
cagcgauggucacugagaa

SEQ ID NO: 1614672 - RNA, 19 nt, Artificial Sequence
  Description of Artificial Sequence: Synthetic oligonucleotide
  Antisense strand to SEQ ID NO: 1614671
uucucagugaccaucgcug

SEQ ID NO: 1614673 - RNA, 19 nt, Artificial Sequence
  Description of Artificial Sequence: Synthetic oligonucleotide
  Sense strand starting at position 1121 of SEQ ID NO: 1560647
agcgauggucacugagaag

SEQ ID NO: 1614674 - RNA, 19 nt, Artificial Sequence
  Description of Artificial Sequence: Synthetic oligonucleotide
  Antisense strand to SEQ ID NO: 1614673
cuucucagugaccaucgcu

SEQ ID NO: 1614675 - RNA, 19 nt, Artificial Sequence
  Description of Artificial Sequence: Synthetic oligonucleotide
  Sense strand starting at position 1395 of SEQ ID NO: 1560647
gccaguguccagagagugu

SEQ ID NO: 1614676 - RNA, 19 nt, Artificial Sequence
  Description of Artificial Sequence: Synthetic oligonucleotide
  Antisense strand to SEQ ID NO: 1614675
acacucucuggacacuggc

SEQ ID NO: 1614677 - RNA, 19 nt, Artificial Sequence
  Description of Artificial Sequence: Synthetic oligonucleotide
  Sense strand starting at position 1408 of SEQ ID NO: 1560647
gaguguuuggagcagagca

SEQ ID NO: 1614678 - RNA, 19 nt, Artificial Sequence
  Description of Artificial Sequence: Synthetic oligonucleotide
  Antisense strand to SEQ ID NO: 1614677
ugcucugcuccaaacacuc

SEQ ID NO: 1614679 - RNA, 19 nt, Artificial Sequence
  Description of Artificial Sequence: Synthetic oligonucleotide
  Sense strand starting at position 1558 of SEQ ID NO: 1560647
agccuuaccugagcuagaa

SEQ ID NO: 1614680 - RNA, 19 nt, Artificial Sequence
  Description of Artificial Sequence: Synthetic oligonucleotide
  Antisense strand to SEQ ID NO: 1614679
uucuagcucagguaaggcu

SEQ ID NO: 1614681 - RNA, 19 nt, Artificial Sequence
  Description of Artificial Sequence: Synthetic oligonucleotide
  Sense strand starting at position 2209 of SEQ ID NO: 1560647
ggguuccggcuccaaauau

SEQ ID NO: 1614682 - RNA, 19 nt, Artificial Sequence
  Description of Artificial Sequence: Synthetic oligonucleotide
  Antisense strand to SEQ ID NO: 1614681
auauuuggagccggaaccc

SEQ ID NO: 1614683 - RNA, 19 nt, Artificial Sequence
  Description of Artificial Sequence: Synthetic oligonucleotide
  Sense strand starting at position 2939 of SEQ ID NO: 1560647
gcaggcuuagauugaugga

SEQ ID NO: 1614684 - RNA, 19 nt, Artificial Sequence
  Description of Artificial Sequence: Synthetic oligonucleotide
  Antisense strand to SEQ ID NO: 1614683
uccaucaaucuaagccugc

SEQ ID NO: 1614685 - RNA, 19 nt, Artificial Sequence
  Description of Artificial Sequence: Synthetic oligonucleotide
  Sense strand starting at position 3167 of SEQ ID NO: 1560647
gcaccugggcugugagaau

SEQ ID NO: 1614686 - RNA, 19 nt, Artificial Sequence
  Description of Artificial Sequence: Synthetic oligonucleotide
  Antisense strand to SEQ ID NO: 1614685
auucucacagcccaggugc

SEQ ID NO: 1614687 - RNA, 19 nt, Artificial Sequence
  Description of Artificial Sequence: Synthetic oligonucleotide
  Sense strand starting at position 3174 of SEQ ID NO: 1560647
ggcugugagaaugguaugu

SEQ ID NO: 1614688 - RNA, 19 nt, Artificial Sequence
  Description of Artificial Sequence: Synthetic oligonucleotide
  Antisense strand to SEQ ID NO: 1614687
acauaccauucucacagcc

SEQ ID NO: 1614689 - RNA, 19 nt, Artificial Sequence
  Description of Artificial Sequence: Synthetic oligonucleotide
  Sense strand starting at position 3179 of SEQ ID NO: 1560647
ugagaaugguaugugugua

SEQ ID NO: 1614690 - RNA, 19 nt, Artificial Sequence
  Description of Artificial Sequence: Synthetic oligonucleotide
  Antisense strand to SEQ ID NO: 1614689
uacacacauaccauucuca

SEQ ID NO: 1614691 - RNA, 19 nt, Artificial Sequence
  Description of Artificial Sequence: Synthetic oligonucleotide
  Sense strand starting at position 3180 of SEQ ID NO: 1560647
gagaaugguauguguguau

SEQ ID NO: 1614692 - RNA, 19 nt, Artificial Sequence
  Description of Artificial Sequence: Synthetic oligonucleotide
  Antisense strand to SEQ ID NO: 1614691
auacacacauaccauucuc

SEQ ID NO: 1614693 - RNA, 19 nt, Artificial Sequence
  Description of Artificial Sequence: Synthetic oligonucleotide
  Sense strand starting at position 3213 of SEQ ID NO: 1560647
uauuccuagccuugagugu

SEQ ID NO: 1614694 - RNA, 19 nt, Artificial Sequence
  Description of Artificial Sequence: Synthetic oligonucleotide
  Antisense strand to SEQ ID NO: 1614693
acacucaaggcuaggaaua

SEQ ID NO: 1614695 - RNA, 19 nt, Artificial Sequence
  Description of Artificial Sequence: Synthetic oligonucleotide
  Sense strand starting at position 3214 of SEQ ID NO: 1560647
auuccuagccuugagugua

SEQ ID NO: 1614696 - RNA, 19 nt, Artificial Sequence
  Description of Artificial Sequence: Synthetic oligonucleotide
  Antisense strand to SEQ ID NO: 1614695
uacacucaaggcuaggaau

SEQ ID NO: 1614697 - RNA, 19 nt, Artificial Sequence
  Description of Artificial Sequence: Synthetic oligonucleotide
  Sense strand starting at position 3224 of SEQ ID NO: 1560647
uugaguguagcgcuucauu

SEQ ID NO: 1614698 - RNA, 19 nt, Artificial Sequence
  Description of Artificial Sequence: Synthetic oligonucleotide
  Antisense strand to SEQ ID NO: 1614697
aaugaagcgcuacacucaa

SEQ ID NO: 1614699 - RNA, 19 nt, Artificial Sequence
  Description of Artificial Sequence: Synthetic oligonucleotide
  Sense strand starting at position 3323 of SEQ ID NO: 1560647
guuggaguuuccuuaccug

SEQ ID NO: 1614700 - RNA, 19 nt, Artificial Sequence
  Description of Artificial Sequence: Synthetic oligonucleotide
  Antisense strand to SEQ ID NO: 1614699
cagguaaggaaacuccaac

SEQ ID NO: 1614701 - RNA, 19 nt, Artificial Sequence
  Description of Artificial Sequence: Synthetic oligonucleotide
  Sense strand starting at position 3351 of SEQ ID NO: 1560647
agcaauaggcuugaucuuu

SEQ ID NO: 1614702 - RNA, 19 nt, Artificial Sequence
  Description of Artificial Sequence: Synthetic oligonucleotide
  Antisense strand to SEQ ID NO: 1614701
aaagaucaagccuauugcu

SEQ ID NO: 1614703 - RNA, 19 nt, Artificial Sequence
  Description of Artificial Sequence: Synthetic oligonucleotide
  Sense strand starting at position 3398 of SEQ ID NO: 1560647
ccuuucucugccugcaaga

SEQ ID NO: 1614704 - RNA, 19 nt, Artificial Sequence
  Description of Artificial Sequence: Synthetic oligonucleotide
  Antisense strand to SEQ ID NO: 1614703
ucuugcaggcagagaaagg

SEQ ID NO: 1614705 - RNA, 19 nt, Artificial Sequence
  Description of Artificial Sequence: Synthetic oligonucleotide
  Sense strand starting at position 3423 of SEQ ID NO: 1560647
acuugugccaucugggauu

SEQ ID NO: 1614706 - RNA, 19 nt, Artificial Sequence
  Description of Artificial Sequence: Synthetic oligonucleotide
  Antisense strand to SEQ ID NO: 1614705
aaucccagauggcacaagu

SEQ ID NO: 1614707 - RNA, 19 nt, Artificial Sequence
  Description of Artificial Sequence: Synthetic oligonucleotide
  Sense strand starting at position 3489 of SEQ ID NO: 1560647
ccuguaaucccggcucguu

SEQ ID NO: 1614708 - RNA, 19 nt, Artificial Sequence
  Description of Artificial Sequence: Synthetic oligonucleotide
  Antisense strand to SEQ ID NO: 1614707
aacgagccgggauuacagg

SEQ ID NO: 1614709 - RNA, 19 nt, Artificial Sequence
  Description of Artificial Sequence: Synthetic oligonucleotide
  Sense strand starting at position 3679 of SEQ ID NO: 1560647
gguggagauuguagugauc

SEQ ID NO: 1614710 - RNA, 19 nt, Artificial Sequence
  Description of Artificial Sequence: Synthetic oligonucleotide
  Antisense strand to SEQ ID NO: 1614709
gaucacuacaaucuccacc

SEQ ID NO: 1614711 - RNA, 19 nt, Artificial Sequence
  Description of Artificial Sequence: Synthetic oligonucleotide
  Sense strand starting at position 3686 of SEQ ID NO: 1560647
auuguagugaucugagauc

SEQ ID NO: 1614712 - RNA, 19 nt, Artificial Sequence
  Description of Artificial Sequence: Synthetic oligonucleotide
  Antisense strand to SEQ ID NO: 1614711
gaucucagaucacuacaau

SEQ ID NO: 1614713 - RNA, 19 nt, Artificial Sequence
  Description of Artificial Sequence: Synthetic oligonucleotide
  Sense strand starting at position 13 of SEQ ID NO: 1560648
gccugaagccaacgauaga

SEQ ID NO: 1614714 - RNA, 19 nt, Artificial Sequence
  Description of Artificial Sequence: Synthetic oligonucleotide
  Antisense strand to SEQ ID NO: 1614713
ucuaucguuggcuucaggc

SEQ ID NO: 1614715 - RNA, 19 nt, Artificial Sequence
  Description of Artificial Sequence: Synthetic oligonucleotide
  Sense strand starting at position 38 of SEQ ID NO: 1560648
ucagguucuggucacagau

SEQ ID NO: 1614716 - RNA, 19 nt, Artificial Sequence
  Description of Artificial Sequence: Synthetic oligonucleotide
  Antisense strand to SEQ ID NO: 1614715
aucugugaccagaaccuga

SEQ ID NO: 1614717 - RNA, 19 nt, Artificial Sequence
  Description of Artificial Sequence: Synthetic oligonucleotide
  Sense strand starting at position 140 of SEQ ID NO: 1560648
uggccagugaguuauugga

SEQ ID NO: 1614718 - RNA, 19 nt, Artificial Sequence
  Description of Artificial Sequence: Synthetic oligonucleotide
  Antisense strand to SEQ ID NO: 1614717
uccaauaacucacuggcca

SEQ ID NO: 1614719 - RNA, 19 nt, Artificial Sequence
  Description of Artificial Sequence: Synthetic oligonucleotide
  Sense strand starting at position 142 of SEQ ID NO: 1560648
gccagugaguuauuggaga

SEQ ID NO: 1614720 - RNA, 19 nt, Artificial Sequence
  Description of Artificial Sequence: Synthetic oligonucleotide
  Antisense strand to SEQ ID NO: 1614719
ucuccaauaacucacuggc

SEQ ID NO: 1614721 - RNA, 19 nt, Artificial Sequence
  Description of Artificial Sequence: Synthetic oligonucleotide
  Sense strand starting at position 146 of SEQ ID NO: 1560648
gugaguuauuggagagguc

SEQ ID NO: 1614722 - RNA, 19 nt, Artificial Sequence
  Description of Artificial Sequence: Synthetic oligonucleotide
  Antisense strand to SEQ ID NO: 1614721
gaccucuccaauaacucac

SEQ ID NO: 1614723 - RNA, 19 nt, Artificial Sequence
  Description of Artificial Sequence: Synthetic oligonucleotide
  Sense strand starting at position 218 of SEQ ID NO: 1560648
gcuuguugccguucaggaa

SEQ ID NO: 1614724 - RNA, 19 nt, Artificial Sequence
  Description of Artificial Sequence: Synthetic oligonucleotide
  Antisense strand to SEQ ID NO: 1614723
uuccugaacggcaacaagc

SEQ ID NO: 1614725 - RNA, 19 nt, Artificial Sequence
  Description of Artificial Sequence: Synthetic oligonucleotide
  Sense strand starting at position 286 of SEQ ID NO: 1560648
ugcaauuuguugccuucua

SEQ ID NO: 1614726 - RNA, 19 nt, Artificial Sequence
  Description of Artificial Sequence: Synthetic oligonucleotide
  Antisense strand to SEQ ID NO: 1614725
uagaaggcaacaaauugca

SEQ ID NO: 1614727 - RNA, 19 nt, Artificial Sequence
  Description of Artificial Sequence: Synthetic oligonucleotide
  Sense strand starting at position 580 of SEQ ID NO: 1560648
gcguuucggguuagaucca

SEQ ID NO: 1614728 - RNA, 19 nt, Artificial Sequence
  Description of Artificial Sequence: Synthetic oligonucleotide
  Antisense strand to SEQ ID NO: 1614727
uggaucuaacccgaaacgc

SEQ ID NO: 1614729 - RNA, 19 nt, Artificial Sequence
  Description of Artificial Sequence: Synthetic oligonucleotide
  Sense strand starting at position 665 of SEQ ID NO: 1560648
ggugcaauucuuggagcuu

SEQ ID NO: 1614730 - RNA, 19 nt, Artificial Sequence
  Description of Artificial Sequence: Synthetic oligonucleotide
  Antisense strand to SEQ ID NO: 1614729
aagcuccaagaauugcacc

SEQ ID NO: 1614731 - RNA, 19 nt, Artificial Sequence
  Description of Artificial Sequence: Synthetic oligonucleotide
  Sense strand starting at position 713 of SEQ ID NO: 1560648
ggugggucagguugaagaa

SEQ ID NO: 1614732 - RNA, 19 nt, Artificial Sequence
  Description of Artificial Sequence: Synthetic oligonucleotide
  Antisense strand to SEQ ID NO: 1614731
uucuucaaccugacccacc

SEQ ID NO: 1614733 - RNA, 19 nt, Artificial Sequence
  Description of Artificial Sequence: Synthetic oligonucleotide
  Sense strand starting at position 714 of SEQ ID NO: 1560648
gugggucagguugaagaau

SEQ ID NO: 1614734 - RNA, 19 nt, Artificial Sequence
  Description of Artificial Sequence: Synthetic oligonucleotide
  Antisense strand to SEQ ID NO: 1614733
auucuucaaccugacccac

SEQ ID NO: 1614735 - RNA, 19 nt, Artificial Sequence
  Description of Artificial Sequence: Synthetic oligonucleotide
  Sense strand starting at position 772 of SEQ ID NO: 1560648
gggauuucggcaggugguu

SEQ ID NO: 1614736 - RNA, 19 nt, Artificial Sequence
  Description of Artificial Sequence: Synthetic oligonucleotide
  Antisense strand to SEQ ID NO: 1614735
aaccaccugccgaaauccc

SEQ ID NO: 1614737 - RNA, 19 nt, Artificial Sequence
  Description of Artificial Sequence: Synthetic oligonucleotide
  Sense strand starting at position 887 of SEQ ID NO: 1560648
ggaacagaguucuagaaac

SEQ ID NO: 1614738 - RNA, 19 nt, Artificial Sequence
  Description of Artificial Sequence: Synthetic oligonucleotide
  Antisense strand to SEQ ID NO: 1614737
guuucuagaacucuguucc

SEQ ID NO: 1614739 - RNA, 19 nt, Artificial Sequence
  Description of Artificial Sequence: Synthetic oligonucleotide
  Sense strand starting at position 971 of SEQ ID NO: 1560648
uacacucagcuaggugaaa

SEQ ID NO: 1614740 - RNA, 19 nt, Artificial Sequence
  Description of Artificial Sequence: Synthetic oligonucleotide
  Antisense strand to SEQ ID NO: 1614739
uuucaccuagcugagugua

SEQ ID NO: 1614741 - RNA, 19 nt, Artificial Sequence
  Description of Artificial Sequence: Synthetic oligonucleotide
  Sense strand starting at position 1170 of SEQ ID NO: 1560648
uugaguuucugaguguaac

SEQ ID NO: 1614742 - RNA, 19 nt, Artificial Sequence
  Description of Artificial Sequence: Synthetic oligonucleotide
  Antisense strand to SEQ ID NO: 1614741
guuacacucagaaacucaa

SEQ ID NO: 1614743 - RNA, 19 nt, Artificial Sequence
  Description of Artificial Sequence: Synthetic oligonucleotide
  Sense strand starting at position 1171 of SEQ ID NO: 1560648
ugaguuucugaguguaacu

SEQ ID NO: 1614744 - RNA, 19 nt, Artificial Sequence
  Description of Artificial Sequence: Synthetic oligonucleotide
  Antisense strand to SEQ ID NO: 1614743
aguuacacucagaaacuca

SEQ ID NO: 1614745 - RNA, 19 nt, Artificial Sequence
  Description of Artificial Sequence: Synthetic oligonucleotide
  Sense strand starting at position 1182 of SEQ ID NO: 1560648
guguaacucccgcauaaua

SEQ ID NO: 1614746 - RNA, 19 nt, Artificial Sequence
  Description of Artificial Sequence: Synthetic oligonucleotide
  Antisense strand to SEQ ID NO: 1614745
uauuaugcgggaguuacac

SEQ ID NO: 1614747 - RNA, 19 nt, Artificial Sequence
  Description of Artificial Sequence: Synthetic oligonucleotide
  Sense strand starting at position 1184 of SEQ ID NO: 1560648
guaacucccgcauaauaug

SEQ ID NO: 1614748 - RNA, 19 nt, Artificial Sequence
  Description of Artificial Sequence: Synthetic oligonucleotide
  Antisense strand to SEQ ID NO: 1614747
cauauuaugcgggaguuac

SEQ ID NO: 1614749 - RNA, 19 nt, Artificial Sequence
  Description of Artificial Sequence: Synthetic oligonucleotide
  Sense strand starting at position 1261 of SEQ ID NO: 1560648
cuugcuaguuucuucugau

SEQ ID NO: 1614750 - RNA, 19 nt, Artificial Sequence
  Description of Artificial Sequence: Synthetic oligonucleotide
  Antisense strand to SEQ ID NO: 1614749
aucagaagaaacuagcaag

SEQ ID NO: 1614751 - RNA, 19 nt, Artificial Sequence
  Description of Artificial Sequence: Synthetic oligonucleotide
  Sense strand starting at position 1262 of SEQ ID NO: 1560648
uugcuaguuucuucugauc

SEQ ID NO: 1614752 - RNA, 19 nt, Artificial Sequence
  Description of Artificial Sequence: Synthetic oligonucleotide
  Antisense strand to SEQ ID NO: 1614751
gaucagaagaaacuagcaa

SEQ ID NO: 1614753 - RNA, 19 nt, Artificial Sequence
  Description of Artificial Sequence: Synthetic oligonucleotide
  Sense strand starting at position 1384 of SEQ ID NO: 1560648
agacuucucugcucuggga

SEQ ID NO: 1614754 - RNA, 19 nt, Artificial Sequence
  Description of Artificial Sequence: Synthetic oligonucleotide
  Antisense strand to SEQ ID NO: 1614753
ucccagagcagagaagucu

SEQ ID NO: 1614755 - RNA, 19 nt, Artificial Sequence
  Description of Artificial Sequence: Synthetic oligonucleotide
  Sense strand starting at position 1533 of SEQ ID NO: 1560648
gcagccucugaacaugaaa

SEQ ID NO: 1614756 - RNA, 19 nt, Artificial Sequence
  Description of Artificial Sequence: Synthetic oligonucleotide
  Antisense strand to SEQ ID NO: 1614755
uuucauguucagaggcugc

SEQ ID NO: 1614757 - RNA, 19 nt, Artificial Sequence
  Description of Artificial Sequence: Synthetic oligonucleotide
  Sense strand starting at position 1594 of SEQ ID NO: 1560648
cuugggaagcggugguuua

SEQ ID NO: 1614758 - RNA, 19 nt, Artificial Sequence
  Description of Artificial Sequence: Synthetic oligonucleotide
  Antisense strand to SEQ ID NO: 1614757
uaaaccaccgcuucccaag

SEQ ID NO: 1614759 - RNA, 19 nt, Artificial Sequence
  Description of Artificial Sequence: Synthetic oligonucleotide
  Sense strand starting at position 1689 of SEQ ID NO: 1560648
acaugaucucgacagccuu

SEQ ID NO: 1614760 - RNA, 19 nt, Artificial Sequence
  Description of Artificial Sequence: Synthetic oligonucleotide
  Antisense strand to SEQ ID NO: 1614759
aaggcugucgagaucaugu

SEQ ID NO: 1614761 - RNA, 19 nt, Artificial Sequence
  Description of Artificial Sequence: Synthetic oligonucleotide
  Sense strand starting at position 1868 of SEQ ID NO: 1560648
cugugacuucuauggguua

SEQ ID NO: 1614762 - RNA, 19 nt, Artificial Sequence
  Description of Artificial Sequence: Synthetic oligonucleotide
  Antisense strand to SEQ ID NO: 1614761
uaacccauagaagucacag

SEQ ID NO: 1614763 - RNA, 19 nt, Artificial Sequence
  Description of Artificial Sequence: Synthetic oligonucleotide
  Sense strand starting at position 2168 of SEQ ID NO: 1560648
ccuggaaauuguuuccugu

SEQ ID NO: 1614764 - RNA, 19 nt, Artificial Sequence
  Description of Artificial Sequence: Synthetic oligonucleotide
  Antisense strand to SEQ ID NO: 1614763
acaggaaacaauuuccagg

SEQ ID NO: 1614765 - RNA, 19 nt, Artificial Sequence
  Description of Artificial Sequence: Synthetic oligonucleotide
  Sense strand starting at position 2170 of SEQ ID NO: 1560648
uggaaauuguuuccuguuc

SEQ ID NO: 1614766 - RNA, 19 nt, Artificial Sequence
  Description of Artificial Sequence: Synthetic oligonucleotide
  Antisense strand to SEQ ID NO: 1614765
gaacaggaaacaauuucca

SEQ ID NO: 1614767 - RNA, 19 nt, Artificial Sequence
  Description of Artificial Sequence: Synthetic oligonucleotide
  Sense strand starting at position 2256 of SEQ ID NO: 1560648
auccaagagucucucuagu

SEQ ID NO: 1614768 - RNA, 19 nt, Artificial Sequence
  Description of Artificial Sequence: Synthetic oligonucleotide
  Antisense strand to SEQ ID NO: 1614767
acuagagagacucuuggau

SEQ ID NO: 1614769 - RNA, 19 nt, Artificial Sequence
  Description of Artificial Sequence: Synthetic oligonucleotide
  Sense strand starting at position 2258 of SEQ ID NO: 1560648
ccaagagucucucuaguug

SEQ ID NO: 1614770 - RNA, 19 nt, Artificial Sequence
  Description of Artificial Sequence: Synthetic oligonucleotide
  Antisense strand to SEQ ID NO: 1614769
caacuagagagacucuugg

SEQ ID NO: 1614771 - RNA, 19 nt, Artificial Sequence
  Description of Artificial Sequence: Synthetic oligonucleotide
  Sense strand starting at position 2295 of SEQ ID NO: 1560648
cccggaguucaagggucaa

SEQ ID NO: 1614772 - RNA, 19 nt, Artificial Sequence
  Description of Artificial Sequence: Synthetic oligonucleotide
  Antisense strand to SEQ ID NO: 1614771
uugacccuugaacuccggg

SEQ ID NO: 1614773 - RNA, 19 nt, Artificial Sequence
  Description of Artificial Sequence: Synthetic oligonucleotide
  Sense strand starting at position 2323 of SEQ ID NO: 1560648
ggcacuauuccuggagaca

SEQ ID NO: 1614774 - RNA, 19 nt, Artificial Sequence
  Description of Artificial Sequence: Synthetic oligonucleotide
  Antisense strand to SEQ ID NO: 1614773
ugucuccaggaauagugcc

SEQ ID NO: 1614775 - RNA, 19 nt, Artificial Sequence
  Description of Artificial Sequence: Synthetic oligonucleotide
  Sense strand starting at position 2342 of SEQ ID NO: 1560648
gggacagcucucugagcaa

SEQ ID NO: 1614776 - RNA, 19 nt, Artificial Sequence
  Description of Artificial Sequence: Synthetic oligonucleotide
  Antisense strand to SEQ ID NO: 1614775
uugcucagagagcuguccc

SEQ ID NO: 1614777 - RNA, 19 nt, Artificial Sequence
  Description of Artificial Sequence: Synthetic oligonucleotide
  Sense strand starting at position 2508 of SEQ ID NO: 1560648
ucucuacgguccuuagaca

SEQ ID NO: 1614778 - RNA, 19 nt, Artificial Sequence
  Description of Artificial Sequence: Synthetic oligonucleotide
  Antisense strand to SEQ ID NO: 1614777
ugucuaaggaccguagaga

SEQ ID NO: 1614779 - RNA, 19 nt, Artificial Sequence
  Description of Artificial Sequence: Synthetic oligonucleotide
  Sense strand starting at position 2705 of SEQ ID NO: 1560648
ccaugcuauuguuuccauu

SEQ ID NO: 1614780 - RNA, 19 nt, Artificial Sequence
  Description of Artificial Sequence: Synthetic oligonucleotide
  Antisense strand to SEQ ID NO: 1614779
aauggaaacaauagcaugg

SEQ ID NO: 1614781 - RNA, 19 nt, Artificial Sequence
  Description of Artificial Sequence: Synthetic oligonucleotide
  Sense strand starting at position 2735 of SEQ ID NO: 1560648
ccuauuaaaugcguuugga

SEQ ID NO: 1614782 - RNA, 19 nt, Artificial Sequence
  Description of Artificial Sequence: Synthetic oligonucleotide
  Antisense strand to SEQ ID NO: 1614781
uccaaacgcauuuaauagg

SEQ ID NO: 1614783 - RNA, 19 nt, Artificial Sequence
  Description of Artificial Sequence: Synthetic oligonucleotide
  Sense strand starting at position 2745 of SEQ ID NO: 1560648
gcguuuggaggcuacaaau

SEQ ID NO: 1614784 - RNA, 19 nt, Artificial Sequence
  Description of Artificial Sequence: Synthetic oligonucleotide
  Antisense strand to SEQ ID NO: 1614783
auuuguagccuccaaacgc

SEQ ID NO: 1614785 - RNA, 19 nt, Artificial Sequence
  Description of Artificial Sequence: Synthetic oligonucleotide
  Sense strand starting at position 2806 of SEQ ID NO: 1560648
ugcagagugcuugcauucu

SEQ ID NO: 1614786 - RNA, 19 nt, Artificial Sequence
  Description of Artificial Sequence: Synthetic oligonucleotide
  Antisense strand to SEQ ID NO: 1614785
agaaugcaagcacucugca

SEQ ID NO: 1614787 - RNA, 19 nt, Artificial Sequence
  Description of Artificial Sequence: Synthetic oligonucleotide
  Sense strand starting at position 2810 of SEQ ID NO: 1560648
gagugcuugcauucuuguu

SEQ ID NO: 1614788 - RNA, 19 nt, Artificial Sequence
  Description of Artificial Sequence: Synthetic oligonucleotide
  Antisense strand to SEQ ID NO: 1614787
aacaagaaugcaagcacuc

SEQ ID NO: 1614789 - RNA, 19 nt, Artificial Sequence
  Description of Artificial Sequence: Synthetic oligonucleotide
  Sense strand starting at position 2814 of SEQ ID NO: 1560648
gcuugcauucuuguugagu

SEQ ID NO: 1614790 - RNA, 19 nt, Artificial Sequence
  Description of Artificial Sequence: Synthetic oligonucleotide
  Antisense strand to SEQ ID NO: 1614789
acucaacaagaaugcaagc

SEQ ID NO: 1614791 - RNA, 19 nt, Artificial Sequence
  Description of Artificial Sequence: Synthetic oligonucleotide
  Sense strand starting at position 3234 of SEQ ID NO: 1560648
agcaguguggugcaaucau

SEQ ID NO: 1614792 - RNA, 19 nt, Artificial Sequence
  Description of Artificial Sequence: Synthetic oligonucleotide
  Antisense strand to SEQ ID NO: 1614791
augauugcaccacacugcu

SEQ ID NO: 1614793 - RNA, 19 nt, Artificial Sequence
  Description of Artificial Sequence: Synthetic oligonucleotide
  Sense strand starting at position 268 of SEQ ID NO: 1560649
accacuaugccugguuauu

SEQ ID NO: 1614794 - RNA, 19 nt, Artificial Sequence
  Description of Artificial Sequence: Synthetic oligonucleotide
  Antisense strand to SEQ ID NO: 1614793
aauaaccaggcauaguggu

SEQ ID NO: 1614795 - RNA, 19 nt, Artificial Sequence
  Description of Artificial Sequence: Synthetic oligonucleotide
  Sense strand starting at position 497 of SEQ ID NO: 1560649
ggaggcaguucugauaauc

SEQ ID NO: 1614796 - RNA, 19 nt, Artificial Sequence
  Description of Artificial Sequence: Synthetic oligonucleotide
  Antisense strand to SEQ ID NO: 1614795
gauuaucagaacugccucc

SEQ ID NO: 1614797 - RNA, 19 nt, Artificial Sequence
  Description of Artificial Sequence: Synthetic oligonucleotide
  Sense strand starting at position 569 of SEQ ID NO: 1560649
agcugacuuugaggaggaa

SEQ ID NO: 1614798 - RNA, 19 nt, Artificial Sequence
  Description of Artificial Sequence: Synthetic oligonucleotide
  Antisense strand to SEQ ID NO: 1614797
uuccuccucaaagucagcu

SEQ ID NO: 1614799 - RNA, 19 nt, Artificial Sequence
  Description of Artificial Sequence: Synthetic oligonucleotide
  Sense strand starting at position 715 of SEQ ID NO: 1560649
ggguucaggauguguguca

SEQ ID NO: 1614800 - RNA, 19 nt, Artificial Sequence
  Description of Artificial Sequence: Synthetic oligonucleotide
  Antisense strand to SEQ ID NO: 1614799
ugacacacauccugaaccc

SEQ ID NO: 1614801 - RNA, 19 nt, Artificial Sequence
  Description of Artificial Sequence: Synthetic oligonucleotide
  Sense strand starting at position 804 of SEQ ID NO: 1560649
ggccaaagcuccuaagcau

SEQ ID NO: 1614802 - RNA, 19 nt, Artificial Sequence
  Description of Artificial Sequence: Synthetic oligonucleotide
  Antisense strand to SEQ ID NO: 1614801
augcuuaggagcuuuggcc

SEQ ID NO: 1614803 - RNA, 19 nt, Artificial Sequence
  Description of Artificial Sequence: Synthetic oligonucleotide
  Sense strand starting at position 924 of SEQ ID NO: 1560649
ggguuacacccucaaugcu

SEQ ID NO: 1614804 - RNA, 19 nt, Artificial Sequence
  Description of Artificial Sequence: Synthetic oligonucleotide
  Antisense strand to SEQ ID NO: 1614803
agcauugaggguguaaccc

SEQ ID NO: 1614805 - RNA, 19 nt, Artificial Sequence
  Description of Artificial Sequence: Synthetic oligonucleotide
  Sense strand starting at position 1026 of SEQ ID NO: 1560649
gggugauuacuuugucauu

SEQ ID NO: 1614806 - RNA, 19 nt, Artificial Sequence
  Description of Artificial Sequence: Synthetic oligonucleotide
  Antisense strand to SEQ ID NO: 1614805
aaugacaaaguaaucaccc

SEQ ID NO: 1614807 - RNA, 19 nt, Artificial Sequence
  Description of Artificial Sequence: Synthetic oligonucleotide
  Sense strand starting at position 1028 of SEQ ID NO: 1560649
gugauuacuuugucauuuc

SEQ ID NO: 1614808 - RNA, 19 nt, Artificial Sequence
  Description of Artificial Sequence: Synthetic oligonucleotide
  Antisense strand to SEQ ID NO: 1614807
gaaaugacaaaguaaucac

SEQ ID NO: 1614809 - RNA, 19 nt, Artificial Sequence
  Description of Artificial Sequence: Synthetic oligonucleotide
  Sense strand starting at position 1055 of SEQ ID NO: 1560649
cagcaaaccugucagguua

SEQ ID NO: 1614810 - RNA, 19 nt, Artificial Sequence
  Description of Artificial Sequence: Synthetic oligonucleotide
  Antisense strand to SEQ ID NO: 1614809
uaaccugacagguuugcug

SEQ ID NO: 1614811 - RNA, 19 nt, Artificial Sequence
  Description of Artificial Sequence: Synthetic oligonucleotide
  Sense strand starting at position 1057 of SEQ ID NO: 1560649
gcaaaccugucagguuaca

SEQ ID NO: 1614812 - RNA, 19 nt, Artificial Sequence
  Description of Artificial Sequence: Synthetic oligonucleotide
  Antisense strand to SEQ ID NO: 1614811
uguaaccugacagguuugc

SEQ ID NO: 1614813 - RNA, 19 nt, Artificial Sequence
  Description of Artificial Sequence: Synthetic oligonucleotide
  Sense strand starting at position 2739 of SEQ ID NO: 1560649
aggccugucuucuucgcaa

SEQ ID NO: 1614814 - RNA, 19 nt, Artificial Sequence
  Description of Artificial Sequence: Synthetic oligonucleotide
  Antisense strand to SEQ ID NO: 1614813
uugcgaagaagacaggccu

SEQ ID NO: 1614815 - RNA, 19 nt, Artificial Sequence
  Description of Artificial Sequence: Synthetic oligonucleotide
  Sense strand starting at position 2876 of SEQ ID NO: 1560649
accagaggccucuggagau

SEQ ID NO: 1614816 - RNA, 19 nt, Artificial Sequence
  Description of Artificial Sequence: Synthetic oligonucleotide
  Antisense strand to SEQ ID NO: 1614815
aucuccagaggccucuggu

SEQ ID NO: 1614817 - RNA, 19 nt, Artificial Sequence
  Description of Artificial Sequence: Synthetic oligonucleotide
  Sense strand starting at position 2926 of SEQ ID NO: 1560649
ccacuauccucgugaggcu

SEQ ID NO: 1614818 - RNA, 19 nt, Artificial Sequence
  Description of Artificial Sequence: Synthetic oligonucleotide
  Antisense strand to SEQ ID NO: 1614817
agccucacgaggauagugg

SEQ ID NO: 1614819 - RNA, 19 nt, Artificial Sequence
  Description of Artificial Sequence: Synthetic oligonucleotide
  Sense strand starting at position 3003 of SEQ ID NO: 1560649
ccaagagguugaguccaau

SEQ ID NO: 1614820 - RNA, 19 nt, Artificial Sequence
  Description of Artificial Sequence: Synthetic oligonucleotide
  Antisense strand to SEQ ID NO: 1614819
auuggacucaaccucuugg

SEQ ID NO: 1614821 - RNA, 19 nt, Artificial Sequence
  Description of Artificial Sequence: Synthetic oligonucleotide
  Sense strand starting at position 3009 of SEQ ID NO: 1560649
gguugaguccaaugaggca

SEQ ID NO: 1614822 - RNA, 19 nt, Artificial Sequence
  Description of Artificial Sequence: Synthetic oligonucleotide
  Antisense strand to SEQ ID NO: 1614821
ugccucauuggacucaacc

SEQ ID NO: 1614823 - RNA, 19 nt, Artificial Sequence
  Description of Artificial Sequence: Synthetic oligonucleotide
  Sense strand starting at position 3049 of SEQ ID NO: 1560649
aagguuugagaaggccauu

SEQ ID NO: 1614824 - RNA, 19 nt, Artificial Sequence
  Description of Artificial Sequence: Synthetic oligonucleotide
  Antisense strand to SEQ ID NO: 1614823
aauggccuucucaaaccuu

SEQ ID NO: 1614825 - RNA, 19 nt, Artificial Sequence
  Description of Artificial Sequence: Synthetic oligonucleotide
  Sense strand starting at position 3071 of SEQ ID NO: 1560649
ggccaagacggaugugaaa

SEQ ID NO: 1614826 - RNA, 19 nt, Artificial Sequence
  Description of Artificial Sequence: Synthetic oligonucleotide
  Antisense strand to SEQ ID NO: 1614825
uuucacauccgucuuggcc

SEQ ID NO: 1614827 - RNA, 19 nt, Artificial Sequence
  Description of Artificial Sequence: Synthetic oligonucleotide
  Sense strand starting at position 3073 of SEQ ID NO: 1560649
ccaagacggaugugaaauc

SEQ ID NO: 1614828 - RNA, 19 nt, Artificial Sequence
  Description of Artificial Sequence: Synthetic oligonucleotide
  Antisense strand to SEQ ID NO: 1614827
gauuucacauccgucuugg

SEQ ID NO: 1614829 - RNA, 19 nt, Artificial Sequence
  Description of Artificial Sequence: Synthetic oligonucleotide
  Sense strand starting at position 3178 of SEQ ID NO: 1560649
uuugauauucuccguuuau

SEQ ID NO: 1614830 - RNA, 19 nt, Artificial Sequence
  Description of Artificial Sequence: Synthetic oligonucleotide
  Antisense strand to SEQ ID NO: 1614829
auaaacggagaauaucaaa

SEQ ID NO: 1614831 - RNA, 19 nt, Artificial Sequence
  Description of Artificial Sequence: Synthetic oligonucleotide
  Sense strand starting at position 3179 of SEQ ID NO: 1560649
uugauauucuccguuuaug

SEQ ID NO: 1614832 - RNA, 19 nt, Artificial Sequence
  Description of Artificial Sequence: Synthetic oligonucleotide
  Antisense strand to SEQ ID NO: 1614831
cauaaacggagaauaucaa

SEQ ID NO: 1614833 - RNA, 19 nt, Artificial Sequence
  Description of Artificial Sequence: Synthetic oligonucleotide
  Sense strand starting at position 3190 of SEQ ID NO: 1560649
cguuuauggagagaagguu

SEQ ID NO: 1614834 - RNA, 19 nt, Artificial Sequence
  Description of Artificial Sequence: Synthetic oligonucleotide
  Antisense strand to SEQ ID NO: 1614833
aaccuucucuccauaaacg

SEQ ID NO: 1614835 - RNA, 19 nt, Artificial Sequence
  Description of Artificial Sequence: Synthetic oligonucleotide
  Sense strand starting at position 3212 of SEQ ID NO: 1560649
agaaacugaugguccguua

SEQ ID NO: 1614836 - RNA, 19 nt, Artificial Sequence
  Description of Artificial Sequence: Synthetic oligonucleotide
  Antisense strand to SEQ ID NO: 1614835
uaacggaccaucaguuucu

SEQ ID NO: 1614837 - RNA, 19 nt, Artificial Sequence
  Description of Artificial Sequence: Synthetic oligonucleotide
  Sense strand starting at position 3223 of SEQ ID NO: 1560649
guccguuagugaaagcgua

SEQ ID NO: 1614838 - RNA, 19 nt, Artificial Sequence
  Description of Artificial Sequence: Synthetic oligonucleotide
  Antisense strand to SEQ ID NO: 1614837
uacgcuuucacuaacggac

SEQ ID NO: 1614839 - RNA, 19 nt, Artificial Sequence
  Description of Artificial Sequence: Synthetic oligonucleotide
  Sense strand starting at position 3346 of SEQ ID NO: 1560649
uucuaauuccuuuggugau

SEQ ID NO: 1614840 - RNA, 19 nt, Artificial Sequence
  Description of Artificial Sequence: Synthetic oligonucleotide
  Antisense strand to SEQ ID NO: 1614839
aucaccaaaggaauuagaa

SEQ ID NO: 1614841 - RNA, 19 nt, Artificial Sequence
  Description of Artificial Sequence: Synthetic oligonucleotide
  Sense strand starting at position 3347 of SEQ ID NO: 1560649
ucuaauuccuuuggugauu

SEQ ID NO: 1614842 - RNA, 19 nt, Artificial Sequence
  Description of Artificial Sequence: Synthetic oligonucleotide
  Antisense strand to SEQ ID NO: 1614841
aaucaccaaaggaauuaga

SEQ ID NO: 1614843 - RNA, 19 nt, Artificial Sequence
  Description of Artificial Sequence: Synthetic oligonucleotide
  Sense strand starting at position 3374 of SEQ ID NO: 1560649
gcagacuucuuaggaaaug

SEQ ID NO: 1614844 - RNA, 19 nt, Artificial Sequence
  Description of Artificial Sequence: Synthetic oligonucleotide
  Antisense strand to SEQ ID NO: 1614843
cauuuccuaagaagucugc

SEQ ID NO: 1614845 - RNA, 19 nt, Artificial Sequence
  Description of Artificial Sequence: Synthetic oligonucleotide
  Sense strand starting at position 3375 of SEQ ID NO: 1560649
cagacuucuuaggaaaugu

SEQ ID NO: 1614846 - RNA, 19 nt, Artificial Sequence
  Description of Artificial Sequence: Synthetic oligonucleotide
  Antisense strand to SEQ ID NO: 1614845
acauuuccuaagaagucug

SEQ ID NO: 1614847 - RNA, 19 nt, Artificial Sequence
  Description of Artificial Sequence: Synthetic oligonucleotide
  Sense strand starting at position 3384 of SEQ ID NO: 1560649
uaggaaauguauuaaagga

SEQ ID NO: 1614848 - RNA, 19 nt, Artificial Sequence
  Description of Artificial Sequence: Synthetic oligonucleotide
  Antisense strand to SEQ ID NO: 1614847
uccuuuaauacauuuccua

SEQ ID NO: 1614849 - RNA, 19 nt, Artificial Sequence
  Description of Artificial Sequence: Synthetic oligonucleotide
  Sense strand starting at position 3427 of SEQ ID NO: 1560649
auuacagauugauggcaua

SEQ ID NO: 1614850 - RNA, 19 nt, Artificial Sequence
  Description of Artificial Sequence: Synthetic oligonucleotide
  Antisense strand to SEQ ID NO: 1614849
uaugccaucaaucuguaau

SEQ ID NO: 1614851 - RNA, 19 nt, Artificial Sequence
  Description of Artificial Sequence: Synthetic oligonucleotide
  Sense strand starting at position 3447 of SEQ ID NO: 1560649
agcacuagccuauguguaa

SEQ ID NO: 1614852 - RNA, 19 nt, Artificial Sequence
  Description of Artificial Sequence: Synthetic oligonucleotide
  Antisense strand to SEQ ID NO: 1614851
uuacacauaggcuagugcu

SEQ ID NO: 1614853 - RNA, 19 nt, Artificial Sequence
  Description of Artificial Sequence: Synthetic oligonucleotide
  Sense strand starting at position 3448 of SEQ ID NO: 1560649
gcacuagccuauguguaau

SEQ ID NO: 1614854 - RNA, 19 nt, Artificial Sequence
  Description of Artificial Sequence: Synthetic oligonucleotide
  Antisense strand to SEQ ID NO: 1614853
auuacacauaggcuagugc

SEQ ID NO: 1614855 - RNA, 19 nt, Artificial Sequence
  Description of Artificial Sequence: Synthetic oligonucleotide
  Sense strand starting at position 3454 of SEQ ID NO: 1560649
gccuauguguaauuugguu

SEQ ID NO: 1614856 - RNA, 19 nt, Artificial Sequence
  Description of Artificial Sequence: Synthetic oligonucleotide
  Antisense strand to SEQ ID NO: 1614855
aaccaaauuacacauaggc

SEQ ID NO: 1614857 - RNA, 19 nt, Artificial Sequence
  Description of Artificial Sequence: Synthetic oligonucleotide
  Sense strand starting at position 3475 of SEQ ID NO: 1560649
agaauuuccucagacugcu

SEQ ID NO: 1614858 - RNA, 19 nt, Artificial Sequence
  Description of Artificial Sequence: Synthetic oligonucleotide
  Antisense strand to SEQ ID NO: 1614857
agcagucugaggaaauucu

SEQ ID NO: 1614859 - RNA, 19 nt, Artificial Sequence
  Description of Artificial Sequence: Synthetic oligonucleotide
  Sense strand starting at position 3513 of SEQ ID NO: 1560649
uuuauuuacgcauggcaaa

SEQ ID NO: 1614860 - RNA, 19 nt, Artificial Sequence
  Description of Artificial Sequence: Synthetic oligonucleotide
  Antisense strand to SEQ ID NO: 1614859
uuugccaugcguaaauaaa

SEQ ID NO: 1614861 - RNA, 19 nt, Artificial Sequence
  Description of Artificial Sequence: Synthetic oligonucleotide
  Sense strand starting at position 3562 of SEQ ID NO: 1560649
gguggaucugcgguuuguu

SEQ ID NO: 1614862 - RNA, 19 nt, Artificial Sequence
  Description of Artificial Sequence: Synthetic oligonucleotide
  Antisense strand to SEQ ID NO: 1614861
aacaaaccgcagauccacc

SEQ ID NO: 1614863 - RNA, 19 nt, Artificial Sequence
  Description of Artificial Sequence: Synthetic oligonucleotide
  Sense strand starting at position 28 of SEQ ID NO: 1560650
ggaaguuugucccauauau

SEQ ID NO: 1614864 - RNA, 19 nt, Artificial Sequence
  Description of Artificial Sequence: Synthetic oligonucleotide
  Antisense strand to SEQ ID NO: 1614863
auauaugggacaaacuucc

SEQ ID NO: 1614865 - RNA, 19 nt, Artificial Sequence
  Description of Artificial Sequence: Synthetic oligonucleotide
  Sense strand starting at position 32 of SEQ ID NO: 1560650
guuugucccauauauggga

SEQ ID NO: 1614866 - RNA, 19 nt, Artificial Sequence
  Description of Artificial Sequence: Synthetic oligonucleotide
  Antisense strand to SEQ ID NO: 1614865
ucccauauaugggacaaac

SEQ ID NO: 1614867 - RNA, 19 nt, Artificial Sequence
  Description of Artificial Sequence: Synthetic oligonucleotide
  Sense strand starting at position 37 of SEQ ID NO: 1560650
ucccauauaugggaacuca

SEQ ID NO: 1614868 - RNA, 19 nt, Artificial Sequence
  Description of Artificial Sequence: Synthetic oligonucleotide
  Antisense strand to SEQ ID NO: 1614867
ugaguucccauauauggga

SEQ ID NO: 1614869 - RNA, 19 nt, Artificial Sequence
  Description of Artificial Sequence: Synthetic oligonucleotide
  Sense strand starting at position 87 of SEQ ID NO: 1560650
ggcuguaauucucccucau

SEQ ID NO: 1614870 - RNA, 19 nt, Artificial Sequence
  Description of Artificial Sequence: Synthetic oligonucleotide
  Antisense strand to SEQ ID NO: 1614869
augagggagaauuacagcc

SEQ ID NO: 1614871 - RNA, 19 nt, Artificial Sequence
  Description of Artificial Sequence: Synthetic oligonucleotide
  Sense strand starting at position 619 of SEQ ID NO: 1560650
acaaacauguucucauagu

SEQ ID NO: 1614872 - RNA, 19 nt, Artificial Sequence
  Description of Artificial Sequence: Synthetic oligonucleotide
  Antisense strand to SEQ ID NO: 1614871
acuaugagaacauguuugu

SEQ ID NO: 1614873 - RNA, 19 nt, Artificial Sequence
  Description of Artificial Sequence: Synthetic oligonucleotide
  Sense strand starting at position 928 of SEQ ID NO: 1560650
cugguugugucccagcaga

SEQ ID NO: 1614874 - RNA, 19 nt, Artificial Sequence
  Description of Artificial Sequence: Synthetic oligonucleotide
  Antisense strand to SEQ ID NO: 1614873
ucugcugggacacaaccag

SEQ ID NO: 1614875 - RNA, 19 nt, Artificial Sequence
  Description of Artificial Sequence: Synthetic oligonucleotide
  Sense strand starting at position 965 of SEQ ID NO: 1560650
agcaguugucucggcggau

SEQ ID NO: 1614876 - RNA, 19 nt, Artificial Sequence
  Description of Artificial Sequence: Synthetic oligonucleotide
  Antisense strand to SEQ ID NO: 1614875
auccgccgagacaacugcu

SEQ ID NO: 1614877 - RNA, 19 nt, Artificial Sequence
  Description of Artificial Sequence: Synthetic oligonucleotide
  Sense strand starting at position 966 of SEQ ID NO: 1560650
gcaguugucucggcggaug

SEQ ID NO: 1614878 - RNA, 19 nt, Artificial Sequence
  Description of Artificial Sequence: Synthetic oligonucleotide
  Antisense strand to SEQ ID NO: 1614877
cauccgccgagacaacugc

SEQ ID NO: 1614879 - RNA, 19 nt, Artificial Sequence
  Description of Artificial Sequence: Synthetic oligonucleotide
  Sense strand starting at position 1211 of SEQ ID NO: 1560650
ggcugaggccacugaaauu

SEQ ID NO: 1614880 - RNA, 19 nt, Artificial Sequence
  Description of Artificial Sequence: Synthetic oligonucleotide
  Antisense strand to SEQ ID NO: 1614879
aauuucaguggccucagcc

SEQ ID NO: 1614881 - RNA, 19 nt, Artificial Sequence
  Description of Artificial Sequence: Synthetic oligonucleotide
  Sense strand starting at position 1430 of SEQ ID NO: 1560650
gccaguguuuauuauuaua

SEQ ID NO: 1614882 - RNA, 19 nt, Artificial Sequence
  Description of Artificial Sequence: Synthetic oligonucleotide
  Antisense strand to SEQ ID NO: 1614881
uauaauaauaaacacuggc

SEQ ID NO: 1614883 - RNA, 19 nt, Artificial Sequence
  Description of Artificial Sequence: Synthetic oligonucleotide
  Sense strand starting at position 1466 of SEQ ID NO: 1560650
ccgcuucugaaaugguaaa

SEQ ID NO: 1614884 - RNA, 19 nt, Artificial Sequence
  Description of Artificial Sequence: Synthetic oligonucleotide
  Antisense strand to SEQ ID NO: 1614883
uuuaccauuucagaagcgg

SEQ ID NO: 1614885 - RNA, 19 nt, Artificial Sequence
  Description of Artificial Sequence: Synthetic oligonucleotide
  Sense strand starting at position 1592 of SEQ ID NO: 1560650
ggagauccgggccaguuaa

SEQ ID NO: 1614886 - RNA, 19 nt, Artificial Sequence
  Description of Artificial Sequence: Synthetic oligonucleotide
  Antisense strand to SEQ ID NO: 1614885
uuaacuggcccggaucucc

SEQ ID NO: 1614887 - RNA, 19 nt, Artificial Sequence
  Description of Artificial Sequence: Synthetic oligonucleotide
  Sense strand starting at position 1744 of SEQ ID NO: 1560650
cugggaaguccugggauag

SEQ ID NO: 1614888 - RNA, 19 nt, Artificial Sequence
  Description of Artificial Sequence: Synthetic oligonucleotide
  Antisense strand to SEQ ID NO: 1614887
cuaucccaggacuucccag

SEQ ID NO: 1614889 - RNA, 19 nt, Artificial Sequence
  Description of Artificial Sequence: Synthetic oligonucleotide
  Sense strand starting at position 2093 of SEQ ID NO: 1560650
ccucaagguucucaccaga

SEQ ID NO: 1614890 - RNA, 19 nt, Artificial Sequence
  Description of Artificial Sequence: Synthetic oligonucleotide
  Antisense strand to SEQ ID NO: 1614889
ucuggugagaaccuugagg

SEQ ID NO: 1614891 - RNA, 19 nt, Artificial Sequence
  Description of Artificial Sequence: Synthetic oligonucleotide
  Sense strand starting at position 2096 of SEQ ID NO: 1560650
caagguucucaccagaggu

SEQ ID NO: 1614892 - RNA, 19 nt, Artificial Sequence
  Description of Artificial Sequence: Synthetic oligonucleotide
  Antisense strand to SEQ ID NO: 1614891
accucuggugagaaccuug

SEQ ID NO: 1614893 - RNA, 19 nt, Artificial Sequence
  Description of Artificial Sequence: Synthetic oligonucleotide
  Sense strand starting at position 2150 of SEQ ID NO: 1560650
ccgcuucccucuugcuaga

SEQ ID NO: 1614894 - RNA, 19 nt, Artificial Sequence
  Description of Artificial Sequence: Synthetic oligonucleotide
  Antisense strand to SEQ ID NO: 1614893
ucuagcaagagggaagcgg

SEQ ID NO: 1614895 - RNA, 19 nt, Artificial Sequence
  Description of Artificial Sequence: Synthetic oligonucleotide
  Sense strand starting at position 2163 of SEQ ID NO: 1560650
gcuagaacccagugacuuc

SEQ ID NO: 1614896 - RNA, 19 nt, Artificial Sequence
  Description of Artificial Sequence: Synthetic oligonucleotide
  Antisense strand to SEQ ID NO: 1614895
gaagucacuggguucuagc

SEQ ID NO: 1614897 - RNA, 19 nt, Artificial Sequence
  Description of Artificial Sequence: Synthetic oligonucleotide
  Sense strand starting at position 2338 of SEQ ID NO: 1560650
gagcuaucuuaagagagga

SEQ ID NO: 1614898 - RNA, 19 nt, Artificial Sequence
  Description of Artificial Sequence: Synthetic oligonucleotide
  Antisense strand to SEQ ID NO: 1614897
uccucucuuaagauagcuc

SEQ ID NO: 1614899 - RNA, 19 nt, Artificial Sequence
  Description of Artificial Sequence: Synthetic oligonucleotide
  Sense strand starting at position 2381 of SEQ ID NO: 1560650
gucccaugcaguuaaggaa

SEQ ID NO: 1614900 - RNA, 19 nt, Artificial Sequence
  Description of Artificial Sequence: Synthetic oligonucleotide
  Antisense strand to SEQ ID NO: 1614899
uuccuuaacugcaugggac

SEQ ID NO: 1614901 - RNA, 19 nt, Artificial Sequence
  Description of Artificial Sequence: Synthetic oligonucleotide
  Sense strand starting at position 2536 of SEQ ID NO: 1560650
cccacugaguucuugcaca

SEQ ID NO: 1614902 - RNA, 19 nt, Artificial Sequence
  Description of Artificial Sequence: Synthetic oligonucleotide
  Antisense strand to SEQ ID NO: 1614901
ugugcaagaacucaguggg

SEQ ID NO: 1614903 - RNA, 19 nt, Artificial Sequence
  Description of Artificial Sequence: Synthetic oligonucleotide
  Sense strand starting at position 2933 of SEQ ID NO: 1560650
accuuaacugcgugugaca

SEQ ID NO: 1614904 - RNA, 19 nt, Artificial Sequence
  Description of Artificial Sequence: Synthetic oligonucleotide
  Antisense strand to SEQ ID NO: 1614903
ugucacacgcaguuaaggu

SEQ ID NO: 1614905 - RNA, 19 nt, Artificial Sequence
  Description of Artificial Sequence: Synthetic oligonucleotide
  Sense strand starting at position 3132 of SEQ ID NO: 1560650
uccagagaugcucauucuu

SEQ ID NO: 1614906 - RNA, 19 nt, Artificial Sequence
  Description of Artificial Sequence: Synthetic oligonucleotide
  Antisense strand to SEQ ID NO: 1614905
aagaaugagcaucucugga

SEQ ID NO: 1614907 - RNA, 19 nt, Artificial Sequence
  Description of Artificial Sequence: Synthetic oligonucleotide
  Sense strand starting at position 3596 of SEQ ID NO: 1560650
aggccaccggaaugauaaa

SEQ ID NO: 1614908 - RNA, 19 nt, Artificial Sequence
  Description of Artificial Sequence: Synthetic oligonucleotide
  Antisense strand to SEQ ID NO: 1614907
uuuaucauuccgguggccu

SEQ ID NO: 1614909 - RNA, 19 nt, Artificial Sequence
  Description of Artificial Sequence: Synthetic oligonucleotide
  Sense strand starting at position 3607 of SEQ ID NO: 1560650
augauaaacucaugugccu

SEQ ID NO: 1614910 - RNA, 19 nt, Artificial Sequence
  Description of Artificial Sequence: Synthetic oligonucleotide
  Antisense strand to SEQ ID NO: 1614909
aggcacaugaguuuaucau

SEQ ID NO: 1614911 - RNA, 19 nt, Artificial Sequence
  Description of Artificial Sequence: Synthetic oligonucleotide
  Sense strand starting at position 3616 of SEQ ID NO: 1560650
ucaugugccugcugacaca

SEQ ID NO: 1614912 - RNA, 19 nt, Artificial Sequence
  Description of Artificial Sequence: Synthetic oligonucleotide
  Antisense strand to SEQ ID NO: 1614911
ugugucagcaggcacauga

SEQ ID NO: 1614913 - RNA, 19 nt, Artificial Sequence
  Description of Artificial Sequence: Synthetic oligonucleotide
  Sense strand starting at position 3649 of SEQ ID NO: 1560650
gggaaucccugccugaaua

SEQ ID NO: 1614914 - RNA, 19 nt, Artificial Sequence
  Description of Artificial Sequence: Synthetic oligonucleotide
  Antisense strand to SEQ ID NO: 1614913
uauucaggcagggauuccc

SEQ ID NO: 1614915 - RNA, 19 nt, Artificial Sequence
  Description of Artificial Sequence: Synthetic oligonucleotide
  Sense strand starting at position 3650 of SEQ ID NO: 1560650
ggaaucccugccugaauau

SEQ ID NO: 1614916 - RNA, 19 nt, Artificial Sequence
  Description of Artificial Sequence: Synthetic oligonucleotide
  Antisense strand to SEQ ID NO: 1614915
auauucaggcagggauucc

SEQ ID NO: 1614917 - RNA, 19 nt, Artificial Sequence
  Description of Artificial Sequence: Synthetic oligonucleotide
  Sense strand starting at position 3659 of SEQ ID NO: 1560650
gccugaauauuugcauguu

SEQ ID NO: 1614918 - RNA, 19 nt, Artificial Sequence
  Description of Artificial Sequence: Synthetic oligonucleotide
  Antisense strand to SEQ ID NO: 1614917
aacaugcaaauauucaggc

SEQ ID NO: 1614919 - RNA, 19 nt, Artificial Sequence
  Description of Artificial Sequence: Synthetic oligonucleotide
  Sense strand starting at position 3660 of SEQ ID NO: 1560650
ccugaauauuugcauguuu

SEQ ID NO: 1614920 - RNA, 19 nt, Artificial Sequence
  Description of Artificial Sequence: Synthetic oligonucleotide
  Antisense strand to SEQ ID NO: 1614919
aaacaugcaaauauucagg

SEQ ID NO: 1614921 - RNA, 19 nt, Artificial Sequence
  Description of Artificial Sequence: Synthetic oligonucleotide
  Sense strand starting at position 3671 of SEQ ID NO: 1560650
gcauguuuacagugugaac

SEQ ID NO: 1614922 - RNA, 19 nt, Artificial Sequence
  Description of Artificial Sequence: Synthetic oligonucleotide
  Antisense strand to SEQ ID NO: 1614921
guucacacuguaaacaugc

SEQ ID NO: 1614923 - RNA, 19 nt, Artificial Sequence
  Description of Artificial Sequence: Synthetic oligonucleotide
  Sense strand starting at position 3682 of SEQ ID NO: 1560650
gugugaacugacuaacgaa

SEQ ID NO: 1614924 - RNA, 19 nt, Artificial Sequence
  Description of Artificial Sequence: Synthetic oligonucleotide
  Antisense strand to SEQ ID NO: 1614923
uucguuagucaguucacac

SEQ ID NO: 1614925 - RNA, 19 nt, Artificial Sequence
  Description of Artificial Sequence: Synthetic oligonucleotide
  Sense strand starting at position 3685 of SEQ ID NO: 1560650
ugaacugacuaacgaauaa

SEQ ID NO: 1614926 - RNA, 19 nt, Artificial Sequence
  Description of Artificial Sequence: Synthetic oligonucleotide
  Antisense strand to SEQ ID NO: 1614925
uuauucguuagucaguuca

SEQ ID NO: 1614927 - RNA, 19 nt, Artificial Sequence
  Description of Artificial Sequence: Synthetic oligonucleotide
  Sense strand starting at position 263 of SEQ ID NO: 1560651
augugaggcgcauagcaau

SEQ ID NO: 1614928 - RNA, 19 nt, Artificial Sequence
  Description of Artificial Sequence: Synthetic oligonucleotide
  Antisense strand to SEQ ID NO: 1614927
auugcuaugcgccucacau

SEQ ID NO: 1614929 - RNA, 19 nt, Artificial Sequence
  Description of Artificial Sequence: Synthetic oligonucleotide
  Sense strand starting at position 653 of SEQ ID NO: 1560651
cugagagcccgggauugau

SEQ ID NO: 1614930 - RNA, 19 nt, Artificial Sequence
  Description of Artificial Sequence: Synthetic oligonucleotide
  Antisense strand to SEQ ID NO: 1614929
aucaaucccgggcucucag

SEQ ID NO: 1614931 - RNA, 19 nt, Artificial Sequence
  Description of Artificial Sequence: Synthetic oligonucleotide
  Sense strand starting at position 662 of SEQ ID NO: 1560651
cgggauugauggugaguug

SEQ ID NO: 1614932 - RNA, 19 nt, Artificial Sequence
  Description of Artificial Sequence: Synthetic oligonucleotide
  Antisense strand to SEQ ID NO: 1614931
caacucaccaucaaucccg

SEQ ID NO: 1614933 - RNA, 19 nt, Artificial Sequence
  Description of Artificial Sequence: Synthetic oligonucleotide
  Sense strand starting at position 665 of SEQ ID NO: 1560651
gauugauggugaguuggaa

SEQ ID NO: 1614934 - RNA, 19 nt, Artificial Sequence
  Description of Artificial Sequence: Synthetic oligonucleotide
  Antisense strand to SEQ ID NO: 1614933
uuccaacucaccaucaauc

SEQ ID NO: 1614935 - RNA, 19 nt, Artificial Sequence
  Description of Artificial Sequence: Synthetic oligonucleotide
  Sense strand starting at position 780 of SEQ ID NO: 1560651
gaugaaaggucauagaagg

SEQ ID NO: 1614936 - RNA, 19 nt, Artificial Sequence
  Description of Artificial Sequence: Synthetic oligonucleotide
  Antisense strand to SEQ ID NO: 1614935
ccuucuaugaccuuucauc

SEQ ID NO: 1614937 - RNA, 19 nt, Artificial Sequence
  Description of Artificial Sequence: Synthetic oligonucleotide
  Sense strand starting at position 1025 of SEQ ID NO: 1560651
cuuagaagguccuagaaga

SEQ ID NO: 1614938 - RNA, 19 nt, Artificial Sequence
  Description of Artificial Sequence: Synthetic oligonucleotide
  Antisense strand to SEQ ID NO: 1614937
ucuucuaggaccuucuaag

SEQ ID NO: 1614939 - RNA, 19 nt, Artificial Sequence
  Description of Artificial Sequence: Synthetic oligonucleotide
  Sense strand starting at position 1147 of SEQ ID NO: 1560651
ggcagugguccuggagaga

SEQ ID NO: 1614940 - RNA, 19 nt, Artificial Sequence
  Description of Artificial Sequence: Synthetic oligonucleotide
  Antisense strand to SEQ ID NO: 1614939
ucucuccaggaccacugcc

SEQ ID NO: 1614941 - RNA, 19 nt, Artificial Sequence
  Description of Artificial Sequence: Synthetic oligonucleotide
  Sense strand starting at position 1162 of SEQ ID NO: 1560651
gagacacgugcccaaggau

SEQ ID NO: 1614942 - RNA, 19 nt, Artificial Sequence
  Description of Artificial Sequence: Synthetic oligonucleotide
  Antisense strand to SEQ ID NO: 1614941
auccuugggcacgugucuc

SEQ ID NO: 1614943 - RNA, 19 nt, Artificial Sequence
  Description of Artificial Sequence: Synthetic oligonucleotide
  Sense strand starting at position 1960 of SEQ ID NO: 1560651
caaugaggcucaggaauuu

SEQ ID NO: 1614944 - RNA, 19 nt, Artificial Sequence
  Description of Artificial Sequence: Synthetic oligonucleotide
  Antisense strand to SEQ ID NO: 1614943
aaauuccugagccucauug

SEQ ID NO: 1614945 - RNA, 19 nt, Artificial Sequence
  Description of Artificial Sequence: Synthetic oligonucleotide
  Sense strand starting at position 2381 of SEQ ID NO: 1560651
gcggaauacugaugauggu

SEQ ID NO: 1614946 - RNA, 19 nt, Artificial Sequence
  Description of Artificial Sequence: Synthetic oligonucleotide
  Antisense strand to SEQ ID NO: 1614945
accaucaucaguauuccgc

SEQ ID NO: 1614947 - RNA, 19 nt, Artificial Sequence
  Description of Artificial Sequence: Synthetic oligonucleotide
  Sense strand starting at position 2720 of SEQ ID NO: 1560651
ggguaacuccugcaauaag

SEQ ID NO: 1614948 - RNA, 19 nt, Artificial Sequence
  Description of Artificial Sequence: Synthetic oligonucleotide
  Antisense strand to SEQ ID NO: 1614947
cuuauugcaggaguuaccc

SEQ ID NO: 1614949 - RNA, 19 nt, Artificial Sequence
  Description of Artificial Sequence: Synthetic oligonucleotide
  Sense strand starting at position 2731 of SEQ ID NO: 1560651
gcaauaagguccuggauga

SEQ ID NO: 1614950 - RNA, 19 nt, Artificial Sequence
  Description of Artificial Sequence: Synthetic oligonucleotide
  Antisense strand to SEQ ID NO: 1614949
ucauccaggaccuuauugc

SEQ ID NO: 1614951 - RNA, 19 nt, Artificial Sequence
  Description of Artificial Sequence: Synthetic oligonucleotide
  Sense strand starting at position 2968 of SEQ ID NO: 1560651
cggugugcguugucaggaa

SEQ ID NO: 1614952 - RNA, 19 nt, Artificial Sequence
  Description of Artificial Sequence: Synthetic oligonucleotide
  Antisense strand to SEQ ID NO: 1614951
uuccugacaacgcacaccg

SEQ ID NO: 1614953 - RNA, 19 nt, Artificial Sequence
  Description of Artificial Sequence: Synthetic oligonucleotide
  Sense strand starting at position 2970 of SEQ ID NO: 1560651
gugugcguugucaggaaga

SEQ ID NO: 1614954 - RNA, 19 nt, Artificial Sequence
  Description of Artificial Sequence: Synthetic oligonucleotide
  Antisense strand to SEQ ID NO: 1614953
ucuuccugacaacgcacac

SEQ ID NO: 1614955 - RNA, 19 nt, Artificial Sequence
  Description of Artificial Sequence: Synthetic oligonucleotide
  Sense strand starting at position 3361 of SEQ ID NO: 1560651
gagaaugggucaguuccua

SEQ ID NO: 1614956 - RNA, 19 nt, Artificial Sequence
  Description of Artificial Sequence: Synthetic oligonucleotide
  Antisense strand to SEQ ID NO: 1614955
uaggaacugacccauucuc

SEQ ID NO: 1614957 - RNA, 19 nt, Artificial Sequence
  Description of Artificial Sequence: Synthetic oligonucleotide
  Sense strand starting at position 3366 of SEQ ID NO: 1560651
ugggucaguuccuagcuuu

SEQ ID NO: 1614958 - RNA, 19 nt, Artificial Sequence
  Description of Artificial Sequence: Synthetic oligonucleotide
  Antisense strand to SEQ ID NO: 1614957
aaagcuaggaacugaccca

SEQ ID NO: 1614959 - RNA, 19 nt, Artificial Sequence
  Description of Artificial Sequence: Synthetic oligonucleotide
  Sense strand starting at position 3503 of SEQ ID NO: 1560651
cgcauuuagagcugugaag

SEQ ID NO: 1614960 - RNA, 19 nt, Artificial Sequence
  Description of Artificial Sequence: Synthetic oligonucleotide
  Antisense strand to SEQ ID NO: 1614959
cuucacagcucuaaaugcg

SEQ ID NO: 1614961 - RNA, 19 nt, Artificial Sequence
  Description of Artificial Sequence: Synthetic oligonucleotide
  Sense strand starting at position 3505 of SEQ ID NO: 1560651
cauuuagagcugugaagcu

SEQ ID NO: 1614962 - RNA, 19 nt, Artificial Sequence
  Description of Artificial Sequence: Synthetic oligonucleotide
  Antisense strand to SEQ ID NO: 1614961
agcuucacagcucuaaaug

SEQ ID NO: 1614963 - RNA, 19 nt, Artificial Sequence
  Description of Artificial Sequence: Synthetic oligonucleotide
  Sense strand starting at position 3774 of SEQ ID NO: 1560651
acuaauaacugaggacuca

SEQ ID NO: 1614964 - RNA, 19 nt, Artificial Sequence
  Description of Artificial Sequence: Synthetic oligonucleotide
  Antisense strand to SEQ ID NO: 1614963
ugaguccucaguuauuagu

SEQ ID NO: 1614965 - RNA, 19 nt, Artificial Sequence
  Description of Artificial Sequence: Synthetic oligonucleotide
  Sense strand starting at position 3808 of SEQ ID NO: 1560651
agaugaagguuccuucuuu

SEQ ID NO: 1614966 - RNA, 19 nt, Artificial Sequence
  Description of Artificial Sequence: Synthetic oligonucleotide
  Antisense strand to SEQ ID NO: 1614965
aaagaaggaaccuucaucu

SEQ ID NO: 1614967 - RNA, 19 nt, Artificial Sequence
  Description of Artificial Sequence: Synthetic oligonucleotide
  Sense strand starting at position 3887 of SEQ ID NO: 1560651
gagggaaaguguggcugua

SEQ ID NO: 1614968 - RNA, 19 nt, Artificial Sequence
  Description of Artificial Sequence: Synthetic oligonucleotide
  Antisense strand to SEQ ID NO: 1614967
uacagccacacuuucccuc

SEQ ID NO: 1614969 - RNA, 19 nt, Artificial Sequence
  Description of Artificial Sequence: Synthetic oligonucleotide
  Sense strand starting at position 3970 of SEQ ID NO: 1560651
ucuauaaugagccaggguu

SEQ ID NO: 1614970 - RNA, 19 nt, Artificial Sequence
  Description of Artificial Sequence: Synthetic oligonucleotide
  Antisense strand to SEQ ID NO: 1614969
aacccuggcucauuauaga

SEQ ID NO: 1614971 - RNA, 19 nt, Artificial Sequence
  Description of Artificial Sequence: Synthetic oligonucleotide
  Sense strand starting at position 450 of SEQ ID NO: 1560652
gacauagaguccugacgga

SEQ ID NO: 1614972 - RNA, 19 nt, Artificial Sequence
  Description of Artificial Sequence: Synthetic oligonucleotide
  Antisense strand to SEQ ID NO: 1614971
uccgucaggacucuauguc

SEQ ID NO: 1614973 - RNA, 19 nt, Artificial Sequence
  Description of Artificial Sequence: Synthetic oligonucleotide
  Sense strand starting at position 807 of SEQ ID NO: 1560652
acgaucauagcucauagua

SEQ ID NO: 1614974 - RNA, 19 nt, Artificial Sequence
  Description of Artificial Sequence: Synthetic oligonucleotide
  Antisense strand to SEQ ID NO: 1614973
uacuaugagcuaugaucgu

SEQ ID NO: 1614975 - RNA, 19 nt, Artificial Sequence
  Description of Artificial Sequence: Synthetic oligonucleotide
  Sense strand starting at position 809 of SEQ ID NO: 1560652
gaucauagcucauaguagu

SEQ ID NO: 1614976 - RNA, 19 nt, Artificial Sequence
  Description of Artificial Sequence: Synthetic oligonucleotide
  Antisense strand to SEQ ID NO: 1614975
acuacuaugagcuaugauc

SEQ ID NO: 1614977 - RNA, 19 nt, Artificial Sequence
  Description of Artificial Sequence: Synthetic oligonucleotide
  Sense strand starting at position 815 of SEQ ID NO: 1560652
agcucauaguagucucgaa

SEQ ID NO: 1614978 - RNA, 19 nt, Artificial Sequence
  Description of Artificial Sequence: Synthetic oligonucleotide
  Antisense strand to SEQ ID NO: 1614977
uucgagacuacuaugagcu

SEQ ID NO: 1614979 - RNA, 19 nt, Artificial Sequence
  Description of Artificial Sequence: Synthetic oligonucleotide
  Sense strand starting at position 1475 of SEQ ID NO: 1560652
acuugaagaucugggacau

SEQ ID NO: 1614980 - RNA, 19 nt, Artificial Sequence
  Description of Artificial Sequence: Synthetic oligonucleotide
  Antisense strand to SEQ ID NO: 1614979
augucccagaucuucaagu

SEQ ID NO: 1614981 - RNA, 19 nt, Artificial Sequence
  Description of Artificial Sequence: Synthetic oligonucleotide
  Sense strand starting at position 1481 of SEQ ID NO: 1560652
agaucugggacauguguaa

SEQ ID NO: 1614982 - RNA, 19 nt, Artificial Sequence
  Description of Artificial Sequence: Synthetic oligonucleotide
  Antisense strand to SEQ ID NO: 1614981
uuacacaugucccagaucu

SEQ ID NO: 1614983 - RNA, 19 nt, Artificial Sequence
  Description of Artificial Sequence: Synthetic oligonucleotide
  Sense strand starting at position 1488 of SEQ ID NO: 1560652
ggacauguguaaguucaag

SEQ ID NO: 1614984 - RNA, 19 nt, Artificial Sequence
  Description of Artificial Sequence: Synthetic oligonucleotide
  Antisense strand to SEQ ID NO: 1614983
cuugaacuuacacaugucc

SEQ ID NO: 1614985 - RNA, 19 nt, Artificial Sequence
  Description of Artificial Sequence: Synthetic oligonucleotide
  Sense strand starting at position 1514 of SEQ ID NO: 1560652
gaggucaggcuugguugaa

SEQ ID NO: 1614986 - RNA, 19 nt, Artificial Sequence
  Description of Artificial Sequence: Synthetic oligonucleotide
  Antisense strand to SEQ ID NO: 1614985
uucaaccaagccugaccuc

SEQ ID NO: 1614987 - RNA, 19 nt, Artificial Sequence
  Description of Artificial Sequence: Synthetic oligonucleotide
  Sense strand starting at position 1578 of SEQ ID NO: 1560652
augaguugucaaugucuuc

SEQ ID NO: 1614988 - RNA, 19 nt, Artificial Sequence
  Description of Artificial Sequence: Synthetic oligonucleotide
  Antisense strand to SEQ ID NO: 1614987
gaagacauugacaacucau

SEQ ID NO: 1614989 - RNA, 19 nt, Artificial Sequence
  Description of Artificial Sequence: Synthetic oligonucleotide
  Sense strand starting at position 1583 of SEQ ID NO: 1560652
uugucaaugucuucccaga

SEQ ID NO: 1614990 - RNA, 19 nt, Artificial Sequence
  Description of Artificial Sequence: Synthetic oligonucleotide
  Antisense strand to SEQ ID NO: 1614989
ucugggaagacauugacaa

SEQ ID NO: 1614991 - RNA, 19 nt, Artificial Sequence
  Description of Artificial Sequence: Synthetic oligonucleotide
  Sense strand starting at position 1585 of SEQ ID NO: 1560652
gucaaugucuucccagaug

SEQ ID NO: 1614992 - RNA, 19 nt, Artificial Sequence
  Description of Artificial Sequence: Synthetic oligonucleotide
  Antisense strand to SEQ ID NO: 1614991
caucugggaagacauugac

SEQ ID NO: 1614993 - RNA, 19 nt, Artificial Sequence
  Description of Artificial Sequence: Synthetic oligonucleotide
  Sense strand starting at position 2188 of SEQ ID NO: 1560652
gucuuagaacuuugcaacu

SEQ ID NO: 1614994 - RNA, 19 nt, Artificial Sequence
  Description of Artificial Sequence: Synthetic oligonucleotide
  Antisense strand to SEQ ID NO: 1614993
aguugcaaaguucuaagac

SEQ ID NO: 1614995 - RNA, 19 nt, Artificial Sequence
  Description of Artificial Sequence: Synthetic oligonucleotide
  Sense strand starting at position 2307 of SEQ ID NO: 1560652
uacggacccugucgagaaa

SEQ ID NO: 1614996 - RNA, 19 nt, Artificial Sequence
  Description of Artificial Sequence: Synthetic oligonucleotide
  Antisense strand to SEQ ID NO: 1614995
uuucucgacaggguccgua

SEQ ID NO: 1614997 - RNA, 19 nt, Artificial Sequence
  Description of Artificial Sequence: Synthetic oligonucleotide
  Sense strand starting at position 2386 of SEQ ID NO: 1560652
ggaggauaccuugggccua

SEQ ID NO: 1614998 - RNA, 19 nt, Artificial Sequence
  Description of Artificial Sequence: Synthetic oligonucleotide
  Antisense strand to SEQ ID NO: 1614997
uaggcccaagguauccucc

SEQ ID NO: 1614999 - RNA, 19 nt, Artificial Sequence
  Description of Artificial Sequence: Synthetic oligonucleotide
  Sense strand starting at position 2425 of SEQ ID NO: 1560652
gcaauauagugggaccaca

SEQ ID NO: 1615000 - RNA, 19 nt, Artificial Sequence
  Description of Artificial Sequence: Synthetic oligonucleotide
  Antisense strand to SEQ ID NO: 1614999
uguggucccacuauauugc

SEQ ID NO: 1615001 - RNA, 19 nt, Artificial Sequence
  Description of Artificial Sequence: Synthetic oligonucleotide
  Sense strand starting at position 2553 of SEQ ID NO: 1560652
accugaaucugggaaguug

SEQ ID NO: 1615002 - RNA, 19 nt, Artificial Sequence
  Description of Artificial Sequence: Synthetic oligonucleotide
  Antisense strand to SEQ ID NO: 1615001
caacuucccagauucaggu

SEQ ID NO: 1615003 - RNA, 19 nt, Artificial Sequence
  Description of Artificial Sequence: Synthetic oligonucleotide
  Sense strand starting at position 2698 of SEQ ID NO: 1560652
ccagucaccuggccuuaaa

SEQ ID NO: 1615004 - RNA, 19 nt, Artificial Sequence
  Description of Artificial Sequence: Synthetic oligonucleotide
  Antisense strand to SEQ ID NO: 1615003
uuuaaggccaggugacugg

SEQ ID NO: 1615005 - RNA, 19 nt, Artificial Sequence
  Description of Artificial Sequence: Synthetic oligonucleotide
  Sense strand starting at position 3002 of SEQ ID NO: 1560652
ugagcugggucuuagauga

SEQ ID NO: 1615006 - RNA, 19 nt, Artificial Sequence
  Description of Artificial Sequence: Synthetic oligonucleotide
  Antisense strand to SEQ ID NO: 1615005
ucaucuaagacccagcuca

SEQ ID NO: 1615007 - RNA, 19 nt, Artificial Sequence
  Description of Artificial Sequence: Synthetic oligonucleotide
  Sense strand starting at position 3006 of SEQ ID NO: 1560652
cugggucuuagaugagcaa

SEQ ID NO: 1615008 - RNA, 19 nt, Artificial Sequence
  Description of Artificial Sequence: Synthetic oligonucleotide
  Antisense strand to SEQ ID NO: 1615007
uugcucaucuaagacccag

SEQ ID NO: 1615009 - RNA, 19 nt, Artificial Sequence
  Description of Artificial Sequence: Synthetic oligonucleotide
  Sense strand starting at position 3009 of SEQ ID NO: 1560652
ggucuuagaugagcaaauc

SEQ ID NO: 1615010 - RNA, 19 nt, Artificial Sequence
  Description of Artificial Sequence: Synthetic oligonucleotide
  Antisense strand to SEQ ID NO: 1615009
gauuugcucaucuaagacc

SEQ ID NO: 1615011 - RNA, 19 nt, Artificial Sequence
  Description of Artificial Sequence: Synthetic oligonucleotide
  Sense strand starting at position 3010 of SEQ ID NO: 1560652
gucuuagaugagcaaaucu

SEQ ID NO: 1615012 - RNA, 19 nt, Artificial Sequence
  Description of Artificial Sequence: Synthetic oligonucleotide
  Antisense strand to SEQ ID NO: 1615011
agauuugcucaucuaagac

SEQ ID NO: 1615013 - RNA, 19 nt, Artificial Sequence
  Description of Artificial Sequence: Synthetic oligonucleotide
  Sense strand starting at position 3018 of SEQ ID NO: 1560652
ugagcaaaucuguggaggu

SEQ ID NO: 1615014 - RNA, 19 nt, Artificial Sequence
  Description of Artificial Sequence: Synthetic oligonucleotide
  Antisense strand to SEQ ID NO: 1615013
accuccacagauuugcuca

SEQ ID NO: 1615015 - RNA, 19 nt, Artificial Sequence
  Description of Artificial Sequence: Synthetic oligonucleotide
  Sense strand starting at position 3043 of SEQ ID NO: 1560652
ugaucuguucuccgucuga

SEQ ID NO: 1615016 - RNA, 19 nt, Artificial Sequence
  Description of Artificial Sequence: Synthetic oligonucleotide
  Antisense strand to SEQ ID NO: 1615015
ucagacggagaacagauca

SEQ ID NO: 1615017 - RNA, 19 nt, Artificial Sequence
  Description of Artificial Sequence: Synthetic oligonucleotide
  Sense strand starting at position 3404 of SEQ ID NO: 1560652
ggauguaucuauggccaua

SEQ ID NO: 1615018 - RNA, 19 nt, Artificial Sequence
  Description of Artificial Sequence: Synthetic oligonucleotide
  Antisense strand to SEQ ID NO: 1615017
uauggccauagauacaucc

SEQ ID NO: 1615019 - RNA, 19 nt, Artificial Sequence
  Description of Artificial Sequence: Synthetic oligonucleotide
  Sense strand starting at position 3434 of SEQ ID NO: 1560652
gcaucugauccucgucuca

SEQ ID NO: 1615020 - RNA, 19 nt, Artificial Sequence
  Description of Artificial Sequence: Synthetic oligonucleotide
  Antisense strand to SEQ ID NO: 1615019
ugagacgaggaucagaugc

SEQ ID NO: 1615021 - RNA, 19 nt, Artificial Sequence
  Description of Artificial Sequence: Synthetic oligonucleotide
  Sense strand starting at position 3507 of SEQ ID NO: 1560652
aggaauaccgggugcugua

SEQ ID NO: 1615022 - RNA, 19 nt, Artificial Sequence
  Description of Artificial Sequence: Synthetic oligonucleotide
  Antisense strand to SEQ ID NO: 1615021
uacagcacccgguauuccu

SEQ ID NO: 1615023 - RNA, 19 nt, Artificial Sequence
  Description of Artificial Sequence: Synthetic oligonucleotide
  Sense strand starting at position 3863 of SEQ ID NO: 1560652
gacggagaguucucccuga

SEQ ID NO: 1615024 - RNA, 19 nt, Artificial Sequence
  Description of Artificial Sequence: Synthetic oligonucleotide
  Antisense strand to SEQ ID NO: 1615023
ucagggagaacucuccguc

SEQ ID NO: 1615025 - RNA, 19 nt, Artificial Sequence
  Description of Artificial Sequence: Synthetic oligonucleotide
  Sense strand starting at position 3867 of SEQ ID NO: 1560652
gagaguucucccugacagg

SEQ ID NO: 1615026 - RNA, 19 nt, Artificial Sequence
  Description of Artificial Sequence: Synthetic oligonucleotide
  Antisense strand to SEQ ID NO: 1615025
ccugucagggagaacucuc

SEQ ID NO: 1615027 - RNA, 19 nt, Artificial Sequence
  Description of Artificial Sequence: Synthetic oligonucleotide
  Sense strand starting at position 3949 of SEQ ID NO: 1560652
ggccgacucgggugauuca

SEQ ID NO: 1615028 - RNA, 19 nt, Artificial Sequence
  Description of Artificial Sequence: Synthetic oligonucleotide
  Antisense strand to SEQ ID NO: 1615027
ugaaucacccgagucggcc

SEQ ID NO: 1615029 - RNA, 19 nt, Artificial Sequence
  Description of Artificial Sequence: Synthetic oligonucleotide
  Sense strand starting at position 106 of SEQ ID NO: 1560653
uccuuuaugguguacaguu

SEQ ID NO: 1615030 - RNA, 19 nt, Artificial Sequence
  Description of Artificial Sequence: Synthetic oligonucleotide
  Antisense strand to SEQ ID NO: 1615029
aacuguacaccauaaagga

SEQ ID NO: 1615031 - RNA, 19 nt, Artificial Sequence
  Description of Artificial Sequence: Synthetic oligonucleotide
  Sense strand starting at position 115 of SEQ ID NO: 1560653
guguacaguucuguaacau

SEQ ID NO: 1615032 - RNA, 19 nt, Artificial Sequence
  Description of Artificial Sequence: Synthetic oligonucleotide
  Antisense strand to SEQ ID NO: 1615031
auguuacagaacuguacac

SEQ ID NO: 1615033 - RNA, 19 nt, Artificial Sequence
  Description of Artificial Sequence: Synthetic oligonucleotide
  Sense strand starting at position 116 of SEQ ID NO: 1560653
uguacaguucuguaacauc

SEQ ID NO: 1615034 - RNA, 19 nt, Artificial Sequence
  Description of Artificial Sequence: Synthetic oligonucleotide
  Antisense strand to SEQ ID NO: 1615033
gauguuacagaacuguaca

SEQ ID NO: 1615035 - RNA, 19 nt, Artificial Sequence
  Description of Artificial Sequence: Synthetic oligonucleotide
  Sense strand starting at position 140 of SEQ ID NO: 1560653
guucccuacccagguauaa

SEQ ID NO: 1615036 - RNA, 19 nt, Artificial Sequence
  Description of Artificial Sequence: Synthetic oligonucleotide
  Antisense strand to SEQ ID NO: 1615035
uuauaccuggguagggaac

SEQ ID NO: 1615037 - RNA, 19 nt, Artificial Sequence
  Description of Artificial Sequence: Synthetic oligonucleotide
  Sense strand starting at position 549 of SEQ ID NO: 1560653
acuugaucccgugaaacca

SEQ ID NO: 1615038 - RNA, 19 nt, Artificial Sequence
  Description of Artificial Sequence: Synthetic oligonucleotide
  Antisense strand to SEQ ID NO: 1615037
ugguuucacgggaucaagu

SEQ ID NO: 1615039 - RNA, 19 nt, Artificial Sequence
  Description of Artificial Sequence: Synthetic oligonucleotide
  Sense strand starting at position 735 of SEQ ID NO: 1560653
uuacacuguugugagauuu

SEQ ID NO: 1615040 - RNA, 19 nt, Artificial Sequence
  Description of Artificial Sequence: Synthetic oligonucleotide
  Antisense strand to SEQ ID NO: 1615039
aaaucucacaacaguguaa

SEQ ID NO: 1615041 - RNA, 19 nt, Artificial Sequence
  Description of Artificial Sequence: Synthetic oligonucleotide
  Sense strand starting at position 816 of SEQ ID NO: 1560653
gcacgugugaacggaaaca

SEQ ID NO: 1615042 - RNA, 19 nt, Artificial Sequence
  Description of Artificial Sequence: Synthetic oligonucleotide
  Antisense strand to SEQ ID NO: 1615041
uguuuccguucacacgugc

SEQ ID NO: 1615043 - RNA, 19 nt, Artificial Sequence
  Description of Artificial Sequence: Synthetic oligonucleotide
  Sense strand starting at position 845 of SEQ ID NO: 1560653
agacucuagggaugccaaa

SEQ ID NO: 1615044 - RNA, 19 nt, Artificial Sequence
  Description of Artificial Sequence: Synthetic oligonucleotide
  Antisense strand to SEQ ID NO: 1615043
uuuggcaucccuagagucu

SEQ ID NO: 1615045 - RNA, 19 nt, Artificial Sequence
  Description of Artificial Sequence: Synthetic oligonucleotide
  Sense strand starting at position 968 of SEQ ID NO: 1560653
aagcuugccuggucaagaa

SEQ ID NO: 1615046 - RNA, 19 nt, Artificial Sequence
  Description of Artificial Sequence: Synthetic oligonucleotide
  Antisense strand to SEQ ID NO: 1615045
uucuugaccaggcaagcuu

SEQ ID NO: 1615047 - RNA, 19 nt, Artificial Sequence
  Description of Artificial Sequence: Synthetic oligonucleotide
  Sense strand starting at position 972 of SEQ ID NO: 1560653
uugccuggucaagaaggau

SEQ ID NO: 1615048 - RNA, 19 nt, Artificial Sequence
  Description of Artificial Sequence: Synthetic oligonucleotide
  Antisense strand to SEQ ID NO: 1615047
auccuucuugaccaggcaa

SEQ ID NO: 1615049 - RNA, 19 nt, Artificial Sequence
  Description of Artificial Sequence: Synthetic oligonucleotide
  Sense strand starting at position 1097 of SEQ ID NO: 1560653
uccgguuuaacagguaaau

SEQ ID NO: 1615050 - RNA, 19 nt, Artificial Sequence
  Description of Artificial Sequence: Synthetic oligonucleotide
  Antisense strand to SEQ ID NO: 1615049
auuuaccuguuaaaccgga

SEQ ID NO: 1615051 - RNA, 19 nt, Artificial Sequence
  Description of Artificial Sequence: Synthetic oligonucleotide
  Sense strand starting at position 1099 of SEQ ID NO: 1560653
cgguuuaacagguaaauac

SEQ ID NO: 1615052 - RNA, 19 nt, Artificial Sequence
  Description of Artificial Sequence: Synthetic oligonucleotide
  Antisense strand to SEQ ID NO: 1615051
guauuuaccuguuaaaccg

SEQ ID NO: 1615053 - RNA, 19 nt, Artificial Sequence
  Description of Artificial Sequence: Synthetic oligonucleotide
  Sense strand starting at position 1234 of SEQ ID NO: 1560653
gaggaagaucgccacgaau

SEQ ID NO: 1615054 - RNA, 19 nt, Artificial Sequence
  Description of Artificial Sequence: Synthetic oligonucleotide
  Antisense strand to SEQ ID NO: 1615053
auucguggcgaucuuccuc

SEQ ID NO: 1615055 - RNA, 19 nt, Artificial Sequence
  Description of Artificial Sequence: Synthetic oligonucleotide
  Sense strand starting at position 1236 of SEQ ID NO: 1560653
ggaagaucgccacgaauug

SEQ ID NO: 1615056 - RNA, 19 nt, Artificial Sequence
  Description of Artificial Sequence: Synthetic oligonucleotide
  Antisense strand to SEQ ID NO: 1615055
caauucguggcgaucuucc

SEQ ID NO: 1615057 - RNA, 19 nt, Artificial Sequence
  Description of Artificial Sequence: Synthetic oligonucleotide
  Sense strand starting at position 1237 of SEQ ID NO: 1560653
gaagaucgccacgaauuga

SEQ ID NO: 1615058 - RNA, 19 nt, Artificial Sequence
  Description of Artificial Sequence: Synthetic oligonucleotide
  Antisense strand to SEQ ID NO: 1615057
ucaauucguggcgaucuuc

SEQ ID NO: 1615059 - RNA, 19 nt, Artificial Sequence
  Description of Artificial Sequence: Synthetic oligonucleotide
  Sense strand starting at position 1274 of SEQ ID NO: 1560653
augggugcuguguagucaa

SEQ ID NO: 1615060 - RNA, 19 nt, Artificial Sequence
  Description of Artificial Sequence: Synthetic oligonucleotide
  Antisense strand to SEQ ID NO: 1615059
uugacuacacagcacccau

SEQ ID NO: 1615061 - RNA, 19 nt, Artificial Sequence
  Description of Artificial Sequence: Synthetic oligonucleotide
  Sense strand starting at position 1329 of SEQ ID NO: 1560653
cuuugaauacuccggcuuu

SEQ ID NO: 1615062 - RNA, 19 nt, Artificial Sequence
  Description of Artificial Sequence: Synthetic oligonucleotide
  Antisense strand to SEQ ID NO: 1615061
aaagccggaguauucaaag

SEQ ID NO: 1615063 - RNA, 19 nt, Artificial Sequence
  Description of Artificial Sequence: Synthetic oligonucleotide
  Sense strand starting at position 2541 of SEQ ID NO: 1560653
ucccaauuaucaguaugua

SEQ ID NO: 1615064 - RNA, 19 nt, Artificial Sequence
  Description of Artificial Sequence: Synthetic oligonucleotide
  Antisense strand to SEQ ID NO: 1615063
uacauacugauaauuggga

SEQ ID NO: 1615065 - RNA, 19 nt, Artificial Sequence
  Description of Artificial Sequence: Synthetic oligonucleotide
  Sense strand starting at position 2542 of SEQ ID NO: 1560653
cccaauuaucaguauguag

SEQ ID NO: 1615066 - RNA, 19 nt, Artificial Sequence
  Description of Artificial Sequence: Synthetic oligonucleotide
  Antisense strand to SEQ ID NO: 1615065
cuacauacugauaauuggg

SEQ ID NO: 1615067 - RNA, 19 nt, Artificial Sequence
  Description of Artificial Sequence: Synthetic oligonucleotide
  Sense strand starting at position 2551 of SEQ ID NO: 1560653
caguauguagcuuggauca

SEQ ID NO: 1615068 - RNA, 19 nt, Artificial Sequence
  Description of Artificial Sequence: Synthetic oligonucleotide
  Antisense strand to SEQ ID NO: 1615067
ugauccaagcuacauacug

SEQ ID NO: 1615069 - RNA, 19 nt, Artificial Sequence
  Description of Artificial Sequence: Synthetic oligonucleotide
  Sense strand starting at position 2564 of SEQ ID NO: 1560653
ggaucaauuccgugaacca

SEQ ID NO: 1615070 - RNA, 19 nt, Artificial Sequence
  Description of Artificial Sequence: Synthetic oligonucleotide
  Antisense strand to SEQ ID NO: 1615069
ugguucacggaauugaucc

SEQ ID NO: 1615071 - RNA, 19 nt, Artificial Sequence
  Description of Artificial Sequence: Synthetic oligonucleotide
  Sense strand starting at position 2565 of SEQ ID NO: 1560653
gaucaauuccgugaaccag

SEQ ID NO: 1615072 - RNA, 19 nt, Artificial Sequence
  Description of Artificial Sequence: Synthetic oligonucleotide
  Antisense strand to SEQ ID NO: 1615071
cugguucacggaauugauc

SEQ ID NO: 1615073 - RNA, 19 nt, Artificial Sequence
  Description of Artificial Sequence: Synthetic oligonucleotide
  Sense strand starting at position 2671 of SEQ ID NO: 1560653
ugauguaaacgguaccauu

SEQ ID NO: 1615074 - RNA, 19 nt, Artificial Sequence
  Description of Artificial Sequence: Synthetic oligonucleotide
  Antisense strand to SEQ ID NO: 1615073
aaugguaccguuuacauca

SEQ ID NO: 1615075 - RNA, 19 nt, Artificial Sequence
  Description of Artificial Sequence: Synthetic oligonucleotide
  Sense strand starting at position 2761 of SEQ ID NO: 1560653
acaccucuccguuauguau

SEQ ID NO: 1615076 - RNA, 19 nt, Artificial Sequence
  Description of Artificial Sequence: Synthetic oligonucleotide
  Antisense strand to SEQ ID NO: 1615075
auacauaacggagaggugu

SEQ ID NO: 1615077 - RNA, 19 nt, Artificial Sequence
  Description of Artificial Sequence: Synthetic oligonucleotide
  Sense strand starting at position 2767 of SEQ ID NO: 1560653
cuccguuauguauacacaa

SEQ ID NO: 1615078 - RNA, 19 nt, Artificial Sequence
  Description of Artificial Sequence: Synthetic oligonucleotide
  Antisense strand to SEQ ID NO: 1615077
uuguguauacauaacggag

SEQ ID NO: 1615079 - RNA, 19 nt, Artificial Sequence
  Description of Artificial Sequence: Synthetic oligonucleotide
  Sense strand starting at position 2836 of SEQ ID NO: 1560653
ccacgauuacucgggcuga

SEQ ID NO: 1615080 - RNA, 19 nt, Artificial Sequence
  Description of Artificial Sequence: Synthetic oligonucleotide
  Antisense strand to SEQ ID NO: 1615079
ucagcccgaguaaucgugg

SEQ ID NO: 1615081 - RNA, 19 nt, Artificial Sequence
  Description of Artificial Sequence: Synthetic oligonucleotide
  Sense strand starting at position 2840 of SEQ ID NO: 1560653
gauuacucgggcugaauua

SEQ ID NO: 1615082 - RNA, 19 nt, Artificial Sequence
  Description of Artificial Sequence: Synthetic oligonucleotide
  Antisense strand to SEQ ID NO: 1615081
uaauucagcccgaguaauc

SEQ ID NO: 1615083 - RNA, 19 nt, Artificial Sequence
  Description of Artificial Sequence: Synthetic oligonucleotide
  Sense strand starting at position 2841 of SEQ ID NO: 1560653
auuacucgggcugaauuau

SEQ ID NO: 1615084 - RNA, 19 nt, Artificial Sequence
  Description of Artificial Sequence: Synthetic oligonucleotide
  Antisense strand to SEQ ID NO: 1615083
auaauucagcccgaguaau

SEQ ID NO: 1615085 - RNA, 19 nt, Artificial Sequence
  Description of Artificial Sequence: Synthetic oligonucleotide
  Sense strand starting at position 2853 of SEQ ID NO: 1560653
gaauuauugcaguagccuu

SEQ ID NO: 1615086 - RNA, 19 nt, Artificial Sequence
  Description of Artificial Sequence: Synthetic oligonucleotide
  Antisense strand to SEQ ID NO: 1615085
aaggcuacugcaauaauuc

SEQ ID NO: 1615087 - RNA, 19 nt, Artificial Sequence
  Description of Artificial Sequence: Synthetic oligonucleotide
  Sense strand starting at position 3322 of SEQ ID NO: 1560653
agacuuuggugucuaagga

SEQ ID NO: 1615088 - RNA, 19 nt, Artificial Sequence
  Description of Artificial Sequence: Synthetic oligonucleotide
  Antisense strand to SEQ ID NO: 1615087
uccuuagacaccaaagucu

SEQ ID NO: 1615089 - RNA, 19 nt, Artificial Sequence
  Description of Artificial Sequence: Synthetic oligonucleotide
  Sense strand starting at position 3323 of SEQ ID NO: 1560653
gacuuuggugucuaaggau

SEQ ID NO: 1615090 - RNA, 19 nt, Artificial Sequence
  Description of Artificial Sequence: Synthetic oligonucleotide
  Antisense strand to SEQ ID NO: 1615089
auccuuagacaccaaaguc

SEQ ID NO: 1615091 - RNA, 19 nt, Artificial Sequence
  Description of Artificial Sequence: Synthetic oligonucleotide
  Sense strand starting at position 3366 of SEQ ID NO: 1560653
guuccagucgcgucuaauu

SEQ ID NO: 1615092 - RNA, 19 nt, Artificial Sequence
  Description of Artificial Sequence: Synthetic oligonucleotide
  Antisense strand to SEQ ID NO: 1615091
aauuagacgcgacuggaac

SEQ ID NO: 1615093 - RNA, 19 nt, Artificial Sequence
  Description of Artificial Sequence: Synthetic oligonucleotide
  Sense strand starting at position 3388 of SEQ ID NO: 1560653
ccaguacuugagcacuuua

SEQ ID NO: 1615094 - RNA, 19 nt, Artificial Sequence
  Description of Artificial Sequence: Synthetic oligonucleotide
  Antisense strand to SEQ ID NO: 1615093
uaaagugcucaaguacugg

SEQ ID NO: 1615095 - RNA, 19 nt, Artificial Sequence
  Description of Artificial Sequence: Synthetic oligonucleotide
  Sense strand starting at position 3409 of SEQ ID NO: 1560653
ccagucucugcucaagcau

SEQ ID NO: 1615096 - RNA, 19 nt, Artificial Sequence
  Description of Artificial Sequence: Synthetic oligonucleotide
  Antisense strand to SEQ ID NO: 1615095
augcuugagcagagacugg

SEQ ID NO: 1615097 - RNA, 19 nt, Artificial Sequence
  Description of Artificial Sequence: Synthetic oligonucleotide
  Sense strand starting at position 3446 of SEQ ID NO: 1560653
cccugacagccuuguuuaa

SEQ ID NO: 1615098 - RNA, 19 nt, Artificial Sequence
  Description of Artificial Sequence: Synthetic oligonucleotide
  Antisense strand to SEQ ID NO: 1615097
uuaaacaaggcugucaggg

SEQ ID NO: 1615099 - RNA, 19 nt, Artificial Sequence
  Description of Artificial Sequence: Synthetic oligonucleotide
  Sense strand starting at position 3521 of SEQ ID NO: 1560653
ucucaaguaugucuguuua

SEQ ID NO: 1615100 - RNA, 19 nt, Artificial Sequence
  Description of Artificial Sequence: Synthetic oligonucleotide
  Antisense strand to SEQ ID NO: 1615099
uaaacagacauacuugaga

SEQ ID NO: 1615101 - RNA, 19 nt, Artificial Sequence
  Description of Artificial Sequence: Synthetic oligonucleotide
  Sense strand starting at position 3523 of SEQ ID NO: 1560653
ucaaguaugucuguuuaau

SEQ ID NO: 1615102 - RNA, 19 nt, Artificial Sequence
  Description of Artificial Sequence: Synthetic oligonucleotide
  Antisense strand to SEQ ID NO: 1615101
auuaaacagacauacuuga

SEQ ID NO: 1615103 - RNA, 19 nt, Artificial Sequence
  Description of Artificial Sequence: Synthetic oligonucleotide
  Sense strand starting at position 3648 of SEQ ID NO: 1560653
agggcagcugcucaguuaa

SEQ ID NO: 1615104 - RNA, 19 nt, Artificial Sequence
  Description of Artificial Sequence: Synthetic oligonucleotide
  Antisense strand to SEQ ID NO: 1615103
uuaacugagcagcugcccu

SEQ ID NO: 1615105 - RNA, 19 nt, Artificial Sequence
  Description of Artificial Sequence: Synthetic oligonucleotide
  Sense strand starting at position 3742 of SEQ ID NO: 1560653
gaagccuggcaucauaaga

SEQ ID NO: 1615106 - RNA, 19 nt, Artificial Sequence
  Description of Artificial Sequence: Synthetic oligonucleotide
  Antisense strand to SEQ ID NO: 1615105
ucuuaugaugccaggcuuc

SEQ ID NO: 1615107 - RNA, 19 nt, Artificial Sequence
  Description of Artificial Sequence: Synthetic oligonucleotide
  Sense strand starting at position 3853 of SEQ ID NO: 1560653
augcgaggaaguugaauua

SEQ ID NO: 1615108 - RNA, 19 nt, Artificial Sequence
  Description of Artificial Sequence: Synthetic oligonucleotide
  Antisense strand to SEQ ID NO: 1615107
uaauucaacuuccucgcau

SEQ ID NO: 1615109 - RNA, 19 nt, Artificial Sequence
  Description of Artificial Sequence: Synthetic oligonucleotide
  Sense strand starting at position 18 of SEQ ID NO: 1560654
cugggaaucuagucggaag

SEQ ID NO: 1615110 - RNA, 19 nt, Artificial Sequence
  Description of Artificial Sequence: Synthetic oligonucleotide
  Antisense strand to SEQ ID NO: 1615109
cuuccgacuagauucccag

SEQ ID NO: 1615111 - RNA, 19 nt, Artificial Sequence
  Description of Artificial Sequence: Synthetic oligonucleotide
  Sense strand starting at position 19 of SEQ ID NO: 1560654
ugggaaucuagucggaaga

SEQ ID NO: 1615112 - RNA, 19 nt, Artificial Sequence
  Description of Artificial Sequence: Synthetic oligonucleotide
  Antisense strand to SEQ ID NO: 1615111
ucuuccgacuagauuccca

SEQ ID NO: 1615113 - RNA, 19 nt, Artificial Sequence
  Description of Artificial Sequence: Synthetic oligonucleotide
  Sense strand starting at position 20 of SEQ ID NO: 1560654
gggaaucuagucggaagaa

SEQ ID NO: 1615114 - RNA, 19 nt, Artificial Sequence
  Description of Artificial Sequence: Synthetic oligonucleotide
  Antisense strand to SEQ ID NO: 1615113
uucuuccgacuagauuccc

SEQ ID NO: 1615115 - RNA, 19 nt, Artificial Sequence
  Description of Artificial Sequence: Synthetic oligonucleotide
  Sense strand starting at position 42 of SEQ ID NO: 1560654
cgaagauccugcucccaca

SEQ ID NO: 1615116 - RNA, 19 nt, Artificial Sequence
  Description of Artificial Sequence: Synthetic oligonucleotide
  Antisense strand to SEQ ID NO: 1615115
ugugggagcaggaucuucg

SEQ ID NO: 1615117 - RNA, 19 nt, Artificial Sequence
  Description of Artificial Sequence: Synthetic oligonucleotide
  Sense strand starting at position 262 of SEQ ID NO: 1560654
cuuugcuuauuccuaggua

SEQ ID NO: 1615118 - RNA, 19 nt, Artificial Sequence
  Description of Artificial Sequence: Synthetic oligonucleotide
  Antisense strand to SEQ ID NO: 1615117
uaccuaggaauaagcaaag

SEQ ID NO: 1615119 - RNA, 19 nt, Artificial Sequence
  Description of Artificial Sequence: Synthetic oligonucleotide
  Sense strand starting at position 265 of SEQ ID NO: 1560654
ugcuuauuccuagguauag

SEQ ID NO: 1615120 - RNA, 19 nt, Artificial Sequence
  Description of Artificial Sequence: Synthetic oligonucleotide
  Antisense strand to SEQ ID NO: 1615119
cuauaccuaggaauaagca

SEQ ID NO: 1615121 - RNA, 19 nt, Artificial Sequence
  Description of Artificial Sequence: Synthetic oligonucleotide
  Sense strand starting at position 274 of SEQ ID NO: 1560654
cuagguauaggccaaacua

SEQ ID NO: 1615122 - RNA, 19 nt, Artificial Sequence
  Description of Artificial Sequence: Synthetic oligonucleotide
  Antisense strand to SEQ ID NO: 1615121
uaguuuggccuauaccuag

SEQ ID NO: 1615123 - RNA, 19 nt, Artificial Sequence
  Description of Artificial Sequence: Synthetic oligonucleotide
  Sense strand starting at position 315 of SEQ ID NO: 1560654
auaguuugacucuggaaca

SEQ ID NO: 1615124 - RNA, 19 nt, Artificial Sequence
  Description of Artificial Sequence: Synthetic oligonucleotide
  Antisense strand to SEQ ID NO: 1615123
uguuccagagucaaacuau

SEQ ID NO: 1615125 - RNA, 19 nt, Artificial Sequence
  Description of Artificial Sequence: Synthetic oligonucleotide
  Sense strand starting at position 476 of SEQ ID NO: 1560654
ccaaauugcuccuugggau

SEQ ID NO: 1615126 - RNA, 19 nt, Artificial Sequence
  Description of Artificial Sequence: Synthetic oligonucleotide
  Antisense strand to SEQ ID NO: 1615125
aucccaaggagcaauuugg

SEQ ID NO: 1615127 - RNA, 19 nt, Artificial Sequence
  Description of Artificial Sequence: Synthetic oligonucleotide
  Sense strand starting at position 554 of SEQ ID NO: 1560654
gacggaucagcugacacua

SEQ ID NO: 1615128 - RNA, 19 nt, Artificial Sequence
  Description of Artificial Sequence: Synthetic oligonucleotide
  Antisense strand to SEQ ID NO: 1615127
uagugucagcugauccguc

SEQ ID NO: 1615129 - RNA, 19 nt, Artificial Sequence
  Description of Artificial Sequence: Synthetic oligonucleotide
  Sense strand starting at position 752 of SEQ ID NO: 1560654
cccuaaugcucagcggaga

SEQ ID NO: 1615130 - RNA, 19 nt, Artificial Sequence
  Description of Artificial Sequence: Synthetic oligonucleotide
  Antisense strand to SEQ ID NO: 1615129
ucuccgcugagcauuaggg

SEQ ID NO: 1615131 - RNA, 19 nt, Artificial Sequence
  Description of Artificial Sequence: Synthetic oligonucleotide
  Sense strand starting at position 856 of SEQ ID NO: 1560654
ugauaaaucugucuaggaa

SEQ ID NO: 1615132 - RNA, 19 nt, Artificial Sequence
  Description of Artificial Sequence: Synthetic oligonucleotide
  Antisense strand to SEQ ID NO: 1615131
uuccuagacagauuuauca

SEQ ID NO: 1615133 - RNA, 19 nt, Artificial Sequence
  Description of Artificial Sequence: Synthetic oligonucleotide
  Sense strand starting at position 860 of SEQ ID NO: 1560654
aaaucugucuaggaagaca

SEQ ID NO: 1615134 - RNA, 19 nt, Artificial Sequence
  Description of Artificial Sequence: Synthetic oligonucleotide
  Antisense strand to SEQ ID NO: 1615133
ugucuuccuagacagauuu

SEQ ID NO: 1615135 - RNA, 19 nt, Artificial Sequence
  Description of Artificial Sequence: Synthetic oligonucleotide
  Sense strand starting at position 924 of SEQ ID NO: 1560654
uagggagaguucucacuaa

SEQ ID NO: 1615136 - RNA, 19 nt, Artificial Sequence
  Description of Artificial Sequence: Synthetic oligonucleotide
  Antisense strand to SEQ ID NO: 1615135
uuagugagaacucucccua

SEQ ID NO: 1615137 - RNA, 19 nt, Artificial Sequence
  Description of Artificial Sequence: Synthetic oligonucleotide
  Sense strand starting at position 1137 of SEQ ID NO: 1560654
ggcacuuucuagcccagau

SEQ ID NO: 1615138 - RNA, 19 nt, Artificial Sequence
  Description of Artificial Sequence: Synthetic oligonucleotide
  Antisense strand to SEQ ID NO: 1615137
aucugggcuagaaagugcc

SEQ ID NO: 1615139 - RNA, 19 nt, Artificial Sequence
  Description of Artificial Sequence: Synthetic oligonucleotide
  Sense strand starting at position 1214 of SEQ ID NO: 1560654
cuucuuuguauugggagga

SEQ ID NO: 1615140 - RNA, 19 nt, Artificial Sequence
  Description of Artificial Sequence: Synthetic oligonucleotide
  Antisense strand to SEQ ID NO: 1615139
uccucccaauacaaagaag

SEQ ID NO: 1615141 - RNA, 19 nt, Artificial Sequence
  Description of Artificial Sequence: Synthetic oligonucleotide
  Sense strand starting at position 1218 of SEQ ID NO: 1560654
uuuguauugggaggaugua

SEQ ID NO: 1615142 - RNA, 19 nt, Artificial Sequence
  Description of Artificial Sequence: Synthetic oligonucleotide
  Antisense strand to SEQ ID NO: 1615141
uacauccucccaauacaaa

SEQ ID NO: 1615143 - RNA, 19 nt, Artificial Sequence
  Description of Artificial Sequence: Synthetic oligonucleotide
  Sense strand starting at position 1271 of SEQ ID NO: 1560654
gcuggaaugacaugcuaug

SEQ ID NO: 1615144 - RNA, 19 nt, Artificial Sequence
  Description of Artificial Sequence: Synthetic oligonucleotide
  Antisense strand to SEQ ID NO: 1615143
cauagcaugucauuccagc

SEQ ID NO: 1615145 - RNA, 19 nt, Artificial Sequence
  Description of Artificial Sequence: Synthetic oligonucleotide
  Sense strand starting at position 1375 of SEQ ID NO: 1560654
ucuugcaagcucugaaauu

SEQ ID NO: 1615146 - RNA, 19 nt, Artificial Sequence
  Description of Artificial Sequence: Synthetic oligonucleotide
  Antisense strand to SEQ ID NO: 1615145
aauuucagagcuugcaaga

SEQ ID NO: 1615147 - RNA, 19 nt, Artificial Sequence
  Description of Artificial Sequence: Synthetic oligonucleotide
  Sense strand starting at position 1597 of SEQ ID NO: 1560654
cacuguacuguggauacaa

SEQ ID NO: 1615148 - RNA, 19 nt, Artificial Sequence
  Description of Artificial Sequence: Synthetic oligonucleotide
  Antisense strand to SEQ ID NO: 1615147
uuguauccacaguacagug

SEQ ID NO: 1615149 - RNA, 19 nt, Artificial Sequence
  Description of Artificial Sequence: Synthetic oligonucleotide
  Sense strand starting at position 2202 of SEQ ID NO: 1560654
uuucguuugcaguagagag

SEQ ID NO: 1615150 - RNA, 19 nt, Artificial Sequence
  Description of Artificial Sequence: Synthetic oligonucleotide
  Antisense strand to SEQ ID NO: 1615149
cucucuacugcaaacgaaa

SEQ ID NO: 1615151 - RNA, 19 nt, Artificial Sequence
  Description of Artificial Sequence: Synthetic oligonucleotide
  Sense strand starting at position 2289 of SEQ ID NO: 1560654
uucuguaauuauccaggga

SEQ ID NO: 1615152 - RNA, 19 nt, Artificial Sequence
  Description of Artificial Sequence: Synthetic oligonucleotide
  Antisense strand to SEQ ID NO: 1615151
ucccuggauaauuacagaa

SEQ ID NO: 1615153 - RNA, 19 nt, Artificial Sequence
  Description of Artificial Sequence: Synthetic oligonucleotide
  Sense strand starting at position 2292 of SEQ ID NO: 1560654
uguaauuauccagggaaca

SEQ ID NO: 1615154 - RNA, 19 nt, Artificial Sequence
  Description of Artificial Sequence: Synthetic oligonucleotide
  Antisense strand to SEQ ID NO: 1615153
uguucccuggauaauuaca

SEQ ID NO: 1615155 - RNA, 19 nt, Artificial Sequence
  Description of Artificial Sequence: Synthetic oligonucleotide
  Sense strand starting at position 2293 of SEQ ID NO: 1560654
guaauuauccagggaacau

SEQ ID NO: 1615156 - RNA, 19 nt, Artificial Sequence
  Description of Artificial Sequence: Synthetic oligonucleotide
  Antisense strand to SEQ ID NO: 1615155
auguucccuggauaauuac

SEQ ID NO: 1615157 - RNA, 19 nt, Artificial Sequence
  Description of Artificial Sequence: Synthetic oligonucleotide
  Sense strand starting at position 2352 of SEQ ID NO: 1560654
ucaguuugcucccuguaaa

SEQ ID NO: 1615158 - RNA, 19 nt, Artificial Sequence
  Description of Artificial Sequence: Synthetic oligonucleotide
  Antisense strand to SEQ ID NO: 1615157
uuuacagggagcaaacuga

SEQ ID NO: 1615159 - RNA, 19 nt, Artificial Sequence
  Description of Artificial Sequence: Synthetic oligonucleotide
  Sense strand starting at position 2355 of SEQ ID NO: 1560654
guuugcucccuguaaauag

SEQ ID NO: 1615160 - RNA, 19 nt, Artificial Sequence
  Description of Artificial Sequence: Synthetic oligonucleotide
  Antisense strand to SEQ ID NO: 1615159
cuauuuacagggagcaaac

SEQ ID NO: 1615161 - RNA, 19 nt, Artificial Sequence
  Description of Artificial Sequence: Synthetic oligonucleotide
  Sense strand starting at position 2391 of SEQ ID NO: 1560654
cguugcuuacuguaaggau

SEQ ID NO: 1615162 - RNA, 19 nt, Artificial Sequence
  Description of Artificial Sequence: Synthetic oligonucleotide
  Antisense strand to SEQ ID NO: 1615161
auccuuacaguaagcaacg

SEQ ID NO: 1615163 - RNA, 19 nt, Artificial Sequence
  Description of Artificial Sequence: Synthetic oligonucleotide
  Sense strand starting at position 2451 of SEQ ID NO: 1560654
ggcacauauuaaguacuua

SEQ ID NO: 1615164 - RNA, 19 nt, Artificial Sequence
  Description of Artificial Sequence: Synthetic oligonucleotide
  Antisense strand to SEQ ID NO: 1615163
uaaguacuuaauaugugcc

SEQ ID NO: 1615165 - RNA, 19 nt, Artificial Sequence
  Description of Artificial Sequence: Synthetic oligonucleotide
  Sense strand starting at position 2484 of SEQ ID NO: 1560654
ccuguuucugcucacagaa

SEQ ID NO: 1615166 - RNA, 19 nt, Artificial Sequence
  Description of Artificial Sequence: Synthetic oligonucleotide
  Antisense strand to SEQ ID NO: 1615165
uucugugagcagaaacagg

SEQ ID NO: 1615167 - RNA, 19 nt, Artificial Sequence
  Description of Artificial Sequence: Synthetic oligonucleotide
  Sense strand starting at position 2554 of SEQ ID NO: 1560654
uaaauaggcgaaugcuauu

SEQ ID NO: 1615168 - RNA, 19 nt, Artificial Sequence
  Description of Artificial Sequence: Synthetic oligonucleotide
  Antisense strand to SEQ ID NO: 1615167
aauagcauucgccuauuua

SEQ ID NO: 1615169 - RNA, 19 nt, Artificial Sequence
  Description of Artificial Sequence: Synthetic oligonucleotide
  Sense strand starting at position 2603 of SEQ ID NO: 1560654
cacacacugcgagguuuaa

SEQ ID NO: 1615170 - RNA, 19 nt, Artificial Sequence
  Description of Artificial Sequence: Synthetic oligonucleotide
  Antisense strand to SEQ ID NO: 1615169
uuaaaccucgcagugugug

SEQ ID NO: 1615171 - RNA, 19 nt, Artificial Sequence
  Description of Artificial Sequence: Synthetic oligonucleotide
  Sense strand starting at position 2671 of SEQ ID NO: 1560654
ugagguugucagcacaguu

SEQ ID NO: 1615172 - RNA, 19 nt, Artificial Sequence
  Description of Artificial Sequence: Synthetic oligonucleotide
  Antisense strand to SEQ ID NO: 1615171
aacugugcugacaaccuca

SEQ ID NO: 1615173 - RNA, 19 nt, Artificial Sequence
  Description of Artificial Sequence: Synthetic oligonucleotide
  Sense strand starting at position 2711 of SEQ ID NO: 1560654
ggacaaucuguguguccua

SEQ ID NO: 1615174 - RNA, 19 nt, Artificial Sequence
  Description of Artificial Sequence: Synthetic oligonucleotide
  Antisense strand to SEQ ID NO: 1615173
uaggacacacagauugucc

SEQ ID NO: 1615175 - RNA, 19 nt, Artificial Sequence
  Description of Artificial Sequence: Synthetic oligonucleotide
  Sense strand starting at position 2712 of SEQ ID NO: 1560654
gacaaucuguguguccuau

SEQ ID NO: 1615176 - RNA, 19 nt, Artificial Sequence
  Description of Artificial Sequence: Synthetic oligonucleotide
  Antisense strand to SEQ ID NO: 1615175
auaggacacacagauuguc

SEQ ID NO: 1615177 - RNA, 19 nt, Artificial Sequence
  Description of Artificial Sequence: Synthetic oligonucleotide
  Sense strand starting at position 2757 of SEQ ID NO: 1560654
cugggaauccuuggaguuc

SEQ ID NO: 1615178 - RNA, 19 nt, Artificial Sequence
  Description of Artificial Sequence: Synthetic oligonucleotide
  Antisense strand to SEQ ID NO: 1615177
gaacuccaaggauucccag

SEQ ID NO: 1615179 - RNA, 19 nt, Artificial Sequence
  Description of Artificial Sequence: Synthetic oligonucleotide
  Sense strand starting at position 2770 of SEQ ID NO: 1560654
gaguucuuggcuuguagau

SEQ ID NO: 1615180 - RNA, 19 nt, Artificial Sequence
  Description of Artificial Sequence: Synthetic oligonucleotide
  Antisense strand to SEQ ID NO: 1615179
aucuacaagccaagaacuc

SEQ ID NO: 1615181 - RNA, 19 nt, Artificial Sequence
  Description of Artificial Sequence: Synthetic oligonucleotide
  Sense strand starting at position 3064 of SEQ ID NO: 1560654
aggauaaugucaucucaag

SEQ ID NO: 1615182 - RNA, 19 nt, Artificial Sequence
  Description of Artificial Sequence: Synthetic oligonucleotide
  Antisense strand to SEQ ID NO: 1615181
cuugagaugacauuauccu

SEQ ID NO: 1615183 - RNA, 19 nt, Artificial Sequence
  Description of Artificial Sequence: Synthetic oligonucleotide
  Sense strand starting at position 3539 of SEQ ID NO: 1560654
auugaauggugucuggaua

SEQ ID NO: 1615184 - RNA, 19 nt, Artificial Sequence
  Description of Artificial Sequence: Synthetic oligonucleotide
  Antisense strand to SEQ ID NO: 1615183
uauccagacaccauucaau

SEQ ID NO: 1615185 - RNA, 19 nt, Artificial Sequence
  Description of Artificial Sequence: Synthetic oligonucleotide
  Sense strand starting at position 3540 of SEQ ID NO: 1560654
uugaauggugucuggauau

SEQ ID NO: 1615186 - RNA, 19 nt, Artificial Sequence
  Description of Artificial Sequence: Synthetic oligonucleotide
  Antisense strand to SEQ ID NO: 1615185
auauccagacaccauucaa

SEQ ID NO: 1615187 - RNA, 19 nt, Artificial Sequence
  Description of Artificial Sequence: Synthetic oligonucleotide
  Sense strand starting at position 3547 of SEQ ID NO: 1560654
gugucuggauaucuuaagu

SEQ ID NO: 1615188 - RNA, 19 nt, Artificial Sequence
  Description of Artificial Sequence: Synthetic oligonucleotide
  Antisense strand to SEQ ID NO: 1615187
acuuaagauauccagacac

SEQ ID NO: 1615189 - RNA, 19 nt, Artificial Sequence
  Description of Artificial Sequence: Synthetic oligonucleotide
  Sense strand starting at position 14 of SEQ ID NO: 1560655
cccaguuaauuguuguacu

SEQ ID NO: 1615190 - RNA, 19 nt, Artificial Sequence
  Description of Artificial Sequence: Synthetic oligonucleotide
  Antisense strand to SEQ ID NO: 1615189
aguacaacaauuaacuggg

SEQ ID NO: 1615191 - RNA, 19 nt, Artificial Sequence
  Description of Artificial Sequence: Synthetic oligonucleotide
  Sense strand starting at position 347 of SEQ ID NO: 1560655
ggcacugagcucugucaau

SEQ ID NO: 1615192 - RNA, 19 nt, Artificial Sequence
  Description of Artificial Sequence: Synthetic oligonucleotide
  Antisense strand to SEQ ID NO: 1615191
auugacagagcucagugcc

SEQ ID NO: 1615193 - RNA, 19 nt, Artificial Sequence
  Description of Artificial Sequence: Synthetic oligonucleotide
  Sense strand starting at position 469 of SEQ ID NO: 1560655
acucacagauccugugaga

SEQ ID NO: 1615194 - RNA, 19 nt, Artificial Sequence
  Description of Artificial Sequence: Synthetic oligonucleotide
  Antisense strand to SEQ ID NO: 1615193
ucucacaggaucugugagu

SEQ ID NO: 1615195 - RNA, 19 nt, Artificial Sequence
  Description of Artificial Sequence: Synthetic oligonucleotide
  Sense strand starting at position 472 of SEQ ID NO: 1560655
cacagauccugugagauaa

SEQ ID NO: 1615196 - RNA, 19 nt, Artificial Sequence
  Description of Artificial Sequence: Synthetic oligonucleotide
  Antisense strand to SEQ ID NO: 1615195
uuaucucacaggaucugug

SEQ ID NO: 1615197 - RNA, 19 nt, Artificial Sequence
  Description of Artificial Sequence: Synthetic oligonucleotide
  Sense strand starting at position 474 of SEQ ID NO: 1560655
cagauccugugagauaaua

SEQ ID NO: 1615198 - RNA, 19 nt, Artificial Sequence
  Description of Artificial Sequence: Synthetic oligonucleotide
  Antisense strand to SEQ ID NO: 1615197
uauuaucucacaggaucug

SEQ ID NO: 1615199 - RNA, 19 nt, Artificial Sequence
  Description of Artificial Sequence: Synthetic oligonucleotide
  Sense strand starting at position 509 of SEQ ID NO: 1560655
gcugcuaaaugggugauuu

SEQ ID NO: 1615200 - RNA, 19 nt, Artificial Sequence
  Description of Artificial Sequence: Synthetic oligonucleotide
  Antisense strand to SEQ ID NO: 1615199
aaaucacccauuuagcagc

SEQ ID NO: 1615201 - RNA, 19 nt, Artificial Sequence
  Description of Artificial Sequence: Synthetic oligonucleotide
  Sense strand starting at position 1117 of SEQ ID NO: 1560655
ccacccaguugucuacaau

SEQ ID NO: 1615202 - RNA, 19 nt, Artificial Sequence
  Description of Artificial Sequence: Synthetic oligonucleotide
  Antisense strand to SEQ ID NO: 1615201
auuguagacaacugggugg

SEQ ID NO: 1615203 - RNA, 19 nt, Artificial Sequence
  Description of Artificial Sequence: Synthetic oligonucleotide
  Sense strand starting at position 1120 of SEQ ID NO: 1560655
cccaguugucuacaaucca

SEQ ID NO: 1615204 - RNA, 19 nt, Artificial Sequence
  Description of Artificial Sequence: Synthetic oligonucleotide
  Antisense strand to SEQ ID NO: 1615203
uggauuguagacaacuggg

SEQ ID NO: 1615205 - RNA, 19 nt, Artificial Sequence
  Description of Artificial Sequence: Synthetic oligonucleotide
  Sense strand starting at position 1127 of SEQ ID NO: 1560655
gucuacaauccagggacaa

SEQ ID NO: 1615206 - RNA, 19 nt, Artificial Sequence
  Description of Artificial Sequence: Synthetic oligonucleotide
  Antisense strand to SEQ ID NO: 1615205
uugucccuggauuguagac

SEQ ID NO: 1615207 - RNA, 19 nt, Artificial Sequence
  Description of Artificial Sequence: Synthetic oligonucleotide
  Sense strand starting at position 1189 of SEQ ID NO: 1560655
ccaagaggcuauugaauaa

SEQ ID NO: 1615208 - RNA, 19 nt, Artificial Sequence
  Description of Artificial Sequence: Synthetic oligonucleotide
  Antisense strand to SEQ ID NO: 1615207
uuauucaauagccucuugg

SEQ ID NO: 1615209 - RNA, 19 nt, Artificial Sequence
  Description of Artificial Sequence: Synthetic oligonucleotide
  Sense strand starting at position 1202 of SEQ ID NO: 1560655
gaauaagugacguguuguc

SEQ ID NO: 1615210 - RNA, 19 nt, Artificial Sequence
  Description of Artificial Sequence: Synthetic oligonucleotide
  Antisense strand to SEQ ID NO: 1615209
gacaacacgucacuuauuc

SEQ ID NO: 1615211 - RNA, 19 nt, Artificial Sequence
  Description of Artificial Sequence: Synthetic oligonucleotide
  Sense strand starting at position 1207 of SEQ ID NO: 1560655
agugacguguugucugacu

SEQ ID NO: 1615212 - RNA, 19 nt, Artificial Sequence
  Description of Artificial Sequence: Synthetic oligonucleotide
  Antisense strand to SEQ ID NO: 1615211
agucagacaacacgucacu

SEQ ID NO: 1615213 - RNA, 19 nt, Artificial Sequence
  Description of Artificial Sequence: Synthetic oligonucleotide
  Sense strand starting at position 1212 of SEQ ID NO: 1560655
cguguugucugacugcuua

SEQ ID NO: 1615214 - RNA, 19 nt, Artificial Sequence
  Description of Artificial Sequence: Synthetic oligonucleotide
  Antisense strand to SEQ ID NO: 1615213
uaagcagucagacaacacg

SEQ ID NO: 1615215 - RNA, 19 nt, Artificial Sequence
  Description of Artificial Sequence: Synthetic oligonucleotide
  Sense strand starting at position 1518 of SEQ ID NO: 1560655
cguggugguacacauuaau

SEQ ID NO: 1615216 - RNA, 19 nt, Artificial Sequence
  Description of Artificial Sequence: Synthetic oligonucleotide
  Antisense strand to SEQ ID NO: 1615215
auuaauguguaccaccacg

SEQ ID NO: 1615217 - RNA, 19 nt, Artificial Sequence
  Description of Artificial Sequence: Synthetic oligonucleotide
  Sense strand starting at position 1690 of SEQ ID NO: 1560655
ccgcaugcguccucaucau

SEQ ID NO: 1615218 - RNA, 19 nt, Artificial Sequence
  Description of Artificial Sequence: Synthetic oligonucleotide
  Antisense strand to SEQ ID NO: 1615217
augaugaggacgcaugcgg

SEQ ID NO: 1615219 - RNA, 19 nt, Artificial Sequence
  Description of Artificial Sequence: Synthetic oligonucleotide
  Sense strand starting at position 1709 of SEQ ID NO: 1560655
cucuguugcuggguuuauu

SEQ ID NO: 1615220 - RNA, 19 nt, Artificial Sequence
  Description of Artificial Sequence: Synthetic oligonucleotide
  Antisense strand to SEQ ID NO: 1615219
aauaaacccagcaacagag

SEQ ID NO: 1615221 - RNA, 19 nt, Artificial Sequence
  Description of Artificial Sequence: Synthetic oligonucleotide
  Sense strand starting at position 1787 of SEQ ID NO: 1560655
ggaacuuuacccggaucgu

SEQ ID NO: 1615222 - RNA, 19 nt, Artificial Sequence
  Description of Artificial Sequence: Synthetic oligonucleotide
  Antisense strand to SEQ ID NO: 1615221
acgauccggguaaaguucc

SEQ ID NO: 1615223 - RNA, 19 nt, Artificial Sequence
  Description of Artificial Sequence: Synthetic oligonucleotide
  Sense strand starting at position 1802 of SEQ ID NO: 1560655
ucgucuugucgauguacuu

SEQ ID NO: 1615224 - RNA, 19 nt, Artificial Sequence
  Description of Artificial Sequence: Synthetic oligonucleotide
  Antisense strand to SEQ ID NO: 1615223
aaguacaucgacaagacga

SEQ ID NO: 1615225 - RNA, 19 nt, Artificial Sequence
  Description of Artificial Sequence: Synthetic oligonucleotide
  Sense strand starting at position 1808 of SEQ ID NO: 1560655
ugucgauguacuuggacaa

SEQ ID NO: 1615226 - RNA, 19 nt, Artificial Sequence
  Description of Artificial Sequence: Synthetic oligonucleotide
  Antisense strand to SEQ ID NO: 1615225
uuguccaaguacaucgaca

SEQ ID NO: 1615227 - RNA, 19 nt, Artificial Sequence
  Description of Artificial Sequence: Synthetic oligonucleotide
  Sense strand starting at position 2709 of SEQ ID NO: 1560655
gaccuuggacgauggaauu

SEQ ID NO: 1615228 - RNA, 19 nt, Artificial Sequence
  Description of Artificial Sequence: Synthetic oligonucleotide
  Antisense strand to SEQ ID NO: 1615227
aauuccaucguccaagguc

SEQ ID NO: 1615229 - RNA, 19 nt, Artificial Sequence
  Description of Artificial Sequence: Synthetic oligonucleotide
  Sense strand starting at position 2720 of SEQ ID NO: 1560655
auggaauucgugugcagaa

SEQ ID NO: 1615230 - RNA, 19 nt, Artificial Sequence
  Description of Artificial Sequence: Synthetic oligonucleotide
  Antisense strand to SEQ ID NO: 1615229
uucugcacacgaauuccau

SEQ ID NO: 1615231 - RNA, 19 nt, Artificial Sequence
  Description of Artificial Sequence: Synthetic oligonucleotide
  Sense strand starting at position 2721 of SEQ ID NO: 1560655
uggaauucgugugcagaag

SEQ ID NO: 1615232 - RNA, 19 nt, Artificial Sequence
  Description of Artificial Sequence: Synthetic oligonucleotide
  Antisense strand to SEQ ID NO: 1615231
cuucugcacacgaauucca

SEQ ID NO: 1615233 - RNA, 19 nt, Artificial Sequence
  Description of Artificial Sequence: Synthetic oligonucleotide
  Sense strand starting at position 2819 of SEQ ID NO: 1560655
cauugugugucauuugaug

SEQ ID NO: 1615234 - RNA, 19 nt, Artificial Sequence
  Description of Artificial Sequence: Synthetic oligonucleotide
  Antisense strand to SEQ ID NO: 1615233
caucaaaugacacacaaug

SEQ ID NO: 1615235 - RNA, 19 nt, Artificial Sequence
  Description of Artificial Sequence: Synthetic oligonucleotide
  Sense strand starting at position 2821 of SEQ ID NO: 1560655
uugugugucauuugaugua

SEQ ID NO: 1615236 - RNA, 19 nt, Artificial Sequence
  Description of Artificial Sequence: Synthetic oligonucleotide
  Antisense strand to SEQ ID NO: 1615235
uacaucaaaugacacacaa

SEQ ID NO: 1615237 - RNA, 19 nt, Artificial Sequence
  Description of Artificial Sequence: Synthetic oligonucleotide
  Sense strand starting at position 2824 of SEQ ID NO: 1560655
ugugucauuugauguaaag

SEQ ID NO: 1615238 - RNA, 19 nt, Artificial Sequence
  Description of Artificial Sequence: Synthetic oligonucleotide
  Antisense strand to SEQ ID NO: 1615237
cuuuacaucaaaugacaca

SEQ ID NO: 1615239 - RNA, 19 nt, Artificial Sequence
  Description of Artificial Sequence: Synthetic oligonucleotide
  Sense strand starting at position 2838 of SEQ ID NO: 1560655
uaaagagugucagguucua

SEQ ID NO: 1615240 - RNA, 19 nt, Artificial Sequence
  Description of Artificial Sequence: Synthetic oligonucleotide
  Antisense strand to SEQ ID NO: 1615239
uagaaccugacacucuuua

SEQ ID NO: 1615241 - RNA, 19 nt, Artificial Sequence
  Description of Artificial Sequence: Synthetic oligonucleotide
  Sense strand starting at position 2870 of SEQ ID NO: 1560655
acgagaucgcacugucaua

SEQ ID NO: 1615242 - RNA, 19 nt, Artificial Sequence
  Description of Artificial Sequence: Synthetic oligonucleotide
  Antisense strand to SEQ ID NO: 1615241
uaugacagugcgaucucgu

SEQ ID NO: 1615243 - RNA, 19 nt, Artificial Sequence
  Description of Artificial Sequence: Synthetic oligonucleotide
  Sense strand starting at position 2929 of SEQ ID NO: 1560655
uccugaguucgguggcuca

SEQ ID NO: 1615244 - RNA, 19 nt, Artificial Sequence
  Description of Artificial Sequence: Synthetic oligonucleotide
  Antisense strand to SEQ ID NO: 1615243
ugagccaccgaacucagga

SEQ ID NO: 1615245 - RNA, 19 nt, Artificial Sequence
  Description of Artificial Sequence: Synthetic oligonucleotide
  Sense strand starting at position 3249 of SEQ ID NO: 1560655
uuucucuuacccugagaug

SEQ ID NO: 1615246 - RNA, 19 nt, Artificial Sequence
  Description of Artificial Sequence: Synthetic oligonucleotide
  Antisense strand to SEQ ID NO: 1615245
caucucaggguaagagaaa

SEQ ID NO: 1615247 - RNA, 19 nt, Artificial Sequence
  Description of Artificial Sequence: Synthetic oligonucleotide
  Sense strand starting at position 3298 of SEQ ID NO: 1560655
cucggaagcuuucugagaa

SEQ ID NO: 1615248 - RNA, 19 nt, Artificial Sequence
  Description of Artificial Sequence: Synthetic oligonucleotide
  Antisense strand to SEQ ID NO: 1615247
uucucagaaagcuuccgag

SEQ ID NO: 1615249 - RNA, 19 nt, Artificial Sequence
  Description of Artificial Sequence: Synthetic oligonucleotide
  Sense strand starting at position 3299 of SEQ ID NO: 1560655
ucggaagcuuucugagaac

SEQ ID NO: 1615250 - RNA, 19 nt, Artificial Sequence
  Description of Artificial Sequence: Synthetic oligonucleotide
  Antisense strand to SEQ ID NO: 1615249
guucucagaaagcuuccga

SEQ ID NO: 1615251 - RNA, 19 nt, Artificial Sequence
  Description of Artificial Sequence: Synthetic oligonucleotide
  Sense strand starting at position 3439 of SEQ ID NO: 1560655
acagaacucuguggagaga

SEQ ID NO: 1615252 - RNA, 19 nt, Artificial Sequence
  Description of Artificial Sequence: Synthetic oligonucleotide
  Antisense strand to SEQ ID NO: 1615251
ucucuccacagaguucugu

SEQ ID NO: 1615253 - RNA, 19 nt, Artificial Sequence
  Description of Artificial Sequence: Synthetic oligonucleotide
  Sense strand starting at position 3460 of SEQ ID NO: 1560655
gacucaguuugccugggaa

SEQ ID NO: 1615254 - RNA, 19 nt, Artificial Sequence
  Description of Artificial Sequence: Synthetic oligonucleotide
  Antisense strand to SEQ ID NO: 1615253
uucccaggcaaacugaguc

SEQ ID NO: 1615255 - RNA, 19 nt, Artificial Sequence
  Description of Artificial Sequence: Synthetic oligonucleotide
  Sense strand starting at position 3801 of SEQ ID NO: 1560655
cgaggcagguguucugaau

SEQ ID NO: 1615256 - RNA, 19 nt, Artificial Sequence
  Description of Artificial Sequence: Synthetic oligonucleotide
  Antisense strand to SEQ ID NO: 1615255
auucagaacaccugccucg

SEQ ID NO: 1615257 - RNA, 19 nt, Artificial Sequence
  Description of Artificial Sequence: Synthetic oligonucleotide
  Sense strand starting at position 3807 of SEQ ID NO: 1560655
agguguucugaaugaugag

SEQ ID NO: 1615258 - RNA, 19 nt, Artificial Sequence
  Description of Artificial Sequence: Synthetic oligonucleotide
  Antisense strand to SEQ ID NO: 1615257
cucaucauucagaacaccu

SEQ ID NO: 1615259 - RNA, 19 nt, Artificial Sequence
  Description of Artificial Sequence: Synthetic oligonucleotide
  Sense strand starting at position 3808 of SEQ ID NO: 1560655
gguguucugaaugaugagu

SEQ ID NO: 1615260 - RNA, 19 nt, Artificial Sequence
  Description of Artificial Sequence: Synthetic oligonucleotide
  Antisense strand to SEQ ID NO: 1615259
acucaucauucagaacacc

SEQ ID NO: 1615261 - RNA, 19 nt, Artificial Sequence
  Description of Artificial Sequence: Synthetic oligonucleotide
  Sense strand starting at position 3901 of SEQ ID NO: 1560655
gugagagcuggcagguuau

SEQ ID NO: 1615262 - RNA, 19 nt, Artificial Sequence
  Description of Artificial Sequence: Synthetic oligonucleotide
  Antisense strand to SEQ ID NO: 1615261
auaaccugccagcucucac

SEQ ID NO: 1615263 - RNA, 19 nt, Artificial Sequence
  Description of Artificial Sequence: Synthetic oligonucleotide
  Sense strand starting at position 3948 of SEQ ID NO: 1560655
uggaguguaggguggaaua

SEQ ID NO: 1615264 - RNA, 19 nt, Artificial Sequence
  Description of Artificial Sequence: Synthetic oligonucleotide
  Antisense strand to SEQ ID NO: 1615263
uauuccacccuacacucca

SEQ ID NO: 1615265 - RNA, 19 nt, Artificial Sequence
  Description of Artificial Sequence: Synthetic oligonucleotide
  Sense strand starting at position 3949 of SEQ ID NO: 1560655
ggaguguaggguggaauaa

SEQ ID NO: 1615266 - RNA, 19 nt, Artificial Sequence
  Description of Artificial Sequence: Synthetic oligonucleotide
  Antisense strand to SEQ ID NO: 1615265
uuauuccacccuacacucc

SEQ ID NO: 1615267 - RNA, 19 nt, Artificial Sequence
  Description of Artificial Sequence: Synthetic oligonucleotide
  Sense strand starting at position 3980 of SEQ ID NO: 1560655
ggguuuacacccugaaaga

SEQ ID NO: 1615268 - RNA, 19 nt, Artificial Sequence
  Description of Artificial Sequence: Synthetic oligonucleotide
  Antisense strand to SEQ ID NO: 1615267
ucuuucaggguguaaaccc

SEQ ID NO: 1615269 - RNA, 19 nt, Artificial Sequence
  Description of Artificial Sequence: Synthetic oligonucleotide
  Sense strand starting at position 431 of SEQ ID NO: 1560656
gcaaguaugugguuuacag

SEQ ID NO: 1615270 - RNA, 19 nt, Artificial Sequence
  Description of Artificial Sequence: Synthetic oligonucleotide
  Antisense strand to SEQ ID NO: 1615269
cuguaaaccacauacuugc

SEQ ID NO: 1615271 - RNA, 19 nt, Artificial Sequence
  Description of Artificial Sequence: Synthetic oligonucleotide
  Sense strand starting at position 457 of SEQ ID NO: 1560656
ggcacacauuguuccuuaa

SEQ ID NO: 1615272 - RNA, 19 nt, Artificial Sequence
  Description of Artificial Sequence: Synthetic oligonucleotide
  Antisense strand to SEQ ID NO: 1615271
uuaaggaacaaugugugcc

SEQ ID NO: 1615273 - RNA, 19 nt, Artificial Sequence
  Description of Artificial Sequence: Synthetic oligonucleotide
  Sense strand starting at position 486 of SEQ ID NO: 1560656
cagugagguagccacgaua

SEQ ID NO: 1615274 - RNA, 19 nt, Artificial Sequence
  Description of Artificial Sequence: Synthetic oligonucleotide
  Antisense strand to SEQ ID NO: 1615273
uaucguggcuaccucacug

SEQ ID NO: 1615275 - RNA, 19 nt, Artificial Sequence
  Description of Artificial Sequence: Synthetic oligonucleotide
  Sense strand starting at position 489 of SEQ ID NO: 1560656
ugagguagccacgauaauc

SEQ ID NO: 1615276 - RNA, 19 nt, Artificial Sequence
  Description of Artificial Sequence: Synthetic oligonucleotide
  Antisense strand to SEQ ID NO: 1615275
gauuaucguggcuaccuca

SEQ ID NO: 1615277 - RNA, 19 nt, Artificial Sequence
  Description of Artificial Sequence: Synthetic oligonucleotide
  Sense strand starting at position 685 of SEQ ID NO: 1560656
cccagauggccauguugau

SEQ ID NO: 1615278 - RNA, 19 nt, Artificial Sequence
  Description of Artificial Sequence: Synthetic oligonucleotide
  Antisense strand to SEQ ID NO: 1615277
aucaacauggccaucuggg

SEQ ID NO: 1615279 - RNA, 19 nt, Artificial Sequence
  Description of Artificial Sequence: Synthetic oligonucleotide
  Sense strand starting at position 788 of SEQ ID NO: 1560656
cauggaguuguuugccuga

SEQ ID NO: 1615280 - RNA, 19 nt, Artificial Sequence
  Description of Artificial Sequence: Synthetic oligonucleotide
  Antisense strand to SEQ ID NO: 1615279
ucaggcaaacaacuccaug

SEQ ID NO: 1615281 - RNA, 19 nt, Artificial Sequence
  Description of Artificial Sequence: Synthetic oligonucleotide
  Sense strand starting at position 790 of SEQ ID NO: 1560656
uggaguuguuugccugaac

SEQ ID NO: 1615282 - RNA, 19 nt, Artificial Sequence
  Description of Artificial Sequence: Synthetic oligonucleotide
  Antisense strand to SEQ ID NO: 1615281
guucaggcaaacaacucca

SEQ ID NO: 1615283 - RNA, 19 nt, Artificial Sequence
  Description of Artificial Sequence: Synthetic oligonucleotide
  Sense strand starting at position 791 of SEQ ID NO: 1560656
ggaguuguuugccugaacu

SEQ ID NO: 1615284 - RNA, 19 nt, Artificial Sequence
  Description of Artificial Sequence: Synthetic oligonucleotide
  Antisense strand to SEQ ID NO: 1615283
aguucaggcaaacaacucc

SEQ ID NO: 1615285 - RNA, 19 nt, Artificial Sequence
  Description of Artificial Sequence: Synthetic oligonucleotide
  Sense strand starting at position 937 of SEQ ID NO: 1560656
auaucccauccaggugaaa

SEQ ID NO: 1615286 - RNA, 19 nt, Artificial Sequence
  Description of Artificial Sequence: Synthetic oligonucleotide
  Antisense strand to SEQ ID NO: 1615285
uuucaccuggaugggauau

SEQ ID NO: 1615287 - RNA, 19 nt, Artificial Sequence
  Description of Artificial Sequence: Synthetic oligonucleotide
  Sense strand starting at position 1002 of SEQ ID NO: 1560656
gacucuuacgcacguauaa

SEQ ID NO: 1615288 - RNA, 19 nt, Artificial Sequence
  Description of Artificial Sequence: Synthetic oligonucleotide
  Antisense strand to SEQ ID NO: 1615287
uuauacgugcguaagaguc

SEQ ID NO: 1615289 - RNA, 19 nt, Artificial Sequence
  Description of Artificial Sequence: Synthetic oligonucleotide
  Sense strand starting at position 1119 of SEQ ID NO: 1560656
cuaggaagcgucugaucca

SEQ ID NO: 1615290 - RNA, 19 nt, Artificial Sequence
  Description of Artificial Sequence: Synthetic oligonucleotide
  Antisense strand to SEQ ID NO: 1615289
uggaucagacgcuuccuag

SEQ ID NO: 1615291 - RNA, 19 nt, Artificial Sequence
  Description of Artificial Sequence: Synthetic oligonucleotide
  Sense strand starting at position 1310 of SEQ ID NO: 1560656
ugcuaucuuccagauaagg

SEQ ID NO: 1615292 - RNA, 19 nt, Artificial Sequence
  Description of Artificial Sequence: Synthetic oligonucleotide
  Antisense strand to SEQ ID NO: 1615291
ccuuaucuggaagauagca

SEQ ID NO: 1615293 - RNA, 19 nt, Artificial Sequence
  Description of Artificial Sequence: Synthetic oligonucleotide
  Sense strand starting at position 2115 of SEQ ID NO: 1560656
ccgagauccaugcaaccga

SEQ ID NO: 1615294 - RNA, 19 nt, Artificial Sequence
  Description of Artificial Sequence: Synthetic oligonucleotide
  Antisense strand to SEQ ID NO: 1615293
ucgguugcauggaucucgg

SEQ ID NO: 1615295 - RNA, 19 nt, Artificial Sequence
  Description of Artificial Sequence: Synthetic oligonucleotide
  Sense strand starting at position 2256 of SEQ ID NO: 1560656
gagcgagucuaagcaaagu

SEQ ID NO: 1615296 - RNA, 19 nt, Artificial Sequence
  Description of Artificial Sequence: Synthetic oligonucleotide
  Antisense strand to SEQ ID NO: 1615295
acuuugcuuagacucgcuc

SEQ ID NO: 1615297 - RNA, 19 nt, Artificial Sequence
  Description of Artificial Sequence: Synthetic oligonucleotide
  Sense strand starting at position 2369 of SEQ ID NO: 1560656
gugucucccaguuagauga

SEQ ID NO: 1615298 - RNA, 19 nt, Artificial Sequence
  Description of Artificial Sequence: Synthetic oligonucleotide
  Antisense strand to SEQ ID NO: 1615297
ucaucuaacugggagacac

SEQ ID NO: 1615299 - RNA, 19 nt, Artificial Sequence
  Description of Artificial Sequence: Synthetic oligonucleotide
  Sense strand starting at position 2470 of SEQ ID NO: 1560656
ggaauuccacuucggaagu

SEQ ID NO: 1615300 - RNA, 19 nt, Artificial Sequence
  Description of Artificial Sequence: Synthetic oligonucleotide
  Antisense strand to SEQ ID NO: 1615299
acuuccgaaguggaauucc

SEQ ID NO: 1615301 - RNA, 19 nt, Artificial Sequence
  Description of Artificial Sequence: Synthetic oligonucleotide
  Sense strand starting at position 2551 of SEQ ID NO: 1560656
gggucagcccuccggaaau

SEQ ID NO: 1615302 - RNA, 19 nt, Artificial Sequence
  Description of Artificial Sequence: Synthetic oligonucleotide
  Antisense strand to SEQ ID NO: 1615301
auuuccggagggcugaccc

SEQ ID NO: 1615303 - RNA, 19 nt, Artificial Sequence
  Description of Artificial Sequence: Synthetic oligonucleotide
  Sense strand starting at position 2563 of SEQ ID NO: 1560656
cggaaauucuggcucuuaa

SEQ ID NO: 1615304 - RNA, 19 nt, Artificial Sequence
  Description of Artificial Sequence: Synthetic oligonucleotide
  Antisense strand to SEQ ID NO: 1615303
uuaagagccagaauuuccg

SEQ ID NO: 1615305 - RNA, 19 nt, Artificial Sequence
  Description of Artificial Sequence: Synthetic oligonucleotide
  Sense strand starting at position 2612 of SEQ ID NO: 1560656
ccgguuuccgcuuaggaau

SEQ ID NO: 1615306 - RNA, 19 nt, Artificial Sequence
  Description of Artificial Sequence: Synthetic oligonucleotide
  Antisense strand to SEQ ID NO: 1615305
auuccuaagcggaaaccgg

SEQ ID NO: 1615307 - RNA, 19 nt, Artificial Sequence
  Description of Artificial Sequence: Synthetic oligonucleotide
  Sense strand starting at position 2623 of SEQ ID NO: 1560656
uuaggaauucccggaacga

SEQ ID NO: 1615308 - RNA, 19 nt, Artificial Sequence
  Description of Artificial Sequence: Synthetic oligonucleotide
  Antisense strand to SEQ ID NO: 1615307
ucguuccgggaauuccuaa

SEQ ID NO: 1615309 - RNA, 19 nt, Artificial Sequence
  Description of Artificial Sequence: Synthetic oligonucleotide
  Sense strand starting at position 2758 of SEQ ID NO: 1560656
cgcuuccucgcguuagacu

SEQ ID NO: 1615310 - RNA, 19 nt, Artificial Sequence
  Description of Artificial Sequence: Synthetic oligonucleotide
  Antisense strand to SEQ ID NO: 1615309
agucuaacgcgaggaagcg

SEQ ID NO: 1615311 - RNA, 19 nt, Artificial Sequence
  Description of Artificial Sequence: Synthetic oligonucleotide
  Sense strand starting at position 2830 of SEQ ID NO: 1560656
uucuacuggcccuguuaaa

SEQ ID NO: 1615312 - RNA, 19 nt, Artificial Sequence
  Description of Artificial Sequence: Synthetic oligonucleotide
  Antisense strand to SEQ ID NO: 1615311
uuuaacagggccaguagaa

SEQ ID NO: 1615313 - RNA, 19 nt, Artificial Sequence
  Description of Artificial Sequence: Synthetic oligonucleotide
  Sense strand starting at position 3063 of SEQ ID NO: 1560656
cgcagauguccacaugauc

SEQ ID NO: 1615314 - RNA, 19 nt, Artificial Sequence
  Description of Artificial Sequence: Synthetic oligonucleotide
  Antisense strand to SEQ ID NO: 1615313
gaucauguggacaucugcg

SEQ ID NO: 1615315 - RNA, 19 nt, Artificial Sequence
  Description of Artificial Sequence: Synthetic oligonucleotide
  Sense strand starting at position 3260 of SEQ ID NO: 1560656
cacaaugucguguaccaau

SEQ ID NO: 1615316 - RNA, 19 nt, Artificial Sequence
  Description of Artificial Sequence: Synthetic oligonucleotide
  Antisense strand to SEQ ID NO: 1615315
auugguacacgacauugug

SEQ ID NO: 1615317 - RNA, 19 nt, Artificial Sequence
  Description of Artificial Sequence: Synthetic oligonucleotide
  Sense strand starting at position 3429 of SEQ ID NO: 1560656
aguggaaucgucuaacauu

SEQ ID NO: 1615318 - RNA, 19 nt, Artificial Sequence
  Description of Artificial Sequence: Synthetic oligonucleotide
  Antisense strand to SEQ ID NO: 1615317
aauguuagacgauuccacu

SEQ ID NO: 1615319 - RNA, 19 nt, Artificial Sequence
  Description of Artificial Sequence: Synthetic oligonucleotide
  Sense strand starting at position 3432 of SEQ ID NO: 1560656
ggaaucgucuaacauuugu

SEQ ID NO: 1615320 - RNA, 19 nt, Artificial Sequence
  Description of Artificial Sequence: Synthetic oligonucleotide
  Antisense strand to SEQ ID NO: 1615319
acaaauguuagacgauucc

SEQ ID NO: 1615321 - RNA, 19 nt, Artificial Sequence
  Description of Artificial Sequence: Synthetic oligonucleotide
  Sense strand starting at position 3443 of SEQ ID NO: 1560656
acauuuguccugugucuag

SEQ ID NO: 1615322 - RNA, 19 nt, Artificial Sequence
  Description of Artificial Sequence: Synthetic oligonucleotide
  Antisense strand to SEQ ID NO: 1615321
cuagacacaggacaaaugu

SEQ ID NO: 1615323 - RNA, 19 nt, Artificial Sequence
  Description of Artificial Sequence: Synthetic oligonucleotide
  Sense strand starting at position 3447 of SEQ ID NO: 1560656
uuguccugugucuaguuua

SEQ ID NO: 1615324 - RNA, 19 nt, Artificial Sequence
  Description of Artificial Sequence: Synthetic oligonucleotide
  Antisense strand to SEQ ID NO: 1615323
uaaacuagacacaggacaa

SEQ ID NO: 1615325 - RNA, 19 nt, Artificial Sequence
  Description of Artificial Sequence: Synthetic oligonucleotide
  Sense strand starting at position 3450 of SEQ ID NO: 1560656
uccugugucuaguuuauuu

SEQ ID NO: 1615326 - RNA, 19 nt, Artificial Sequence
  Description of Artificial Sequence: Synthetic oligonucleotide
  Antisense strand to SEQ ID NO: 1615325
aaauaaacuagacacagga

SEQ ID NO: 1615327 - RNA, 19 nt, Artificial Sequence
  Description of Artificial Sequence: Synthetic oligonucleotide
  Sense strand starting at position 3565 of SEQ ID NO: 1560656
uguaccauuguauguauau

SEQ ID NO: 1615328 - RNA, 19 nt, Artificial Sequence
  Description of Artificial Sequence: Synthetic oligonucleotide
  Antisense strand to SEQ ID NO: 1615327
auauacauacaaugguaca

SEQ ID NO: 1615329 - RNA, 19 nt, Artificial Sequence
  Description of Artificial Sequence: Synthetic oligonucleotide
  Sense strand starting at position 3566 of SEQ ID NO: 1560656
guaccauuguauguauaug

SEQ ID NO: 1615330 - RNA, 19 nt, Artificial Sequence
  Description of Artificial Sequence: Synthetic oligonucleotide
  Antisense strand to SEQ ID NO: 1615329
cauauacauacaaugguac

SEQ ID NO: 1615331 - RNA, 19 nt, Artificial Sequence
  Description of Artificial Sequence: Synthetic oligonucleotide
  Sense strand starting at position 3658 of SEQ ID NO: 1560656
agcugugaacacuggugua

SEQ ID NO: 1615332 - RNA, 19 nt, Artificial Sequence
  Description of Artificial Sequence: Synthetic oligonucleotide
  Antisense strand to SEQ ID NO: 1615331
uacaccaguguucacagcu

SEQ ID NO: 1615333 - RNA, 19 nt, Artificial Sequence
  Description of Artificial Sequence: Synthetic oligonucleotide
  Sense strand starting at position 3699 of SEQ ID NO: 1560656
uugaauauaugccuaagaa

SEQ ID NO: 1615334 - RNA, 19 nt, Artificial Sequence
  Description of Artificial Sequence: Synthetic oligonucleotide
  Antisense strand to SEQ ID NO: 1615333
uucuuaggcauauauucaa

SEQ ID NO: 1615335 - RNA, 19 nt, Artificial Sequence
  Description of Artificial Sequence: Synthetic oligonucleotide
  Sense strand starting at position 3718 of SEQ ID NO: 1560656
uggaauugcugggugacuu

SEQ ID NO: 1615336 - RNA, 19 nt, Artificial Sequence
  Description of Artificial Sequence: Synthetic oligonucleotide
  Antisense strand to SEQ ID NO: 1615335
aagucacccagcaauucca

SEQ ID NO: 1615337 - RNA, 19 nt, Artificial Sequence
  Description of Artificial Sequence: Synthetic oligonucleotide
  Sense strand starting at position 3730 of SEQ ID NO: 1560656
gugacuugguaguucuauu

SEQ ID NO: 1615338 - RNA, 19 nt, Artificial Sequence
  Description of Artificial Sequence: Synthetic oligonucleotide
  Antisense strand to SEQ ID NO: 1615337
aauagaacuaccaagucac

SEQ ID NO: 1615339 - RNA, 19 nt, Artificial Sequence
  Description of Artificial Sequence: Synthetic oligonucleotide
  Sense strand starting at position 3812 of SEQ ID NO: 1560656
cagcaaugcacggaggauu

SEQ ID NO: 1615340 - RNA, 19 nt, Artificial Sequence
  Description of Artificial Sequence: Synthetic oligonucleotide
  Antisense strand to SEQ ID NO: 1615339
aauccuccgugcauugcug

SEQ ID NO: 1615341 - RNA, 19 nt, Artificial Sequence
  Description of Artificial Sequence: Synthetic oligonucleotide
  Sense strand starting at position 3908 of SEQ ID NO: 1560656
ucucauugugguuguaauc

SEQ ID NO: 1615342 - RNA, 19 nt, Artificial Sequence
  Description of Artificial Sequence: Synthetic oligonucleotide
  Antisense strand to SEQ ID NO: 1615341
gauuacaaccacaaugaga

SEQ ID NO: 1615343 - RNA, 19 nt, Artificial Sequence
  Description of Artificial Sequence: Synthetic oligonucleotide
  Sense strand starting at position 3915 of SEQ ID NO: 1560656
gugguuguaaucugcauuu

SEQ ID NO: 1615344 - RNA, 19 nt, Artificial Sequence
  Description of Artificial Sequence: Synthetic oligonucleotide
  Antisense strand to SEQ ID NO: 1615343
aaaugcagauuacaaccac

SEQ ID NO: 1615345 - RNA, 19 nt, Artificial Sequence
  Description of Artificial Sequence: Synthetic oligonucleotide
  Sense strand starting at position 3944 of SEQ ID NO: 1560656
uaacgauguugagcauauu

SEQ ID NO: 1615346 - RNA, 19 nt, Artificial Sequence
  Description of Artificial Sequence: Synthetic oligonucleotide
  Antisense strand to SEQ ID NO: 1615345
aauaugcucaacaucguua

SEQ ID NO: 1615347 - RNA, 19 nt, Artificial Sequence
  Description of Artificial Sequence: Synthetic oligonucleotide
  Sense strand starting at position 3953 of SEQ ID NO: 1560656
ugagcauauuuccacgaau

SEQ ID NO: 1615348 - RNA, 19 nt, Artificial Sequence
  Description of Artificial Sequence: Synthetic oligonucleotide
  Antisense strand to SEQ ID NO: 1615347
auucguggaaauaugcuca

SEQ ID NO: 1615349 - RNA, 19 nt, Artificial Sequence
  Description of Artificial Sequence: Synthetic oligonucleotide
  Sense strand starting at position 137 of SEQ ID NO: 1560657
gggcuugaaacagguauau

SEQ ID NO: 1615350 - RNA, 19 nt, Artificial Sequence
  Description of Artificial Sequence: Synthetic oligonucleotide
  Antisense strand to SEQ ID NO: 1615349
auauaccuguuucaagccc

SEQ ID NO: 1615351 - RNA, 19 nt, Artificial Sequence
  Description of Artificial Sequence: Synthetic oligonucleotide
  Sense strand starting at position 146 of SEQ ID NO: 1560657
acagguauaugacuaacga

SEQ ID NO: 1615352 - RNA, 19 nt, Artificial Sequence
  Description of Artificial Sequence: Synthetic oligonucleotide
  Antisense strand to SEQ ID NO: 1615351
ucguuagucauauaccugu

SEQ ID NO: 1615353 - RNA, 19 nt, Artificial Sequence
  Description of Artificial Sequence: Synthetic oligonucleotide
  Sense strand starting at position 150 of SEQ ID NO: 1560657
guauaugacuaacgagguu

SEQ ID NO: 1615354 - RNA, 19 nt, Artificial Sequence
  Description of Artificial Sequence: Synthetic oligonucleotide
  Antisense strand to SEQ ID NO: 1615353
aaccucguuagucauauac

SEQ ID NO: 1615355 - RNA, 19 nt, Artificial Sequence
  Description of Artificial Sequence: Synthetic oligonucleotide
  Sense strand starting at position 209 of SEQ ID NO: 1560657
ggcaaauuggcuuagacuu

SEQ ID NO: 1615356 - RNA, 19 nt, Artificial Sequence
  Description of Artificial Sequence: Synthetic oligonucleotide
  Antisense strand to SEQ ID NO: 1615355
aagucuaagccaauuugcc

SEQ ID NO: 1615357 - RNA, 19 nt, Artificial Sequence
  Description of Artificial Sequence: Synthetic oligonucleotide
  Sense strand starting at position 355 of SEQ ID NO: 1560657
cucgauuucuaagagcauu

SEQ ID NO: 1615358 - RNA, 19 nt, Artificial Sequence
  Description of Artificial Sequence: Synthetic oligonucleotide
  Antisense strand to SEQ ID NO: 1615357
aaugcucuuagaaaucgag

SEQ ID NO: 1615359 - RNA, 19 nt, Artificial Sequence
  Description of Artificial Sequence: Synthetic oligonucleotide
  Sense strand starting at position 379 of SEQ ID NO: 1560657
gcccgcacugucugggaau

SEQ ID NO: 1615360 - RNA, 19 nt, Artificial Sequence
  Description of Artificial Sequence: Synthetic oligonucleotide
  Antisense strand to SEQ ID NO: 1615359
auucccagacagugcgggc

SEQ ID NO: 1615361 - RNA, 19 nt, Artificial Sequence
  Description of Artificial Sequence: Synthetic oligonucleotide
  Sense strand starting at position 590 of SEQ ID NO: 1560657
gccugaguucuagcccguu

SEQ ID NO: 1615362 - RNA, 19 nt, Artificial Sequence
  Description of Artificial Sequence: Synthetic oligonucleotide
  Antisense strand to SEQ ID NO: 1615361
aacgggcuagaacucaggc

SEQ ID NO: 1615363 - RNA, 19 nt, Artificial Sequence
  Description of Artificial Sequence: Synthetic oligonucleotide
  Sense strand starting at position 593 of SEQ ID NO: 1560657
ugaguucuagcccguucuu

SEQ ID NO: 1615364 - RNA, 19 nt, Artificial Sequence
  Description of Artificial Sequence: Synthetic oligonucleotide
  Antisense strand to SEQ ID NO: 1615363
aagaacgggcuagaacuca

SEQ ID NO: 1615365 - RNA, 19 nt, Artificial Sequence
  Description of Artificial Sequence: Synthetic oligonucleotide
  Sense strand starting at position 619 of SEQ ID NO: 1560657
cacgauguguguccagaag

SEQ ID NO: 1615366 - RNA, 19 nt, Artificial Sequence
  Description of Artificial Sequence: Synthetic oligonucleotide
  Antisense strand to SEQ ID NO: 1615365
cuucuggacacacaucgug

SEQ ID NO: 1615367 - RNA, 19 nt, Artificial Sequence
  Description of Artificial Sequence: Synthetic oligonucleotide
  Sense strand starting at position 749 of SEQ ID NO: 1560657
gguucaagugcgucgcaau

SEQ ID NO: 1615368 - RNA, 19 nt, Artificial Sequence
  Description of Artificial Sequence: Synthetic oligonucleotide
  Antisense strand to SEQ ID NO: 1615367
auugcgacgcacuugaacc

SEQ ID NO: 1615369 - RNA, 19 nt, Artificial Sequence
  Description of Artificial Sequence: Synthetic oligonucleotide
  Sense strand starting at position 1205 of SEQ ID NO: 1560657
uggaucucucgcggugaaa

SEQ ID NO: 1615370 - RNA, 19 nt, Artificial Sequence
  Description of Artificial Sequence: Synthetic oligonucleotide
  Antisense strand to SEQ ID NO: 1615369
uuucaccgcgagagaucca

SEQ ID NO: 1615371 - RNA, 19 nt, Artificial Sequence
  Description of Artificial Sequence: Synthetic oligonucleotide
  Sense strand starting at position 1207 of SEQ ID NO: 1560657
gaucucucgcggugaaauc

SEQ ID NO: 1615372 - RNA, 19 nt, Artificial Sequence
  Description of Artificial Sequence: Synthetic oligonucleotide
  Antisense strand to SEQ ID NO: 1615371
gauuucaccgcgagagauc

SEQ ID NO: 1615373 - RNA, 19 nt, Artificial Sequence
  Description of Artificial Sequence: Synthetic oligonucleotide
  Sense strand starting at position 1250 of SEQ ID NO: 1560657
guccucuaauucuaggaaa

SEQ ID NO: 1615374 - RNA, 19 nt, Artificial Sequence
  Description of Artificial Sequence: Synthetic oligonucleotide
  Antisense strand to SEQ ID NO: 1615373
uuuccuagaauuagaggac

SEQ ID NO: 1615375 - RNA, 19 nt, Artificial Sequence
  Description of Artificial Sequence: Synthetic oligonucleotide
  Sense strand starting at position 1352 of SEQ ID NO: 1560657
gagucuaugucuuccugac

SEQ ID NO: 1615376 - RNA, 19 nt, Artificial Sequence
  Description of Artificial Sequence: Synthetic oligonucleotide
  Antisense strand to SEQ ID NO: 1615375
gucaggaagacauagacuc

SEQ ID NO: 1615377 - RNA, 19 nt, Artificial Sequence
  Description of Artificial Sequence: Synthetic oligonucleotide
  Sense strand starting at position 1354 of SEQ ID NO: 1560657
gucuaugucuuccugacca

SEQ ID NO: 1615378 - RNA, 19 nt, Artificial Sequence
  Description of Artificial Sequence: Synthetic oligonucleotide
  Antisense strand to SEQ ID NO: 1615377
uggucaggaagacauagac

SEQ ID NO: 1615379 - RNA, 19 nt, Artificial Sequence
  Description of Artificial Sequence: Synthetic oligonucleotide
  Sense strand starting at position 1533 of SEQ ID NO: 1560657
cccacacgucucuaucauu

SEQ ID NO: 1615380 - RNA, 19 nt, Artificial Sequence
  Description of Artificial Sequence: Synthetic oligonucleotide
  Antisense strand to SEQ ID NO: 1615379
aaugauagagacguguggg

SEQ ID NO: 1615381 - RNA, 19 nt, Artificial Sequence
  Description of Artificial Sequence: Synthetic oligonucleotide
  Sense strand starting at position 1536 of SEQ ID NO: 1560657
acacgucucuaucauucua

SEQ ID NO: 1615382 - RNA, 19 nt, Artificial Sequence
  Description of Artificial Sequence: Synthetic oligonucleotide
  Antisense strand to SEQ ID NO: 1615381
uagaaugauagagacgugu

SEQ ID NO: 1615383 - RNA, 19 nt, Artificial Sequence
  Description of Artificial Sequence: Synthetic oligonucleotide
  Sense strand starting at position 1541 of SEQ ID NO: 1560657
ucucuaucauucuaggaga

SEQ ID NO: 1615384 - RNA, 19 nt, Artificial Sequence
  Description of Artificial Sequence: Synthetic oligonucleotide
  Antisense strand to SEQ ID NO: 1615383
ucuccuagaaugauagaga

SEQ ID NO: 1615385 - RNA, 19 nt, Artificial Sequence
  Description of Artificial Sequence: Synthetic oligonucleotide
  Sense strand starting at position 1544 of SEQ ID NO: 1560657
cuaucauucuaggagagcu

SEQ ID NO: 1615386 - RNA, 19 nt, Artificial Sequence
  Description of Artificial Sequence: Synthetic oligonucleotide
  Antisense strand to SEQ ID NO: 1615385
agcucuccuagaaugauag

SEQ ID NO: 1615387 - RNA, 19 nt, Artificial Sequence
  Description of Artificial Sequence: Synthetic oligonucleotide
  Sense strand starting at position 1615 of SEQ ID NO: 1560657
ccaggauucucuggagacu

SEQ ID NO: 1615388 - RNA, 19 nt, Artificial Sequence
  Description of Artificial Sequence: Synthetic oligonucleotide
  Antisense strand to SEQ ID NO: 1615387
agucuccagagaauccugg

SEQ ID NO: 1615389 - RNA, 19 nt, Artificial Sequence
  Description of Artificial Sequence: Synthetic oligonucleotide
  Sense strand starting at position 1740 of SEQ ID NO: 1560657
uuugcaucuccacaucgaa

SEQ ID NO: 1615390 - RNA, 19 nt, Artificial Sequence
  Description of Artificial Sequence: Synthetic oligonucleotide
  Antisense strand to SEQ ID NO: 1615389
uucgauguggagaugcaaa

SEQ ID NO: 1615391 - RNA, 19 nt, Artificial Sequence
  Description of Artificial Sequence: Synthetic oligonucleotide
  Sense strand starting at position 1811 of SEQ ID NO: 1560657
ccagacuuauuggguggaa

SEQ ID NO: 1615392 - RNA, 19 nt, Artificial Sequence
  Description of Artificial Sequence: Synthetic oligonucleotide
  Antisense strand to SEQ ID NO: 1615391
uuccacccaauaagucugg

SEQ ID NO: 1615393 - RNA, 19 nt, Artificial Sequence
  Description of Artificial Sequence: Synthetic oligonucleotide
  Sense strand starting at position 2259 of SEQ ID NO: 1560657
aaauuaggacucggauacu

SEQ ID NO: 1615394 - RNA, 19 nt, Artificial Sequence
  Description of Artificial Sequence: Synthetic oligonucleotide
  Antisense strand to SEQ ID NO: 1615393
aguauccgaguccuaauuu

SEQ ID NO: 1615395 - RNA, 19 nt, Artificial Sequence
  Description of Artificial Sequence: Synthetic oligonucleotide
  Sense strand starting at position 2282 of SEQ ID NO: 1560657
ccgugaaccuucucgugga

SEQ ID NO: 1615396 - RNA, 19 nt, Artificial Sequence
  Description of Artificial Sequence: Synthetic oligonucleotide
  Antisense strand to SEQ ID NO: 1615395
uccacgagaagguucacgg

SEQ ID NO: 1615397 - RNA, 19 nt, Artificial Sequence
  Description of Artificial Sequence: Synthetic oligonucleotide
  Sense strand starting at position 2285 of SEQ ID NO: 1560657
ugaaccuucucguggaaca

SEQ ID NO: 1615398 - RNA, 19 nt, Artificial Sequence
  Description of Artificial Sequence: Synthetic oligonucleotide
  Antisense strand to SEQ ID NO: 1615397
uguuccacgagaagguuca

SEQ ID NO: 1615399 - RNA, 19 nt, Artificial Sequence
  Description of Artificial Sequence: Synthetic oligonucleotide
  Sense strand starting at position 2287 of SEQ ID NO: 1560657
aaccuucucguggaacaga

SEQ ID NO: 1615400 - RNA, 19 nt, Artificial Sequence
  Description of Artificial Sequence: Synthetic oligonucleotide
  Antisense strand to SEQ ID NO: 1615399
ucuguuccacgagaagguu

SEQ ID NO: 1615401 - RNA, 19 nt, Artificial Sequence
  Description of Artificial Sequence: Synthetic oligonucleotide
  Sense strand starting at position 2408 of SEQ ID NO: 1560657
cucccaguucugggagaau

SEQ ID NO: 1615402 - RNA, 19 nt, Artificial Sequence
  Description of Artificial Sequence: Synthetic oligonucleotide
  Antisense strand to SEQ ID NO: 1615401
auucucccagaacugggag

SEQ ID NO: 1615403 - RNA, 19 nt, Artificial Sequence
  Description of Artificial Sequence: Synthetic oligonucleotide
  Sense strand starting at position 2417 of SEQ ID NO: 1560657
cugggagaauucggucaga

SEQ ID NO: 1615404 - RNA, 19 nt, Artificial Sequence
  Description of Artificial Sequence: Synthetic oligonucleotide
  Antisense strand to SEQ ID NO: 1615403
ucugaccgaauucucccag

SEQ ID NO: 1615405 - RNA, 19 nt, Artificial Sequence
  Description of Artificial Sequence: Synthetic oligonucleotide
  Sense strand starting at position 2422 of SEQ ID NO: 1560657
agaauucggucagaauuua

SEQ ID NO: 1615406 - RNA, 19 nt, Artificial Sequence
  Description of Artificial Sequence: Synthetic oligonucleotide
  Antisense strand to SEQ ID NO: 1615405
uaaauucugaccgaauucu

SEQ ID NO: 1615407 - RNA, 19 nt, Artificial Sequence
  Description of Artificial Sequence: Synthetic oligonucleotide
  Sense strand starting at position 2499 of SEQ ID NO: 1560657
gacugaggauucugcaaau

SEQ ID NO: 1615408 - RNA, 19 nt, Artificial Sequence
  Description of Artificial Sequence: Synthetic oligonucleotide
  Antisense strand to SEQ ID NO: 1615407
auuugcagaauccucaguc

SEQ ID NO: 1615409 - RNA, 19 nt, Artificial Sequence
  Description of Artificial Sequence: Synthetic oligonucleotide
  Sense strand starting at position 2576 of SEQ ID NO: 1560657
auuggaucuucucaaagaa

SEQ ID NO: 1615410 - RNA, 19 nt, Artificial Sequence
  Description of Artificial Sequence: Synthetic oligonucleotide
  Antisense strand to SEQ ID NO: 1615409
uucuuugagaagauccaau

SEQ ID NO: 1615411 - RNA, 19 nt, Artificial Sequence
  Description of Artificial Sequence: Synthetic oligonucleotide
  Sense strand starting at position 2664 of SEQ ID NO: 1560657
agcucugucccucagugaa

SEQ ID NO: 1615412 - RNA, 19 nt, Artificial Sequence
  Description of Artificial Sequence: Synthetic oligonucleotide
  Antisense strand to SEQ ID NO: 1615411
uucacugagggacagagcu

SEQ ID NO: 1615413 - RNA, 19 nt, Artificial Sequence
  Description of Artificial Sequence: Synthetic oligonucleotide
  Sense strand starting at position 2795 of SEQ ID NO: 1560657
uugccugagucuuugaaug

SEQ ID NO: 1615414 - RNA, 19 nt, Artificial Sequence
  Description of Artificial Sequence: Synthetic oligonucleotide
  Antisense strand to SEQ ID NO: 1615413
cauucaaagacucaggcaa

SEQ ID NO: 1615415 - RNA, 19 nt, Artificial Sequence
  Description of Artificial Sequence: Synthetic oligonucleotide
  Sense strand starting at position 2845 of SEQ ID NO: 1560657
ugcagacuuucuccuuaga

SEQ ID NO: 1615416 - RNA, 19 nt, Artificial Sequence
  Description of Artificial Sequence: Synthetic oligonucleotide
  Antisense strand to SEQ ID NO: 1615415
ucuaaggagaaagucugca

SEQ ID NO: 1615417 - RNA, 19 nt, Artificial Sequence
  Description of Artificial Sequence: Synthetic oligonucleotide
  Sense strand starting at position 2850 of SEQ ID NO: 1560657
acuuucuccuuagagaguu

SEQ ID NO: 1615418 - RNA, 19 nt, Artificial Sequence
  Description of Artificial Sequence: Synthetic oligonucleotide
  Antisense strand to SEQ ID NO: 1615417
aacucucuaaggagaaagu

SEQ ID NO: 1615419 - RNA, 19 nt, Artificial Sequence
  Description of Artificial Sequence: Synthetic oligonucleotide
  Sense strand starting at position 2925 of SEQ ID NO: 1560657
cgagguggaucgcuugagu

SEQ ID NO: 1615420 - RNA, 19 nt, Artificial Sequence
  Description of Artificial Sequence: Synthetic oligonucleotide
  Antisense strand to SEQ ID NO: 1615419
acucaagcgauccaccucg

SEQ ID NO: 1615421 - RNA, 19 nt, Artificial Sequence
  Description of Artificial Sequence: Synthetic oligonucleotide
  Sense strand starting at position 3542 of SEQ ID NO: 1560657
cccuuccuugccuaagagu

SEQ ID NO: 1615422 - RNA, 19 nt, Artificial Sequence
  Description of Artificial Sequence: Synthetic oligonucleotide
  Antisense strand to SEQ ID NO: 1615421
acucuuaggcaaggaaggg

SEQ ID NO: 1615423 - RNA, 19 nt, Artificial Sequence
  Description of Artificial Sequence: Synthetic oligonucleotide
  Sense strand starting at position 3667 of SEQ ID NO: 1560657
caaagcucuugggagcauu

SEQ ID NO: 1615424 - RNA, 19 nt, Artificial Sequence
  Description of Artificial Sequence: Synthetic oligonucleotide
  Antisense strand to SEQ ID NO: 1615423
aaugcucccaagagcuuug

SEQ ID NO: 1615425 - RNA, 19 nt, Artificial Sequence
  Description of Artificial Sequence: Synthetic oligonucleotide
  Sense strand starting at position 3891 of SEQ ID NO: 1560657
ggccuugagaagggaucaa

SEQ ID NO: 1615426 - RNA, 19 nt, Artificial Sequence
  Description of Artificial Sequence: Synthetic oligonucleotide
  Antisense strand to SEQ ID NO: 1615425
uugaucccuucucaaggcc

SEQ ID NO: 1615427 - RNA, 19 nt, Artificial Sequence
  Description of Artificial Sequence: Synthetic oligonucleotide
  Sense strand starting at position 3906 of SEQ ID NO: 1560657
ucaauucuuugagaagauc

SEQ ID NO: 1615428 - RNA, 19 nt, Artificial Sequence
  Description of Artificial Sequence: Synthetic oligonucleotide
  Antisense strand to SEQ ID NO: 1615427
gaucuucucaaagaauuga

SEQ ID NO: 1615429 - RNA, 19 nt, Artificial Sequence
  Description of Artificial Sequence: Synthetic oligonucleotide
  Sense strand starting at position 86 of SEQ ID NO: 1560658
ggaguccucuugcgagaac

SEQ ID NO: 1615430 - RNA, 19 nt, Artificial Sequence
  Description of Artificial Sequence: Synthetic oligonucleotide
  Antisense strand to SEQ ID NO: 1615429
guucucgcaagaggacucc

SEQ ID NO: 1615431 - RNA, 19 nt, Artificial Sequence
  Description of Artificial Sequence: Synthetic oligonucleotide
  Sense strand starting at position 136 of SEQ ID NO: 1560658
gaagauaaaugggaucaga

SEQ ID NO: 1615432 - RNA, 19 nt, Artificial Sequence
  Description of Artificial Sequence: Synthetic oligonucleotide
  Antisense strand to SEQ ID NO: 1615431
ucugaucccauuuaucuuc

SEQ ID NO: 1615433 - RNA, 19 nt, Artificial Sequence
  Description of Artificial Sequence: Synthetic oligonucleotide
  Sense strand starting at position 273 of SEQ ID NO: 1560658
aggaguggucucuaaaguc

SEQ ID NO: 1615434 - RNA, 19 nt, Artificial Sequence
  Description of Artificial Sequence: Synthetic oligonucleotide
  Antisense strand to SEQ ID NO: 1615433
gacuuuagagaccacuccu

SEQ ID NO: 1615435 - RNA, 19 nt, Artificial Sequence
  Description of Artificial Sequence: Synthetic oligonucleotide
  Sense strand starting at position 281 of SEQ ID NO: 1560658
ucucuaaagucuguugcca

SEQ ID NO: 1615436 - RNA, 19 nt, Artificial Sequence
  Description of Artificial Sequence: Synthetic oligonucleotide
  Antisense strand to SEQ ID NO: 1615435
uggcaacagacuuuagaga

SEQ ID NO: 1615437 - RNA, 19 nt, Artificial Sequence
  Description of Artificial Sequence: Synthetic oligonucleotide
  Sense strand starting at position 283 of SEQ ID NO: 1560658
ucuaaagucuguugccaug

SEQ ID NO: 1615438 - RNA, 19 nt, Artificial Sequence
  Description of Artificial Sequence: Synthetic oligonucleotide
  Antisense strand to SEQ ID NO: 1615437
cauggcaacagacuuuaga

SEQ ID NO: 1615439 - RNA, 19 nt, Artificial Sequence
  Description of Artificial Sequence: Synthetic oligonucleotide
  Sense strand starting at position 289 of SEQ ID NO: 1560658
gucuguugccaugguugga

SEQ ID NO: 1615440 - RNA, 19 nt, Artificial Sequence
  Description of Artificial Sequence: Synthetic oligonucleotide
  Antisense strand to SEQ ID NO: 1615439
uccaaccauggcaacagac

SEQ ID NO: 1615441 - RNA, 19 nt, Artificial Sequence
  Description of Artificial Sequence: Synthetic oligonucleotide
  Sense strand starting at position 418 of SEQ ID NO: 1560658
gaggcuuaacuaggaauca

SEQ ID NO: 1615442 - RNA, 19 nt, Artificial Sequence
  Description of Artificial Sequence: Synthetic oligonucleotide
  Antisense strand to SEQ ID NO: 1615441
ugauuccuaguuaagccuc

SEQ ID NO: 1615443 - RNA, 19 nt, Artificial Sequence
  Description of Artificial Sequence: Synthetic oligonucleotide
  Sense strand starting at position 419 of SEQ ID NO: 1560658
aggcuuaacuaggaaucaa

SEQ ID NO: 1615444 - RNA, 19 nt, Artificial Sequence
  Description of Artificial Sequence: Synthetic oligonucleotide
  Antisense strand to SEQ ID NO: 1615443
uugauuccuaguuaagccu

SEQ ID NO: 1615445 - RNA, 19 nt, Artificial Sequence
  Description of Artificial Sequence: Synthetic oligonucleotide
  Sense strand starting at position 512 of SEQ ID NO: 1560658
agaggcauuucucugccuu

SEQ ID NO: 1615446 - RNA, 19 nt, Artificial Sequence
  Description of Artificial Sequence: Synthetic oligonucleotide
  Antisense strand to SEQ ID NO: 1615445
aaggcagagaaaugccucu

SEQ ID NO: 1615447 - RNA, 19 nt, Artificial Sequence
  Description of Artificial Sequence: Synthetic oligonucleotide
  Sense strand starting at position 526 of SEQ ID NO: 1560658
gccuucucuuggccugaau

SEQ ID NO: 1615448 - RNA, 19 nt, Artificial Sequence
  Description of Artificial Sequence: Synthetic oligonucleotide
  Antisense strand to SEQ ID NO: 1615447
auucaggccaagagaaggc

SEQ ID NO: 1615449 - RNA, 19 nt, Artificial Sequence
  Description of Artificial Sequence: Synthetic oligonucleotide
  Sense strand starting at position 881 of SEQ ID NO: 1560658
gggcgaguucuccgcucca

SEQ ID NO: 1615450 - RNA, 19 nt, Artificial Sequence
  Description of Artificial Sequence: Synthetic oligonucleotide
  Antisense strand to SEQ ID NO: 1615449
uggagcggagaacucgccc

SEQ ID NO: 1615451 - RNA, 19 nt, Artificial Sequence
  Description of Artificial Sequence: Synthetic oligonucleotide
  Sense strand starting at position 959 of SEQ ID NO: 1560658
cagagagucugcccacuuu

SEQ ID NO: 1615452 - RNA, 19 nt, Artificial Sequence
  Description of Artificial Sequence: Synthetic oligonucleotide
  Antisense strand to SEQ ID NO: 1615451
aaagugggcagacucucug

SEQ ID NO: 1615453 - RNA, 19 nt, Artificial Sequence
  Description of Artificial Sequence: Synthetic oligonucleotide
  Sense strand starting at position 1044 of SEQ ID NO: 1560658
cuaggagugccuggugcau

SEQ ID NO: 1615454 - RNA, 19 nt, Artificial Sequence
  Description of Artificial Sequence: Synthetic oligonucleotide
  Antisense strand to SEQ ID NO: 1615453
augcaccaggcacuccuag

SEQ ID NO: 1615455 - RNA, 19 nt, Artificial Sequence
  Description of Artificial Sequence: Synthetic oligonucleotide
  Sense strand starting at position 1248 of SEQ ID NO: 1560658
cccucuuaguucuucggau

SEQ ID NO: 1615456 - RNA, 19 nt, Artificial Sequence
  Description of Artificial Sequence: Synthetic oligonucleotide
  Antisense strand to SEQ ID NO: 1615455
auccgaagaacuaagaggg

SEQ ID NO: 1615457 - RNA, 19 nt, Artificial Sequence
  Description of Artificial Sequence: Synthetic oligonucleotide
  Sense strand starting at position 1249 of SEQ ID NO: 1560658
ccucuuaguucuucggauu

SEQ ID NO: 1615458 - RNA, 19 nt, Artificial Sequence
  Description of Artificial Sequence: Synthetic oligonucleotide
  Antisense strand to SEQ ID NO: 1615457
aauccgaagaacuaagagg

SEQ ID NO: 1615459 - RNA, 19 nt, Artificial Sequence
  Description of Artificial Sequence: Synthetic oligonucleotide
  Sense strand starting at position 1250 of SEQ ID NO: 1560658
cucuuaguucuucggauua

SEQ ID NO: 1615460 - RNA, 19 nt, Artificial Sequence
  Description of Artificial Sequence: Synthetic oligonucleotide
  Antisense strand to SEQ ID NO: 1615459
uaauccgaagaacuaagag

SEQ ID NO: 1615461 - RNA, 19 nt, Artificial Sequence
  Description of Artificial Sequence: Synthetic oligonucleotide
  Sense strand starting at position 1252 of SEQ ID NO: 1560658
cuuaguucuucggauuaac

SEQ ID NO: 1615462 - RNA, 19 nt, Artificial Sequence
  Description of Artificial Sequence: Synthetic oligonucleotide
  Antisense strand to SEQ ID NO: 1615461
guuaauccgaagaacuaag

SEQ ID NO: 1615463 - RNA, 19 nt, Artificial Sequence
  Description of Artificial Sequence: Synthetic oligonucleotide
  Sense strand starting at position 1255 of SEQ ID NO: 1560658
aguucuucggauuaacuuu

SEQ ID NO: 1615464 - RNA, 19 nt, Artificial Sequence
  Description of Artificial Sequence: Synthetic oligonucleotide
  Antisense strand to SEQ ID NO: 1615463
aaaguuaauccgaagaacu

SEQ ID NO: 1615465 - RNA, 19 nt, Artificial Sequence
  Description of Artificial Sequence: Synthetic oligonucleotide
  Sense strand starting at position 1262 of SEQ ID NO: 1560658
cggauuaacuuucuucucu

SEQ ID NO: 1615466 - RNA, 19 nt, Artificial Sequence
  Description of Artificial Sequence: Synthetic oligonucleotide
  Antisense strand to SEQ ID NO: 1615465
agagaagaaaguuaauccg

SEQ ID NO: 1615467 - RNA, 19 nt, Artificial Sequence
  Description of Artificial Sequence: Synthetic oligonucleotide
  Sense strand starting at position 1394 of SEQ ID NO: 1560658
uacucagcgucucagaauu

SEQ ID NO: 1615468 - RNA, 19 nt, Artificial Sequence
  Description of Artificial Sequence: Synthetic oligonucleotide
  Antisense strand to SEQ ID NO: 1615467
aauucugagacgcugagua

SEQ ID NO: 1615469 - RNA, 19 nt, Artificial Sequence
  Description of Artificial Sequence: Synthetic oligonucleotide
  Sense strand starting at position 1475 of SEQ ID NO: 1560658
caugaaagcuggcgccaau

SEQ ID NO: 1615470 - RNA, 19 nt, Artificial Sequence
  Description of Artificial Sequence: Synthetic oligonucleotide
  Antisense strand to SEQ ID NO: 1615469
auuggcgccagcuuucaug

SEQ ID NO: 1615471 - RNA, 19 nt, Artificial Sequence
  Description of Artificial Sequence: Synthetic oligonucleotide
  Sense strand starting at position 1620 of SEQ ID NO: 1560658
ugcacuauugcauauggaa

SEQ ID NO: 1615472 - RNA, 19 nt, Artificial Sequence
  Description of Artificial Sequence: Synthetic oligonucleotide
  Antisense strand to SEQ ID NO: 1615471
uuccauaugcaauagugca

SEQ ID NO: 1615473 - RNA, 19 nt, Artificial Sequence
  Description of Artificial Sequence: Synthetic oligonucleotide
  Sense strand starting at position 1657 of SEQ ID NO: 1560658
ggaggacugucuccuccau

SEQ ID NO: 1615474 - RNA, 19 nt, Artificial Sequence
  Description of Artificial Sequence: Synthetic oligonucleotide
  Antisense strand to SEQ ID NO: 1615473
auggaggagacaguccucc

SEQ ID NO: 1615475 - RNA, 19 nt, Artificial Sequence
  Description of Artificial Sequence: Synthetic oligonucleotide
  Sense strand starting at position 2320 of SEQ ID NO: 1560658
gaaauccauuaagaguagu

SEQ ID NO: 1615476 - RNA, 19 nt, Artificial Sequence
  Description of Artificial Sequence: Synthetic oligonucleotide
  Antisense strand to SEQ ID NO: 1615475
acuacucuuaauggauuuc

SEQ ID NO: 1615477 - RNA, 19 nt, Artificial Sequence
  Description of Artificial Sequence: Synthetic oligonucleotide
  Sense strand starting at position 2419 of SEQ ID NO: 1560658
gggcuaucaugguacaucu

SEQ ID NO: 1615478 - RNA, 19 nt, Artificial Sequence
  Description of Artificial Sequence: Synthetic oligonucleotide
  Antisense strand to SEQ ID NO: 1615477
agauguaccaugauagccc

SEQ ID NO: 1615479 - RNA, 19 nt, Artificial Sequence
  Description of Artificial Sequence: Synthetic oligonucleotide
  Sense strand starting at position 3136 of SEQ ID NO: 1560658
ggcuuuaucuggcccggaa

SEQ ID NO: 1615480 - RNA, 19 nt, Artificial Sequence
  Description of Artificial Sequence: Synthetic oligonucleotide
  Antisense strand to SEQ ID NO: 1615479
uuccgggccagauaaagcc

SEQ ID NO: 1615481 - RNA, 19 nt, Artificial Sequence
  Description of Artificial Sequence: Synthetic oligonucleotide
  Sense strand starting at position 3327 of SEQ ID NO: 1560658
gcugcugucaccggguuaa

SEQ ID NO: 1615482 - RNA, 19 nt, Artificial Sequence
  Description of Artificial Sequence: Synthetic oligonucleotide
  Antisense strand to SEQ ID NO: 1615481
uuaacccggugacagcagc

SEQ ID NO: 1615483 - RNA, 19 nt, Artificial Sequence
  Description of Artificial Sequence: Synthetic oligonucleotide
  Sense strand starting at position 3649 of SEQ ID NO: 1560658
gcaggcaagggaugaaaua

SEQ ID NO: 1615484 - RNA, 19 nt, Artificial Sequence
  Description of Artificial Sequence: Synthetic oligonucleotide
  Antisense strand to SEQ ID NO: 1615483
uauuucaucccuugccugc

SEQ ID NO: 1615485 - RNA, 19 nt, Artificial Sequence
  Description of Artificial Sequence: Synthetic oligonucleotide
  Sense strand starting at position 3769 of SEQ ID NO: 1560658
aggaguuccugagggagga

SEQ ID NO: 1615486 - RNA, 19 nt, Artificial Sequence
  Description of Artificial Sequence: Synthetic oligonucleotide
  Antisense strand to SEQ ID NO: 1615485
uccucccucaggaacuccu

SEQ ID NO: 1615487 - RNA, 19 nt, Artificial Sequence
  Description of Artificial Sequence: Synthetic oligonucleotide
  Sense strand starting at position 78 of SEQ ID NO: 1560659
gcaguuggauucuuaagcu

SEQ ID NO: 1615488 - RNA, 19 nt, Artificial Sequence
  Description of Artificial Sequence: Synthetic oligonucleotide
  Antisense strand to SEQ ID NO: 1615487
agcuuaagaauccaacugc

SEQ ID NO: 1615489 - RNA, 19 nt, Artificial Sequence
  Description of Artificial Sequence: Synthetic oligonucleotide
  Sense strand starting at position 505 of SEQ ID NO: 1560659
ccaugacuguacuccauga

SEQ ID NO: 1615490 - RNA, 19 nt, Artificial Sequence
  Description of Artificial Sequence: Synthetic oligonucleotide
  Antisense strand to SEQ ID NO: 1615489
ucauggaguacagucaugg

SEQ ID NO: 1615491 - RNA, 19 nt, Artificial Sequence
  Description of Artificial Sequence: Synthetic oligonucleotide
  Sense strand starting at position 688 of SEQ ID NO: 1560659
gcuuguugcuaggcaacau

SEQ ID NO: 1615492 - RNA, 19 nt, Artificial Sequence
  Description of Artificial Sequence: Synthetic oligonucleotide
  Antisense strand to SEQ ID NO: 1615491
auguugccuagcaacaagc

SEQ ID NO: 1615493 - RNA, 19 nt, Artificial Sequence
  Description of Artificial Sequence: Synthetic oligonucleotide
  Sense strand starting at position 805 of SEQ ID NO: 1560659
caggaucgugucuauguca

SEQ ID NO: 1615494 - RNA, 19 nt, Artificial Sequence
  Description of Artificial Sequence: Synthetic oligonucleotide
  Antisense strand to SEQ ID NO: 1615493
ugacauagacacgauccug

SEQ ID NO: 1615495 - RNA, 19 nt, Artificial Sequence
  Description of Artificial Sequence: Synthetic oligonucleotide
  Sense strand starting at position 1474 of SEQ ID NO: 1560659
uauucuagaucugugagca

SEQ ID NO: 1615496 - RNA, 19 nt, Artificial Sequence
  Description of Artificial Sequence: Synthetic oligonucleotide
  Antisense strand to SEQ ID NO: 1615495
ugcucacagaucuagaaua

SEQ ID NO: 1615497 - RNA, 19 nt, Artificial Sequence
  Description of Artificial Sequence: Synthetic oligonucleotide
  Sense strand starting at position 1475 of SEQ ID NO: 1560659
auucuagaucugugagcau

SEQ ID NO: 1615498 - RNA, 19 nt, Artificial Sequence
  Description of Artificial Sequence: Synthetic oligonucleotide
  Antisense strand to SEQ ID NO: 1615497
augcucacagaucuagaau

SEQ ID NO: 1615499 - RNA, 19 nt, Artificial Sequence
  Description of Artificial Sequence: Synthetic oligonucleotide
  Sense strand starting at position 1478 of SEQ ID NO: 1560659
cuagaucugugagcauuac

SEQ ID NO: 1615500 - RNA, 19 nt, Artificial Sequence
  Description of Artificial Sequence: Synthetic oligonucleotide
  Antisense strand to SEQ ID NO: 1615499
guaaugcucacagaucuag

SEQ ID NO: 1615501 - RNA, 19 nt, Artificial Sequence
  Description of Artificial Sequence: Synthetic oligonucleotide
  Sense strand starting at position 1479 of SEQ ID NO: 1560659
uagaucugugagcauuaca

SEQ ID NO: 1615502 - RNA, 19 nt, Artificial Sequence
  Description of Artificial Sequence: Synthetic oligonucleotide
  Antisense strand to SEQ ID NO: 1615501
uguaaugcucacagaucua

SEQ ID NO: 1615503 - RNA, 19 nt, Artificial Sequence
  Description of Artificial Sequence: Synthetic oligonucleotide
  Sense strand starting at position 1584 of SEQ ID NO: 1560659
ucugaauauccuggcaugu

SEQ ID NO: 1615504 - RNA, 19 nt, Artificial Sequence
  Description of Artificial Sequence: Synthetic oligonucleotide
  Antisense strand to SEQ ID NO: 1615503
acaugccaggauauucaga

SEQ ID NO: 1615505 - RNA, 19 nt, Artificial Sequence
  Description of Artificial Sequence: Synthetic oligonucleotide
  Sense strand starting at position 1996 of SEQ ID NO: 1560659
ucccauuuguguuccagau

SEQ ID NO: 1615506 - RNA, 19 nt, Artificial Sequence
  Description of Artificial Sequence: Synthetic oligonucleotide
  Antisense strand to SEQ ID NO: 1615505
aucuggaacacaaauggga

SEQ ID NO: 1615507 - RNA, 19 nt, Artificial Sequence
  Description of Artificial Sequence: Synthetic oligonucleotide
  Sense strand starting at position 1998 of SEQ ID NO: 1560659
ccauuuguguuccagauuc

SEQ ID NO: 1615508 - RNA, 19 nt, Artificial Sequence
  Description of Artificial Sequence: Synthetic oligonucleotide
  Antisense strand to SEQ ID NO: 1615507
gaaucuggaacacaaaugg

SEQ ID NO: 1615509 - RNA, 19 nt, Artificial Sequence
  Description of Artificial Sequence: Synthetic oligonucleotide
  Sense strand starting at position 2005 of SEQ ID NO: 1560659
uguuccagauucucugaua

SEQ ID NO: 1615510 - RNA, 19 nt, Artificial Sequence
  Description of Artificial Sequence: Synthetic oligonucleotide
  Antisense strand to SEQ ID NO: 1615509
uaucagagaaucuggaaca

SEQ ID NO: 1615511 - RNA, 19 nt, Artificial Sequence
  Description of Artificial Sequence: Synthetic oligonucleotide
  Sense strand starting at position 2006 of SEQ ID NO: 1560659
guuccagauucucugauaa

SEQ ID NO: 1615512 - RNA, 19 nt, Artificial Sequence
  Description of Artificial Sequence: Synthetic oligonucleotide
  Antisense strand to SEQ ID NO: 1615511
uuaucagagaaucuggaac

SEQ ID NO: 1615513 - RNA, 19 nt, Artificial Sequence
  Description of Artificial Sequence: Synthetic oligonucleotide
  Sense strand starting at position 2044 of SEQ ID NO: 1560659
auggauuucuuggaacgca

SEQ ID NO: 1615514 - RNA, 19 nt, Artificial Sequence
  Description of Artificial Sequence: Synthetic oligonucleotide
  Antisense strand to SEQ ID NO: 1615513
ugcguuccaagaaauccau

SEQ ID NO: 1615515 - RNA, 19 nt, Artificial Sequence
  Description of Artificial Sequence: Synthetic oligonucleotide
  Sense strand starting at position 2088 of SEQ ID NO: 1560659
ggcggauaguccaggaucu

SEQ ID NO: 1615516 - RNA, 19 nt, Artificial Sequence
  Description of Artificial Sequence: Synthetic oligonucleotide
  Antisense strand to SEQ ID NO: 1615515
agauccuggacuauccgcc

SEQ ID NO: 1615517 - RNA, 19 nt, Artificial Sequence
  Description of Artificial Sequence: Synthetic oligonucleotide
  Sense strand starting at position 2125 of SEQ ID NO: 1560659
ccuaguaauccagguuccu

SEQ ID NO: 1615518 - RNA, 19 nt, Artificial Sequence
  Description of Artificial Sequence: Synthetic oligonucleotide
  Antisense strand to SEQ ID NO: 1615517
aggaaccuggauuacuagg

SEQ ID NO: 1615519 - RNA, 19 nt, Artificial Sequence
  Description of Artificial Sequence: Synthetic oligonucleotide
  Sense strand starting at position 2137 of SEQ ID NO: 1560659
gguuccuuucuguauccua

SEQ ID NO: 1615520 - RNA, 19 nt, Artificial Sequence
  Description of Artificial Sequence: Synthetic oligonucleotide
  Antisense strand to SEQ ID NO: 1615519
uaggauacagaaaggaacc

SEQ ID NO: 1615521 - RNA, 19 nt, Artificial Sequence
  Description of Artificial Sequence: Synthetic oligonucleotide
  Sense strand starting at position 2192 of SEQ ID NO: 1560659
uauuccuaccgguggagau

SEQ ID NO: 1615522 - RNA, 19 nt, Artificial Sequence
  Description of Artificial Sequence: Synthetic oligonucleotide
  Antisense strand to SEQ ID NO: 1615521
aucuccaccgguaggaaua

SEQ ID NO: 1615523 - RNA, 19 nt, Artificial Sequence
  Description of Artificial Sequence: Synthetic oligonucleotide
  Sense strand starting at position 2193 of SEQ ID NO: 1560659
auuccuaccgguggagauu

SEQ ID NO: 1615524 - RNA, 19 nt, Artificial Sequence
  Description of Artificial Sequence: Synthetic oligonucleotide
  Antisense strand to SEQ ID NO: 1615523
aaucuccaccgguaggaau

SEQ ID NO: 1615525 - RNA, 19 nt, Artificial Sequence
  Description of Artificial Sequence: Synthetic oligonucleotide
  Sense strand starting at position 2315 of SEQ ID NO: 1560659
ggagaacucuaauauuguu

SEQ ID NO: 1615526 - RNA, 19 nt, Artificial Sequence
  Description of Artificial Sequence: Synthetic oligonucleotide
  Antisense strand to SEQ ID NO: 1615525
aacaauauuagaguucucc

SEQ ID NO: 1615527 - RNA, 19 nt, Artificial Sequence
  Description of Artificial Sequence: Synthetic oligonucleotide
  Sense strand starting at position 2328 of SEQ ID NO: 1560659
auuguuaauccaugagcac

SEQ ID NO: 1615528 - RNA, 19 nt, Artificial Sequence
  Description of Artificial Sequence: Synthetic oligonucleotide
  Antisense strand to SEQ ID NO: 1615527
gugcucauggauuaacaau

SEQ ID NO: 1615529 - RNA, 19 nt, Artificial Sequence
  Description of Artificial Sequence: Synthetic oligonucleotide
  Sense strand starting at position 2329 of SEQ ID NO: 1560659
uuguuaauccaugagcacu

SEQ ID NO: 1615530 - RNA, 19 nt, Artificial Sequence
  Description of Artificial Sequence: Synthetic oligonucleotide
  Antisense strand to SEQ ID NO: 1615529
agugcucauggauuaacaa

SEQ ID NO: 1615531 - RNA, 19 nt, Artificial Sequence
  Description of Artificial Sequence: Synthetic oligonucleotide
  Sense strand starting at position 2347 of SEQ ID NO: 1560659
uccagaauauccuuguguc

SEQ ID NO: 1615532 - RNA, 19 nt, Artificial Sequence
  Description of Artificial Sequence: Synthetic oligonucleotide
  Antisense strand to SEQ ID NO: 1615531
gacacaaggauauucugga

SEQ ID NO: 1615533 - RNA, 19 nt, Artificial Sequence
  Description of Artificial Sequence: Synthetic oligonucleotide
  Sense strand starting at position 2353 of SEQ ID NO: 1560659
auauccuuguguccgagau

SEQ ID NO: 1615534 - RNA, 19 nt, Artificial Sequence
  Description of Artificial Sequence: Synthetic oligonucleotide
  Antisense strand to SEQ ID NO: 1615533
aucucggacacaaggauau

SEQ ID NO: 1615535 - RNA, 19 nt, Artificial Sequence
  Description of Artificial Sequence: Synthetic oligonucleotide
  Sense strand starting at position 2354 of SEQ ID NO: 1560659
uauccuuguguccgagaug

SEQ ID NO: 1615536 - RNA, 19 nt, Artificial Sequence
  Description of Artificial Sequence: Synthetic oligonucleotide
  Antisense strand to SEQ ID NO: 1615535
caucucggacacaaggaua

SEQ ID NO: 1615537 - RNA, 19 nt, Artificial Sequence
  Description of Artificial Sequence: Synthetic oligonucleotide
  Sense strand starting at position 2359 of SEQ ID NO: 1560659
uuguguccgagauguccua

SEQ ID NO: 1615538 - RNA, 19 nt, Artificial Sequence
  Description of Artificial Sequence: Synthetic oligonucleotide
  Antisense strand to SEQ ID NO: 1615537
uaggacaucucggacacaa

SEQ ID NO: 1615539 - RNA, 19 nt, Artificial Sequence
  Description of Artificial Sequence: Synthetic oligonucleotide
  Sense strand starting at position 2413 of SEQ ID NO: 1560659
ucuggcauuccagaaacua

SEQ ID NO: 1615540 - RNA, 19 nt, Artificial Sequence
  Description of Artificial Sequence: Synthetic oligonucleotide
  Antisense strand to SEQ ID NO: 1615539
uaguuucuggaaugccaga

SEQ ID NO: 1615541 - RNA, 19 nt, Artificial Sequence
  Description of Artificial Sequence: Synthetic oligonucleotide
  Sense strand starting at position 2439 of SEQ ID NO: 1560659
cuagaauuagcauguucua

SEQ ID NO: 1615542 - RNA, 19 nt, Artificial Sequence
  Description of Artificial Sequence: Synthetic oligonucleotide
  Antisense strand to SEQ ID NO: 1615541
uagaacaugcuaauucuag

SEQ ID NO: 1615543 - RNA, 19 nt, Artificial Sequence
  Description of Artificial Sequence: Synthetic oligonucleotide
  Sense strand starting at position 2442 of SEQ ID NO: 1560659
gaauuagcauguucuagua

SEQ ID NO: 1615544 - RNA, 19 nt, Artificial Sequence
  Description of Artificial Sequence: Synthetic oligonucleotide
  Antisense strand to SEQ ID NO: 1615543
uacuagaacaugcuaauuc

SEQ ID NO: 1615545 - RNA, 19 nt, Artificial Sequence
  Description of Artificial Sequence: Synthetic oligonucleotide
  Sense strand starting at position 2457 of SEQ ID NO: 1560659
aguauucucuacuccuagu

SEQ ID NO: 1615546 - RNA, 19 nt, Artificial Sequence
  Description of Artificial Sequence: Synthetic oligonucleotide
  Antisense strand to SEQ ID NO: 1615545
acuaggaguagagaauacu

SEQ ID NO: 1615547 - RNA, 19 nt, Artificial Sequence
  Description of Artificial Sequence: Synthetic oligonucleotide
  Sense strand starting at position 2729 of SEQ ID NO: 1560659
ugauccaggcugcaauaau

SEQ ID NO: 1615548 - RNA, 19 nt, Artificial Sequence
  Description of Artificial Sequence: Synthetic oligonucleotide
  Antisense strand to SEQ ID NO: 1615547
auuauugcagccuggauca

SEQ ID NO: 1615549 - RNA, 19 nt, Artificial Sequence
  Description of Artificial Sequence: Synthetic oligonucleotide
  Sense strand starting at position 2839 of SEQ ID NO: 1560659
gcuguugcuagggaagaaa

SEQ ID NO: 1615550 - RNA, 19 nt, Artificial Sequence
  Description of Artificial Sequence: Synthetic oligonucleotide
  Antisense strand to SEQ ID NO: 1615549
uuucuucccuagcaacagc

SEQ ID NO: 1615551 - RNA, 19 nt, Artificial Sequence
  Description of Artificial Sequence: Synthetic oligonucleotide
  Sense strand starting at position 2911 of SEQ ID NO: 1560659
gaagauguauuccagaggu

SEQ ID NO: 1615552 - RNA, 19 nt, Artificial Sequence
  Description of Artificial Sequence: Synthetic oligonucleotide
  Antisense strand to SEQ ID NO: 1615551
accucuggaauacaucuuc

SEQ ID NO: 1615553 - RNA, 19 nt, Artificial Sequence
  Description of Artificial Sequence: Synthetic oligonucleotide
  Sense strand starting at position 2915 of SEQ ID NO: 1560659
auguauuccagagguaagu

SEQ ID NO: 1615554 - RNA, 19 nt, Artificial Sequence
  Description of Artificial Sequence: Synthetic oligonucleotide
  Antisense strand to SEQ ID NO: 1615553
acuuaccucuggaauacau

SEQ ID NO: 1615555 - RNA, 19 nt, Artificial Sequence
  Description of Artificial Sequence: Synthetic oligonucleotide
  Sense strand starting at position 2917 of SEQ ID NO: 1560659
guauuccagagguaaguga

SEQ ID NO: 1615556 - RNA, 19 nt, Artificial Sequence
  Description of Artificial Sequence: Synthetic oligonucleotide
  Antisense strand to SEQ ID NO: 1615555
ucacuuaccucuggaauac

SEQ ID NO: 1615557 - RNA, 19 nt, Artificial Sequence
  Description of Artificial Sequence: Synthetic oligonucleotide
  Sense strand starting at position 2921 of SEQ ID NO: 1560659
uccagagguaagugaaguu

SEQ ID NO: 1615558 - RNA, 19 nt, Artificial Sequence
  Description of Artificial Sequence: Synthetic oligonucleotide
  Antisense strand to SEQ ID NO: 1615557
aacuucacuuaccucugga

SEQ ID NO: 1615559 - RNA, 19 nt, Artificial Sequence
  Description of Artificial Sequence: Synthetic oligonucleotide
  Sense strand starting at position 2930 of SEQ ID NO: 1560659
aagugaaguuaggagauaa

SEQ ID NO: 1615560 - RNA, 19 nt, Artificial Sequence
  Description of Artificial Sequence: Synthetic oligonucleotide
  Antisense strand to SEQ ID NO: 1615559
uuaucuccuaacuucacuu

SEQ ID NO: 1615561 - RNA, 19 nt, Artificial Sequence
  Description of Artificial Sequence: Synthetic oligonucleotide
  Sense strand starting at position 2949 of SEQ ID NO: 1560659
aaagauauucugggccgga

SEQ ID NO: 1615562 - RNA, 19 nt, Artificial Sequence
  Description of Artificial Sequence: Synthetic oligonucleotide
  Antisense strand to SEQ ID NO: 1615561
uccggcccagaauaucuuu

SEQ ID NO: 1615563 - RNA, 19 nt, Artificial Sequence
  Description of Artificial Sequence: Synthetic oligonucleotide
  Sense strand starting at position 3647 of SEQ ID NO: 1560659
uggccucccuuugcuuaaa

SEQ ID NO: 1615564 - RNA, 19 nt, Artificial Sequence
  Description of Artificial Sequence: Synthetic oligonucleotide
  Antisense strand to SEQ ID NO: 1615563
uuuaagcaaagggaggcca

SEQ ID NO: 1615565 - RNA, 19 nt, Artificial Sequence
  Description of Artificial Sequence: Synthetic oligonucleotide
  Sense strand starting at position 3670 of SEQ ID NO: 1560659
agagguagauguuccugau

SEQ ID NO: 1615566 - RNA, 19 nt, Artificial Sequence
  Description of Artificial Sequence: Synthetic oligonucleotide
  Antisense strand to SEQ ID NO: 1615565
aucaggaacaucuaccucu

SEQ ID NO: 1615567 - RNA, 19 nt, Artificial Sequence
  Description of Artificial Sequence: Synthetic oligonucleotide
  Sense strand starting at position 27 of SEQ ID NO: 1560660
gguacucaccugugggaaa

SEQ ID NO: 1615568 - RNA, 19 nt, Artificial Sequence
  Description of Artificial Sequence: Synthetic oligonucleotide
  Antisense strand to SEQ ID NO: 1615567
uuucccacaggugaguacc

SEQ ID NO: 1615569 - RNA, 19 nt, Artificial Sequence
  Description of Artificial Sequence: Synthetic oligonucleotide
  Sense strand starting at position 87 of SEQ ID NO: 1560660
accugcuuagcucaagaaa

SEQ ID NO: 1615570 - RNA, 19 nt, Artificial Sequence
  Description of Artificial Sequence: Synthetic oligonucleotide
  Antisense strand to SEQ ID NO: 1615569
uuucuugagcuaagcaggu

SEQ ID NO: 1615571 - RNA, 19 nt, Artificial Sequence
  Description of Artificial Sequence: Synthetic oligonucleotide
  Sense strand starting at position 150 of SEQ ID NO: 1560660
agagaaguuucaguaggca

SEQ ID NO: 1615572 - RNA, 19 nt, Artificial Sequence
  Description of Artificial Sequence: Synthetic oligonucleotide
  Antisense strand to SEQ ID NO: 1615571
ugccuacugaaacuucucu

SEQ ID NO: 1615573 - RNA, 19 nt, Artificial Sequence
  Description of Artificial Sequence: Synthetic oligonucleotide
  Sense strand starting at position 190 of SEQ ID NO: 1560660
cccagaaacuuccaggaca

SEQ ID NO: 1615574 - RNA, 19 nt, Artificial Sequence
  Description of Artificial Sequence: Synthetic oligonucleotide
  Antisense strand to SEQ ID NO: 1615573
uguccuggaaguuucuggg

SEQ ID NO: 1615575 - RNA, 19 nt, Artificial Sequence
  Description of Artificial Sequence: Synthetic oligonucleotide
  Sense strand starting at position 305 of SEQ ID NO: 1560660
cccagccucugagcaaaua

SEQ ID NO: 1615576 - RNA, 19 nt, Artificial Sequence
  Description of Artificial Sequence: Synthetic oligonucleotide
  Antisense strand to SEQ ID NO: 1615575
uauuugcucagaggcuggg

SEQ ID NO: 1615577 - RNA, 19 nt, Artificial Sequence
  Description of Artificial Sequence: Synthetic oligonucleotide
  Sense strand starting at position 306 of SEQ ID NO: 1560660
ccagccucugagcaaauau

SEQ ID NO: 1615578 - RNA, 19 nt, Artificial Sequence
  Description of Artificial Sequence: Synthetic oligonucleotide
  Antisense strand to SEQ ID NO: 1615577
auauuugcucagaggcugg

SEQ ID NO: 1615579 - RNA, 19 nt, Artificial Sequence
  Description of Artificial Sequence: Synthetic oligonucleotide
  Sense strand starting at position 422 of SEQ ID NO: 1560660
cccuguuauccucagaucu

SEQ ID NO: 1615580 - RNA, 19 nt, Artificial Sequence
  Description of Artificial Sequence: Synthetic oligonucleotide
  Antisense strand to SEQ ID NO: 1615579
agaucugaggauaacaggg

SEQ ID NO: 1615581 - RNA, 19 nt, Artificial Sequence
  Description of Artificial Sequence: Synthetic oligonucleotide
  Sense strand starting at position 469 of SEQ ID NO: 1560660
acucauugaugccauguga

SEQ ID NO: 1615582 - RNA, 19 nt, Artificial Sequence
  Description of Artificial Sequence: Synthetic oligonucleotide
  Antisense strand to SEQ ID NO: 1615581
ucacauggcaucaaugagu

SEQ ID NO: 1615583 - RNA, 19 nt, Artificial Sequence
  Description of Artificial Sequence: Synthetic oligonucleotide
  Sense strand starting at position 587 of SEQ ID NO: 1560660
ucccauugcugucccugaa

SEQ ID NO: 1615584 - RNA, 19 nt, Artificial Sequence
  Description of Artificial Sequence: Synthetic oligonucleotide
  Antisense strand to SEQ ID NO: 1615583
uucagggacagcaauggga

SEQ ID NO: 1615585 - RNA, 19 nt, Artificial Sequence
  Description of Artificial Sequence: Synthetic oligonucleotide
  Sense strand starting at position 590 of SEQ ID NO: 1560660
cauugcugucccugaaagu

SEQ ID NO: 1615586 - RNA, 19 nt, Artificial Sequence
  Description of Artificial Sequence: Synthetic oligonucleotide
  Antisense strand to SEQ ID NO: 1615585
acuuucagggacagcaaug

SEQ ID NO: 1615587 - RNA, 19 nt, Artificial Sequence
  Description of Artificial Sequence: Synthetic oligonucleotide
  Sense strand starting at position 591 of SEQ ID NO: 1560660
auugcugucccugaaagug

SEQ ID NO: 1615588 - RNA, 19 nt, Artificial Sequence
  Description of Artificial Sequence: Synthetic oligonucleotide
  Antisense strand to SEQ ID NO: 1615587
cacuuucagggacagcaau

SEQ ID NO: 1615589 - RNA, 19 nt, Artificial Sequence
  Description of Artificial Sequence: Synthetic oligonucleotide
  Sense strand starting at position 599 of SEQ ID NO: 1560660
cccugaaagugcuccauaa

SEQ ID NO: 1615590 - RNA, 19 nt, Artificial Sequence
  Description of Artificial Sequence: Synthetic oligonucleotide
  Antisense strand to SEQ ID NO: 1615589
uuauggagcacuuucaggg

SEQ ID NO: 1615591 - RNA, 19 nt, Artificial Sequence
  Description of Artificial Sequence: Synthetic oligonucleotide
  Sense strand starting at position 601 of SEQ ID NO: 1560660
cugaaagugcuccauaauu

SEQ ID NO: 1615592 - RNA, 19 nt, Artificial Sequence
  Description of Artificial Sequence: Synthetic oligonucleotide
  Antisense strand to SEQ ID NO: 1615591
aauuauggagcacuuucag

SEQ ID NO: 1615593 - RNA, 19 nt, Artificial Sequence
  Description of Artificial Sequence: Synthetic oligonucleotide
  Sense strand starting at position 603 of SEQ ID NO: 1560660
gaaagugcuccauaauugc

SEQ ID NO: 1615594 - RNA, 19 nt, Artificial Sequence
  Description of Artificial Sequence: Synthetic oligonucleotide
  Antisense strand to SEQ ID NO: 1615593
gcaauuauggagcacuuuc

SEQ ID NO: 1615595 - RNA, 19 nt, Artificial Sequence
  Description of Artificial Sequence: Synthetic oligonucleotide
  Sense strand starting at position 609 of SEQ ID NO: 1560660
gcuccauaauugcuugagu

SEQ ID NO: 1615596 - RNA, 19 nt, Artificial Sequence
  Description of Artificial Sequence: Synthetic oligonucleotide
  Antisense strand to SEQ ID NO: 1615595
acucaagcaauuauggagc

SEQ ID NO: 1615597 - RNA, 19 nt, Artificial Sequence
  Description of Artificial Sequence: Synthetic oligonucleotide
  Sense strand starting at position 611 of SEQ ID NO: 1560660
uccauaauugcuugaguga

SEQ ID NO: 1615598 - RNA, 19 nt, Artificial Sequence
  Description of Artificial Sequence: Synthetic oligonucleotide
  Antisense strand to SEQ ID NO: 1615597
ucacucaagcaauuaugga

SEQ ID NO: 1615599 - RNA, 19 nt, Artificial Sequence
  Description of Artificial Sequence: Synthetic oligonucleotide
  Sense strand starting at position 612 of SEQ ID NO: 1560660
ccauaauugcuugagugac

SEQ ID NO: 1615600 - RNA, 19 nt, Artificial Sequence
  Description of Artificial Sequence: Synthetic oligonucleotide
  Antisense strand to SEQ ID NO: 1615599
gucacucaagcaauuaugg

SEQ ID NO: 1615601 - RNA, 19 nt, Artificial Sequence
  Description of Artificial Sequence: Synthetic oligonucleotide
  Sense strand starting at position 1156 of SEQ ID NO: 1560660
guuugcucuugguuccaga

SEQ ID NO: 1615602 - RNA, 19 nt, Artificial Sequence
  Description of Artificial Sequence: Synthetic oligonucleotide
  Antisense strand to SEQ ID NO: 1615601
ucuggaaccaagagcaaac

SEQ ID NO: 1615603 - RNA, 19 nt, Artificial Sequence
  Description of Artificial Sequence: Synthetic oligonucleotide
  Sense strand starting at position 1271 of SEQ ID NO: 1560660
ggucccugcuggugaauga

SEQ ID NO: 1615604 - RNA, 19 nt, Artificial Sequence
  Description of Artificial Sequence: Synthetic oligonucleotide
  Antisense strand to SEQ ID NO: 1615603
ucauucaccagcagggacc

SEQ ID NO: 1615605 - RNA, 19 nt, Artificial Sequence
  Description of Artificial Sequence: Synthetic oligonucleotide
  Sense strand starting at position 2003 of SEQ ID NO: 1560660
gcccgaaugucugugcuga

SEQ ID NO: 1615606 - RNA, 19 nt, Artificial Sequence
  Description of Artificial Sequence: Synthetic oligonucleotide
  Antisense strand to SEQ ID NO: 1615605
ucagcacagacauucgggc

SEQ ID NO: 1615607 - RNA, 19 nt, Artificial Sequence
  Description of Artificial Sequence: Synthetic oligonucleotide
  Sense strand starting at position 2004 of SEQ ID NO: 1560660
cccgaaugucugugcugau

SEQ ID NO: 1615608 - RNA, 19 nt, Artificial Sequence
  Description of Artificial Sequence: Synthetic oligonucleotide
  Antisense strand to SEQ ID NO: 1615607
aucagcacagacauucggg

SEQ ID NO: 1615609 - RNA, 19 nt, Artificial Sequence
  Description of Artificial Sequence: Synthetic oligonucleotide
  Sense strand starting at position 2005 of SEQ ID NO: 1560660
ccgaaugucugugcugaug

SEQ ID NO: 1615610 - RNA, 19 nt, Artificial Sequence
  Description of Artificial Sequence: Synthetic oligonucleotide
  Antisense strand to SEQ ID NO: 1615609
caucagcacagacauucgg

SEQ ID NO: 1615611 - RNA, 19 nt, Artificial Sequence
  Description of Artificial Sequence: Synthetic oligonucleotide
  Sense strand starting at position 2555 of SEQ ID NO: 1560660
acccacuugugauacucau

SEQ ID NO: 1615612 - RNA, 19 nt, Artificial Sequence
  Description of Artificial Sequence: Synthetic oligonucleotide
  Antisense strand to SEQ ID NO: 1615611
augaguaucacaagugggu

SEQ ID NO: 1615613 - RNA, 19 nt, Artificial Sequence
  Description of Artificial Sequence: Synthetic oligonucleotide
  Sense strand starting at position 2561 of SEQ ID NO: 1560660
uugugauacucaugcuuug

SEQ ID NO: 1615614 - RNA, 19 nt, Artificial Sequence
  Description of Artificial Sequence: Synthetic oligonucleotide
  Antisense strand to SEQ ID NO: 1615613
caaagcaugaguaucacaa

SEQ ID NO: 1615615 - RNA, 19 nt, Artificial Sequence
  Description of Artificial Sequence: Synthetic oligonucleotide
  Sense strand starting at position 2810 of SEQ ID NO: 1560660
gcggauugcuugggcucau

SEQ ID NO: 1615616 - RNA, 19 nt, Artificial Sequence
  Description of Artificial Sequence: Synthetic oligonucleotide
  Antisense strand to SEQ ID NO: 1615615
augagcccaagcaauccgc

SEQ ID NO: 1615617 - RNA, 19 nt, Artificial Sequence
  Description of Artificial Sequence: Synthetic oligonucleotide
  Sense strand starting at position 3073 of SEQ ID NO: 1560660
cucugauaucgcuacaagg

SEQ ID NO: 1615618 - RNA, 19 nt, Artificial Sequence
  Description of Artificial Sequence: Synthetic oligonucleotide
  Antisense strand to SEQ ID NO: 1615617
ccuuguagcgauaucagag

SEQ ID NO: 1615619 - RNA, 19 nt, Artificial Sequence
  Description of Artificial Sequence: Synthetic oligonucleotide
  Sense strand starting at position 3075 of SEQ ID NO: 1560660
cugauaucgcuacaaggag

SEQ ID NO: 1615620 - RNA, 19 nt, Artificial Sequence
  Description of Artificial Sequence: Synthetic oligonucleotide
  Antisense strand to SEQ ID NO: 1615619
cuccuuguagcgauaucag

SEQ ID NO: 1615621 - RNA, 19 nt, Artificial Sequence
  Description of Artificial Sequence: Synthetic oligonucleotide
  Sense strand starting at position 3087 of SEQ ID NO: 1560660
caaggaggguccuaagauu

SEQ ID NO: 1615622 - RNA, 19 nt, Artificial Sequence
  Description of Artificial Sequence: Synthetic oligonucleotide
  Antisense strand to SEQ ID NO: 1615621
aaucuuaggacccuccuug

SEQ ID NO: 1615623 - RNA, 19 nt, Artificial Sequence
  Description of Artificial Sequence: Synthetic oligonucleotide
  Sense strand starting at position 3101 of SEQ ID NO: 1560660
agauuagccucauuacaga

SEQ ID NO: 1615624 - RNA, 19 nt, Artificial Sequence
  Description of Artificial Sequence: Synthetic oligonucleotide
  Antisense strand to SEQ ID NO: 1615623
ucuguaaugaggcuaaucu

SEQ ID NO: 1615625 - RNA, 19 nt, Artificial Sequence
  Description of Artificial Sequence: Synthetic oligonucleotide
  Sense strand starting at position 3161 of SEQ ID NO: 1560660
caggacucuucguuaacgu

SEQ ID NO: 1615626 - RNA, 19 nt, Artificial Sequence
  Description of Artificial Sequence: Synthetic oligonucleotide
  Antisense strand to SEQ ID NO: 1615625
acguuaacgaagaguccug

SEQ ID NO: 1615627 - RNA, 19 nt, Artificial Sequence
  Description of Artificial Sequence: Synthetic oligonucleotide
  Sense strand starting at position 3162 of SEQ ID NO: 1560660
aggacucuucguuaacguu

SEQ ID NO: 1615628 - RNA, 19 nt, Artificial Sequence
  Description of Artificial Sequence: Synthetic oligonucleotide
  Antisense strand to SEQ ID NO: 1615627
aacguuaacgaagaguccu

SEQ ID NO: 1615629 - RNA, 19 nt, Artificial Sequence
  Description of Artificial Sequence: Synthetic oligonucleotide
  Sense strand starting at position 3168 of SEQ ID NO: 1560660
cuucguuaacguuacuaaa

SEQ ID NO: 1615630 - RNA, 19 nt, Artificial Sequence
  Description of Artificial Sequence: Synthetic oligonucleotide
  Antisense strand to SEQ ID NO: 1615629
uuuaguaacguuaacgaag

SEQ ID NO: 1615631 - RNA, 19 nt, Artificial Sequence
  Description of Artificial Sequence: Synthetic oligonucleotide
  Sense strand starting at position 3708 of SEQ ID NO: 1560660
agcuguauggaccaauaca

SEQ ID NO: 1615632 - RNA, 19 nt, Artificial Sequence
  Description of Artificial Sequence: Synthetic oligonucleotide
  Antisense strand to SEQ ID NO: 1615631
uguauugguccauacagcu

SEQ ID NO: 1615633 - RNA, 19 nt, Artificial Sequence
  Description of Artificial Sequence: Synthetic oligonucleotide
  Sense strand starting at position 3756 of SEQ ID NO: 1560660
gugacaucucuuuauuggu

SEQ ID NO: 1615634 - RNA, 19 nt, Artificial Sequence
  Description of Artificial Sequence: Synthetic oligonucleotide
  Antisense strand to SEQ ID NO: 1615633
accaauaaagagaugucac

SEQ ID NO: 1615635 - RNA, 19 nt, Artificial Sequence
  Description of Artificial Sequence: Synthetic oligonucleotide
  Sense strand starting at position 3928 of SEQ ID NO: 1560660
ggaagauggugggugugaa

SEQ ID NO: 1615636 - RNA, 19 nt, Artificial Sequence
  Description of Artificial Sequence: Synthetic oligonucleotide
  Antisense strand to SEQ ID NO: 1615635
uucacacccaccaucuucc

SEQ ID NO: 1615637 - RNA, 19 nt, Artificial Sequence
  Description of Artificial Sequence: Synthetic oligonucleotide
  Sense strand starting at position 3979 of SEQ ID NO: 1560660
auccuuuccugggauggga

SEQ ID NO: 1615638 - RNA, 19 nt, Artificial Sequence
  Description of Artificial Sequence: Synthetic oligonucleotide
  Antisense strand to SEQ ID NO: 1615637
ucccaucccaggaaaggau

SEQ ID NO: 1615639 - RNA, 19 nt, Artificial Sequence
  Description of Artificial Sequence: Synthetic oligonucleotide
  Sense strand starting at position 74 of SEQ ID NO: 1560661
cgagaauuguccguggacu

SEQ ID NO: 1615640 - RNA, 19 nt, Artificial Sequence
  Description of Artificial Sequence: Synthetic oligonucleotide
  Antisense strand to SEQ ID NO: 1615639
aguccacggacaauucucg

SEQ ID NO: 1615641 - RNA, 19 nt, Artificial Sequence
  Description of Artificial Sequence: Synthetic oligonucleotide
  Sense strand starting at position 75 of SEQ ID NO: 1560661
gagaauuguccguggacua

SEQ ID NO: 1615642 - RNA, 19 nt, Artificial Sequence
  Description of Artificial Sequence: Synthetic oligonucleotide
  Antisense strand to SEQ ID NO: 1615641
uaguccacggacaauucuc

SEQ ID NO: 1615643 - RNA, 19 nt, Artificial Sequence
  Description of Artificial Sequence: Synthetic oligonucleotide
  Sense strand starting at position 76 of SEQ ID NO: 1560661
agaauuguccguggacuag

SEQ ID NO: 1615644 - RNA, 19 nt, Artificial Sequence
  Description of Artificial Sequence: Synthetic oligonucleotide
  Antisense strand to SEQ ID NO: 1615643
cuaguccacggacaauucu

SEQ ID NO: 1615645 - RNA, 19 nt, Artificial Sequence
  Description of Artificial Sequence: Synthetic oligonucleotide
  Sense strand starting at position 356 of SEQ ID NO: 1560661
gggaggucucauuggugga

SEQ ID NO: 1615646 - RNA, 19 nt, Artificial Sequence
  Description of Artificial Sequence: Synthetic oligonucleotide
  Antisense strand to SEQ ID NO: 1615645
uccaccaaugagaccuccc

SEQ ID NO: 1615647 - RNA, 19 nt, Artificial Sequence
  Description of Artificial Sequence: Synthetic oligonucleotide
  Sense strand starting at position 361 of SEQ ID NO: 1560661
gucucauugguggagcaga

SEQ ID NO: 1615648 - RNA, 19 nt, Artificial Sequence
  Description of Artificial Sequence: Synthetic oligonucleotide
  Antisense strand to SEQ ID NO: 1615647
ucugcuccaccaaugagac

SEQ ID NO: 1615649 - RNA, 19 nt, Artificial Sequence
  Description of Artificial Sequence: Synthetic oligonucleotide
  Sense strand starting at position 452 of SEQ ID NO: 1560661
ugcuccucgcgcuuguaau

SEQ ID NO: 1615650 - RNA, 19 nt, Artificial Sequence
  Description of Artificial Sequence: Synthetic oligonucleotide
  Antisense strand to SEQ ID NO: 1615649
auuacaagcgcgaggagca

SEQ ID NO: 1615651 - RNA, 19 nt, Artificial Sequence
  Description of Artificial Sequence: Synthetic oligonucleotide
  Sense strand starting at position 460 of SEQ ID NO: 1560661
gcgcuuguaauuguuaaua

SEQ ID NO: 1615652 - RNA, 19 nt, Artificial Sequence
  Description of Artificial Sequence: Synthetic oligonucleotide
  Antisense strand to SEQ ID NO: 1615651
uauuaacaauuacaagcgc

SEQ ID NO: 1615653 - RNA, 19 nt, Artificial Sequence
  Description of Artificial Sequence: Synthetic oligonucleotide
  Sense strand starting at position 802 of SEQ ID NO: 1560661
cugagcccuccuugcuaaa

SEQ ID NO: 1615654 - RNA, 19 nt, Artificial Sequence
  Description of Artificial Sequence: Synthetic oligonucleotide
  Antisense strand to SEQ ID NO: 1615653
uuuagcaaggagggcucag

SEQ ID NO: 1615655 - RNA, 19 nt, Artificial Sequence
  Description of Artificial Sequence: Synthetic oligonucleotide
  Sense strand starting at position 877 of SEQ ID NO: 1560661
agucuuauugcacacacuu

SEQ ID NO: 1615656 - RNA, 19 nt, Artificial Sequence
  Description of Artificial Sequence: Synthetic oligonucleotide
  Antisense strand to SEQ ID NO: 1615655
aagugugugcaauaagacu

SEQ ID NO: 1615657 - RNA, 19 nt, Artificial Sequence
  Description of Artificial Sequence: Synthetic oligonucleotide
  Sense strand starting at position 1082 of SEQ ID NO: 1560661
uucugcucagaaugagaga

SEQ ID NO: 1615658 - RNA, 19 nt, Artificial Sequence
  Description of Artificial Sequence: Synthetic oligonucleotide
  Antisense strand to SEQ ID NO: 1615657
ucucucauucugagcagaa

SEQ ID NO: 1615659 - RNA, 19 nt, Artificial Sequence
  Description of Artificial Sequence: Synthetic oligonucleotide
  Sense strand starting at position 1111 of SEQ ID NO: 1560661
cagugugugggagaacuuu

SEQ ID NO: 1615660 - RNA, 19 nt, Artificial Sequence
  Description of Artificial Sequence: Synthetic oligonucleotide
  Antisense strand to SEQ ID NO: 1615659
aaaguucucccacacacug

SEQ ID NO: 1615661 - RNA, 19 nt, Artificial Sequence
  Description of Artificial Sequence: Synthetic oligonucleotide
  Sense strand starting at position 1136 of SEQ ID NO: 1560661
aguagacugugcucaguga

SEQ ID NO: 1615662 - RNA, 19 nt, Artificial Sequence
  Description of Artificial Sequence: Synthetic oligonucleotide
  Antisense strand to SEQ ID NO: 1615661
ucacugagcacagucuacu

SEQ ID NO: 1615663 - RNA, 19 nt, Artificial Sequence
  Description of Artificial Sequence: Synthetic oligonucleotide
  Sense strand starting at position 1140 of SEQ ID NO: 1560661
gacugugcucagugaggga

SEQ ID NO: 1615664 - RNA, 19 nt, Artificial Sequence
  Description of Artificial Sequence: Synthetic oligonucleotide
  Antisense strand to SEQ ID NO: 1615663
ucccucacugagcacaguc

SEQ ID NO: 1615665 - RNA, 19 nt, Artificial Sequence
  Description of Artificial Sequence: Synthetic oligonucleotide
  Sense strand starting at position 1471 of SEQ ID NO: 1560661
aucguuugaccucaugauc

SEQ ID NO: 1615666 - RNA, 19 nt, Artificial Sequence
  Description of Artificial Sequence: Synthetic oligonucleotide
  Antisense strand to SEQ ID NO: 1615665
gaucaugaggucaaacgau

SEQ ID NO: 1615667 - RNA, 19 nt, Artificial Sequence
  Description of Artificial Sequence: Synthetic oligonucleotide
  Sense strand starting at position 2052 of SEQ ID NO: 1560661
gcgcgucauccaagggaga

SEQ ID NO: 1615668 - RNA, 19 nt, Artificial Sequence
  Description of Artificial Sequence: Synthetic oligonucleotide
  Antisense strand to SEQ ID NO: 1615667
ucucccuuggaugacgcgc

SEQ ID NO: 1615669 - RNA, 19 nt, Artificial Sequence
  Description of Artificial Sequence: Synthetic oligonucleotide
  Sense strand starting at position 2222 of SEQ ID NO: 1560661
acuguuaaaugagcaucua

SEQ ID NO: 1615670 - RNA, 19 nt, Artificial Sequence
  Description of Artificial Sequence: Synthetic oligonucleotide
  Antisense strand to SEQ ID NO: 1615669
uagaugcucauuuaacagu

SEQ ID NO: 1615671 - RNA, 19 nt, Artificial Sequence
  Description of Artificial Sequence: Synthetic oligonucleotide
  Sense strand starting at position 2249 of SEQ ID NO: 1560661
ccggcuuuggucuagguaa

SEQ ID NO: 1615672 - RNA, 19 nt, Artificial Sequence
  Description of Artificial Sequence: Synthetic oligonucleotide
  Antisense strand to SEQ ID NO: 1615671
uuaccuagaccaaagccgg

SEQ ID NO: 1615673 - RNA, 19 nt, Artificial Sequence
  Description of Artificial Sequence: Synthetic oligonucleotide
  Sense strand starting at position 2251 of SEQ ID NO: 1560661
ggcuuuggucuagguaaug

SEQ ID NO: 1615674 - RNA, 19 nt, Artificial Sequence
  Description of Artificial Sequence: Synthetic oligonucleotide
  Antisense strand to SEQ ID NO: 1615673
cauuaccuagaccaaagcc

SEQ ID NO: 1615675 - RNA, 19 nt, Artificial Sequence
  Description of Artificial Sequence: Synthetic oligonucleotide
  Sense strand starting at position 2260 of SEQ ID NO: 1560661
cuagguaaugcuggagaug

SEQ ID NO: 1615676 - RNA, 19 nt, Artificial Sequence
  Description of Artificial Sequence: Synthetic oligonucleotide
  Antisense strand to SEQ ID NO: 1615675
caucuccagcauuaccuag

SEQ ID NO: 1615677 - RNA, 19 nt, Artificial Sequence
  Description of Artificial Sequence: Synthetic oligonucleotide
  Sense strand starting at position 2352 of SEQ ID NO: 1560661
acaaauugguguuuaccaa

SEQ ID NO: 1615678 - RNA, 19 nt, Artificial Sequence
  Description of Artificial Sequence: Synthetic oligonucleotide
  Antisense strand to SEQ ID NO: 1615677
uugguaaacaccaauuugu

SEQ ID NO: 1615679 - RNA, 19 nt, Artificial Sequence
  Description of Artificial Sequence: Synthetic oligonucleotide
  Sense strand starting at position 2407 of SEQ ID NO: 1560661
caaggagaugugcagucua

SEQ ID NO: 1615680 - RNA, 19 nt, Artificial Sequence
  Description of Artificial Sequence: Synthetic oligonucleotide
  Antisense strand to SEQ ID NO: 1615679
uagacugcacaucuccuug

SEQ ID NO: 1615681 - RNA, 19 nt, Artificial Sequence
  Description of Artificial Sequence: Synthetic oligonucleotide
  Sense strand starting at position 2412 of SEQ ID NO: 1560661
agaugugcagucuagaagu

SEQ ID NO: 1615682 - RNA, 19 nt, Artificial Sequence
  Description of Artificial Sequence: Synthetic oligonucleotide
  Antisense strand to SEQ ID NO: 1615681
acuucuagacugcacaucu

SEQ ID NO: 1615683 - RNA, 19 nt, Artificial Sequence
  Description of Artificial Sequence: Synthetic oligonucleotide
  Sense strand starting at position 2445 of SEQ ID NO: 1560661
gagggcuuccuugagguua

SEQ ID NO: 1615684 - RNA, 19 nt, Artificial Sequence
  Description of Artificial Sequence: Synthetic oligonucleotide
  Antisense strand to SEQ ID NO: 1615683
uaaccucaaggaagcccuc

SEQ ID NO: 1615685 - RNA, 19 nt, Artificial Sequence
  Description of Artificial Sequence: Synthetic oligonucleotide
  Sense strand starting at position 2450 of SEQ ID NO: 1560661
cuuccuugagguuaucuga

SEQ ID NO: 1615686 - RNA, 19 nt, Artificial Sequence
  Description of Artificial Sequence: Synthetic oligonucleotide
  Antisense strand to SEQ ID NO: 1615685
ucagauaaccucaaggaag

SEQ ID NO: 1615687 - RNA, 19 nt, Artificial Sequence
  Description of Artificial Sequence: Synthetic oligonucleotide
  Sense strand starting at position 2453 of SEQ ID NO: 1560661
ccuugagguuaucugagau

SEQ ID NO: 1615688 - RNA, 19 nt, Artificial Sequence
  Description of Artificial Sequence: Synthetic oligonucleotide
  Antisense strand to SEQ ID NO: 1615687
aucucagauaaccucaagg

SEQ ID NO: 1615689 - RNA, 19 nt, Artificial Sequence
  Description of Artificial Sequence: Synthetic oligonucleotide
  Sense strand starting at position 2756 of SEQ ID NO: 1560661
gucuaaaugagcuggagga

SEQ ID NO: 1615690 - RNA, 19 nt, Artificial Sequence
  Description of Artificial Sequence: Synthetic oligonucleotide
  Antisense strand to SEQ ID NO: 1615689
uccuccagcucauuuagac

SEQ ID NO: 1615691 - RNA, 19 nt, Artificial Sequence
  Description of Artificial Sequence: Synthetic oligonucleotide
  Sense strand starting at position 2781 of SEQ ID NO: 1560661
agauuugcuuccuaauaug

SEQ ID NO: 1615692 - RNA, 19 nt, Artificial Sequence
  Description of Artificial Sequence: Synthetic oligonucleotide
  Antisense strand to SEQ ID NO: 1615691
cauauuaggaagcaaaucu

SEQ ID NO: 1615693 - RNA, 19 nt, Artificial Sequence
  Description of Artificial Sequence: Synthetic oligonucleotide
  Sense strand starting at position 2798 of SEQ ID NO: 1560661
ugaucaaccugagaaauag

SEQ ID NO: 1615694 - RNA, 19 nt, Artificial Sequence
  Description of Artificial Sequence: Synthetic oligonucleotide
  Antisense strand to SEQ ID NO: 1615693
cuauuucucagguugauca

SEQ ID NO: 1615695 - RNA, 19 nt, Artificial Sequence
  Description of Artificial Sequence: Synthetic oligonucleotide
  Sense strand starting at position 2821 of SEQ ID NO: 1560661
gcuagccaucaagaaguaa

SEQ ID NO: 1615696 - RNA, 19 nt, Artificial Sequence
  Description of Artificial Sequence: Synthetic oligonucleotide
  Antisense strand to SEQ ID NO: 1615695
uuacuucuugauggcuagc

SEQ ID NO: 1615697 - RNA, 19 nt, Artificial Sequence
  Description of Artificial Sequence: Synthetic oligonucleotide
  Sense strand starting at position 3176 of SEQ ID NO: 1560661
aguaaauggaucugagagu

SEQ ID NO: 1615698 - RNA, 19 nt, Artificial Sequence
  Description of Artificial Sequence: Synthetic oligonucleotide
  Antisense strand to SEQ ID NO: 1615697
acucucagauccauuuacu

SEQ ID NO: 1615699 - RNA, 19 nt, Artificial Sequence
  Description of Artificial Sequence: Synthetic oligonucleotide
  Sense strand starting at position 3251 of SEQ ID NO: 1560661
gguugguucggccaaugga

SEQ ID NO: 1615700 - RNA, 19 nt, Artificial Sequence
  Description of Artificial Sequence: Synthetic oligonucleotide
  Antisense strand to SEQ ID NO: 1615699
uccauuggccgaaccaacc

SEQ ID NO: 1615701 - RNA, 19 nt, Artificial Sequence
  Description of Artificial Sequence: Synthetic oligonucleotide
  Sense strand starting at position 3254 of SEQ ID NO: 1560661
ugguucggccaauggaaua

SEQ ID NO: 1615702 - RNA, 19 nt, Artificial Sequence
  Description of Artificial Sequence: Synthetic oligonucleotide
  Antisense strand to SEQ ID NO: 1615701
uauuccauuggccgaacca

SEQ ID NO: 1615703 - RNA, 19 nt, Artificial Sequence
  Description of Artificial Sequence: Synthetic oligonucleotide
  Sense strand starting at position 3302 of SEQ ID NO: 1560661
ugauauaugcagcaacaua

SEQ ID NO: 1615704 - RNA, 19 nt, Artificial Sequence
  Description of Artificial Sequence: Synthetic oligonucleotide
  Antisense strand to SEQ ID NO: 1615703
uauguugcugcauauauca

SEQ ID NO: 1615705 - RNA, 19 nt, Artificial Sequence
  Description of Artificial Sequence: Synthetic oligonucleotide
  Sense strand starting at position 3484 of SEQ ID NO: 1560661
ugguguugaguuuagaaag

SEQ ID NO: 1615706 - RNA, 19 nt, Artificial Sequence
  Description of Artificial Sequence: Synthetic oligonucleotide
  Antisense strand to SEQ ID NO: 1615705
cuuucuaaacucaacacca

SEQ ID NO: 1615707 - RNA, 19 nt, Artificial Sequence
  Description of Artificial Sequence: Synthetic oligonucleotide
  Sense strand starting at position 3680 of SEQ ID NO: 1560661
guguacagauacguugaga

SEQ ID NO: 1615708 - RNA, 19 nt, Artificial Sequence
  Description of Artificial Sequence: Synthetic oligonucleotide
  Antisense strand to SEQ ID NO: 1615707
ucucaacguaucuguacac

SEQ ID NO: 1615709 - RNA, 19 nt, Artificial Sequence
  Description of Artificial Sequence: Synthetic oligonucleotide
  Sense strand starting at position 3715 of SEQ ID NO: 1560661
ugucacuggacguauguua

SEQ ID NO: 1615710 - RNA, 19 nt, Artificial Sequence
  Description of Artificial Sequence: Synthetic oligonucleotide
  Antisense strand to SEQ ID NO: 1615709
uaacauacguccagugaca

SEQ ID NO: 1615711 - RNA, 19 nt, Artificial Sequence
  Description of Artificial Sequence: Synthetic oligonucleotide
  Sense strand starting at position 3753 of SEQ ID NO: 1560661
uaaagaaugucacugugga

SEQ ID NO: 1615712 - RNA, 19 nt, Artificial Sequence
  Description of Artificial Sequence: Synthetic oligonucleotide
  Antisense strand to SEQ ID NO: 1615711
uccacagugacauucuuua

SEQ ID NO: 1615713 - RNA, 19 nt, Artificial Sequence
  Description of Artificial Sequence: Synthetic oligonucleotide
  Sense strand starting at position 3754 of SEQ ID NO: 1560661
aaagaaugucacuguggac

SEQ ID NO: 1615714 - RNA, 19 nt, Artificial Sequence
  Description of Artificial Sequence: Synthetic oligonucleotide
  Antisense strand to SEQ ID NO: 1615713
guccacagugacauucuuu

SEQ ID NO: 1615715 - RNA, 19 nt, Artificial Sequence
  Description of Artificial Sequence: Synthetic oligonucleotide
  Sense strand starting at position 3763 of SEQ ID NO: 1560661
cacuguggacucuguguaa

SEQ ID NO: 1615716 - RNA, 19 nt, Artificial Sequence
  Description of Artificial Sequence: Synthetic oligonucleotide
  Antisense strand to SEQ ID NO: 1615715
uuacacagaguccacagug

SEQ ID NO: 1615717 - RNA, 19 nt, Artificial Sequence
  Description of Artificial Sequence: Synthetic oligonucleotide
  Sense strand starting at position 3885 of SEQ ID NO: 1560661
gggaguuggccugacacac

SEQ ID NO: 1615718 - RNA, 19 nt, Artificial Sequence
  Description of Artificial Sequence: Synthetic oligonucleotide
  Antisense strand to SEQ ID NO: 1615717
gugugucaggccaacuccc

SEQ ID NO: 1615719 - RNA, 19 nt, Artificial Sequence
  Description of Artificial Sequence: Synthetic oligonucleotide
  Sense strand starting at position 4 of SEQ ID NO: 1560662
ugucaaauuguacaucuau

SEQ ID NO: 1615720 - RNA, 19 nt, Artificial Sequence
  Description of Artificial Sequence: Synthetic oligonucleotide
  Antisense strand to SEQ ID NO: 1615719
auagauguacaauuugaca

SEQ ID NO: 1615721 - RNA, 19 nt, Artificial Sequence
  Description of Artificial Sequence: Synthetic oligonucleotide
  Sense strand starting at position 16 of SEQ ID NO: 1560662
caucuaucagacugguaag

SEQ ID NO: 1615722 - RNA, 19 nt, Artificial Sequence
  Description of Artificial Sequence: Synthetic oligonucleotide
  Antisense strand to SEQ ID NO: 1615721
cuuaccagucugauagaug

SEQ ID NO: 1615723 - RNA, 19 nt, Artificial Sequence
  Description of Artificial Sequence: Synthetic oligonucleotide
  Sense strand starting at position 19 of SEQ ID NO: 1560662
cuaucagacugguaaggau

SEQ ID NO: 1615724 - RNA, 19 nt, Artificial Sequence
  Description of Artificial Sequence: Synthetic oligonucleotide
  Antisense strand to SEQ ID NO: 1615723
auccuuaccagucugauag

SEQ ID NO: 1615725 - RNA, 19 nt, Artificial Sequence
  Description of Artificial Sequence: Synthetic oligonucleotide
  Sense strand starting at position 53 of SEQ ID NO: 1560662
agacaaguguuggcaggua

SEQ ID NO: 1615726 - RNA, 19 nt, Artificial Sequence
  Description of Artificial Sequence: Synthetic oligonucleotide
  Antisense strand to SEQ ID NO: 1615725
uaccugccaacacuugucu

SEQ ID NO: 1615727 - RNA, 19 nt, Artificial Sequence
  Description of Artificial Sequence: Synthetic oligonucleotide
  Sense strand starting at position 97 of SEQ ID NO: 1560662
ccugaugcucauggcauua

SEQ ID NO: 1615728 - RNA, 19 nt, Artificial Sequence
  Description of Artificial Sequence: Synthetic oligonucleotide
  Antisense strand to SEQ ID NO: 1615727
uaaugccaugagcaucagg

SEQ ID NO: 1615729 - RNA, 19 nt, Artificial Sequence
  Description of Artificial Sequence: Synthetic oligonucleotide
  Sense strand starting at position 217 of SEQ ID NO: 1560662
cugacacuacauggucaaa

SEQ ID NO: 1615730 - RNA, 19 nt, Artificial Sequence
  Description of Artificial Sequence: Synthetic oligonucleotide
  Antisense strand to SEQ ID NO: 1615729
uuugaccauguagugucag

SEQ ID NO: 1615731 - RNA, 19 nt, Artificial Sequence
  Description of Artificial Sequence: Synthetic oligonucleotide
  Sense strand starting at position 228 of SEQ ID NO: 1560662
uggucaaauuggguuuaua

SEQ ID NO: 1615732 - RNA, 19 nt, Artificial Sequence
  Description of Artificial Sequence: Synthetic oligonucleotide
  Antisense strand to SEQ ID NO: 1615731
uauaaacccaauuugacca

SEQ ID NO: 1615733 - RNA, 19 nt, Artificial Sequence
  Description of Artificial Sequence: Synthetic oligonucleotide
  Sense strand starting at position 472 of SEQ ID NO: 1560662
cacccagcuuuguagagau

SEQ ID NO: 1615734 - RNA, 19 nt, Artificial Sequence
  Description of Artificial Sequence: Synthetic oligonucleotide
  Antisense strand to SEQ ID NO: 1615733
aucucuacaaagcugggug

SEQ ID NO: 1615735 - RNA, 19 nt, Artificial Sequence
  Description of Artificial Sequence: Synthetic oligonucleotide
  Sense strand starting at position 609 of SEQ ID NO: 1560662
cauuauuguggugauggua

SEQ ID NO: 1615736 - RNA, 19 nt, Artificial Sequence
  Description of Artificial Sequence: Synthetic oligonucleotide
  Antisense strand to SEQ ID NO: 1615735
uaccaucaccacaauaaug

SEQ ID NO: 1615737 - RNA, 19 nt, Artificial Sequence
  Description of Artificial Sequence: Synthetic oligonucleotide
  Sense strand starting at position 617 of SEQ ID NO: 1560662
uggugaugguagguugaga

SEQ ID NO: 1615738 - RNA, 19 nt, Artificial Sequence
  Description of Artificial Sequence: Synthetic oligonucleotide
  Antisense strand to SEQ ID NO: 1615737
ucucaaccuaccaucacca

SEQ ID NO: 1615739 - RNA, 19 nt, Artificial Sequence
  Description of Artificial Sequence: Synthetic oligonucleotide
  Sense strand starting at position 684 of SEQ ID NO: 1560662
ggauguacgcuauggaaua

SEQ ID NO: 1615740 - RNA, 19 nt, Artificial Sequence
  Description of Artificial Sequence: Synthetic oligonucleotide
  Antisense strand to SEQ ID NO: 1615739
uauuccauagcguacaucc

SEQ ID NO: 1615741 - RNA, 19 nt, Artificial Sequence
  Description of Artificial Sequence: Synthetic oligonucleotide
  Sense strand starting at position 696 of SEQ ID NO: 1560662
uggaauaucacgcaggagu

SEQ ID NO: 1615742 - RNA, 19 nt, Artificial Sequence
  Description of Artificial Sequence: Synthetic oligonucleotide
  Antisense strand to SEQ ID NO: 1615741
acuccugcgugauauucca

SEQ ID NO: 1615743 - RNA, 19 nt, Artificial Sequence
  Description of Artificial Sequence: Synthetic oligonucleotide
  Sense strand starting at position 713 of SEQ ID NO: 1560662
guuggaagaaguugauuag

SEQ ID NO: 1615744 - RNA, 19 nt, Artificial Sequence
  Description of Artificial Sequence: Synthetic oligonucleotide
  Antisense strand to SEQ ID NO: 1615743
cuaaucaacuucuuccaac

SEQ ID NO: 1615745 - RNA, 19 nt, Artificial Sequence
  Description of Artificial Sequence: Synthetic oligonucleotide
  Sense strand starting at position 1093 of SEQ ID NO: 1560662
gaauguguacauggauaga

SEQ ID NO: 1615746 - RNA, 19 nt, Artificial Sequence
  Description of Artificial Sequence: Synthetic oligonucleotide
  Antisense strand to SEQ ID NO: 1615745
ucuauccauguacacauuc

SEQ ID NO: 1615747 - RNA, 19 nt, Artificial Sequence
  Description of Artificial Sequence: Synthetic oligonucleotide
  Sense strand starting at position 1124 of SEQ ID NO: 1560662
agugcugauuauuacaaau

SEQ ID NO: 1615748 - RNA, 19 nt, Artificial Sequence
  Description of Artificial Sequence: Synthetic oligonucleotide
  Antisense strand to SEQ ID NO: 1615747
auuuguaauaaucagcacu

SEQ ID NO: 1615749 - RNA, 19 nt, Artificial Sequence
  Description of Artificial Sequence: Synthetic oligonucleotide
  Sense strand starting at position 1126 of SEQ ID NO: 1560662
ugcugauuauuacaaauag

SEQ ID NO: 1615750 - RNA, 19 nt, Artificial Sequence
  Description of Artificial Sequence: Synthetic oligonucleotide
  Antisense strand to SEQ ID NO: 1615749
cuauuuguaauaaucagca

SEQ ID NO: 1615751 - RNA, 19 nt, Artificial Sequence
  Description of Artificial Sequence: Synthetic oligonucleotide
  Sense strand starting at position 1199 of SEQ ID NO: 1560662
ggucguucaugccugugau

SEQ ID NO: 1615752 - RNA, 19 nt, Artificial Sequence
  Description of Artificial Sequence: Synthetic oligonucleotide
  Antisense strand to SEQ ID NO: 1615751
aucacaggcaugaacgacc

SEQ ID NO: 1615753 - RNA, 19 nt, Artificial Sequence
  Description of Artificial Sequence: Synthetic oligonucleotide
  Sense strand starting at position 1200 of SEQ ID NO: 1560662
gucguucaugccugugauc

SEQ ID NO: 1615754 - RNA, 19 nt, Artificial Sequence
  Description of Artificial Sequence: Synthetic oligonucleotide
  Antisense strand to SEQ ID NO: 1615753
gaucacaggcaugaacgac

SEQ ID NO: 1615755 - RNA, 19 nt, Artificial Sequence
  Description of Artificial Sequence: Synthetic oligonucleotide
  Sense strand starting at position 1657 of SEQ ID NO: 1560662
ccauaaguauuaggcaaau

SEQ ID NO: 1615756 - RNA, 19 nt, Artificial Sequence
  Description of Artificial Sequence: Synthetic oligonucleotide
  Antisense strand to SEQ ID NO: 1615755
auuugccuaauacuuaugg

SEQ ID NO: 1615757 - RNA, 19 nt, Artificial Sequence
  Description of Artificial Sequence: Synthetic oligonucleotide
  Sense strand starting at position 1663 of SEQ ID NO: 1560662
guauuaggcaaaugcuaag

SEQ ID NO: 1615758 - RNA, 19 nt, Artificial Sequence
  Description of Artificial Sequence: Synthetic oligonucleotide
  Antisense strand to SEQ ID NO: 1615757
cuuagcauuugccuaauac

SEQ ID NO: 1615759 - RNA, 19 nt, Artificial Sequence
  Description of Artificial Sequence: Synthetic oligonucleotide
  Sense strand starting at position 1669 of SEQ ID NO: 1560662
ggcaaaugcuaagcucuuu

SEQ ID NO: 1615760 - RNA, 19 nt, Artificial Sequence
  Description of Artificial Sequence: Synthetic oligonucleotide
  Antisense strand to SEQ ID NO: 1615759
aaagagcuuagcauuugcc

SEQ ID NO: 1615761 - RNA, 19 nt, Artificial Sequence
  Description of Artificial Sequence: Synthetic oligonucleotide
  Sense strand starting at position 1683 of SEQ ID NO: 1560662
ucuuuauaaucguugguua

SEQ ID NO: 1615762 - RNA, 19 nt, Artificial Sequence
  Description of Artificial Sequence: Synthetic oligonucleotide
  Antisense strand to SEQ ID NO: 1615761
uaaccaacgauuauaaaga

SEQ ID NO: 1615763 - RNA, 19 nt, Artificial Sequence
  Description of Artificial Sequence: Synthetic oligonucleotide
  Sense strand starting at position 1684 of SEQ ID NO: 1560662
cuuuauaaucguugguuac

SEQ ID NO: 1615764 - RNA, 19 nt, Artificial Sequence
  Description of Artificial Sequence: Synthetic oligonucleotide
  Antisense strand to SEQ ID NO: 1615763
guaaccaacgauuauaaag

SEQ ID NO: 1615765 - RNA, 19 nt, Artificial Sequence
  Description of Artificial Sequence: Synthetic oligonucleotide
  Sense strand starting at position 1784 of SEQ ID NO: 1560662
cucuuuagcuggccuuuaa

SEQ ID NO: 1615766 - RNA, 19 nt, Artificial Sequence
  Description of Artificial Sequence: Synthetic oligonucleotide
  Antisense strand to SEQ ID NO: 1615765
uuaaaggccagcuaaagag

SEQ ID NO: 1615767 - RNA, 19 nt, Artificial Sequence
  Description of Artificial Sequence: Synthetic oligonucleotide
  Sense strand starting at position 1937 of SEQ ID NO: 1560662
agacacacaugcucuguaa

SEQ ID NO: 1615768 - RNA, 19 nt, Artificial Sequence
  Description of Artificial Sequence: Synthetic oligonucleotide
  Antisense strand to SEQ ID NO: 1615767
uuacagagcaugugugucu

SEQ ID NO: 1615769 - RNA, 19 nt, Artificial Sequence
  Description of Artificial Sequence: Synthetic oligonucleotide
  Sense strand starting at position 1956 of SEQ ID NO: 1560662
cccagaaaucuguggccaa

SEQ ID NO: 1615770 - RNA, 19 nt, Artificial Sequence
  Description of Artificial Sequence: Synthetic oligonucleotide
  Antisense strand to SEQ ID NO: 1615769
uuggccacagauuucuggg

SEQ ID NO: 1615771 - RNA, 19 nt, Artificial Sequence
  Description of Artificial Sequence: Synthetic oligonucleotide
  Sense strand starting at position 1959 of SEQ ID NO: 1560662
agaaaucuguggccaagaa

SEQ ID NO: 1615772 - RNA, 19 nt, Artificial Sequence
  Description of Artificial Sequence: Synthetic oligonucleotide
  Antisense strand to SEQ ID NO: 1615771
uucuuggccacagauuucu

SEQ ID NO: 1615773 - RNA, 19 nt, Artificial Sequence
  Description of Artificial Sequence: Synthetic oligonucleotide
  Sense strand starting at position 2513 of SEQ ID NO: 1560662
gcgaacucuugaggaagau

SEQ ID NO: 1615774 - RNA, 19 nt, Artificial Sequence
  Description of Artificial Sequence: Synthetic oligonucleotide
  Antisense strand to SEQ ID NO: 1615773
aucuuccucaagaguucgc

SEQ ID NO: 1615775 - RNA, 19 nt, Artificial Sequence
  Description of Artificial Sequence: Synthetic oligonucleotide
  Sense strand starting at position 2542 of SEQ ID NO: 1560662
gguggagccagccagaaau

SEQ ID NO: 1615776 - RNA, 19 nt, Artificial Sequence
  Description of Artificial Sequence: Synthetic oligonucleotide
  Antisense strand to SEQ ID NO: 1615775
auuucuggcuggcuccacc

SEQ ID NO: 1615777 - RNA, 19 nt, Artificial Sequence
  Description of Artificial Sequence: Synthetic oligonucleotide
  Sense strand starting at position 2737 of SEQ ID NO: 1560662
ggugcaaucugaggaagga

SEQ ID NO: 1615778 - RNA, 19 nt, Artificial Sequence
  Description of Artificial Sequence: Synthetic oligonucleotide
  Antisense strand to SEQ ID NO: 1615777
uccuuccucagauugcacc

SEQ ID NO: 1615779 - RNA, 19 nt, Artificial Sequence
  Description of Artificial Sequence: Synthetic oligonucleotide
  Sense strand starting at position 2887 of SEQ ID NO: 1560662
gcgcgaagucgagguacaa

SEQ ID NO: 1615780 - RNA, 19 nt, Artificial Sequence
  Description of Artificial Sequence: Synthetic oligonucleotide
  Antisense strand to SEQ ID NO: 1615779
uuguaccucgacuucgcgc

SEQ ID NO: 1615781 - RNA, 19 nt, Artificial Sequence
  Description of Artificial Sequence: Synthetic oligonucleotide
  Sense strand starting at position 3128 of SEQ ID NO: 1560662
gcgcuauuggugggacuga

SEQ ID NO: 1615782 - RNA, 19 nt, Artificial Sequence
  Description of Artificial Sequence: Synthetic oligonucleotide
  Antisense strand to SEQ ID NO: 1615781
ucagucccaccaauagcgc

SEQ ID NO: 1615783 - RNA, 19 nt, Artificial Sequence
  Description of Artificial Sequence: Synthetic oligonucleotide
  Sense strand starting at position 3146 of SEQ ID NO: 1560662
auagucuugugcgccaaga

SEQ ID NO: 1615784 - RNA, 19 nt, Artificial Sequence
  Description of Artificial Sequence: Synthetic oligonucleotide
  Antisense strand to SEQ ID NO: 1615783
ucuuggcgcacaagacuau

SEQ ID NO: 1615785 - RNA, 19 nt, Artificial Sequence
  Description of Artificial Sequence: Synthetic oligonucleotide
  Sense strand starting at position 3148 of SEQ ID NO: 1560662
agucuugugcgccaagaag

SEQ ID NO: 1615786 - RNA, 19 nt, Artificial Sequence
  Description of Artificial Sequence: Synthetic oligonucleotide
  Antisense strand to SEQ ID NO: 1615785
cuucuuggcgcacaagacu

SEQ ID NO: 1615787 - RNA, 19 nt, Artificial Sequence
  Description of Artificial Sequence: Synthetic oligonucleotide
  Sense strand starting at position 3237 of SEQ ID NO: 1560662
agaggcgaugcuugaaguu

SEQ ID NO: 1615788 - RNA, 19 nt, Artificial Sequence
  Description of Artificial Sequence: Synthetic oligonucleotide
  Antisense strand to SEQ ID NO: 1615787
aacuucaagcaucgccucu

SEQ ID NO: 1615789 - RNA, 19 nt, Artificial Sequence
  Description of Artificial Sequence: Synthetic oligonucleotide
  Sense strand starting at position 3253 of SEQ ID NO: 1560662
guucauuggucuuugugag

SEQ ID NO: 1615790 - RNA, 19 nt, Artificial Sequence
  Description of Artificial Sequence: Synthetic oligonucleotide
  Antisense strand to SEQ ID NO: 1615789
cucacaaagaccaaugaac

SEQ ID NO: 1615791 - RNA, 19 nt, Artificial Sequence
  Description of Artificial Sequence: Synthetic oligonucleotide
  Sense strand starting at position 3261 of SEQ ID NO: 1560662
gucuuugugagacagggua

SEQ ID NO: 1615792 - RNA, 19 nt, Artificial Sequence
  Description of Artificial Sequence: Synthetic oligonucleotide
  Antisense strand to SEQ ID NO: 1615791
uacccugucucacaaagac

SEQ ID NO: 1615793 - RNA, 19 nt, Artificial Sequence
  Description of Artificial Sequence: Synthetic oligonucleotide
  Sense strand starting at position 3371 of SEQ ID NO: 1560662
ugugguaaccgugaacuag

SEQ ID NO: 1615794 - RNA, 19 nt, Artificial Sequence
  Description of Artificial Sequence: Synthetic oligonucleotide
  Antisense strand to SEQ ID NO: 1615793
cuaguucacgguuaccaca

SEQ ID NO: 1615795 - RNA, 19 nt, Artificial Sequence
  Description of Artificial Sequence: Synthetic oligonucleotide
  Sense strand starting at position 3681 of SEQ ID NO: 1560662
gcgcaagagagacauuagu

SEQ ID NO: 1615796 - RNA, 19 nt, Artificial Sequence
  Description of Artificial Sequence: Synthetic oligonucleotide
  Antisense strand to SEQ ID NO: 1615795
acuaaugucucucuugcgc

SEQ ID NO: 1615797 - RNA, 19 nt, Artificial Sequence
  Description of Artificial Sequence: Synthetic oligonucleotide
  Sense strand starting at position 3756 of SEQ ID NO: 1560662
guaaccauuuguggaauga

SEQ ID NO: 1615798 - RNA, 19 nt, Artificial Sequence
  Description of Artificial Sequence: Synthetic oligonucleotide
  Antisense strand to SEQ ID NO: 1615797
ucauuccacaaaugguuac

SEQ ID NO: 1615799 - RNA, 19 nt, Artificial Sequence
  Description of Artificial Sequence: Synthetic oligonucleotide
  Sense strand starting at position 147 of SEQ ID NO: 1560663
gaauguguacauggauaga

SEQ ID NO: 1615800 - RNA, 19 nt, Artificial Sequence
  Description of Artificial Sequence: Synthetic oligonucleotide
  Antisense strand to SEQ ID NO: 1615799
ucuauccauguacacauuc

SEQ ID NO: 1615801 - RNA, 19 nt, Artificial Sequence
  Description of Artificial Sequence: Synthetic oligonucleotide
  Sense strand starting at position 178 of SEQ ID NO: 1560663
agugcugauuauuacaaau

SEQ ID NO: 1615802 - RNA, 19 nt, Artificial Sequence
  Description of Artificial Sequence: Synthetic oligonucleotide
  Antisense strand to SEQ ID NO: 1615801
auuuguaauaaucagcacu

SEQ ID NO: 1615803 - RNA, 19 nt, Artificial Sequence
  Description of Artificial Sequence: Synthetic oligonucleotide
  Sense strand starting at position 180 of SEQ ID NO: 1560663
ugcugauuauuacaaauag

SEQ ID NO: 1615804 - RNA, 19 nt, Artificial Sequence
  Description of Artificial Sequence: Synthetic oligonucleotide
  Antisense strand to SEQ ID NO: 1615803
cuauuuguaauaaucagca

SEQ ID NO: 1615805 - RNA, 19 nt, Artificial Sequence
  Description of Artificial Sequence: Synthetic oligonucleotide
  Sense strand starting at position 253 of SEQ ID NO: 1560663
ggucguucaugccugugau

SEQ ID NO: 1615806 - RNA, 19 nt, Artificial Sequence
  Description of Artificial Sequence: Synthetic oligonucleotide
  Antisense strand to SEQ ID NO: 1615805
aucacaggcaugaacgacc

SEQ ID NO: 1615807 - RNA, 19 nt, Artificial Sequence
  Description of Artificial Sequence: Synthetic oligonucleotide
  Sense strand starting at position 254 of SEQ ID NO: 1560663
gucguucaugccugugauc

SEQ ID NO: 1615808 - RNA, 19 nt, Artificial Sequence
  Description of Artificial Sequence: Synthetic oligonucleotide
  Antisense strand to SEQ ID NO: 1615807
gaucacaggcaugaacgac

SEQ ID NO: 1615809 - RNA, 19 nt, Artificial Sequence
  Description of Artificial Sequence: Synthetic oligonucleotide
  Sense strand starting at position 711 of SEQ ID NO: 1560663
ccauaaguauuaggcaaau

SEQ ID NO: 1615810 - RNA, 19 nt, Artificial Sequence
  Description of Artificial Sequence: Synthetic oligonucleotide
  Antisense strand to SEQ ID NO: 1615809
auuugccuaauacuuaugg

SEQ ID NO: 1615811 - RNA, 19 nt, Artificial Sequence
  Description of Artificial Sequence: Synthetic oligonucleotide
  Sense strand starting at position 717 of SEQ ID NO: 1560663
guauuaggcaaaugcuaag

SEQ ID NO: 1615812 - RNA, 19 nt, Artificial Sequence
  Description of Artificial Sequence: Synthetic oligonucleotide
  Antisense strand to SEQ ID NO: 1615811
cuuagcauuugccuaauac

SEQ ID NO: 1615813 - RNA, 19 nt, Artificial Sequence
  Description of Artificial Sequence: Synthetic oligonucleotide
  Sense strand starting at position 723 of SEQ ID NO: 1560663
ggcaaaugcuaagcucuuu

SEQ ID NO: 1615814 - RNA, 19 nt, Artificial Sequence
  Description of Artificial Sequence: Synthetic oligonucleotide
  Antisense strand to SEQ ID NO: 1615813
aaagagcuuagcauuugcc

SEQ ID NO: 1615815 - RNA, 19 nt, Artificial Sequence
  Description of Artificial Sequence: Synthetic oligonucleotide
  Sense strand starting at position 737 of SEQ ID NO: 1560663
ucuuuauaaucguugguua

SEQ ID NO: 1615816 - RNA, 19 nt, Artificial Sequence
  Description of Artificial Sequence: Synthetic oligonucleotide
  Antisense strand to SEQ ID NO: 1615815
uaaccaacgauuauaaaga

SEQ ID NO: 1615817 - RNA, 19 nt, Artificial Sequence
  Description of Artificial Sequence: Synthetic oligonucleotide
  Sense strand starting at position 738 of SEQ ID NO: 1560663
cuuuauaaucguugguuac

SEQ ID NO: 1615818 - RNA, 19 nt, Artificial Sequence
  Description of Artificial Sequence: Synthetic oligonucleotide
  Antisense strand to SEQ ID NO: 1615817
guaaccaacgauuauaaag

SEQ ID NO: 1615819 - RNA, 19 nt, Artificial Sequence
  Description of Artificial Sequence: Synthetic oligonucleotide
  Sense strand starting at position 838 of SEQ ID NO: 1560663
cucuuuagcuggccuuuaa

SEQ ID NO: 1615820 - RNA, 19 nt, Artificial Sequence
  Description of Artificial Sequence: Synthetic oligonucleotide
  Antisense strand to SEQ ID NO: 1615819
uuaaaggccagcuaaagag

SEQ ID NO: 1615821 - RNA, 19 nt, Artificial Sequence
  Description of Artificial Sequence: Synthetic oligonucleotide
  Sense strand starting at position 991 of SEQ ID NO: 1560663
agacacacaugcucuguaa

SEQ ID NO: 1615822 - RNA, 19 nt, Artificial Sequence
  Description of Artificial Sequence: Synthetic oligonucleotide
  Antisense strand to SEQ ID NO: 1615821
uuacagagcaugugugucu

SEQ ID NO: 1615823 - RNA, 19 nt, Artificial Sequence
  Description of Artificial Sequence: Synthetic oligonucleotide
  Sense strand starting at position 1010 of SEQ ID NO: 1560663
cccagaaaucuguggccaa

SEQ ID NO: 1615824 - RNA, 19 nt, Artificial Sequence
  Description of Artificial Sequence: Synthetic oligonucleotide
  Antisense strand to SEQ ID NO: 1615823
uuggccacagauuucuggg

SEQ ID NO: 1615825 - RNA, 19 nt, Artificial Sequence
  Description of Artificial Sequence: Synthetic oligonucleotide
  Sense strand starting at position 1011 of SEQ ID NO: 1560663
ccagaaaucuguggccaag

SEQ ID NO: 1615826 - RNA, 19 nt, Artificial Sequence
  Description of Artificial Sequence: Synthetic oligonucleotide
  Antisense strand to SEQ ID NO: 1615825
cuuggccacagauuucugg

SEQ ID NO: 1615827 - RNA, 19 nt, Artificial Sequence
  Description of Artificial Sequence: Synthetic oligonucleotide
  Sense strand starting at position 1013 of SEQ ID NO: 1560663
agaaaucuguggccaagaa

SEQ ID NO: 1615828 - RNA, 19 nt, Artificial Sequence
  Description of Artificial Sequence: Synthetic oligonucleotide
  Antisense strand to SEQ ID NO: 1615827
uucuuggccacagauuucu

SEQ ID NO: 1615829 - RNA, 19 nt, Artificial Sequence
  Description of Artificial Sequence: Synthetic oligonucleotide
  Sense strand starting at position 1567 of SEQ ID NO: 1560663
gcgaacucuugaggaagau

SEQ ID NO: 1615830 - RNA, 19 nt, Artificial Sequence
  Description of Artificial Sequence: Synthetic oligonucleotide
  Antisense strand to SEQ ID NO: 1615829
aucuuccucaagaguucgc

SEQ ID NO: 1615831 - RNA, 19 nt, Artificial Sequence
  Description of Artificial Sequence: Synthetic oligonucleotide
  Sense strand starting at position 1596 of SEQ ID NO: 1560663
gguggagccagccagaaau

SEQ ID NO: 1615832 - RNA, 19 nt, Artificial Sequence
  Description of Artificial Sequence: Synthetic oligonucleotide
  Antisense strand to SEQ ID NO: 1615831
auuucuggcuggcuccacc

SEQ ID NO: 1615833 - RNA, 19 nt, Artificial Sequence
  Description of Artificial Sequence: Synthetic oligonucleotide
  Sense strand starting at position 1791 of SEQ ID NO: 1560663
ggugcaaucugaggaagga

SEQ ID NO: 1615834 - RNA, 19 nt, Artificial Sequence
  Description of Artificial Sequence: Synthetic oligonucleotide
  Antisense strand to SEQ ID NO: 1615833
uccuuccucagauugcacc

SEQ ID NO: 1615835 - RNA, 19 nt, Artificial Sequence
  Description of Artificial Sequence: Synthetic oligonucleotide
  Sense strand starting at position 1941 of SEQ ID NO: 1560663
gcgcgaagucgagguacaa

SEQ ID NO: 1615836 - RNA, 19 nt, Artificial Sequence
  Description of Artificial Sequence: Synthetic oligonucleotide
  Antisense strand to SEQ ID NO: 1615835
uuguaccucgacuucgcgc

SEQ ID NO: 1615837 - RNA, 19 nt, Artificial Sequence
  Description of Artificial Sequence: Synthetic oligonucleotide
  Sense strand starting at position 2182 of SEQ ID NO: 1560663
gcgcuauuggugggacuga

SEQ ID NO: 1615838 - RNA, 19 nt, Artificial Sequence
  Description of Artificial Sequence: Synthetic oligonucleotide
  Antisense strand to SEQ ID NO: 1615837
ucagucccaccaauagcgc

SEQ ID NO: 1615839 - RNA, 19 nt, Artificial Sequence
  Description of Artificial Sequence: Synthetic oligonucleotide
  Sense strand starting at position 2183 of SEQ ID NO: 1560663
cgcuauuggugggacugau

SEQ ID NO: 1615840 - RNA, 19 nt, Artificial Sequence
  Description of Artificial Sequence: Synthetic oligonucleotide
  Antisense strand to SEQ ID NO: 1615839
aucagucccaccaauagcg

SEQ ID NO: 1615841 - RNA, 19 nt, Artificial Sequence
  Description of Artificial Sequence: Synthetic oligonucleotide
  Sense strand starting at position 2200 of SEQ ID NO: 1560663
auagucuugugcgccaaga

SEQ ID NO: 1615842 - RNA, 19 nt, Artificial Sequence
  Description of Artificial Sequence: Synthetic oligonucleotide
  Antisense strand to SEQ ID NO: 1615841
ucuuggcgcacaagacuau

SEQ ID NO: 1615843 - RNA, 19 nt, Artificial Sequence
  Description of Artificial Sequence: Synthetic oligonucleotide
  Sense strand starting at position 2202 of SEQ ID NO: 1560663
agucuugugcgccaagaag

SEQ ID NO: 1615844 - RNA, 19 nt, Artificial Sequence
  Description of Artificial Sequence: Synthetic oligonucleotide
  Antisense strand to SEQ ID NO: 1615843
cuucuuggcgcacaagacu

SEQ ID NO: 1615845 - RNA, 19 nt, Artificial Sequence
  Description of Artificial Sequence: Synthetic oligonucleotide
  Sense strand starting at position 2291 of SEQ ID NO: 1560663
agaggcgaugcuugaaguu

SEQ ID NO: 1615846 - RNA, 19 nt, Artificial Sequence
  Description of Artificial Sequence: Synthetic oligonucleotide
  Antisense strand to SEQ ID NO: 1615845
aacuucaagcaucgccucu

SEQ ID NO: 1615847 - RNA, 19 nt, Artificial Sequence
  Description of Artificial Sequence: Synthetic oligonucleotide
  Sense strand starting at position 2307 of SEQ ID NO: 1560663
guucauuggucuuugugag

SEQ ID NO: 1615848 - RNA, 19 nt, Artificial Sequence
  Description of Artificial Sequence: Synthetic oligonucleotide
  Antisense strand to SEQ ID NO: 1615847
cucacaaagaccaaugaac

SEQ ID NO: 1615849 - RNA, 19 nt, Artificial Sequence
  Description of Artificial Sequence: Synthetic oligonucleotide
  Sense strand starting at position 2315 of SEQ ID NO: 1560663
gucuuugugagacagggua

SEQ ID NO: 1615850 - RNA, 19 nt, Artificial Sequence
  Description of Artificial Sequence: Synthetic oligonucleotide
  Antisense strand to SEQ ID NO: 1615849
uacccugucucacaaagac

SEQ ID NO: 1615851 - RNA, 19 nt, Artificial Sequence
  Description of Artificial Sequence: Synthetic oligonucleotide
  Sense strand starting at position 2425 of SEQ ID NO: 1560663
ugugguaaccgugaacuag

SEQ ID NO: 1615852 - RNA, 19 nt, Artificial Sequence
  Description of Artificial Sequence: Synthetic oligonucleotide
  Antisense strand to SEQ ID NO: 1615851
cuaguucacgguuaccaca

SEQ ID NO: 1615853 - RNA, 19 nt, Artificial Sequence
  Description of Artificial Sequence: Synthetic oligonucleotide
  Sense strand starting at position 2735 of SEQ ID NO: 1560663
gcgcaagagagacauuagu

SEQ ID NO: 1615854 - RNA, 19 nt, Artificial Sequence
  Description of Artificial Sequence: Synthetic oligonucleotide
  Antisense strand to SEQ ID NO: 1615853
acuaaugucucucuugcgc

SEQ ID NO: 1615855 - RNA, 19 nt, Artificial Sequence
  Description of Artificial Sequence: Synthetic oligonucleotide
  Sense strand starting at position 2810 of SEQ ID NO: 1560663
guaaccauuuguggaauga

SEQ ID NO: 1615856 - RNA, 19 nt, Artificial Sequence
  Description of Artificial Sequence: Synthetic oligonucleotide
  Antisense strand to SEQ ID NO: 1615855
ucauuccacaaaugguuac

SEQ ID NO: 1615857 - RNA, 19 nt, Artificial Sequence
  Description of Artificial Sequence: Synthetic oligonucleotide
  Sense strand starting at position 3363 of SEQ ID NO: 1560663
gggaauccaugagaauaag

SEQ ID NO: 1615858 - RNA, 19 nt, Artificial Sequence
  Description of Artificial Sequence: Synthetic oligonucleotide
  Antisense strand to SEQ ID NO: 1615857
cuuauucucauggauuccc

SEQ ID NO: 1615859 - RNA, 19 nt, Artificial Sequence
  Description of Artificial Sequence: Synthetic oligonucleotide
  Sense strand starting at position 3369 of SEQ ID NO: 1560663
ccaugagaauaagguaauu

SEQ ID NO: 1615860 - RNA, 19 nt, Artificial Sequence
  Description of Artificial Sequence: Synthetic oligonucleotide
  Antisense strand to SEQ ID NO: 1615859
aauuaccuuauucucaugg

SEQ ID NO: 1615861 - RNA, 19 nt, Artificial Sequence
  Description of Artificial Sequence: Synthetic oligonucleotide
  Sense strand starting at position 3399 of SEQ ID NO: 1560663
aagagaggguucugauuua

SEQ ID NO: 1615862 - RNA, 19 nt, Artificial Sequence
  Description of Artificial Sequence: Synthetic oligonucleotide
  Antisense strand to SEQ ID NO: 1615861
uaaaucagaacccucucuu

SEQ ID NO: 1615863 - RNA, 19 nt, Artificial Sequence
  Description of Artificial Sequence: Synthetic oligonucleotide
  Sense strand starting at position 3465 of SEQ ID NO: 1560663
ugcuuugcagggcauagau

SEQ ID NO: 1615864 - RNA, 19 nt, Artificial Sequence
  Description of Artificial Sequence: Synthetic oligonucleotide
  Antisense strand to SEQ ID NO: 1615863
aucuaugcccugcaaagca

SEQ ID NO: 1615865 - RNA, 19 nt, Artificial Sequence
  Description of Artificial Sequence: Synthetic oligonucleotide
  Sense strand starting at position 3480 of SEQ ID NO: 1560663
agaugagacuaagaauuga

SEQ ID NO: 1615866 - RNA, 19 nt, Artificial Sequence
  Description of Artificial Sequence: Synthetic oligonucleotide
  Antisense strand to SEQ ID NO: 1615865
ucaauucuuagucucaucu

SEQ ID NO: 1615867 - RNA, 19 nt, Artificial Sequence
  Description of Artificial Sequence: Synthetic oligonucleotide
  Sense strand starting at position 3533 of SEQ ID NO: 1560663
cugguaggcauuggaugaa

SEQ ID NO: 1615868 - RNA, 19 nt, Artificial Sequence
  Description of Artificial Sequence: Synthetic oligonucleotide
  Antisense strand to SEQ ID NO: 1615867
uucauccaaugccuaccag

SEQ ID NO: 1615869 - RNA, 19 nt, Artificial Sequence
  Description of Artificial Sequence: Synthetic oligonucleotide
  Sense strand starting at position 3564 of SEQ ID NO: 1560663
gggugagcauuguugaaga

SEQ ID NO: 1615870 - RNA, 19 nt, Artificial Sequence
  Description of Artificial Sequence: Synthetic oligonucleotide
  Antisense strand to SEQ ID NO: 1615869
ucuucaacaaugcucaccc

SEQ ID NO: 1615871 - RNA, 19 nt, Artificial Sequence
  Description of Artificial Sequence: Synthetic oligonucleotide
  Sense strand starting at position 3631 of SEQ ID NO: 1560663
ggauguaggacucgcugaa

SEQ ID NO: 1615872 - RNA, 19 nt, Artificial Sequence
  Description of Artificial Sequence: Synthetic oligonucleotide
  Antisense strand to SEQ ID NO: 1615871
uucagcgaguccuacaucc

SEQ ID NO: 1615873 - RNA, 19 nt, Artificial Sequence
  Description of Artificial Sequence: Synthetic oligonucleotide
  Sense strand starting at position 3661 of SEQ ID NO: 1560663
ggacaugaguagguuggaa

SEQ ID NO: 1615874 - RNA, 19 nt, Artificial Sequence
  Description of Artificial Sequence: Synthetic oligonucleotide
  Antisense strand to SEQ ID NO: 1615873
uuccaaccuacucaugucc

SEQ ID NO: 1615875 - RNA, 19 nt, Artificial Sequence
  Description of Artificial Sequence: Synthetic oligonucleotide
  Sense strand starting at position 3700 of SEQ ID NO: 1560663
gggaaaguguuuggauuga

SEQ ID NO: 1615876 - RNA, 19 nt, Artificial Sequence
  Description of Artificial Sequence: Synthetic oligonucleotide
  Antisense strand to SEQ ID NO: 1615875
ucaauccaaacacuuuccc

SEQ ID NO: 1615877 - RNA, 19 nt, Artificial Sequence
  Description of Artificial Sequence: Synthetic oligonucleotide
  Sense strand starting at position 3704 of SEQ ID NO: 1560663
aaguguuuggauugaaaga

SEQ ID NO: 1615878 - RNA, 19 nt, Artificial Sequence
  Description of Artificial Sequence: Synthetic oligonucleotide
  Antisense strand to SEQ ID NO: 1615877
ucuuucaauccaaacacuu

SEQ ID NO: 1615879 - RNA, 19 nt, Artificial Sequence
  Description of Artificial Sequence: Synthetic oligonucleotide
  Sense strand starting at position 148 of SEQ ID NO: 1560664
acaauuaugcgauguuuag

SEQ ID NO: 1615880 - RNA, 19 nt, Artificial Sequence
  Description of Artificial Sequence: Synthetic oligonucleotide
  Antisense strand to SEQ ID NO: 1615879
cuaaacaucgcauaauugu

SEQ ID NO: 1615881 - RNA, 19 nt, Artificial Sequence
  Description of Artificial Sequence: Synthetic oligonucleotide
  Sense strand starting at position 152 of SEQ ID NO: 1560664
uuaugcgauguuuagagau

SEQ ID NO: 1615882 - RNA, 19 nt, Artificial Sequence
  Description of Artificial Sequence: Synthetic oligonucleotide
  Antisense strand to SEQ ID NO: 1615881
aucucuaaacaucgcauaa

SEQ ID NO: 1615883 - RNA, 19 nt, Artificial Sequence
  Description of Artificial Sequence: Synthetic oligonucleotide
  Sense strand starting at position 406 of SEQ ID NO: 1560664
acgagaauugcuggagccu

SEQ ID NO: 1615884 - RNA, 19 nt, Artificial Sequence
  Description of Artificial Sequence: Synthetic oligonucleotide
  Antisense strand to SEQ ID NO: 1615883
aggcuccagcaauucucgu

SEQ ID NO: 1615885 - RNA, 19 nt, Artificial Sequence
  Description of Artificial Sequence: Synthetic oligonucleotide
  Sense strand starting at position 606 of SEQ ID NO: 1560664
caaacaauuggucaggcau

SEQ ID NO: 1615886 - RNA, 19 nt, Artificial Sequence
  Description of Artificial Sequence: Synthetic oligonucleotide
  Antisense strand to SEQ ID NO: 1615885
augccugaccaauuguuug

SEQ ID NO: 1615887 - RNA, 19 nt, Artificial Sequence
  Description of Artificial Sequence: Synthetic oligonucleotide
  Sense strand starting at position 793 of SEQ ID NO: 1560664
gucucauuggcugauguga

SEQ ID NO: 1615888 - RNA, 19 nt, Artificial Sequence
  Description of Artificial Sequence: Synthetic oligonucleotide
  Antisense strand to SEQ ID NO: 1615887
ucacaucagccaaugagac

SEQ ID NO: 1615889 - RNA, 19 nt, Artificial Sequence
  Description of Artificial Sequence: Synthetic oligonucleotide
  Sense strand starting at position 1244 of SEQ ID NO: 1560664
cacagagacucauaggaca

SEQ ID NO: 1615890 - RNA, 19 nt, Artificial Sequence
  Description of Artificial Sequence: Synthetic oligonucleotide
  Antisense strand to SEQ ID NO: 1615889
uguccuaugagucucugug

SEQ ID NO: 1615891 - RNA, 19 nt, Artificial Sequence
  Description of Artificial Sequence: Synthetic oligonucleotide
  Sense strand starting at position 1325 of SEQ ID NO: 1560664
uuugguugugugcaggaau

SEQ ID NO: 1615892 - RNA, 19 nt, Artificial Sequence
  Description of Artificial Sequence: Synthetic oligonucleotide
  Antisense strand to SEQ ID NO: 1615891
auuccugcacacaaccaaa

SEQ ID NO: 1615893 - RNA, 19 nt, Artificial Sequence
  Description of Artificial Sequence: Synthetic oligonucleotide
  Sense strand starting at position 1339 of SEQ ID NO: 1560664
ggaauagccuccuuucuac

SEQ ID NO: 1615894 - RNA, 19 nt, Artificial Sequence
  Description of Artificial Sequence: Synthetic oligonucleotide
  Antisense strand to SEQ ID NO: 1615893
guagaaaggaggcuauucc

SEQ ID NO: 1615895 - RNA, 19 nt, Artificial Sequence
  Description of Artificial Sequence: Synthetic oligonucleotide
  Sense strand starting at position 1362 of SEQ ID NO: 1560664
cuaauucccugucuuugua

SEQ ID NO: 1615896 - RNA, 19 nt, Artificial Sequence
  Description of Artificial Sequence: Synthetic oligonucleotide
  Antisense strand to SEQ ID NO: 1615895
uacaaagacagggaauuag

SEQ ID NO: 1615897 - RNA, 19 nt, Artificial Sequence
  Description of Artificial Sequence: Synthetic oligonucleotide
  Sense strand starting at position 2018 of SEQ ID NO: 1560664
ccaguauuucuucguccca

SEQ ID NO: 1615898 - RNA, 19 nt, Artificial Sequence
  Description of Artificial Sequence: Synthetic oligonucleotide
  Antisense strand to SEQ ID NO: 1615897
ugggacgaagaaauacugg

SEQ ID NO: 1615899 - RNA, 19 nt, Artificial Sequence
  Description of Artificial Sequence: Synthetic oligonucleotide
  Sense strand starting at position 2054 of SEQ ID NO: 1560664
ggucucuuccuagguaauc

SEQ ID NO: 1615900 - RNA, 19 nt, Artificial Sequence
  Description of Artificial Sequence: Synthetic oligonucleotide
  Antisense strand to SEQ ID NO: 1615899
gauuaccuaggaagagacc

SEQ ID NO: 1615901 - RNA, 19 nt, Artificial Sequence
  Description of Artificial Sequence: Synthetic oligonucleotide
  Sense strand starting at position 2063 of SEQ ID NO: 1560664
cuagguaaucgugauggaa

SEQ ID NO: 1615902 - RNA, 19 nt, Artificial Sequence
  Description of Artificial Sequence: Synthetic oligonucleotide
  Antisense strand to SEQ ID NO: 1615901
uuccaucacgauuaccuag

SEQ ID NO: 1615903 - RNA, 19 nt, Artificial Sequence
  Description of Artificial Sequence: Synthetic oligonucleotide
  Sense strand starting at position 2066 of SEQ ID NO: 1560664
gguaaucgugauggaaaca

SEQ ID NO: 1615904 - RNA, 19 nt, Artificial Sequence
  Description of Artificial Sequence: Synthetic oligonucleotide
  Antisense strand to SEQ ID NO: 1615903
uguuuccaucacgauuacc

SEQ ID NO: 1615905 - RNA, 19 nt, Artificial Sequence
  Description of Artificial Sequence: Synthetic oligonucleotide
  Sense strand starting at position 2085 of SEQ ID NO: 1560664
gggugauccucaguugcug

SEQ ID NO: 1615906 - RNA, 19 nt, Artificial Sequence
  Description of Artificial Sequence: Synthetic oligonucleotide
  Antisense strand to SEQ ID NO: 1615905
cagcaacugaggaucaccc

SEQ ID NO: 1615907 - RNA, 19 nt, Artificial Sequence
  Description of Artificial Sequence: Synthetic oligonucleotide
  Sense strand starting at position 2100 of SEQ ID NO: 1560664
gcuggagaucuacacuucu

SEQ ID NO: 1615908 - RNA, 19 nt, Artificial Sequence
  Description of Artificial Sequence: Synthetic oligonucleotide
  Antisense strand to SEQ ID NO: 1615907
agaaguguagaucuccagc

SEQ ID NO: 1615909 - RNA, 19 nt, Artificial Sequence
  Description of Artificial Sequence: Synthetic oligonucleotide
  Sense strand starting at position 2161 of SEQ ID NO: 1560664
uuugaaugauuggugucuu

SEQ ID NO: 1615910 - RNA, 19 nt, Artificial Sequence
  Description of Artificial Sequence: Synthetic oligonucleotide
  Antisense strand to SEQ ID NO: 1615909
aagacaccaaucauucaaa

SEQ ID NO: 1615911 - RNA, 19 nt, Artificial Sequence
  Description of Artificial Sequence: Synthetic oligonucleotide
  Sense strand starting at position 2488 of SEQ ID NO: 1560664
gaaugucugagauaccgua

SEQ ID NO: 1615912 - RNA, 19 nt, Artificial Sequence
  Description of Artificial Sequence: Synthetic oligonucleotide
  Antisense strand to SEQ ID NO: 1615911
uacgguaucucagacauuc

SEQ ID NO: 1615913 - RNA, 19 nt, Artificial Sequence
  Description of Artificial Sequence: Synthetic oligonucleotide
  Sense strand starting at position 2495 of SEQ ID NO: 1560664
ugagauaccguaugacuga

SEQ ID NO: 1615914 - RNA, 19 nt, Artificial Sequence
  Description of Artificial Sequence: Synthetic oligonucleotide
  Antisense strand to SEQ ID NO: 1615913
ucagucauacgguaucuca

SEQ ID NO: 1615915 - RNA, 19 nt, Artificial Sequence
  Description of Artificial Sequence: Synthetic oligonucleotide
  Sense strand starting at position 2680 of SEQ ID NO: 1560664
aacagaugugacuguguag

SEQ ID NO: 1615916 - RNA, 19 nt, Artificial Sequence
  Description of Artificial Sequence: Synthetic oligonucleotide
  Antisense strand to SEQ ID NO: 1615915
cuacacagucacaucuguu

SEQ ID NO: 1615917 - RNA, 19 nt, Artificial Sequence
  Description of Artificial Sequence: Synthetic oligonucleotide
  Sense strand starting at position 2683 of SEQ ID NO: 1560664
agaugugacuguguaguca

SEQ ID NO: 1615918 - RNA, 19 nt, Artificial Sequence
  Description of Artificial Sequence: Synthetic oligonucleotide
  Antisense strand to SEQ ID NO: 1615917
ugacuacacagucacaucu

SEQ ID NO: 1615919 - RNA, 19 nt, Artificial Sequence
  Description of Artificial Sequence: Synthetic oligonucleotide
  Sense strand starting at position 2687 of SEQ ID NO: 1560664
gugacuguguagucacaca

SEQ ID NO: 1615920 - RNA, 19 nt, Artificial Sequence
  Description of Artificial Sequence: Synthetic oligonucleotide
  Antisense strand to SEQ ID NO: 1615919
ugugugacuacacagucac

SEQ ID NO: 1615921 - RNA, 19 nt, Artificial Sequence
  Description of Artificial Sequence: Synthetic oligonucleotide
  Sense strand starting at position 2692 of SEQ ID NO: 1560664
uguguagucacacagacaa

SEQ ID NO: 1615922 - RNA, 19 nt, Artificial Sequence
  Description of Artificial Sequence: Synthetic oligonucleotide
  Antisense strand to SEQ ID NO: 1615921
uugucugugugacuacaca

SEQ ID NO: 1615923 - RNA, 19 nt, Artificial Sequence
  Description of Artificial Sequence: Synthetic oligonucleotide
  Sense strand starting at position 2853 of SEQ ID NO: 1560664
acauguggaugcucagaca

SEQ ID NO: 1615924 - RNA, 19 nt, Artificial Sequence
  Description of Artificial Sequence: Synthetic oligonucleotide
  Antisense strand to SEQ ID NO: 1615923
ugucugagcauccacaugu

SEQ ID NO: 1615925 - RNA, 19 nt, Artificial Sequence
  Description of Artificial Sequence: Synthetic oligonucleotide
  Sense strand starting at position 2960 of SEQ ID NO: 1560664
acuucuugcugccuggaga

SEQ ID NO: 1615926 - RNA, 19 nt, Artificial Sequence
  Description of Artificial Sequence: Synthetic oligonucleotide
  Antisense strand to SEQ ID NO: 1615925
ucuccaggcagcaagaagu

SEQ ID NO: 1615927 - RNA, 19 nt, Artificial Sequence
  Description of Artificial Sequence: Synthetic oligonucleotide
  Sense strand starting at position 2961 of SEQ ID NO: 1560664
cuucuugcugccuggagau

SEQ ID NO: 1615928 - RNA, 19 nt, Artificial Sequence
  Description of Artificial Sequence: Synthetic oligonucleotide
  Antisense strand to SEQ ID NO: 1615927
aucuccaggcagcaagaag

SEQ ID NO: 1615929 - RNA, 19 nt, Artificial Sequence
  Description of Artificial Sequence: Synthetic oligonucleotide
  Sense strand starting at position 3175 of SEQ ID NO: 1560664
guaggacacuuacuuuaga

SEQ ID NO: 1615930 - RNA, 19 nt, Artificial Sequence
  Description of Artificial Sequence: Synthetic oligonucleotide
  Antisense strand to SEQ ID NO: 1615929
ucuaaaguaaguguccuac

SEQ ID NO: 1615931 - RNA, 19 nt, Artificial Sequence
  Description of Artificial Sequence: Synthetic oligonucleotide
  Sense strand starting at position 3202 of SEQ ID NO: 1560664
acagucaucccucgguauu

SEQ ID NO: 1615932 - RNA, 19 nt, Artificial Sequence
  Description of Artificial Sequence: Synthetic oligonucleotide
  Antisense strand to SEQ ID NO: 1615931
aauaccgagggaugacugu

SEQ ID NO: 1615933 - RNA, 19 nt, Artificial Sequence
  Description of Artificial Sequence: Synthetic oligonucleotide
  Sense strand starting at position 3203 of SEQ ID NO: 1560664
cagucaucccucgguauug

SEQ ID NO: 1615934 - RNA, 19 nt, Artificial Sequence
  Description of Artificial Sequence: Synthetic oligonucleotide
  Antisense strand to SEQ ID NO: 1615933
caauaccgagggaugacug

SEQ ID NO: 1615935 - RNA, 19 nt, Artificial Sequence
  Description of Artificial Sequence: Synthetic oligonucleotide
  Sense strand starting at position 3205 of SEQ ID NO: 1560664
gucaucccucgguauuguu

SEQ ID NO: 1615936 - RNA, 19 nt, Artificial Sequence
  Description of Artificial Sequence: Synthetic oligonucleotide
  Antisense strand to SEQ ID NO: 1615935
aacaauaccgagggaugac

SEQ ID NO: 1615937 - RNA, 19 nt, Artificial Sequence
  Description of Artificial Sequence: Synthetic oligonucleotide
  Sense strand starting at position 3281 of SEQ ID NO: 1560664
gacugaaugcguggaggua

SEQ ID NO: 1615938 - RNA, 19 nt, Artificial Sequence
  Description of Artificial Sequence: Synthetic oligonucleotide
  Antisense strand to SEQ ID NO: 1615937
uaccuccacgcauucaguc

SEQ ID NO: 1615939 - RNA, 19 nt, Artificial Sequence
  Description of Artificial Sequence: Synthetic oligonucleotide
  Sense strand starting at position 3293 of SEQ ID NO: 1560664
ggagguagaaccuguggau

SEQ ID NO: 1615940 - RNA, 19 nt, Artificial Sequence
  Description of Artificial Sequence: Synthetic oligonucleotide
  Antisense strand to SEQ ID NO: 1615939
auccacagguucuaccucc

SEQ ID NO: 1615941 - RNA, 19 nt, Artificial Sequence
  Description of Artificial Sequence: Synthetic oligonucleotide
  Sense strand starting at position 3334 of SEQ ID NO: 1560664
ggccaaauauaauugcaaa

SEQ ID NO: 1615942 - RNA, 19 nt, Artificial Sequence
  Description of Artificial Sequence: Synthetic oligonucleotide
  Antisense strand to SEQ ID NO: 1615941
uuugcaauuauauuuggcc

SEQ ID NO: 1615943 - RNA, 19 nt, Artificial Sequence
  Description of Artificial Sequence: Synthetic oligonucleotide
  Sense strand starting at position 3698 of SEQ ID NO: 1560664
agguaaaucuucuccuggu

SEQ ID NO: 1615944 - RNA, 19 nt, Artificial Sequence
  Description of Artificial Sequence: Synthetic oligonucleotide
  Antisense strand to SEQ ID NO: 1615943
accaggagaagauuuaccu

SEQ ID NO: 1615945 - RNA, 19 nt, Artificial Sequence
  Description of Artificial Sequence: Synthetic oligonucleotide
  Sense strand starting at position 3699 of SEQ ID NO: 1560664
gguaaaucuucuccugguc

SEQ ID NO: 1615946 - RNA, 19 nt, Artificial Sequence
  Description of Artificial Sequence: Synthetic oligonucleotide
  Antisense strand to SEQ ID NO: 1615945
gaccaggagaagauuuacc

SEQ ID NO: 1615947 - RNA, 19 nt, Artificial Sequence
  Description of Artificial Sequence: Synthetic oligonucleotide
  Sense strand starting at position 3725 of SEQ ID NO: 1560664
agcguuacaacccaggaau

SEQ ID NO: 1615948 - RNA, 19 nt, Artificial Sequence
  Description of Artificial Sequence: Synthetic oligonucleotide
  Antisense strand to SEQ ID NO: 1615947
auuccuggguuguaacgcu

SEQ ID NO: 1615949 - RNA, 19 nt, Artificial Sequence
  Description of Artificial Sequence: Synthetic oligonucleotide
  Sense strand starting at position 3760 of SEQ ID NO: 1560664
ugggaauuaucccuuugaa

SEQ ID NO: 1615950 - RNA, 19 nt, Artificial Sequence
  Description of Artificial Sequence: Synthetic oligonucleotide
  Antisense strand to SEQ ID NO: 1615949
uucaaagggauaauuccca

SEQ ID NO: 1615951 - RNA, 19 nt, Artificial Sequence
  Description of Artificial Sequence: Synthetic oligonucleotide
  Sense strand starting at position 3825 of SEQ ID NO: 1560664
guaggagccucacuuugau

SEQ ID NO: 1615952 - RNA, 19 nt, Artificial Sequence
  Description of Artificial Sequence: Synthetic oligonucleotide
  Antisense strand to SEQ ID NO: 1615951
aucaaagugaggcuccuac

SEQ ID NO: 1615953 - RNA, 19 nt, Artificial Sequence
  Description of Artificial Sequence: Synthetic oligonucleotide
  Sense strand starting at position 3828 of SEQ ID NO: 1560664
ggagccucacuuugauaau

SEQ ID NO: 1615954 - RNA, 19 nt, Artificial Sequence
  Description of Artificial Sequence: Synthetic oligonucleotide
  Antisense strand to SEQ ID NO: 1615953
auuaucaaagugaggcucc

SEQ ID NO: 1615955 - RNA, 19 nt, Artificial Sequence
  Description of Artificial Sequence: Synthetic oligonucleotide
  Sense strand starting at position 3902 of SEQ ID NO: 1560664
ggaauaacuccaugugaug

SEQ ID NO: 1615956 - RNA, 19 nt, Artificial Sequence
  Description of Artificial Sequence: Synthetic oligonucleotide
  Antisense strand to SEQ ID NO: 1615955
caucacauggaguuauucc

SEQ ID NO: 1615957 - RNA, 19 nt, Artificial Sequence
  Description of Artificial Sequence: Synthetic oligonucleotide
  Sense strand starting at position 3937 of SEQ ID NO: 1560664
agaauaacuccaugugaug

SEQ ID NO: 1615958 - RNA, 19 nt, Artificial Sequence
  Description of Artificial Sequence: Synthetic oligonucleotide
  Antisense strand to SEQ ID NO: 1615957
caucacauggaguuauucu

SEQ ID NO: 1615959 - RNA, 19 nt, Artificial Sequence
  Description of Artificial Sequence: Synthetic oligonucleotide
  Sense strand starting at position 343 of SEQ ID NO: 1560665
gggccugucugguaucacu

SEQ ID NO: 1615960 - RNA, 19 nt, Artificial Sequence
  Description of Artificial Sequence: Synthetic oligonucleotide
  Antisense strand to SEQ ID NO: 1615959
agugauaccagacaggccc

SEQ ID NO: 1615961 - RNA, 19 nt, Artificial Sequence
  Description of Artificial Sequence: Synthetic oligonucleotide
  Sense strand starting at position 459 of SEQ ID NO: 1560665
cggucugguccuggugaca

SEQ ID NO: 1615962 - RNA, 19 nt, Artificial Sequence
  Description of Artificial Sequence: Synthetic oligonucleotide
  Antisense strand to SEQ ID NO: 1615961
ugucaccaggaccagaccg

SEQ ID NO: 1615963 - RNA, 19 nt, Artificial Sequence
  Description of Artificial Sequence: Synthetic oligonucleotide
  Sense strand starting at position 822 of SEQ ID NO: 1560665
gggcguugcauuugucagu

SEQ ID NO: 1615964 - RNA, 19 nt, Artificial Sequence
  Description of Artificial Sequence: Synthetic oligonucleotide
  Antisense strand to SEQ ID NO: 1615963
acugacaaaugcaacgccc

SEQ ID NO: 1615965 - RNA, 19 nt, Artificial Sequence
  Description of Artificial Sequence: Synthetic oligonucleotide
  Sense strand starting at position 823 of SEQ ID NO: 1560665
ggcguugcauuugucaguu

SEQ ID NO: 1615966 - RNA, 19 nt, Artificial Sequence
  Description of Artificial Sequence: Synthetic oligonucleotide
  Antisense strand to SEQ ID NO: 1615965
aacugacaaaugcaacgcc

SEQ ID NO: 1615967 - RNA, 19 nt, Artificial Sequence
  Description of Artificial Sequence: Synthetic oligonucleotide
  Sense strand starting at position 829 of SEQ ID NO: 1560665
gcauuugucaguugugcag

SEQ ID NO: 1615968 - RNA, 19 nt, Artificial Sequence
  Description of Artificial Sequence: Synthetic oligonucleotide
  Antisense strand to SEQ ID NO: 1615967
cugcacaacugacaaaugc

SEQ ID NO: 1615969 - RNA, 19 nt, Artificial Sequence
  Description of Artificial Sequence: Synthetic oligonucleotide
  Sense strand starting at position 980 of SEQ ID NO: 1560665
cgugcucugcuucccgaaa

SEQ ID NO: 1615970 - RNA, 19 nt, Artificial Sequence
  Description of Artificial Sequence: Synthetic oligonucleotide
  Antisense strand to SEQ ID NO: 1615969
uuucgggaagcagagcacg

SEQ ID NO: 1615971 - RNA, 19 nt, Artificial Sequence
  Description of Artificial Sequence: Synthetic oligonucleotide
  Sense strand starting at position 1761 of SEQ ID NO: 1560665
caaaguaggugugcucaaa

SEQ ID NO: 1615972 - RNA, 19 nt, Artificial Sequence
  Description of Artificial Sequence: Synthetic oligonucleotide
  Antisense strand to SEQ ID NO: 1615971
uuugagcacaccuacuuug

SEQ ID NO: 1615973 - RNA, 19 nt, Artificial Sequence
  Description of Artificial Sequence: Synthetic oligonucleotide
  Sense strand starting at position 1968 of SEQ ID NO: 1560665
gugucugucucauggcaga

SEQ ID NO: 1615974 - RNA, 19 nt, Artificial Sequence
  Description of Artificial Sequence: Synthetic oligonucleotide
  Antisense strand to SEQ ID NO: 1615973
ucugccaugagacagacac

SEQ ID NO: 1615975 - RNA, 19 nt, Artificial Sequence
  Description of Artificial Sequence: Synthetic oligonucleotide
  Sense strand starting at position 1971 of SEQ ID NO: 1560665
ucugucucauggcagagua

SEQ ID NO: 1615976 - RNA, 19 nt, Artificial Sequence
  Description of Artificial Sequence: Synthetic oligonucleotide
  Antisense strand to SEQ ID NO: 1615975
uacucugccaugagacaga

SEQ ID NO: 1615977 - RNA, 19 nt, Artificial Sequence
  Description of Artificial Sequence: Synthetic oligonucleotide
  Sense strand starting at position 1973 of SEQ ID NO: 1560665
ugucucauggcagaguaau

SEQ ID NO: 1615978 - RNA, 19 nt, Artificial Sequence
  Description of Artificial Sequence: Synthetic oligonucleotide
  Antisense strand to SEQ ID NO: 1615977
auuacucugccaugagaca

SEQ ID NO: 1615979 - RNA, 19 nt, Artificial Sequence
  Description of Artificial Sequence: Synthetic oligonucleotide
  Sense strand starting at position 2203 of SEQ ID NO: 1560665
agugaagugugguccugua

SEQ ID NO: 1615980 - RNA, 19 nt, Artificial Sequence
  Description of Artificial Sequence: Synthetic oligonucleotide
  Antisense strand to SEQ ID NO: 1615979
uacaggaccacacuucacu

SEQ ID NO: 1615981 - RNA, 19 nt, Artificial Sequence
  Description of Artificial Sequence: Synthetic oligonucleotide
  Sense strand starting at position 2216 of SEQ ID NO: 1560665
ccuguagugcccuguaaac

SEQ ID NO: 1615982 - RNA, 19 nt, Artificial Sequence
  Description of Artificial Sequence: Synthetic oligonucleotide
  Antisense strand to SEQ ID NO: 1615981
guuuacagggcacuacagg

SEQ ID NO: 1615983 - RNA, 19 nt, Artificial Sequence
  Description of Artificial Sequence: Synthetic oligonucleotide
  Sense strand starting at position 2379 of SEQ ID NO: 1560665
gcaucuggacccugcaaua

SEQ ID NO: 1615984 - RNA, 19 nt, Artificial Sequence
  Description of Artificial Sequence: Synthetic oligonucleotide
  Antisense strand to SEQ ID NO: 1615983
uauugcaggguccagaugc

SEQ ID NO: 1615985 - RNA, 19 nt, Artificial Sequence
  Description of Artificial Sequence: Synthetic oligonucleotide
  Sense strand starting at position 2453 of SEQ ID NO: 1560665
aagcguaugucugugagga

SEQ ID NO: 1615986 - RNA, 19 nt, Artificial Sequence
  Description of Artificial Sequence: Synthetic oligonucleotide
  Antisense strand to SEQ ID NO: 1615985
uccucacagacauacgcuu

SEQ ID NO: 1615987 - RNA, 19 nt, Artificial Sequence
  Description of Artificial Sequence: Synthetic oligonucleotide
  Sense strand starting at position 2454 of SEQ ID NO: 1560665
agcguaugucugugaggau

SEQ ID NO: 1615988 - RNA, 19 nt, Artificial Sequence
  Description of Artificial Sequence: Synthetic oligonucleotide
  Antisense strand to SEQ ID NO: 1615987
auccucacagacauacgcu

SEQ ID NO: 1615989 - RNA, 19 nt, Artificial Sequence
  Description of Artificial Sequence: Synthetic oligonucleotide
  Sense strand starting at position 2455 of SEQ ID NO: 1560665
gcguaugucugugaggaug

SEQ ID NO: 1615990 - RNA, 19 nt, Artificial Sequence
  Description of Artificial Sequence: Synthetic oligonucleotide
  Antisense strand to SEQ ID NO: 1615989
cauccucacagacauacgc

SEQ ID NO: 1615991 - RNA, 19 nt, Artificial Sequence
  Description of Artificial Sequence: Synthetic oligonucleotide
  Sense strand starting at position 2470 of SEQ ID NO: 1560665
gaugcuugugccuguauga

SEQ ID NO: 1615992 - RNA, 19 nt, Artificial Sequence
  Description of Artificial Sequence: Synthetic oligonucleotide
  Antisense strand to SEQ ID NO: 1615991
ucauacaggcacaagcauc

SEQ ID NO: 1615993 - RNA, 19 nt, Artificial Sequence
  Description of Artificial Sequence: Synthetic oligonucleotide
  Sense strand starting at position 2477 of SEQ ID NO: 1560665
gugccuguaugauaaccau

SEQ ID NO: 1615994 - RNA, 19 nt, Artificial Sequence
  Description of Artificial Sequence: Synthetic oligonucleotide
  Antisense strand to SEQ ID NO: 1615993
augguuaucauacaggcac

SEQ ID NO: 1615995 - RNA, 19 nt, Artificial Sequence
  Description of Artificial Sequence: Synthetic oligonucleotide
  Sense strand starting at position 2577 of SEQ ID NO: 1560665
gccacaauuaugcgauguu

SEQ ID NO: 1615996 - RNA, 19 nt, Artificial Sequence
  Description of Artificial Sequence: Synthetic oligonucleotide
  Antisense strand to SEQ ID NO: 1615995
aacaucgcauaauuguggc

SEQ ID NO: 1615997 - RNA, 19 nt, Artificial Sequence
  Description of Artificial Sequence: Synthetic oligonucleotide
  Sense strand starting at position 2578 of SEQ ID NO: 1560665
ccacaauuaugcgauguuu

SEQ ID NO: 1615998 - RNA, 19 nt, Artificial Sequence
  Description of Artificial Sequence: Synthetic oligonucleotide
  Antisense strand to SEQ ID NO: 1615997
aaacaucgcauaauugugg

SEQ ID NO: 1615999 - RNA, 19 nt, Artificial Sequence
  Description of Artificial Sequence: Synthetic oligonucleotide
  Sense strand starting at position 2580 of SEQ ID NO: 1560665
acaauuaugcgauguuuag

SEQ ID NO: 1616000 - RNA, 19 nt, Artificial Sequence
  Description of Artificial Sequence: Synthetic oligonucleotide
  Antisense strand to SEQ ID NO: 1615999
cuaaacaucgcauaauugu

SEQ ID NO: 1616001 - RNA, 19 nt, Artificial Sequence
  Description of Artificial Sequence: Synthetic oligonucleotide
  Sense strand starting at position 2584 of SEQ ID NO: 1560665
uuaugcgauguuuagagau

SEQ ID NO: 1616002 - RNA, 19 nt, Artificial Sequence
  Description of Artificial Sequence: Synthetic oligonucleotide
  Antisense strand to SEQ ID NO: 1616001
aucucuaaacaucgcauaa

SEQ ID NO: 1616003 - RNA, 19 nt, Artificial Sequence
  Description of Artificial Sequence: Synthetic oligonucleotide
  Sense strand starting at position 2586 of SEQ ID NO: 1560665
augcgauguuuagagauac

SEQ ID NO: 1616004 - RNA, 19 nt, Artificial Sequence
  Description of Artificial Sequence: Synthetic oligonucleotide
  Antisense strand to SEQ ID NO: 1616003
guaucucuaaacaucgcau

SEQ ID NO: 1616005 - RNA, 19 nt, Artificial Sequence
  Description of Artificial Sequence: Synthetic oligonucleotide
  Sense strand starting at position 2838 of SEQ ID NO: 1560665
acgagaauugcuggagccu

SEQ ID NO: 1616006 - RNA, 19 nt, Artificial Sequence
  Description of Artificial Sequence: Synthetic oligonucleotide
  Antisense strand to SEQ ID NO: 1616005
aggcuccagcaauucucgu

SEQ ID NO: 1616007 - RNA, 19 nt, Artificial Sequence
  Description of Artificial Sequence: Synthetic oligonucleotide
  Sense strand starting at position 3038 of SEQ ID NO: 1560665
caaacaauuggucaggcau

SEQ ID NO: 1616008 - RNA, 19 nt, Artificial Sequence
  Description of Artificial Sequence: Synthetic oligonucleotide
  Antisense strand to SEQ ID NO: 1616007
augccugaccaauuguuug

SEQ ID NO: 1616009 - RNA, 19 nt, Artificial Sequence
  Description of Artificial Sequence: Synthetic oligonucleotide
  Sense strand starting at position 3221 of SEQ ID NO: 1560665
gccagucucauuggcugau

SEQ ID NO: 1616010 - RNA, 19 nt, Artificial Sequence
  Description of Artificial Sequence: Synthetic oligonucleotide
  Antisense strand to SEQ ID NO: 1616009
aucagccaaugagacuggc

SEQ ID NO: 1616011 - RNA, 19 nt, Artificial Sequence
  Description of Artificial Sequence: Synthetic oligonucleotide
  Sense strand starting at position 3225 of SEQ ID NO: 1560665
gucucauuggcugauguga

SEQ ID NO: 1616012 - RNA, 19 nt, Artificial Sequence
  Description of Artificial Sequence: Synthetic oligonucleotide
  Antisense strand to SEQ ID NO: 1616011
ucacaucagccaaugagac

SEQ ID NO: 1616013 - RNA, 19 nt, Artificial Sequence
  Description of Artificial Sequence: Synthetic oligonucleotide
  Sense strand starting at position 3227 of SEQ ID NO: 1560665
cucauuggcugaugugagu

SEQ ID NO: 1616014 - RNA, 19 nt, Artificial Sequence
  Description of Artificial Sequence: Synthetic oligonucleotide
  Antisense strand to SEQ ID NO: 1616013
acucacaucagccaaugag

SEQ ID NO: 1616015 - RNA, 19 nt, Artificial Sequence
  Description of Artificial Sequence: Synthetic oligonucleotide
  Sense strand starting at position 3676 of SEQ ID NO: 1560665
cacagagacucauaggaca

SEQ ID NO: 1616016 - RNA, 19 nt, Artificial Sequence
  Description of Artificial Sequence: Synthetic oligonucleotide
  Antisense strand to SEQ ID NO: 1616015
uguccuaugagucucugug

SEQ ID NO: 1616017 - RNA, 19 nt, Artificial Sequence
  Description of Artificial Sequence: Synthetic oligonucleotide
  Sense strand starting at position 3757 of SEQ ID NO: 1560665
uuugguugugugcaggaau

SEQ ID NO: 1616018 - RNA, 19 nt, Artificial Sequence
  Description of Artificial Sequence: Synthetic oligonucleotide
  Antisense strand to SEQ ID NO: 1616017
auuccugcacacaaccaaa

SEQ ID NO: 1616019 - RNA, 19 nt, Artificial Sequence
  Description of Artificial Sequence: Synthetic oligonucleotide
  Sense strand starting at position 3771 of SEQ ID NO: 1560665
ggaauagccuccuuucuac

SEQ ID NO: 1616020 - RNA, 19 nt, Artificial Sequence
  Description of Artificial Sequence: Synthetic oligonucleotide
  Antisense strand to SEQ ID NO: 1616019
guagaaaggaggcuauucc

SEQ ID NO: 1616021 - RNA, 19 nt, Artificial Sequence
  Description of Artificial Sequence: Synthetic oligonucleotide
  Sense strand starting at position 3794 of SEQ ID NO: 1560665
cuaauucccugucuuugua

SEQ ID NO: 1616022 - RNA, 19 nt, Artificial Sequence
  Description of Artificial Sequence: Synthetic oligonucleotide
  Antisense strand to SEQ ID NO: 1616021
uacaaagacagggaauuag

SEQ ID NO: 1616023 - RNA, 19 nt, Artificial Sequence
  Description of Artificial Sequence: Synthetic oligonucleotide
  Sense strand starting at position 3826 of SEQ ID NO: 1560665
ugaaaugaguuauguuccu

SEQ ID NO: 1616024 - RNA, 19 nt, Artificial Sequence
  Description of Artificial Sequence: Synthetic oligonucleotide
  Antisense strand to SEQ ID NO: 1616023
aggaacauaacucauuuca

SEQ ID NO: 1616025 - RNA, 19 nt, Artificial Sequence
  Description of Artificial Sequence: Synthetic oligonucleotide
  Sense strand starting at position 3831 of SEQ ID NO: 1560665
ugaguuauguuccuguccu

SEQ ID NO: 1616026 - RNA, 19 nt, Artificial Sequence
  Description of Artificial Sequence: Synthetic oligonucleotide
  Antisense strand to SEQ ID NO: 1616025
aggacaggaacauaacuca

SEQ ID NO: 1616027 - RNA, 19 nt, Artificial Sequence
  Description of Artificial Sequence: Synthetic oligonucleotide
  Sense strand starting at position 3832 of SEQ ID NO: 1560665
gaguuauguuccuguccua

SEQ ID NO: 1616028 - RNA, 19 nt, Artificial Sequence
  Description of Artificial Sequence: Synthetic oligonucleotide
  Antisense strand to SEQ ID NO: 1616027
uaggacaggaacauaacuc

SEQ ID NO: 1616029 - RNA, 19 nt, Artificial Sequence
  Description of Artificial Sequence: Synthetic oligonucleotide
  Sense strand starting at position 44 of SEQ ID NO: 1560666
gcagcagugaaucaagaga

SEQ ID NO: 1616030 - RNA, 19 nt, Artificial Sequence
  Description of Artificial Sequence: Synthetic oligonucleotide
  Antisense strand to SEQ ID NO: 1616029
ucucuugauucacugcugc

SEQ ID NO: 1616031 - RNA, 19 nt, Artificial Sequence
  Description of Artificial Sequence: Synthetic oligonucleotide
  Sense strand starting at position 116 of SEQ ID NO: 1560666
cacauaagaugugucugaa

SEQ ID NO: 1616032 - RNA, 19 nt, Artificial Sequence
  Description of Artificial Sequence: Synthetic oligonucleotide
  Antisense strand to SEQ ID NO: 1616031
uucagacacaucuuaugug

SEQ ID NO: 1616033 - RNA, 19 nt, Artificial Sequence
  Description of Artificial Sequence: Synthetic oligonucleotide
  Sense strand starting at position 119 of SEQ ID NO: 1560666
auaagaugugucugaacuc

SEQ ID NO: 1616034 - RNA, 19 nt, Artificial Sequence
  Description of Artificial Sequence: Synthetic oligonucleotide
  Antisense strand to SEQ ID NO: 1616033
gaguucagacacaucuuau

SEQ ID NO: 1616035 - RNA, 19 nt, Artificial Sequence
  Description of Artificial Sequence: Synthetic oligonucleotide
  Sense strand starting at position 170 of SEQ ID NO: 1560666
gagccuggugaugauuaga

SEQ ID NO: 1616036 - RNA, 19 nt, Artificial Sequence
  Description of Artificial Sequence: Synthetic oligonucleotide
  Antisense strand to SEQ ID NO: 1616035
ucuaaucaucaccaggcuc

SEQ ID NO: 1616037 - RNA, 19 nt, Artificial Sequence
  Description of Artificial Sequence: Synthetic oligonucleotide
  Sense strand starting at position 173 of SEQ ID NO: 1560666
ccuggugaugauuagaguu

SEQ ID NO: 1616038 - RNA, 19 nt, Artificial Sequence
  Description of Artificial Sequence: Synthetic oligonucleotide
  Antisense strand to SEQ ID NO: 1616037
aacucuaaucaucaccagg

SEQ ID NO: 1616039 - RNA, 19 nt, Artificial Sequence
  Description of Artificial Sequence: Synthetic oligonucleotide
  Sense strand starting at position 208 of SEQ ID NO: 1560666
gaugcuguaucauuaauga

SEQ ID NO: 1616040 - RNA, 19 nt, Artificial Sequence
  Description of Artificial Sequence: Synthetic oligonucleotide
  Antisense strand to SEQ ID NO: 1616039
ucauuaaugauacagcauc

SEQ ID NO: 1616041 - RNA, 19 nt, Artificial Sequence
  Description of Artificial Sequence: Synthetic oligonucleotide
  Sense strand starting at position 260 of SEQ ID NO: 1560666
cuugucaauucuuuaaguu

SEQ ID NO: 1616042 - RNA, 19 nt, Artificial Sequence
  Description of Artificial Sequence: Synthetic oligonucleotide
  Antisense strand to SEQ ID NO: 1616041
aacuuaaagaauugacaag

SEQ ID NO: 1616043 - RNA, 19 nt, Artificial Sequence
  Description of Artificial Sequence: Synthetic oligonucleotide
  Sense strand starting at position 275 of SEQ ID NO: 1560666
aguuauagcuuucuaggaa

SEQ ID NO: 1616044 - RNA, 19 nt, Artificial Sequence
  Description of Artificial Sequence: Synthetic oligonucleotide
  Antisense strand to SEQ ID NO: 1616043
uuccuagaaagcuauaacu

SEQ ID NO: 1616045 - RNA, 19 nt, Artificial Sequence
  Description of Artificial Sequence: Synthetic oligonucleotide
  Sense strand starting at position 469 of SEQ ID NO: 1560666
gcauuuagccucuauugca

SEQ ID NO: 1616046 - RNA, 19 nt, Artificial Sequence
  Description of Artificial Sequence: Synthetic oligonucleotide
  Antisense strand to SEQ ID NO: 1616045
ugcaauagaggcuaaaugc

SEQ ID NO: 1616047 - RNA, 19 nt, Artificial Sequence
  Description of Artificial Sequence: Synthetic oligonucleotide
  Sense strand starting at position 476 of SEQ ID NO: 1560666
gccucuauugcaucagugu

SEQ ID NO: 1616048 - RNA, 19 nt, Artificial Sequence
  Description of Artificial Sequence: Synthetic oligonucleotide
  Antisense strand to SEQ ID NO: 1616047
acacugaugcaauagaggc

SEQ ID NO: 1616049 - RNA, 19 nt, Artificial Sequence
  Description of Artificial Sequence: Synthetic oligonucleotide
  Sense strand starting at position 513 of SEQ ID NO: 1560666
gugcuuauuguugaccuca

SEQ ID NO: 1616050 - RNA, 19 nt, Artificial Sequence
  Description of Artificial Sequence: Synthetic oligonucleotide
  Antisense strand to SEQ ID NO: 1616049
ugaggucaacaauaagcac

SEQ ID NO: 1616051 - RNA, 19 nt, Artificial Sequence
  Description of Artificial Sequence: Synthetic oligonucleotide
  Sense strand starting at position 556 of SEQ ID NO: 1560666
auuauucuguguucuaacu

SEQ ID NO: 1616052 - RNA, 19 nt, Artificial Sequence
  Description of Artificial Sequence: Synthetic oligonucleotide
  Antisense strand to SEQ ID NO: 1616051
aguuagaacacagaauaau

SEQ ID NO: 1616053 - RNA, 19 nt, Artificial Sequence
  Description of Artificial Sequence: Synthetic oligonucleotide
  Sense strand starting at position 770 of SEQ ID NO: 1560666
uagugauuauuaguucuag

SEQ ID NO: 1616054 - RNA, 19 nt, Artificial Sequence
  Description of Artificial Sequence: Synthetic oligonucleotide
  Antisense strand to SEQ ID NO: 1616053
cuagaacuaauaaucacua

SEQ ID NO: 1616055 - RNA, 19 nt, Artificial Sequence
  Description of Artificial Sequence: Synthetic oligonucleotide
  Sense strand starting at position 966 of SEQ ID NO: 1560666
acguguaacccuggagauc

SEQ ID NO: 1616056 - RNA, 19 nt, Artificial Sequence
  Description of Artificial Sequence: Synthetic oligonucleotide
  Antisense strand to SEQ ID NO: 1616055
gaucuccaggguuacacgu

SEQ ID NO: 1616057 - RNA, 19 nt, Artificial Sequence
  Description of Artificial Sequence: Synthetic oligonucleotide
  Sense strand starting at position 975 of SEQ ID NO: 1560666
ccuggagaucgauggguca

SEQ ID NO: 1616058 - RNA, 19 nt, Artificial Sequence
  Description of Artificial Sequence: Synthetic oligonucleotide
  Antisense strand to SEQ ID NO: 1616057
ugacccaucgaucuccagg

SEQ ID NO: 1616059 - RNA, 19 nt, Artificial Sequence
  Description of Artificial Sequence: Synthetic oligonucleotide
  Sense strand starting at position 1140 of SEQ ID NO: 1560666
cggaaaguguagcucauuu

SEQ ID NO: 1616060 - RNA, 19 nt, Artificial Sequence
  Description of Artificial Sequence: Synthetic oligonucleotide
  Antisense strand to SEQ ID NO: 1616059
aaaugagcuacacuuuccg

SEQ ID NO: 1616061 - RNA, 19 nt, Artificial Sequence
  Description of Artificial Sequence: Synthetic oligonucleotide
  Sense strand starting at position 1170 of SEQ ID NO: 1560666
cuuucuguuauguauguga

SEQ ID NO: 1616062 - RNA, 19 nt, Artificial Sequence
  Description of Artificial Sequence: Synthetic oligonucleotide
  Antisense strand to SEQ ID NO: 1616061
ucacauacauaacagaaag

SEQ ID NO: 1616063 - RNA, 19 nt, Artificial Sequence
  Description of Artificial Sequence: Synthetic oligonucleotide
  Sense strand starting at position 1319 of SEQ ID NO: 1560666
ggacaauacuguguagcua

SEQ ID NO: 1616064 - RNA, 19 nt, Artificial Sequence
  Description of Artificial Sequence: Synthetic oligonucleotide
  Antisense strand to SEQ ID NO: 1616063
uagcuacacaguauugucc

SEQ ID NO: 1616065 - RNA, 19 nt, Artificial Sequence
  Description of Artificial Sequence: Synthetic oligonucleotide
  Sense strand starting at position 1323 of SEQ ID NO: 1560666
aauacuguguagcuagaga

SEQ ID NO: 1616066 - RNA, 19 nt, Artificial Sequence
  Description of Artificial Sequence: Synthetic oligonucleotide
  Antisense strand to SEQ ID NO: 1616065
ucucuagcuacacaguauu

SEQ ID NO: 1616067 - RNA, 19 nt, Artificial Sequence
  Description of Artificial Sequence: Synthetic oligonucleotide
  Sense strand starting at position 1364 of SEQ ID NO: 1560666
guaggaaagcucgauuguc

SEQ ID NO: 1616068 - RNA, 19 nt, Artificial Sequence
  Description of Artificial Sequence: Synthetic oligonucleotide
  Antisense strand to SEQ ID NO: 1616067
gacaaucgagcuuuccuac

SEQ ID NO: 1616069 - RNA, 19 nt, Artificial Sequence
  Description of Artificial Sequence: Synthetic oligonucleotide
  Sense strand starting at position 1426 of SEQ ID NO: 1560666
uugugucacagucacagau

SEQ ID NO: 1616070 - RNA, 19 nt, Artificial Sequence
  Description of Artificial Sequence: Synthetic oligonucleotide
  Antisense strand to SEQ ID NO: 1616069
aucugugacugugacacaa

SEQ ID NO: 1616071 - RNA, 19 nt, Artificial Sequence
  Description of Artificial Sequence: Synthetic oligonucleotide
  Sense strand starting at position 1528 of SEQ ID NO: 1560666
cugugucaugagcacacau

SEQ ID NO: 1616072 - RNA, 19 nt, Artificial Sequence
  Description of Artificial Sequence: Synthetic oligonucleotide
  Antisense strand to SEQ ID NO: 1616071
augugugcucaugacacag

SEQ ID NO: 1616073 - RNA, 19 nt, Artificial Sequence
  Description of Artificial Sequence: Synthetic oligonucleotide
  Sense strand starting at position 2010 of SEQ ID NO: 1560666
cgcucauucggcccaguga

SEQ ID NO: 1616074 - RNA, 19 nt, Artificial Sequence
  Description of Artificial Sequence: Synthetic oligonucleotide
  Antisense strand to SEQ ID NO: 1616073
ucacugggccgaaugagcg

SEQ ID NO: 1616075 - RNA, 19 nt, Artificial Sequence
  Description of Artificial Sequence: Synthetic oligonucleotide
  Sense strand starting at position 2021 of SEQ ID NO: 1560666
cccagugaccugugggaau

SEQ ID NO: 1616076 - RNA, 19 nt, Artificial Sequence
  Description of Artificial Sequence: Synthetic oligonucleotide
  Antisense strand to SEQ ID NO: 1616075
auucccacaggucacuggg

SEQ ID NO: 1616077 - RNA, 19 nt, Artificial Sequence
  Description of Artificial Sequence: Synthetic oligonucleotide
  Sense strand starting at position 2328 of SEQ ID NO: 1560666
acacguaguggguggaaau

SEQ ID NO: 1616078 - RNA, 19 nt, Artificial Sequence
  Description of Artificial Sequence: Synthetic oligonucleotide
  Antisense strand to SEQ ID NO: 1616077
auuuccacccacuacgugu

SEQ ID NO: 1616079 - RNA, 19 nt, Artificial Sequence
  Description of Artificial Sequence: Synthetic oligonucleotide
  Sense strand starting at position 2465 of SEQ ID NO: 1560666
caaagauguggguacagua

SEQ ID NO: 1616080 - RNA, 19 nt, Artificial Sequence
  Description of Artificial Sequence: Synthetic oligonucleotide
  Antisense strand to SEQ ID NO: 1616079
uacuguacccacaucuuug

SEQ ID NO: 1616081 - RNA, 19 nt, Artificial Sequence
  Description of Artificial Sequence: Synthetic oligonucleotide
  Sense strand starting at position 2574 of SEQ ID NO: 1560666
ugugcuagccaauaugaua

SEQ ID NO: 1616082 - RNA, 19 nt, Artificial Sequence
  Description of Artificial Sequence: Synthetic oligonucleotide
  Antisense strand to SEQ ID NO: 1616081
uaucauauuggcuagcaca

SEQ ID NO: 1616083 - RNA, 19 nt, Artificial Sequence
  Description of Artificial Sequence: Synthetic oligonucleotide
  Sense strand starting at position 2829 of SEQ ID NO: 1560666
aguagaagaauguguugaa

SEQ ID NO: 1616084 - RNA, 19 nt, Artificial Sequence
  Description of Artificial Sequence: Synthetic oligonucleotide
  Antisense strand to SEQ ID NO: 1616083
uucaacacauucuucuacu

SEQ ID NO: 1616085 - RNA, 19 nt, Artificial Sequence
  Description of Artificial Sequence: Synthetic oligonucleotide
  Sense strand starting at position 2830 of SEQ ID NO: 1560666
guagaagaauguguugaag

SEQ ID NO: 1616086 - RNA, 19 nt, Artificial Sequence
  Description of Artificial Sequence: Synthetic oligonucleotide
  Antisense strand to SEQ ID NO: 1616085
cuucaacacauucuucuac

SEQ ID NO: 1616087 - RNA, 19 nt, Artificial Sequence
  Description of Artificial Sequence: Synthetic oligonucleotide
  Sense strand starting at position 2875 of SEQ ID NO: 1560666
uggauagcaugaucccauu

SEQ ID NO: 1616088 - RNA, 19 nt, Artificial Sequence
  Description of Artificial Sequence: Synthetic oligonucleotide
  Antisense strand to SEQ ID NO: 1616087
aaugggaucaugcuaucca

SEQ ID NO: 1616089 - RNA, 19 nt, Artificial Sequence
  Description of Artificial Sequence: Synthetic oligonucleotide
  Sense strand starting at position 3148 of SEQ ID NO: 1560666
gacguacucuuucuugaaa

SEQ ID NO: 1616090 - RNA, 19 nt, Artificial Sequence
  Description of Artificial Sequence: Synthetic oligonucleotide
  Antisense strand to SEQ ID NO: 1616089
uuucaagaaagaguacguc

SEQ ID NO: 1616091 - RNA, 19 nt, Artificial Sequence
  Description of Artificial Sequence: Synthetic oligonucleotide
  Sense strand starting at position 3149 of SEQ ID NO: 1560666
acguacucuuucuugaaau

SEQ ID NO: 1616092 - RNA, 19 nt, Artificial Sequence
  Description of Artificial Sequence: Synthetic oligonucleotide
  Antisense strand to SEQ ID NO: 1616091
auuucaagaaagaguacgu

SEQ ID NO: 1616093 - RNA, 19 nt, Artificial Sequence
  Description of Artificial Sequence: Synthetic oligonucleotide
  Sense strand starting at position 3284 of SEQ ID NO: 1560666
gcauuagaacauggaauua

SEQ ID NO: 1616094 - RNA, 19 nt, Artificial Sequence
  Description of Artificial Sequence: Synthetic oligonucleotide
  Antisense strand to SEQ ID NO: 1616093
uaauuccauguucuaaugc

SEQ ID NO: 1616095 - RNA, 19 nt, Artificial Sequence
  Description of Artificial Sequence: Synthetic oligonucleotide
  Sense strand starting at position 3296 of SEQ ID NO: 1560666
ggaauuacuugagugauua

SEQ ID NO: 1616096 - RNA, 19 nt, Artificial Sequence
  Description of Artificial Sequence: Synthetic oligonucleotide
  Antisense strand to SEQ ID NO: 1616095
uaaucacucaaguaauucc

SEQ ID NO: 1616097 - RNA, 19 nt, Artificial Sequence
  Description of Artificial Sequence: Synthetic oligonucleotide
  Sense strand starting at position 3297 of SEQ ID NO: 1560666
gaauuacuugagugauuaa

SEQ ID NO: 1616098 - RNA, 19 nt, Artificial Sequence
  Description of Artificial Sequence: Synthetic oligonucleotide
  Antisense strand to SEQ ID NO: 1616097
uuaaucacucaaguaauuc

SEQ ID NO: 1616099 - RNA, 19 nt, Artificial Sequence
  Description of Artificial Sequence: Synthetic oligonucleotide
  Sense strand starting at position 3327 of SEQ ID NO: 1560666
uaagaaauugauuguggca

SEQ ID NO: 1616100 - RNA, 19 nt, Artificial Sequence
  Description of Artificial Sequence: Synthetic oligonucleotide
  Antisense strand to SEQ ID NO: 1616099
ugccacaaucaauuucuua

SEQ ID NO: 1616101 - RNA, 19 nt, Artificial Sequence
  Description of Artificial Sequence: Synthetic oligonucleotide
  Sense strand starting at position 3354 of SEQ ID NO: 1560666
agugaaaucaguuggauca

SEQ ID NO: 1616102 - RNA, 19 nt, Artificial Sequence
  Description of Artificial Sequence: Synthetic oligonucleotide
  Antisense strand to SEQ ID NO: 1616101
ugauccaacugauuucacu

SEQ ID NO: 1616103 - RNA, 19 nt, Artificial Sequence
  Description of Artificial Sequence: Synthetic oligonucleotide
  Sense strand starting at position 3355 of SEQ ID NO: 1560666
gugaaaucaguuggaucaa

SEQ ID NO: 1616104 - RNA, 19 nt, Artificial Sequence
  Description of Artificial Sequence: Synthetic oligonucleotide
  Antisense strand to SEQ ID NO: 1616103
uugauccaacugauuucac

SEQ ID NO: 1616105 - RNA, 19 nt, Artificial Sequence
  Description of Artificial Sequence: Synthetic oligonucleotide
  Sense strand starting at position 3591 of SEQ ID NO: 1560666
uugcauagcucuuugaaua

SEQ ID NO: 1616106 - RNA, 19 nt, Artificial Sequence
  Description of Artificial Sequence: Synthetic oligonucleotide
  Antisense strand to SEQ ID NO: 1616105
uauucaaagagcuaugcaa

SEQ ID NO: 1616107 - RNA, 19 nt, Artificial Sequence
  Description of Artificial Sequence: Synthetic oligonucleotide
  Sense strand starting at position 3592 of SEQ ID NO: 1560666
ugcauagcucuuugaauaa

SEQ ID NO: 1616108 - RNA, 19 nt, Artificial Sequence
  Description of Artificial Sequence: Synthetic oligonucleotide
  Antisense strand to SEQ ID NO: 1616107
uuauucaaagagcuaugca

SEQ ID NO: 1616109 - RNA, 19 nt, Artificial Sequence
  Description of Artificial Sequence: Synthetic oligonucleotide
  Sense strand starting at position 2926 of SEQ ID NO: 1560667
gccucuguuccuuggucua

SEQ ID NO: 1616110 - RNA, 19 nt, Artificial Sequence
  Description of Artificial Sequence: Synthetic oligonucleotide
  Antisense strand to SEQ ID NO: 1616109
uagaccaaggaacagaggc

SEQ ID NO: 1616111 - RNA, 19 nt, Artificial Sequence
  Description of Artificial Sequence: Synthetic oligonucleotide
  Sense strand starting at position 2928 of SEQ ID NO: 1560667
cucuguuccuuggucuaca

SEQ ID NO: 1616112 - RNA, 19 nt, Artificial Sequence
  Description of Artificial Sequence: Synthetic oligonucleotide
  Antisense strand to SEQ ID NO: 1616111
uguagaccaaggaacagag

SEQ ID NO: 1616113 - RNA, 19 nt, Artificial Sequence
  Description of Artificial Sequence: Synthetic oligonucleotide
  Sense strand starting at position 3412 of SEQ ID NO: 1560667
uuucccuggccauggaaua

SEQ ID NO: 1616114 - RNA, 19 nt, Artificial Sequence
  Description of Artificial Sequence: Synthetic oligonucleotide
  Antisense strand to SEQ ID NO: 1616113
uauuccauggccagggaaa

SEQ ID NO: 1616115 - RNA, 19 nt, Artificial Sequence
  Description of Artificial Sequence: Synthetic oligonucleotide
  Sense strand starting at position 3472 of SEQ ID NO: 1560667
cggcuuaccugucagagga

SEQ ID NO: 1616116 - RNA, 19 nt, Artificial Sequence
  Description of Artificial Sequence: Synthetic oligonucleotide
  Antisense strand to SEQ ID NO: 1616115
uccucugacagguaagccg

SEQ ID NO: 1616117 - RNA, 19 nt, Artificial Sequence
  Description of Artificial Sequence: Synthetic oligonucleotide
  Sense strand starting at position 200 of SEQ ID NO: 1560668
guaucagcauucccgacau

SEQ ID NO: 1616118 - RNA, 19 nt, Artificial Sequence
  Description of Artificial Sequence: Synthetic oligonucleotide
  Antisense strand to SEQ ID NO: 1616117
augucgggaaugcugauac

SEQ ID NO: 1616119 - RNA, 19 nt, Artificial Sequence
  Description of Artificial Sequence: Synthetic oligonucleotide
  Sense strand starting at position 211 of SEQ ID NO: 1560668
cccgacaugccgcgugaau

SEQ ID NO: 1616120 - RNA, 19 nt, Artificial Sequence
  Description of Artificial Sequence: Synthetic oligonucleotide
  Antisense strand to SEQ ID NO: 1616119
auucacgcggcaugucggg

SEQ ID NO: 1616121 - RNA, 19 nt, Artificial Sequence
  Description of Artificial Sequence: Synthetic oligonucleotide
  Sense strand starting at position 212 of SEQ ID NO: 1560668
ccgacaugccgcgugaauu

SEQ ID NO: 1616122 - RNA, 19 nt, Artificial Sequence
  Description of Artificial Sequence: Synthetic oligonucleotide
  Antisense strand to SEQ ID NO: 1616121
aauucacgcggcaugucgg

SEQ ID NO: 1616123 - RNA, 19 nt, Artificial Sequence
  Description of Artificial Sequence: Synthetic oligonucleotide
  Sense strand starting at position 213 of SEQ ID NO: 1560668
cgacaugccgcgugaauuc

SEQ ID NO: 1616124 - RNA, 19 nt, Artificial Sequence
  Description of Artificial Sequence: Synthetic oligonucleotide
  Antisense strand to SEQ ID NO: 1616123
gaauucacgcggcaugucg

SEQ ID NO: 1616125 - RNA, 19 nt, Artificial Sequence
  Description of Artificial Sequence: Synthetic oligonucleotide
  Sense strand starting at position 573 of SEQ ID NO: 1560668
gaugaaaugugacagaugu

SEQ ID NO: 1616126 - RNA, 19 nt, Artificial Sequence
  Description of Artificial Sequence: Synthetic oligonucleotide
  Antisense strand to SEQ ID NO: 1616125
acaucugucacauuucauc

SEQ ID NO: 1616127 - RNA, 19 nt, Artificial Sequence
  Description of Artificial Sequence: Synthetic oligonucleotide
  Sense strand starting at position 1087 of SEQ ID NO: 1560668
ggccacaguccauaaacau

SEQ ID NO: 1616128 - RNA, 19 nt, Artificial Sequence
  Description of Artificial Sequence: Synthetic oligonucleotide
  Antisense strand to SEQ ID NO: 1616127
auguuuauggacuguggcc

SEQ ID NO: 1616129 - RNA, 19 nt, Artificial Sequence
  Description of Artificial Sequence: Synthetic oligonucleotide
  Sense strand starting at position 1112 of SEQ ID NO: 1560668
agcagaucuguuggauuaa

SEQ ID NO: 1616130 - RNA, 19 nt, Artificial Sequence
  Description of Artificial Sequence: Synthetic oligonucleotide
  Antisense strand to SEQ ID NO: 1616129
uuaauccaacagaucugcu

SEQ ID NO: 1616131 - RNA, 19 nt, Artificial Sequence
  Description of Artificial Sequence: Synthetic oligonucleotide
  Sense strand starting at position 1113 of SEQ ID NO: 1560668
gcagaucuguuggauuaaa

SEQ ID NO: 1616132 - RNA, 19 nt, Artificial Sequence
  Description of Artificial Sequence: Synthetic oligonucleotide
  Antisense strand to SEQ ID NO: 1616131
uuuaauccaacagaucugc

SEQ ID NO: 1616133 - RNA, 19 nt, Artificial Sequence
  Description of Artificial Sequence: Synthetic oligonucleotide
  Sense strand starting at position 1523 of SEQ ID NO: 1560668
gucugaucaccuggacauc

SEQ ID NO: 1616134 - RNA, 19 nt, Artificial Sequence
  Description of Artificial Sequence: Synthetic oligonucleotide
  Antisense strand to SEQ ID NO: 1616133
gauguccaggugaucagac

SEQ ID NO: 1616135 - RNA, 19 nt, Artificial Sequence
  Description of Artificial Sequence: Synthetic oligonucleotide
  Sense strand starting at position 1542 of SEQ ID NO: 1560668
cuuccauucuucggccaga

SEQ ID NO: 1616136 - RNA, 19 nt, Artificial Sequence
  Description of Artificial Sequence: Synthetic oligonucleotide
  Antisense strand to SEQ ID NO: 1616135
ucuggccgaagaauggaag

SEQ ID NO: 1616137 - RNA, 19 nt, Artificial Sequence
  Description of Artificial Sequence: Synthetic oligonucleotide
  Sense strand starting at position 1543 of SEQ ID NO: 1560668
uuccauucuucggccagau

SEQ ID NO: 1616138 - RNA, 19 nt, Artificial Sequence
  Description of Artificial Sequence: Synthetic oligonucleotide
  Antisense strand to SEQ ID NO: 1616137
aucuggccgaagaauggaa

SEQ ID NO: 1616139 - RNA, 19 nt, Artificial Sequence
  Description of Artificial Sequence: Synthetic oligonucleotide
  Sense strand starting at position 2198 of SEQ ID NO: 1560668
gcagucuaaucucuuugga

SEQ ID NO: 1616140 - RNA, 19 nt, Artificial Sequence
  Description of Artificial Sequence: Synthetic oligonucleotide
  Antisense strand to SEQ ID NO: 1616139
uccaaagagauuagacugc

SEQ ID NO: 1616141 - RNA, 19 nt, Artificial Sequence
  Description of Artificial Sequence: Synthetic oligonucleotide
  Sense strand starting at position 2200 of SEQ ID NO: 1560668
agucuaaucucuuuggaag

SEQ ID NO: 1616142 - RNA, 19 nt, Artificial Sequence
  Description of Artificial Sequence: Synthetic oligonucleotide
  Antisense strand to SEQ ID NO: 1616141
cuuccaaagagauuagacu

SEQ ID NO: 1616143 - RNA, 19 nt, Artificial Sequence
  Description of Artificial Sequence: Synthetic oligonucleotide
  Sense strand starting at position 2201 of SEQ ID NO: 1560668
gucuaaucucuuuggaagu

SEQ ID NO: 1616144 - RNA, 19 nt, Artificial Sequence
  Description of Artificial Sequence: Synthetic oligonucleotide
  Antisense strand to SEQ ID NO: 1616143
acuuccaaagagauuagac

SEQ ID NO: 1616145 - RNA, 19 nt, Artificial Sequence
  Description of Artificial Sequence: Synthetic oligonucleotide
  Sense strand starting at position 2236 of SEQ ID NO: 1560668
gaggcauuguccucaggga

SEQ ID NO: 1616146 - RNA, 19 nt, Artificial Sequence
  Description of Artificial Sequence: Synthetic oligonucleotide
  Antisense strand to SEQ ID NO: 1616145
ucccugaggacaaugccuc

SEQ ID NO: 1616147 - RNA, 19 nt, Artificial Sequence
  Description of Artificial Sequence: Synthetic oligonucleotide
  Sense strand starting at position 2237 of SEQ ID NO: 1560668
aggcauuguccucagggaa

SEQ ID NO: 1616148 - RNA, 19 nt, Artificial Sequence
  Description of Artificial Sequence: Synthetic oligonucleotide
  Antisense strand to SEQ ID NO: 1616147
uucccugaggacaaugccu

SEQ ID NO: 1616149 - RNA, 19 nt, Artificial Sequence
  Description of Artificial Sequence: Synthetic oligonucleotide
  Sense strand starting at position 2240 of SEQ ID NO: 1560668
cauuguccucagggaaucu

SEQ ID NO: 1616150 - RNA, 19 nt, Artificial Sequence
  Description of Artificial Sequence: Synthetic oligonucleotide
  Antisense strand to SEQ ID NO: 1616149
agauucccugaggacaaug

SEQ ID NO: 1616151 - RNA, 19 nt, Artificial Sequence
  Description of Artificial Sequence: Synthetic oligonucleotide
  Sense strand starting at position 2250 of SEQ ID NO: 1560668
agggaaucuugguggcaac

SEQ ID NO: 1616152 - RNA, 19 nt, Artificial Sequence
  Description of Artificial Sequence: Synthetic oligonucleotide
  Antisense strand to SEQ ID NO: 1616151
guugccaccaagauucccu

SEQ ID NO: 1616153 - RNA, 19 nt, Artificial Sequence
  Description of Artificial Sequence: Synthetic oligonucleotide
  Sense strand starting at position 2251 of SEQ ID NO: 1560668
gggaaucuugguggcaaca

SEQ ID NO: 1616154 - RNA, 19 nt, Artificial Sequence
  Description of Artificial Sequence: Synthetic oligonucleotide
  Antisense strand to SEQ ID NO: 1616153
uguugccaccaagauuccc

SEQ ID NO: 1616155 - RNA, 19 nt, Artificial Sequence
  Description of Artificial Sequence: Synthetic oligonucleotide
  Sense strand starting at position 2253 of SEQ ID NO: 1560668
gaaucuugguggcaacauu

SEQ ID NO: 1616156 - RNA, 19 nt, Artificial Sequence
  Description of Artificial Sequence: Synthetic oligonucleotide
  Antisense strand to SEQ ID NO: 1616155
aauguugccaccaagauuc

SEQ ID NO: 1616157 - RNA, 19 nt, Artificial Sequence
  Description of Artificial Sequence: Synthetic oligonucleotide
  Sense strand starting at position 2394 of SEQ ID NO: 1560668
ccagaagcuucgucuugga

SEQ ID NO: 1616158 - RNA, 19 nt, Artificial Sequence
  Description of Artificial Sequence: Synthetic oligonucleotide
  Antisense strand to SEQ ID NO: 1616157
uccaagacgaagcuucugg

SEQ ID NO: 1616159 - RNA, 19 nt, Artificial Sequence
  Description of Artificial Sequence: Synthetic oligonucleotide
  Sense strand starting at position 2397 of SEQ ID NO: 1560668
gaagcuucgucuuggauau

SEQ ID NO: 1616160 - RNA, 19 nt, Artificial Sequence
  Description of Artificial Sequence: Synthetic oligonucleotide
  Antisense strand to SEQ ID NO: 1616159
auauccaagacgaagcuuc

SEQ ID NO: 1616161 - RNA, 19 nt, Artificial Sequence
  Description of Artificial Sequence: Synthetic oligonucleotide
  Sense strand starting at position 2398 of SEQ ID NO: 1560668
aagcuucgucuuggauauu

SEQ ID NO: 1616162 - RNA, 19 nt, Artificial Sequence
  Description of Artificial Sequence: Synthetic oligonucleotide
  Antisense strand to SEQ ID NO: 1616161
aauauccaagacgaagcuu

SEQ ID NO: 1616163 - RNA, 19 nt, Artificial Sequence
  Description of Artificial Sequence: Synthetic oligonucleotide
  Sense strand starting at position 2404 of SEQ ID NO: 1560668
cgucuuggauauucucaau

SEQ ID NO: 1616164 - RNA, 19 nt, Artificial Sequence
  Description of Artificial Sequence: Synthetic oligonucleotide
  Antisense strand to SEQ ID NO: 1616163
auugagaauauccaagacg

SEQ ID NO: 1616165 - RNA, 19 nt, Artificial Sequence
  Description of Artificial Sequence: Synthetic oligonucleotide
  Sense strand starting at position 2424 of SEQ ID NO: 1560668
cauccuugcucguagacaa

SEQ ID NO: 1616166 - RNA, 19 nt, Artificial Sequence
  Description of Artificial Sequence: Synthetic oligonucleotide
  Antisense strand to SEQ ID NO: 1616165
uugucuacgagcaaggaug

SEQ ID NO: 1616167 - RNA, 19 nt, Artificial Sequence
  Description of Artificial Sequence: Synthetic oligonucleotide
  Sense strand starting at position 2453 of SEQ ID NO: 1560668
ggcaguugagcuuaauaaa

SEQ ID NO: 1616168 - RNA, 19 nt, Artificial Sequence
  Description of Artificial Sequence: Synthetic oligonucleotide
  Antisense strand to SEQ ID NO: 1616167
uuuauuaagcucaacugcc

SEQ ID NO: 1616169 - RNA, 19 nt, Artificial Sequence
  Description of Artificial Sequence: Synthetic oligonucleotide
  Sense strand starting at position 2542 of SEQ ID NO: 1560668
gcucauucuuccuggaaag

SEQ ID NO: 1616170 - RNA, 19 nt, Artificial Sequence
  Description of Artificial Sequence: Synthetic oligonucleotide
  Antisense strand to SEQ ID NO: 1616169
cuuuccaggaagaaugagc

SEQ ID NO: 1616171 - RNA, 19 nt, Artificial Sequence
  Description of Artificial Sequence: Synthetic oligonucleotide
  Sense strand starting at position 2544 of SEQ ID NO: 1560668
ucauucuuccuggaaagca

SEQ ID NO: 1616172 - RNA, 19 nt, Artificial Sequence
  Description of Artificial Sequence: Synthetic oligonucleotide
  Antisense strand to SEQ ID NO: 1616171
ugcuuuccaggaagaauga

SEQ ID NO: 1616173 - RNA, 19 nt, Artificial Sequence
  Description of Artificial Sequence: Synthetic oligonucleotide
  Sense strand starting at position 2647 of SEQ ID NO: 1560668
ugggaagcuuucccaucuu

SEQ ID NO: 1616174 - RNA, 19 nt, Artificial Sequence
  Description of Artificial Sequence: Synthetic oligonucleotide
  Antisense strand to SEQ ID NO: 1616173
aagaugggaaagcuuccca

SEQ ID NO: 1616175 - RNA, 19 nt, Artificial Sequence
  Description of Artificial Sequence: Synthetic oligonucleotide
  Sense strand starting at position 2964 of SEQ ID NO: 1560668
cuggagguggcgugacaaa

SEQ ID NO: 1616176 - RNA, 19 nt, Artificial Sequence
  Description of Artificial Sequence: Synthetic oligonucleotide
  Antisense strand to SEQ ID NO: 1616175
uuugucacgccaccuccag

SEQ ID NO: 1616177 - RNA, 19 nt, Artificial Sequence
  Description of Artificial Sequence: Synthetic oligonucleotide
  Sense strand starting at position 3267 of SEQ ID NO: 1560668
augccuggguccuggagaa

SEQ ID NO: 1616178 - RNA, 19 nt, Artificial Sequence
  Description of Artificial Sequence: Synthetic oligonucleotide
  Antisense strand to SEQ ID NO: 1616177
uucuccaggacccaggcau

SEQ ID NO: 1616179 - RNA, 19 nt, Artificial Sequence
  Description of Artificial Sequence: Synthetic oligonucleotide
  Sense strand starting at position 3492 of SEQ ID NO: 1560668
ucgcaauagucgcugacau

SEQ ID NO: 1616180 - RNA, 19 nt, Artificial Sequence
  Description of Artificial Sequence: Synthetic oligonucleotide
  Antisense strand to SEQ ID NO: 1616179
augucagcgacuauugcga

SEQ ID NO: 1616181 - RNA, 19 nt, Artificial Sequence
  Description of Artificial Sequence: Synthetic oligonucleotide
  Sense strand starting at position 3493 of SEQ ID NO: 1560668
cgcaauagucgcugacauc

SEQ ID NO: 1616182 - RNA, 19 nt, Artificial Sequence
  Description of Artificial Sequence: Synthetic oligonucleotide
  Antisense strand to SEQ ID NO: 1616181
gaugucagcgacuauugcg

SEQ ID NO: 1616183 - RNA, 19 nt, Artificial Sequence
  Description of Artificial Sequence: Synthetic oligonucleotide
  Sense strand starting at position 3494 of SEQ ID NO: 1560668
gcaauagucgcugacauca

SEQ ID NO: 1616184 - RNA, 19 nt, Artificial Sequence
  Description of Artificial Sequence: Synthetic oligonucleotide
  Antisense strand to SEQ ID NO: 1616183
ugaugucagcgacuauugc

SEQ ID NO: 1616185 - RNA, 19 nt, Artificial Sequence
  Description of Artificial Sequence: Synthetic oligonucleotide
  Sense strand starting at position 3654 of SEQ ID NO: 1560668
ugccguaucagcugaucuu

SEQ ID NO: 1616186 - RNA, 19 nt, Artificial Sequence
  Description of Artificial Sequence: Synthetic oligonucleotide
  Antisense strand to SEQ ID NO: 1616185
aagaucagcugauacggca

SEQ ID NO: 1616187 - RNA, 19 nt, Artificial Sequence
  Description of Artificial Sequence: Synthetic oligonucleotide
  Sense strand starting at position 3655 of SEQ ID NO: 1560668
gccguaucagcugaucuuu

SEQ ID NO: 1616188 - RNA, 19 nt, Artificial Sequence
  Description of Artificial Sequence: Synthetic oligonucleotide
  Antisense strand to SEQ ID NO: 1616187
aaagaucagcugauacggc

SEQ ID NO: 1616189 - RNA, 19 nt, Artificial Sequence
  Description of Artificial Sequence: Synthetic oligonucleotide
  Sense strand starting at position 550 of SEQ ID NO: 1560669
gauugcuggugucuuugua

SEQ ID NO: 1616190 - RNA, 19 nt, Artificial Sequence
  Description of Artificial Sequence: Synthetic oligonucleotide
  Antisense strand to SEQ ID NO: 1616189
uacaaagacaccagcaauc

SEQ ID NO: 1616191 - RNA, 19 nt, Artificial Sequence
  Description of Artificial Sequence: Synthetic oligonucleotide
  Sense strand starting at position 558 of SEQ ID NO: 1560669
gugucuuuguacccaucca

SEQ ID NO: 1616192 - RNA, 19 nt, Artificial Sequence
  Description of Artificial Sequence: Synthetic oligonucleotide
  Antisense strand to SEQ ID NO: 1616191
uggauggguacaaagacac

SEQ ID NO: 1616193 - RNA, 19 nt, Artificial Sequence
  Description of Artificial Sequence: Synthetic oligonucleotide
  Sense strand starting at position 611 of SEQ ID NO: 1560669
cccuuugccuucucaggaa

SEQ ID NO: 1616194 - RNA, 19 nt, Artificial Sequence
  Description of Artificial Sequence: Synthetic oligonucleotide
  Antisense strand to SEQ ID NO: 1616193
uuccugagaaggcaaaggg

SEQ ID NO: 1616195 - RNA, 19 nt, Artificial Sequence
  Description of Artificial Sequence: Synthetic oligonucleotide
  Sense strand starting at position 615 of SEQ ID NO: 1560669
uugccuucucaggaacuga

SEQ ID NO: 1616196 - RNA, 19 nt, Artificial Sequence
  Description of Artificial Sequence: Synthetic oligonucleotide
  Antisense strand to SEQ ID NO: 1616195
ucaguuccugagaaggcaa

SEQ ID NO: 1616197 - RNA, 19 nt, Artificial Sequence
  Description of Artificial Sequence: Synthetic oligonucleotide
  Sense strand starting at position 629 of SEQ ID NO: 1560669
acugaucuguaguucgaaa

SEQ ID NO: 1616198 - RNA, 19 nt, Artificial Sequence
  Description of Artificial Sequence: Synthetic oligonucleotide
  Antisense strand to SEQ ID NO: 1616197
uuucgaacuacagaucagu

SEQ ID NO: 1616199 - RNA, 19 nt, Artificial Sequence
  Description of Artificial Sequence: Synthetic oligonucleotide
  Sense strand starting at position 631 of SEQ ID NO: 1560669
ugaucuguaguucgaaaca

SEQ ID NO: 1616200 - RNA, 19 nt, Artificial Sequence
  Description of Artificial Sequence: Synthetic oligonucleotide
  Antisense strand to SEQ ID NO: 1616199
uguuucgaacuacagauca

SEQ ID NO: 1616201 - RNA, 19 nt, Artificial Sequence
  Description of Artificial Sequence: Synthetic oligonucleotide
  Sense strand starting at position 980 of SEQ ID NO: 1560669
aguauaagccuuuguuucu

SEQ ID NO: 1616202 - RNA, 19 nt, Artificial Sequence
  Description of Artificial Sequence: Synthetic oligonucleotide
  Antisense strand to SEQ ID NO: 1616201
agaaacaaaggcuuauacu

SEQ ID NO: 1616203 - RNA, 19 nt, Artificial Sequence
  Description of Artificial Sequence: Synthetic oligonucleotide
  Sense strand starting at position 1201 of SEQ ID NO: 1560669
aguacagcauucucaggau

SEQ ID NO: 1616204 - RNA, 19 nt, Artificial Sequence
  Description of Artificial Sequence: Synthetic oligonucleotide
  Antisense strand to SEQ ID NO: 1616203
auccugagaaugcuguacu

SEQ ID NO: 1616205 - RNA, 19 nt, Artificial Sequence
  Description of Artificial Sequence: Synthetic oligonucleotide
  Sense strand starting at position 1410 of SEQ ID NO: 1560669
gugaauucagcagggaaag

SEQ ID NO: 1616206 - RNA, 19 nt, Artificial Sequence
  Description of Artificial Sequence: Synthetic oligonucleotide
  Antisense strand to SEQ ID NO: 1616205
cuuucccugcugaauucac

SEQ ID NO: 1616207 - RNA, 19 nt, Artificial Sequence
  Description of Artificial Sequence: Synthetic oligonucleotide
  Sense strand starting at position 1513 of SEQ ID NO: 1560669
gacaccuugcuccgaggaa

SEQ ID NO: 1616208 - RNA, 19 nt, Artificial Sequence
  Description of Artificial Sequence: Synthetic oligonucleotide
  Antisense strand to SEQ ID NO: 1616207
uuccucggagcaagguguc

SEQ ID NO: 1616209 - RNA, 19 nt, Artificial Sequence
  Description of Artificial Sequence: Synthetic oligonucleotide
  Sense strand starting at position 1548 of SEQ ID NO: 1560669
ccagacaccuggucugaaa

SEQ ID NO: 1616210 - RNA, 19 nt, Artificial Sequence
  Description of Artificial Sequence: Synthetic oligonucleotide
  Antisense strand to SEQ ID NO: 1616209
uuucagaccaggugucugg

SEQ ID NO: 1616211 - RNA, 19 nt, Artificial Sequence
  Description of Artificial Sequence: Synthetic oligonucleotide
  Sense strand starting at position 1735 of SEQ ID NO: 1560669
gcuggaacucaauacucuu

SEQ ID NO: 1616212 - RNA, 19 nt, Artificial Sequence
  Description of Artificial Sequence: Synthetic oligonucleotide
  Antisense strand to SEQ ID NO: 1616211
aagaguauugaguuccagc

SEQ ID NO: 1616213 - RNA, 19 nt, Artificial Sequence
  Description of Artificial Sequence: Synthetic oligonucleotide
  Sense strand starting at position 1741 of SEQ ID NO: 1560669
acucaauacucuuaggaga

SEQ ID NO: 1616214 - RNA, 19 nt, Artificial Sequence
  Description of Artificial Sequence: Synthetic oligonucleotide
  Antisense strand to SEQ ID NO: 1616213
ucuccuaagaguauugagu

SEQ ID NO: 1616215 - RNA, 19 nt, Artificial Sequence
  Description of Artificial Sequence: Synthetic oligonucleotide
  Sense strand starting at position 1743 of SEQ ID NO: 1560669
ucaauacucuuaggagaug

SEQ ID NO: 1616216 - RNA, 19 nt, Artificial Sequence
  Description of Artificial Sequence: Synthetic oligonucleotide
  Antisense strand to SEQ ID NO: 1616215
caucuccuaagaguauuga

SEQ ID NO: 1616217 - RNA, 19 nt, Artificial Sequence
  Description of Artificial Sequence: Synthetic oligonucleotide
  Sense strand starting at position 1799 of SEQ ID NO: 1560669
cugacagguuucugaggaa

SEQ ID NO: 1616218 - RNA, 19 nt, Artificial Sequence
  Description of Artificial Sequence: Synthetic oligonucleotide
  Antisense strand to SEQ ID NO: 1616217
uuccucagaaaccugucag

SEQ ID NO: 1616219 - RNA, 19 nt, Artificial Sequence
  Description of Artificial Sequence: Synthetic oligonucleotide
  Sense strand starting at position 1802 of SEQ ID NO: 1560669
acagguuucugaggaauag

SEQ ID NO: 1616220 - RNA, 19 nt, Artificial Sequence
  Description of Artificial Sequence: Synthetic oligonucleotide
  Antisense strand to SEQ ID NO: 1616219
cuauuccucagaaaccugu

SEQ ID NO: 1616221 - RNA, 19 nt, Artificial Sequence
  Description of Artificial Sequence: Synthetic oligonucleotide
  Sense strand starting at position 1908 of SEQ ID NO: 1560669
gauagaaccguugaggagu

SEQ ID NO: 1616222 - RNA, 19 nt, Artificial Sequence
  Description of Artificial Sequence: Synthetic oligonucleotide
  Antisense strand to SEQ ID NO: 1616221
acuccucaacgguucuauc

SEQ ID NO: 1616223 - RNA, 19 nt, Artificial Sequence
  Description of Artificial Sequence: Synthetic oligonucleotide
  Sense strand starting at position 2440 of SEQ ID NO: 1560669
ccuggaguccuggguuuaa

SEQ ID NO: 1616224 - RNA, 19 nt, Artificial Sequence
  Description of Artificial Sequence: Synthetic oligonucleotide
  Antisense strand to SEQ ID NO: 1616223
uuaaacccaggacuccagg

SEQ ID NO: 1616225 - RNA, 19 nt, Artificial Sequence
  Description of Artificial Sequence: Synthetic oligonucleotide
  Sense strand starting at position 2497 of SEQ ID NO: 1560669
ggacagagguguucggauu

SEQ ID NO: 1616226 - RNA, 19 nt, Artificial Sequence
  Description of Artificial Sequence: Synthetic oligonucleotide
  Antisense strand to SEQ ID NO: 1616225
aauccgaacaccucugucc

SEQ ID NO: 1616227 - RNA, 19 nt, Artificial Sequence
  Description of Artificial Sequence: Synthetic oligonucleotide
  Sense strand starting at position 2498 of SEQ ID NO: 1560669
gacagagguguucggauuc

SEQ ID NO: 1616228 - RNA, 19 nt, Artificial Sequence
  Description of Artificial Sequence: Synthetic oligonucleotide
  Antisense strand to SEQ ID NO: 1616227
gaauccgaacaccucuguc

SEQ ID NO: 1616229 - RNA, 19 nt, Artificial Sequence
  Description of Artificial Sequence: Synthetic oligonucleotide
  Sense strand starting at position 2561 of SEQ ID NO: 1560669
cuuagauuccugggucuga

SEQ ID NO: 1616230 - RNA, 19 nt, Artificial Sequence
  Description of Artificial Sequence: Synthetic oligonucleotide
  Antisense strand to SEQ ID NO: 1616229
ucagacccaggaaucuaag

SEQ ID NO: 1616231 - RNA, 19 nt, Artificial Sequence
  Description of Artificial Sequence: Synthetic oligonucleotide
  Sense strand starting at position 2654 of SEQ ID NO: 1560669
gggccuuauaaucggcaga

SEQ ID NO: 1616232 - RNA, 19 nt, Artificial Sequence
  Description of Artificial Sequence: Synthetic oligonucleotide
  Antisense strand to SEQ ID NO: 1616231
ucugccgauuauaaggccc

SEQ ID NO: 1616233 - RNA, 19 nt, Artificial Sequence
  Description of Artificial Sequence: Synthetic oligonucleotide
  Sense strand starting at position 2657 of SEQ ID NO: 1560669
ccuuauaaucggcagagca

SEQ ID NO: 1616234 - RNA, 19 nt, Artificial Sequence
  Description of Artificial Sequence: Synthetic oligonucleotide
  Antisense strand to SEQ ID NO: 1616233
ugcucugccgauuauaagg

SEQ ID NO: 1616235 - RNA, 19 nt, Artificial Sequence
  Description of Artificial Sequence: Synthetic oligonucleotide
  Sense strand starting at position 2714 of SEQ ID NO: 1560669
cugcucuuggguuggauua

SEQ ID NO: 1616236 - RNA, 19 nt, Artificial Sequence
  Description of Artificial Sequence: Synthetic oligonucleotide
  Antisense strand to SEQ ID NO: 1616235
uaauccaacccaagagcag

SEQ ID NO: 1616237 - RNA, 19 nt, Artificial Sequence
  Description of Artificial Sequence: Synthetic oligonucleotide
  Sense strand starting at position 2750 of SEQ ID NO: 1560669
caaggccguggcuauaaau

SEQ ID NO: 1616238 - RNA, 19 nt, Artificial Sequence
  Description of Artificial Sequence: Synthetic oligonucleotide
  Antisense strand to SEQ ID NO: 1616237
auuuauagccacggccuug

SEQ ID NO: 1616239 - RNA, 19 nt, Artificial Sequence
  Description of Artificial Sequence: Synthetic oligonucleotide
  Sense strand starting at position 2884 of SEQ ID NO: 1560669
cuuuauugcucccuggcau

SEQ ID NO: 1616240 - RNA, 19 nt, Artificial Sequence
  Description of Artificial Sequence: Synthetic oligonucleotide
  Antisense strand to SEQ ID NO: 1616239
augccagggagcaauaaag

SEQ ID NO: 1616241 - RNA, 19 nt, Artificial Sequence
  Description of Artificial Sequence: Synthetic oligonucleotide
  Sense strand starting at position 2885 of SEQ ID NO: 1560669
uuuauugcucccuggcauu

SEQ ID NO: 1616242 - RNA, 19 nt, Artificial Sequence
  Description of Artificial Sequence: Synthetic oligonucleotide
  Antisense strand to SEQ ID NO: 1616241
aaugccagggagcaauaaa

SEQ ID NO: 1616243 - RNA, 19 nt, Artificial Sequence
  Description of Artificial Sequence: Synthetic oligonucleotide
  Sense strand starting at position 2964 of SEQ ID NO: 1560669
aacauuccacgcgggauaa

SEQ ID NO: 1616244 - RNA, 19 nt, Artificial Sequence
  Description of Artificial Sequence: Synthetic oligonucleotide
  Antisense strand to SEQ ID NO: 1616243
uuaucccgcguggaauguu

SEQ ID NO: 1616245 - RNA, 19 nt, Artificial Sequence
  Description of Artificial Sequence: Synthetic oligonucleotide
  Sense strand starting at position 3028 of SEQ ID NO: 1560669
cguagaagcccgugacauu

SEQ ID NO: 1616246 - RNA, 19 nt, Artificial Sequence
  Description of Artificial Sequence: Synthetic oligonucleotide
  Antisense strand to SEQ ID NO: 1616245
aaugucacgggcuucuacg

SEQ ID NO: 1616247 - RNA, 19 nt, Artificial Sequence
  Description of Artificial Sequence: Synthetic oligonucleotide
  Sense strand starting at position 3067 of SEQ ID NO: 1560669
ugguauugguucucaagga

SEQ ID NO: 1616248 - RNA, 19 nt, Artificial Sequence
  Description of Artificial Sequence: Synthetic oligonucleotide
  Antisense strand to SEQ ID NO: 1616247
uccuugagaaccaauacca

SEQ ID NO: 1616249 - RNA, 19 nt, Artificial Sequence
  Description of Artificial Sequence: Synthetic oligonucleotide
  Sense strand starting at position 3068 of SEQ ID NO: 1560669
gguauugguucucaaggag

SEQ ID NO: 1616250 - RNA, 19 nt, Artificial Sequence
  Description of Artificial Sequence: Synthetic oligonucleotide
  Antisense strand to SEQ ID NO: 1616249
cuccuugagaaccaauacc

SEQ ID NO: 1616251 - RNA, 19 nt, Artificial Sequence
  Description of Artificial Sequence: Synthetic oligonucleotide
  Sense strand starting at position 3165 of SEQ ID NO: 1560669
uacggaguucacggugcaa

SEQ ID NO: 1616252 - RNA, 19 nt, Artificial Sequence
  Description of Artificial Sequence: Synthetic oligonucleotide
  Antisense strand to SEQ ID NO: 1616251
uugcaccgugaacuccgua

SEQ ID NO: 1616253 - RNA, 19 nt, Artificial Sequence
  Description of Artificial Sequence: Synthetic oligonucleotide
  Sense strand starting at position 3256 of SEQ ID NO: 1560669
ggagaagcuuucgaagaug

SEQ ID NO: 1616254 - RNA, 19 nt, Artificial Sequence
  Description of Artificial Sequence: Synthetic oligonucleotide
  Antisense strand to SEQ ID NO: 1616253
caucuucgaaagcuucucc

SEQ ID NO: 1616255 - RNA, 19 nt, Artificial Sequence
  Description of Artificial Sequence: Synthetic oligonucleotide
  Sense strand starting at position 3298 of SEQ ID NO: 1560669
gcgguuagagucugaaagu

SEQ ID NO: 1616256 - RNA, 19 nt, Artificial Sequence
  Description of Artificial Sequence: Synthetic oligonucleotide
  Antisense strand to SEQ ID NO: 1616255
acuuucagacucuaaccgc

SEQ ID NO: 1616257 - RNA, 19 nt, Artificial Sequence
  Description of Artificial Sequence: Synthetic oligonucleotide
  Sense strand starting at position 3325 of SEQ ID NO: 1560669
gguaguugcaucgggaaga

SEQ ID NO: 1616258 - RNA, 19 nt, Artificial Sequence
  Description of Artificial Sequence: Synthetic oligonucleotide
  Antisense strand to SEQ ID NO: 1616257
ucuucccgaugcaacuacc

SEQ ID NO: 1616259 - RNA, 19 nt, Artificial Sequence
  Description of Artificial Sequence: Synthetic oligonucleotide
  Sense strand starting at position 3448 of SEQ ID NO: 1560669
gaaguuguaguucagacga

SEQ ID NO: 1616260 - RNA, 19 nt, Artificial Sequence
  Description of Artificial Sequence: Synthetic oligonucleotide
  Antisense strand to SEQ ID NO: 1616259
ucgucugaacuacaacuuc

SEQ ID NO: 1616261 - RNA, 19 nt, Artificial Sequence
  Description of Artificial Sequence: Synthetic oligonucleotide
  Sense strand starting at position 3453 of SEQ ID NO: 1560669
uguaguucagacgauggaa

SEQ ID NO: 1616262 - RNA, 19 nt, Artificial Sequence
  Description of Artificial Sequence: Synthetic oligonucleotide
  Antisense strand to SEQ ID NO: 1616261
uuccaucgucugaacuaca

SEQ ID NO: 1616263 - RNA, 19 nt, Artificial Sequence
  Description of Artificial Sequence: Synthetic oligonucleotide
  Sense strand starting at position 3473 of SEQ ID NO: 1560669
gccaccguugccugggaaa

SEQ ID NO: 1616264 - RNA, 19 nt, Artificial Sequence
  Description of Artificial Sequence: Synthetic oligonucleotide
  Antisense strand to SEQ ID NO: 1616263
uuucccaggcaacgguggc

SEQ ID NO: 1616265 - RNA, 19 nt, Artificial Sequence
  Description of Artificial Sequence: Synthetic oligonucleotide
  Sense strand starting at position 3530 of SEQ ID NO: 1560669
cuuacagauuccuaaaggu

SEQ ID NO: 1616266 - RNA, 19 nt, Artificial Sequence
  Description of Artificial Sequence: Synthetic oligonucleotide
  Antisense strand to SEQ ID NO: 1616265
accuuuaggaaucuguaag

SEQ ID NO: 1616267 - RNA, 19 nt, Artificial Sequence
  Description of Artificial Sequence: Synthetic oligonucleotide
  Sense strand starting at position 3780 of SEQ ID NO: 1560669
acuccaagauccugagaaa

SEQ ID NO: 1616268 - RNA, 19 nt, Artificial Sequence
  Description of Artificial Sequence: Synthetic oligonucleotide
  Antisense strand to SEQ ID NO: 1616267
uuucucaggaucuuggagu

SEQ ID NO: 1616269 - RNA, 19 nt, Artificial Sequence
  Description of Artificial Sequence: Synthetic oligonucleotide
  Sense strand starting at position 29 of SEQ ID NO: 1560670
gggcuagauuucugugcau

SEQ ID NO: 1616270 - RNA, 19 nt, Artificial Sequence
  Description of Artificial Sequence: Synthetic oligonucleotide
  Antisense strand to SEQ ID NO: 1616269
augcacagaaaucuagccc

SEQ ID NO: 1616271 - RNA, 19 nt, Artificial Sequence
  Description of Artificial Sequence: Synthetic oligonucleotide
  Sense strand starting at position 31 of SEQ ID NO: 1560670
gcuagauuucugugcaugg

SEQ ID NO: 1616272 - RNA, 19 nt, Artificial Sequence
  Description of Artificial Sequence: Synthetic oligonucleotide
  Antisense strand to SEQ ID NO: 1616271
ccaugcacagaaaucuagc

SEQ ID NO: 1616273 - RNA, 19 nt, Artificial Sequence
  Description of Artificial Sequence: Synthetic oligonucleotide
  Sense strand starting at position 221 of SEQ ID NO: 1560670
aacagaagugggugucaua

SEQ ID NO: 1616274 - RNA, 19 nt, Artificial Sequence
  Description of Artificial Sequence: Synthetic oligonucleotide
  Antisense strand to SEQ ID NO: 1616273
uaugacacccacuucuguu

SEQ ID NO: 1616275 - RNA, 19 nt, Artificial Sequence
  Description of Artificial Sequence: Synthetic oligonucleotide
  Sense strand starting at position 230 of SEQ ID NO: 1560670
gggugucauaccuaggaug

SEQ ID NO: 1616276 - RNA, 19 nt, Artificial Sequence
  Description of Artificial Sequence: Synthetic oligonucleotide
  Antisense strand to SEQ ID NO: 1616275
cauccuagguaugacaccc

SEQ ID NO: 1616277 - RNA, 19 nt, Artificial Sequence
  Description of Artificial Sequence: Synthetic oligonucleotide
  Sense strand starting at position 232 of SEQ ID NO: 1560670
gugucauaccuaggaugug

SEQ ID NO: 1616278 - RNA, 19 nt, Artificial Sequence
  Description of Artificial Sequence: Synthetic oligonucleotide
  Antisense strand to SEQ ID NO: 1616277
cacauccuagguaugacac

SEQ ID NO: 1616279 - RNA, 19 nt, Artificial Sequence
  Description of Artificial Sequence: Synthetic oligonucleotide
  Sense strand starting at position 264 of SEQ ID NO: 1560670
ugucccuucccacagagau

SEQ ID NO: 1616280 - RNA, 19 nt, Artificial Sequence
  Description of Artificial Sequence: Synthetic oligonucleotide
  Antisense strand to SEQ ID NO: 1616279
aucucugugggaagggaca

SEQ ID NO: 1616281 - RNA, 19 nt, Artificial Sequence
  Description of Artificial Sequence: Synthetic oligonucleotide
  Sense strand starting at position 415 of SEQ ID NO: 1560670
uugggagacuccugaaaga

SEQ ID NO: 1616282 - RNA, 19 nt, Artificial Sequence
  Description of Artificial Sequence: Synthetic oligonucleotide
  Antisense strand to SEQ ID NO: 1616281
ucuuucaggagucucccaa

SEQ ID NO: 1616283 - RNA, 19 nt, Artificial Sequence
  Description of Artificial Sequence: Synthetic oligonucleotide
  Sense strand starting at position 860 of SEQ ID NO: 1560670
agacuugauugcugggaga

SEQ ID NO: 1616284 - RNA, 19 nt, Artificial Sequence
  Description of Artificial Sequence: Synthetic oligonucleotide
  Antisense strand to SEQ ID NO: 1616283
ucucccagcaaucaagucu

SEQ ID NO: 1616285 - RNA, 19 nt, Artificial Sequence
  Description of Artificial Sequence: Synthetic oligonucleotide
  Sense strand starting at position 862 of SEQ ID NO: 1560670
acuugauugcugggagaug

SEQ ID NO: 1616286 - RNA, 19 nt, Artificial Sequence
  Description of Artificial Sequence: Synthetic oligonucleotide
  Antisense strand to SEQ ID NO: 1616285
caucucccagcaaucaagu

SEQ ID NO: 1616287 - RNA, 19 nt, Artificial Sequence
  Description of Artificial Sequence: Synthetic oligonucleotide
  Sense strand starting at position 925 of SEQ ID NO: 1560670
guugcuacauucucaagua

SEQ ID NO: 1616288 - RNA, 19 nt, Artificial Sequence
  Description of Artificial Sequence: Synthetic oligonucleotide
  Antisense strand to SEQ ID NO: 1616287
uacuugagaauguagcaac

SEQ ID NO: 1616289 - RNA, 19 nt, Artificial Sequence
  Description of Artificial Sequence: Synthetic oligonucleotide
  Sense strand starting at position 968 of SEQ ID NO: 1560670
gggugugguagcugaggau

SEQ ID NO: 1616290 - RNA, 19 nt, Artificial Sequence
  Description of Artificial Sequence: Synthetic oligonucleotide
  Antisense strand to SEQ ID NO: 1616289
auccucagcuaccacaccc

SEQ ID NO: 1616291 - RNA, 19 nt, Artificial Sequence
  Description of Artificial Sequence: Synthetic oligonucleotide
  Sense strand starting at position 985 of SEQ ID NO: 1560670
aucacagaugucugagguu

SEQ ID NO: 1616292 - RNA, 19 nt, Artificial Sequence
  Description of Artificial Sequence: Synthetic oligonucleotide
  Antisense strand to SEQ ID NO: 1616291
aaccucagacaucugugau

SEQ ID NO: 1616293 - RNA, 19 nt, Artificial Sequence
  Description of Artificial Sequence: Synthetic oligonucleotide
  Sense strand starting at position 1304 of SEQ ID NO: 1560670
uagauugagccaugacacu

SEQ ID NO: 1616294 - RNA, 19 nt, Artificial Sequence
  Description of Artificial Sequence: Synthetic oligonucleotide
  Antisense strand to SEQ ID NO: 1616293
agugucauggcucaaucua

SEQ ID NO: 1616295 - RNA, 19 nt, Artificial Sequence
  Description of Artificial Sequence: Synthetic oligonucleotide
  Sense strand starting at position 1382 of SEQ ID NO: 1560670
uccagagcuucucauguau

SEQ ID NO: 1616296 - RNA, 19 nt, Artificial Sequence
  Description of Artificial Sequence: Synthetic oligonucleotide
  Antisense strand to SEQ ID NO: 1616295
auacaugagaagcucugga

SEQ ID NO: 1616297 - RNA, 19 nt, Artificial Sequence
  Description of Artificial Sequence: Synthetic oligonucleotide
  Sense strand starting at position 1391 of SEQ ID NO: 1560670
ucucauguauaccaaaugu

SEQ ID NO: 1616298 - RNA, 19 nt, Artificial Sequence
  Description of Artificial Sequence: Synthetic oligonucleotide
  Antisense strand to SEQ ID NO: 1616297
acauuugguauacaugaga

SEQ ID NO: 1616299 - RNA, 19 nt, Artificial Sequence
  Description of Artificial Sequence: Synthetic oligonucleotide
  Sense strand starting at position 1418 of SEQ ID NO: 1560670
ggaugccugucuucuccaa

SEQ ID NO: 1616300 - RNA, 19 nt, Artificial Sequence
  Description of Artificial Sequence: Synthetic oligonucleotide
  Antisense strand to SEQ ID NO: 1616299
uuggagaagacaggcaucc

SEQ ID NO: 1616301 - RNA, 19 nt, Artificial Sequence
  Description of Artificial Sequence: Synthetic oligonucleotide
  Sense strand starting at position 1422 of SEQ ID NO: 1560670
gccugucuucuccaaagaa

SEQ ID NO: 1616302 - RNA, 19 nt, Artificial Sequence
  Description of Artificial Sequence: Synthetic oligonucleotide
  Antisense strand to SEQ ID NO: 1616301
uucuuuggagaagacaggc

SEQ ID NO: 1616303 - RNA, 19 nt, Artificial Sequence
  Description of Artificial Sequence: Synthetic oligonucleotide
  Sense strand starting at position 1611 of SEQ ID NO: 1560670
gcagcuguauuccaggaua

SEQ ID NO: 1616304 - RNA, 19 nt, Artificial Sequence
  Description of Artificial Sequence: Synthetic oligonucleotide
  Antisense strand to SEQ ID NO: 1616303
uauccuggaauacagcugc

SEQ ID NO: 1616305 - RNA, 19 nt, Artificial Sequence
  Description of Artificial Sequence: Synthetic oligonucleotide
  Sense strand starting at position 1613 of SEQ ID NO: 1560670
agcuguauuccaggauauc

SEQ ID NO: 1616306 - RNA, 19 nt, Artificial Sequence
  Description of Artificial Sequence: Synthetic oligonucleotide
  Antisense strand to SEQ ID NO: 1616305
gauauccuggaauacagcu

SEQ ID NO: 1616307 - RNA, 19 nt, Artificial Sequence
  Description of Artificial Sequence: Synthetic oligonucleotide
  Sense strand starting at position 1614 of SEQ ID NO: 1560670
gcuguauuccaggauaucc

SEQ ID NO: 1616308 - RNA, 19 nt, Artificial Sequence
  Description of Artificial Sequence: Synthetic oligonucleotide
  Antisense strand to SEQ ID NO: 1616307
ggauauccuggaauacagc

SEQ ID NO: 1616309 - RNA, 19 nt, Artificial Sequence
  Description of Artificial Sequence: Synthetic oligonucleotide
  Sense strand starting at position 1690 of SEQ ID NO: 1560670
ccugauuccgucuguggau

SEQ ID NO: 1616310 - RNA, 19 nt, Artificial Sequence
  Description of Artificial Sequence: Synthetic oligonucleotide
  Antisense strand to SEQ ID NO: 1616309
auccacagacggaaucagg

SEQ ID NO: 1616311 - RNA, 19 nt, Artificial Sequence
  Description of Artificial Sequence: Synthetic oligonucleotide
  Sense strand starting at position 1803 of SEQ ID NO: 1560670
ugcaguuguuggcgggaua

SEQ ID NO: 1616312 - RNA, 19 nt, Artificial Sequence
  Description of Artificial Sequence: Synthetic oligonucleotide
  Antisense strand to SEQ ID NO: 1616311
uaucccgccaacaacugca

SEQ ID NO: 1616313 - RNA, 19 nt, Artificial Sequence
  Description of Artificial Sequence: Synthetic oligonucleotide
  Sense strand starting at position 1804 of SEQ ID NO: 1560670
gcaguuguuggcgggauau

SEQ ID NO: 1616314 - RNA, 19 nt, Artificial Sequence
  Description of Artificial Sequence: Synthetic oligonucleotide
  Antisense strand to SEQ ID NO: 1616313
auaucccgccaacaacugc

SEQ ID NO: 1616315 - RNA, 19 nt, Artificial Sequence
  Description of Artificial Sequence: Synthetic oligonucleotide
  Sense strand starting at position 2096 of SEQ ID NO: 1560670
cugcuacuuucugugcuau

SEQ ID NO: 1616316 - RNA, 19 nt, Artificial Sequence
  Description of Artificial Sequence: Synthetic oligonucleotide
  Antisense strand to SEQ ID NO: 1616315
auagcacagaaaguagcag

SEQ ID NO: 1616317 - RNA, 19 nt, Artificial Sequence
  Description of Artificial Sequence: Synthetic oligonucleotide
  Sense strand starting at position 2131 of SEQ ID NO: 1560670
agucaacacucuccgcaua

SEQ ID NO: 1616318 - RNA, 19 nt, Artificial Sequence
  Description of Artificial Sequence: Synthetic oligonucleotide
  Antisense strand to SEQ ID NO: 1616317
uaugcggagaguguugacu

SEQ ID NO: 1616319 - RNA, 19 nt, Artificial Sequence
  Description of Artificial Sequence: Synthetic oligonucleotide
  Sense strand starting at position 2406 of SEQ ID NO: 1560670
accuaagucuccugaguac

SEQ ID NO: 1616320 - RNA, 19 nt, Artificial Sequence
  Description of Artificial Sequence: Synthetic oligonucleotide
  Antisense strand to SEQ ID NO: 1616319
guacucaggagacuuaggu

SEQ ID NO: 1616321 - RNA, 19 nt, Artificial Sequence
  Description of Artificial Sequence: Synthetic oligonucleotide
  Sense strand starting at position 2485 of SEQ ID NO: 1560670
uguguugcccaggaugaau

SEQ ID NO: 1616322 - RNA, 19 nt, Artificial Sequence
  Description of Artificial Sequence: Synthetic oligonucleotide
  Antisense strand to SEQ ID NO: 1616321
auucauccugggcaacaca

SEQ ID NO: 1616323 - RNA, 19 nt, Artificial Sequence
  Description of Artificial Sequence: Synthetic oligonucleotide
  Sense strand starting at position 2494 of SEQ ID NO: 1560670
caggaugaauguuaacuau

SEQ ID NO: 1616324 - RNA, 19 nt, Artificial Sequence
  Description of Artificial Sequence: Synthetic oligonucleotide
  Antisense strand to SEQ ID NO: 1616323
auaguuaacauucauccug

SEQ ID NO: 1616325 - RNA, 19 nt, Artificial Sequence
  Description of Artificial Sequence: Synthetic oligonucleotide
  Sense strand starting at position 2559 of SEQ ID NO: 1560670
gcuugaggacaaugucaca

SEQ ID NO: 1616326 - RNA, 19 nt, Artificial Sequence
  Description of Artificial Sequence: Synthetic oligonucleotide
  Antisense strand to SEQ ID NO: 1616325
ugugacauuguccucaagc

SEQ ID NO: 1616327 - RNA, 19 nt, Artificial Sequence
  Description of Artificial Sequence: Synthetic oligonucleotide
  Sense strand starting at position 3245 of SEQ ID NO: 1560670
uuugauugcuggugucuuu

SEQ ID NO: 1616328 - RNA, 19 nt, Artificial Sequence
  Description of Artificial Sequence: Synthetic oligonucleotide
  Antisense strand to SEQ ID NO: 1616327
aaagacaccagcaaucaaa

SEQ ID NO: 1616329 - RNA, 19 nt, Artificial Sequence
  Description of Artificial Sequence: Synthetic oligonucleotide
  Sense strand starting at position 3248 of SEQ ID NO: 1560670
gauugcuggugucuuugua

SEQ ID NO: 1616330 - RNA, 19 nt, Artificial Sequence
  Description of Artificial Sequence: Synthetic oligonucleotide
  Antisense strand to SEQ ID NO: 1616329
uacaaagacaccagcaauc

SEQ ID NO: 1616331 - RNA, 19 nt, Artificial Sequence
  Description of Artificial Sequence: Synthetic oligonucleotide
  Sense strand starting at position 3256 of SEQ ID NO: 1560670
gugucuuuguacccaucca

SEQ ID NO: 1616332 - RNA, 19 nt, Artificial Sequence
  Description of Artificial Sequence: Synthetic oligonucleotide
  Antisense strand to SEQ ID NO: 1616331
uggauggguacaaagacac

SEQ ID NO: 1616333 - RNA, 19 nt, Artificial Sequence
  Description of Artificial Sequence: Synthetic oligonucleotide
  Sense strand starting at position 3309 of SEQ ID NO: 1560670
cccuuugccuucucaggaa

SEQ ID NO: 1616334 - RNA, 19 nt, Artificial Sequence
  Description of Artificial Sequence: Synthetic oligonucleotide
  Antisense strand to SEQ ID NO: 1616333
uuccugagaaggcaaaggg

SEQ ID NO: 1616335 - RNA, 19 nt, Artificial Sequence
  Description of Artificial Sequence: Synthetic oligonucleotide
  Sense strand starting at position 3313 of SEQ ID NO: 1560670
uugccuucucaggaacuga

SEQ ID NO: 1616336 - RNA, 19 nt, Artificial Sequence
  Description of Artificial Sequence: Synthetic oligonucleotide
  Antisense strand to SEQ ID NO: 1616335
ucaguuccugagaaggcaa

SEQ ID NO: 1616337 - RNA, 19 nt, Artificial Sequence
  Description of Artificial Sequence: Synthetic oligonucleotide
  Sense strand starting at position 3327 of SEQ ID NO: 1560670
acugaucuguaguucgaaa

SEQ ID NO: 1616338 - RNA, 19 nt, Artificial Sequence
  Description of Artificial Sequence: Synthetic oligonucleotide
  Antisense strand to SEQ ID NO: 1616337
uuucgaacuacagaucagu

SEQ ID NO: 1616339 - RNA, 19 nt, Artificial Sequence
  Description of Artificial Sequence: Synthetic oligonucleotide
  Sense strand starting at position 3329 of SEQ ID NO: 1560670
ugaucuguaguucgaaaca

SEQ ID NO: 1616340 - RNA, 19 nt, Artificial Sequence
  Description of Artificial Sequence: Synthetic oligonucleotide
  Antisense strand to SEQ ID NO: 1616339
uguuucgaacuacagauca

SEQ ID NO: 1616341 - RNA, 19 nt, Artificial Sequence
  Description of Artificial Sequence: Synthetic oligonucleotide
  Sense strand starting at position 3527 of SEQ ID NO: 1560670
cggcuauacuugcagacuu

SEQ ID NO: 1616342 - RNA, 19 nt, Artificial Sequence
  Description of Artificial Sequence: Synthetic oligonucleotide
  Antisense strand to SEQ ID NO: 1616341
aagucugcaaguauagccg

SEQ ID NO: 1616343 - RNA, 19 nt, Artificial Sequence
  Description of Artificial Sequence: Synthetic oligonucleotide
  Sense strand starting at position 3665 of SEQ ID NO: 1560670
cugcgugugcgccaguaua

SEQ ID NO: 1616344 - RNA, 19 nt, Artificial Sequence
  Description of Artificial Sequence: Synthetic oligonucleotide
  Antisense strand to SEQ ID NO: 1616343
uauacuggcgcacacgcag

SEQ ID NO: 1616345 - RNA, 19 nt, Artificial Sequence
  Description of Artificial Sequence: Synthetic oligonucleotide
  Sense strand starting at position 3678 of SEQ ID NO: 1560670
aguauaagccuuuguuucu

SEQ ID NO: 1616346 - RNA, 19 nt, Artificial Sequence
  Description of Artificial Sequence: Synthetic oligonucleotide
  Antisense strand to SEQ ID NO: 1616345
agaaacaaaggcuuauacu

SEQ ID NO: 1616347 - RNA, 19 nt, Artificial Sequence
  Description of Artificial Sequence: Synthetic oligonucleotide
  Sense strand starting at position 3899 of SEQ ID NO: 1560670
aguacagcauucucaggau

SEQ ID NO: 1616348 - RNA, 19 nt, Artificial Sequence
  Description of Artificial Sequence: Synthetic oligonucleotide
  Antisense strand to SEQ ID NO: 1616347
auccugagaaugcuguacu

SEQ ID NO: 1616349 - RNA, 19 nt, Artificial Sequence
  Description of Artificial Sequence: Synthetic oligonucleotide
  Sense strand starting at position 60 of SEQ ID NO: 1560671
ccagaauucugggucucca

SEQ ID NO: 1616350 - RNA, 19 nt, Artificial Sequence
  Description of Artificial Sequence: Synthetic oligonucleotide
  Antisense strand to SEQ ID NO: 1616349
uggagacccagaauucugg

SEQ ID NO: 1616351 - RNA, 19 nt, Artificial Sequence
  Description of Artificial Sequence: Synthetic oligonucleotide
  Sense strand starting at position 93 of SEQ ID NO: 1560671
gggcuagauuucugugcau

SEQ ID NO: 1616352 - RNA, 19 nt, Artificial Sequence
  Description of Artificial Sequence: Synthetic oligonucleotide
  Antisense strand to SEQ ID NO: 1616351
augcacagaaaucuagccc

SEQ ID NO: 1616353 - RNA, 19 nt, Artificial Sequence
  Description of Artificial Sequence: Synthetic oligonucleotide
  Sense strand starting at position 95 of SEQ ID NO: 1560671
gcuagauuucugugcaugg

SEQ ID NO: 1616354 - RNA, 19 nt, Artificial Sequence
  Description of Artificial Sequence: Synthetic oligonucleotide
  Antisense strand to SEQ ID NO: 1616353
ccaugcacagaaaucuagc

SEQ ID NO: 1616355 - RNA, 19 nt, Artificial Sequence
  Description of Artificial Sequence: Synthetic oligonucleotide
  Sense strand starting at position 285 of SEQ ID NO: 1560671
aacagaagugggugucaua

SEQ ID NO: 1616356 - RNA, 19 nt, Artificial Sequence
  Description of Artificial Sequence: Synthetic oligonucleotide
  Antisense strand to SEQ ID NO: 1616355
uaugacacccacuucuguu

SEQ ID NO: 1616357 - RNA, 19 nt, Artificial Sequence
  Description of Artificial Sequence: Synthetic oligonucleotide
  Sense strand starting at position 294 of SEQ ID NO: 1560671
gggugucauaccuaggaug

SEQ ID NO: 1616358 - RNA, 19 nt, Artificial Sequence
  Description of Artificial Sequence: Synthetic oligonucleotide
  Antisense strand to SEQ ID NO: 1616357
cauccuagguaugacaccc

SEQ ID NO: 1616359 - RNA, 19 nt, Artificial Sequence
  Description of Artificial Sequence: Synthetic oligonucleotide
  Sense strand starting at position 296 of SEQ ID NO: 1560671
gugucauaccuaggaugug

SEQ ID NO: 1616360 - RNA, 19 nt, Artificial Sequence
  Description of Artificial Sequence: Synthetic oligonucleotide
  Antisense strand to SEQ ID NO: 1616359
cacauccuagguaugacac

SEQ ID NO: 1616361 - RNA, 19 nt, Artificial Sequence
  Description of Artificial Sequence: Synthetic oligonucleotide
  Sense strand starting at position 328 of SEQ ID NO: 1560671
ugucccuucccacagagau

SEQ ID NO: 1616362 - RNA, 19 nt, Artificial Sequence
  Description of Artificial Sequence: Synthetic oligonucleotide
  Antisense strand to SEQ ID NO: 1616361
aucucugugggaagggaca

SEQ ID NO: 1616363 - RNA, 19 nt, Artificial Sequence
  Description of Artificial Sequence: Synthetic oligonucleotide
  Sense strand starting at position 479 of SEQ ID NO: 1560671
uugggagacuccugaaaga

SEQ ID NO: 1616364 - RNA, 19 nt, Artificial Sequence
  Description of Artificial Sequence: Synthetic oligonucleotide
  Antisense strand to SEQ ID NO: 1616363
ucuuucaggagucucccaa

SEQ ID NO: 1616365 - RNA, 19 nt, Artificial Sequence
  Description of Artificial Sequence: Synthetic oligonucleotide
  Sense strand starting at position 924 of SEQ ID NO: 1560671
agacuugauugcugggaga

SEQ ID NO: 1616366 - RNA, 19 nt, Artificial Sequence
  Description of Artificial Sequence: Synthetic oligonucleotide
  Antisense strand to SEQ ID NO: 1616365
ucucccagcaaucaagucu

SEQ ID NO: 1616367 - RNA, 19 nt, Artificial Sequence
  Description of Artificial Sequence: Synthetic oligonucleotide
  Sense strand starting at position 926 of SEQ ID NO: 1560671
acuugauugcugggagaug

SEQ ID NO: 1616368 - RNA, 19 nt, Artificial Sequence
  Description of Artificial Sequence: Synthetic oligonucleotide
  Antisense strand to SEQ ID NO: 1616367
caucucccagcaaucaagu

SEQ ID NO: 1616369 - RNA, 19 nt, Artificial Sequence
  Description of Artificial Sequence: Synthetic oligonucleotide
  Sense strand starting at position 989 of SEQ ID NO: 1560671
guugcuacauucucaagua

SEQ ID NO: 1616370 - RNA, 19 nt, Artificial Sequence
  Description of Artificial Sequence: Synthetic oligonucleotide
  Antisense strand to SEQ ID NO: 1616369
uacuugagaauguagcaac

SEQ ID NO: 1616371 - RNA, 19 nt, Artificial Sequence
  Description of Artificial Sequence: Synthetic oligonucleotide
  Sense strand starting at position 1032 of SEQ ID NO: 1560671
gggugugguagcugaggau

SEQ ID NO: 1616372 - RNA, 19 nt, Artificial Sequence
  Description of Artificial Sequence: Synthetic oligonucleotide
  Antisense strand to SEQ ID NO: 1616371
auccucagcuaccacaccc

SEQ ID NO: 1616373 - RNA, 19 nt, Artificial Sequence
  Description of Artificial Sequence: Synthetic oligonucleotide
  Sense strand starting at position 1049 of SEQ ID NO: 1560671
aucacagaugucugagguu

SEQ ID NO: 1616374 - RNA, 19 nt, Artificial Sequence
  Description of Artificial Sequence: Synthetic oligonucleotide
  Antisense strand to SEQ ID NO: 1616373
aaccucagacaucugugau

SEQ ID NO: 1616375 - RNA, 19 nt, Artificial Sequence
  Description of Artificial Sequence: Synthetic oligonucleotide
  Sense strand starting at position 1368 of SEQ ID NO: 1560671
uagauugagccaugacacu

SEQ ID NO: 1616376 - RNA, 19 nt, Artificial Sequence
  Description of Artificial Sequence: Synthetic oligonucleotide
  Antisense strand to SEQ ID NO: 1616375
agugucauggcucaaucua

SEQ ID NO: 1616377 - RNA, 19 nt, Artificial Sequence
  Description of Artificial Sequence: Synthetic oligonucleotide
  Sense strand starting at position 1446 of SEQ ID NO: 1560671
uccagagcuucucauguau

SEQ ID NO: 1616378 - RNA, 19 nt, Artificial Sequence
  Description of Artificial Sequence: Synthetic oligonucleotide
  Antisense strand to SEQ ID NO: 1616377
auacaugagaagcucugga

SEQ ID NO: 1616379 - RNA, 19 nt, Artificial Sequence
  Description of Artificial Sequence: Synthetic oligonucleotide
  Sense strand starting at position 1455 of SEQ ID NO: 1560671
ucucauguauaccaaaugu

SEQ ID NO: 1616380 - RNA, 19 nt, Artificial Sequence
  Description of Artificial Sequence: Synthetic oligonucleotide
  Antisense strand to SEQ ID NO: 1616379
acauuugguauacaugaga

SEQ ID NO: 1616381 - RNA, 19 nt, Artificial Sequence
  Description of Artificial Sequence: Synthetic oligonucleotide
  Sense strand starting at position 1482 of SEQ ID NO: 1560671
ggaugccugucuucuccaa

SEQ ID NO: 1616382 - RNA, 19 nt, Artificial Sequence
  Description of Artificial Sequence: Synthetic oligonucleotide
  Antisense strand to SEQ ID NO: 1616381
uuggagaagacaggcaucc

SEQ ID NO: 1616383 - RNA, 19 nt, Artificial Sequence
  Description of Artificial Sequence: Synthetic oligonucleotide
  Sense strand starting at position 1486 of SEQ ID NO: 1560671
gccugucuucuccaaagaa

SEQ ID NO: 1616384 - RNA, 19 nt, Artificial Sequence
  Description of Artificial Sequence: Synthetic oligonucleotide
  Antisense strand to SEQ ID NO: 1616383
uucuuuggagaagacaggc

SEQ ID NO: 1616385 - RNA, 19 nt, Artificial Sequence
  Description of Artificial Sequence: Synthetic oligonucleotide
  Sense strand starting at position 1675 of SEQ ID NO: 1560671
gcagcuguauuccaggaua

SEQ ID NO: 1616386 - RNA, 19 nt, Artificial Sequence
  Description of Artificial Sequence: Synthetic oligonucleotide
  Antisense strand to SEQ ID NO: 1616385
uauccuggaauacagcugc

SEQ ID NO: 1616387 - RNA, 19 nt, Artificial Sequence
  Description of Artificial Sequence: Synthetic oligonucleotide
  Sense strand starting at position 1677 of SEQ ID NO: 1560671
agcuguauuccaggauauc

SEQ ID NO: 1616388 - RNA, 19 nt, Artificial Sequence
  Description of Artificial Sequence: Synthetic oligonucleotide
  Antisense strand to SEQ ID NO: 1616387
gauauccuggaauacagcu

SEQ ID NO: 1616389 - RNA, 19 nt, Artificial Sequence
  Description of Artificial Sequence: Synthetic oligonucleotide
  Sense strand starting at position 1678 of SEQ ID NO: 1560671
gcuguauuccaggauaucc

SEQ ID NO: 1616390 - RNA, 19 nt, Artificial Sequence
  Description of Artificial Sequence: Synthetic oligonucleotide
  Antisense strand to SEQ ID NO: 1616389
ggauauccuggaauacagc

SEQ ID NO: 1616391 - RNA, 19 nt, Artificial Sequence
  Description of Artificial Sequence: Synthetic oligonucleotide
  Sense strand starting at position 1754 of SEQ ID NO: 1560671
ccugauuccgucuguggau

SEQ ID NO: 1616392 - RNA, 19 nt, Artificial Sequence
  Description of Artificial Sequence: Synthetic oligonucleotide
  Antisense strand to SEQ ID NO: 1616391
auccacagacggaaucagg

SEQ ID NO: 1616393 - RNA, 19 nt, Artificial Sequence
  Description of Artificial Sequence: Synthetic oligonucleotide
  Sense strand starting at position 1868 of SEQ ID NO: 1560671
gcaguuguuggcgggauau

SEQ ID NO: 1616394 - RNA, 19 nt, Artificial Sequence
  Description of Artificial Sequence: Synthetic oligonucleotide
  Antisense strand to SEQ ID NO: 1616393
auaucccgccaacaacugc

SEQ ID NO: 1616395 - RNA, 19 nt, Artificial Sequence
  Description of Artificial Sequence: Synthetic oligonucleotide
  Sense strand starting at position 2160 of SEQ ID NO: 1560671
cugcuacuuucugugcuau

SEQ ID NO: 1616396 - RNA, 19 nt, Artificial Sequence
  Description of Artificial Sequence: Synthetic oligonucleotide
  Antisense strand to SEQ ID NO: 1616395
auagcacagaaaguagcag

SEQ ID NO: 1616397 - RNA, 19 nt, Artificial Sequence
  Description of Artificial Sequence: Synthetic oligonucleotide
  Sense strand starting at position 2195 of SEQ ID NO: 1560671
agucaacacucuccgcaua

SEQ ID NO: 1616398 - RNA, 19 nt, Artificial Sequence
  Description of Artificial Sequence: Synthetic oligonucleotide
  Antisense strand to SEQ ID NO: 1616397
uaugcggagaguguugacu

SEQ ID NO: 1616399 - RNA, 19 nt, Artificial Sequence
  Description of Artificial Sequence: Synthetic oligonucleotide
  Sense strand starting at position 2470 of SEQ ID NO: 1560671
accuaagucuccugaguac

SEQ ID NO: 1616400 - RNA, 19 nt, Artificial Sequence
  Description of Artificial Sequence: Synthetic oligonucleotide
  Antisense strand to SEQ ID NO: 1616399
guacucaggagacuuaggu

SEQ ID NO: 1616401 - RNA, 19 nt, Artificial Sequence
  Description of Artificial Sequence: Synthetic oligonucleotide
  Sense strand starting at position 2549 of SEQ ID NO: 1560671
uguguugcccaggaugaau

SEQ ID NO: 1616402 - RNA, 19 nt, Artificial Sequence
  Description of Artificial Sequence: Synthetic oligonucleotide
  Antisense strand to SEQ ID NO: 1616401
auucauccugggcaacaca

SEQ ID NO: 1616403 - RNA, 19 nt, Artificial Sequence
  Description of Artificial Sequence: Synthetic oligonucleotide
  Sense strand starting at position 2558 of SEQ ID NO: 1560671
caggaugaauguuaacuau

SEQ ID NO: 1616404 - RNA, 19 nt, Artificial Sequence
  Description of Artificial Sequence: Synthetic oligonucleotide
  Antisense strand to SEQ ID NO: 1616403
auaguuaacauucauccug

SEQ ID NO: 1616405 - RNA, 19 nt, Artificial Sequence
  Description of Artificial Sequence: Synthetic oligonucleotide
  Sense strand starting at position 2623 of SEQ ID NO: 1560671
gcuugaggacaaugucaca

SEQ ID NO: 1616406 - RNA, 19 nt, Artificial Sequence
  Description of Artificial Sequence: Synthetic oligonucleotide
  Antisense strand to SEQ ID NO: 1616405
ugugacauuguccucaagc

SEQ ID NO: 1616407 - RNA, 19 nt, Artificial Sequence
  Description of Artificial Sequence: Synthetic oligonucleotide
  Sense strand starting at position 3309 of SEQ ID NO: 1560671
uuugauugcuggugucuuu

SEQ ID NO: 1616408 - RNA, 19 nt, Artificial Sequence
  Description of Artificial Sequence: Synthetic oligonucleotide
  Antisense strand to SEQ ID NO: 1616407
aaagacaccagcaaucaaa

SEQ ID NO: 1616409 - RNA, 19 nt, Artificial Sequence
  Description of Artificial Sequence: Synthetic oligonucleotide
  Sense strand starting at position 3312 of SEQ ID NO: 1560671
gauugcuggugucuuugua

SEQ ID NO: 1616410 - RNA, 19 nt, Artificial Sequence
  Description of Artificial Sequence: Synthetic oligonucleotide
  Antisense strand to SEQ ID NO: 1616409
uacaaagacaccagcaauc

SEQ ID NO: 1616411 - RNA, 19 nt, Artificial Sequence
  Description of Artificial Sequence: Synthetic oligonucleotide
  Sense strand starting at position 3320 of SEQ ID NO: 1560671
gugucuuuguacccaucca

SEQ ID NO: 1616412 - RNA, 19 nt, Artificial Sequence
  Description of Artificial Sequence: Synthetic oligonucleotide
  Antisense strand to SEQ ID NO: 1616411
uggauggguacaaagacac

SEQ ID NO: 1616413 - RNA, 19 nt, Artificial Sequence
  Description of Artificial Sequence: Synthetic oligonucleotide
  Sense strand starting at position 3373 of SEQ ID NO: 1560671
cccuuugccuucucaggaa

SEQ ID NO: 1616414 - RNA, 19 nt, Artificial Sequence
  Description of Artificial Sequence: Synthetic oligonucleotide
  Antisense strand to SEQ ID NO: 1616413
uuccugagaaggcaaaggg

SEQ ID NO: 1616415 - RNA, 19 nt, Artificial Sequence
  Description of Artificial Sequence: Synthetic oligonucleotide
  Sense strand starting at position 3377 of SEQ ID NO: 1560671
uugccuucucaggaacuga

SEQ ID NO: 1616416 - RNA, 19 nt, Artificial Sequence
  Description of Artificial Sequence: Synthetic oligonucleotide
  Antisense strand to SEQ ID NO: 1616415
ucaguuccugagaaggcaa

SEQ ID NO: 1616417 - RNA, 19 nt, Artificial Sequence
  Description of Artificial Sequence: Synthetic oligonucleotide
  Sense strand starting at position 3391 of SEQ ID NO: 1560671
acugaucuguaguucgaaa

SEQ ID NO: 1616418 - RNA, 19 nt, Artificial Sequence
  Description of Artificial Sequence: Synthetic oligonucleotide
  Antisense strand to SEQ ID NO: 1616417
uuucgaacuacagaucagu

SEQ ID NO: 1616419 - RNA, 19 nt, Artificial Sequence
  Description of Artificial Sequence: Synthetic oligonucleotide
  Sense strand starting at position 3393 of SEQ ID NO: 1560671
ugaucuguaguucgaaaca

SEQ ID NO: 1616420 - RNA, 19 nt, Artificial Sequence
  Description of Artificial Sequence: Synthetic oligonucleotide
  Antisense strand to SEQ ID NO: 1616419
uguuucgaacuacagauca

SEQ ID NO: 1616421 - RNA, 19 nt, Artificial Sequence
  Description of Artificial Sequence: Synthetic oligonucleotide
  Sense strand starting at position 3591 of SEQ ID NO: 1560671
cggcuauacuugcagacuu

SEQ ID NO: 1616422 - RNA, 19 nt, Artificial Sequence
  Description of Artificial Sequence: Synthetic oligonucleotide
  Antisense strand to SEQ ID NO: 1616421
aagucugcaaguauagccg

SEQ ID NO: 1616423 - RNA, 19 nt, Artificial Sequence
  Description of Artificial Sequence: Synthetic oligonucleotide
  Sense strand starting at position 3729 of SEQ ID NO: 1560671
cugcgugugcgccaguaua

SEQ ID NO: 1616424 - RNA, 19 nt, Artificial Sequence
  Description of Artificial Sequence: Synthetic oligonucleotide
  Antisense strand to SEQ ID NO: 1616423
uauacuggcgcacacgcag

SEQ ID NO: 1616425 - RNA, 19 nt, Artificial Sequence
  Description of Artificial Sequence: Synthetic oligonucleotide
  Sense strand starting at position 3742 of SEQ ID NO: 1560671
aguauaagccuuuguuucu

SEQ ID NO: 1616426 - RNA, 19 nt, Artificial Sequence
  Description of Artificial Sequence: Synthetic oligonucleotide
  Antisense strand to SEQ ID NO: 1616425
agaaacaaaggcuuauacu

SEQ ID NO: 1616427 - RNA, 19 nt, Artificial Sequence
  Description of Artificial Sequence: Synthetic oligonucleotide
  Sense strand starting at position 3963 of SEQ ID NO: 1560671
aguacagcauucucaggau

SEQ ID NO: 1616428 - RNA, 19 nt, Artificial Sequence
  Description of Artificial Sequence: Synthetic oligonucleotide
  Antisense strand to SEQ ID NO: 1616427
auccugagaaugcuguacu

SEQ ID NO: 1616429 - RNA, 19 nt, Artificial Sequence
  Description of Artificial Sequence: Synthetic oligonucleotide
  Sense strand starting at position 94 of SEQ ID NO: 1560672
ccaaauguguccuccagaa

SEQ ID NO: 1616430 - RNA, 19 nt, Artificial Sequence
  Description of Artificial Sequence: Synthetic oligonucleotide
  Antisense strand to SEQ ID NO: 1616429
uucuggaggacacauuugg

SEQ ID NO: 1616431 - RNA, 19 nt, Artificial Sequence
  Description of Artificial Sequence: Synthetic oligonucleotide
  Sense strand starting at position 256 of SEQ ID NO: 1560672
gggaguagggugggugaua

SEQ ID NO: 1616432 - RNA, 19 nt, Artificial Sequence
  Description of Artificial Sequence: Synthetic oligonucleotide
  Antisense strand to SEQ ID NO: 1616431
uaucacccacccuacuccc

SEQ ID NO: 1616433 - RNA, 19 nt, Artificial Sequence
  Description of Artificial Sequence: Synthetic oligonucleotide
  Sense strand starting at position 338 of SEQ ID NO: 1560672
aggccauaguucccagaua

SEQ ID NO: 1616434 - RNA, 19 nt, Artificial Sequence
  Description of Artificial Sequence: Synthetic oligonucleotide
  Antisense strand to SEQ ID NO: 1616433
uaucugggaacuauggccu

SEQ ID NO: 1616435 - RNA, 19 nt, Artificial Sequence
  Description of Artificial Sequence: Synthetic oligonucleotide
  Sense strand starting at position 410 of SEQ ID NO: 1560672
ggcuuugugggauguauag

SEQ ID NO: 1616436 - RNA, 19 nt, Artificial Sequence
  Description of Artificial Sequence: Synthetic oligonucleotide
  Antisense strand to SEQ ID NO: 1616435
cuauacaucccacaaagcc

SEQ ID NO: 1616437 - RNA, 19 nt, Artificial Sequence
  Description of Artificial Sequence: Synthetic oligonucleotide
  Sense strand starting at position 412 of SEQ ID NO: 1560672
cuuugugggauguauagga

SEQ ID NO: 1616438 - RNA, 19 nt, Artificial Sequence
  Description of Artificial Sequence: Synthetic oligonucleotide
  Antisense strand to SEQ ID NO: 1616437
uccuauacaucccacaaag

SEQ ID NO: 1616439 - RNA, 19 nt, Artificial Sequence
  Description of Artificial Sequence: Synthetic oligonucleotide
  Sense strand starting at position 642 of SEQ ID NO: 1560672
gaaggcaaucuccacguaa

SEQ ID NO: 1616440 - RNA, 19 nt, Artificial Sequence
  Description of Artificial Sequence: Synthetic oligonucleotide
  Antisense strand to SEQ ID NO: 1616439
uuacguggagauugccuuc

SEQ ID NO: 1616441 - RNA, 19 nt, Artificial Sequence
  Description of Artificial Sequence: Synthetic oligonucleotide
  Sense strand starting at position 644 of SEQ ID NO: 1560672
aggcaaucuccacguaaau

SEQ ID NO: 1616442 - RNA, 19 nt, Artificial Sequence
  Description of Artificial Sequence: Synthetic oligonucleotide
  Antisense strand to SEQ ID NO: 1616441
auuuacguggagauugccu

SEQ ID NO: 1616443 - RNA, 19 nt, Artificial Sequence
  Description of Artificial Sequence: Synthetic oligonucleotide
  Sense strand starting at position 737 of SEQ ID NO: 1560672
ugucauucuugacugugga

SEQ ID NO: 1616444 - RNA, 19 nt, Artificial Sequence
  Description of Artificial Sequence: Synthetic oligonucleotide
  Antisense strand to SEQ ID NO: 1616443
uccacagucaagaaugaca

SEQ ID NO: 1616445 - RNA, 19 nt, Artificial Sequence
  Description of Artificial Sequence: Synthetic oligonucleotide
  Sense strand starting at position 738 of SEQ ID NO: 1560672
gucauucuugacuguggau

SEQ ID NO: 1616446 - RNA, 19 nt, Artificial Sequence
  Description of Artificial Sequence: Synthetic oligonucleotide
  Antisense strand to SEQ ID NO: 1616445
auccacagucaagaaugac

SEQ ID NO: 1616447 - RNA, 19 nt, Artificial Sequence
  Description of Artificial Sequence: Synthetic oligonucleotide
  Sense strand starting at position 740 of SEQ ID NO: 1560672
cauucuugacuguggauaa

SEQ ID NO: 1616448 - RNA, 19 nt, Artificial Sequence
  Description of Artificial Sequence: Synthetic oligonucleotide
  Antisense strand to SEQ ID NO: 1616447
uuauccacagucaagaaug

SEQ ID NO: 1616449 - RNA, 19 nt, Artificial Sequence
  Description of Artificial Sequence: Synthetic oligonucleotide
  Sense strand starting at position 815 of SEQ ID NO: 1560672
agcccaaacccuggauauu

SEQ ID NO: 1616450 - RNA, 19 nt, Artificial Sequence
  Description of Artificial Sequence: Synthetic oligonucleotide
  Antisense strand to SEQ ID NO: 1616449
aauauccaggguuugggcu

SEQ ID NO: 1616451 - RNA, 19 nt, Artificial Sequence
  Description of Artificial Sequence: Synthetic oligonucleotide
  Sense strand starting at position 826 of SEQ ID NO: 1560672
uggauauuaggguagcacu

SEQ ID NO: 1616452 - RNA, 19 nt, Artificial Sequence
  Description of Artificial Sequence: Synthetic oligonucleotide
  Antisense strand to SEQ ID NO: 1616451
agugcuacccuaauaucca

SEQ ID NO: 1616453 - RNA, 19 nt, Artificial Sequence
  Description of Artificial Sequence: Synthetic oligonucleotide
  Sense strand starting at position 1093 of SEQ ID NO: 1560672
agucuugaucuagagguga

SEQ ID NO: 1616454 - RNA, 19 nt, Artificial Sequence
  Description of Artificial Sequence: Synthetic oligonucleotide
  Antisense strand to SEQ ID NO: 1616453
ucaccucuagaucaagacu

SEQ ID NO: 1616455 - RNA, 19 nt, Artificial Sequence
  Description of Artificial Sequence: Synthetic oligonucleotide
  Sense strand starting at position 1095 of SEQ ID NO: 1560672
ucuugaucuagaggugagu

SEQ ID NO: 1616456 - RNA, 19 nt, Artificial Sequence
  Description of Artificial Sequence: Synthetic oligonucleotide
  Antisense strand to SEQ ID NO: 1616455
acucaccucuagaucaaga

SEQ ID NO: 1616457 - RNA, 19 nt, Artificial Sequence
  Description of Artificial Sequence: Synthetic oligonucleotide
  Sense strand starting at position 1097 of SEQ ID NO: 1560672
uugaucuagaggugaguga

SEQ ID NO: 1616458 - RNA, 19 nt, Artificial Sequence
  Description of Artificial Sequence: Synthetic oligonucleotide
  Antisense strand to SEQ ID NO: 1616457
ucacucaccucuagaucaa

SEQ ID NO: 1616459 - RNA, 19 nt, Artificial Sequence
  Description of Artificial Sequence: Synthetic oligonucleotide
  Sense strand starting at position 1125 of SEQ ID NO: 1560672
gccugaucucgccuaugug

SEQ ID NO: 1616460 - RNA, 19 nt, Artificial Sequence
  Description of Artificial Sequence: Synthetic oligonucleotide
  Antisense strand to SEQ ID NO: 1616459
cacauaggcgagaucaggc

SEQ ID NO: 1616461 - RNA, 19 nt, Artificial Sequence
  Description of Artificial Sequence: Synthetic oligonucleotide
  Sense strand starting at position 1183 of SEQ ID NO: 1560672
cauaguugugcucauagau

SEQ ID NO: 1616462 - RNA, 19 nt, Artificial Sequence
  Description of Artificial Sequence: Synthetic oligonucleotide
  Antisense strand to SEQ ID NO: 1616461
aucuaugagcacaacuaug

SEQ ID NO: 1616463 - RNA, 19 nt, Artificial Sequence
  Description of Artificial Sequence: Synthetic oligonucleotide
  Sense strand starting at position 1262 of SEQ ID NO: 1560672
auagaaguagcugauguuu

SEQ ID NO: 1616464 - RNA, 19 nt, Artificial Sequence
  Description of Artificial Sequence: Synthetic oligonucleotide
  Antisense strand to SEQ ID NO: 1616463
aaacaucagcuacuucuau

SEQ ID NO: 1616465 - RNA, 19 nt, Artificial Sequence
  Description of Artificial Sequence: Synthetic oligonucleotide
  Sense strand starting at position 1395 of SEQ ID NO: 1560672
acacucaggaaguguaaga

SEQ ID NO: 1616466 - RNA, 19 nt, Artificial Sequence
  Description of Artificial Sequence: Synthetic oligonucleotide
  Antisense strand to SEQ ID NO: 1616465
ucuuacacuuccugagugu

SEQ ID NO: 1616467 - RNA, 19 nt, Artificial Sequence
  Description of Artificial Sequence: Synthetic oligonucleotide
  Sense strand starting at position 1518 of SEQ ID NO: 1560672
cacaguuaagugcagacaa

SEQ ID NO: 1616468 - RNA, 19 nt, Artificial Sequence
  Description of Artificial Sequence: Synthetic oligonucleotide
  Antisense strand to SEQ ID NO: 1616467
uugucugcacuuaacugug

SEQ ID NO: 1616469 - RNA, 19 nt, Artificial Sequence
  Description of Artificial Sequence: Synthetic oligonucleotide
  Sense strand starting at position 1638 of SEQ ID NO: 1560672
cucagaccacacugucaua

SEQ ID NO: 1616470 - RNA, 19 nt, Artificial Sequence
  Description of Artificial Sequence: Synthetic oligonucleotide
  Antisense strand to SEQ ID NO: 1616469
uaugacaguguggucugag

SEQ ID NO: 1616471 - RNA, 19 nt, Artificial Sequence
  Description of Artificial Sequence: Synthetic oligonucleotide
  Sense strand starting at position 1649 of SEQ ID NO: 1560672
cugucauaucaucagccau

SEQ ID NO: 1616472 - RNA, 19 nt, Artificial Sequence
  Description of Artificial Sequence: Synthetic oligonucleotide
  Antisense strand to SEQ ID NO: 1616471
auggcugaugauaugacag

SEQ ID NO: 1616473 - RNA, 19 nt, Artificial Sequence
  Description of Artificial Sequence: Synthetic oligonucleotide
  Sense strand starting at position 1651 of SEQ ID NO: 1560672
gucauaucaucagccauuc

SEQ ID NO: 1616474 - RNA, 19 nt, Artificial Sequence
  Description of Artificial Sequence: Synthetic oligonucleotide
  Antisense strand to SEQ ID NO: 1616473
gaauggcugaugauaugac

SEQ ID NO: 1616475 - RNA, 19 nt, Artificial Sequence
  Description of Artificial Sequence: Synthetic oligonucleotide
  Sense strand starting at position 2266 of SEQ ID NO: 1560672
uaguguguccaugggaauc

SEQ ID NO: 1616476 - RNA, 19 nt, Artificial Sequence
  Description of Artificial Sequence: Synthetic oligonucleotide
  Antisense strand to SEQ ID NO: 1616475
gauucccauggacacacua

SEQ ID NO: 1616477 - RNA, 19 nt, Artificial Sequence
  Description of Artificial Sequence: Synthetic oligonucleotide
  Sense strand starting at position 2328 of SEQ ID NO: 1560672
ggaccuagcuugccuaaga

SEQ ID NO: 1616478 - RNA, 19 nt, Artificial Sequence
  Description of Artificial Sequence: Synthetic oligonucleotide
  Antisense strand to SEQ ID NO: 1616477
ucuuaggcaagcuaggucc

SEQ ID NO: 1616479 - RNA, 19 nt, Artificial Sequence
  Description of Artificial Sequence: Synthetic oligonucleotide
  Sense strand starting at position 2358 of SEQ ID NO: 1560672
ugaagaguccuauacugug

SEQ ID NO: 1616480 - RNA, 19 nt, Artificial Sequence
  Description of Artificial Sequence: Synthetic oligonucleotide
  Antisense strand to SEQ ID NO: 1616479
cacaguauaggacucuuca

SEQ ID NO: 1616481 - RNA, 19 nt, Artificial Sequence
  Description of Artificial Sequence: Synthetic oligonucleotide
  Sense strand starting at position 2381 of SEQ ID NO: 1560672
uugggacguuggguaaaua

SEQ ID NO: 1616482 - RNA, 19 nt, Artificial Sequence
  Description of Artificial Sequence: Synthetic oligonucleotide
  Antisense strand to SEQ ID NO: 1616481
uauuuacccaacgucccaa

SEQ ID NO: 1616483 - RNA, 19 nt, Artificial Sequence
  Description of Artificial Sequence: Synthetic oligonucleotide
  Sense strand starting at position 2421 of SEQ ID NO: 1560672
gauccagccugguugagaa

SEQ ID NO: 1616484 - RNA, 19 nt, Artificial Sequence
  Description of Artificial Sequence: Synthetic oligonucleotide
  Antisense strand to SEQ ID NO: 1616483
uucucaaccaggcuggauc

SEQ ID NO: 1616485 - RNA, 19 nt, Artificial Sequence
  Description of Artificial Sequence: Synthetic oligonucleotide
  Sense strand starting at position 2446 of SEQ ID NO: 1560672
cuggguguuccggagagaa

SEQ ID NO: 1616486 - RNA, 19 nt, Artificial Sequence
  Description of Artificial Sequence: Synthetic oligonucleotide
  Antisense strand to SEQ ID NO: 1616485
uucucuccggaacacccag

SEQ ID NO: 1616487 - RNA, 19 nt, Artificial Sequence
  Description of Artificial Sequence: Synthetic oligonucleotide
  Sense strand starting at position 2915 of SEQ ID NO: 1560672
acgcauuuguggucccagu

SEQ ID NO: 1616488 - RNA, 19 nt, Artificial Sequence
  Description of Artificial Sequence: Synthetic oligonucleotide
  Antisense strand to SEQ ID NO: 1616487
acugggaccacaaaugcgu

SEQ ID NO: 1616489 - RNA, 19 nt, Artificial Sequence
  Description of Artificial Sequence: Synthetic oligonucleotide
  Sense strand starting at position 2981 of SEQ ID NO: 1560672
ggcugcagugaacauagau

SEQ ID NO: 1616490 - RNA, 19 nt, Artificial Sequence
  Description of Artificial Sequence: Synthetic oligonucleotide
  Antisense strand to SEQ ID NO: 1616489
aucuauguucacugcagcc

SEQ ID NO: 1616491 - RNA, 19 nt, Artificial Sequence
  Description of Artificial Sequence: Synthetic oligonucleotide
  Sense strand starting at position 3082 of SEQ ID NO: 1560672
uagauuaucuaggucagca

SEQ ID NO: 1616492 - RNA, 19 nt, Artificial Sequence
  Description of Artificial Sequence: Synthetic oligonucleotide
  Antisense strand to SEQ ID NO: 1616491
ugcugaccuagauaaucua

SEQ ID NO: 1616493 - RNA, 19 nt, Artificial Sequence
  Description of Artificial Sequence: Synthetic oligonucleotide
  Sense strand starting at position 3146 of SEQ ID NO: 1560672
ccuagcaccugacuuaaga

SEQ ID NO: 1616494 - RNA, 19 nt, Artificial Sequence
  Description of Artificial Sequence: Synthetic oligonucleotide
  Antisense strand to SEQ ID NO: 1616493
ucuuaagucaggugcuagg

SEQ ID NO: 1616495 - RNA, 19 nt, Artificial Sequence
  Description of Artificial Sequence: Synthetic oligonucleotide
  Sense strand starting at position 3169 of SEQ ID NO: 1560672
agguuuaugaaguaagcaa

SEQ ID NO: 1616496 - RNA, 19 nt, Artificial Sequence
  Description of Artificial Sequence: Synthetic oligonucleotide
  Antisense strand to SEQ ID NO: 1616495
uugcuuacuucauaaaccu

SEQ ID NO: 1616497 - RNA, 19 nt, Artificial Sequence
  Description of Artificial Sequence: Synthetic oligonucleotide
  Sense strand starting at position 3415 of SEQ ID NO: 1560672
uaggguguucccuaggaaa

SEQ ID NO: 1616498 - RNA, 19 nt, Artificial Sequence
  Description of Artificial Sequence: Synthetic oligonucleotide
  Antisense strand to SEQ ID NO: 1616497
uuuccuagggaacacccua

SEQ ID NO: 1616499 - RNA, 19 nt, Artificial Sequence
  Description of Artificial Sequence: Synthetic oligonucleotide
  Sense strand starting at position 3417 of SEQ ID NO: 1560672
ggguguucccuaggaaagg

SEQ ID NO: 1616500 - RNA, 19 nt, Artificial Sequence
  Description of Artificial Sequence: Synthetic oligonucleotide
  Antisense strand to SEQ ID NO: 1616499
ccuuuccuagggaacaccc

SEQ ID NO: 1616501 - RNA, 19 nt, Artificial Sequence
  Description of Artificial Sequence: Synthetic oligonucleotide
  Sense strand starting at position 3593 of SEQ ID NO: 1560672
gcgucaugggcugaggauu

SEQ ID NO: 1616502 - RNA, 19 nt, Artificial Sequence
  Description of Artificial Sequence: Synthetic oligonucleotide
  Antisense strand to SEQ ID NO: 1616501
aauccucagcccaugacgc

SEQ ID NO: 1616503 - RNA, 19 nt, Artificial Sequence
  Description of Artificial Sequence: Synthetic oligonucleotide
  Sense strand starting at position 3711 of SEQ ID NO: 1560672
aagagucacuuguucugua

SEQ ID NO: 1616504 - RNA, 19 nt, Artificial Sequence
  Description of Artificial Sequence: Synthetic oligonucleotide
  Antisense strand to SEQ ID NO: 1616503
uacagaacaagugacucuu

SEQ ID NO: 1616505 - RNA, 19 nt, Artificial Sequence
  Description of Artificial Sequence: Synthetic oligonucleotide
  Sense strand starting at position 3716 of SEQ ID NO: 1560672
ucacuuguucuguagggca

SEQ ID NO: 1616506 - RNA, 19 nt, Artificial Sequence
  Description of Artificial Sequence: Synthetic oligonucleotide
  Antisense strand to SEQ ID NO: 1616505
ugcccuacagaacaaguga

SEQ ID NO: 1616507 - RNA, 19 nt, Artificial Sequence
  Description of Artificial Sequence: Synthetic oligonucleotide
  Sense strand starting at position 3915 of SEQ ID NO: 1560672
ccagaucaugcccacugau

SEQ ID NO: 1616508 - RNA, 19 nt, Artificial Sequence
  Description of Artificial Sequence: Synthetic oligonucleotide
  Antisense strand to SEQ ID NO: 1616507
aucagugggcaugaucugg

SEQ ID NO: 1616509 - RNA, 19 nt, Artificial Sequence
  Description of Artificial Sequence: Synthetic oligonucleotide
  Sense strand starting at position 104 of SEQ ID NO: 1560673
ucuagauguucuguccacu

SEQ ID NO: 1616510 - RNA, 19 nt, Artificial Sequence
  Description of Artificial Sequence: Synthetic oligonucleotide
  Antisense strand to SEQ ID NO: 1616509
aguggacagaacaucuaga

SEQ ID NO: 1616511 - RNA, 19 nt, Artificial Sequence
  Description of Artificial Sequence: Synthetic oligonucleotide
  Sense strand starting at position 243 of SEQ ID NO: 1560673
aucugucaaucagggacaa

SEQ ID NO: 1616512 - RNA, 19 nt, Artificial Sequence
  Description of Artificial Sequence: Synthetic oligonucleotide
  Antisense strand to SEQ ID NO: 1616511
uugucccugauugacagau

SEQ ID NO: 1616513 - RNA, 19 nt, Artificial Sequence
  Description of Artificial Sequence: Synthetic oligonucleotide
  Sense strand starting at position 244 of SEQ ID NO: 1560673
ucugucaaucagggacaaa

SEQ ID NO: 1616514 - RNA, 19 nt, Artificial Sequence
  Description of Artificial Sequence: Synthetic oligonucleotide
  Antisense strand to SEQ ID NO: 1616513
uuugucccugauugacaga

SEQ ID NO: 1616515 - RNA, 19 nt, Artificial Sequence
  Description of Artificial Sequence: Synthetic oligonucleotide
  Sense strand starting at position 281 of SEQ ID NO: 1560673
guggguugcugaggacuga

SEQ ID NO: 1616516 - RNA, 19 nt, Artificial Sequence
  Description of Artificial Sequence: Synthetic oligonucleotide
  Antisense strand to SEQ ID NO: 1616515
ucaguccucagcaacccac

SEQ ID NO: 1616517 - RNA, 19 nt, Artificial Sequence
  Description of Artificial Sequence: Synthetic oligonucleotide
  Sense strand starting at position 328 of SEQ ID NO: 1560673
uuugaaaggucucaacugu

SEQ ID NO: 1616518 - RNA, 19 nt, Artificial Sequence
  Description of Artificial Sequence: Synthetic oligonucleotide
  Antisense strand to SEQ ID NO: 1616517
acaguugagaccuuucaaa

SEQ ID NO: 1616519 - RNA, 19 nt, Artificial Sequence
  Description of Artificial Sequence: Synthetic oligonucleotide
  Sense strand starting at position 334 of SEQ ID NO: 1560673
aggucucaacuguauuauu

SEQ ID NO: 1616520 - RNA, 19 nt, Artificial Sequence
  Description of Artificial Sequence: Synthetic oligonucleotide
  Antisense strand to SEQ ID NO: 1616519
aauaauacaguugagaccu

SEQ ID NO: 1616521 - RNA, 19 nt, Artificial Sequence
  Description of Artificial Sequence: Synthetic oligonucleotide
  Sense strand starting at position 814 of SEQ ID NO: 1560673
gcuccuaugcccugccaga

SEQ ID NO: 1616522 - RNA, 19 nt, Artificial Sequence
  Description of Artificial Sequence: Synthetic oligonucleotide
  Antisense strand to SEQ ID NO: 1616521
ucuggcagggcauaggagc

SEQ ID NO: 1616523 - RNA, 19 nt, Artificial Sequence
  Description of Artificial Sequence: Synthetic oligonucleotide
  Sense strand starting at position 955 of SEQ ID NO: 1560673
gacugacuguccucucagu

SEQ ID NO: 1616524 - RNA, 19 nt, Artificial Sequence
  Description of Artificial Sequence: Synthetic oligonucleotide
  Antisense strand to SEQ ID NO: 1616523
acugagaggacagucaguc

SEQ ID NO: 1616525 - RNA, 19 nt, Artificial Sequence
  Description of Artificial Sequence: Synthetic oligonucleotide
  Sense strand starting at position 1003 of SEQ ID NO: 1560673
ccaugugagcuggaagcuu

SEQ ID NO: 1616526 - RNA, 19 nt, Artificial Sequence
  Description of Artificial Sequence: Synthetic oligonucleotide
  Antisense strand to SEQ ID NO: 1616525
aagcuuccagcucacaugg

SEQ ID NO: 1616527 - RNA, 19 nt, Artificial Sequence
  Description of Artificial Sequence: Synthetic oligonucleotide
  Sense strand starting at position 1011 of SEQ ID NO: 1560673
gcuggaagcuuguuccauc

SEQ ID NO: 1616528 - RNA, 19 nt, Artificial Sequence
  Description of Artificial Sequence: Synthetic oligonucleotide
  Antisense strand to SEQ ID NO: 1616527
gauggaacaagcuuccagc

SEQ ID NO: 1616529 - RNA, 19 nt, Artificial Sequence
  Description of Artificial Sequence: Synthetic oligonucleotide
  Sense strand starting at position 1077 of SEQ ID NO: 1560673
ggcugaaccugucuaucau

SEQ ID NO: 1616530 - RNA, 19 nt, Artificial Sequence
  Description of Artificial Sequence: Synthetic oligonucleotide
  Antisense strand to SEQ ID NO: 1616529
augauagacagguucagcc

SEQ ID NO: 1616531 - RNA, 19 nt, Artificial Sequence
  Description of Artificial Sequence: Synthetic oligonucleotide
  Sense strand starting at position 1078 of SEQ ID NO: 1560673
gcugaaccugucuaucauc

SEQ ID NO: 1616532 - RNA, 19 nt, Artificial Sequence
  Description of Artificial Sequence: Synthetic oligonucleotide
  Antisense strand to SEQ ID NO: 1616531
gaugauagacagguucagc

SEQ ID NO: 1616533 - RNA, 19 nt, Artificial Sequence
  Description of Artificial Sequence: Synthetic oligonucleotide
  Sense strand starting at position 1087 of SEQ ID NO: 1560673
gucuaucaucccggccaua

SEQ ID NO: 1616534 - RNA, 19 nt, Artificial Sequence
  Description of Artificial Sequence: Synthetic oligonucleotide
  Antisense strand to SEQ ID NO: 1616533
uauggccgggaugauagac

SEQ ID NO: 1616535 - RNA, 19 nt, Artificial Sequence
  Description of Artificial Sequence: Synthetic oligonucleotide
  Sense strand starting at position 1100 of SEQ ID NO: 1560673
gccauaucccuguguccac

SEQ ID NO: 1616536 - RNA, 19 nt, Artificial Sequence
  Description of Artificial Sequence: Synthetic oligonucleotide
  Antisense strand to SEQ ID NO: 1616535
guggacacagggauauggc

SEQ ID NO: 1616537 - RNA, 19 nt, Artificial Sequence
  Description of Artificial Sequence: Synthetic oligonucleotide
  Sense strand starting at position 1180 of SEQ ID NO: 1560673
gugcguguuccugucccau

SEQ ID NO: 1616538 - RNA, 19 nt, Artificial Sequence
  Description of Artificial Sequence: Synthetic oligonucleotide
  Antisense strand to SEQ ID NO: 1616537
augggacaggaacacgcac

SEQ ID NO: 1616539 - RNA, 19 nt, Artificial Sequence
  Description of Artificial Sequence: Synthetic oligonucleotide
  Sense strand starting at position 1182 of SEQ ID NO: 1560673
gcguguuccugucccauuu

SEQ ID NO: 1616540 - RNA, 19 nt, Artificial Sequence
  Description of Artificial Sequence: Synthetic oligonucleotide
  Antisense strand to SEQ ID NO: 1616539
aaaugggacaggaacacgc

SEQ ID NO: 1616541 - RNA, 19 nt, Artificial Sequence
  Description of Artificial Sequence: Synthetic oligonucleotide
  Sense strand starting at position 1222 of SEQ ID NO: 1560673
uccagaugcuccgagggau

SEQ ID NO: 1616542 - RNA, 19 nt, Artificial Sequence
  Description of Artificial Sequence: Synthetic oligonucleotide
  Antisense strand to SEQ ID NO: 1616541
aucccucggagcaucugga

SEQ ID NO: 1616543 - RNA, 19 nt, Artificial Sequence
  Description of Artificial Sequence: Synthetic oligonucleotide
  Sense strand starting at position 1472 of SEQ ID NO: 1560673
ggagaucucuaucuaagcu

SEQ ID NO: 1616544 - RNA, 19 nt, Artificial Sequence
  Description of Artificial Sequence: Synthetic oligonucleotide
  Antisense strand to SEQ ID NO: 1616543
agcuuagauagagaucucc

SEQ ID NO: 1616545 - RNA, 19 nt, Artificial Sequence
  Description of Artificial Sequence: Synthetic oligonucleotide
  Sense strand starting at position 1488 of SEQ ID NO: 1560673
gcugcuaagaccuggagau

SEQ ID NO: 1616546 - RNA, 19 nt, Artificial Sequence
  Description of Artificial Sequence: Synthetic oligonucleotide
  Antisense strand to SEQ ID NO: 1616545
aucuccaggucuuagcagc

SEQ ID NO: 1616547 - RNA, 19 nt, Artificial Sequence
  Description of Artificial Sequence: Synthetic oligonucleotide
  Sense strand starting at position 1489 of SEQ ID NO: 1560673
cugcuaagaccuggagauc

SEQ ID NO: 1616548 - RNA, 19 nt, Artificial Sequence
  Description of Artificial Sequence: Synthetic oligonucleotide
  Antisense strand to SEQ ID NO: 1616547
gaucuccaggucuuagcag

SEQ ID NO: 1616549 - RNA, 19 nt, Artificial Sequence
  Description of Artificial Sequence: Synthetic oligonucleotide
  Sense strand starting at position 2382 of SEQ ID NO: 1560673
agaaaucuaucuuguaggu

SEQ ID NO: 1616550 - RNA, 19 nt, Artificial Sequence
  Description of Artificial Sequence: Synthetic oligonucleotide
  Antisense strand to SEQ ID NO: 1616549
accuacaagauagauuucu

SEQ ID NO: 1616551 - RNA, 19 nt, Artificial Sequence
  Description of Artificial Sequence: Synthetic oligonucleotide
  Sense strand starting at position 2384 of SEQ ID NO: 1560673
aaaucuaucuuguagguag

SEQ ID NO: 1616552 - RNA, 19 nt, Artificial Sequence
  Description of Artificial Sequence: Synthetic oligonucleotide
  Antisense strand to SEQ ID NO: 1616551
cuaccuacaagauagauuu

SEQ ID NO: 1616553 - RNA, 19 nt, Artificial Sequence
  Description of Artificial Sequence: Synthetic oligonucleotide
  Sense strand starting at position 2403 of SEQ ID NO: 1560673
ggcuuuaagggauguguag

SEQ ID NO: 1616554 - RNA, 19 nt, Artificial Sequence
  Description of Artificial Sequence: Synthetic oligonucleotide
  Antisense strand to SEQ ID NO: 1616553
cuacacaucccuuaaagcc

SEQ ID NO: 1616555 - RNA, 19 nt, Artificial Sequence
  Description of Artificial Sequence: Synthetic oligonucleotide
  Sense strand starting at position 2409 of SEQ ID NO: 1560673
aagggauguguaggaguuu

SEQ ID NO: 1616556 - RNA, 19 nt, Artificial Sequence
  Description of Artificial Sequence: Synthetic oligonucleotide
  Antisense strand to SEQ ID NO: 1616555
aaacuccuacacaucccuu

SEQ ID NO: 1616557 - RNA, 19 nt, Artificial Sequence
  Description of Artificial Sequence: Synthetic oligonucleotide
  Sense strand starting at position 2420 of SEQ ID NO: 1560673
aggaguuugccuugugggu

SEQ ID NO: 1616558 - RNA, 19 nt, Artificial Sequence
  Description of Artificial Sequence: Synthetic oligonucleotide
  Antisense strand to SEQ ID NO: 1616557
acccacaaggcaaacuccu

SEQ ID NO: 1616559 - RNA, 19 nt, Artificial Sequence
  Description of Artificial Sequence: Synthetic oligonucleotide
  Sense strand starting at position 2451 of SEQ ID NO: 1560673
gcuggugaggcagaaguuu

SEQ ID NO: 1616560 - RNA, 19 nt, Artificial Sequence
  Description of Artificial Sequence: Synthetic oligonucleotide
  Antisense strand to SEQ ID NO: 1616559
aaacuucugccucaccagc

SEQ ID NO: 1616561 - RNA, 19 nt, Artificial Sequence
  Description of Artificial Sequence: Synthetic oligonucleotide
  Sense strand starting at position 2505 of SEQ ID NO: 1560673
auguguguuugggacacaa

SEQ ID NO: 1616562 - RNA, 19 nt, Artificial Sequence
  Description of Artificial Sequence: Synthetic oligonucleotide
  Antisense strand to SEQ ID NO: 1616561
uugugucccaaacacacau

SEQ ID NO: 1616563 - RNA, 19 nt, Artificial Sequence
  Description of Artificial Sequence: Synthetic oligonucleotide
  Sense strand starting at position 2573 of SEQ ID NO: 1560673
uccugugcgccagguauuu

SEQ ID NO: 1616564 - RNA, 19 nt, Artificial Sequence
  Description of Artificial Sequence: Synthetic oligonucleotide
  Antisense strand to SEQ ID NO: 1616563
aaauaccuggcgcacagga

SEQ ID NO: 1616565 - RNA, 19 nt, Artificial Sequence
  Description of Artificial Sequence: Synthetic oligonucleotide
  Sense strand starting at position 2616 of SEQ ID NO: 1560673
agcacaaagcgaugaguuu

SEQ ID NO: 1616566 - RNA, 19 nt, Artificial Sequence
  Description of Artificial Sequence: Synthetic oligonucleotide
  Antisense strand to SEQ ID NO: 1616565
aaacucaucgcuuugugcu

SEQ ID NO: 1616567 - RNA, 19 nt, Artificial Sequence
  Description of Artificial Sequence: Synthetic oligonucleotide
  Sense strand starting at position 2638 of SEQ ID NO: 1560673
gcuuguauguaggcacaga

SEQ ID NO: 1616568 - RNA, 19 nt, Artificial Sequence
  Description of Artificial Sequence: Synthetic oligonucleotide
  Antisense strand to SEQ ID NO: 1616567
ucugugccuacauacaagc

SEQ ID NO: 1616569 - RNA, 19 nt, Artificial Sequence
  Description of Artificial Sequence: Synthetic oligonucleotide
  Sense strand starting at position 2639 of SEQ ID NO: 1560673
cuuguauguaggcacagau

SEQ ID NO: 1616570 - RNA, 19 nt, Artificial Sequence
  Description of Artificial Sequence: Synthetic oligonucleotide
  Antisense strand to SEQ ID NO: 1616569
aucugugccuacauacaag

SEQ ID NO: 1616571 - RNA, 19 nt, Artificial Sequence
  Description of Artificial Sequence: Synthetic oligonucleotide
  Sense strand starting at position 2667 of SEQ ID NO: 1560673
caguuacuguggucacuuu

SEQ ID NO: 1616572 - RNA, 19 nt, Artificial Sequence
  Description of Artificial Sequence: Synthetic oligonucleotide
  Antisense strand to SEQ ID NO: 1616571
aaagugaccacaguaacug

SEQ ID NO: 1616573 - RNA, 19 nt, Artificial Sequence
  Description of Artificial Sequence: Synthetic oligonucleotide
  Sense strand starting at position 2733 of SEQ ID NO: 1560673
gccuguaagugguagagca

SEQ ID NO: 1616574 - RNA, 19 nt, Artificial Sequence
  Description of Artificial Sequence: Synthetic oligonucleotide
  Antisense strand to SEQ ID NO: 1616573
ugcucuaccacuuacaggc

SEQ ID NO: 1616575 - RNA, 19 nt, Artificial Sequence
  Description of Artificial Sequence: Synthetic oligonucleotide
  Sense strand starting at position 2761 of SEQ ID NO: 1560673
ccaagugggucuuacucua

SEQ ID NO: 1616576 - RNA, 19 nt, Artificial Sequence
  Description of Artificial Sequence: Synthetic oligonucleotide
  Antisense strand to SEQ ID NO: 1616575
uagaguaagacccacuugg

SEQ ID NO: 1616577 - RNA, 19 nt, Artificial Sequence
  Description of Artificial Sequence: Synthetic oligonucleotide
  Sense strand starting at position 2837 of SEQ ID NO: 1560673
agauaauccucuuuaggcu

SEQ ID NO: 1616578 - RNA, 19 nt, Artificial Sequence
  Description of Artificial Sequence: Synthetic oligonucleotide
  Antisense strand to SEQ ID NO: 1616577
agccuaaagaggauuaucu

SEQ ID NO: 1616579 - RNA, 19 nt, Artificial Sequence
  Description of Artificial Sequence: Synthetic oligonucleotide
  Sense strand starting at position 3695 of SEQ ID NO: 1560673
cuuggaacuucuggacagu

SEQ ID NO: 1616580 - RNA, 19 nt, Artificial Sequence
  Description of Artificial Sequence: Synthetic oligonucleotide
  Antisense strand to SEQ ID NO: 1616579
acuguccagaaguuccaag

SEQ ID NO: 1616581 - RNA, 19 nt, Artificial Sequence
  Description of Artificial Sequence: Synthetic oligonucleotide
  Sense strand starting at position 3714 of SEQ ID NO: 1560673
gguccaugcccaggaaaca

SEQ ID NO: 1616582 - RNA, 19 nt, Artificial Sequence
  Description of Artificial Sequence: Synthetic oligonucleotide
  Antisense strand to SEQ ID NO: 1616581
uguuuccugggcauggacc

SEQ ID NO: 1616583 - RNA, 19 nt, Artificial Sequence
  Description of Artificial Sequence: Synthetic oligonucleotide
  Sense strand starting at position 3715 of SEQ ID NO: 1560673
guccaugcccaggaaacau

SEQ ID NO: 1616584 - RNA, 19 nt, Artificial Sequence
  Description of Artificial Sequence: Synthetic oligonucleotide
  Antisense strand to SEQ ID NO: 1616583
auguuuccugggcauggac

SEQ ID NO: 1616585 - RNA, 19 nt, Artificial Sequence
  Description of Artificial Sequence: Synthetic oligonucleotide
  Sense strand starting at position 3836 of SEQ ID NO: 1560673
gccguuuauuaucuagguu

SEQ ID NO: 1616586 - RNA, 19 nt, Artificial Sequence
  Description of Artificial Sequence: Synthetic oligonucleotide
  Antisense strand to SEQ ID NO: 1616585
aaccuagauaauaaacggc

SEQ ID NO: 1616587 - RNA, 19 nt, Artificial Sequence
  Description of Artificial Sequence: Synthetic oligonucleotide
  Sense strand starting at position 3839 of SEQ ID NO: 1560673
guuuauuaucuagguuguu

SEQ ID NO: 1616588 - RNA, 19 nt, Artificial Sequence
  Description of Artificial Sequence: Synthetic oligonucleotide
  Antisense strand to SEQ ID NO: 1616587
aacaaccuagauaauaaac

SEQ ID NO: 1616589 - RNA, 19 nt, Artificial Sequence
  Description of Artificial Sequence: Synthetic oligonucleotide
  Sense strand starting at position 517 of SEQ ID NO: 1560674
gccugaucucacgacuuag

SEQ ID NO: 1616590 - RNA, 19 nt, Artificial Sequence
  Description of Artificial Sequence: Synthetic oligonucleotide
  Antisense strand to SEQ ID NO: 1616589
cuaagucgugagaucaggc

SEQ ID NO: 1616591 - RNA, 19 nt, Artificial Sequence
  Description of Artificial Sequence: Synthetic oligonucleotide
  Sense strand starting at position 668 of SEQ ID NO: 1560674
ccauucugcuacucaguga

SEQ ID NO: 1616592 - RNA, 19 nt, Artificial Sequence
  Description of Artificial Sequence: Synthetic oligonucleotide
  Antisense strand to SEQ ID NO: 1616591
ucacugaguagcagaaugg

SEQ ID NO: 1616593 - RNA, 19 nt, Artificial Sequence
  Description of Artificial Sequence: Synthetic oligonucleotide
  Sense strand starting at position 723 of SEQ ID NO: 1560674
ggcccuaucucauuauuga

SEQ ID NO: 1616594 - RNA, 19 nt, Artificial Sequence
  Description of Artificial Sequence: Synthetic oligonucleotide
  Antisense strand to SEQ ID NO: 1616593
ucaauaaugagauagggcc

SEQ ID NO: 1616595 - RNA, 19 nt, Artificial Sequence
  Description of Artificial Sequence: Synthetic oligonucleotide
  Sense strand starting at position 724 of SEQ ID NO: 1560674
gcccuaucucauuauugag

SEQ ID NO: 1616596 - RNA, 19 nt, Artificial Sequence
  Description of Artificial Sequence: Synthetic oligonucleotide
  Antisense strand to SEQ ID NO: 1616595
cucaauaaugagauagggc

SEQ ID NO: 1616597 - RNA, 19 nt, Artificial Sequence
  Description of Artificial Sequence: Synthetic oligonucleotide
  Sense strand starting at position 727 of SEQ ID NO: 1560674
cuaucucauuauugaggga

SEQ ID NO: 1616598 - RNA, 19 nt, Artificial Sequence
  Description of Artificial Sequence: Synthetic oligonucleotide
  Antisense strand to SEQ ID NO: 1616597
ucccucaauaaugagauag

SEQ ID NO: 1616599 - RNA, 19 nt, Artificial Sequence
  Description of Artificial Sequence: Synthetic oligonucleotide
  Sense strand starting at position 787 of SEQ ID NO: 1560674
cagucucauuacucaggga

SEQ ID NO: 1616600 - RNA, 19 nt, Artificial Sequence
  Description of Artificial Sequence: Synthetic oligonucleotide
  Antisense strand to SEQ ID NO: 1616599
ucccugaguaaugagacug

SEQ ID NO: 1616601 - RNA, 19 nt, Artificial Sequence
  Description of Artificial Sequence: Synthetic oligonucleotide
  Sense strand starting at position 977 of SEQ ID NO: 1560674
guccuuuccucuuaggaac

SEQ ID NO: 1616602 - RNA, 19 nt, Artificial Sequence
  Description of Artificial Sequence: Synthetic oligonucleotide
  Antisense strand to SEQ ID NO: 1616601
guuccuaagaggaaaggac

SEQ ID NO: 1616603 - RNA, 19 nt, Artificial Sequence
  Description of Artificial Sequence: Synthetic oligonucleotide
  Sense strand starting at position 1035 of SEQ ID NO: 1560674
guucucuccucuuagagau

SEQ ID NO: 1616604 - RNA, 19 nt, Artificial Sequence
  Description of Artificial Sequence: Synthetic oligonucleotide
  Antisense strand to SEQ ID NO: 1616603
aucucuaagaggagagaac

SEQ ID NO: 1616605 - RNA, 19 nt, Artificial Sequence
  Description of Artificial Sequence: Synthetic oligonucleotide
  Sense strand starting at position 1285 of SEQ ID NO: 1560674
cucagagacucccguuauc

SEQ ID NO: 1616606 - RNA, 19 nt, Artificial Sequence
  Description of Artificial Sequence: Synthetic oligonucleotide
  Antisense strand to SEQ ID NO: 1616605
gauaacgggagucucugag

SEQ ID NO: 1616607 - RNA, 19 nt, Artificial Sequence
  Description of Artificial Sequence: Synthetic oligonucleotide
  Sense strand starting at position 2421 of SEQ ID NO: 1560674
gccuuagagugucaguuac

SEQ ID NO: 1616608 - RNA, 19 nt, Artificial Sequence
  Description of Artificial Sequence: Synthetic oligonucleotide
  Antisense strand to SEQ ID NO: 1616607
guaacugacacucuaaggc

SEQ ID NO: 1616609 - RNA, 19 nt, Artificial Sequence
  Description of Artificial Sequence: Synthetic oligonucleotide
  Sense strand starting at position 2518 of SEQ ID NO: 1560674
uuacuaugcgcauguugaa

SEQ ID NO: 1616610 - RNA, 19 nt, Artificial Sequence
  Description of Artificial Sequence: Synthetic oligonucleotide
  Antisense strand to SEQ ID NO: 1616609
uucaacaugcgcauaguaa

SEQ ID NO: 1616611 - RNA, 19 nt, Artificial Sequence
  Description of Artificial Sequence: Synthetic oligonucleotide
  Sense strand starting at position 2723 of SEQ ID NO: 1560674
cgucguacuuccugugaau

SEQ ID NO: 1616612 - RNA, 19 nt, Artificial Sequence
  Description of Artificial Sequence: Synthetic oligonucleotide
  Antisense strand to SEQ ID NO: 1616611
auucacaggaaguacgacg

SEQ ID NO: 1616613 - RNA, 19 nt, Artificial Sequence
  Description of Artificial Sequence: Synthetic oligonucleotide
  Sense strand starting at position 2725 of SEQ ID NO: 1560674
ucguacuuccugugaaucu

SEQ ID NO: 1616614 - RNA, 19 nt, Artificial Sequence
  Description of Artificial Sequence: Synthetic oligonucleotide
  Antisense strand to SEQ ID NO: 1616613
agauucacaggaaguacga

SEQ ID NO: 1616615 - RNA, 19 nt, Artificial Sequence
  Description of Artificial Sequence: Synthetic oligonucleotide
  Sense strand starting at position 2732 of SEQ ID NO: 1560674
uccugugaaucugaugauu

SEQ ID NO: 1616616 - RNA, 19 nt, Artificial Sequence
  Description of Artificial Sequence: Synthetic oligonucleotide
  Antisense strand to SEQ ID NO: 1616615
aaucaucagauucacagga

SEQ ID NO: 1616617 - RNA, 19 nt, Artificial Sequence
  Description of Artificial Sequence: Synthetic oligonucleotide
  Sense strand starting at position 2734 of SEQ ID NO: 1560674
cugugaaucugaugauucu

SEQ ID NO: 1616618 - RNA, 19 nt, Artificial Sequence
  Description of Artificial Sequence: Synthetic oligonucleotide
  Antisense strand to SEQ ID NO: 1616617
agaaucaucagauucacag

SEQ ID NO: 1616619 - RNA, 19 nt, Artificial Sequence
  Description of Artificial Sequence: Synthetic oligonucleotide
  Sense strand starting at position 2743 of SEQ ID NO: 1560674
ugaugauucuagggacuuc

SEQ ID NO: 1616620 - RNA, 19 nt, Artificial Sequence
  Description of Artificial Sequence: Synthetic oligonucleotide
  Antisense strand to SEQ ID NO: 1616619
gaagucccuagaaucauca

SEQ ID NO: 1616621 - RNA, 19 nt, Artificial Sequence
  Description of Artificial Sequence: Synthetic oligonucleotide
  Sense strand starting at position 2760 of SEQ ID NO: 1560674
ucauaugaguaggaucaca

SEQ ID NO: 1616622 - RNA, 19 nt, Artificial Sequence
  Description of Artificial Sequence: Synthetic oligonucleotide
  Antisense strand to SEQ ID NO: 1616621
ugugauccuacucauauga

SEQ ID NO: 1616623 - RNA, 19 nt, Artificial Sequence
  Description of Artificial Sequence: Synthetic oligonucleotide
  Sense strand starting at position 2788 of SEQ ID NO: 1560674
ucccuuuguggcuggcaua

SEQ ID NO: 1616624 - RNA, 19 nt, Artificial Sequence
  Description of Artificial Sequence: Synthetic oligonucleotide
  Antisense strand to SEQ ID NO: 1616623
uaugccagccacaaaggga

SEQ ID NO: 1616625 - RNA, 19 nt, Artificial Sequence
  Description of Artificial Sequence: Synthetic oligonucleotide
  Sense strand starting at position 2791 of SEQ ID NO: 1560674
cuuuguggcuggcauauuu

SEQ ID NO: 1616626 - RNA, 19 nt, Artificial Sequence
  Description of Artificial Sequence: Synthetic oligonucleotide
  Antisense strand to SEQ ID NO: 1616625
aaauaugccagccacaaag

SEQ ID NO: 1616627 - RNA, 19 nt, Artificial Sequence
  Description of Artificial Sequence: Synthetic oligonucleotide
  Sense strand starting at position 2834 of SEQ ID NO: 1560674
gccuguuguagcuguguua

SEQ ID NO: 1616628 - RNA, 19 nt, Artificial Sequence
  Description of Artificial Sequence: Synthetic oligonucleotide
  Antisense strand to SEQ ID NO: 1616627
uaacacagcuacaacaggc

SEQ ID NO: 1616629 - RNA, 19 nt, Artificial Sequence
  Description of Artificial Sequence: Synthetic oligonucleotide
  Sense strand starting at position 2837 of SEQ ID NO: 1560674
uguuguagcuguguuagau

SEQ ID NO: 1616630 - RNA, 19 nt, Artificial Sequence
  Description of Artificial Sequence: Synthetic oligonucleotide
  Antisense strand to SEQ ID NO: 1616629
aucuaacacagcuacaaca

SEQ ID NO: 1616631 - RNA, 19 nt, Artificial Sequence
  Description of Artificial Sequence: Synthetic oligonucleotide
  Sense strand starting at position 2847 of SEQ ID NO: 1560674
guguuagauccacguugua

SEQ ID NO: 1616632 - RNA, 19 nt, Artificial Sequence
  Description of Artificial Sequence: Synthetic oligonucleotide
  Antisense strand to SEQ ID NO: 1616631
uacaacguggaucuaacac

SEQ ID NO: 1616633 - RNA, 19 nt, Artificial Sequence
  Description of Artificial Sequence: Synthetic oligonucleotide
  Sense strand starting at position 2859 of SEQ ID NO: 1560674
cguuguaaccuguguuaga

SEQ ID NO: 1616634 - RNA, 19 nt, Artificial Sequence
  Description of Artificial Sequence: Synthetic oligonucleotide
  Antisense strand to SEQ ID NO: 1616633
ucuaacacagguuacaacg

SEQ ID NO: 1616635 - RNA, 19 nt, Artificial Sequence
  Description of Artificial Sequence: Synthetic oligonucleotide
  Sense strand starting at position 2860 of SEQ ID NO: 1560674
guuguaaccuguguuagaa

SEQ ID NO: 1616636 - RNA, 19 nt, Artificial Sequence
  Description of Artificial Sequence: Synthetic oligonucleotide
  Antisense strand to SEQ ID NO: 1616635
uucuaacacagguuacaac

SEQ ID NO: 1616637 - RNA, 19 nt, Artificial Sequence
  Description of Artificial Sequence: Synthetic oligonucleotide
  Sense strand starting at position 2862 of SEQ ID NO: 1560674
uguaaccuguguuagaauu

SEQ ID NO: 1616638 - RNA, 19 nt, Artificial Sequence
  Description of Artificial Sequence: Synthetic oligonucleotide
  Antisense strand to SEQ ID NO: 1616637
aauucuaacacagguuaca

SEQ ID NO: 1616639 - RNA, 19 nt, Artificial Sequence
  Description of Artificial Sequence: Synthetic oligonucleotide
  Sense strand starting at position 2887 of SEQ ID NO: 1560674
cuugacuacuccgggcaua

SEQ ID NO: 1616640 - RNA, 19 nt, Artificial Sequence
  Description of Artificial Sequence: Synthetic oligonucleotide
  Antisense strand to SEQ ID NO: 1616639
uaugcccggaguagucaag

SEQ ID NO: 1616641 - RNA, 19 nt, Artificial Sequence
  Description of Artificial Sequence: Synthetic oligonucleotide
  Sense strand starting at position 3295 of SEQ ID NO: 1560674
auucuauugugugcaugga

SEQ ID NO: 1616642 - RNA, 19 nt, Artificial Sequence
  Description of Artificial Sequence: Synthetic oligonucleotide
  Antisense strand to SEQ ID NO: 1616641
uccaugcacacaauagaau

SEQ ID NO: 1616643 - RNA, 19 nt, Artificial Sequence
  Description of Artificial Sequence: Synthetic oligonucleotide
  Sense strand starting at position 3299 of SEQ ID NO: 1560674
uauugugugcauggacuau

SEQ ID NO: 1616644 - RNA, 19 nt, Artificial Sequence
  Description of Artificial Sequence: Synthetic oligonucleotide
  Antisense strand to SEQ ID NO: 1616643
auaguccaugcacacaaua

SEQ ID NO: 1616645 - RNA, 19 nt, Artificial Sequence
  Description of Artificial Sequence: Synthetic oligonucleotide
  Sense strand starting at position 3342 of SEQ ID NO: 1560674
acuagacacuucggugaau

SEQ ID NO: 1616646 - RNA, 19 nt, Artificial Sequence
  Description of Artificial Sequence: Synthetic oligonucleotide
  Antisense strand to SEQ ID NO: 1616645
auucaccgaagugucuagu

SEQ ID NO: 1616647 - RNA, 19 nt, Artificial Sequence
  Description of Artificial Sequence: Synthetic oligonucleotide
  Sense strand starting at position 3352 of SEQ ID NO: 1560674
ucggugaaucgugccgcua

SEQ ID NO: 1616648 - RNA, 19 nt, Artificial Sequence
  Description of Artificial Sequence: Synthetic oligonucleotide
  Antisense strand to SEQ ID NO: 1616647
uagcggcacgauucaccga

SEQ ID NO: 1616649 - RNA, 19 nt, Artificial Sequence
  Description of Artificial Sequence: Synthetic oligonucleotide
  Sense strand starting at position 3353 of SEQ ID NO: 1560674
cggugaaucgugccgcuau

SEQ ID NO: 1616650 - RNA, 19 nt, Artificial Sequence
  Description of Artificial Sequence: Synthetic oligonucleotide
  Antisense strand to SEQ ID NO: 1616649
auagcggcacgauucaccg

SEQ ID NO: 1616651 - RNA, 19 nt, Artificial Sequence
  Description of Artificial Sequence: Synthetic oligonucleotide
  Sense strand starting at position 3354 of SEQ ID NO: 1560674
ggugaaucgugccgcuaug

SEQ ID NO: 1616652 - RNA, 19 nt, Artificial Sequence
  Description of Artificial Sequence: Synthetic oligonucleotide
  Antisense strand to SEQ ID NO: 1616651
cauagcggcacgauucacc

SEQ ID NO: 1616653 - RNA, 19 nt, Artificial Sequence
  Description of Artificial Sequence: Synthetic oligonucleotide
  Sense strand starting at position 3355 of SEQ ID NO: 1560674
gugaaucgugccgcuauga

SEQ ID NO: 1616654 - RNA, 19 nt, Artificial Sequence
  Description of Artificial Sequence: Synthetic oligonucleotide
  Antisense strand to SEQ ID NO: 1616653
ucauagcggcacgauucac

SEQ ID NO: 1616655 - RNA, 19 nt, Artificial Sequence
  Description of Artificial Sequence: Synthetic oligonucleotide
  Sense strand starting at position 3396 of SEQ ID NO: 1560674
uugaguccuugccuugagu

SEQ ID NO: 1616656 - RNA, 19 nt, Artificial Sequence
  Description of Artificial Sequence: Synthetic oligonucleotide
  Antisense strand to SEQ ID NO: 1616655
acucaaggcaaggacucaa

SEQ ID NO: 1616657 - RNA, 19 nt, Artificial Sequence
  Description of Artificial Sequence: Synthetic oligonucleotide
  Sense strand starting at position 3398 of SEQ ID NO: 1560674
gaguccuugccuugaguuc

SEQ ID NO: 1616658 - RNA, 19 nt, Artificial Sequence
  Description of Artificial Sequence: Synthetic oligonucleotide
  Antisense strand to SEQ ID NO: 1616657
gaacucaaggcaaggacuc

SEQ ID NO: 1616659 - RNA, 19 nt, Artificial Sequence
  Description of Artificial Sequence: Synthetic oligonucleotide
  Sense strand starting at position 3419 of SEQ ID NO: 1560674
uuggguauauguucugaag

SEQ ID NO: 1616660 - RNA, 19 nt, Artificial Sequence
  Description of Artificial Sequence: Synthetic oligonucleotide
  Antisense strand to SEQ ID NO: 1616659
cuucagaacauauacccaa

SEQ ID NO: 1616661 - RNA, 19 nt, Artificial Sequence
  Description of Artificial Sequence: Synthetic oligonucleotide
  Sense strand starting at position 3421 of SEQ ID NO: 1560674
ggguauauguucugaagag

SEQ ID NO: 1616662 - RNA, 19 nt, Artificial Sequence
  Description of Artificial Sequence: Synthetic oligonucleotide
  Antisense strand to SEQ ID NO: 1616661
cucuucagaacauauaccc

SEQ ID NO: 1616663 - RNA, 19 nt, Artificial Sequence
  Description of Artificial Sequence: Synthetic oligonucleotide
  Sense strand starting at position 3422 of SEQ ID NO: 1560674
gguauauguucugaagagg

SEQ ID NO: 1616664 - RNA, 19 nt, Artificial Sequence
  Description of Artificial Sequence: Synthetic oligonucleotide
  Antisense strand to SEQ ID NO: 1616663
ccucuucagaacauauacc

SEQ ID NO: 1616665 - RNA, 19 nt, Artificial Sequence
  Description of Artificial Sequence: Synthetic oligonucleotide
  Sense strand starting at position 3509 of SEQ ID NO: 1560674
gccguaccacuuuauaaga

SEQ ID NO: 1616666 - RNA, 19 nt, Artificial Sequence
  Description of Artificial Sequence: Synthetic oligonucleotide
  Antisense strand to SEQ ID NO: 1616665
ucuuauaaagugguacggc

SEQ ID NO: 1616667 - RNA, 19 nt, Artificial Sequence
  Description of Artificial Sequence: Synthetic oligonucleotide
  Sense strand starting at position 3511 of SEQ ID NO: 1560674
cguaccacuuuauaagaaa

SEQ ID NO: 1616668 - RNA, 19 nt, Artificial Sequence
  Description of Artificial Sequence: Synthetic oligonucleotide
  Antisense strand to SEQ ID NO: 1616667
uuucuuauaaagugguacg

SEQ ID NO: 1616669 - RNA, 19 nt, Artificial Sequence
  Description of Artificial Sequence: Synthetic oligonucleotide
  Sense strand starting at position 25 of SEQ ID NO: 1560675
aacgacugauucguccaaa

SEQ ID NO: 1616670 - RNA, 19 nt, Artificial Sequence
  Description of Artificial Sequence: Synthetic oligonucleotide
  Antisense strand to SEQ ID NO: 1616669
uuuggacgaaucagucguu

SEQ ID NO: 1616671 - RNA, 19 nt, Artificial Sequence
  Description of Artificial Sequence: Synthetic oligonucleotide
  Sense strand starting at position 344 of SEQ ID NO: 1560675
ggcaguguccugcaccaga

SEQ ID NO: 1616672 - RNA, 19 nt, Artificial Sequence
  Description of Artificial Sequence: Synthetic oligonucleotide
  Antisense strand to SEQ ID NO: 1616671
ucuggugcaggacacugcc

SEQ ID NO: 1616673 - RNA, 19 nt, Artificial Sequence
  Description of Artificial Sequence: Synthetic oligonucleotide
  Sense strand starting at position 518 of SEQ ID NO: 1560675
accuuucucgccugccaua

SEQ ID NO: 1616674 - RNA, 19 nt, Artificial Sequence
  Description of Artificial Sequence: Synthetic oligonucleotide
  Antisense strand to SEQ ID NO: 1616673
uauggcaggcgagaaaggu

SEQ ID NO: 1616675 - RNA, 19 nt, Artificial Sequence
  Description of Artificial Sequence: Synthetic oligonucleotide
  Sense strand starting at position 564 of SEQ ID NO: 1560675
cuacgaaggucacaucaga

SEQ ID NO: 1616676 - RNA, 19 nt, Artificial Sequence
  Description of Artificial Sequence: Synthetic oligonucleotide
  Antisense strand to SEQ ID NO: 1616675
ucugaugugaccuucguag

SEQ ID NO: 1616677 - RNA, 19 nt, Artificial Sequence
  Description of Artificial Sequence: Synthetic oligonucleotide
  Sense strand starting at position 721 of SEQ ID NO: 1560675
gagacuagauauggucagu

SEQ ID NO: 1616678 - RNA, 19 nt, Artificial Sequence
  Description of Artificial Sequence: Synthetic oligonucleotide
  Antisense strand to SEQ ID NO: 1616677
acugaccauaucuagucuc

SEQ ID NO: 1616679 - RNA, 19 nt, Artificial Sequence
  Description of Artificial Sequence: Synthetic oligonucleotide
  Sense strand starting at position 724 of SEQ ID NO: 1560675
acuagauauggucaguguu

SEQ ID NO: 1616680 - RNA, 19 nt, Artificial Sequence
  Description of Artificial Sequence: Synthetic oligonucleotide
  Antisense strand to SEQ ID NO: 1616679
aacacugaccauaucuagu

SEQ ID NO: 1616681 - RNA, 19 nt, Artificial Sequence
  Description of Artificial Sequence: Synthetic oligonucleotide
  Sense strand starting at position 755 of SEQ ID NO: 1560675
gugugugaagcgagaggua

SEQ ID NO: 1616682 - RNA, 19 nt, Artificial Sequence
  Description of Artificial Sequence: Synthetic oligonucleotide
  Antisense strand to SEQ ID NO: 1616681
uaccucucgcuucacacac

SEQ ID NO: 1616683 - RNA, 19 nt, Artificial Sequence
  Description of Artificial Sequence: Synthetic oligonucleotide
  Sense strand starting at position 757 of SEQ ID NO: 1560675
gugugaagcgagagguacu

SEQ ID NO: 1616684 - RNA, 19 nt, Artificial Sequence
  Description of Artificial Sequence: Synthetic oligonucleotide
  Antisense strand to SEQ ID NO: 1616683
aguaccucucgcuucacac

SEQ ID NO: 1616685 - RNA, 19 nt, Artificial Sequence
  Description of Artificial Sequence: Synthetic oligonucleotide
  Sense strand starting at position 764 of SEQ ID NO: 1560675
gcgagagguacugaucuag

SEQ ID NO: 1616686 - RNA, 19 nt, Artificial Sequence
  Description of Artificial Sequence: Synthetic oligonucleotide
  Antisense strand to SEQ ID NO: 1616685
cuagaucaguaccucucgc

SEQ ID NO: 1616687 - RNA, 19 nt, Artificial Sequence
  Description of Artificial Sequence: Synthetic oligonucleotide
  Sense strand starting at position 1034 of SEQ ID NO: 1560675
ugaaacuggucacagggau

SEQ ID NO: 1616688 - RNA, 19 nt, Artificial Sequence
  Description of Artificial Sequence: Synthetic oligonucleotide
  Antisense strand to SEQ ID NO: 1616687
aucccugugaccaguuuca

SEQ ID NO: 1616689 - RNA, 19 nt, Artificial Sequence
  Description of Artificial Sequence: Synthetic oligonucleotide
  Sense strand starting at position 1212 of SEQ ID NO: 1560675
ggcucuauguggucaagua

SEQ ID NO: 1616690 - RNA, 19 nt, Artificial Sequence
  Description of Artificial Sequence: Synthetic oligonucleotide
  Antisense strand to SEQ ID NO: 1616689
uacuugaccacauagagcc

SEQ ID NO: 1616691 - RNA, 19 nt, Artificial Sequence
  Description of Artificial Sequence: Synthetic oligonucleotide
  Sense strand starting at position 1213 of SEQ ID NO: 1560675
gcucuauguggucaaguaa

SEQ ID NO: 1616692 - RNA, 19 nt, Artificial Sequence
  Description of Artificial Sequence: Synthetic oligonucleotide
  Antisense strand to SEQ ID NO: 1616691
uuacuugaccacauagagc

SEQ ID NO: 1616693 - RNA, 19 nt, Artificial Sequence
  Description of Artificial Sequence: Synthetic oligonucleotide
  Sense strand starting at position 1319 of SEQ ID NO: 1560675
gccagacagucccugagau

SEQ ID NO: 1616694 - RNA, 19 nt, Artificial Sequence
  Description of Artificial Sequence: Synthetic oligonucleotide
  Antisense strand to SEQ ID NO: 1616693
aucucagggacugucuggc

SEQ ID NO: 1616695 - RNA, 19 nt, Artificial Sequence
  Description of Artificial Sequence: Synthetic oligonucleotide
  Sense strand starting at position 1363 of SEQ ID NO: 1560675
cagggacgugucuguguuu

SEQ ID NO: 1616696 - RNA, 19 nt, Artificial Sequence
  Description of Artificial Sequence: Synthetic oligonucleotide
  Antisense strand to SEQ ID NO: 1616695
aaacacagacacgucccug

SEQ ID NO: 1616697 - RNA, 19 nt, Artificial Sequence
  Description of Artificial Sequence: Synthetic oligonucleotide
  Sense strand starting at position 2186 of SEQ ID NO: 1560675
gcaugcuuagcgaggcgaa

SEQ ID NO: 1616698 - RNA, 19 nt, Artificial Sequence
  Description of Artificial Sequence: Synthetic oligonucleotide
  Antisense strand to SEQ ID NO: 1616697
uucgccucgcuaagcaugc

SEQ ID NO: 1616699 - RNA, 19 nt, Artificial Sequence
  Description of Artificial Sequence: Synthetic oligonucleotide
  Sense strand starting at position 2353 of SEQ ID NO: 1560675
cacugauggugcuuuauua

SEQ ID NO: 1616700 - RNA, 19 nt, Artificial Sequence
  Description of Artificial Sequence: Synthetic oligonucleotide
  Antisense strand to SEQ ID NO: 1616699
uaauaaagcaccaucagug

SEQ ID NO: 1616701 - RNA, 19 nt, Artificial Sequence
  Description of Artificial Sequence: Synthetic oligonucleotide
  Sense strand starting at position 2357 of SEQ ID NO: 1560675
gauggugcuuuauuaggau

SEQ ID NO: 1616702 - RNA, 19 nt, Artificial Sequence
  Description of Artificial Sequence: Synthetic oligonucleotide
  Antisense strand to SEQ ID NO: 1616701
auccuaauaaagcaccauc

SEQ ID NO: 1616703 - RNA, 19 nt, Artificial Sequence
  Description of Artificial Sequence: Synthetic oligonucleotide
  Sense strand starting at position 2423 of SEQ ID NO: 1560675
ccgccuccucaccguaauu

SEQ ID NO: 1616704 - RNA, 19 nt, Artificial Sequence
  Description of Artificial Sequence: Synthetic oligonucleotide
  Antisense strand to SEQ ID NO: 1616703
aauuacggugaggaggcgg

SEQ ID NO: 1616705 - RNA, 19 nt, Artificial Sequence
  Description of Artificial Sequence: Synthetic oligonucleotide
  Sense strand starting at position 2437 of SEQ ID NO: 1560675
uaauuaggcuccgucgaga

SEQ ID NO: 1616706 - RNA, 19 nt, Artificial Sequence
  Description of Artificial Sequence: Synthetic oligonucleotide
  Antisense strand to SEQ ID NO: 1616705
ucucgacggagccuaauua

SEQ ID NO: 1616707 - RNA, 19 nt, Artificial Sequence
  Description of Artificial Sequence: Synthetic oligonucleotide
  Sense strand starting at position 2575 of SEQ ID NO: 1560675
gccagaguuguuggccaga

SEQ ID NO: 1616708 - RNA, 19 nt, Artificial Sequence
  Description of Artificial Sequence: Synthetic oligonucleotide
  Antisense strand to SEQ ID NO: 1616707
ucuggccaacaacucuggc

SEQ ID NO: 1616709 - RNA, 19 nt, Artificial Sequence
  Description of Artificial Sequence: Synthetic oligonucleotide
  Sense strand starting at position 2693 of SEQ ID NO: 1560675
ggguuaggugccagugcuu

SEQ ID NO: 1616710 - RNA, 19 nt, Artificial Sequence
  Description of Artificial Sequence: Synthetic oligonucleotide
  Antisense strand to SEQ ID NO: 1616709
aagcacuggcaccuaaccc

SEQ ID NO: 1616711 - RNA, 19 nt, Artificial Sequence
  Description of Artificial Sequence: Synthetic oligonucleotide
  Sense strand starting at position 2810 of SEQ ID NO: 1560675
ucugcucuuagaugcgaga

SEQ ID NO: 1616712 - RNA, 19 nt, Artificial Sequence
  Description of Artificial Sequence: Synthetic oligonucleotide
  Antisense strand to SEQ ID NO: 1616711
ucucgcaucuaagagcaga

SEQ ID NO: 1616713 - RNA, 19 nt, Artificial Sequence
  Description of Artificial Sequence: Synthetic oligonucleotide
  Sense strand starting at position 2916 of SEQ ID NO: 1560675
ggaacacuuugggaugaga

SEQ ID NO: 1616714 - RNA, 19 nt, Artificial Sequence
  Description of Artificial Sequence: Synthetic oligonucleotide
  Antisense strand to SEQ ID NO: 1616713
ucucaucccaaaguguucc

SEQ ID NO: 1616715 - RNA, 19 nt, Artificial Sequence
  Description of Artificial Sequence: Synthetic oligonucleotide
  Sense strand starting at position 2927 of SEQ ID NO: 1560675
ggaugagaguuaccggcuu

SEQ ID NO: 1616716 - RNA, 19 nt, Artificial Sequence
  Description of Artificial Sequence: Synthetic oligonucleotide
  Antisense strand to SEQ ID NO: 1616715
aagccgguaacucucaucc

SEQ ID NO: 1616717 - RNA, 19 nt, Artificial Sequence
  Description of Artificial Sequence: Synthetic oligonucleotide
  Sense strand starting at position 2929 of SEQ ID NO: 1560675
augagaguuaccggcuugu

SEQ ID NO: 1616718 - RNA, 19 nt, Artificial Sequence
  Description of Artificial Sequence: Synthetic oligonucleotide
  Antisense strand to SEQ ID NO: 1616717
acaagccgguaacucucau

SEQ ID NO: 1616719 - RNA, 19 nt, Artificial Sequence
  Description of Artificial Sequence: Synthetic oligonucleotide
  Sense strand starting at position 2964 of SEQ ID NO: 1560675
acgauuuguggguggagca

SEQ ID NO: 1616720 - RNA, 19 nt, Artificial Sequence
  Description of Artificial Sequence: Synthetic oligonucleotide
  Antisense strand to SEQ ID NO: 1616719
ugcuccacccacaaaucgu

SEQ ID NO: 1616721 - RNA, 19 nt, Artificial Sequence
  Description of Artificial Sequence: Synthetic oligonucleotide
  Sense strand starting at position 2983 of SEQ ID NO: 1560675
cacacaaguguagaguuau

SEQ ID NO: 1616722 - RNA, 19 nt, Artificial Sequence
  Description of Artificial Sequence: Synthetic oligonucleotide
  Antisense strand to SEQ ID NO: 1616721
auaacucuacacuugugug

SEQ ID NO: 1616723 - RNA, 19 nt, Artificial Sequence
  Description of Artificial Sequence: Synthetic oligonucleotide
  Sense strand starting at position 2993 of SEQ ID NO: 1560675
uagaguuauagcugagguc

SEQ ID NO: 1616724 - RNA, 19 nt, Artificial Sequence
  Description of Artificial Sequence: Synthetic oligonucleotide
  Antisense strand to SEQ ID NO: 1616723
gaccucagcuauaacucua

SEQ ID NO: 1616725 - RNA, 19 nt, Artificial Sequence
  Description of Artificial Sequence: Synthetic oligonucleotide
  Sense strand starting at position 2994 of SEQ ID NO: 1560675
agaguuauagcugaggucu

SEQ ID NO: 1616726 - RNA, 19 nt, Artificial Sequence
  Description of Artificial Sequence: Synthetic oligonucleotide
  Antisense strand to SEQ ID NO: 1616725
agaccucagcuauaacucu

SEQ ID NO: 1616727 - RNA, 19 nt, Artificial Sequence
  Description of Artificial Sequence: Synthetic oligonucleotide
  Sense strand starting at position 3002 of SEQ ID NO: 1560675
agcugaggucuuuaccuuu

SEQ ID NO: 1616728 - RNA, 19 nt, Artificial Sequence
  Description of Artificial Sequence: Synthetic oligonucleotide
  Antisense strand to SEQ ID NO: 1616727
aaagguaaagaccucagcu

SEQ ID NO: 1616729 - RNA, 19 nt, Artificial Sequence
  Description of Artificial Sequence: Synthetic oligonucleotide
  Sense strand starting at position 3042 of SEQ ID NO: 1560675
gugccucugcucugagaac

SEQ ID NO: 1616730 - RNA, 19 nt, Artificial Sequence
  Description of Artificial Sequence: Synthetic oligonucleotide
  Antisense strand to SEQ ID NO: 1616729
guucucagagcagaggcac

SEQ ID NO: 1616731 - RNA, 19 nt, Artificial Sequence
  Description of Artificial Sequence: Synthetic oligonucleotide
  Sense strand starting at position 3043 of SEQ ID NO: 1560675
ugccucugcucugagaaca

SEQ ID NO: 1616732 - RNA, 19 nt, Artificial Sequence
  Description of Artificial Sequence: Synthetic oligonucleotide
  Antisense strand to SEQ ID NO: 1616731
uguucucagagcagaggca

SEQ ID NO: 1616733 - RNA, 19 nt, Artificial Sequence
  Description of Artificial Sequence: Synthetic oligonucleotide
  Sense strand starting at position 3053 of SEQ ID NO: 1560675
cugagaacaugagacucau

SEQ ID NO: 1616734 - RNA, 19 nt, Artificial Sequence
  Description of Artificial Sequence: Synthetic oligonucleotide
  Antisense strand to SEQ ID NO: 1616733
augagucucauguucucag

SEQ ID NO: 1616735 - RNA, 19 nt, Artificial Sequence
  Description of Artificial Sequence: Synthetic oligonucleotide
  Sense strand starting at position 3062 of SEQ ID NO: 1560675
ugagacucauccuugauuc

SEQ ID NO: 1616736 - RNA, 19 nt, Artificial Sequence
  Description of Artificial Sequence: Synthetic oligonucleotide
  Antisense strand to SEQ ID NO: 1616735
gaaucaaggaugagucuca

SEQ ID NO: 1616737 - RNA, 19 nt, Artificial Sequence
  Description of Artificial Sequence: Synthetic oligonucleotide
  Sense strand starting at position 3089 of SEQ ID NO: 1560675
ggguguuacuuggucacau

SEQ ID NO: 1616738 - RNA, 19 nt, Artificial Sequence
  Description of Artificial Sequence: Synthetic oligonucleotide
  Antisense strand to SEQ ID NO: 1616737
augugaccaaguaacaccc

SEQ ID NO: 1616739 - RNA, 19 nt, Artificial Sequence
  Description of Artificial Sequence: Synthetic oligonucleotide
  Sense strand starting at position 3090 of SEQ ID NO: 1560675
gguguuacuuggucacaug

SEQ ID NO: 1616740 - RNA, 19 nt, Artificial Sequence
  Description of Artificial Sequence: Synthetic oligonucleotide
  Antisense strand to SEQ ID NO: 1616739
caugugaccaaguaacacc

SEQ ID NO: 1616741 - RNA, 19 nt, Artificial Sequence
  Description of Artificial Sequence: Synthetic oligonucleotide
  Sense strand starting at position 3091 of SEQ ID NO: 1560675
guguuacuuggucacauga

SEQ ID NO: 1616742 - RNA, 19 nt, Artificial Sequence
  Description of Artificial Sequence: Synthetic oligonucleotide
  Antisense strand to SEQ ID NO: 1616741
ucaugugaccaaguaacac

SEQ ID NO: 1616743 - RNA, 19 nt, Artificial Sequence
  Description of Artificial Sequence: Synthetic oligonucleotide
  Sense strand starting at position 3093 of SEQ ID NO: 1560675
guuacuuggucacaugaaa

SEQ ID NO: 1616744 - RNA, 19 nt, Artificial Sequence
  Description of Artificial Sequence: Synthetic oligonucleotide
  Antisense strand to SEQ ID NO: 1616743
uuucaugugaccaaguaac

SEQ ID NO: 1616745 - RNA, 19 nt, Artificial Sequence
  Description of Artificial Sequence: Synthetic oligonucleotide
  Sense strand starting at position 3706 of SEQ ID NO: 1560675
gcccuaauggacgguguua

SEQ ID NO: 1616746 - RNA, 19 nt, Artificial Sequence
  Description of Artificial Sequence: Synthetic oligonucleotide
  Antisense strand to SEQ ID NO: 1616745
uaacaccguccauuagggc

SEQ ID NO: 1616747 - RNA, 19 nt, Artificial Sequence
  Description of Artificial Sequence: Synthetic oligonucleotide
  Sense strand starting at position 3708 of SEQ ID NO: 1560675
ccuaauggacgguguuaga

SEQ ID NO: 1616748 - RNA, 19 nt, Artificial Sequence
  Description of Artificial Sequence: Synthetic oligonucleotide
  Antisense strand to SEQ ID NO: 1616747
ucuaacaccguccauuagg

SEQ ID NO: 1616749 - RNA, 19 nt, Artificial Sequence
  Description of Artificial Sequence: Synthetic oligonucleotide
  Sense strand starting at position 109 of SEQ ID NO: 1560676
ucuggaaauaucuguggaa

SEQ ID NO: 1616750 - RNA, 19 nt, Artificial Sequence
  Description of Artificial Sequence: Synthetic oligonucleotide
  Antisense strand to SEQ ID NO: 1616749
uuccacagauauuuccaga

SEQ ID NO: 1616751 - RNA, 19 nt, Artificial Sequence
  Description of Artificial Sequence: Synthetic oligonucleotide
  Sense strand starting at position 110 of SEQ ID NO: 1560676
cuggaaauaucuguggaau

SEQ ID NO: 1616752 - RNA, 19 nt, Artificial Sequence
  Description of Artificial Sequence: Synthetic oligonucleotide
  Antisense strand to SEQ ID NO: 1616751
auuccacagauauuuccag

SEQ ID NO: 1616753 - RNA, 19 nt, Artificial Sequence
  Description of Artificial Sequence: Synthetic oligonucleotide
  Sense strand starting at position 112 of SEQ ID NO: 1560676
ggaaauaucuguggaauga

SEQ ID NO: 1616754 - RNA, 19 nt, Artificial Sequence
  Description of Artificial Sequence: Synthetic oligonucleotide
  Antisense strand to SEQ ID NO: 1616753
ucauuccacagauauuucc

SEQ ID NO: 1616755 - RNA, 19 nt, Artificial Sequence
  Description of Artificial Sequence: Synthetic oligonucleotide
  Sense strand starting at position 136 of SEQ ID NO: 1560676
ugaaauugcuagccuguga

SEQ ID NO: 1616756 - RNA, 19 nt, Artificial Sequence
  Description of Artificial Sequence: Synthetic oligonucleotide
  Antisense strand to SEQ ID NO: 1616755
ucacaggcuagcaauuuca

SEQ ID NO: 1616757 - RNA, 19 nt, Artificial Sequence
  Description of Artificial Sequence: Synthetic oligonucleotide
  Sense strand starting at position 153 of SEQ ID NO: 1560676
gaguacugucagggcagaa

SEQ ID NO: 1616758 - RNA, 19 nt, Artificial Sequence
  Description of Artificial Sequence: Synthetic oligonucleotide
  Antisense strand to SEQ ID NO: 1616757
uucugcccugacaguacuc

SEQ ID NO: 1616759 - RNA, 19 nt, Artificial Sequence
  Description of Artificial Sequence: Synthetic oligonucleotide
  Sense strand starting at position 168 of SEQ ID NO: 1560676
agaaaccauggcugucuua

SEQ ID NO: 1616760 - RNA, 19 nt, Artificial Sequence
  Description of Artificial Sequence: Synthetic oligonucleotide
  Antisense strand to SEQ ID NO: 1616759
uaagacagccaugguuucu

SEQ ID NO: 1616761 - RNA, 19 nt, Artificial Sequence
  Description of Artificial Sequence: Synthetic oligonucleotide
  Sense strand starting at position 205 of SEQ ID NO: 1560676
cuuaauaggugcucaauua

SEQ ID NO: 1616762 - RNA, 19 nt, Artificial Sequence
  Description of Artificial Sequence: Synthetic oligonucleotide
  Antisense strand to SEQ ID NO: 1616761
uaauugagcaccuauuaag

SEQ ID NO: 1616763 - RNA, 19 nt, Artificial Sequence
  Description of Artificial Sequence: Synthetic oligonucleotide
  Sense strand starting at position 206 of SEQ ID NO: 1560676
uuaauaggugcucaauuaa

SEQ ID NO: 1616764 - RNA, 19 nt, Artificial Sequence
  Description of Artificial Sequence: Synthetic oligonucleotide
  Antisense strand to SEQ ID NO: 1616763
uuaauugagcaccuauuaa

SEQ ID NO: 1616765 - RNA, 19 nt, Artificial Sequence
  Description of Artificial Sequence: Synthetic oligonucleotide
  Sense strand starting at position 260 of SEQ ID NO: 1560676
aaaugagucuugcagaaug

SEQ ID NO: 1616766 - RNA, 19 nt, Artificial Sequence
  Description of Artificial Sequence: Synthetic oligonucleotide
  Antisense strand to SEQ ID NO: 1616765
cauucugcaagacucauuu

SEQ ID NO: 1616767 - RNA, 19 nt, Artificial Sequence
  Description of Artificial Sequence: Synthetic oligonucleotide
  Sense strand starting at position 262 of SEQ ID NO: 1560676
augagucuugcagaauguu

SEQ ID NO: 1616768 - RNA, 19 nt, Artificial Sequence
  Description of Artificial Sequence: Synthetic oligonucleotide
  Antisense strand to SEQ ID NO: 1616767
aacauucugcaagacucau

SEQ ID NO: 1616769 - RNA, 19 nt, Artificial Sequence
  Description of Artificial Sequence: Synthetic oligonucleotide
  Sense strand starting at position 270 of SEQ ID NO: 1560676
ugcagaauguucccuucua

SEQ ID NO: 1616770 - RNA, 19 nt, Artificial Sequence
  Description of Artificial Sequence: Synthetic oligonucleotide
  Antisense strand to SEQ ID NO: 1616769
uagaagggaacauucugca

SEQ ID NO: 1616771 - RNA, 19 nt, Artificial Sequence
  Description of Artificial Sequence: Synthetic oligonucleotide
  Sense strand starting at position 271 of SEQ ID NO: 1560676
gcagaauguucccuucuac

SEQ ID NO: 1616772 - RNA, 19 nt, Artificial Sequence
  Description of Artificial Sequence: Synthetic oligonucleotide
  Antisense strand to SEQ ID NO: 1616771
guagaagggaacauucugc

SEQ ID NO: 1616773 - RNA, 19 nt, Artificial Sequence
  Description of Artificial Sequence: Synthetic oligonucleotide
  Sense strand starting at position 433 of SEQ ID NO: 1560676
aggaaaugguucucaacug

SEQ ID NO: 1616774 - RNA, 19 nt, Artificial Sequence
  Description of Artificial Sequence: Synthetic oligonucleotide
  Antisense strand to SEQ ID NO: 1616773
caguugagaaccauuuccu

SEQ ID NO: 1616775 - RNA, 19 nt, Artificial Sequence
  Description of Artificial Sequence: Synthetic oligonucleotide
  Sense strand starting at position 478 of SEQ ID NO: 1560676
uuugcaaugccuggagaca

SEQ ID NO: 1616776 - RNA, 19 nt, Artificial Sequence
  Description of Artificial Sequence: Synthetic oligonucleotide
  Antisense strand to SEQ ID NO: 1616775
ugucuccaggcauugcaaa

SEQ ID NO: 1616777 - RNA, 19 nt, Artificial Sequence
  Description of Artificial Sequence: Synthetic oligonucleotide
  Sense strand starting at position 561 of SEQ ID NO: 1560676
uaaagaugccgcuaagcaa

SEQ ID NO: 1616778 - RNA, 19 nt, Artificial Sequence
  Description of Artificial Sequence: Synthetic oligonucleotide
  Antisense strand to SEQ ID NO: 1616777
uugcuuagcggcaucuuua

SEQ ID NO: 1616779 - RNA, 19 nt, Artificial Sequence
  Description of Artificial Sequence: Synthetic oligonucleotide
  Sense strand starting at position 761 of SEQ ID NO: 1560676
agggaacgcagguguucau

SEQ ID NO: 1616780 - RNA, 19 nt, Artificial Sequence
  Description of Artificial Sequence: Synthetic oligonucleotide
  Antisense strand to SEQ ID NO: 1616779
augaacaccugcguucccu

SEQ ID NO: 1616781 - RNA, 19 nt, Artificial Sequence
  Description of Artificial Sequence: Synthetic oligonucleotide
  Sense strand starting at position 768 of SEQ ID NO: 1560676
gcagguguucauggauaca

SEQ ID NO: 1616782 - RNA, 19 nt, Artificial Sequence
  Description of Artificial Sequence: Synthetic oligonucleotide
  Antisense strand to SEQ ID NO: 1616781
uguauccaugaacaccugc

SEQ ID NO: 1616783 - RNA, 19 nt, Artificial Sequence
  Description of Artificial Sequence: Synthetic oligonucleotide
  Sense strand starting at position 771 of SEQ ID NO: 1560676
gguguucauggauacaugu

SEQ ID NO: 1616784 - RNA, 19 nt, Artificial Sequence
  Description of Artificial Sequence: Synthetic oligonucleotide
  Antisense strand to SEQ ID NO: 1616783
acauguauccaugaacacc

SEQ ID NO: 1616785 - RNA, 19 nt, Artificial Sequence
  Description of Artificial Sequence: Synthetic oligonucleotide
  Sense strand starting at position 778 of SEQ ID NO: 1560676
auggauacauguuuacuga

SEQ ID NO: 1616786 - RNA, 19 nt, Artificial Sequence
  Description of Artificial Sequence: Synthetic oligonucleotide
  Antisense strand to SEQ ID NO: 1616785
ucaguaaacauguauccau

SEQ ID NO: 1616787 - RNA, 19 nt, Artificial Sequence
  Description of Artificial Sequence: Synthetic oligonucleotide
  Sense strand starting at position 785 of SEQ ID NO: 1560676
cauguuuacugagcgauug

SEQ ID NO: 1616788 - RNA, 19 nt, Artificial Sequence
  Description of Artificial Sequence: Synthetic oligonucleotide
  Antisense strand to SEQ ID NO: 1616787
caaucgcucaguaaacaug

SEQ ID NO: 1616789 - RNA, 19 nt, Artificial Sequence
  Description of Artificial Sequence: Synthetic oligonucleotide
  Sense strand starting at position 786 of SEQ ID NO: 1560676
auguuuacugagcgauugu

SEQ ID NO: 1616790 - RNA, 19 nt, Artificial Sequence
  Description of Artificial Sequence: Synthetic oligonucleotide
  Antisense strand to SEQ ID NO: 1616789
acaaucgcucaguaaacau

SEQ ID NO: 1616791 - RNA, 19 nt, Artificial Sequence
  Description of Artificial Sequence: Synthetic oligonucleotide
  Sense strand starting at position 795 of SEQ ID NO: 1560676
gagcgauugugacucugca

SEQ ID NO: 1616792 - RNA, 19 nt, Artificial Sequence
  Description of Artificial Sequence: Synthetic oligonucleotide
  Antisense strand to SEQ ID NO: 1616791
ugcagagucacaaucgcuc

SEQ ID NO: 1616793 - RNA, 19 nt, Artificial Sequence
  Description of Artificial Sequence: Synthetic oligonucleotide
  Sense strand starting at position 986 of SEQ ID NO: 1560676
uugagagguucuguggaag

SEQ ID NO: 1616794 - RNA, 19 nt, Artificial Sequence
  Description of Artificial Sequence: Synthetic oligonucleotide
  Antisense strand to SEQ ID NO: 1616793
cuuccacagaaccucucaa

SEQ ID NO: 1616795 - RNA, 19 nt, Artificial Sequence
  Description of Artificial Sequence: Synthetic oligonucleotide
  Sense strand starting at position 2666 of SEQ ID NO: 1560676
ggaccuuaucccugaggca

SEQ ID NO: 1616796 - RNA, 19 nt, Artificial Sequence
  Description of Artificial Sequence: Synthetic oligonucleotide
  Antisense strand to SEQ ID NO: 1616795
ugccucagggauaaggucc

SEQ ID NO: 1616797 - RNA, 19 nt, Artificial Sequence
  Description of Artificial Sequence: Synthetic oligonucleotide
  Sense strand starting at position 2794 of SEQ ID NO: 1560676
gggugguuggagcaaguua

SEQ ID NO: 1616798 - RNA, 19 nt, Artificial Sequence
  Description of Artificial Sequence: Synthetic oligonucleotide
  Antisense strand to SEQ ID NO: 1616797
uaacuugcuccaaccaccc

SEQ ID NO: 1616799 - RNA, 19 nt, Artificial Sequence
  Description of Artificial Sequence: Synthetic oligonucleotide
  Sense strand starting at position 2853 of SEQ ID NO: 1560676
cugggaggauguguuuagu

SEQ ID NO: 1616800 - RNA, 19 nt, Artificial Sequence
  Description of Artificial Sequence: Synthetic oligonucleotide
  Antisense strand to SEQ ID NO: 1616799
acuaaacacauccucccag

SEQ ID NO: 1616801 - RNA, 19 nt, Artificial Sequence
  Description of Artificial Sequence: Synthetic oligonucleotide
  Sense strand starting at position 2855 of SEQ ID NO: 1560676
gggaggauguguuuagugu

SEQ ID NO: 1616802 - RNA, 19 nt, Artificial Sequence
  Description of Artificial Sequence: Synthetic oligonucleotide
  Antisense strand to SEQ ID NO: 1616801
acacuaaacacauccuccc

SEQ ID NO: 1616803 - RNA, 19 nt, Artificial Sequence
  Description of Artificial Sequence: Synthetic oligonucleotide
  Sense strand starting at position 2856 of SEQ ID NO: 1560676
ggaggauguguuuaguguc

SEQ ID NO: 1616804 - RNA, 19 nt, Artificial Sequence
  Description of Artificial Sequence: Synthetic oligonucleotide
  Antisense strand to SEQ ID NO: 1616803
gacacuaaacacauccucc

SEQ ID NO: 1616805 - RNA, 19 nt, Artificial Sequence
  Description of Artificial Sequence: Synthetic oligonucleotide
  Sense strand starting at position 2939 of SEQ ID NO: 1560676
acuccugcucuugagaauc

SEQ ID NO: 1616806 - RNA, 19 nt, Artificial Sequence
  Description of Artificial Sequence: Synthetic oligonucleotide
  Antisense strand to SEQ ID NO: 1616805
gauucucaagagcaggagu

SEQ ID NO: 1616807 - RNA, 19 nt, Artificial Sequence
  Description of Artificial Sequence: Synthetic oligonucleotide
  Sense strand starting at position 3030 of SEQ ID NO: 1560676
cgugguaucguuaagucuu

SEQ ID NO: 1616808 - RNA, 19 nt, Artificial Sequence
  Description of Artificial Sequence: Synthetic oligonucleotide
  Antisense strand to SEQ ID NO: 1616807
aagacuuaacgauaccacg

SEQ ID NO: 1616809 - RNA, 19 nt, Artificial Sequence
  Description of Artificial Sequence: Synthetic oligonucleotide
  Sense strand starting at position 3067 of SEQ ID NO: 1560676
acagaugacucauagagaa

SEQ ID NO: 1616810 - RNA, 19 nt, Artificial Sequence
  Description of Artificial Sequence: Synthetic oligonucleotide
  Antisense strand to SEQ ID NO: 1616809
uucucuaugagucaucugu

SEQ ID NO: 1616811 - RNA, 19 nt, Artificial Sequence
  Description of Artificial Sequence: Synthetic oligonucleotide
  Sense strand starting at position 3085 of SEQ ID NO: 1560676
agugaagucauuugugcaa

SEQ ID NO: 1616812 - RNA, 19 nt, Artificial Sequence
  Description of Artificial Sequence: Synthetic oligonucleotide
  Antisense strand to SEQ ID NO: 1616811
uugcacaaaugacuucacu

SEQ ID NO: 1616813 - RNA, 19 nt, Artificial Sequence
  Description of Artificial Sequence: Synthetic oligonucleotide
  Sense strand starting at position 3092 of SEQ ID NO: 1560676
ucauuugugcaaggcuaca

SEQ ID NO: 1616814 - RNA, 19 nt, Artificial Sequence
  Description of Artificial Sequence: Synthetic oligonucleotide
  Antisense strand to SEQ ID NO: 1616813
uguagccuugcacaaauga

SEQ ID NO: 1616815 - RNA, 19 nt, Artificial Sequence
  Description of Artificial Sequence: Synthetic oligonucleotide
  Sense strand starting at position 3588 of SEQ ID NO: 1560676
cgcagagguucagugacuu

SEQ ID NO: 1616816 - RNA, 19 nt, Artificial Sequence
  Description of Artificial Sequence: Synthetic oligonucleotide
  Antisense strand to SEQ ID NO: 1616815
aagucacugaaccucugcg

SEQ ID NO: 1616817 - RNA, 19 nt, Artificial Sequence
  Description of Artificial Sequence: Synthetic oligonucleotide
  Sense strand starting at position 3613 of SEQ ID NO: 1560676
gaucucuaagcuuguaaga

SEQ ID NO: 1616818 - RNA, 19 nt, Artificial Sequence
  Description of Artificial Sequence: Synthetic oligonucleotide
  Antisense strand to SEQ ID NO: 1616817
ucuuacaagcuuagagauc

SEQ ID NO: 1616819 - RNA, 19 nt, Artificial Sequence
  Description of Artificial Sequence: Synthetic oligonucleotide
  Sense strand starting at position 3657 of SEQ ID NO: 1560676
ggccucuccugagugguau

SEQ ID NO: 1616820 - RNA, 19 nt, Artificial Sequence
  Description of Artificial Sequence: Synthetic oligonucleotide
  Antisense strand to SEQ ID NO: 1616819
auaccacucaggagaggcc

SEQ ID NO: 1616821 - RNA, 19 nt, Artificial Sequence
  Description of Artificial Sequence: Synthetic oligonucleotide
  Sense strand starting at position 3769 of SEQ ID NO: 1560676
uccauugucagagggaagu

SEQ ID NO: 1616822 - RNA, 19 nt, Artificial Sequence
  Description of Artificial Sequence: Synthetic oligonucleotide
  Antisense strand to SEQ ID NO: 1616821
acuucccucugacaaugga

SEQ ID NO: 1616823 - RNA, 19 nt, Artificial Sequence
  Description of Artificial Sequence: Synthetic oligonucleotide
  Sense strand starting at position 3875 of SEQ ID NO: 1560676
gaguauaaguguuucugcu

SEQ ID NO: 1616824 - RNA, 19 nt, Artificial Sequence
  Description of Artificial Sequence: Synthetic oligonucleotide
  Antisense strand to SEQ ID NO: 1616823
agcagaaacacuuauacuc

SEQ ID NO: 1616825 - RNA, 19 nt, Artificial Sequence
  Description of Artificial Sequence: Synthetic oligonucleotide
  Sense strand starting at position 3877 of SEQ ID NO: 1560676
guauaaguguuucugcuau

SEQ ID NO: 1616826 - RNA, 19 nt, Artificial Sequence
  Description of Artificial Sequence: Synthetic oligonucleotide
  Antisense strand to SEQ ID NO: 1616825
auagcagaaacacuuauac

SEQ ID NO: 1616827 - RNA, 19 nt, Artificial Sequence
  Description of Artificial Sequence: Synthetic oligonucleotide
  Sense strand starting at position 3879 of SEQ ID NO: 1560676
auaaguguuucugcuauaa

SEQ ID NO: 1616828 - RNA, 19 nt, Artificial Sequence
  Description of Artificial Sequence: Synthetic oligonucleotide
  Antisense strand to SEQ ID NO: 1616827
uuauagcagaaacacuuau

SEQ ID NO: 1616829 - RNA, 19 nt, Artificial Sequence
  Description of Artificial Sequence: Synthetic oligonucleotide
  Sense strand starting at position 22 of SEQ ID NO: 1560677
agcccaggaguuugaaaua

SEQ ID NO: 1616830 - RNA, 19 nt, Artificial Sequence
  Description of Artificial Sequence: Synthetic oligonucleotide
  Antisense strand to SEQ ID NO: 1616829
uauuucaaacuccugggcu

SEQ ID NO: 1616831 - RNA, 19 nt, Artificial Sequence
  Description of Artificial Sequence: Synthetic oligonucleotide
  Sense strand starting at position 32 of SEQ ID NO: 1560677
uuugaaauauggcccagaa

SEQ ID NO: 1616832 - RNA, 19 nt, Artificial Sequence
  Description of Artificial Sequence: Synthetic oligonucleotide
  Antisense strand to SEQ ID NO: 1616831
uucugggccauauuucaaa

SEQ ID NO: 1616833 - RNA, 19 nt, Artificial Sequence
  Description of Artificial Sequence: Synthetic oligonucleotide
  Sense strand starting at position 150 of SEQ ID NO: 1560677
uuucucuaaccuugguaga

SEQ ID NO: 1616834 - RNA, 19 nt, Artificial Sequence
  Description of Artificial Sequence: Synthetic oligonucleotide
  Antisense strand to SEQ ID NO: 1616833
ucuaccaagguuagagaaa

SEQ ID NO: 1616835 - RNA, 19 nt, Artificial Sequence
  Description of Artificial Sequence: Synthetic oligonucleotide
  Sense strand starting at position 151 of SEQ ID NO: 1560677
uucucuaaccuugguagau

SEQ ID NO: 1616836 - RNA, 19 nt, Artificial Sequence
  Description of Artificial Sequence: Synthetic oligonucleotide
  Antisense strand to SEQ ID NO: 1616835
aucuaccaagguuagagaa

SEQ ID NO: 1616837 - RNA, 19 nt, Artificial Sequence
  Description of Artificial Sequence: Synthetic oligonucleotide
  Sense strand starting at position 152 of SEQ ID NO: 1560677
ucucuaaccuugguagaug

SEQ ID NO: 1616838 - RNA, 19 nt, Artificial Sequence
  Description of Artificial Sequence: Synthetic oligonucleotide
  Antisense strand to SEQ ID NO: 1616837
caucuaccaagguuagaga

SEQ ID NO: 1616839 - RNA, 19 nt, Artificial Sequence
  Description of Artificial Sequence: Synthetic oligonucleotide
  Sense strand starting at position 163 of SEQ ID NO: 1560677
gguagauguccuggagaga

SEQ ID NO: 1616840 - RNA, 19 nt, Artificial Sequence
  Description of Artificial Sequence: Synthetic oligonucleotide
  Antisense strand to SEQ ID NO: 1616839
ucucuccaggacaucuacc

SEQ ID NO: 1616841 - RNA, 19 nt, Artificial Sequence
  Description of Artificial Sequence: Synthetic oligonucleotide
  Sense strand starting at position 208 of SEQ ID NO: 1560677
uccagaguuucugcaaccu

SEQ ID NO: 1616842 - RNA, 19 nt, Artificial Sequence
  Description of Artificial Sequence: Synthetic oligonucleotide
  Antisense strand to SEQ ID NO: 1616841
agguugcagaaacucugga

SEQ ID NO: 1616843 - RNA, 19 nt, Artificial Sequence
  Description of Artificial Sequence: Synthetic oligonucleotide
  Sense strand starting at position 224 of SEQ ID NO: 1560677
ccugcagugguucaagagu

SEQ ID NO: 1616844 - RNA, 19 nt, Artificial Sequence
  Description of Artificial Sequence: Synthetic oligonucleotide
  Antisense strand to SEQ ID NO: 1616843
acucuugaaccacugcagg

SEQ ID NO: 1616845 - RNA, 19 nt, Artificial Sequence
  Description of Artificial Sequence: Synthetic oligonucleotide
  Sense strand starting at position 230 of SEQ ID NO: 1560677
gugguucaagaguaagaau

SEQ ID NO: 1616846 - RNA, 19 nt, Artificial Sequence
  Description of Artificial Sequence: Synthetic oligonucleotide
  Antisense strand to SEQ ID NO: 1616845
auucuuacucuugaaccac

SEQ ID NO: 1616847 - RNA, 19 nt, Artificial Sequence
  Description of Artificial Sequence: Synthetic oligonucleotide
  Sense strand starting at position 511 of SEQ ID NO: 1560677
cagagaucucacggguugu

SEQ ID NO: 1616848 - RNA, 19 nt, Artificial Sequence
  Description of Artificial Sequence: Synthetic oligonucleotide
  Antisense strand to SEQ ID NO: 1616847
acaacccgugagaucucug

SEQ ID NO: 1616849 - RNA, 19 nt, Artificial Sequence
  Description of Artificial Sequence: Synthetic oligonucleotide
  Sense strand starting at position 572 of SEQ ID NO: 1560677
gggagcagaggucauuauu

SEQ ID NO: 1616850 - RNA, 19 nt, Artificial Sequence
  Description of Artificial Sequence: Synthetic oligonucleotide
  Antisense strand to SEQ ID NO: 1616849
aauaaugaccucugcuccc

SEQ ID NO: 1616851 - RNA, 19 nt, Artificial Sequence
  Description of Artificial Sequence: Synthetic oligonucleotide
  Sense strand starting at position 619 of SEQ ID NO: 1560677
cagggaauuuaggaguuua

SEQ ID NO: 1616852 - RNA, 19 nt, Artificial Sequence
  Description of Artificial Sequence: Synthetic oligonucleotide
  Antisense strand to SEQ ID NO: 1616851
uaaacuccuaaauucccug

SEQ ID NO: 1616853 - RNA, 19 nt, Artificial Sequence
  Description of Artificial Sequence: Synthetic oligonucleotide
  Sense strand starting at position 629 of SEQ ID NO: 1560677
aggaguuuauauuaaagga

SEQ ID NO: 1616854 - RNA, 19 nt, Artificial Sequence
  Description of Artificial Sequence: Synthetic oligonucleotide
  Antisense strand to SEQ ID NO: 1616853
uccuuuaauauaaacuccu

SEQ ID NO: 1616855 - RNA, 19 nt, Artificial Sequence
  Description of Artificial Sequence: Synthetic oligonucleotide
  Sense strand starting at position 746 of SEQ ID NO: 1560677
ggguacucuuggucagaaa

SEQ ID NO: 1616856 - RNA, 19 nt, Artificial Sequence
  Description of Artificial Sequence: Synthetic oligonucleotide
  Antisense strand to SEQ ID NO: 1616855
uuucugaccaagaguaccc

SEQ ID NO: 1616857 - RNA, 19 nt, Artificial Sequence
  Description of Artificial Sequence: Synthetic oligonucleotide
  Sense strand starting at position 747 of SEQ ID NO: 1560677
gguacucuuggucagaaau

SEQ ID NO: 1616858 - RNA, 19 nt, Artificial Sequence
  Description of Artificial Sequence: Synthetic oligonucleotide
  Antisense strand to SEQ ID NO: 1616857
auuucugaccaagaguacc

SEQ ID NO: 1616859 - RNA, 19 nt, Artificial Sequence
  Description of Artificial Sequence: Synthetic oligonucleotide
  Sense strand starting at position 881 of SEQ ID NO: 1560677
ucggguuauggugagaaau

SEQ ID NO: 1616860 - RNA, 19 nt, Artificial Sequence
  Description of Artificial Sequence: Synthetic oligonucleotide
  Antisense strand to SEQ ID NO: 1616859
auuucucaccauaacccga

SEQ ID NO: 1616861 - RNA, 19 nt, Artificial Sequence
  Description of Artificial Sequence: Synthetic oligonucleotide
  Sense strand starting at position 887 of SEQ ID NO: 1560677
uauggugagaaauggaagu

SEQ ID NO: 1616862 - RNA, 19 nt, Artificial Sequence
  Description of Artificial Sequence: Synthetic oligonucleotide
  Antisense strand to SEQ ID NO: 1616861
acuuccauuucucaccaua

SEQ ID NO: 1616863 - RNA, 19 nt, Artificial Sequence
  Description of Artificial Sequence: Synthetic oligonucleotide
  Sense strand starting at position 898 of SEQ ID NO: 1560677
auggaaguucaagguuaga

SEQ ID NO: 1616864 - RNA, 19 nt, Artificial Sequence
  Description of Artificial Sequence: Synthetic oligonucleotide
  Antisense strand to SEQ ID NO: 1616863
ucuaaccuugaacuuccau

SEQ ID NO: 1616865 - RNA, 19 nt, Artificial Sequence
  Description of Artificial Sequence: Synthetic oligonucleotide
  Sense strand starting at position 1377 of SEQ ID NO: 1560677
ggauuuccuucugaagggu

SEQ ID NO: 1616866 - RNA, 19 nt, Artificial Sequence
  Description of Artificial Sequence: Synthetic oligonucleotide
  Antisense strand to SEQ ID NO: 1616865
acccuucagaaggaaaucc

SEQ ID NO: 1616867 - RNA, 19 nt, Artificial Sequence
  Description of Artificial Sequence: Synthetic oligonucleotide
  Sense strand starting at position 1400 of SEQ ID NO: 1560677
acaucaucaucugugagga

SEQ ID NO: 1616868 - RNA, 19 nt, Artificial Sequence
  Description of Artificial Sequence: Synthetic oligonucleotide
  Antisense strand to SEQ ID NO: 1616867
uccucacagaugaugaugu

SEQ ID NO: 1616869 - RNA, 19 nt, Artificial Sequence
  Description of Artificial Sequence: Synthetic oligonucleotide
  Sense strand starting at position 1465 of SEQ ID NO: 1560677
aggugaucccaguguccca

SEQ ID NO: 1616870 - RNA, 19 nt, Artificial Sequence
  Description of Artificial Sequence: Synthetic oligonucleotide
  Antisense strand to SEQ ID NO: 1616869
ugggacacugggaucaccu

SEQ ID NO: 1616871 - RNA, 19 nt, Artificial Sequence
  Description of Artificial Sequence: Synthetic oligonucleotide
  Sense strand starting at position 1703 of SEQ ID NO: 1560677
gagggcuugccuuaaaggu

SEQ ID NO: 1616872 - RNA, 19 nt, Artificial Sequence
  Description of Artificial Sequence: Synthetic oligonucleotide
  Antisense strand to SEQ ID NO: 1616871
accuuuaaggcaagcccuc

SEQ ID NO: 1616873 - RNA, 19 nt, Artificial Sequence
  Description of Artificial Sequence: Synthetic oligonucleotide
  Sense strand starting at position 1796 of SEQ ID NO: 1560677
cgcuguagcaggucauagu

SEQ ID NO: 1616874 - RNA, 19 nt, Artificial Sequence
  Description of Artificial Sequence: Synthetic oligonucleotide
  Antisense strand to SEQ ID NO: 1616873
acuaugaccugcuacagcg

SEQ ID NO: 1616875 - RNA, 19 nt, Artificial Sequence
  Description of Artificial Sequence: Synthetic oligonucleotide
  Sense strand starting at position 2128 of SEQ ID NO: 1560677
gcuggauguaaaugugaug

SEQ ID NO: 1616876 - RNA, 19 nt, Artificial Sequence
  Description of Artificial Sequence: Synthetic oligonucleotide
  Antisense strand to SEQ ID NO: 1616875
caucacauuuacauccagc

SEQ ID NO: 1616877 - RNA, 19 nt, Artificial Sequence
  Description of Artificial Sequence: Synthetic oligonucleotide
  Sense strand starting at position 2135 of SEQ ID NO: 1560677
guaaaugugaugcaaauga

SEQ ID NO: 1616878 - RNA, 19 nt, Artificial Sequence
  Description of Artificial Sequence: Synthetic oligonucleotide
  Antisense strand to SEQ ID NO: 1616877
ucauuugcaucacauuuac

SEQ ID NO: 1616879 - RNA, 19 nt, Artificial Sequence
  Description of Artificial Sequence: Synthetic oligonucleotide
  Sense strand starting at position 2142 of SEQ ID NO: 1560677
ugaugcaaaugaucuuaau

SEQ ID NO: 1616880 - RNA, 19 nt, Artificial Sequence
  Description of Artificial Sequence: Synthetic oligonucleotide
  Antisense strand to SEQ ID NO: 1616879
auuaagaucauuugcauca

SEQ ID NO: 1616881 - RNA, 19 nt, Artificial Sequence
  Description of Artificial Sequence: Synthetic oligonucleotide
  Sense strand starting at position 2208 of SEQ ID NO: 1560677
cuagguagugucuaaaccu

SEQ ID NO: 1616882 - RNA, 19 nt, Artificial Sequence
  Description of Artificial Sequence: Synthetic oligonucleotide
  Antisense strand to SEQ ID NO: 1616881
agguuuagacacuaccuag

SEQ ID NO: 1616883 - RNA, 19 nt, Artificial Sequence
  Description of Artificial Sequence: Synthetic oligonucleotide
  Sense strand starting at position 2651 of SEQ ID NO: 1560677
agggcugagacuugaaacu

SEQ ID NO: 1616884 - RNA, 19 nt, Artificial Sequence
  Description of Artificial Sequence: Synthetic oligonucleotide
  Antisense strand to SEQ ID NO: 1616883
aguuucaagucucagcccu

SEQ ID NO: 1616885 - RNA, 19 nt, Artificial Sequence
  Description of Artificial Sequence: Synthetic oligonucleotide
  Sense strand starting at position 2844 of SEQ ID NO: 1560677
gggugcuucccggugaguu

SEQ ID NO: 1616886 - RNA, 19 nt, Artificial Sequence
  Description of Artificial Sequence: Synthetic oligonucleotide
  Antisense strand to SEQ ID NO: 1616885
aacucaccgggaagcaccc

SEQ ID NO: 1616887 - RNA, 19 nt, Artificial Sequence
  Description of Artificial Sequence: Synthetic oligonucleotide
  Sense strand starting at position 3280 of SEQ ID NO: 1560677
aggguaucgacaggucuga

SEQ ID NO: 1616888 - RNA, 19 nt, Artificial Sequence
  Description of Artificial Sequence: Synthetic oligonucleotide
  Antisense strand to SEQ ID NO: 1616887
ucagaccugucgauacccu

SEQ ID NO: 1616889 - RNA, 19 nt, Artificial Sequence
  Description of Artificial Sequence: Synthetic oligonucleotide
  Sense strand starting at position 3598 of SEQ ID NO: 1560677
gagagaaucuugguaccac

SEQ ID NO: 1616890 - RNA, 19 nt, Artificial Sequence
  Description of Artificial Sequence: Synthetic oligonucleotide
  Antisense strand to SEQ ID NO: 1616889
gugguaccaagauucucuc

SEQ ID NO: 1616891 - RNA, 19 nt, Artificial Sequence
  Description of Artificial Sequence: Synthetic oligonucleotide
  Sense strand starting at position 3616 of SEQ ID NO: 1560677
cucagucucuucguaaauu

SEQ ID NO: 1616892 - RNA, 19 nt, Artificial Sequence
  Description of Artificial Sequence: Synthetic oligonucleotide
  Antisense strand to SEQ ID NO: 1616891
aauuuacgaagagacugag

SEQ ID NO: 1616893 - RNA, 19 nt, Artificial Sequence
  Description of Artificial Sequence: Synthetic oligonucleotide
  Sense strand starting at position 3627 of SEQ ID NO: 1560677
cguaaauugccuuaagguu

SEQ ID NO: 1616894 - RNA, 19 nt, Artificial Sequence
  Description of Artificial Sequence: Synthetic oligonucleotide
  Antisense strand to SEQ ID NO: 1616893
aaccuuaaggcaauuuacg

SEQ ID NO: 1616895 - RNA, 19 nt, Artificial Sequence
  Description of Artificial Sequence: Synthetic oligonucleotide
  Sense strand starting at position 3663 of SEQ ID NO: 1560677
uccuuugagugccucuuaa

SEQ ID NO: 1616896 - RNA, 19 nt, Artificial Sequence
  Description of Artificial Sequence: Synthetic oligonucleotide
  Antisense strand to SEQ ID NO: 1616895
uuaagaggcacucaaagga

SEQ ID NO: 1616897 - RNA, 19 nt, Artificial Sequence
  Description of Artificial Sequence: Synthetic oligonucleotide
  Sense strand starting at position 3716 of SEQ ID NO: 1560677
uccacacguuuacugaaau

SEQ ID NO: 1616898 - RNA, 19 nt, Artificial Sequence
  Description of Artificial Sequence: Synthetic oligonucleotide
  Antisense strand to SEQ ID NO: 1616897
auuucaguaaacgugugga

SEQ ID NO: 1616899 - RNA, 19 nt, Artificial Sequence
  Description of Artificial Sequence: Synthetic oligonucleotide
  Sense strand starting at position 3806 of SEQ ID NO: 1560677
ugaguucccuuuccauaag

SEQ ID NO: 1616900 - RNA, 19 nt, Artificial Sequence
  Description of Artificial Sequence: Synthetic oligonucleotide
  Antisense strand to SEQ ID NO: 1616899
cuuauggaaagggaacuca

SEQ ID NO: 1616901 - RNA, 19 nt, Artificial Sequence
  Description of Artificial Sequence: Synthetic oligonucleotide
  Sense strand starting at position 3809 of SEQ ID NO: 1560677
guucccuuuccauaaggga

SEQ ID NO: 1616902 - RNA, 19 nt, Artificial Sequence
  Description of Artificial Sequence: Synthetic oligonucleotide
  Antisense strand to SEQ ID NO: 1616901
ucccuuauggaaagggaac

SEQ ID NO: 1616903 - RNA, 19 nt, Artificial Sequence
  Description of Artificial Sequence: Synthetic oligonucleotide
  Sense strand starting at position 3846 of SEQ ID NO: 1560677
cagcgauagccgggagaga

SEQ ID NO: 1616904 - RNA, 19 nt, Artificial Sequence
  Description of Artificial Sequence: Synthetic oligonucleotide
  Antisense strand to SEQ ID NO: 1616903
ucucucccggcuaucgcug

SEQ ID NO: 1616905 - RNA, 19 nt, Artificial Sequence
  Description of Artificial Sequence: Synthetic oligonucleotide
  Sense strand starting at position 3847 of SEQ ID NO: 1560677
agcgauagccgggagagau

SEQ ID NO: 1616906 - RNA, 19 nt, Artificial Sequence
  Description of Artificial Sequence: Synthetic oligonucleotide
  Antisense strand to SEQ ID NO: 1616905
aucucucccggcuaucgcu

SEQ ID NO: 1616907 - RNA, 19 nt, Artificial Sequence
  Description of Artificial Sequence: Synthetic oligonucleotide
  Sense strand starting at position 3895 of SEQ ID NO: 1560677
gaguguucagguggacaug

SEQ ID NO: 1616908 - RNA, 19 nt, Artificial Sequence
  Description of Artificial Sequence: Synthetic oligonucleotide
  Antisense strand to SEQ ID NO: 1616907
cauguccaccugaacacuc

SEQ ID NO: 1616909 - RNA, 19 nt, Artificial Sequence
  Description of Artificial Sequence: Synthetic oligonucleotide
  Sense strand starting at position 189 of SEQ ID NO: 1560678
ggagauagaucucauugag

SEQ ID NO: 1616910 - RNA, 19 nt, Artificial Sequence
  Description of Artificial Sequence: Synthetic oligonucleotide
  Antisense strand to SEQ ID NO: 1616909
cucaaugagaucuaucucc

SEQ ID NO: 1616911 - RNA, 19 nt, Artificial Sequence
  Description of Artificial Sequence: Synthetic oligonucleotide
  Sense strand starting at position 192 of SEQ ID NO: 1560678
gauagaucucauugagucu

SEQ ID NO: 1616912 - RNA, 19 nt, Artificial Sequence
  Description of Artificial Sequence: Synthetic oligonucleotide
  Antisense strand to SEQ ID NO: 1616911
agacucaaugagaucuauc

SEQ ID NO: 1616913 - RNA, 19 nt, Artificial Sequence
  Description of Artificial Sequence: Synthetic oligonucleotide
  Sense strand starting at position 309 of SEQ ID NO: 1560678
gugucagaauuugaacuua

SEQ ID NO: 1616914 - RNA, 19 nt, Artificial Sequence
  Description of Artificial Sequence: Synthetic oligonucleotide
  Antisense strand to SEQ ID NO: 1616913
uaaguucaaauucugacac

SEQ ID NO: 1616915 - RNA, 19 nt, Artificial Sequence
  Description of Artificial Sequence: Synthetic oligonucleotide
  Sense strand starting at position 360 of SEQ ID NO: 1560678
agaccuggguucuuuaacu

SEQ ID NO: 1616916 - RNA, 19 nt, Artificial Sequence
  Description of Artificial Sequence: Synthetic oligonucleotide
  Antisense strand to SEQ ID NO: 1616915
aguuaaagaacccaggucu

SEQ ID NO: 1616917 - RNA, 19 nt, Artificial Sequence
  Description of Artificial Sequence: Synthetic oligonucleotide
  Sense strand starting at position 440 of SEQ ID NO: 1560678
ugggccucauucuaaugau

SEQ ID NO: 1616918 - RNA, 19 nt, Artificial Sequence
  Description of Artificial Sequence: Synthetic oligonucleotide
  Antisense strand to SEQ ID NO: 1616917
aucauuagaaugaggccca

SEQ ID NO: 1616919 - RNA, 19 nt, Artificial Sequence
  Description of Artificial Sequence: Synthetic oligonucleotide
  Sense strand starting at position 443 of SEQ ID NO: 1560678
gccucauucuaaugaugga

SEQ ID NO: 1616920 - RNA, 19 nt, Artificial Sequence
  Description of Artificial Sequence: Synthetic oligonucleotide
  Antisense strand to SEQ ID NO: 1616919
uccaucauuagaaugaggc

SEQ ID NO: 1616921 - RNA, 19 nt, Artificial Sequence
  Description of Artificial Sequence: Synthetic oligonucleotide
  Sense strand starting at position 684 of SEQ ID NO: 1560678
cucucucagccucaguauu

SEQ ID NO: 1616922 - RNA, 19 nt, Artificial Sequence
  Description of Artificial Sequence: Synthetic oligonucleotide
  Antisense strand to SEQ ID NO: 1616921
aauacugaggcugagagag

SEQ ID NO: 1616923 - RNA, 19 nt, Artificial Sequence
  Description of Artificial Sequence: Synthetic oligonucleotide
  Sense strand starting at position 686 of SEQ ID NO: 1560678
cucucagccucaguauuau

SEQ ID NO: 1616924 - RNA, 19 nt, Artificial Sequence
  Description of Artificial Sequence: Synthetic oligonucleotide
  Antisense strand to SEQ ID NO: 1616923
auaauacugaggcugagag

SEQ ID NO: 1616925 - RNA, 19 nt, Artificial Sequence
  Description of Artificial Sequence: Synthetic oligonucleotide
  Sense strand starting at position 923 of SEQ ID NO: 1560678
guaggaaucgcuugaaucu

SEQ ID NO: 1616926 - RNA, 19 nt, Artificial Sequence
  Description of Artificial Sequence: Synthetic oligonucleotide
  Antisense strand to SEQ ID NO: 1616925
agauucaagcgauuccuac

SEQ ID NO: 1616927 - RNA, 19 nt, Artificial Sequence
  Description of Artificial Sequence: Synthetic oligonucleotide
  Sense strand starting at position 1034 of SEQ ID NO: 1560678
gagucauaaugauauguag

SEQ ID NO: 1616928 - RNA, 19 nt, Artificial Sequence
  Description of Artificial Sequence: Synthetic oligonucleotide
  Antisense strand to SEQ ID NO: 1616927
cuacauaucauuaugacuc

SEQ ID NO: 1616929 - RNA, 19 nt, Artificial Sequence
  Description of Artificial Sequence: Synthetic oligonucleotide
  Sense strand starting at position 1036 of SEQ ID NO: 1560678
gucauaaugauauguaguu

SEQ ID NO: 1616930 - RNA, 19 nt, Artificial Sequence
  Description of Artificial Sequence: Synthetic oligonucleotide
  Antisense strand to SEQ ID NO: 1616929
aacuacauaucauuaugac

SEQ ID NO: 1616931 - RNA, 19 nt, Artificial Sequence
  Description of Artificial Sequence: Synthetic oligonucleotide
  Sense strand starting at position 1117 of SEQ ID NO: 1560678
agcuuacagaguuguugau

SEQ ID NO: 1616932 - RNA, 19 nt, Artificial Sequence
  Description of Artificial Sequence: Synthetic oligonucleotide
  Antisense strand to SEQ ID NO: 1616931
aucaacaacucuguaagcu

SEQ ID NO: 1616933 - RNA, 19 nt, Artificial Sequence
  Description of Artificial Sequence: Synthetic oligonucleotide
  Sense strand starting at position 1119 of SEQ ID NO: 1560678
cuuacagaguuguugauga

SEQ ID NO: 1616934 - RNA, 19 nt, Artificial Sequence
  Description of Artificial Sequence: Synthetic oligonucleotide
  Antisense strand to SEQ ID NO: 1616933
ucaucaacaacucuguaag

SEQ ID NO: 1616935 - RNA, 19 nt, Artificial Sequence
  Description of Artificial Sequence: Synthetic oligonucleotide
  Sense strand starting at position 1123 of SEQ ID NO: 1560678
cagaguuguugaugagagg

SEQ ID NO: 1616936 - RNA, 19 nt, Artificial Sequence
  Description of Artificial Sequence: Synthetic oligonucleotide
  Antisense strand to SEQ ID NO: 1616935
ccucucaucaacaacucug

SEQ ID NO: 1616937 - RNA, 19 nt, Artificial Sequence
  Description of Artificial Sequence: Synthetic oligonucleotide
  Sense strand starting at position 1124 of SEQ ID NO: 1560678
agaguuguugaugagaggu

SEQ ID NO: 1616938 - RNA, 19 nt, Artificial Sequence
  Description of Artificial Sequence: Synthetic oligonucleotide
  Antisense strand to SEQ ID NO: 1616937
accucucaucaacaacucu

SEQ ID NO: 1616939 - RNA, 19 nt, Artificial Sequence
  Description of Artificial Sequence: Synthetic oligonucleotide
  Sense strand starting at position 1126 of SEQ ID NO: 1560678
aguuguugaugagagguca

SEQ ID NO: 1616940 - RNA, 19 nt, Artificial Sequence
  Description of Artificial Sequence: Synthetic oligonucleotide
  Antisense strand to SEQ ID NO: 1616939
ugaccucucaucaacaacu

SEQ ID NO: 1616941 - RNA, 19 nt, Artificial Sequence
  Description of Artificial Sequence: Synthetic oligonucleotide
  Sense strand starting at position 1204 of SEQ ID NO: 1560678
ggguaaauguggagguugu

SEQ ID NO: 1616942 - RNA, 19 nt, Artificial Sequence
  Description of Artificial Sequence: Synthetic oligonucleotide
  Antisense strand to SEQ ID NO: 1616941
acaaccuccacauuuaccc

SEQ ID NO: 1616943 - RNA, 19 nt, Artificial Sequence
  Description of Artificial Sequence: Synthetic oligonucleotide
  Sense strand starting at position 1205 of SEQ ID NO: 1560678
gguaaauguggagguuguu

SEQ ID NO: 1616944 - RNA, 19 nt, Artificial Sequence
  Description of Artificial Sequence: Synthetic oligonucleotide
  Antisense strand to SEQ ID NO: 1616943
aacaaccuccacauuuacc

SEQ ID NO: 1616945 - RNA, 19 nt, Artificial Sequence
  Description of Artificial Sequence: Synthetic oligonucleotide
  Sense strand starting at position 1208 of SEQ ID NO: 1560678
aaauguggagguuguuauu

SEQ ID NO: 1616946 - RNA, 19 nt, Artificial Sequence
  Description of Artificial Sequence: Synthetic oligonucleotide
  Antisense strand to SEQ ID NO: 1616945
aauaacaaccuccacauuu

SEQ ID NO: 1616947 - RNA, 19 nt, Artificial Sequence
  Description of Artificial Sequence: Synthetic oligonucleotide
  Sense strand starting at position 1367 of SEQ ID NO: 1560678
ccaccuacucaguaugguu

SEQ ID NO: 1616948 - RNA, 19 nt, Artificial Sequence
  Description of Artificial Sequence: Synthetic oligonucleotide
  Antisense strand to SEQ ID NO: 1616947
aaccauacugaguaggugg

SEQ ID NO: 1616949 - RNA, 19 nt, Artificial Sequence
  Description of Artificial Sequence: Synthetic oligonucleotide
  Sense strand starting at position 1478 of SEQ ID NO: 1560678
caaaguggcugggucauua

SEQ ID NO: 1616950 - RNA, 19 nt, Artificial Sequence
  Description of Artificial Sequence: Synthetic oligonucleotide
  Antisense strand to SEQ ID NO: 1616949
uaaugacccagccacuuug

SEQ ID NO: 1616951 - RNA, 19 nt, Artificial Sequence
  Description of Artificial Sequence: Synthetic oligonucleotide
  Sense strand starting at position 1482 of SEQ ID NO: 1560678
guggcugggucauuauauu

SEQ ID NO: 1616952 - RNA, 19 nt, Artificial Sequence
  Description of Artificial Sequence: Synthetic oligonucleotide
  Antisense strand to SEQ ID NO: 1616951
aauauaaugacccagccac

SEQ ID NO: 1616953 - RNA, 19 nt, Artificial Sequence
  Description of Artificial Sequence: Synthetic oligonucleotide
  Sense strand starting at position 1488 of SEQ ID NO: 1560678
gggucauuauauuauaacu

SEQ ID NO: 1616954 - RNA, 19 nt, Artificial Sequence
  Description of Artificial Sequence: Synthetic oligonucleotide
  Antisense strand to SEQ ID NO: 1616953
aguuauaauauaaugaccc

SEQ ID NO: 1616955 - RNA, 19 nt, Artificial Sequence
  Description of Artificial Sequence: Synthetic oligonucleotide
  Sense strand starting at position 2267 of SEQ ID NO: 1560678
cggccagcguccucuaaua

SEQ ID NO: 1616956 - RNA, 19 nt, Artificial Sequence
  Description of Artificial Sequence: Synthetic oligonucleotide
  Antisense strand to SEQ ID NO: 1616955
uauuagaggacgcuggccg

SEQ ID NO: 1616957 - RNA, 19 nt, Artificial Sequence
  Description of Artificial Sequence: Synthetic oligonucleotide
  Sense strand starting at position 2269 of SEQ ID NO: 1560678
gccagcguccucuaauaaa

SEQ ID NO: 1616958 - RNA, 19 nt, Artificial Sequence
  Description of Artificial Sequence: Synthetic oligonucleotide
  Antisense strand to SEQ ID NO: 1616957
uuuauuagaggacgcuggc

SEQ ID NO: 1616959 - RNA, 19 nt, Artificial Sequence
  Description of Artificial Sequence: Synthetic oligonucleotide
  Sense strand starting at position 2272 of SEQ ID NO: 1560678
agcguccucuaauaaauaa

SEQ ID NO: 1616960 - RNA, 19 nt, Artificial Sequence
  Description of Artificial Sequence: Synthetic oligonucleotide
  Antisense strand to SEQ ID NO: 1616959
uuauuuauuagaggacgcu

SEQ ID NO: 1616961 - RNA, 19 nt, Artificial Sequence
  Description of Artificial Sequence: Synthetic oligonucleotide
  Sense strand starting at position 2431 of SEQ ID NO: 1560678
gaguucccgucucuacaaa

SEQ ID NO: 1616962 - RNA, 19 nt, Artificial Sequence
  Description of Artificial Sequence: Synthetic oligonucleotide
  Antisense strand to SEQ ID NO: 1616961
uuuguagagacgggaacuc

SEQ ID NO: 1616963 - RNA, 19 nt, Artificial Sequence
  Description of Artificial Sequence: Synthetic oligonucleotide
  Sense strand starting at position 3036 of SEQ ID NO: 1560678
auguaauucccagagccca

SEQ ID NO: 1616964 - RNA, 19 nt, Artificial Sequence
  Description of Artificial Sequence: Synthetic oligonucleotide
  Antisense strand to SEQ ID NO: 1616963
ugggcucugggaauuacau

SEQ ID NO: 1616965 - RNA, 19 nt, Artificial Sequence
  Description of Artificial Sequence: Synthetic oligonucleotide
  Sense strand starting at position 3390 of SEQ ID NO: 1560678
gugagucaugucugcaauc

SEQ ID NO: 1616966 - RNA, 19 nt, Artificial Sequence
  Description of Artificial Sequence: Synthetic oligonucleotide
  Antisense strand to SEQ ID NO: 1616965
gauugcagacaugacucac

SEQ ID NO: 1616967 - RNA, 19 nt, Artificial Sequence
  Description of Artificial Sequence: Synthetic oligonucleotide
  Sense strand starting at position 3438 of SEQ ID NO: 1560678
gucucuugggucuaggagu

SEQ ID NO: 1616968 - RNA, 19 nt, Artificial Sequence
  Description of Artificial Sequence: Synthetic oligonucleotide
  Antisense strand to SEQ ID NO: 1616967
acuccuagacccaagagac

SEQ ID NO: 1616969 - RNA, 19 nt, Artificial Sequence
  Description of Artificial Sequence: Synthetic oligonucleotide
  Sense strand starting at position 3446 of SEQ ID NO: 1560678
ggucuaggagucugagauc

SEQ ID NO: 1616970 - RNA, 19 nt, Artificial Sequence
  Description of Artificial Sequence: Synthetic oligonucleotide
  Antisense strand to SEQ ID NO: 1616969
gaucucagacuccuagacc

SEQ ID NO: 1616971 - RNA, 19 nt, Artificial Sequence
  Description of Artificial Sequence: Synthetic oligonucleotide
  Sense strand starting at position 3449 of SEQ ID NO: 1560678
cuaggagucugagaucagu

SEQ ID NO: 1616972 - RNA, 19 nt, Artificial Sequence
  Description of Artificial Sequence: Synthetic oligonucleotide
  Antisense strand to SEQ ID NO: 1616971
acugaucucagacuccuag

SEQ ID NO: 1616973 - RNA, 19 nt, Artificial Sequence
  Description of Artificial Sequence: Synthetic oligonucleotide
  Sense strand starting at position 3732 of SEQ ID NO: 1560678
agucucucuuucuggaaca

SEQ ID NO: 1616974 - RNA, 19 nt, Artificial Sequence
  Description of Artificial Sequence: Synthetic oligonucleotide
  Antisense strand to SEQ ID NO: 1616973
uguuccagaaagagagacu

SEQ ID NO: 1616975 - RNA, 19 nt, Artificial Sequence
  Description of Artificial Sequence: Synthetic oligonucleotide
  Sense strand starting at position 3733 of SEQ ID NO: 1560678
gucucucuuucuggaacau

SEQ ID NO: 1616976 - RNA, 19 nt, Artificial Sequence
  Description of Artificial Sequence: Synthetic oligonucleotide
  Antisense strand to SEQ ID NO: 1616975
auguuccagaaagagagac

SEQ ID NO: 1616977 - RNA, 19 nt, Artificial Sequence
  Description of Artificial Sequence: Synthetic oligonucleotide
  Sense strand starting at position 3827 of SEQ ID NO: 1560678
uuccauugcuauuugucua

SEQ ID NO: 1616978 - RNA, 19 nt, Artificial Sequence
  Description of Artificial Sequence: Synthetic oligonucleotide
  Antisense strand to SEQ ID NO: 1616977
uagacaaauagcaauggaa

SEQ ID NO: 1616979 - RNA, 19 nt, Artificial Sequence
  Description of Artificial Sequence: Synthetic oligonucleotide
  Sense strand starting at position 3862 of SEQ ID NO: 1560678
uugcauuuguggcaggaaa

SEQ ID NO: 1616980 - RNA, 19 nt, Artificial Sequence
  Description of Artificial Sequence: Synthetic oligonucleotide
  Antisense strand to SEQ ID NO: 1616979
uuuccugccacaaaugcaa

SEQ ID NO: 1616981 - RNA, 19 nt, Artificial Sequence
  Description of Artificial Sequence: Synthetic oligonucleotide
  Sense strand starting at position 3926 of SEQ ID NO: 1560678
uccacuaucgauugugcua

SEQ ID NO: 1616982 - RNA, 19 nt, Artificial Sequence
  Description of Artificial Sequence: Synthetic oligonucleotide
  Antisense strand to SEQ ID NO: 1616981
uagcacaaucgauagugga

SEQ ID NO: 1616983 - RNA, 19 nt, Artificial Sequence
  Description of Artificial Sequence: Synthetic oligonucleotide
  Sense strand starting at position 3931 of SEQ ID NO: 1560678
uaucgauugugcuaacuug

SEQ ID NO: 1616984 - RNA, 19 nt, Artificial Sequence
  Description of Artificial Sequence: Synthetic oligonucleotide
  Antisense strand to SEQ ID NO: 1616983
caaguuagcacaaucgaua

SEQ ID NO: 1616985 - RNA, 19 nt, Artificial Sequence
  Description of Artificial Sequence: Synthetic oligonucleotide
  Sense strand starting at position 3952 of SEQ ID NO: 1560678
ucaaauggugucugccagu

SEQ ID NO: 1616986 - RNA, 19 nt, Artificial Sequence
  Description of Artificial Sequence: Synthetic oligonucleotide
  Antisense strand to SEQ ID NO: 1616985
acuggcagacaccauuuga

SEQ ID NO: 1616987 - RNA, 19 nt, Artificial Sequence
  Description of Artificial Sequence: Synthetic oligonucleotide
  Sense strand starting at position 3978 of SEQ ID NO: 1560678
gugugagguuaguauguua

SEQ ID NO: 1616988 - RNA, 19 nt, Artificial Sequence
  Description of Artificial Sequence: Synthetic oligonucleotide
  Antisense strand to SEQ ID NO: 1616987
uaacauacuaaccucacac

SEQ ID NO: 1616989 - RNA, 19 nt, Artificial Sequence
  Description of Artificial Sequence: Synthetic oligonucleotide
  Sense strand starting at position 182 of SEQ ID NO: 1560679
ugggcaggucuuuggaagu

SEQ ID NO: 1616990 - RNA, 19 nt, Artificial Sequence
  Description of Artificial Sequence: Synthetic oligonucleotide
  Antisense strand to SEQ ID NO: 1616989
acuuccaaagaccugccca

SEQ ID NO: 1616991 - RNA, 19 nt, Artificial Sequence
  Description of Artificial Sequence: Synthetic oligonucleotide
  Sense strand starting at position 188 of SEQ ID NO: 1560679
ggucuuuggaagugaucag

SEQ ID NO: 1616992 - RNA, 19 nt, Artificial Sequence
  Description of Artificial Sequence: Synthetic oligonucleotide
  Antisense strand to SEQ ID NO: 1616991
cugaucacuuccaaagacc

SEQ ID NO: 1616993 - RNA, 19 nt, Artificial Sequence
  Description of Artificial Sequence: Synthetic oligonucleotide
  Sense strand starting at position 189 of SEQ ID NO: 1560679
gucuuuggaagugaucagu

SEQ ID NO: 1616994 - RNA, 19 nt, Artificial Sequence
  Description of Artificial Sequence: Synthetic oligonucleotide
  Antisense strand to SEQ ID NO: 1616993
acugaucacuuccaaagac

SEQ ID NO: 1616995 - RNA, 19 nt, Artificial Sequence
  Description of Artificial Sequence: Synthetic oligonucleotide
  Sense strand starting at position 195 of SEQ ID NO: 1560679
ggaagugaucagugaucag

SEQ ID NO: 1616996 - RNA, 19 nt, Artificial Sequence
  Description of Artificial Sequence: Synthetic oligonucleotide
  Antisense strand to SEQ ID NO: 1616995
cugaucacugaucacuucc

SEQ ID NO: 1616997 - RNA, 19 nt, Artificial Sequence
  Description of Artificial Sequence: Synthetic oligonucleotide
  Sense strand starting at position 198 of SEQ ID NO: 1560679
agugaucagugaucagaga

SEQ ID NO: 1616998 - RNA, 19 nt, Artificial Sequence
  Description of Artificial Sequence: Synthetic oligonucleotide
  Antisense strand to SEQ ID NO: 1616997
ucucugaucacugaucacu

SEQ ID NO: 1616999 - RNA, 19 nt, Artificial Sequence
  Description of Artificial Sequence: Synthetic oligonucleotide
  Sense strand starting at position 425 of SEQ ID NO: 1560679
guaggaacuucuugggcaa

SEQ ID NO: 1617000 - RNA, 19 nt, Artificial Sequence
  Description of Artificial Sequence: Synthetic oligonucleotide
  Antisense strand to SEQ ID NO: 1616999
uugcccaagaaguuccuac

SEQ ID NO: 1617001 - RNA, 19 nt, Artificial Sequence
  Description of Artificial Sequence: Synthetic oligonucleotide
  Sense strand starting at position 428 of SEQ ID NO: 1560679
ggaacuucuugggcaagga

SEQ ID NO: 1617002 - RNA, 19 nt, Artificial Sequence
  Description of Artificial Sequence: Synthetic oligonucleotide
  Antisense strand to SEQ ID NO: 1617001
uccuugcccaagaaguucc

SEQ ID NO: 1617003 - RNA, 19 nt, Artificial Sequence
  Description of Artificial Sequence: Synthetic oligonucleotide
  Sense strand starting at position 567 of SEQ ID NO: 1560679
gcuucagguccaggaguuu

SEQ ID NO: 1617004 - RNA, 19 nt, Artificial Sequence
  Description of Artificial Sequence: Synthetic oligonucleotide
  Antisense strand to SEQ ID NO: 1617003
aaacuccuggaccugaagc

SEQ ID NO: 1617005 - RNA, 19 nt, Artificial Sequence
  Description of Artificial Sequence: Synthetic oligonucleotide
  Sense strand starting at position 730 of SEQ ID NO: 1560679
gucugaguuuggccuagca

SEQ ID NO: 1617006 - RNA, 19 nt, Artificial Sequence
  Description of Artificial Sequence: Synthetic oligonucleotide
  Antisense strand to SEQ ID NO: 1617005
ugcuaggccaaacucagac

SEQ ID NO: 1617007 - RNA, 19 nt, Artificial Sequence
  Description of Artificial Sequence: Synthetic oligonucleotide
  Sense strand starting at position 832 of SEQ ID NO: 1560679
ugguccagggccuagaaau

SEQ ID NO: 1617008 - RNA, 19 nt, Artificial Sequence
  Description of Artificial Sequence: Synthetic oligonucleotide
  Antisense strand to SEQ ID NO: 1617007
auuucuaggcccuggacca

SEQ ID NO: 1617009 - RNA, 19 nt, Artificial Sequence
  Description of Artificial Sequence: Synthetic oligonucleotide
  Sense strand starting at position 2141 of SEQ ID NO: 1560679
gcguguucucgcccgagac

SEQ ID NO: 1617010 - RNA, 19 nt, Artificial Sequence
  Description of Artificial Sequence: Synthetic oligonucleotide
  Antisense strand to SEQ ID NO: 1617009
gucucgggcgagaacacgc

SEQ ID NO: 1617011 - RNA, 19 nt, Artificial Sequence
  Description of Artificial Sequence: Synthetic oligonucleotide
  Sense strand starting at position 2143 of SEQ ID NO: 1560679
guguucucgcccgagacga

SEQ ID NO: 1617012 - RNA, 19 nt, Artificial Sequence
  Description of Artificial Sequence: Synthetic oligonucleotide
  Antisense strand to SEQ ID NO: 1617011
ucgucucgggcgagaacac

SEQ ID NO: 1617013 - RNA, 19 nt, Artificial Sequence
  Description of Artificial Sequence: Synthetic oligonucleotide
  Sense strand starting at position 2435 of SEQ ID NO: 1560679
cgcagagaucugugaagag

SEQ ID NO: 1617014 - RNA, 19 nt, Artificial Sequence
  Description of Artificial Sequence: Synthetic oligonucleotide
  Antisense strand to SEQ ID NO: 1617013
cucuucacagaucucugcg

SEQ ID NO: 1617015 - RNA, 19 nt, Artificial Sequence
  Description of Artificial Sequence: Synthetic oligonucleotide
  Sense strand starting at position 2813 of SEQ ID NO: 1560679
aaggaagaauccguguguu

SEQ ID NO: 1617016 - RNA, 19 nt, Artificial Sequence
  Description of Artificial Sequence: Synthetic oligonucleotide
  Antisense strand to SEQ ID NO: 1617015
aacacacggauucuuccuu

SEQ ID NO: 1617017 - RNA, 19 nt, Artificial Sequence
  Description of Artificial Sequence: Synthetic oligonucleotide
  Sense strand starting at position 2816 of SEQ ID NO: 1560679
gaagaauccguguguugcu

SEQ ID NO: 1617018 - RNA, 19 nt, Artificial Sequence
  Description of Artificial Sequence: Synthetic oligonucleotide
  Antisense strand to SEQ ID NO: 1617017
agcaacacacggauucuuc

SEQ ID NO: 1617019 - RNA, 19 nt, Artificial Sequence
  Description of Artificial Sequence: Synthetic oligonucleotide
  Sense strand starting at position 3008 of SEQ ID NO: 1560679
auagucuuggccugggagu

SEQ ID NO: 1617020 - RNA, 19 nt, Artificial Sequence
  Description of Artificial Sequence: Synthetic oligonucleotide
  Antisense strand to SEQ ID NO: 1617019
acucccaggccaagacuau

SEQ ID NO: 1617021 - RNA, 19 nt, Artificial Sequence
  Description of Artificial Sequence: Synthetic oligonucleotide
  Sense strand starting at position 3061 of SEQ ID NO: 1560679
ucuucuaucugaggcuuau

SEQ ID NO: 1617022 - RNA, 19 nt, Artificial Sequence
  Description of Artificial Sequence: Synthetic oligonucleotide
  Antisense strand to SEQ ID NO: 1617021
auaagccucagauagaaga

SEQ ID NO: 1617023 - RNA, 19 nt, Artificial Sequence
  Description of Artificial Sequence: Synthetic oligonucleotide
  Sense strand starting at position 3133 of SEQ ID NO: 1560679
gagcgagcugauuguuaug

SEQ ID NO: 1617024 - RNA, 19 nt, Artificial Sequence
  Description of Artificial Sequence: Synthetic oligonucleotide
  Antisense strand to SEQ ID NO: 1617023
cauaacaaucagcucgcuc

SEQ ID NO: 1617025 - RNA, 19 nt, Artificial Sequence
  Description of Artificial Sequence: Synthetic oligonucleotide
  Sense strand starting at position 3143 of SEQ ID NO: 1560679
auuguuaugucucaggaau

SEQ ID NO: 1617026 - RNA, 19 nt, Artificial Sequence
  Description of Artificial Sequence: Synthetic oligonucleotide
  Antisense strand to SEQ ID NO: 1617025
auuccugagacauaacaau

SEQ ID NO: 1617027 - RNA, 19 nt, Artificial Sequence
  Description of Artificial Sequence: Synthetic oligonucleotide
  Sense strand starting at position 3145 of SEQ ID NO: 1560679
uguuaugucucaggaauuu

SEQ ID NO: 1617028 - RNA, 19 nt, Artificial Sequence
  Description of Artificial Sequence: Synthetic oligonucleotide
  Antisense strand to SEQ ID NO: 1617027
aaauuccugagacauaaca

SEQ ID NO: 1617029 - RNA, 19 nt, Artificial Sequence
  Description of Artificial Sequence: Synthetic oligonucleotide
  Sense strand starting at position 3162 of SEQ ID NO: 1560679
uuuggaacugguuguuaaa

SEQ ID NO: 1617030 - RNA, 19 nt, Artificial Sequence
  Description of Artificial Sequence: Synthetic oligonucleotide
  Antisense strand to SEQ ID NO: 1617029
uuuaacaaccaguuccaaa

SEQ ID NO: 1617031 - RNA, 19 nt, Artificial Sequence
  Description of Artificial Sequence: Synthetic oligonucleotide
  Sense strand starting at position 3164 of SEQ ID NO: 1560679
uggaacugguuguuaaaca

SEQ ID NO: 1617032 - RNA, 19 nt, Artificial Sequence
  Description of Artificial Sequence: Synthetic oligonucleotide
  Antisense strand to SEQ ID NO: 1617031
uguuuaacaaccaguucca

SEQ ID NO: 1617033 - RNA, 19 nt, Artificial Sequence
  Description of Artificial Sequence: Synthetic oligonucleotide
  Sense strand starting at position 3252 of SEQ ID NO: 1560679
cucaucacguccuaguuau

SEQ ID NO: 1617034 - RNA, 19 nt, Artificial Sequence
  Description of Artificial Sequence: Synthetic oligonucleotide
  Antisense strand to SEQ ID NO: 1617033
auaacuaggacgugaugag

SEQ ID NO: 1617035 - RNA, 19 nt, Artificial Sequence
  Description of Artificial Sequence: Synthetic oligonucleotide
  Sense strand starting at position 3258 of SEQ ID NO: 1560679
acguccuaguuaucuuacu

SEQ ID NO: 1617036 - RNA, 19 nt, Artificial Sequence
  Description of Artificial Sequence: Synthetic oligonucleotide
  Antisense strand to SEQ ID NO: 1617035
aguaagauaacuaggacgu

SEQ ID NO: 1617037 - RNA, 19 nt, Artificial Sequence
  Description of Artificial Sequence: Synthetic oligonucleotide
  Sense strand starting at position 3259 of SEQ ID NO: 1560679
cguccuaguuaucuuacua

SEQ ID NO: 1617038 - RNA, 19 nt, Artificial Sequence
  Description of Artificial Sequence: Synthetic oligonucleotide
  Antisense strand to SEQ ID NO: 1617037
uaguaagauaacuaggacg

SEQ ID NO: 1617039 - RNA, 19 nt, Artificial Sequence
  Description of Artificial Sequence: Synthetic oligonucleotide
  Sense strand starting at position 3281 of SEQ ID NO: 1560679
uugccauuaucugugaucu

SEQ ID NO: 1617040 - RNA, 19 nt, Artificial Sequence
  Description of Artificial Sequence: Synthetic oligonucleotide
  Antisense strand to SEQ ID NO: 1617039
agaucacagauaauggcaa

SEQ ID NO: 1617041 - RNA, 19 nt, Artificial Sequence
  Description of Artificial Sequence: Synthetic oligonucleotide
  Sense strand starting at position 3283 of SEQ ID NO: 1560679
gccauuaucugugaucuug

SEQ ID NO: 1617042 - RNA, 19 nt, Artificial Sequence
  Description of Artificial Sequence: Synthetic oligonucleotide
  Antisense strand to SEQ ID NO: 1617041
caagaucacagauaauggc

SEQ ID NO: 1617043 - RNA, 19 nt, Artificial Sequence
  Description of Artificial Sequence: Synthetic oligonucleotide
  Sense strand starting at position 3285 of SEQ ID NO: 1560679
cauuaucugugaucuugag

SEQ ID NO: 1617044 - RNA, 19 nt, Artificial Sequence
  Description of Artificial Sequence: Synthetic oligonucleotide
  Antisense strand to SEQ ID NO: 1617043
cucaagaucacagauaaug

SEQ ID NO: 1617045 - RNA, 19 nt, Artificial Sequence
  Description of Artificial Sequence: Synthetic oligonucleotide
  Sense strand starting at position 3289 of SEQ ID NO: 1560679
aucugugaucuugagguua

SEQ ID NO: 1617046 - RNA, 19 nt, Artificial Sequence
  Description of Artificial Sequence: Synthetic oligonucleotide
  Antisense strand to SEQ ID NO: 1617045
uaaccucaagaucacagau

SEQ ID NO: 1617047 - RNA, 19 nt, Artificial Sequence
  Description of Artificial Sequence: Synthetic oligonucleotide
  Sense strand starting at position 3300 of SEQ ID NO: 1560679
ugagguuaccuacgucuau

SEQ ID NO: 1617048 - RNA, 19 nt, Artificial Sequence
  Description of Artificial Sequence: Synthetic oligonucleotide
  Antisense strand to SEQ ID NO: 1617047
auagacguagguaaccuca

SEQ ID NO: 1617049 - RNA, 19 nt, Artificial Sequence
  Description of Artificial Sequence: Synthetic oligonucleotide
  Sense strand starting at position 3301 of SEQ ID NO: 1560679
gagguuaccuacgucuauu

SEQ ID NO: 1617050 - RNA, 19 nt, Artificial Sequence
  Description of Artificial Sequence: Synthetic oligonucleotide
  Antisense strand to SEQ ID NO: 1617049
aauagacguagguaaccuc

SEQ ID NO: 1617051 - RNA, 19 nt, Artificial Sequence
  Description of Artificial Sequence: Synthetic oligonucleotide
  Sense strand starting at position 3304 of SEQ ID NO: 1560679
guuaccuacgucuauugua

SEQ ID NO: 1617052 - RNA, 19 nt, Artificial Sequence
  Description of Artificial Sequence: Synthetic oligonucleotide
  Antisense strand to SEQ ID NO: 1617051
uacaauagacguagguaac

SEQ ID NO: 1617053 - RNA, 19 nt, Artificial Sequence
  Description of Artificial Sequence: Synthetic oligonucleotide
  Sense strand starting at position 3525 of SEQ ID NO: 1560679
cugcauuacccaggcuaga

SEQ ID NO: 1617054 - RNA, 19 nt, Artificial Sequence
  Description of Artificial Sequence: Synthetic oligonucleotide
  Antisense strand to SEQ ID NO: 1617053
ucuagccuggguaaugcag

SEQ ID NO: 1617055 - RNA, 19 nt, Artificial Sequence
  Description of Artificial Sequence: Synthetic oligonucleotide
  Sense strand starting at position 3781 of SEQ ID NO: 1560679
acagcacugcuugauacua

SEQ ID NO: 1617056 - RNA, 19 nt, Artificial Sequence
  Description of Artificial Sequence: Synthetic oligonucleotide
  Antisense strand to SEQ ID NO: 1617055
uaguaucaagcagugcugu

SEQ ID NO: 1617057 - RNA, 19 nt, Artificial Sequence
  Description of Artificial Sequence: Synthetic oligonucleotide
  Sense strand starting at position 3789 of SEQ ID NO: 1560679
gcuugauacuaugagcaac

SEQ ID NO: 1617058 - RNA, 19 nt, Artificial Sequence
  Description of Artificial Sequence: Synthetic oligonucleotide
  Antisense strand to SEQ ID NO: 1617057
guugcucauaguaucaagc

SEQ ID NO: 1617059 - RNA, 19 nt, Artificial Sequence
  Description of Artificial Sequence: Synthetic oligonucleotide
  Sense strand starting at position 131 of SEQ ID NO: 1560680
ggguuucucgaagaaaggu

SEQ ID NO: 1617060 - RNA, 19 nt, Artificial Sequence
  Description of Artificial Sequence: Synthetic oligonucleotide
  Antisense strand to SEQ ID NO: 1617059
accuuucuucgagaaaccc

SEQ ID NO: 1617061 - RNA, 19 nt, Artificial Sequence
  Description of Artificial Sequence: Synthetic oligonucleotide
  Sense strand starting at position 271 of SEQ ID NO: 1560680
aggugacaccauuggugau

SEQ ID NO: 1617062 - RNA, 19 nt, Artificial Sequence
  Description of Artificial Sequence: Synthetic oligonucleotide
  Antisense strand to SEQ ID NO: 1617061
aucaccaauggugucaccu

SEQ ID NO: 1617063 - RNA, 19 nt, Artificial Sequence
  Description of Artificial Sequence: Synthetic oligonucleotide
  Sense strand starting at position 272 of SEQ ID NO: 1560680
ggugacaccauuggugaua

SEQ ID NO: 1617064 - RNA, 19 nt, Artificial Sequence
  Description of Artificial Sequence: Synthetic oligonucleotide
  Antisense strand to SEQ ID NO: 1617063
uaucaccaauggugucacc

SEQ ID NO: 1617065 - RNA, 19 nt, Artificial Sequence
  Description of Artificial Sequence: Synthetic oligonucleotide
  Sense strand starting at position 325 of SEQ ID NO: 1560680
guagguauccacguguggu

SEQ ID NO: 1617066 - RNA, 19 nt, Artificial Sequence
  Description of Artificial Sequence: Synthetic oligonucleotide
  Antisense strand to SEQ ID NO: 1617065
accacacguggauaccuac

SEQ ID NO: 1617067 - RNA, 19 nt, Artificial Sequence
  Description of Artificial Sequence: Synthetic oligonucleotide
  Sense strand starting at position 340 of SEQ ID NO: 1560680
ugguauccacuguaugaau

SEQ ID NO: 1617068 - RNA, 19 nt, Artificial Sequence
  Description of Artificial Sequence: Synthetic oligonucleotide
  Antisense strand to SEQ ID NO: 1617067
auucauacaguggauacca

SEQ ID NO: 1617069 - RNA, 19 nt, Artificial Sequence
  Description of Artificial Sequence: Synthetic oligonucleotide
  Sense strand starting at position 435 of SEQ ID NO: 1560680
uugagcauuugugugucua

SEQ ID NO: 1617070 - RNA, 19 nt, Artificial Sequence
  Description of Artificial Sequence: Synthetic oligonucleotide
  Antisense strand to SEQ ID NO: 1617069
uagacacacaaaugcucaa

SEQ ID NO: 1617071 - RNA, 19 nt, Artificial Sequence
  Description of Artificial Sequence: Synthetic oligonucleotide
  Sense strand starting at position 436 of SEQ ID NO: 1560680
ugagcauuugugugucuau

SEQ ID NO: 1617072 - RNA, 19 nt, Artificial Sequence
  Description of Artificial Sequence: Synthetic oligonucleotide
  Antisense strand to SEQ ID NO: 1617071
auagacacacaaaugcuca

SEQ ID NO: 1617073 - RNA, 19 nt, Artificial Sequence
  Description of Artificial Sequence: Synthetic oligonucleotide
  Sense strand starting at position 802 of SEQ ID NO: 1560680
gcaucuauugugugaauuu

SEQ ID NO: 1617074 - RNA, 19 nt, Artificial Sequence
  Description of Artificial Sequence: Synthetic oligonucleotide
  Antisense strand to SEQ ID NO: 1617073
aaauucacacaauagaugc

SEQ ID NO: 1617075 - RNA, 19 nt, Artificial Sequence
  Description of Artificial Sequence: Synthetic oligonucleotide
  Sense strand starting at position 830 of SEQ ID NO: 1560680
ugacacuguguccaaacau

SEQ ID NO: 1617076 - RNA, 19 nt, Artificial Sequence
  Description of Artificial Sequence: Synthetic oligonucleotide
  Antisense strand to SEQ ID NO: 1617075
auguuuggacacaguguca

SEQ ID NO: 1617077 - RNA, 19 nt, Artificial Sequence
  Description of Artificial Sequence: Synthetic oligonucleotide
  Sense strand starting at position 858 of SEQ ID NO: 1560680
uuugacauucucuagguga

SEQ ID NO: 1617078 - RNA, 19 nt, Artificial Sequence
  Description of Artificial Sequence: Synthetic oligonucleotide
  Antisense strand to SEQ ID NO: 1617077
ucaccuagagaaugucaaa

SEQ ID NO: 1617079 - RNA, 19 nt, Artificial Sequence
  Description of Artificial Sequence: Synthetic oligonucleotide
  Sense strand starting at position 860 of SEQ ID NO: 1560680
ugacauucucuaggugagu

SEQ ID NO: 1617080 - RNA, 19 nt, Artificial Sequence
  Description of Artificial Sequence: Synthetic oligonucleotide
  Antisense strand to SEQ ID NO: 1617079
acucaccuagagaauguca

SEQ ID NO: 1617081 - RNA, 19 nt, Artificial Sequence
  Description of Artificial Sequence: Synthetic oligonucleotide
  Sense strand starting at position 906 of SEQ ID NO: 1560680
cgugguucugucucugcaa

SEQ ID NO: 1617082 - RNA, 19 nt, Artificial Sequence
  Description of Artificial Sequence: Synthetic oligonucleotide
  Antisense strand to SEQ ID NO: 1617081
uugcagagacagaaccacg

SEQ ID NO: 1617083 - RNA, 19 nt, Artificial Sequence
  Description of Artificial Sequence: Synthetic oligonucleotide
  Sense strand starting at position 921 of SEQ ID NO: 1560680
gcaagaucccuacaucugu

SEQ ID NO: 1617084 - RNA, 19 nt, Artificial Sequence
  Description of Artificial Sequence: Synthetic oligonucleotide
  Antisense strand to SEQ ID NO: 1617083
acagauguagggaucuugc

SEQ ID NO: 1617085 - RNA, 19 nt, Artificial Sequence
  Description of Artificial Sequence: Synthetic oligonucleotide
  Sense strand starting at position 935 of SEQ ID NO: 1560680
ucuguuuauccugauguca

SEQ ID NO: 1617086 - RNA, 19 nt, Artificial Sequence
  Description of Artificial Sequence: Synthetic oligonucleotide
  Antisense strand to SEQ ID NO: 1617085
ugacaucaggauaaacaga

SEQ ID NO: 1617087 - RNA, 19 nt, Artificial Sequence
  Description of Artificial Sequence: Synthetic oligonucleotide
  Sense strand starting at position 950 of SEQ ID NO: 1560680
gucagugugacauaguaug

SEQ ID NO: 1617088 - RNA, 19 nt, Artificial Sequence
  Description of Artificial Sequence: Synthetic oligonucleotide
  Antisense strand to SEQ ID NO: 1617087
cauacuaugucacacugac

SEQ ID NO: 1617089 - RNA, 19 nt, Artificial Sequence
  Description of Artificial Sequence: Synthetic oligonucleotide
  Sense strand starting at position 955 of SEQ ID NO: 1560680
ugugacauaguaugugaga

SEQ ID NO: 1617090 - RNA, 19 nt, Artificial Sequence
  Description of Artificial Sequence: Synthetic oligonucleotide
  Antisense strand to SEQ ID NO: 1617089
ucucacauacuaugucaca

SEQ ID NO: 1617091 - RNA, 19 nt, Artificial Sequence
  Description of Artificial Sequence: Synthetic oligonucleotide
  Sense strand starting at position 956 of SEQ ID NO: 1560680
gugacauaguaugugagau

SEQ ID NO: 1617092 - RNA, 19 nt, Artificial Sequence
  Description of Artificial Sequence: Synthetic oligonucleotide
  Antisense strand to SEQ ID NO: 1617091
aucucacauacuaugucac

SEQ ID NO: 1617093 - RNA, 19 nt, Artificial Sequence
  Description of Artificial Sequence: Synthetic oligonucleotide
  Sense strand starting at position 957 of SEQ ID NO: 1560680
ugacauaguaugugagaua

SEQ ID NO: 1617094 - RNA, 19 nt, Artificial Sequence
  Description of Artificial Sequence: Synthetic oligonucleotide
  Antisense strand to SEQ ID NO: 1617093
uaucucacauacuauguca

SEQ ID NO: 1617095 - RNA, 19 nt, Artificial Sequence
  Description of Artificial Sequence: Synthetic oligonucleotide
  Sense strand starting at position 1009 of SEQ ID NO: 1560680
ggaugcauggaugggauau

SEQ ID NO: 1617096 - RNA, 19 nt, Artificial Sequence
  Description of Artificial Sequence: Synthetic oligonucleotide
  Antisense strand to SEQ ID NO: 1617095
auaucccauccaugcaucc

SEQ ID NO: 1617097 - RNA, 19 nt, Artificial Sequence
  Description of Artificial Sequence: Synthetic oligonucleotide
  Sense strand starting at position 1010 of SEQ ID NO: 1560680
gaugcauggaugggauauu

SEQ ID NO: 1617098 - RNA, 19 nt, Artificial Sequence
  Description of Artificial Sequence: Synthetic oligonucleotide
  Antisense strand to SEQ ID NO: 1617097
aauaucccauccaugcauc

SEQ ID NO: 1617099 - RNA, 19 nt, Artificial Sequence
  Description of Artificial Sequence: Synthetic oligonucleotide
  Sense strand starting at position 1040 of SEQ ID NO: 1560680
uugcaucuuggaugacaua

SEQ ID NO: 1617100 - RNA, 19 nt, Artificial Sequence
  Description of Artificial Sequence: Synthetic oligonucleotide
  Antisense strand to SEQ ID NO: 1617099
uaugucauccaagaugcaa

SEQ ID NO: 1617101 - RNA, 19 nt, Artificial Sequence
  Description of Artificial Sequence: Synthetic oligonucleotide
  Sense strand starting at position 1089 of SEQ ID NO: 1560680
acaucuuacuagguguaca

SEQ ID NO: 1617102 - RNA, 19 nt, Artificial Sequence
  Description of Artificial Sequence: Synthetic oligonucleotide
  Antisense strand to SEQ ID NO: 1617101
uguacaccuaguaagaugu

SEQ ID NO: 1617103 - RNA, 19 nt, Artificial Sequence
  Description of Artificial Sequence: Synthetic oligonucleotide
  Sense strand starting at position 2241 of SEQ ID NO: 1560680
uuaucaacucccuggagga

SEQ ID NO: 1617104 - RNA, 19 nt, Artificial Sequence
  Description of Artificial Sequence: Synthetic oligonucleotide
  Antisense strand to SEQ ID NO: 1617103
uccuccagggaguugauaa

SEQ ID NO: 1617105 - RNA, 19 nt, Artificial Sequence
  Description of Artificial Sequence: Synthetic oligonucleotide
  Sense strand starting at position 2343 of SEQ ID NO: 1560680
agaggaucccugggugauu

SEQ ID NO: 1617106 - RNA, 19 nt, Artificial Sequence
  Description of Artificial Sequence: Synthetic oligonucleotide
  Antisense strand to SEQ ID NO: 1617105
aaucacccagggauccucu

SEQ ID NO: 1617107 - RNA, 19 nt, Artificial Sequence
  Description of Artificial Sequence: Synthetic oligonucleotide
  Sense strand starting at position 2433 of SEQ ID NO: 1560680
uggcauaucagcguguguu

SEQ ID NO: 1617108 - RNA, 19 nt, Artificial Sequence
  Description of Artificial Sequence: Synthetic oligonucleotide
  Antisense strand to SEQ ID NO: 1617107
aacacacgcugauaugcca

SEQ ID NO: 1617109 - RNA, 19 nt, Artificial Sequence
  Description of Artificial Sequence: Synthetic oligonucleotide
  Sense strand starting at position 2615 of SEQ ID NO: 1560680
aucgcuugaguccaaggaa

SEQ ID NO: 1617110 - RNA, 19 nt, Artificial Sequence
  Description of Artificial Sequence: Synthetic oligonucleotide
  Antisense strand to SEQ ID NO: 1617109
uuccuuggacucaagcgau

SEQ ID NO: 1617111 - RNA, 19 nt, Artificial Sequence
  Description of Artificial Sequence: Synthetic oligonucleotide
  Sense strand starting at position 2618 of SEQ ID NO: 1560680
gcuugaguccaaggaaaca

SEQ ID NO: 1617112 - RNA, 19 nt, Artificial Sequence
  Description of Artificial Sequence: Synthetic oligonucleotide
  Antisense strand to SEQ ID NO: 1617111
uguuuccuuggacucaagc

SEQ ID NO: 1617113 - RNA, 19 nt, Artificial Sequence
  Description of Artificial Sequence: Synthetic oligonucleotide
  Sense strand starting at position 2804 of SEQ ID NO: 1560680
gggugaugugauggacaau

SEQ ID NO: 1617114 - RNA, 19 nt, Artificial Sequence
  Description of Artificial Sequence: Synthetic oligonucleotide
  Antisense strand to SEQ ID NO: 1617113
auuguccaucacaucaccc

SEQ ID NO: 1617115 - RNA, 19 nt, Artificial Sequence
  Description of Artificial Sequence: Synthetic oligonucleotide
  Sense strand starting at position 2982 of SEQ ID NO: 1560680
agcguacucaaugaaugaa

SEQ ID NO: 1617116 - RNA, 19 nt, Artificial Sequence
  Description of Artificial Sequence: Synthetic oligonucleotide
  Antisense strand to SEQ ID NO: 1617115
uucauucauugaguacgcu

SEQ ID NO: 1617117 - RNA, 19 nt, Artificial Sequence
  Description of Artificial Sequence: Synthetic oligonucleotide
  Sense strand starting at position 3114 of SEQ ID NO: 1560680
uaaguagagugacucacaa

SEQ ID NO: 1617118 - RNA, 19 nt, Artificial Sequence
  Description of Artificial Sequence: Synthetic oligonucleotide
  Antisense strand to SEQ ID NO: 1617117
uugugagucacucuacuua

SEQ ID NO: 1617119 - RNA, 19 nt, Artificial Sequence
  Description of Artificial Sequence: Synthetic oligonucleotide
  Sense strand starting at position 3185 of SEQ ID NO: 1560680
ucaggaggucgagguuaua

SEQ ID NO: 1617120 - RNA, 19 nt, Artificial Sequence
  Description of Artificial Sequence: Synthetic oligonucleotide
  Antisense strand to SEQ ID NO: 1617119
uauaaccucgaccuccuga

SEQ ID NO: 1617121 - RNA, 19 nt, Artificial Sequence
  Description of Artificial Sequence: Synthetic oligonucleotide
  Sense strand starting at position 3359 of SEQ ID NO: 1560680
gaguauuaacuuuaugugu

SEQ ID NO: 1617122 - RNA, 19 nt, Artificial Sequence
  Description of Artificial Sequence: Synthetic oligonucleotide
  Antisense strand to SEQ ID NO: 1617121
acacauaaaguuaauacuc

SEQ ID NO: 1617123 - RNA, 19 nt, Artificial Sequence
  Description of Artificial Sequence: Synthetic oligonucleotide
  Sense strand starting at position 3367 of SEQ ID NO: 1560680
acuuuaugugucugcauuu

SEQ ID NO: 1617124 - RNA, 19 nt, Artificial Sequence
  Description of Artificial Sequence: Synthetic oligonucleotide
  Antisense strand to SEQ ID NO: 1617123
aaaugcagacacauaaagu

SEQ ID NO: 1617125 - RNA, 19 nt, Artificial Sequence
  Description of Artificial Sequence: Synthetic oligonucleotide
  Sense strand starting at position 3630 of SEQ ID NO: 1560680
ccuagacauuucuaggauc

SEQ ID NO: 1617126 - RNA, 19 nt, Artificial Sequence
  Description of Artificial Sequence: Synthetic oligonucleotide
  Antisense strand to SEQ ID NO: 1617125
gauccuagaaaugucuagg

SEQ ID NO: 1617127 - RNA, 19 nt, Artificial Sequence
  Description of Artificial Sequence: Synthetic oligonucleotide
  Sense strand starting at position 3633 of SEQ ID NO: 1560680
agacauuucuaggaucucu

SEQ ID NO: 1617128 - RNA, 19 nt, Artificial Sequence
  Description of Artificial Sequence: Synthetic oligonucleotide
  Antisense strand to SEQ ID NO: 1617127
agagauccuagaaaugucu

SEQ ID NO: 1617129 - RNA, 19 nt, Artificial Sequence
  Description of Artificial Sequence: Synthetic oligonucleotide
  Sense strand starting at position 3726 of SEQ ID NO: 1560680
ugucuccuugaggaucuua

SEQ ID NO: 1617130 - RNA, 19 nt, Artificial Sequence
  Description of Artificial Sequence: Synthetic oligonucleotide
  Antisense strand to SEQ ID NO: 1617129
uaagauccucaaggagaca

SEQ ID NO: 1617131 - RNA, 19 nt, Artificial Sequence
  Description of Artificial Sequence: Synthetic oligonucleotide
  Sense strand starting at position 3819 of SEQ ID NO: 1560680
gagaacaggcguuauuaag

SEQ ID NO: 1617132 - RNA, 19 nt, Artificial Sequence
  Description of Artificial Sequence: Synthetic oligonucleotide
  Antisense strand to SEQ ID NO: 1617131
cuuaauaacgccuguucuc

SEQ ID NO: 1617133 - RNA, 19 nt, Artificial Sequence
  Description of Artificial Sequence: Synthetic oligonucleotide
  Sense strand starting at position 3828 of SEQ ID NO: 1560680
cguuauuaaggagggacau

SEQ ID NO: 1617134 - RNA, 19 nt, Artificial Sequence
  Description of Artificial Sequence: Synthetic oligonucleotide
  Antisense strand to SEQ ID NO: 1617133
augucccuccuuaauaacg

SEQ ID NO: 1617135 - RNA, 19 nt, Artificial Sequence
  Description of Artificial Sequence: Synthetic oligonucleotide
  Sense strand starting at position 3841 of SEQ ID NO: 1560680
ggacaugcugcaugacaga

SEQ ID NO: 1617136 - RNA, 19 nt, Artificial Sequence
  Description of Artificial Sequence: Synthetic oligonucleotide
  Antisense strand to SEQ ID NO: 1617135
ucugucaugcagcaugucc

SEQ ID NO: 1617137 - RNA, 19 nt, Artificial Sequence
  Description of Artificial Sequence: Synthetic oligonucleotide
  Sense strand starting at position 3945 of SEQ ID NO: 1560680
acgggugaccgauaaucca

SEQ ID NO: 1617138 - RNA, 19 nt, Artificial Sequence
  Description of Artificial Sequence: Synthetic oligonucleotide
  Antisense strand to SEQ ID NO: 1617137
uggauuaucggucacccgu

SEQ ID NO: 1617139 - RNA, 19 nt, Artificial Sequence
  Description of Artificial Sequence: Synthetic oligonucleotide
  Sense strand starting at position 154 of SEQ ID NO: 1560681
ggaacugcguggguucaaa

SEQ ID NO: 1617140 - RNA, 19 nt, Artificial Sequence
  Description of Artificial Sequence: Synthetic oligonucleotide
  Antisense strand to SEQ ID NO: 1617139
uuugaacccacgcaguucc

SEQ ID NO: 1617141 - RNA, 19 nt, Artificial Sequence
  Description of Artificial Sequence: Synthetic oligonucleotide
  Sense strand starting at position 216 of SEQ ID NO: 1560681
uggcuaugcuucucugaac

SEQ ID NO: 1617142 - RNA, 19 nt, Artificial Sequence
  Description of Artificial Sequence: Synthetic oligonucleotide
  Antisense strand to SEQ ID NO: 1617141
guucagagaagcauagcca

SEQ ID NO: 1617143 - RNA, 19 nt, Artificial Sequence
  Description of Artificial Sequence: Synthetic oligonucleotide
  Sense strand starting at position 345 of SEQ ID NO: 1560681
ggaggcgguuucucuauuu

SEQ ID NO: 1617144 - RNA, 19 nt, Artificial Sequence
  Description of Artificial Sequence: Synthetic oligonucleotide
  Antisense strand to SEQ ID NO: 1617143
aaauagagaaaccgccucc

SEQ ID NO: 1617145 - RNA, 19 nt, Artificial Sequence
  Description of Artificial Sequence: Synthetic oligonucleotide
  Sense strand starting at position 870 of SEQ ID NO: 1560681
ugcugugagucccuuauca

SEQ ID NO: 1617146 - RNA, 19 nt, Artificial Sequence
  Description of Artificial Sequence: Synthetic oligonucleotide
  Antisense strand to SEQ ID NO: 1617145
ugauaagggacucacagca

SEQ ID NO: 1617147 - RNA, 19 nt, Artificial Sequence
  Description of Artificial Sequence: Synthetic oligonucleotide
  Sense strand starting at position 874 of SEQ ID NO: 1560681
gugagucccuuaucacaac

SEQ ID NO: 1617148 - RNA, 19 nt, Artificial Sequence
  Description of Artificial Sequence: Synthetic oligonucleotide
  Antisense strand to SEQ ID NO: 1617147
guugugauaagggacucac

SEQ ID NO: 1617149 - RNA, 19 nt, Artificial Sequence
  Description of Artificial Sequence: Synthetic oligonucleotide
  Sense strand starting at position 1014 of SEQ ID NO: 1560681
gcaggcgcuccauaaaugu

SEQ ID NO: 1617150 - RNA, 19 nt, Artificial Sequence
  Description of Artificial Sequence: Synthetic oligonucleotide
  Antisense strand to SEQ ID NO: 1617149
acauuuauggagcgccugc

SEQ ID NO: 1617151 - RNA, 19 nt, Artificial Sequence
  Description of Artificial Sequence: Synthetic oligonucleotide
  Sense strand starting at position 1023 of SEQ ID NO: 1560681
ccauaaauguucguugggu

SEQ ID NO: 1617152 - RNA, 19 nt, Artificial Sequence
  Description of Artificial Sequence: Synthetic oligonucleotide
  Antisense strand to SEQ ID NO: 1617151
acccaacgaacauuuaugg

SEQ ID NO: 1617153 - RNA, 19 nt, Artificial Sequence
  Description of Artificial Sequence: Synthetic oligonucleotide
  Sense strand starting at position 1024 of SEQ ID NO: 1560681
cauaaauguucguugggua

SEQ ID NO: 1617154 - RNA, 19 nt, Artificial Sequence
  Description of Artificial Sequence: Synthetic oligonucleotide
  Antisense strand to SEQ ID NO: 1617153
uacccaacgaacauuuaug

SEQ ID NO: 1617155 - RNA, 19 nt, Artificial Sequence
  Description of Artificial Sequence: Synthetic oligonucleotide
  Sense strand starting at position 1025 of SEQ ID NO: 1560681
auaaauguucguuggguaa

SEQ ID NO: 1617156 - RNA, 19 nt, Artificial Sequence
  Description of Artificial Sequence: Synthetic oligonucleotide
  Antisense strand to SEQ ID NO: 1617155
uuacccaacgaacauuuau

SEQ ID NO: 1617157 - RNA, 19 nt, Artificial Sequence
  Description of Artificial Sequence: Synthetic oligonucleotide
  Sense strand starting at position 1027 of SEQ ID NO: 1560681
aaauguucguuggguaagu

SEQ ID NO: 1617158 - RNA, 19 nt, Artificial Sequence
  Description of Artificial Sequence: Synthetic oligonucleotide
  Antisense strand to SEQ ID NO: 1617157
acuuacccaacgaacauuu

SEQ ID NO: 1617159 - RNA, 19 nt, Artificial Sequence
  Description of Artificial Sequence: Synthetic oligonucleotide
  Sense strand starting at position 1083 of SEQ ID NO: 1560681
uucuuaaggguguggucua

SEQ ID NO: 1617160 - RNA, 19 nt, Artificial Sequence
  Description of Artificial Sequence: Synthetic oligonucleotide
  Antisense strand to SEQ ID NO: 1617159
uagaccacacccuuaagaa

SEQ ID NO: 1617161 - RNA, 19 nt, Artificial Sequence
  Description of Artificial Sequence: Synthetic oligonucleotide
  Sense strand starting at position 1084 of SEQ ID NO: 1560681
ucuuaaggguguggucuaa

SEQ ID NO: 1617162 - RNA, 19 nt, Artificial Sequence
  Description of Artificial Sequence: Synthetic oligonucleotide
  Antisense strand to SEQ ID NO: 1617161
uuagaccacacccuuaaga

SEQ ID NO: 1617163 - RNA, 19 nt, Artificial Sequence
  Description of Artificial Sequence: Synthetic oligonucleotide
  Sense strand starting at position 1090 of SEQ ID NO: 1560681
ggguguggucuaaguccca

SEQ ID NO: 1617164 - RNA, 19 nt, Artificial Sequence
  Description of Artificial Sequence: Synthetic oligonucleotide
  Antisense strand to SEQ ID NO: 1617163
ugggacuuagaccacaccc

SEQ ID NO: 1617165 - RNA, 19 nt, Artificial Sequence
  Description of Artificial Sequence: Synthetic oligonucleotide
  Sense strand starting at position 1095 of SEQ ID NO: 1560681
uggucuaagucccagagga

SEQ ID NO: 1617166 - RNA, 19 nt, Artificial Sequence
  Description of Artificial Sequence: Synthetic oligonucleotide
  Antisense strand to SEQ ID NO: 1617165
uccucugggacuuagacca

SEQ ID NO: 1617167 - RNA, 19 nt, Artificial Sequence
  Description of Artificial Sequence: Synthetic oligonucleotide
  Sense strand starting at position 1306 of SEQ ID NO: 1560681
gacccuauggcucauugga

SEQ ID NO: 1617168 - RNA, 19 nt, Artificial Sequence
  Description of Artificial Sequence: Synthetic oligonucleotide
  Antisense strand to SEQ ID NO: 1617167
uccaaugagccauaggguc

SEQ ID NO: 1617169 - RNA, 19 nt, Artificial Sequence
  Description of Artificial Sequence: Synthetic oligonucleotide
  Sense strand starting at position 1308 of SEQ ID NO: 1560681
cccuauggcucauuggaaa

SEQ ID NO: 1617170 - RNA, 19 nt, Artificial Sequence
  Description of Artificial Sequence: Synthetic oligonucleotide
  Antisense strand to SEQ ID NO: 1617169
uuuccaaugagccauaggg

SEQ ID NO: 1617171 - RNA, 19 nt, Artificial Sequence
  Description of Artificial Sequence: Synthetic oligonucleotide
  Sense strand starting at position 1382 of SEQ ID NO: 1560681
agcgccuugugccguaaga

SEQ ID NO: 1617172 - RNA, 19 nt, Artificial Sequence
  Description of Artificial Sequence: Synthetic oligonucleotide
  Antisense strand to SEQ ID NO: 1617171
ucuuacggcacaaggcgcu

SEQ ID NO: 1617173 - RNA, 19 nt, Artificial Sequence
  Description of Artificial Sequence: Synthetic oligonucleotide
  Sense strand starting at position 1384 of SEQ ID NO: 1560681
cgccuugugccguaagaga

SEQ ID NO: 1617174 - RNA, 19 nt, Artificial Sequence
  Description of Artificial Sequence: Synthetic oligonucleotide
  Antisense strand to SEQ ID NO: 1617173
ucucuuacggcacaaggcg

SEQ ID NO: 1617175 - RNA, 19 nt, Artificial Sequence
  Description of Artificial Sequence: Synthetic oligonucleotide
  Sense strand starting at position 1393 of SEQ ID NO: 1560681
ccguaagagagcugguuga

SEQ ID NO: 1617176 - RNA, 19 nt, Artificial Sequence
  Description of Artificial Sequence: Synthetic oligonucleotide
  Antisense strand to SEQ ID NO: 1617175
ucaaccagcucucuuacgg

SEQ ID NO: 1617177 - RNA, 19 nt, Artificial Sequence
  Description of Artificial Sequence: Synthetic oligonucleotide
  Sense strand starting at position 1450 of SEQ ID NO: 1560681
guggcuuuccgggacuaga

SEQ ID NO: 1617178 - RNA, 19 nt, Artificial Sequence
  Description of Artificial Sequence: Synthetic oligonucleotide
  Antisense strand to SEQ ID NO: 1617177
ucuagucccggaaagccac

SEQ ID NO: 1617179 - RNA, 19 nt, Artificial Sequence
  Description of Artificial Sequence: Synthetic oligonucleotide
  Sense strand starting at position 1597 of SEQ ID NO: 1560681
auauuaauacaucgcuagu

SEQ ID NO: 1617180 - RNA, 19 nt, Artificial Sequence
  Description of Artificial Sequence: Synthetic oligonucleotide
  Antisense strand to SEQ ID NO: 1617179
acuagcgauguauuaauau

SEQ ID NO: 1617181 - RNA, 19 nt, Artificial Sequence
  Description of Artificial Sequence: Synthetic oligonucleotide
  Sense strand starting at position 1599 of SEQ ID NO: 1560681
auuaauacaucgcuaguaa

SEQ ID NO: 1617182 - RNA, 19 nt, Artificial Sequence
  Description of Artificial Sequence: Synthetic oligonucleotide
  Antisense strand to SEQ ID NO: 1617181
uuacuagcgauguauuaau

SEQ ID NO: 1617183 - RNA, 19 nt, Artificial Sequence
  Description of Artificial Sequence: Synthetic oligonucleotide
  Sense strand starting at position 1600 of SEQ ID NO: 1560681
uuaauacaucgcuaguaau

SEQ ID NO: 1617184 - RNA, 19 nt, Artificial Sequence
  Description of Artificial Sequence: Synthetic oligonucleotide
  Antisense strand to SEQ ID NO: 1617183
auuacuagcgauguauuaa

SEQ ID NO: 1617185 - RNA, 19 nt, Artificial Sequence
  Description of Artificial Sequence: Synthetic oligonucleotide
  Sense strand starting at position 1608 of SEQ ID NO: 1560681
ucgcuaguaauaggacuaa

SEQ ID NO: 1617186 - RNA, 19 nt, Artificial Sequence
  Description of Artificial Sequence: Synthetic oligonucleotide
  Antisense strand to SEQ ID NO: 1617185
uuaguccuauuacuagcga

SEQ ID NO: 1617187 - RNA, 19 nt, Artificial Sequence
  Description of Artificial Sequence: Synthetic oligonucleotide
  Sense strand starting at position 1659 of SEQ ID NO: 1560681
ugcuguugcuagcauuauu

SEQ ID NO: 1617188 - RNA, 19 nt, Artificial Sequence
  Description of Artificial Sequence: Synthetic oligonucleotide
  Antisense strand to SEQ ID NO: 1617187
aauaaugcuagcaacagca

SEQ ID NO: 1617189 - RNA, 19 nt, Artificial Sequence
  Description of Artificial Sequence: Synthetic oligonucleotide
  Sense strand starting at position 1662 of SEQ ID NO: 1560681
uguugcuagcauuauuauu

SEQ ID NO: 1617190 - RNA, 19 nt, Artificial Sequence
  Description of Artificial Sequence: Synthetic oligonucleotide
  Antisense strand to SEQ ID NO: 1617189
aauaauaaugcuagcaaca

SEQ ID NO: 1617191 - RNA, 19 nt, Artificial Sequence
  Description of Artificial Sequence: Synthetic oligonucleotide
  Sense strand starting at position 2197 of SEQ ID NO: 1560681
uugcaugaauccucucaga

SEQ ID NO: 1617192 - RNA, 19 nt, Artificial Sequence
  Description of Artificial Sequence: Synthetic oligonucleotide
  Antisense strand to SEQ ID NO: 1617191
ucugagaggauucaugcaa

SEQ ID NO: 1617193 - RNA, 19 nt, Artificial Sequence
  Description of Artificial Sequence: Synthetic oligonucleotide
  Sense strand starting at position 2202 of SEQ ID NO: 1560681
ugaauccucucagaaguaa

SEQ ID NO: 1617194 - RNA, 19 nt, Artificial Sequence
  Description of Artificial Sequence: Synthetic oligonucleotide
  Antisense strand to SEQ ID NO: 1617193
uuacuucugagaggauuca

SEQ ID NO: 1617195 - RNA, 19 nt, Artificial Sequence
  Description of Artificial Sequence: Synthetic oligonucleotide
  Sense strand starting at position 2261 of SEQ ID NO: 1560681
aggcuaagauagguuaauc

SEQ ID NO: 1617196 - RNA, 19 nt, Artificial Sequence
  Description of Artificial Sequence: Synthetic oligonucleotide
  Antisense strand to SEQ ID NO: 1617195
gauuaaccuaucuuagccu

SEQ ID NO: 1617197 - RNA, 19 nt, Artificial Sequence
  Description of Artificial Sequence: Synthetic oligonucleotide
  Sense strand starting at position 2959 of SEQ ID NO: 1560681
uuuaauuuaugagacgagu

SEQ ID NO: 1617198 - RNA, 19 nt, Artificial Sequence
  Description of Artificial Sequence: Synthetic oligonucleotide
  Antisense strand to SEQ ID NO: 1617197
acucgucucauaaauuaaa

SEQ ID NO: 1617199 - RNA, 19 nt, Artificial Sequence
  Description of Artificial Sequence: Synthetic oligonucleotide
  Sense strand starting at position 3272 of SEQ ID NO: 1560681
ugaucagacccuuguccuu

SEQ ID NO: 1617200 - RNA, 19 nt, Artificial Sequence
  Description of Artificial Sequence: Synthetic oligonucleotide
  Antisense strand to SEQ ID NO: 1617199
aaggacaagggucugauca

SEQ ID NO: 1617201 - RNA, 19 nt, Artificial Sequence
  Description of Artificial Sequence: Synthetic oligonucleotide
  Sense strand starting at position 3371 of SEQ ID NO: 1560681
ugcaguugucaguuucuuu

SEQ ID NO: 1617202 - RNA, 19 nt, Artificial Sequence
  Description of Artificial Sequence: Synthetic oligonucleotide
  Antisense strand to SEQ ID NO: 1617201
aaagaaacugacaacugca

SEQ ID NO: 1617203 - RNA, 19 nt, Artificial Sequence
  Description of Artificial Sequence: Synthetic oligonucleotide
  Sense strand starting at position 3410 of SEQ ID NO: 1560681
ugcccuaagugucucauaa

SEQ ID NO: 1617204 - RNA, 19 nt, Artificial Sequence
  Description of Artificial Sequence: Synthetic oligonucleotide
  Antisense strand to SEQ ID NO: 1617203
uuaugagacacuuagggca

SEQ ID NO: 1617205 - RNA, 19 nt, Artificial Sequence
  Description of Artificial Sequence: Synthetic oligonucleotide
  Sense strand starting at position 3412 of SEQ ID NO: 1560681
cccuaagugucucauaaac

SEQ ID NO: 1617206 - RNA, 19 nt, Artificial Sequence
  Description of Artificial Sequence: Synthetic oligonucleotide
  Antisense strand to SEQ ID NO: 1617205
guuuaugagacacuuaggg

SEQ ID NO: 1617207 - RNA, 19 nt, Artificial Sequence
  Description of Artificial Sequence: Synthetic oligonucleotide
  Sense strand starting at position 3414 of SEQ ID NO: 1560681
cuaagugucucauaaacac

SEQ ID NO: 1617208 - RNA, 19 nt, Artificial Sequence
  Description of Artificial Sequence: Synthetic oligonucleotide
  Antisense strand to SEQ ID NO: 1617207
guguuuaugagacacuuag

SEQ ID NO: 1617209 - RNA, 19 nt, Artificial Sequence
  Description of Artificial Sequence: Synthetic oligonucleotide
  Sense strand starting at position 3942 of SEQ ID NO: 1560681
ggaguaugcuuucaggcuc

SEQ ID NO: 1617210 - RNA, 19 nt, Artificial Sequence
  Description of Artificial Sequence: Synthetic oligonucleotide
  Antisense strand to SEQ ID NO: 1617209
gagccugaaagcauacucc

SEQ ID NO: 1617211 - RNA, 19 nt, Artificial Sequence
  Description of Artificial Sequence: Synthetic oligonucleotide
  Sense strand starting at position 376 of SEQ ID NO: 1560682
cuuguagggucaugagaag

SEQ ID NO: 1617212 - RNA, 19 nt, Artificial Sequence
  Description of Artificial Sequence: Synthetic oligonucleotide
  Antisense strand to SEQ ID NO: 1617211
cuucucaugacccuacaag

SEQ ID NO: 1617213 - RNA, 19 nt, Artificial Sequence
  Description of Artificial Sequence: Synthetic oligonucleotide
  Sense strand starting at position 420 of SEQ ID NO: 1560682
guaaauaggugaugaauca

SEQ ID NO: 1617214 - RNA, 19 nt, Artificial Sequence
  Description of Artificial Sequence: Synthetic oligonucleotide
  Antisense strand to SEQ ID NO: 1617213
ugauucaucaccuauuuac

SEQ ID NO: 1617215 - RNA, 19 nt, Artificial Sequence
  Description of Artificial Sequence: Synthetic oligonucleotide
  Sense strand starting at position 431 of SEQ ID NO: 1560682
augaaucaaugucguuaua

SEQ ID NO: 1617216 - RNA, 19 nt, Artificial Sequence
  Description of Artificial Sequence: Synthetic oligonucleotide
  Antisense strand to SEQ ID NO: 1617215
uauaacgacauugauucau

SEQ ID NO: 1617217 - RNA, 19 nt, Artificial Sequence
  Description of Artificial Sequence: Synthetic oligonucleotide
  Sense strand starting at position 442 of SEQ ID NO: 1560682
ucguuauaauaccaaguga

SEQ ID NO: 1617218 - RNA, 19 nt, Artificial Sequence
  Description of Artificial Sequence: Synthetic oligonucleotide
  Antisense strand to SEQ ID NO: 1617217
ucacuugguauuauaacga

SEQ ID NO: 1617219 - RNA, 19 nt, Artificial Sequence
  Description of Artificial Sequence: Synthetic oligonucleotide
  Sense strand starting at position 1322 of SEQ ID NO: 1560682
gccgaugcuuccuaaugca

SEQ ID NO: 1617220 - RNA, 19 nt, Artificial Sequence
  Description of Artificial Sequence: Synthetic oligonucleotide
  Antisense strand to SEQ ID NO: 1617219
ugcauuaggaagcaucggc

SEQ ID NO: 1617221 - RNA, 19 nt, Artificial Sequence
  Description of Artificial Sequence: Synthetic oligonucleotide
  Sense strand starting at position 1334 of SEQ ID NO: 1560682
uaaugcauuucguuugcaa

SEQ ID NO: 1617222 - RNA, 19 nt, Artificial Sequence
  Description of Artificial Sequence: Synthetic oligonucleotide
  Antisense strand to SEQ ID NO: 1617221
uugcaaacgaaaugcauua

SEQ ID NO: 1617223 - RNA, 19 nt, Artificial Sequence
  Description of Artificial Sequence: Synthetic oligonucleotide
  Sense strand starting at position 1439 of SEQ ID NO: 1560682
uucucagucccagaagcua

SEQ ID NO: 1617224 - RNA, 19 nt, Artificial Sequence
  Description of Artificial Sequence: Synthetic oligonucleotide
  Antisense strand to SEQ ID NO: 1617223
uagcuucugggacugagaa

SEQ ID NO: 1617225 - RNA, 19 nt, Artificial Sequence
  Description of Artificial Sequence: Synthetic oligonucleotide
  Sense strand starting at position 1717 of SEQ ID NO: 1560682
caccgaugucgccuagcaa

SEQ ID NO: 1617226 - RNA, 19 nt, Artificial Sequence
  Description of Artificial Sequence: Synthetic oligonucleotide
  Antisense strand to SEQ ID NO: 1617225
uugcuaggcgacaucggug

SEQ ID NO: 1617227 - RNA, 19 nt, Artificial Sequence
  Description of Artificial Sequence: Synthetic oligonucleotide
  Sense strand starting at position 2044 of SEQ ID NO: 1560682
cgacuuaacucuuugucag

SEQ ID NO: 1617228 - RNA, 19 nt, Artificial Sequence
  Description of Artificial Sequence: Synthetic oligonucleotide
  Antisense strand to SEQ ID NO: 1617227
cugacaaagaguuaagucg

SEQ ID NO: 1617229 - RNA, 19 nt, Artificial Sequence
  Description of Artificial Sequence: Synthetic oligonucleotide
  Sense strand starting at position 2090 of SEQ ID NO: 1560682
caggaauccuguuugccuu

SEQ ID NO: 1617230 - RNA, 19 nt, Artificial Sequence
  Description of Artificial Sequence: Synthetic oligonucleotide
  Antisense strand to SEQ ID NO: 1617229
aaggcaaacaggauuccug

SEQ ID NO: 1617231 - RNA, 19 nt, Artificial Sequence
  Description of Artificial Sequence: Synthetic oligonucleotide
  Sense strand starting at position 2343 of SEQ ID NO: 1560682
gacagagacaaaugguguu

SEQ ID NO: 1617232 - RNA, 19 nt, Artificial Sequence
  Description of Artificial Sequence: Synthetic oligonucleotide
  Antisense strand to SEQ ID NO: 1617231
aacaccauuugucucuguc

SEQ ID NO: 1617233 - RNA, 19 nt, Artificial Sequence
  Description of Artificial Sequence: Synthetic oligonucleotide
  Sense strand starting at position 2349 of SEQ ID NO: 1560682
gacaaaugguguucucugu

SEQ ID NO: 1617234 - RNA, 19 nt, Artificial Sequence
  Description of Artificial Sequence: Synthetic oligonucleotide
  Antisense strand to SEQ ID NO: 1617233
acagagaacaccauuuguc

SEQ ID NO: 1617235 - RNA, 19 nt, Artificial Sequence
  Description of Artificial Sequence: Synthetic oligonucleotide
  Sense strand starting at position 2353 of SEQ ID NO: 1560682
aaugguguucucugucuuu

SEQ ID NO: 1617236 - RNA, 19 nt, Artificial Sequence
  Description of Artificial Sequence: Synthetic oligonucleotide
  Antisense strand to SEQ ID NO: 1617235
aaagacagagaacaccauu

SEQ ID NO: 1617237 - RNA, 19 nt, Artificial Sequence
  Description of Artificial Sequence: Synthetic oligonucleotide
  Sense strand starting at position 2364 of SEQ ID NO: 1560682
cugucuuucugagacagag

SEQ ID NO: 1617238 - RNA, 19 nt, Artificial Sequence
  Description of Artificial Sequence: Synthetic oligonucleotide
  Antisense strand to SEQ ID NO: 1617237
cucugucucagaaagacag

SEQ ID NO: 1617239 - RNA, 19 nt, Artificial Sequence
  Description of Artificial Sequence: Synthetic oligonucleotide
  Sense strand starting at position 2366 of SEQ ID NO: 1560682
gucuuucugagacagaguu

SEQ ID NO: 1617240 - RNA, 19 nt, Artificial Sequence
  Description of Artificial Sequence: Synthetic oligonucleotide
  Antisense strand to SEQ ID NO: 1617239
aacucugucucagaaagac

SEQ ID NO: 1617241 - RNA, 19 nt, Artificial Sequence
  Description of Artificial Sequence: Synthetic oligonucleotide
  Sense strand starting at position 2762 of SEQ ID NO: 1560682
gcccgagaucugggaauac

SEQ ID NO: 1617242 - RNA, 19 nt, Artificial Sequence
  Description of Artificial Sequence: Synthetic oligonucleotide
  Antisense strand to SEQ ID NO: 1617241
guauucccagaucucgggc

SEQ ID NO: 1617243 - RNA, 19 nt, Artificial Sequence
  Description of Artificial Sequence: Synthetic oligonucleotide
  Sense strand starting at position 2772 of SEQ ID NO: 1560682
ugggaauacaguggugauc

SEQ ID NO: 1617244 - RNA, 19 nt, Artificial Sequence
  Description of Artificial Sequence: Synthetic oligonucleotide
  Antisense strand to SEQ ID NO: 1617243
gaucaccacuguauuccca

SEQ ID NO: 1617245 - RNA, 19 nt, Artificial Sequence
  Description of Artificial Sequence: Synthetic oligonucleotide
  Sense strand starting at position 2783 of SEQ ID NO: 1560682
uggugauccaauugauggu

SEQ ID NO: 1617246 - RNA, 19 nt, Artificial Sequence
  Description of Artificial Sequence: Synthetic oligonucleotide
  Antisense strand to SEQ ID NO: 1617245
accaucaauuggaucacca

SEQ ID NO: 1617247 - RNA, 19 nt, Artificial Sequence
  Description of Artificial Sequence: Synthetic oligonucleotide
  Sense strand starting at position 2866 of SEQ ID NO: 1560682
aaagaugcaugguuuaaag

SEQ ID NO: 1617248 - RNA, 19 nt, Artificial Sequence
  Description of Artificial Sequence: Synthetic oligonucleotide
  Antisense strand to SEQ ID NO: 1617247
cuuuaaaccaugcaucuuu

SEQ ID NO: 1617249 - RNA, 19 nt, Artificial Sequence
  Description of Artificial Sequence: Synthetic oligonucleotide
  Sense strand starting at position 2877 of SEQ ID NO: 1560682
guuuaaagucaaggaauag

SEQ ID NO: 1617250 - RNA, 19 nt, Artificial Sequence
  Description of Artificial Sequence: Synthetic oligonucleotide
  Antisense strand to SEQ ID NO: 1617249
cuauuccuugacuuuaaac

SEQ ID NO: 1617251 - RNA, 19 nt, Artificial Sequence
  Description of Artificial Sequence: Synthetic oligonucleotide
  Sense strand starting at position 3283 of SEQ ID NO: 1560682
ccuugagcccugggcaaau

SEQ ID NO: 1617252 - RNA, 19 nt, Artificial Sequence
  Description of Artificial Sequence: Synthetic oligonucleotide
  Antisense strand to SEQ ID NO: 1617251
auuugcccagggcucaagg

SEQ ID NO: 1617253 - RNA, 19 nt, Artificial Sequence
  Description of Artificial Sequence: Synthetic oligonucleotide
  Sense strand starting at position 3367 of SEQ ID NO: 1560682
gagugaaguucccaagaaa

SEQ ID NO: 1617254 - RNA, 19 nt, Artificial Sequence
  Description of Artificial Sequence: Synthetic oligonucleotide
  Antisense strand to SEQ ID NO: 1617253
uuucuugggaacuucacuc

SEQ ID NO: 1617255 - RNA, 19 nt, Artificial Sequence
  Description of Artificial Sequence: Synthetic oligonucleotide
  Sense strand starting at position 3379 of SEQ ID NO: 1560682
caagaaaucugggauagag

SEQ ID NO: 1617256 - RNA, 19 nt, Artificial Sequence
  Description of Artificial Sequence: Synthetic oligonucleotide
  Antisense strand to SEQ ID NO: 1617255
cucuaucccagauuucuug

SEQ ID NO: 1617257 - RNA, 19 nt, Artificial Sequence
  Description of Artificial Sequence: Synthetic oligonucleotide
  Sense strand starting at position 3478 of SEQ ID NO: 1560682
aauuccuguugcugacaga

SEQ ID NO: 1617258 - RNA, 19 nt, Artificial Sequence
  Description of Artificial Sequence: Synthetic oligonucleotide
  Antisense strand to SEQ ID NO: 1617257
ucugucagcaacaggaauu

SEQ ID NO: 1617259 - RNA, 19 nt, Artificial Sequence
  Description of Artificial Sequence: Synthetic oligonucleotide
  Sense strand starting at position 3479 of SEQ ID NO: 1560682
auuccuguugcugacagau

SEQ ID NO: 1617260 - RNA, 19 nt, Artificial Sequence
  Description of Artificial Sequence: Synthetic oligonucleotide
  Antisense strand to SEQ ID NO: 1617259
aucugucagcaacaggaau

SEQ ID NO: 1617261 - RNA, 19 nt, Artificial Sequence
  Description of Artificial Sequence: Synthetic oligonucleotide
  Sense strand starting at position 3481 of SEQ ID NO: 1560682
uccuguugcugacagauaa

SEQ ID NO: 1617262 - RNA, 19 nt, Artificial Sequence
  Description of Artificial Sequence: Synthetic oligonucleotide
  Antisense strand to SEQ ID NO: 1617261
uuaucugucagcaacagga

SEQ ID NO: 1617263 - RNA, 19 nt, Artificial Sequence
  Description of Artificial Sequence: Synthetic oligonucleotide
  Sense strand starting at position 3492 of SEQ ID NO: 1560682
acagauaaucccugcuaga

SEQ ID NO: 1617264 - RNA, 19 nt, Artificial Sequence
  Description of Artificial Sequence: Synthetic oligonucleotide
  Antisense strand to SEQ ID NO: 1617263
ucuagcagggauuaucugu

SEQ ID NO: 1617265 - RNA, 19 nt, Artificial Sequence
  Description of Artificial Sequence: Synthetic oligonucleotide
  Sense strand starting at position 3709 of SEQ ID NO: 1560682
gcuggaaacugucacgaaa

SEQ ID NO: 1617266 - RNA, 19 nt, Artificial Sequence
  Description of Artificial Sequence: Synthetic oligonucleotide
  Antisense strand to SEQ ID NO: 1617265
uuucgugacaguuuccagc

SEQ ID NO: 1617267 - RNA, 19 nt, Artificial Sequence
  Description of Artificial Sequence: Synthetic oligonucleotide
  Sense strand starting at position 3711 of SEQ ID NO: 1560682
uggaaacugucacgaaacu

SEQ ID NO: 1617268 - RNA, 19 nt, Artificial Sequence
  Description of Artificial Sequence: Synthetic oligonucleotide
  Antisense strand to SEQ ID NO: 1617267
aguuucgugacaguuucca

SEQ ID NO: 1617269 - RNA, 19 nt, Artificial Sequence
  Description of Artificial Sequence: Synthetic oligonucleotide
  Sense strand starting at position 3892 of SEQ ID NO: 1560682
cacugugugucucuaggau

SEQ ID NO: 1617270 - RNA, 19 nt, Artificial Sequence
  Description of Artificial Sequence: Synthetic oligonucleotide
  Antisense strand to SEQ ID NO: 1617269
auccuagagacacacagug

SEQ ID NO: 1617271 - RNA, 19 nt, Artificial Sequence
  Description of Artificial Sequence: Synthetic oligonucleotide
  Sense strand starting at position 3956 of SEQ ID NO: 1560682
gggaggcguugagaugaau

SEQ ID NO: 1617272 - RNA, 19 nt, Artificial Sequence
  Description of Artificial Sequence: Synthetic oligonucleotide
  Antisense strand to SEQ ID NO: 1617271
auucaucucaacgccuccc

SEQ ID NO: 1617273 - RNA, 19 nt, Artificial Sequence
  Description of Artificial Sequence: Synthetic oligonucleotide
  Sense strand starting at position 3959 of SEQ ID NO: 1560682
aggcguugagaugaaugau

SEQ ID NO: 1617274 - RNA, 19 nt, Artificial Sequence
  Description of Artificial Sequence: Synthetic oligonucleotide
  Antisense strand to SEQ ID NO: 1617273
aucauucaucucaacgccu

SEQ ID NO: 1617275 - RNA, 19 nt, Artificial Sequence
  Description of Artificial Sequence: Synthetic oligonucleotide
  Sense strand starting at position 3962 of SEQ ID NO: 1560682
cguugagaugaaugauucu

SEQ ID NO: 1617276 - RNA, 19 nt, Artificial Sequence
  Description of Artificial Sequence: Synthetic oligonucleotide
  Antisense strand to SEQ ID NO: 1617275
agaaucauucaucucaacg

SEQ ID NO: 1617277 - RNA, 19 nt, Artificial Sequence
  Description of Artificial Sequence: Synthetic oligonucleotide
  Sense strand starting at position 3971 of SEQ ID NO: 1560682
gaaugauucucagccggug

SEQ ID NO: 1617278 - RNA, 19 nt, Artificial Sequence
  Description of Artificial Sequence: Synthetic oligonucleotide
  Antisense strand to SEQ ID NO: 1617277
caccggcugagaaucauuc

SEQ ID NO: 1617279 - RNA, 19 nt, Artificial Sequence
  Description of Artificial Sequence: Synthetic oligonucleotide
  Sense strand starting at position 651 of SEQ ID NO: 1560683
ggaaguuccucagcagaau

SEQ ID NO: 1617280 - RNA, 19 nt, Artificial Sequence
  Description of Artificial Sequence: Synthetic oligonucleotide
  Antisense strand to SEQ ID NO: 1617279
auucugcugaggaacuucc

SEQ ID NO: 1617281 - RNA, 19 nt, Artificial Sequence
  Description of Artificial Sequence: Synthetic oligonucleotide
  Sense strand starting at position 652 of SEQ ID NO: 1560683
gaaguuccucagcagaauc

SEQ ID NO: 1617282 - RNA, 19 nt, Artificial Sequence
  Description of Artificial Sequence: Synthetic oligonucleotide
  Antisense strand to SEQ ID NO: 1617281
gauucugcugaggaacuuc

SEQ ID NO: 1617283 - RNA, 19 nt, Artificial Sequence
  Description of Artificial Sequence: Synthetic oligonucleotide
  Sense strand starting at position 666 of SEQ ID NO: 1560683
gaaucacagccgugaaaug

SEQ ID NO: 1617284 - RNA, 19 nt, Artificial Sequence
  Description of Artificial Sequence: Synthetic oligonucleotide
  Antisense strand to SEQ ID NO: 1617283
cauuucacggcugugauuc

SEQ ID NO: 1617285 - RNA, 19 nt, Artificial Sequence
  Description of Artificial Sequence: Synthetic oligonucleotide
  Sense strand starting at position 678 of SEQ ID NO: 1560683
ugaaaugcccgccaggaaa

SEQ ID NO: 1617286 - RNA, 19 nt, Artificial Sequence
  Description of Artificial Sequence: Synthetic oligonucleotide
  Antisense strand to SEQ ID NO: 1617285
uuuccuggcgggcauuuca

SEQ ID NO: 1617287 - RNA, 19 nt, Artificial Sequence
  Description of Artificial Sequence: Synthetic oligonucleotide
  Sense strand starting at position 908 of SEQ ID NO: 1560683
gagucaaggucauucccaa

SEQ ID NO: 1617288 - RNA, 19 nt, Artificial Sequence
  Description of Artificial Sequence: Synthetic oligonucleotide
  Antisense strand to SEQ ID NO: 1617287
uugggaaugaccuugacuc

SEQ ID NO: 1617289 - RNA, 19 nt, Artificial Sequence
  Description of Artificial Sequence: Synthetic oligonucleotide
  Sense strand starting at position 1851 of SEQ ID NO: 1560683
ggagcgaguugcuccguuu

SEQ ID NO: 1617290 - RNA, 19 nt, Artificial Sequence
  Description of Artificial Sequence: Synthetic oligonucleotide
  Antisense strand to SEQ ID NO: 1617289
aaacggagcaacucgcucc

SEQ ID NO: 1617291 - RNA, 19 nt, Artificial Sequence
  Description of Artificial Sequence: Synthetic oligonucleotide
  Sense strand starting at position 1854 of SEQ ID NO: 1560683
gcgaguugcuccguuuccu

SEQ ID NO: 1617292 - RNA, 19 nt, Artificial Sequence
  Description of Artificial Sequence: Synthetic oligonucleotide
  Antisense strand to SEQ ID NO: 1617291
aggaaacggagcaacucgc

SEQ ID NO: 1617293 - RNA, 19 nt, Artificial Sequence
  Description of Artificial Sequence: Synthetic oligonucleotide
  Sense strand starting at position 2134 of SEQ ID NO: 1560683
ggguucuuggagcguggaa

SEQ ID NO: 1617294 - RNA, 19 nt, Artificial Sequence
  Description of Artificial Sequence: Synthetic oligonucleotide
  Antisense strand to SEQ ID NO: 1617293
uuccacgcuccaagaaccc

SEQ ID NO: 1617295 - RNA, 19 nt, Artificial Sequence
  Description of Artificial Sequence: Synthetic oligonucleotide
  Sense strand starting at position 2250 of SEQ ID NO: 1560683
gacacuucguacucugcaa

SEQ ID NO: 1617296 - RNA, 19 nt, Artificial Sequence
  Description of Artificial Sequence: Synthetic oligonucleotide
  Antisense strand to SEQ ID NO: 1617295
uugcagaguacgaaguguc

SEQ ID NO: 1617297 - RNA, 19 nt, Artificial Sequence
  Description of Artificial Sequence: Synthetic oligonucleotide
  Sense strand starting at position 2279 of SEQ ID NO: 1560683
cucagugucgcccauuuga

SEQ ID NO: 1617298 - RNA, 19 nt, Artificial Sequence
  Description of Artificial Sequence: Synthetic oligonucleotide
  Antisense strand to SEQ ID NO: 1617297
ucaaaugggcgacacugag

SEQ ID NO: 1617299 - RNA, 19 nt, Artificial Sequence
  Description of Artificial Sequence: Synthetic oligonucleotide
  Sense strand starting at position 2313 of SEQ ID NO: 1560683
gagggcuauuggugguuga

SEQ ID NO: 1617300 - RNA, 19 nt, Artificial Sequence
  Description of Artificial Sequence: Synthetic oligonucleotide
  Antisense strand to SEQ ID NO: 1617299
ucaaccaccaauagcccuc

SEQ ID NO: 1617301 - RNA, 19 nt, Artificial Sequence
  Description of Artificial Sequence: Synthetic oligonucleotide
  Sense strand starting at position 2316 of SEQ ID NO: 1560683
ggcuauuggugguugacaa

SEQ ID NO: 1617302 - RNA, 19 nt, Artificial Sequence
  Description of Artificial Sequence: Synthetic oligonucleotide
  Antisense strand to SEQ ID NO: 1617301
uugucaaccaccaauagcc

SEQ ID NO: 1617303 - RNA, 19 nt, Artificial Sequence
  Description of Artificial Sequence: Synthetic oligonucleotide
  Sense strand starting at position 2317 of SEQ ID NO: 1560683
gcuauuggugguugacaaa

SEQ ID NO: 1617304 - RNA, 19 nt, Artificial Sequence
  Description of Artificial Sequence: Synthetic oligonucleotide
  Antisense strand to SEQ ID NO: 1617303
uuugucaaccaccaauagc

SEQ ID NO: 1617305 - RNA, 19 nt, Artificial Sequence
  Description of Artificial Sequence: Synthetic oligonucleotide
  Sense strand starting at position 2350 of SEQ ID NO: 1560683
aaugucagccgcuaucaau

SEQ ID NO: 1617306 - RNA, 19 nt, Artificial Sequence
  Description of Artificial Sequence: Synthetic oligonucleotide
  Antisense strand to SEQ ID NO: 1617305
auugauagcggcugacauu

SEQ ID NO: 1617307 - RNA, 19 nt, Artificial Sequence
  Description of Artificial Sequence: Synthetic oligonucleotide
  Sense strand starting at position 2356 of SEQ ID NO: 1560683
agccgcuaucaauaucauu

SEQ ID NO: 1617308 - RNA, 19 nt, Artificial Sequence
  Description of Artificial Sequence: Synthetic oligonucleotide
  Antisense strand to SEQ ID NO: 1617307
aaugauauugauagcggcu

SEQ ID NO: 1617309 - RNA, 19 nt, Artificial Sequence
  Description of Artificial Sequence: Synthetic oligonucleotide
  Sense strand starting at position 2407 of SEQ ID NO: 1560683
guaacagaaucaucgggaa

SEQ ID NO: 1617310 - RNA, 19 nt, Artificial Sequence
  Description of Artificial Sequence: Synthetic oligonucleotide
  Antisense strand to SEQ ID NO: 1617309
uucccgaugauucuguuac

SEQ ID NO: 1617311 - RNA, 19 nt, Artificial Sequence
  Description of Artificial Sequence: Synthetic oligonucleotide
  Sense strand starting at position 2410 of SEQ ID NO: 1560683
acagaaucaucgggaacug

SEQ ID NO: 1617312 - RNA, 19 nt, Artificial Sequence
  Description of Artificial Sequence: Synthetic oligonucleotide
  Antisense strand to SEQ ID NO: 1617311
caguucccgaugauucugu

SEQ ID NO: 1617313 - RNA, 19 nt, Artificial Sequence
  Description of Artificial Sequence: Synthetic oligonucleotide
  Sense strand starting at position 2426 of SEQ ID NO: 1560683
cuguaaucauccggaugca

SEQ ID NO: 1617314 - RNA, 19 nt, Artificial Sequence
  Description of Artificial Sequence: Synthetic oligonucleotide
  Antisense strand to SEQ ID NO: 1617313
ugcauccggaugauuacag

SEQ ID NO: 1617315 - RNA, 19 nt, Artificial Sequence
  Description of Artificial Sequence: Synthetic oligonucleotide
  Sense strand starting at position 2427 of SEQ ID NO: 1560683
uguaaucauccggaugcaa

SEQ ID NO: 1617316 - RNA, 19 nt, Artificial Sequence
  Description of Artificial Sequence: Synthetic oligonucleotide
  Antisense strand to SEQ ID NO: 1617315
uugcauccggaugauuaca

SEQ ID NO: 1617317 - RNA, 19 nt, Artificial Sequence
  Description of Artificial Sequence: Synthetic oligonucleotide
  Sense strand starting at position 2440 of SEQ ID NO: 1560683
augcaaacuucuuagagcu

SEQ ID NO: 1617318 - RNA, 19 nt, Artificial Sequence
  Description of Artificial Sequence: Synthetic oligonucleotide
  Antisense strand to SEQ ID NO: 1617317
agcucuaagaaguuugcau

SEQ ID NO: 1617319 - RNA, 19 nt, Artificial Sequence
  Description of Artificial Sequence: Synthetic oligonucleotide
  Sense strand starting at position 2595 of SEQ ID NO: 1560683
agaacaguuugaucucacu

SEQ ID NO: 1617320 - RNA, 19 nt, Artificial Sequence
  Description of Artificial Sequence: Synthetic oligonucleotide
  Antisense strand to SEQ ID NO: 1617319
agugagaucaaacuguucu

SEQ ID NO: 1617321 - RNA, 19 nt, Artificial Sequence
  Description of Artificial Sequence: Synthetic oligonucleotide
  Sense strand starting at position 2642 of SEQ ID NO: 1560683
cagcgauggcuuugugguu

SEQ ID NO: 1617322 - RNA, 19 nt, Artificial Sequence
  Description of Artificial Sequence: Synthetic oligonucleotide
  Antisense strand to SEQ ID NO: 1617321
aaccacaaagccaucgcug

SEQ ID NO: 1617323 - RNA, 19 nt, Artificial Sequence
  Description of Artificial Sequence: Synthetic oligonucleotide
  Sense strand starting at position 2697 of SEQ ID NO: 1560683
gcaggccuuuaucuuuauu

SEQ ID NO: 1617324 - RNA, 19 nt, Artificial Sequence
  Description of Artificial Sequence: Synthetic oligonucleotide
  Antisense strand to SEQ ID NO: 1617323
aauaaagauaaaggccugc

SEQ ID NO: 1617325 - RNA, 19 nt, Artificial Sequence
  Description of Artificial Sequence: Synthetic oligonucleotide
  Sense strand starting at position 2916 of SEQ ID NO: 1560683
gggugaguucccuguccug

SEQ ID NO: 1617326 - RNA, 19 nt, Artificial Sequence
  Description of Artificial Sequence: Synthetic oligonucleotide
  Antisense strand to SEQ ID NO: 1617325
caggacagggaacucaccc

SEQ ID NO: 1617327 - RNA, 19 nt, Artificial Sequence
  Description of Artificial Sequence: Synthetic oligonucleotide
  Sense strand starting at position 3288 of SEQ ID NO: 1560683
ggaugaguccucugaaaca

SEQ ID NO: 1617328 - RNA, 19 nt, Artificial Sequence
  Description of Artificial Sequence: Synthetic oligonucleotide
  Antisense strand to SEQ ID NO: 1617327
uguuucagaggacucaucc

SEQ ID NO: 1617329 - RNA, 19 nt, Artificial Sequence
  Description of Artificial Sequence: Synthetic oligonucleotide
  Sense strand starting at position 3448 of SEQ ID NO: 1560683
acaagagaauuacagaaca

SEQ ID NO: 1617330 - RNA, 19 nt, Artificial Sequence
  Description of Artificial Sequence: Synthetic oligonucleotide
  Antisense strand to SEQ ID NO: 1617329
uguucuguaauucucuugu

SEQ ID NO: 1617331 - RNA, 19 nt, Artificial Sequence
  Description of Artificial Sequence: Synthetic oligonucleotide
  Sense strand starting at position 3629 of SEQ ID NO: 1560683
caccauggugccugguuaa

SEQ ID NO: 1617332 - RNA, 19 nt, Artificial Sequence
  Description of Artificial Sequence: Synthetic oligonucleotide
  Antisense strand to SEQ ID NO: 1617331
uuaaccaggcaccauggug

SEQ ID NO: 1617333 - RNA, 19 nt, Artificial Sequence
  Description of Artificial Sequence: Synthetic oligonucleotide
  Sense strand starting at position 3743 of SEQ ID NO: 1560683
ccaggaugcucucucaucu

SEQ ID NO: 1617334 - RNA, 19 nt, Artificial Sequence
  Description of Artificial Sequence: Synthetic oligonucleotide
  Antisense strand to SEQ ID NO: 1617333
agaugagagagcauccugg

SEQ ID NO: 1617335 - RNA, 19 nt, Artificial Sequence
  Description of Artificial Sequence: Synthetic oligonucleotide
  Sense strand starting at position 32 of SEQ ID NO: 1560684
ggauuuaccucagauuaau

SEQ ID NO: 1617336 - RNA, 19 nt, Artificial Sequence
  Description of Artificial Sequence: Synthetic oligonucleotide
  Antisense strand to SEQ ID NO: 1617335
auuaaucugagguaaaucc

SEQ ID NO: 1617337 - RNA, 19 nt, Artificial Sequence
  Description of Artificial Sequence: Synthetic oligonucleotide
  Sense strand starting at position 858 of SEQ ID NO: 1560684
ucccgcauucuuugaggca

SEQ ID NO: 1617338 - RNA, 19 nt, Artificial Sequence
  Description of Artificial Sequence: Synthetic oligonucleotide
  Antisense strand to SEQ ID NO: 1617337
ugccucaaagaaugcggga

SEQ ID NO: 1617339 - RNA, 19 nt, Artificial Sequence
  Description of Artificial Sequence: Synthetic oligonucleotide
  Sense strand starting at position 1051 of SEQ ID NO: 1560684
ccucauaggccucaaauga

SEQ ID NO: 1617340 - RNA, 19 nt, Artificial Sequence
  Description of Artificial Sequence: Synthetic oligonucleotide
  Antisense strand to SEQ ID NO: 1617339
ucauuugaggccuaugagg

SEQ ID NO: 1617341 - RNA, 19 nt, Artificial Sequence
  Description of Artificial Sequence: Synthetic oligonucleotide
  Sense strand starting at position 1156 of SEQ ID NO: 1560684
accaaacuucuguguccaa

SEQ ID NO: 1617342 - RNA, 19 nt, Artificial Sequence
  Description of Artificial Sequence: Synthetic oligonucleotide
  Antisense strand to SEQ ID NO: 1617341
uuggacacagaaguuuggu

SEQ ID NO: 1617343 - RNA, 19 nt, Artificial Sequence
  Description of Artificial Sequence: Synthetic oligonucleotide
  Sense strand starting at position 1159 of SEQ ID NO: 1560684
aaacuucuguguccaagga

SEQ ID NO: 1617344 - RNA, 19 nt, Artificial Sequence
  Description of Artificial Sequence: Synthetic oligonucleotide
  Antisense strand to SEQ ID NO: 1617343
uccuuggacacagaaguuu

SEQ ID NO: 1617345 - RNA, 19 nt, Artificial Sequence
  Description of Artificial Sequence: Synthetic oligonucleotide
  Sense strand starting at position 1163 of SEQ ID NO: 1560684
uucuguguccaaggagaau

SEQ ID NO: 1617346 - RNA, 19 nt, Artificial Sequence
  Description of Artificial Sequence: Synthetic oligonucleotide
  Antisense strand to SEQ ID NO: 1617345
auucuccuuggacacagaa

SEQ ID NO: 1617347 - RNA, 19 nt, Artificial Sequence
  Description of Artificial Sequence: Synthetic oligonucleotide
  Sense strand starting at position 1175 of SEQ ID NO: 1560684
ggagaaucaugcccuucca

SEQ ID NO: 1617348 - RNA, 19 nt, Artificial Sequence
  Description of Artificial Sequence: Synthetic oligonucleotide
  Antisense strand to SEQ ID NO: 1617347
uggaagggcaugauucucc

SEQ ID NO: 1617349 - RNA, 19 nt, Artificial Sequence
  Description of Artificial Sequence: Synthetic oligonucleotide
  Sense strand starting at position 1453 of SEQ ID NO: 1560684
ggagcccugucaccagaaa

SEQ ID NO: 1617350 - RNA, 19 nt, Artificial Sequence
  Description of Artificial Sequence: Synthetic oligonucleotide
  Antisense strand to SEQ ID NO: 1617349
uuucuggugacagggcucc

SEQ ID NO: 1617351 - RNA, 19 nt, Artificial Sequence
  Description of Artificial Sequence: Synthetic oligonucleotide
  Sense strand starting at position 1497 of SEQ ID NO: 1560684
gcuuucgugucccuugaga

SEQ ID NO: 1617352 - RNA, 19 nt, Artificial Sequence
  Description of Artificial Sequence: Synthetic oligonucleotide
  Antisense strand to SEQ ID NO: 1617351
ucucaagggacacgaaagc

SEQ ID NO: 1617353 - RNA, 19 nt, Artificial Sequence
  Description of Artificial Sequence: Synthetic oligonucleotide
  Sense strand starting at position 2038 of SEQ ID NO: 1560684
gcggcuuccgcgagaucug

SEQ ID NO: 1617354 - RNA, 19 nt, Artificial Sequence
  Description of Artificial Sequence: Synthetic oligonucleotide
  Antisense strand to SEQ ID NO: 1617353
cagaucucgcggaagccgc

SEQ ID NO: 1617355 - RNA, 19 nt, Artificial Sequence
  Description of Artificial Sequence: Synthetic oligonucleotide
  Sense strand starting at position 2047 of SEQ ID NO: 1560684
gcgagaucugccgcccaaa

SEQ ID NO: 1617356 - RNA, 19 nt, Artificial Sequence
  Description of Artificial Sequence: Synthetic oligonucleotide
  Antisense strand to SEQ ID NO: 1617355
uuugggcggcagaucucgc

SEQ ID NO: 1617357 - RNA, 19 nt, Artificial Sequence
  Description of Artificial Sequence: Synthetic oligonucleotide
  Sense strand starting at position 2072 of SEQ ID NO: 1560684
uggaacauguaguuuguau

SEQ ID NO: 1617358 - RNA, 19 nt, Artificial Sequence
  Description of Artificial Sequence: Synthetic oligonucleotide
  Antisense strand to SEQ ID NO: 1617357
auacaaacuacauguucca

SEQ ID NO: 1617359 - RNA, 19 nt, Artificial Sequence
  Description of Artificial Sequence: Synthetic oligonucleotide
  Sense strand starting at position 2079 of SEQ ID NO: 1560684
uguaguuuguauuugggau

SEQ ID NO: 1617360 - RNA, 19 nt, Artificial Sequence
  Description of Artificial Sequence: Synthetic oligonucleotide
  Antisense strand to SEQ ID NO: 1617359
aucccaaauacaaacuaca

SEQ ID NO: 1617361 - RNA, 19 nt, Artificial Sequence
  Description of Artificial Sequence: Synthetic oligonucleotide
  Sense strand starting at position 2081 of SEQ ID NO: 1560684
uaguuuguauuugggauga

SEQ ID NO: 1617362 - RNA, 19 nt, Artificial Sequence
  Description of Artificial Sequence: Synthetic oligonucleotide
  Antisense strand to SEQ ID NO: 1617361
ucaucccaaauacaaacua

SEQ ID NO: 1617363 - RNA, 19 nt, Artificial Sequence
  Description of Artificial Sequence: Synthetic oligonucleotide
  Sense strand starting at position 2083 of SEQ ID NO: 1560684
guuuguauuugggaugacu

SEQ ID NO: 1617364 - RNA, 19 nt, Artificial Sequence
  Description of Artificial Sequence: Synthetic oligonucleotide
  Antisense strand to SEQ ID NO: 1617363
agucaucccaaauacaaac

SEQ ID NO: 1617365 - RNA, 19 nt, Artificial Sequence
  Description of Artificial Sequence: Synthetic oligonucleotide
  Sense strand starting at position 2124 of SEQ ID NO: 1560684
gggcgacgccguuugguua

SEQ ID NO: 1617366 - RNA, 19 nt, Artificial Sequence
  Description of Artificial Sequence: Synthetic oligonucleotide
  Antisense strand to SEQ ID NO: 1617365
uaaccaaacggcgucgccc

SEQ ID NO: 1617367 - RNA, 19 nt, Artificial Sequence
  Description of Artificial Sequence: Synthetic oligonucleotide
  Sense strand starting at position 2138 of SEQ ID NO: 1560684
gguuaucgugacugggacu

SEQ ID NO: 1617368 - RNA, 19 nt, Artificial Sequence
  Description of Artificial Sequence: Synthetic oligonucleotide
  Antisense strand to SEQ ID NO: 1617367
agucccagucacgauaacc

SEQ ID NO: 1617369 - RNA, 19 nt, Artificial Sequence
  Description of Artificial Sequence: Synthetic oligonucleotide
  Sense strand starting at position 2152 of SEQ ID NO: 1560684
ggacuuaggcaucgcugau

SEQ ID NO: 1617370 - RNA, 19 nt, Artificial Sequence
  Description of Artificial Sequence: Synthetic oligonucleotide
  Antisense strand to SEQ ID NO: 1617369
aucagcgaugccuaagucc

SEQ ID NO: 1617371 - RNA, 19 nt, Artificial Sequence
  Description of Artificial Sequence: Synthetic oligonucleotide
  Sense strand starting at position 2182 of SEQ ID NO: 1560684
uccguuucuggagguuaaa

SEQ ID NO: 1617372 - RNA, 19 nt, Artificial Sequence
  Description of Artificial Sequence: Synthetic oligonucleotide
  Antisense strand to SEQ ID NO: 1617371
uuuaaccuccagaaacgga

SEQ ID NO: 1617373 - RNA, 19 nt, Artificial Sequence
  Description of Artificial Sequence: Synthetic oligonucleotide
  Sense strand starting at position 2212 of SEQ ID NO: 1560684
ccagucguucacgcaguaa

SEQ ID NO: 1617374 - RNA, 19 nt, Artificial Sequence
  Description of Artificial Sequence: Synthetic oligonucleotide
  Antisense strand to SEQ ID NO: 1617373
uuacugcgugaacgacugg

SEQ ID NO: 1617375 - RNA, 19 nt, Artificial Sequence
  Description of Artificial Sequence: Synthetic oligonucleotide
  Sense strand starting at position 2215 of SEQ ID NO: 1560684
gucguucacgcaguaauag

SEQ ID NO: 1617376 - RNA, 19 nt, Artificial Sequence
  Description of Artificial Sequence: Synthetic oligonucleotide
  Antisense strand to SEQ ID NO: 1617375
cuauuacugcgugaacgac

SEQ ID NO: 1617377 - RNA, 19 nt, Artificial Sequence
  Description of Artificial Sequence: Synthetic oligonucleotide
  Sense strand starting at position 2224 of SEQ ID NO: 1560684
gcaguaauagggcgagucu

SEQ ID NO: 1617378 - RNA, 19 nt, Artificial Sequence
  Description of Artificial Sequence: Synthetic oligonucleotide
  Antisense strand to SEQ ID NO: 1617377
agacucgcccuauuacugc

SEQ ID NO: 1617379 - RNA, 19 nt, Artificial Sequence
  Description of Artificial Sequence: Synthetic oligonucleotide
  Sense strand starting at position 2270 of SEQ ID NO: 1560684
ggcgaugcacacuauaaca

SEQ ID NO: 1617380 - RNA, 19 nt, Artificial Sequence
  Description of Artificial Sequence: Synthetic oligonucleotide
  Antisense strand to SEQ ID NO: 1617379
uguuauagugugcaucgcc

SEQ ID NO: 1617381 - RNA, 19 nt, Artificial Sequence
  Description of Artificial Sequence: Synthetic oligonucleotide
  Sense strand starting at position 2322 of SEQ ID NO: 1560684
uuggaugagucucaagaug

SEQ ID NO: 1617382 - RNA, 19 nt, Artificial Sequence
  Description of Artificial Sequence: Synthetic oligonucleotide
  Antisense strand to SEQ ID NO: 1617381
caucuugagacucauccaa

SEQ ID NO: 1617383 - RNA, 19 nt, Artificial Sequence
  Description of Artificial Sequence: Synthetic oligonucleotide
  Sense strand starting at position 2347 of SEQ ID NO: 1560684
cgggauguugcagguaaca

SEQ ID NO: 1617384 - RNA, 19 nt, Artificial Sequence
  Description of Artificial Sequence: Synthetic oligonucleotide
  Antisense strand to SEQ ID NO: 1617383
uguuaccugcaacaucccg

SEQ ID NO: 1617385 - RNA, 19 nt, Artificial Sequence
  Description of Artificial Sequence: Synthetic oligonucleotide
  Sense strand starting at position 2499 of SEQ ID NO: 1560684
accucuugguuucucgaga

SEQ ID NO: 1617386 - RNA, 19 nt, Artificial Sequence
  Description of Artificial Sequence: Synthetic oligonucleotide
  Antisense strand to SEQ ID NO: 1617385
ucucgagaaaccaagaggu

SEQ ID NO: 1617387 - RNA, 19 nt, Artificial Sequence
  Description of Artificial Sequence: Synthetic oligonucleotide
  Sense strand starting at position 2601 of SEQ ID NO: 1560684
cugcgucccguuuccgaaa

SEQ ID NO: 1617388 - RNA, 19 nt, Artificial Sequence
  Description of Artificial Sequence: Synthetic oligonucleotide
  Antisense strand to SEQ ID NO: 1617387
uuucggaaacgggacgcag

SEQ ID NO: 1617389 - RNA, 19 nt, Artificial Sequence
  Description of Artificial Sequence: Synthetic oligonucleotide
  Sense strand starting at position 2967 of SEQ ID NO: 1560684
gugucagugcauuaaugag

SEQ ID NO: 1617390 - RNA, 19 nt, Artificial Sequence
  Description of Artificial Sequence: Synthetic oligonucleotide
  Antisense strand to SEQ ID NO: 1617389
cucauuaaugcacugacac

SEQ ID NO: 1617391 - RNA, 19 nt, Artificial Sequence
  Description of Artificial Sequence: Synthetic oligonucleotide
  Sense strand starting at position 3003 of SEQ ID NO: 1560684
uuacguaugaugugagguu

SEQ ID NO: 1617392 - RNA, 19 nt, Artificial Sequence
  Description of Artificial Sequence: Synthetic oligonucleotide
  Antisense strand to SEQ ID NO: 1617391
aaccucacaucauacguaa

SEQ ID NO: 1617393 - RNA, 19 nt, Artificial Sequence
  Description of Artificial Sequence: Synthetic oligonucleotide
  Sense strand starting at position 3012 of SEQ ID NO: 1560684
augugagguuacguaugau

SEQ ID NO: 1617394 - RNA, 19 nt, Artificial Sequence
  Description of Artificial Sequence: Synthetic oligonucleotide
  Antisense strand to SEQ ID NO: 1617393
aucauacguaaccucacau

SEQ ID NO: 1617395 - RNA, 19 nt, Artificial Sequence
  Description of Artificial Sequence: Synthetic oligonucleotide
  Sense strand starting at position 3015 of SEQ ID NO: 1560684
ugagguuacguaugauaug

SEQ ID NO: 1617396 - RNA, 19 nt, Artificial Sequence
  Description of Artificial Sequence: Synthetic oligonucleotide
  Antisense strand to SEQ ID NO: 1617395
cauaucauacguaaccuca

SEQ ID NO: 1617397 - RNA, 19 nt, Artificial Sequence
  Description of Artificial Sequence: Synthetic oligonucleotide
  Sense strand starting at position 3021 of SEQ ID NO: 1560684
uacguaugauaugaucaga

SEQ ID NO: 1617398 - RNA, 19 nt, Artificial Sequence
  Description of Artificial Sequence: Synthetic oligonucleotide
  Antisense strand to SEQ ID NO: 1617397
ucugaucauaucauacgua

SEQ ID NO: 1617399 - RNA, 19 nt, Artificial Sequence
  Description of Artificial Sequence: Synthetic oligonucleotide
  Sense strand starting at position 3026 of SEQ ID NO: 1560684
augauaugaucagagugga

SEQ ID NO: 1617400 - RNA, 19 nt, Artificial Sequence
  Description of Artificial Sequence: Synthetic oligonucleotide
  Antisense strand to SEQ ID NO: 1617399
uccacucugaucauaucau

SEQ ID NO: 1617401 - RNA, 19 nt, Artificial Sequence
  Description of Artificial Sequence: Synthetic oligonucleotide
  Sense strand starting at position 3048 of SEQ ID NO: 1560684
uucugauauuggguaguca

SEQ ID NO: 1617402 - RNA, 19 nt, Artificial Sequence
  Description of Artificial Sequence: Synthetic oligonucleotide
  Antisense strand to SEQ ID NO: 1617401
ugacuacccaauaucagaa

SEQ ID NO: 1617403 - RNA, 19 nt, Artificial Sequence
  Description of Artificial Sequence: Synthetic oligonucleotide
  Sense strand starting at position 3052 of SEQ ID NO: 1560684
gauauuggguagucaggaa

SEQ ID NO: 1617404 - RNA, 19 nt, Artificial Sequence
  Description of Artificial Sequence: Synthetic oligonucleotide
  Antisense strand to SEQ ID NO: 1617403
uuccugacuacccaauauc

SEQ ID NO: 1617405 - RNA, 19 nt, Artificial Sequence
  Description of Artificial Sequence: Synthetic oligonucleotide
  Sense strand starting at position 3417 of SEQ ID NO: 1560684
gaaugccagcuaugggaau

SEQ ID NO: 1617406 - RNA, 19 nt, Artificial Sequence
  Description of Artificial Sequence: Synthetic oligonucleotide
  Antisense strand to SEQ ID NO: 1617405
auucccauagcuggcauuc

SEQ ID NO: 1617407 - RNA, 19 nt, Artificial Sequence
  Description of Artificial Sequence: Synthetic oligonucleotide
  Sense strand starting at position 3509 of SEQ ID NO: 1560684
uuugaagaaugucaaggau

SEQ ID NO: 1617408 - RNA, 19 nt, Artificial Sequence
  Description of Artificial Sequence: Synthetic oligonucleotide
  Antisense strand to SEQ ID NO: 1617407
auccuugacauucuucaaa

SEQ ID NO: 1617409 - RNA, 19 nt, Artificial Sequence
  Description of Artificial Sequence: Synthetic oligonucleotide
  Sense strand starting at position 3938 of SEQ ID NO: 1560684
ugucuucccugucuccaua

SEQ ID NO: 1617410 - RNA, 19 nt, Artificial Sequence
  Description of Artificial Sequence: Synthetic oligonucleotide
  Antisense strand to SEQ ID NO: 1617409
uauggagacagggaagaca

SEQ ID NO: 1617411 - RNA, 19 nt, Artificial Sequence
  Description of Artificial Sequence: Synthetic oligonucleotide
  Sense strand starting at position 3960 of SEQ ID NO: 1560684
ucacccuagucugaagaca

SEQ ID NO: 1617412 - RNA, 19 nt, Artificial Sequence
  Description of Artificial Sequence: Synthetic oligonucleotide
  Antisense strand to SEQ ID NO: 1617411
ugucuucagacuaggguga

SEQ ID NO: 1617413 - RNA, 19 nt, Artificial Sequence
  Description of Artificial Sequence: Synthetic oligonucleotide
  Sense strand starting at position 3971 of SEQ ID NO: 1560684
ugaagacaucauugucugu

SEQ ID NO: 1617414 - RNA, 19 nt, Artificial Sequence
  Description of Artificial Sequence: Synthetic oligonucleotide
  Antisense strand to SEQ ID NO: 1617413
acagacaaugaugucuuca

SEQ ID NO: 1617415 - RNA, 19 nt, Artificial Sequence
  Description of Artificial Sequence: Synthetic oligonucleotide
  Sense strand starting at position 434 of SEQ ID NO: 1560685
cagcaugugucacugcaga

SEQ ID NO: 1617416 - RNA, 19 nt, Artificial Sequence
  Description of Artificial Sequence: Synthetic oligonucleotide
  Antisense strand to SEQ ID NO: 1617415
ucugcagugacacaugcug

SEQ ID NO: 1617417 - RNA, 19 nt, Artificial Sequence
  Description of Artificial Sequence: Synthetic oligonucleotide
  Sense strand starting at position 703 of SEQ ID NO: 1560685
cuccuuggcucguggaaac

SEQ ID NO: 1617418 - RNA, 19 nt, Artificial Sequence
  Description of Artificial Sequence: Synthetic oligonucleotide
  Antisense strand to SEQ ID NO: 1617417
guuuccacgagccaaggag

SEQ ID NO: 1617419 - RNA, 19 nt, Artificial Sequence
  Description of Artificial Sequence: Synthetic oligonucleotide
  Sense strand starting at position 1000 of SEQ ID NO: 1560685
cgacuaagucuuuguucca

SEQ ID NO: 1617420 - RNA, 19 nt, Artificial Sequence
  Description of Artificial Sequence: Synthetic oligonucleotide
  Antisense strand to SEQ ID NO: 1617419
uggaacaaagacuuagucg

SEQ ID NO: 1617421 - RNA, 19 nt, Artificial Sequence
  Description of Artificial Sequence: Synthetic oligonucleotide
  Sense strand starting at position 1266 of SEQ ID NO: 1560685
ggcgcuuauucccaggacu

SEQ ID NO: 1617422 - RNA, 19 nt, Artificial Sequence
  Description of Artificial Sequence: Synthetic oligonucleotide
  Antisense strand to SEQ ID NO: 1617421
aguccugggaauaagcgcc

SEQ ID NO: 1617423 - RNA, 19 nt, Artificial Sequence
  Description of Artificial Sequence: Synthetic oligonucleotide
  Sense strand starting at position 2322 of SEQ ID NO: 1560685
gggacaugcuuucggacua

SEQ ID NO: 1617424 - RNA, 19 nt, Artificial Sequence
  Description of Artificial Sequence: Synthetic oligonucleotide
  Antisense strand to SEQ ID NO: 1617423
uaguccgaaagcauguccc

SEQ ID NO: 1617425 - RNA, 19 nt, Artificial Sequence
  Description of Artificial Sequence: Synthetic oligonucleotide
  Sense strand starting at position 2610 of SEQ ID NO: 1560685
aguuguuaugccucagccu

SEQ ID NO: 1617426 - RNA, 19 nt, Artificial Sequence
  Description of Artificial Sequence: Synthetic oligonucleotide
  Antisense strand to SEQ ID NO: 1617425
aggcugaggcauaacaacu

SEQ ID NO: 1617427 - RNA, 19 nt, Artificial Sequence
  Description of Artificial Sequence: Synthetic oligonucleotide
  Sense strand starting at position 2888 of SEQ ID NO: 1560685
gggagaguuccaggaccuu

SEQ ID NO: 1617428 - RNA, 19 nt, Artificial Sequence
  Description of Artificial Sequence: Synthetic oligonucleotide
  Antisense strand to SEQ ID NO: 1617427
aagguccuggaacucuccc

SEQ ID NO: 1617429 - RNA, 19 nt, Artificial Sequence
  Description of Artificial Sequence: Synthetic oligonucleotide
  Sense strand starting at position 3052 of SEQ ID NO: 1560685
acagguguucaaggacuga

SEQ ID NO: 1617430 - RNA, 19 nt, Artificial Sequence
  Description of Artificial Sequence: Synthetic oligonucleotide
  Antisense strand to SEQ ID NO: 1617429
ucaguccuugaacaccugu

SEQ ID NO: 1617431 - RNA, 19 nt, Artificial Sequence
  Description of Artificial Sequence: Synthetic oligonucleotide
  Sense strand starting at position 3101 of SEQ ID NO: 1560685
uggagaaacuguccugguu

SEQ ID NO: 1617432 - RNA, 19 nt, Artificial Sequence
  Description of Artificial Sequence: Synthetic oligonucleotide
  Antisense strand to SEQ ID NO: 1617431
aaccaggacaguuucucca

SEQ ID NO: 1617433 - RNA, 19 nt, Artificial Sequence
  Description of Artificial Sequence: Synthetic oligonucleotide
  Sense strand starting at position 3103 of SEQ ID NO: 1560685
gagaaacuguccugguucu

SEQ ID NO: 1617434 - RNA, 19 nt, Artificial Sequence
  Description of Artificial Sequence: Synthetic oligonucleotide
  Antisense strand to SEQ ID NO: 1617433
agaaccaggacaguuucuc

SEQ ID NO: 1617435 - RNA, 19 nt, Artificial Sequence
  Description of Artificial Sequence: Synthetic oligonucleotide
  Sense strand starting at position 3104 of SEQ ID NO: 1560685
agaaacuguccugguucua

SEQ ID NO: 1617436 - RNA, 19 nt, Artificial Sequence
  Description of Artificial Sequence: Synthetic oligonucleotide
  Antisense strand to SEQ ID NO: 1617435
uagaaccaggacaguuucu

SEQ ID NO: 1617437 - RNA, 19 nt, Artificial Sequence
  Description of Artificial Sequence: Synthetic oligonucleotide
  Sense strand starting at position 3568 of SEQ ID NO: 1560685
ggauguugugcugaccaca

SEQ ID NO: 1617438 - RNA, 19 nt, Artificial Sequence
  Description of Artificial Sequence: Synthetic oligonucleotide
  Antisense strand to SEQ ID NO: 1617437
uguggucagcacaacaucc

SEQ ID NO: 1617439 - RNA, 19 nt, Artificial Sequence
  Description of Artificial Sequence: Synthetic oligonucleotide
  Sense strand starting at position 3571 of SEQ ID NO: 1560685
uguugugcugaccacagaa

SEQ ID NO: 1617440 - RNA, 19 nt, Artificial Sequence
  Description of Artificial Sequence: Synthetic oligonucleotide
  Antisense strand to SEQ ID NO: 1617439
uucuguggucagcacaaca

SEQ ID NO: 1617441 - RNA, 19 nt, Artificial Sequence
  Description of Artificial Sequence: Synthetic oligonucleotide
  Sense strand starting at position 3593 of SEQ ID NO: 1560685
cugaauaaaucaggaugga

SEQ ID NO: 1617442 - RNA, 19 nt, Artificial Sequence
  Description of Artificial Sequence: Synthetic oligonucleotide
  Antisense strand to SEQ ID NO: 1617441
uccauccugauuuauucag

SEQ ID NO: 1617443 - RNA, 19 nt, Artificial Sequence
  Description of Artificial Sequence: Synthetic oligonucleotide
  Sense strand starting at position 3682 of SEQ ID NO: 1560685
agcucugucucccgagaag

SEQ ID NO: 1617444 - RNA, 19 nt, Artificial Sequence
  Description of Artificial Sequence: Synthetic oligonucleotide
  Antisense strand to SEQ ID NO: 1617443
cuucucgggagacagagcu

SEQ ID NO: 1617445 - RNA, 19 nt, Artificial Sequence
  Description of Artificial Sequence: Synthetic oligonucleotide
  Sense strand starting at position 3708 of SEQ ID NO: 1560685
gcugguuacuggccugaga

SEQ ID NO: 1617446 - RNA, 19 nt, Artificial Sequence
  Description of Artificial Sequence: Synthetic oligonucleotide
  Antisense strand to SEQ ID NO: 1617445
ucucaggccaguaaccagc

SEQ ID NO: 1617447 - RNA, 19 nt, Artificial Sequence
  Description of Artificial Sequence: Synthetic oligonucleotide
  Sense strand starting at position 3763 of SEQ ID NO: 1560685
cagugcucccaaggagaca

SEQ ID NO: 1617448 - RNA, 19 nt, Artificial Sequence
  Description of Artificial Sequence: Synthetic oligonucleotide
  Antisense strand to SEQ ID NO: 1617447
ugucuccuugggagcacug

SEQ ID NO: 1617449 - RNA, 19 nt, Artificial Sequence
  Description of Artificial Sequence: Synthetic oligonucleotide
  Sense strand starting at position 9 of SEQ ID NO: 1560686
uuaccaguuucugagauug

SEQ ID NO: 1617450 - RNA, 19 nt, Artificial Sequence
  Description of Artificial Sequence: Synthetic oligonucleotide
  Antisense strand to SEQ ID NO: 1617449
caaucucagaaacugguaa

SEQ ID NO: 1617451 - RNA, 19 nt, Artificial Sequence
  Description of Artificial Sequence: Synthetic oligonucleotide
  Sense strand starting at position 11 of SEQ ID NO: 1560686
accaguuucugagauugau

SEQ ID NO: 1617452 - RNA, 19 nt, Artificial Sequence
  Description of Artificial Sequence: Synthetic oligonucleotide
  Antisense strand to SEQ ID NO: 1617451
aucaaucucagaaacuggu

SEQ ID NO: 1617453 - RNA, 19 nt, Artificial Sequence
  Description of Artificial Sequence: Synthetic oligonucleotide
  Sense strand starting at position 15 of SEQ ID NO: 1560686
guuucugagauugaugugu

SEQ ID NO: 1617454 - RNA, 19 nt, Artificial Sequence
  Description of Artificial Sequence: Synthetic oligonucleotide
  Antisense strand to SEQ ID NO: 1617453
acacaucaaucucagaaac

SEQ ID NO: 1617455 - RNA, 19 nt, Artificial Sequence
  Description of Artificial Sequence: Synthetic oligonucleotide
  Sense strand starting at position 19 of SEQ ID NO: 1560686
cugagauugauguguuaaa

SEQ ID NO: 1617456 - RNA, 19 nt, Artificial Sequence
  Description of Artificial Sequence: Synthetic oligonucleotide
  Antisense strand to SEQ ID NO: 1617455
uuuaacacaucaaucucag

SEQ ID NO: 1617457 - RNA, 19 nt, Artificial Sequence
  Description of Artificial Sequence: Synthetic oligonucleotide
  Sense strand starting at position 111 of SEQ ID NO: 1560686
uuugcuuaagucuaggagu

SEQ ID NO: 1617458 - RNA, 19 nt, Artificial Sequence
  Description of Artificial Sequence: Synthetic oligonucleotide
  Antisense strand to SEQ ID NO: 1617457
acuccuagacuuaagcaaa

SEQ ID NO: 1617459 - RNA, 19 nt, Artificial Sequence
  Description of Artificial Sequence: Synthetic oligonucleotide
  Sense strand starting at position 189 of SEQ ID NO: 1560686
gccagauguaauggcaugu

SEQ ID NO: 1617460 - RNA, 19 nt, Artificial Sequence
  Description of Artificial Sequence: Synthetic oligonucleotide
  Antisense strand to SEQ ID NO: 1617459
acaugccauuacaucuggc

SEQ ID NO: 1617461 - RNA, 19 nt, Artificial Sequence
  Description of Artificial Sequence: Synthetic oligonucleotide
  Sense strand starting at position 266 of SEQ ID NO: 1560686
ucaagacugcagugagguu

SEQ ID NO: 1617462 - RNA, 19 nt, Artificial Sequence
  Description of Artificial Sequence: Synthetic oligonucleotide
  Antisense strand to SEQ ID NO: 1617461
aaccucacugcagucuuga

SEQ ID NO: 1617463 - RNA, 19 nt, Artificial Sequence
  Description of Artificial Sequence: Synthetic oligonucleotide
  Sense strand starting at position 727 of SEQ ID NO: 1560686
augagaguauaacaugaaa

SEQ ID NO: 1617464 - RNA, 19 nt, Artificial Sequence
  Description of Artificial Sequence: Synthetic oligonucleotide
  Antisense strand to SEQ ID NO: 1617463
uuucauguuauacucucau

SEQ ID NO: 1617465 - RNA, 19 nt, Artificial Sequence
  Description of Artificial Sequence: Synthetic oligonucleotide
  Sense strand starting at position 810 of SEQ ID NO: 1560686
ucuuuauucccuuguguca

SEQ ID NO: 1617466 - RNA, 19 nt, Artificial Sequence
  Description of Artificial Sequence: Synthetic oligonucleotide
  Antisense strand to SEQ ID NO: 1617465
ugacacaagggaauaaaga

SEQ ID NO: 1617467 - RNA, 19 nt, Artificial Sequence
  Description of Artificial Sequence: Synthetic oligonucleotide
  Sense strand starting at position 827 of SEQ ID NO: 1560686
cacacaaaggaguguaauu

SEQ ID NO: 1617468 - RNA, 19 nt, Artificial Sequence
  Description of Artificial Sequence: Synthetic oligonucleotide
  Antisense strand to SEQ ID NO: 1617467
aauuacacuccuuugugug

SEQ ID NO: 1617469 - RNA, 19 nt, Artificial Sequence
  Description of Artificial Sequence: Synthetic oligonucleotide
  Sense strand starting at position 2142 of SEQ ID NO: 1560686
cuccuuguuugaguacuau

SEQ ID NO: 1617470 - RNA, 19 nt, Artificial Sequence
  Description of Artificial Sequence: Synthetic oligonucleotide
  Antisense strand to SEQ ID NO: 1617469
auaguacucaaacaaggag

SEQ ID NO: 1617471 - RNA, 19 nt, Artificial Sequence
  Description of Artificial Sequence: Synthetic oligonucleotide
  Sense strand starting at position 2219 of SEQ ID NO: 1560686
ugacaaauaugacagucuu

SEQ ID NO: 1617472 - RNA, 19 nt, Artificial Sequence
  Description of Artificial Sequence: Synthetic oligonucleotide
  Antisense strand to SEQ ID NO: 1617471
aagacugucauauuuguca

SEQ ID NO: 1617473 - RNA, 19 nt, Artificial Sequence
  Description of Artificial Sequence: Synthetic oligonucleotide
  Sense strand starting at position 3104 of SEQ ID NO: 1560686
auagauaccuguucuugau

SEQ ID NO: 1617474 - RNA, 19 nt, Artificial Sequence
  Description of Artificial Sequence: Synthetic oligonucleotide
  Antisense strand to SEQ ID NO: 1617473
aucaagaacagguaucuau

SEQ ID NO: 1617475 - RNA, 19 nt, Artificial Sequence
  Description of Artificial Sequence: Synthetic oligonucleotide
  Sense strand starting at position 3106 of SEQ ID NO: 1560686
agauaccuguucuugauga

SEQ ID NO: 1617476 - RNA, 19 nt, Artificial Sequence
  Description of Artificial Sequence: Synthetic oligonucleotide
  Antisense strand to SEQ ID NO: 1617475
ucaucaagaacagguaucu

SEQ ID NO: 1617477 - RNA, 19 nt, Artificial Sequence
  Description of Artificial Sequence: Synthetic oligonucleotide
  Sense strand starting at position 3108 of SEQ ID NO: 1560686
auaccuguucuugaugaac

SEQ ID NO: 1617478 - RNA, 19 nt, Artificial Sequence
  Description of Artificial Sequence: Synthetic oligonucleotide
  Antisense strand to SEQ ID NO: 1617477
guucaucaagaacagguau

SEQ ID NO: 1617479 - RNA, 19 nt, Artificial Sequence
  Description of Artificial Sequence: Synthetic oligonucleotide
  Sense strand starting at position 3111 of SEQ ID NO: 1560686
ccuguucuugaugaacaua

SEQ ID NO: 1617480 - RNA, 19 nt, Artificial Sequence
  Description of Artificial Sequence: Synthetic oligonucleotide
  Antisense strand to SEQ ID NO: 1617479
uauguucaucaagaacagg

SEQ ID NO: 1617481 - RNA, 19 nt, Artificial Sequence
  Description of Artificial Sequence: Synthetic oligonucleotide
  Sense strand starting at position 3136 of SEQ ID NO: 1560686
ggagcaaguaucugugauu

SEQ ID NO: 1617482 - RNA, 19 nt, Artificial Sequence
  Description of Artificial Sequence: Synthetic oligonucleotide
  Antisense strand to SEQ ID NO: 1617481
aaucacagauacuugcucc

SEQ ID NO: 1617483 - RNA, 19 nt, Artificial Sequence
  Description of Artificial Sequence: Synthetic oligonucleotide
  Sense strand starting at position 3139 of SEQ ID NO: 1560686
gcaaguaucugugauuugg

SEQ ID NO: 1617484 - RNA, 19 nt, Artificial Sequence
  Description of Artificial Sequence: Synthetic oligonucleotide
  Antisense strand to SEQ ID NO: 1617483
ccaaaucacagauacuugc

SEQ ID NO: 1617485 - RNA, 19 nt, Artificial Sequence
  Description of Artificial Sequence: Synthetic oligonucleotide
  Sense strand starting at position 3143 of SEQ ID NO: 1560686
guaucugugauuuggguau

SEQ ID NO: 1617486 - RNA, 19 nt, Artificial Sequence
  Description of Artificial Sequence: Synthetic oligonucleotide
  Antisense strand to SEQ ID NO: 1617485
auacccaaaucacagauac

SEQ ID NO: 1617487 - RNA, 19 nt, Artificial Sequence
  Description of Artificial Sequence: Synthetic oligonucleotide
  Sense strand starting at position 3145 of SEQ ID NO: 1560686
aucugugauuuggguauuu

SEQ ID NO: 1617488 - RNA, 19 nt, Artificial Sequence
  Description of Artificial Sequence: Synthetic oligonucleotide
  Antisense strand to SEQ ID NO: 1617487
aaauacccaaaucacagau

SEQ ID NO: 1617489 - RNA, 19 nt, Artificial Sequence
  Description of Artificial Sequence: Synthetic oligonucleotide
  Sense strand starting at position 3161 of SEQ ID NO: 1560686
uuugaauuacuccggaccu

SEQ ID NO: 1617490 - RNA, 19 nt, Artificial Sequence
  Description of Artificial Sequence: Synthetic oligonucleotide
  Antisense strand to SEQ ID NO: 1617489
agguccggaguaauucaaa

SEQ ID NO: 1617491 - RNA, 19 nt, Artificial Sequence
  Description of Artificial Sequence: Synthetic oligonucleotide
  Sense strand starting at position 3224 of SEQ ID NO: 1560686
uggauucuguggucugcga

SEQ ID NO: 1617492 - RNA, 19 nt, Artificial Sequence
  Description of Artificial Sequence: Synthetic oligonucleotide
  Antisense strand to SEQ ID NO: 1617491
ucgcagaccacagaaucca

SEQ ID NO: 1617493 - RNA, 19 nt, Artificial Sequence
  Description of Artificial Sequence: Synthetic oligonucleotide
  Sense strand starting at position 3668 of SEQ ID NO: 1560686
gucauaugaucacugcuga

SEQ ID NO: 1617494 - RNA, 19 nt, Artificial Sequence
  Description of Artificial Sequence: Synthetic oligonucleotide
  Antisense strand to SEQ ID NO: 1617493
ucagcagugaucauaugac

SEQ ID NO: 1617495 - RNA, 19 nt, Artificial Sequence
  Description of Artificial Sequence: Synthetic oligonucleotide
  Sense strand starting at position 3669 of SEQ ID NO: 1560686
ucauaugaucacugcugaa

SEQ ID NO: 1617496 - RNA, 19 nt, Artificial Sequence
  Description of Artificial Sequence: Synthetic oligonucleotide
  Antisense strand to SEQ ID NO: 1617495
uucagcagugaucauauga

SEQ ID NO: 1617497 - RNA, 19 nt, Artificial Sequence
  Description of Artificial Sequence: Synthetic oligonucleotide
  Sense strand starting at position 3740 of SEQ ID NO: 1560686
uccaucaacugggaagaau

SEQ ID NO: 1617498 - RNA, 19 nt, Artificial Sequence
  Description of Artificial Sequence: Synthetic oligonucleotide
  Antisense strand to SEQ ID NO: 1617497
auucuucccaguugaugga

SEQ ID NO: 1617499 - RNA, 19 nt, Artificial Sequence
  Description of Artificial Sequence: Synthetic oligonucleotide
  Sense strand starting at position 3751 of SEQ ID NO: 1560686
ggaagaauccaucaugcgu

SEQ ID NO: 1617500 - RNA, 19 nt, Artificial Sequence
  Description of Artificial Sequence: Synthetic oligonucleotide
  Antisense strand to SEQ ID NO: 1617499
acgcaugauggauucuucc

SEQ ID NO: 1617501 - RNA, 19 nt, Artificial Sequence
  Description of Artificial Sequence: Synthetic oligonucleotide
  Sense strand starting at position 3756 of SEQ ID NO: 1560686
aauccaucaugcguagaaa

SEQ ID NO: 1617502 - RNA, 19 nt, Artificial Sequence
  Description of Artificial Sequence: Synthetic oligonucleotide
  Antisense strand to SEQ ID NO: 1617501
uuucuacgcaugauggauu

SEQ ID NO: 1617503 - RNA, 19 nt, Artificial Sequence
  Description of Artificial Sequence: Synthetic oligonucleotide
  Sense strand starting at position 3757 of SEQ ID NO: 1560686
auccaucaugcguagaaac

SEQ ID NO: 1617504 - RNA, 19 nt, Artificial Sequence
  Description of Artificial Sequence: Synthetic oligonucleotide
  Antisense strand to SEQ ID NO: 1617503
guuucuacgcaugauggau

SEQ ID NO: 1617505 - RNA, 19 nt, Artificial Sequence
  Description of Artificial Sequence: Synthetic oligonucleotide
  Sense strand starting at position 3759 of SEQ ID NO: 1560686
ccaucaugcguagaaacuu

SEQ ID NO: 1617506 - RNA, 19 nt, Artificial Sequence
  Description of Artificial Sequence: Synthetic oligonucleotide
  Antisense strand to SEQ ID NO: 1617505
aaguuucuacgcaugaugg

SEQ ID NO: 1617507 - RNA, 19 nt, Artificial Sequence
  Description of Artificial Sequence: Synthetic oligonucleotide
  Sense strand starting at position 3785 of SEQ ID NO: 1560686
uguguaugcacugucaugu

SEQ ID NO: 1617508 - RNA, 19 nt, Artificial Sequence
  Description of Artificial Sequence: Synthetic oligonucleotide
  Antisense strand to SEQ ID NO: 1617507
acaugacagugcauacaca

SEQ ID NO: 1617509 - RNA, 19 nt, Artificial Sequence
  Description of Artificial Sequence: Synthetic oligonucleotide
  Sense strand starting at position 3796 of SEQ ID NO: 1560686
ugucauguuuacuccuuga

SEQ ID NO: 1617510 - RNA, 19 nt, Artificial Sequence
  Description of Artificial Sequence: Synthetic oligonucleotide
  Antisense strand to SEQ ID NO: 1617509
ucaaggaguaaacaugaca

SEQ ID NO: 1617511 - RNA, 19 nt, Artificial Sequence
  Description of Artificial Sequence: Synthetic oligonucleotide
  Sense strand starting at position 3889 of SEQ ID NO: 1560686
accugaugguucccaaaga

SEQ ID NO: 1617512 - RNA, 19 nt, Artificial Sequence
  Description of Artificial Sequence: Synthetic oligonucleotide
  Antisense strand to SEQ ID NO: 1617511
ucuuugggaaccaucaggu

SEQ ID NO: 1617513 - RNA, 19 nt, Artificial Sequence
  Description of Artificial Sequence: Synthetic oligonucleotide
  Sense strand starting at position 3890 of SEQ ID NO: 1560686
ccugaugguucccaaagac

SEQ ID NO: 1617514 - RNA, 19 nt, Artificial Sequence
  Description of Artificial Sequence: Synthetic oligonucleotide
  Antisense strand to SEQ ID NO: 1617513
gucuuugggaaccaucagg

SEQ ID NO: 1617515 - RNA, 19 nt, Artificial Sequence
  Description of Artificial Sequence: Synthetic oligonucleotide
  Sense strand starting at position 3905 of SEQ ID NO: 1560686
agacguuaguugccaaauc

SEQ ID NO: 1617516 - RNA, 19 nt, Artificial Sequence
  Description of Artificial Sequence: Synthetic oligonucleotide
  Antisense strand to SEQ ID NO: 1617515
gauuuggcaacuaacgucu

SEQ ID NO: 1617517 - RNA, 19 nt, Artificial Sequence
  Description of Artificial Sequence: Synthetic oligonucleotide
  Sense strand starting at position 3913 of SEQ ID NO: 1560686
guugccaaaucugcaaaua

SEQ ID NO: 1617518 - RNA, 19 nt, Artificial Sequence
  Description of Artificial Sequence: Synthetic oligonucleotide
  Antisense strand to SEQ ID NO: 1617517
uauuugcagauuuggcaac

SEQ ID NO: 1617519 - RNA, 19 nt, Artificial Sequence
  Description of Artificial Sequence: Synthetic oligonucleotide
  Sense strand starting at position 3924 of SEQ ID NO: 1560686
ugcaaauaucccugauaag

SEQ ID NO: 1617520 - RNA, 19 nt, Artificial Sequence
  Description of Artificial Sequence: Synthetic oligonucleotide
  Antisense strand to SEQ ID NO: 1617519
cuuaucagggauauuugca

SEQ ID NO: 1617521 - RNA, 19 nt, Artificial Sequence
  Description of Artificial Sequence: Synthetic oligonucleotide
  Sense strand starting at position 3925 of SEQ ID NO: 1560686
gcaaauaucccugauaagc

SEQ ID NO: 1617522 - RNA, 19 nt, Artificial Sequence
  Description of Artificial Sequence: Synthetic oligonucleotide
  Antisense strand to SEQ ID NO: 1617521
gcuuaucagggauauuugc

SEQ ID NO: 1617523 - RNA, 19 nt, Artificial Sequence
  Description of Artificial Sequence: Synthetic oligonucleotide
  Sense strand starting at position 3934 of SEQ ID NO: 1560686
ccugauaagcauugaaugu

SEQ ID NO: 1617524 - RNA, 19 nt, Artificial Sequence
  Description of Artificial Sequence: Synthetic oligonucleotide
  Antisense strand to SEQ ID NO: 1617523
acauucaaugcuuaucagg

SEQ ID NO: 1617525 - RNA, 19 nt, Artificial Sequence
  Description of Artificial Sequence: Synthetic oligonucleotide
  Sense strand starting at position 3941 of SEQ ID NO: 1560686
agcauugaauguuuccaaa

SEQ ID NO: 1617526 - RNA, 19 nt, Artificial Sequence
  Description of Artificial Sequence: Synthetic oligonucleotide
  Antisense strand to SEQ ID NO: 1617525
uuuggaaacauucaaugcu

SEQ ID NO: 1617527 - RNA, 19 nt, Artificial Sequence
  Description of Artificial Sequence: Synthetic oligonucleotide
  Sense strand starting at position 3981 of SEQ ID NO: 1560686
gagauuuccugccaggcau

SEQ ID NO: 1617528 - RNA, 19 nt, Artificial Sequence
  Description of Artificial Sequence: Synthetic oligonucleotide
  Antisense strand to SEQ ID NO: 1617527
augccuggcaggaaaucuc

SEQ ID NO: 1617529 - RNA, 19 nt, Artificial Sequence
  Description of Artificial Sequence: Synthetic oligonucleotide
  Sense strand starting at position 458 of SEQ ID NO: 1560687
guuugcugaagucagauau

SEQ ID NO: 1617530 - RNA, 19 nt, Artificial Sequence
  Description of Artificial Sequence: Synthetic oligonucleotide
  Antisense strand to SEQ ID NO: 1617529
auaucugacuucagcaaac

SEQ ID NO: 1617531 - RNA, 19 nt, Artificial Sequence
  Description of Artificial Sequence: Synthetic oligonucleotide
  Sense strand starting at position 1168 of SEQ ID NO: 1560687
uucuguuguccuggcauua

SEQ ID NO: 1617532 - RNA, 19 nt, Artificial Sequence
  Description of Artificial Sequence: Synthetic oligonucleotide
  Antisense strand to SEQ ID NO: 1617531
uaaugccaggacaacagaa

SEQ ID NO: 1617533 - RNA, 19 nt, Artificial Sequence
  Description of Artificial Sequence: Synthetic oligonucleotide
  Sense strand starting at position 1173 of SEQ ID NO: 1560687
uuguccuggcauuaagauu

SEQ ID NO: 1617534 - RNA, 19 nt, Artificial Sequence
  Description of Artificial Sequence: Synthetic oligonucleotide
  Antisense strand to SEQ ID NO: 1617533
aaucuuaaugccaggacaa

SEQ ID NO: 1617535 - RNA, 19 nt, Artificial Sequence
  Description of Artificial Sequence: Synthetic oligonucleotide
  Sense strand starting at position 1389 of SEQ ID NO: 1560687
ccgauaggguaucagauau

SEQ ID NO: 1617536 - RNA, 19 nt, Artificial Sequence
  Description of Artificial Sequence: Synthetic oligonucleotide
  Antisense strand to SEQ ID NO: 1617535
auaucugauacccuaucgg

SEQ ID NO: 1617537 - RNA, 19 nt, Artificial Sequence
  Description of Artificial Sequence: Synthetic oligonucleotide
  Sense strand starting at position 1406 of SEQ ID NO: 1560687
auaauuaaguuccaugaug

SEQ ID NO: 1617538 - RNA, 19 nt, Artificial Sequence
  Description of Artificial Sequence: Synthetic oligonucleotide
  Antisense strand to SEQ ID NO: 1617537
caucauggaacuuaauuau

SEQ ID NO: 1617539 - RNA, 19 nt, Artificial Sequence
  Description of Artificial Sequence: Synthetic oligonucleotide
  Sense strand starting at position 1500 of SEQ ID NO: 1560687
gaaucaugacagugaguuu

SEQ ID NO: 1617540 - RNA, 19 nt, Artificial Sequence
  Description of Artificial Sequence: Synthetic oligonucleotide
  Antisense strand to SEQ ID NO: 1617539
aaacucacugucaugauuc

SEQ ID NO: 1617541 - RNA, 19 nt, Artificial Sequence
  Description of Artificial Sequence: Synthetic oligonucleotide
  Sense strand starting at position 1509 of SEQ ID NO: 1560687
cagugaguuuagggaagga

SEQ ID NO: 1617542 - RNA, 19 nt, Artificial Sequence
  Description of Artificial Sequence: Synthetic oligonucleotide
  Antisense strand to SEQ ID NO: 1617541
uccuucccuaaacucacug

SEQ ID NO: 1617543 - RNA, 19 nt, Artificial Sequence
  Description of Artificial Sequence: Synthetic oligonucleotide
  Sense strand starting at position 1595 of SEQ ID NO: 1560687
ucaagaacuuuccagagag

SEQ ID NO: 1617544 - RNA, 19 nt, Artificial Sequence
  Description of Artificial Sequence: Synthetic oligonucleotide
  Antisense strand to SEQ ID NO: 1617543
cucucuggaaaguucuuga

SEQ ID NO: 1617545 - RNA, 19 nt, Artificial Sequence
  Description of Artificial Sequence: Synthetic oligonucleotide
  Sense strand starting at position 1663 of SEQ ID NO: 1560687
agugauguuguuggacuuu

SEQ ID NO: 1617546 - RNA, 19 nt, Artificial Sequence
  Description of Artificial Sequence: Synthetic oligonucleotide
  Antisense strand to SEQ ID NO: 1617545
aaaguccaacaacaucacu

SEQ ID NO: 1617547 - RNA, 19 nt, Artificial Sequence
  Description of Artificial Sequence: Synthetic oligonucleotide
  Sense strand starting at position 1703 of SEQ ID NO: 1560687
cccagauagcuccgugaac

SEQ ID NO: 1617548 - RNA, 19 nt, Artificial Sequence
  Description of Artificial Sequence: Synthetic oligonucleotide
  Antisense strand to SEQ ID NO: 1617547
guucacggagcuaucuggg

SEQ ID NO: 1617549 - RNA, 19 nt, Artificial Sequence
  Description of Artificial Sequence: Synthetic oligonucleotide
  Sense strand starting at position 1704 of SEQ ID NO: 1560687
ccagauagcuccgugaaca

SEQ ID NO: 1617550 - RNA, 19 nt, Artificial Sequence
  Description of Artificial Sequence: Synthetic oligonucleotide
  Antisense strand to SEQ ID NO: 1617549
uguucacggagcuaucugg

SEQ ID NO: 1617551 - RNA, 19 nt, Artificial Sequence
  Description of Artificial Sequence: Synthetic oligonucleotide
  Sense strand starting at position 1705 of SEQ ID NO: 1560687
cagauagcuccgugaacaa

SEQ ID NO: 1617552 - RNA, 19 nt, Artificial Sequence
  Description of Artificial Sequence: Synthetic oligonucleotide
  Antisense strand to SEQ ID NO: 1617551
uuguucacggagcuaucug

SEQ ID NO: 1617553 - RNA, 19 nt, Artificial Sequence
  Description of Artificial Sequence: Synthetic oligonucleotide
  Sense strand starting at position 1791 of SEQ ID NO: 1560687
gguauaaguuuccacgaga

SEQ ID NO: 1617554 - RNA, 19 nt, Artificial Sequence
  Description of Artificial Sequence: Synthetic oligonucleotide
  Antisense strand to SEQ ID NO: 1617553
ucucguggaaacuuauacc

SEQ ID NO: 1617555 - RNA, 19 nt, Artificial Sequence
  Description of Artificial Sequence: Synthetic oligonucleotide
  Sense strand starting at position 1796 of SEQ ID NO: 1560687
aaguuuccacgagauagca

SEQ ID NO: 1617556 - RNA, 19 nt, Artificial Sequence
  Description of Artificial Sequence: Synthetic oligonucleotide
  Antisense strand to SEQ ID NO: 1617555
ugcuaucucguggaaacuu

SEQ ID NO: 1617557 - RNA, 19 nt, Artificial Sequence
  Description of Artificial Sequence: Synthetic oligonucleotide
  Sense strand starting at position 1832 of SEQ ID NO: 1560687
cuugcuaaacugugaagau

SEQ ID NO: 1617558 - RNA, 19 nt, Artificial Sequence
  Description of Artificial Sequence: Synthetic oligonucleotide
  Antisense strand to SEQ ID NO: 1617557
aucuucacaguuuagcaag

SEQ ID NO: 1617559 - RNA, 19 nt, Artificial Sequence
  Description of Artificial Sequence: Synthetic oligonucleotide
  Sense strand starting at position 1833 of SEQ ID NO: 1560687
uugcuaaacugugaagaug

SEQ ID NO: 1617560 - RNA, 19 nt, Artificial Sequence
  Description of Artificial Sequence: Synthetic oligonucleotide
  Antisense strand to SEQ ID NO: 1617559
caucuucacaguuuagcaa

SEQ ID NO: 1617561 - RNA, 19 nt, Artificial Sequence
  Description of Artificial Sequence: Synthetic oligonucleotide
  Sense strand starting at position 1889 of SEQ ID NO: 1560687
uuuggucaauagucaauaa

SEQ ID NO: 1617562 - RNA, 19 nt, Artificial Sequence
  Description of Artificial Sequence: Synthetic oligonucleotide
  Antisense strand to SEQ ID NO: 1617561
uuauugacuauugaccaaa

SEQ ID NO: 1617563 - RNA, 19 nt, Artificial Sequence
  Description of Artificial Sequence: Synthetic oligonucleotide
  Sense strand starting at position 2160 of SEQ ID NO: 1560687
ccaauaugguguuaccaac

SEQ ID NO: 1617564 - RNA, 19 nt, Artificial Sequence
  Description of Artificial Sequence: Synthetic oligonucleotide
  Antisense strand to SEQ ID NO: 1617563
guugguaacaccauauugg

SEQ ID NO: 1617565 - RNA, 19 nt, Artificial Sequence
  Description of Artificial Sequence: Synthetic oligonucleotide
  Sense strand starting at position 2291 of SEQ ID NO: 1560687
uugaaagcauucuacggaa

SEQ ID NO: 1617566 - RNA, 19 nt, Artificial Sequence
  Description of Artificial Sequence: Synthetic oligonucleotide
  Antisense strand to SEQ ID NO: 1617565
uuccguagaaugcuuucaa

SEQ ID NO: 1617567 - RNA, 19 nt, Artificial Sequence
  Description of Artificial Sequence: Synthetic oligonucleotide
  Sense strand starting at position 2293 of SEQ ID NO: 1560687
gaaagcauucuacggaaau

SEQ ID NO: 1617568 - RNA, 19 nt, Artificial Sequence
  Description of Artificial Sequence: Synthetic oligonucleotide
  Antisense strand to SEQ ID NO: 1617567
auuuccguagaaugcuuuc

SEQ ID NO: 1617569 - RNA, 19 nt, Artificial Sequence
  Description of Artificial Sequence: Synthetic oligonucleotide
  Sense strand starting at position 2712 of SEQ ID NO: 1560687
ggucuaugcagugacuacu

SEQ ID NO: 1617570 - RNA, 19 nt, Artificial Sequence
  Description of Artificial Sequence: Synthetic oligonucleotide
  Antisense strand to SEQ ID NO: 1617569
aguagucacugcauagacc

SEQ ID NO: 1617571 - RNA, 19 nt, Artificial Sequence
  Description of Artificial Sequence: Synthetic oligonucleotide
  Sense strand starting at position 2767 of SEQ ID NO: 1560687
guauaaaucuuccugguuu

SEQ ID NO: 1617572 - RNA, 19 nt, Artificial Sequence
  Description of Artificial Sequence: Synthetic oligonucleotide
  Antisense strand to SEQ ID NO: 1617571
aaaccaggaagauuuauac

SEQ ID NO: 1617573 - RNA, 19 nt, Artificial Sequence
  Description of Artificial Sequence: Synthetic oligonucleotide
  Sense strand starting at position 2769 of SEQ ID NO: 1560687
auaaaucuuccugguuuga

SEQ ID NO: 1617574 - RNA, 19 nt, Artificial Sequence
  Description of Artificial Sequence: Synthetic oligonucleotide
  Antisense strand to SEQ ID NO: 1617573
ucaaaccaggaagauuuau

SEQ ID NO: 1617575 - RNA, 19 nt, Artificial Sequence
  Description of Artificial Sequence: Synthetic oligonucleotide
  Sense strand starting at position 2779 of SEQ ID NO: 1560687
cugguuugaucuuugagga

SEQ ID NO: 1617576 - RNA, 19 nt, Artificial Sequence
  Description of Artificial Sequence: Synthetic oligonucleotide
  Antisense strand to SEQ ID NO: 1617575
uccucaaagaucaaaccag

SEQ ID NO: 1617577 - RNA, 19 nt, Artificial Sequence
  Description of Artificial Sequence: Synthetic oligonucleotide
  Sense strand starting at position 2780 of SEQ ID NO: 1560687
ugguuugaucuuugaggag

SEQ ID NO: 1617578 - RNA, 19 nt, Artificial Sequence
  Description of Artificial Sequence: Synthetic oligonucleotide
  Antisense strand to SEQ ID NO: 1617577
cuccucaaagaucaaacca

SEQ ID NO: 1617579 - RNA, 19 nt, Artificial Sequence
  Description of Artificial Sequence: Synthetic oligonucleotide
  Sense strand starting at position 2800 of SEQ ID NO: 1560687
cagacagaugcuggcuauu

SEQ ID NO: 1617580 - RNA, 19 nt, Artificial Sequence
  Description of Artificial Sequence: Synthetic oligonucleotide
  Antisense strand to SEQ ID NO: 1617579
aauagccagcaucugucug

SEQ ID NO: 1617581 - RNA, 19 nt, Artificial Sequence
  Description of Artificial Sequence: Synthetic oligonucleotide
  Sense strand starting at position 2853 of SEQ ID NO: 1560687
acacaauuagcuuacguau

SEQ ID NO: 1617582 - RNA, 19 nt, Artificial Sequence
  Description of Artificial Sequence: Synthetic oligonucleotide
  Antisense strand to SEQ ID NO: 1617581
auacguaagcuaauugugu

SEQ ID NO: 1617583 - RNA, 19 nt, Artificial Sequence
  Description of Artificial Sequence: Synthetic oligonucleotide
  Sense strand starting at position 2855 of SEQ ID NO: 1560687
acaauuagcuuacguauuu

SEQ ID NO: 1617584 - RNA, 19 nt, Artificial Sequence
  Description of Artificial Sequence: Synthetic oligonucleotide
  Antisense strand to SEQ ID NO: 1617583
aaauacguaagcuaauugu

SEQ ID NO: 1617585 - RNA, 19 nt, Artificial Sequence
  Description of Artificial Sequence: Synthetic oligonucleotide
  Sense strand starting at position 3018 of SEQ ID NO: 1560687
cagagagaaauggguguua

SEQ ID NO: 1617586 - RNA, 19 nt, Artificial Sequence
  Description of Artificial Sequence: Synthetic oligonucleotide
  Antisense strand to SEQ ID NO: 1617585
uaacacccauuucucucug

SEQ ID NO: 1617587 - RNA, 19 nt, Artificial Sequence
  Description of Artificial Sequence: Synthetic oligonucleotide
  Sense strand starting at position 3056 of SEQ ID NO: 1560687
auauuugcaugaugugcau

SEQ ID NO: 1617588 - RNA, 19 nt, Artificial Sequence
  Description of Artificial Sequence: Synthetic oligonucleotide
  Antisense strand to SEQ ID NO: 1617587
augcacaucaugcaaauau

SEQ ID NO: 1617589 - RNA, 19 nt, Artificial Sequence
  Description of Artificial Sequence: Synthetic oligonucleotide
  Sense strand starting at position 3067 of SEQ ID NO: 1560687
augugcauccaguaaagua

SEQ ID NO: 1617590 - RNA, 19 nt, Artificial Sequence
  Description of Artificial Sequence: Synthetic oligonucleotide
  Antisense strand to SEQ ID NO: 1617589
uacuuuacuggaugcacau

SEQ ID NO: 1617591 - RNA, 19 nt, Artificial Sequence
  Description of Artificial Sequence: Synthetic oligonucleotide
  Sense strand starting at position 3246 of SEQ ID NO: 1560687
ucagauaaacgcugaugaa

SEQ ID NO: 1617592 - RNA, 19 nt, Artificial Sequence
  Description of Artificial Sequence: Synthetic oligonucleotide
  Antisense strand to SEQ ID NO: 1617591
uucaucagcguuuaucuga

SEQ ID NO: 1617593 - RNA, 19 nt, Artificial Sequence
  Description of Artificial Sequence: Synthetic oligonucleotide
  Sense strand starting at position 3286 of SEQ ID NO: 1560687
auacacuucuguuuggcua

SEQ ID NO: 1617594 - RNA, 19 nt, Artificial Sequence
  Description of Artificial Sequence: Synthetic oligonucleotide
  Antisense strand to SEQ ID NO: 1617593
uagccaaacagaaguguau

SEQ ID NO: 1617595 - RNA, 19 nt, Artificial Sequence
  Description of Artificial Sequence: Synthetic oligonucleotide
  Sense strand starting at position 3362 of SEQ ID NO: 1560687
acguguagccagugagagu

SEQ ID NO: 1617596 - RNA, 19 nt, Artificial Sequence
  Description of Artificial Sequence: Synthetic oligonucleotide
  Antisense strand to SEQ ID NO: 1617595
acucucacuggcuacacgu

SEQ ID NO: 1617597 - RNA, 19 nt, Artificial Sequence
  Description of Artificial Sequence: Synthetic oligonucleotide
  Sense strand starting at position 3363 of SEQ ID NO: 1560687
cguguagccagugagaguu

SEQ ID NO: 1617598 - RNA, 19 nt, Artificial Sequence
  Description of Artificial Sequence: Synthetic oligonucleotide
  Antisense strand to SEQ ID NO: 1617597
aacucucacuggcuacacg

SEQ ID NO: 1617599 - RNA, 19 nt, Artificial Sequence
  Description of Artificial Sequence: Synthetic oligonucleotide
  Sense strand starting at position 3377 of SEQ ID NO: 1560687
gaguuuaaaugggaagaaa

SEQ ID NO: 1617600 - RNA, 19 nt, Artificial Sequence
  Description of Artificial Sequence: Synthetic oligonucleotide
  Antisense strand to SEQ ID NO: 1617599
uuucuucccauuuaaacuc

SEQ ID NO: 1617601 - RNA, 19 nt, Artificial Sequence
  Description of Artificial Sequence: Synthetic oligonucleotide
  Sense strand starting at position 3397 of SEQ ID NO: 1560687
guacuuuauuuguauccca

SEQ ID NO: 1617602 - RNA, 19 nt, Artificial Sequence
  Description of Artificial Sequence: Synthetic oligonucleotide
  Antisense strand to SEQ ID NO: 1617601
ugggauacaaauaaaguac

SEQ ID NO: 1617603 - RNA, 19 nt, Artificial Sequence
  Description of Artificial Sequence: Synthetic oligonucleotide
  Sense strand starting at position 3602 of SEQ ID NO: 1560687
ugaacuuugguuugcagaa

SEQ ID NO: 1617604 - RNA, 19 nt, Artificial Sequence
  Description of Artificial Sequence: Synthetic oligonucleotide
  Antisense strand to SEQ ID NO: 1617603
uucugcaaaccaaaguuca

SEQ ID NO: 1617605 - RNA, 19 nt, Artificial Sequence
  Description of Artificial Sequence: Synthetic oligonucleotide
  Sense strand starting at position 3603 of SEQ ID NO: 1560687
gaacuuugguuugcagaaa

SEQ ID NO: 1617606 - RNA, 19 nt, Artificial Sequence
  Description of Artificial Sequence: Synthetic oligonucleotide
  Antisense strand to SEQ ID NO: 1617605
uuucugcaaaccaaaguuc

SEQ ID NO: 1617607 - RNA, 19 nt, Artificial Sequence
  Description of Artificial Sequence: Synthetic oligonucleotide
  Sense strand starting at position 3729 of SEQ ID NO: 1560687
uuuagagucucccucuguu

SEQ ID NO: 1617608 - RNA, 19 nt, Artificial Sequence
  Description of Artificial Sequence: Synthetic oligonucleotide
  Antisense strand to SEQ ID NO: 1617607
aacagagggagacucuaaa

SEQ ID NO: 1617609 - RNA, 19 nt, Artificial Sequence
  Description of Artificial Sequence: Synthetic oligonucleotide
  Sense strand starting at position 1794 of SEQ ID NO: 1560688
auuaccaccugagguauaa

SEQ ID NO: 1617610 - RNA, 19 nt, Artificial Sequence
  Description of Artificial Sequence: Synthetic oligonucleotide
  Antisense strand to SEQ ID NO: 1617609
uuauaccucaggugguaau

SEQ ID NO: 1617611 - RNA, 19 nt, Artificial Sequence
  Description of Artificial Sequence: Synthetic oligonucleotide
  Sense strand starting at position 1798 of SEQ ID NO: 1560688
ccaccugagguauaacuuu

SEQ ID NO: 1617612 - RNA, 19 nt, Artificial Sequence
  Description of Artificial Sequence: Synthetic oligonucleotide
  Antisense strand to SEQ ID NO: 1617611
aaaguuauaccucaggugg

SEQ ID NO: 1617613 - RNA, 19 nt, Artificial Sequence
  Description of Artificial Sequence: Synthetic oligonucleotide
  Sense strand starting at position 3500 of SEQ ID NO: 1560688
cuucuuugguuuccacauu

SEQ ID NO: 1617614 - RNA, 19 nt, Artificial Sequence
  Description of Artificial Sequence: Synthetic oligonucleotide
  Antisense strand to SEQ ID NO: 1617613
aauguggaaaccaaagaag

SEQ ID NO: 1617615 - RNA, 19 nt, Artificial Sequence
  Description of Artificial Sequence: Synthetic oligonucleotide
  Sense strand starting at position 983 of SEQ ID NO: 1560690
gguauaccaugagagaauc

SEQ ID NO: 1617616 - RNA, 19 nt, Artificial Sequence
  Description of Artificial Sequence: Synthetic oligonucleotide
  Antisense strand to SEQ ID NO: 1617615
gauucucucaugguauacc

SEQ ID NO: 1617617 - RNA, 19 nt, Artificial Sequence
  Description of Artificial Sequence: Synthetic oligonucleotide
  Sense strand starting at position 1173 of SEQ ID NO: 1560690
guuguccuggcauaaagau

SEQ ID NO: 1617618 - RNA, 19 nt, Artificial Sequence
  Description of Artificial Sequence: Synthetic oligonucleotide
  Antisense strand to SEQ ID NO: 1617617
aucuuuaugccaggacaac

SEQ ID NO: 1617619 - RNA, 19 nt, Artificial Sequence
  Description of Artificial Sequence: Synthetic oligonucleotide
  Sense strand starting at position 1407 of SEQ ID NO: 1560690
acaaauuucugguggaaua

SEQ ID NO: 1617620 - RNA, 19 nt, Artificial Sequence
  Description of Artificial Sequence: Synthetic oligonucleotide
  Antisense strand to SEQ ID NO: 1617619
uauuccaccagaaauuugu

SEQ ID NO: 1617621 - RNA, 19 nt, Artificial Sequence
  Description of Artificial Sequence: Synthetic oligonucleotide
  Sense strand starting at position 1417 of SEQ ID NO: 1560690
gguggaauaucagauauaa

SEQ ID NO: 1617622 - RNA, 19 nt, Artificial Sequence
  Description of Artificial Sequence: Synthetic oligonucleotide
  Antisense strand to SEQ ID NO: 1617621
uuauaucugauauuccacc

SEQ ID NO: 1617623 - RNA, 19 nt, Artificial Sequence
  Description of Artificial Sequence: Synthetic oligonucleotide
  Sense strand starting at position 1428 of SEQ ID NO: 1560690
agauauaaguaaguuccau

SEQ ID NO: 1617624 - RNA, 19 nt, Artificial Sequence
  Description of Artificial Sequence: Synthetic oligonucleotide
  Antisense strand to SEQ ID NO: 1617623
auggaacuuacuuauaucu

SEQ ID NO: 1617625 - RNA, 19 nt, Artificial Sequence
  Description of Artificial Sequence: Synthetic oligonucleotide
  Sense strand starting at position 1434 of SEQ ID NO: 1560690
aaguaaguuccaugaugaa

SEQ ID NO: 1617626 - RNA, 19 nt, Artificial Sequence
  Description of Artificial Sequence: Synthetic oligonucleotide
  Antisense strand to SEQ ID NO: 1617625
uucaucauggaacuuacuu

SEQ ID NO: 1617627 - RNA, 19 nt, Artificial Sequence
  Description of Artificial Sequence: Synthetic oligonucleotide
  Sense strand starting at position 1523 of SEQ ID NO: 1560690
aaucgugacagugaguuua

SEQ ID NO: 1617628 - RNA, 19 nt, Artificial Sequence
  Description of Artificial Sequence: Synthetic oligonucleotide
  Antisense strand to SEQ ID NO: 1617627
uaaacucacugucacgauu

SEQ ID NO: 1617629 - RNA, 19 nt, Artificial Sequence
  Description of Artificial Sequence: Synthetic oligonucleotide
  Sense strand starting at position 1765 of SEQ ID NO: 1560690
ugagaauacuuugaacauu

SEQ ID NO: 1617630 - RNA, 19 nt, Artificial Sequence
  Description of Artificial Sequence: Synthetic oligonucleotide
  Antisense strand to SEQ ID NO: 1617629
aauguucaaaguauucuca

SEQ ID NO: 1617631 - RNA, 19 nt, Artificial Sequence
  Description of Artificial Sequence: Synthetic oligonucleotide
  Sense strand starting at position 1854 of SEQ ID NO: 1560690
cuguaaagcugucuuacag

SEQ ID NO: 1617632 - RNA, 19 nt, Artificial Sequence
  Description of Artificial Sequence: Synthetic oligonucleotide
  Antisense strand to SEQ ID NO: 1617631
cuguaagacagcuuuacag

SEQ ID NO: 1617633 - RNA, 19 nt, Artificial Sequence
  Description of Artificial Sequence: Synthetic oligonucleotide
  Sense strand starting at position 1916 of SEQ ID NO: 1560690
ucccguacucaccagaaca

SEQ ID NO: 1617634 - RNA, 19 nt, Artificial Sequence
  Description of Artificial Sequence: Synthetic oligonucleotide
  Antisense strand to SEQ ID NO: 1617633
uguucuggugaguacggga

SEQ ID NO: 1617635 - RNA, 19 nt, Artificial Sequence
  Description of Artificial Sequence: Synthetic oligonucleotide
  Sense strand starting at position 2072 of SEQ ID NO: 1560690
agagaaagcgagugauaau

SEQ ID NO: 1617636 - RNA, 19 nt, Artificial Sequence
  Description of Artificial Sequence: Synthetic oligonucleotide
  Antisense strand to SEQ ID NO: 1617635
auuaucacucgcuuucucu

SEQ ID NO: 1617637 - RNA, 19 nt, Artificial Sequence
  Description of Artificial Sequence: Synthetic oligonucleotide
  Sense strand starting at position 2188 of SEQ ID NO: 1560690
cacagaguguuaguagaga

SEQ ID NO: 1617638 - RNA, 19 nt, Artificial Sequence
  Description of Artificial Sequence: Synthetic oligonucleotide
  Antisense strand to SEQ ID NO: 1617637
ucucuacuaacacucugug

SEQ ID NO: 1617639 - RNA, 19 nt, Artificial Sequence
  Description of Artificial Sequence: Synthetic oligonucleotide
  Sense strand starting at position 2208 of SEQ ID NO: 1560690
agaauugaauacgugugua

SEQ ID NO: 1617640 - RNA, 19 nt, Artificial Sequence
  Description of Artificial Sequence: Synthetic oligonucleotide
  Antisense strand to SEQ ID NO: 1617639
uacacacguauucaauucu

SEQ ID NO: 1617641 - RNA, 19 nt, Artificial Sequence
  Description of Artificial Sequence: Synthetic oligonucleotide
  Sense strand starting at position 2334 of SEQ ID NO: 1560690
aauggaauugucuauguac

SEQ ID NO: 1617642 - RNA, 19 nt, Artificial Sequence
  Description of Artificial Sequence: Synthetic oligonucleotide
  Antisense strand to SEQ ID NO: 1617641
guacauagacaauuccauu

SEQ ID NO: 1617643 - RNA, 19 nt, Artificial Sequence
  Description of Artificial Sequence: Synthetic oligonucleotide
  Sense strand starting at position 2336 of SEQ ID NO: 1560690
uggaauugucuauguacau

SEQ ID NO: 1617644 - RNA, 19 nt, Artificial Sequence
  Description of Artificial Sequence: Synthetic oligonucleotide
  Antisense strand to SEQ ID NO: 1617643
auguacauagacaauucca

SEQ ID NO: 1617645 - RNA, 19 nt, Artificial Sequence
  Description of Artificial Sequence: Synthetic oligonucleotide
  Sense strand starting at position 2337 of SEQ ID NO: 1560690
ggaauugucuauguacaua

SEQ ID NO: 1617646 - RNA, 19 nt, Artificial Sequence
  Description of Artificial Sequence: Synthetic oligonucleotide
  Antisense strand to SEQ ID NO: 1617645
uauguacauagacaauucc

SEQ ID NO: 1617647 - RNA, 19 nt, Artificial Sequence
  Description of Artificial Sequence: Synthetic oligonucleotide
  Sense strand starting at position 2792 of SEQ ID NO: 1560690
aaguucuauuucgugcauu

SEQ ID NO: 1617648 - RNA, 19 nt, Artificial Sequence
  Description of Artificial Sequence: Synthetic oligonucleotide
  Antisense strand to SEQ ID NO: 1617647
aaugcacgaaauagaacuu

SEQ ID NO: 1617649 - RNA, 19 nt, Artificial Sequence
  Description of Artificial Sequence: Synthetic oligonucleotide
  Sense strand starting at position 2904 of SEQ ID NO: 1560690
uuacuugacugacuuugaa

SEQ ID NO: 1617650 - RNA, 19 nt, Artificial Sequence
  Description of Artificial Sequence: Synthetic oligonucleotide
  Antisense strand to SEQ ID NO: 1617649
uucaaagucagucaaguaa

SEQ ID NO: 1617651 - RNA, 19 nt, Artificial Sequence
  Description of Artificial Sequence: Synthetic oligonucleotide
  Sense strand starting at position 2907 of SEQ ID NO: 1560690
cuugacugacuuugaauua

SEQ ID NO: 1617652 - RNA, 19 nt, Artificial Sequence
  Description of Artificial Sequence: Synthetic oligonucleotide
  Antisense strand to SEQ ID NO: 1617651
uaauucaaagucagucaag

SEQ ID NO: 1617653 - RNA, 19 nt, Artificial Sequence
  Description of Artificial Sequence: Synthetic oligonucleotide
  Sense strand starting at position 2908 of SEQ ID NO: 1560690
uugacugacuuugaauuaa

SEQ ID NO: 1617654 - RNA, 19 nt, Artificial Sequence
  Description of Artificial Sequence: Synthetic oligonucleotide
  Antisense strand to SEQ ID NO: 1617653
uuaauucaaagucagucaa

SEQ ID NO: 1617655 - RNA, 19 nt, Artificial Sequence
  Description of Artificial Sequence: Synthetic oligonucleotide
  Sense strand starting at position 2974 of SEQ ID NO: 1560690
ccauacaaaucuguguagu

SEQ ID NO: 1617656 - RNA, 19 nt, Artificial Sequence
  Description of Artificial Sequence: Synthetic oligonucleotide
  Antisense strand to SEQ ID NO: 1617655
acuacacagauuuguaugg

SEQ ID NO: 1617657 - RNA, 19 nt, Artificial Sequence
  Description of Artificial Sequence: Synthetic oligonucleotide
  Sense strand starting at position 2976 of SEQ ID NO: 1560690
auacaaaucuguguaguua

SEQ ID NO: 1617658 - RNA, 19 nt, Artificial Sequence
  Description of Artificial Sequence: Synthetic oligonucleotide
  Antisense strand to SEQ ID NO: 1617657
uaacuacacagauuuguau

SEQ ID NO: 1617659 - RNA, 19 nt, Artificial Sequence
  Description of Artificial Sequence: Synthetic oligonucleotide
  Sense strand starting at position 2984 of SEQ ID NO: 1560690
cuguguaguuaugcuaaua

SEQ ID NO: 1617660 - RNA, 19 nt, Artificial Sequence
  Description of Artificial Sequence: Synthetic oligonucleotide
  Antisense strand to SEQ ID NO: 1617659
uauuagcauaacuacacag

SEQ ID NO: 1617661 - RNA, 19 nt, Artificial Sequence
  Description of Artificial Sequence: Synthetic oligonucleotide
  Sense strand starting at position 3106 of SEQ ID NO: 1560690
guauuaccauucucaugca

SEQ ID NO: 1617662 - RNA, 19 nt, Artificial Sequence
  Description of Artificial Sequence: Synthetic oligonucleotide
  Antisense strand to SEQ ID NO: 1617661
ugcaugagaaugguaauac

SEQ ID NO: 1617663 - RNA, 19 nt, Artificial Sequence
  Description of Artificial Sequence: Synthetic oligonucleotide
  Sense strand starting at position 3153 of SEQ ID NO: 1560690
aggagacauuucuaguauu

SEQ ID NO: 1617664 - RNA, 19 nt, Artificial Sequence
  Description of Artificial Sequence: Synthetic oligonucleotide
  Antisense strand to SEQ ID NO: 1617663
aauacuagaaaugucuccu

SEQ ID NO: 1617665 - RNA, 19 nt, Artificial Sequence
  Description of Artificial Sequence: Synthetic oligonucleotide
  Sense strand starting at position 3156 of SEQ ID NO: 1560690
agacauuucuaguauugcu

SEQ ID NO: 1617666 - RNA, 19 nt, Artificial Sequence
  Description of Artificial Sequence: Synthetic oligonucleotide
  Antisense strand to SEQ ID NO: 1617665
agcaauacuagaaaugucu

SEQ ID NO: 1617667 - RNA, 19 nt, Artificial Sequence
  Description of Artificial Sequence: Synthetic oligonucleotide
  Sense strand starting at position 3393 of SEQ ID NO: 1560690
acgggugucugguuugaca

SEQ ID NO: 1617668 - RNA, 19 nt, Artificial Sequence
  Description of Artificial Sequence: Synthetic oligonucleotide
  Antisense strand to SEQ ID NO: 1617667
ugucaaaccagacacccgu

SEQ ID NO: 1617669 - RNA, 19 nt, Artificial Sequence
  Description of Artificial Sequence: Synthetic oligonucleotide
  Sense strand starting at position 3395 of SEQ ID NO: 1560690
gggugucugguuugacaaa

SEQ ID NO: 1617670 - RNA, 19 nt, Artificial Sequence
  Description of Artificial Sequence: Synthetic oligonucleotide
  Antisense strand to SEQ ID NO: 1617669
uuugucaaaccagacaccc

SEQ ID NO: 1617671 - RNA, 19 nt, Artificial Sequence
  Description of Artificial Sequence: Synthetic oligonucleotide
  Sense strand starting at position 3441 of SEQ ID NO: 1560690
cccacugaugucuaucuca

SEQ ID NO: 1617672 - RNA, 19 nt, Artificial Sequence
  Description of Artificial Sequence: Synthetic oligonucleotide
  Antisense strand to SEQ ID NO: 1617671
ugagauagacaucaguggg

SEQ ID NO: 1617673 - RNA, 19 nt, Artificial Sequence
  Description of Artificial Sequence: Synthetic oligonucleotide
  Sense strand starting at position 3582 of SEQ ID NO: 1560690
guguauuuccuuugccuag

SEQ ID NO: 1617674 - RNA, 19 nt, Artificial Sequence
  Description of Artificial Sequence: Synthetic oligonucleotide
  Antisense strand to SEQ ID NO: 1617673
cuaggcaaaggaaauacac

SEQ ID NO: 1617675 - RNA, 19 nt, Artificial Sequence
  Description of Artificial Sequence: Synthetic oligonucleotide
  Sense strand starting at position 3615 of SEQ ID NO: 1560690
auugcaucuguggguugau

SEQ ID NO: 1617676 - RNA, 19 nt, Artificial Sequence
  Description of Artificial Sequence: Synthetic oligonucleotide
  Antisense strand to SEQ ID NO: 1617675
aucaacccacagaugcaau

SEQ ID NO: 1617677 - RNA, 19 nt, Artificial Sequence
  Description of Artificial Sequence: Synthetic oligonucleotide
  Sense strand starting at position 3647 of SEQ ID NO: 1560690
uuggaaggugcauauguau

SEQ ID NO: 1617678 - RNA, 19 nt, Artificial Sequence
  Description of Artificial Sequence: Synthetic oligonucleotide
  Antisense strand to SEQ ID NO: 1617677
auacauaugcaccuuccaa

SEQ ID NO: 1617679 - RNA, 19 nt, Artificial Sequence
  Description of Artificial Sequence: Synthetic oligonucleotide
  Sense strand starting at position 3680 of SEQ ID NO: 1560690
auccauucuuguccaaguu

SEQ ID NO: 1617680 - RNA, 19 nt, Artificial Sequence
  Description of Artificial Sequence: Synthetic oligonucleotide
  Antisense strand to SEQ ID NO: 1617679
aacuuggacaagaauggau

SEQ ID NO: 1617681 - RNA, 19 nt, Artificial Sequence
  Description of Artificial Sequence: Synthetic oligonucleotide
  Sense strand starting at position 3689 of SEQ ID NO: 1560690
uguccaaguucucucuacu

SEQ ID NO: 1617682 - RNA, 19 nt, Artificial Sequence
  Description of Artificial Sequence: Synthetic oligonucleotide
  Antisense strand to SEQ ID NO: 1617681
aguagagagaacuuggaca

SEQ ID NO: 1617683 - RNA, 19 nt, Artificial Sequence
  Description of Artificial Sequence: Synthetic oligonucleotide
  Sense strand starting at position 3723 of SEQ ID NO: 1560690
ucccacuugucucugaagu

SEQ ID NO: 1617684 - RNA, 19 nt, Artificial Sequence
  Description of Artificial Sequence: Synthetic oligonucleotide
  Antisense strand to SEQ ID NO: 1617683
acuucagagacaaguggga

SEQ ID NO: 1617685 - RNA, 19 nt, Artificial Sequence
  Description of Artificial Sequence: Synthetic oligonucleotide
  Sense strand starting at position 3724 of SEQ ID NO: 1560690
cccacuugucucugaaguu

SEQ ID NO: 1617686 - RNA, 19 nt, Artificial Sequence
  Description of Artificial Sequence: Synthetic oligonucleotide
  Antisense strand to SEQ ID NO: 1617685
aacuucagagacaaguggg

SEQ ID NO: 1617687 - RNA, 19 nt, Artificial Sequence
  Description of Artificial Sequence: Synthetic oligonucleotide
  Sense strand starting at position 3736 of SEQ ID NO: 1560690
ugaaguuuccaauguuguu

SEQ ID NO: 1617688 - RNA, 19 nt, Artificial Sequence
  Description of Artificial Sequence: Synthetic oligonucleotide
  Antisense strand to SEQ ID NO: 1617687
aacaacauuggaaacuuca

SEQ ID NO: 1617689 - RNA, 19 nt, Artificial Sequence
  Description of Artificial Sequence: Synthetic oligonucleotide
  Sense strand starting at position 3752 of SEQ ID NO: 1560690
guucaugcuuuggugggaa

SEQ ID NO: 1617690 - RNA, 19 nt, Artificial Sequence
  Description of Artificial Sequence: Synthetic oligonucleotide
  Antisense strand to SEQ ID NO: 1617689
uucccaccaaagcaugaac

SEQ ID NO: 1617691 - RNA, 19 nt, Artificial Sequence
  Description of Artificial Sequence: Synthetic oligonucleotide
  Sense strand starting at position 3754 of SEQ ID NO: 1560690
ucaugcuuuggugggaaua

SEQ ID NO: 1617692 - RNA, 19 nt, Artificial Sequence
  Description of Artificial Sequence: Synthetic oligonucleotide
  Antisense strand to SEQ ID NO: 1617691
uauucccaccaaagcauga

SEQ ID NO: 1617693 - RNA, 19 nt, Artificial Sequence
  Description of Artificial Sequence: Synthetic oligonucleotide
  Sense strand starting at position 3755 of SEQ ID NO: 1560690
caugcuuuggugggaauau

SEQ ID NO: 1617694 - RNA, 19 nt, Artificial Sequence
  Description of Artificial Sequence: Synthetic oligonucleotide
  Antisense strand to SEQ ID NO: 1617693
auauucccaccaaagcaug

SEQ ID NO: 1617695 - RNA, 19 nt, Artificial Sequence
  Description of Artificial Sequence: Synthetic oligonucleotide
  Sense strand starting at position 598 of SEQ ID NO: 1560691
acuagauacguccauucuu

SEQ ID NO: 1617696 - RNA, 19 nt, Artificial Sequence
  Description of Artificial Sequence: Synthetic oligonucleotide
  Antisense strand to SEQ ID NO: 1617695
aagaauggacguaucuagu

SEQ ID NO: 1617697 - RNA, 19 nt, Artificial Sequence
  Description of Artificial Sequence: Synthetic oligonucleotide
  Sense strand starting at position 640 of SEQ ID NO: 1560691
ggcagagauucacagugag

SEQ ID NO: 1617698 - RNA, 19 nt, Artificial Sequence
  Description of Artificial Sequence: Synthetic oligonucleotide
  Antisense strand to SEQ ID NO: 1617697
cucacugugaaucucugcc

SEQ ID NO: 1617699 - RNA, 19 nt, Artificial Sequence
  Description of Artificial Sequence: Synthetic oligonucleotide
  Sense strand starting at position 733 of SEQ ID NO: 1560691
ugaggaugauggaguauga

SEQ ID NO: 1617700 - RNA, 19 nt, Artificial Sequence
  Description of Artificial Sequence: Synthetic oligonucleotide
  Antisense strand to SEQ ID NO: 1617699
ucauacuccaucauccuca

SEQ ID NO: 1617701 - RNA, 19 nt, Artificial Sequence
  Description of Artificial Sequence: Synthetic oligonucleotide
  Sense strand starting at position 758 of SEQ ID NO: 1560691
gcuccucuccuuugagaac

SEQ ID NO: 1617702 - RNA, 19 nt, Artificial Sequence
  Description of Artificial Sequence: Synthetic oligonucleotide
  Antisense strand to SEQ ID NO: 1617701
guucucaaaggagaggagc

SEQ ID NO: 1617703 - RNA, 19 nt, Artificial Sequence
  Description of Artificial Sequence: Synthetic oligonucleotide
  Sense strand starting at position 1153 of SEQ ID NO: 1560691
cagcccuucuccuucgaga

SEQ ID NO: 1617704 - RNA, 19 nt, Artificial Sequence
  Description of Artificial Sequence: Synthetic oligonucleotide
  Antisense strand to SEQ ID NO: 1617703
ucucgaaggagaagggcug

SEQ ID NO: 1617705 - RNA, 19 nt, Artificial Sequence
  Description of Artificial Sequence: Synthetic oligonucleotide
  Sense strand starting at position 1813 of SEQ ID NO: 1560691
ggagcucggcgugaggaau

SEQ ID NO: 1617706 - RNA, 19 nt, Artificial Sequence
  Description of Artificial Sequence: Synthetic oligonucleotide
  Antisense strand to SEQ ID NO: 1617705
auuccucacgccgagcucc

SEQ ID NO: 1617707 - RNA, 19 nt, Artificial Sequence
  Description of Artificial Sequence: Synthetic oligonucleotide
  Sense strand starting at position 1849 of SEQ ID NO: 1560691
cggguuccuucgggcacaa

SEQ ID NO: 1617708 - RNA, 19 nt, Artificial Sequence
  Description of Artificial Sequence: Synthetic oligonucleotide
  Antisense strand to SEQ ID NO: 1617707
uugugcccgaaggaacccg

SEQ ID NO: 1617709 - RNA, 19 nt, Artificial Sequence
  Description of Artificial Sequence: Synthetic oligonucleotide
  Sense strand starting at position 1872 of SEQ ID NO: 1560691
gagcuugaguucuccggaa

SEQ ID NO: 1617710 - RNA, 19 nt, Artificial Sequence
  Description of Artificial Sequence: Synthetic oligonucleotide
  Antisense strand to SEQ ID NO: 1617709
uuccggagaacucaagcuc

SEQ ID NO: 1617711 - RNA, 19 nt, Artificial Sequence
  Description of Artificial Sequence: Synthetic oligonucleotide
  Sense strand starting at position 1874 of SEQ ID NO: 1560691
gcuugaguucuccggaagc

SEQ ID NO: 1617712 - RNA, 19 nt, Artificial Sequence
  Description of Artificial Sequence: Synthetic oligonucleotide
  Antisense strand to SEQ ID NO: 1617711
gcuuccggagaacucaagc

SEQ ID NO: 1617713 - RNA, 19 nt, Artificial Sequence
  Description of Artificial Sequence: Synthetic oligonucleotide
  Sense strand starting at position 1906 of SEQ ID NO: 1560691
ucggcucacuucggcaaua

SEQ ID NO: 1617714 - RNA, 19 nt, Artificial Sequence
  Description of Artificial Sequence: Synthetic oligonucleotide
  Antisense strand to SEQ ID NO: 1617713
uauugccgaagugagccga

SEQ ID NO: 1617715 - RNA, 19 nt, Artificial Sequence
  Description of Artificial Sequence: Synthetic oligonucleotide
  Sense strand starting at position 1908 of SEQ ID NO: 1560691
ggcucacuucggcaauagu

SEQ ID NO: 1617716 - RNA, 19 nt, Artificial Sequence
  Description of Artificial Sequence: Synthetic oligonucleotide
  Antisense strand to SEQ ID NO: 1617715
acuauugccgaagugagcc

SEQ ID NO: 1617717 - RNA, 19 nt, Artificial Sequence
  Description of Artificial Sequence: Synthetic oligonucleotide
  Sense strand starting at position 1918 of SEQ ID NO: 1560691
ggcaauagucgagaacgga

SEQ ID NO: 1617718 - RNA, 19 nt, Artificial Sequence
  Description of Artificial Sequence: Synthetic oligonucleotide
  Antisense strand to SEQ ID NO: 1617717
uccguucucgacuauugcc

SEQ ID NO: 1617719 - RNA, 19 nt, Artificial Sequence
  Description of Artificial Sequence: Synthetic oligonucleotide
  Sense strand starting at position 1970 of SEQ ID NO: 1560691
ucggcuuucuucggaggua

SEQ ID NO: 1617720 - RNA, 19 nt, Artificial Sequence
  Description of Artificial Sequence: Synthetic oligonucleotide
  Antisense strand to SEQ ID NO: 1617719
uaccuccgaagaaagccga

SEQ ID NO: 1617721 - RNA, 19 nt, Artificial Sequence
  Description of Artificial Sequence: Synthetic oligonucleotide
  Sense strand starting at position 1972 of SEQ ID NO: 1560691
ggcuuucuucggagguagu

SEQ ID NO: 1617722 - RNA, 19 nt, Artificial Sequence
  Description of Artificial Sequence: Synthetic oligonucleotide
  Antisense strand to SEQ ID NO: 1617721
acuaccuccgaagaaagcc

SEQ ID NO: 1617723 - RNA, 19 nt, Artificial Sequence
  Description of Artificial Sequence: Synthetic oligonucleotide
  Sense strand starting at position 1986 of SEQ ID NO: 1560691
guagucgaguccuuagggu

SEQ ID NO: 1617724 - RNA, 19 nt, Artificial Sequence
  Description of Artificial Sequence: Synthetic oligonucleotide
  Antisense strand to SEQ ID NO: 1617723
acccuaaggacucgacuac

SEQ ID NO: 1617725 - RNA, 19 nt, Artificial Sequence
  Description of Artificial Sequence: Synthetic oligonucleotide
  Sense strand starting at position 2055 of SEQ ID NO: 1560691
ccacaagcuucgguuuacu

SEQ ID NO: 1617726 - RNA, 19 nt, Artificial Sequence
  Description of Artificial Sequence: Synthetic oligonucleotide
  Antisense strand to SEQ ID NO: 1617725
aguaaaccgaagcuugugg

SEQ ID NO: 1617727 - RNA, 19 nt, Artificial Sequence
  Description of Artificial Sequence: Synthetic oligonucleotide
  Sense strand starting at position 2063 of SEQ ID NO: 1560691
uucgguuuacuucguagau

SEQ ID NO: 1617728 - RNA, 19 nt, Artificial Sequence
  Description of Artificial Sequence: Synthetic oligonucleotide
  Antisense strand to SEQ ID NO: 1617727
aucuacgaaguaaaccgaa

SEQ ID NO: 1617729 - RNA, 19 nt, Artificial Sequence
  Description of Artificial Sequence: Synthetic oligonucleotide
  Sense strand starting at position 2064 of SEQ ID NO: 1560691
ucgguuuacuucguagaua

SEQ ID NO: 1617730 - RNA, 19 nt, Artificial Sequence
  Description of Artificial Sequence: Synthetic oligonucleotide
  Antisense strand to SEQ ID NO: 1617729
uaucuacgaaguaaaccga

SEQ ID NO: 1617731 - RNA, 19 nt, Artificial Sequence
  Description of Artificial Sequence: Synthetic oligonucleotide
  Sense strand starting at position 2065 of SEQ ID NO: 1560691
cgguuuacuucguagauag

SEQ ID NO: 1617732 - RNA, 19 nt, Artificial Sequence
  Description of Artificial Sequence: Synthetic oligonucleotide
  Antisense strand to SEQ ID NO: 1617731
cuaucuacgaaguaaaccg

SEQ ID NO: 1617733 - RNA, 19 nt, Artificial Sequence
  Description of Artificial Sequence: Synthetic oligonucleotide
  Sense strand starting at position 2072 of SEQ ID NO: 1560691
cuucguagauaguugggua

SEQ ID NO: 1617734 - RNA, 19 nt, Artificial Sequence
  Description of Artificial Sequence: Synthetic oligonucleotide
  Antisense strand to SEQ ID NO: 1617733
uacccaacuaucuacgaag

SEQ ID NO: 1617735 - RNA, 19 nt, Artificial Sequence
  Description of Artificial Sequence: Synthetic oligonucleotide
  Sense strand starting at position 2075 of SEQ ID NO: 1560691
cguagauaguuggguacaa

SEQ ID NO: 1617736 - RNA, 19 nt, Artificial Sequence
  Description of Artificial Sequence: Synthetic oligonucleotide
  Antisense strand to SEQ ID NO: 1617735
uuguacccaacuaucuacg

SEQ ID NO: 1617737 - RNA, 19 nt, Artificial Sequence
  Description of Artificial Sequence: Synthetic oligonucleotide
  Sense strand starting at position 2077 of SEQ ID NO: 1560691
uagauaguuggguacaagu

SEQ ID NO: 1617738 - RNA, 19 nt, Artificial Sequence
  Description of Artificial Sequence: Synthetic oligonucleotide
  Antisense strand to SEQ ID NO: 1617737
acuuguacccaacuaucua

SEQ ID NO: 1617739 - RNA, 19 nt, Artificial Sequence
  Description of Artificial Sequence: Synthetic oligonucleotide
  Sense strand starting at position 2079 of SEQ ID NO: 1560691
gauaguuggguacaaguga

SEQ ID NO: 1617740 - RNA, 19 nt, Artificial Sequence
  Description of Artificial Sequence: Synthetic oligonucleotide
  Antisense strand to SEQ ID NO: 1617739
ucacuuguacccaacuauc

SEQ ID NO: 1617741 - RNA, 19 nt, Artificial Sequence
  Description of Artificial Sequence: Synthetic oligonucleotide
  Sense strand starting at position 2092 of SEQ ID NO: 1560691
aagugacgcuaggaugaua

SEQ ID NO: 1617742 - RNA, 19 nt, Artificial Sequence
  Description of Artificial Sequence: Synthetic oligonucleotide
  Antisense strand to SEQ ID NO: 1617741
uaucauccuagcgucacuu

SEQ ID NO: 1617743 - RNA, 19 nt, Artificial Sequence
  Description of Artificial Sequence: Synthetic oligonucleotide
  Sense strand starting at position 2103 of SEQ ID NO: 1560691
ggaugauaggcggagucaa

SEQ ID NO: 1617744 - RNA, 19 nt, Artificial Sequence
  Description of Artificial Sequence: Synthetic oligonucleotide
  Antisense strand to SEQ ID NO: 1617743
uugacuccgccuaucaucc

SEQ ID NO: 1617745 - RNA, 19 nt, Artificial Sequence
  Description of Artificial Sequence: Synthetic oligonucleotide
  Sense strand starting at position 2129 of SEQ ID NO: 1560691
gccagacacccaugaguau

SEQ ID NO: 1617746 - RNA, 19 nt, Artificial Sequence
  Description of Artificial Sequence: Synthetic oligonucleotide
  Antisense strand to SEQ ID NO: 1617745
auacucaugggugucuggc

SEQ ID NO: 1617747 - RNA, 19 nt, Artificial Sequence
  Description of Artificial Sequence: Synthetic oligonucleotide
  Sense strand starting at position 2230 of SEQ ID NO: 1560691
ggaugacgauccucaaguu

SEQ ID NO: 1617748 - RNA, 19 nt, Artificial Sequence
  Description of Artificial Sequence: Synthetic oligonucleotide
  Antisense strand to SEQ ID NO: 1617747
aacuugaggaucgucaucc

SEQ ID NO: 1617749 - RNA, 19 nt, Artificial Sequence
  Description of Artificial Sequence: Synthetic oligonucleotide
  Sense strand starting at position 3765 of SEQ ID NO: 1560691
ggaccugggagucaaguuu

SEQ ID NO: 1617750 - RNA, 19 nt, Artificial Sequence
  Description of Artificial Sequence: Synthetic oligonucleotide
  Antisense strand to SEQ ID NO: 1617749
aaacuugacucccaggucc

SEQ ID NO: 1617751 - RNA, 19 nt, Artificial Sequence
  Description of Artificial Sequence: Synthetic oligonucleotide
  Sense strand starting at position 3773 of SEQ ID NO: 1560691
gagucaaguuuccuggcuu

SEQ ID NO: 1617752 - RNA, 19 nt, Artificial Sequence
  Description of Artificial Sequence: Synthetic oligonucleotide
  Antisense strand to SEQ ID NO: 1617751
aagccaggaaacuugacuc

SEQ ID NO: 1617753 - RNA, 19 nt, Artificial Sequence
  Description of Artificial Sequence: Synthetic oligonucleotide
  Sense strand starting at position 3777 of SEQ ID NO: 1560691
caaguuuccuggcuucuga

SEQ ID NO: 1617754 - RNA, 19 nt, Artificial Sequence
  Description of Artificial Sequence: Synthetic oligonucleotide
  Antisense strand to SEQ ID NO: 1617753
ucagaagccaggaaacuug

SEQ ID NO: 1617755 - RNA, 19 nt, Artificial Sequence
  Description of Artificial Sequence: Synthetic oligonucleotide
  Sense strand starting at position 3799 of SEQ ID NO: 1560691
gaccauaagcuuggagguu

SEQ ID NO: 1617756 - RNA, 19 nt, Artificial Sequence
  Description of Artificial Sequence: Synthetic oligonucleotide
  Antisense strand to SEQ ID NO: 1617755
aaccuccaagcuuaugguc

SEQ ID NO: 1617757 - RNA, 19 nt, Artificial Sequence
  Description of Artificial Sequence: Synthetic oligonucleotide
  Sense strand starting at position 3811 of SEQ ID NO: 1560691
ggagguuccagcgaagugu

SEQ ID NO: 1617758 - RNA, 19 nt, Artificial Sequence
  Description of Artificial Sequence: Synthetic oligonucleotide
  Antisense strand to SEQ ID NO: 1617757
acacuucgcuggaaccucc

SEQ ID NO: 1617759 - RNA, 19 nt, Artificial Sequence
  Description of Artificial Sequence: Synthetic oligonucleotide
  Sense strand starting at position 3819 of SEQ ID NO: 1560691
cagcgaagugugcuucuca

SEQ ID NO: 1617760 - RNA, 19 nt, Artificial Sequence
  Description of Artificial Sequence: Synthetic oligonucleotide
  Antisense strand to SEQ ID NO: 1617759
ugagaagcacacuucgcug

SEQ ID NO: 1617761 - RNA, 19 nt, Artificial Sequence
  Description of Artificial Sequence: Synthetic oligonucleotide
  Sense strand starting at position 64 of SEQ ID NO: 1560692
cgccaacuuacguggcauu

SEQ ID NO: 1617762 - RNA, 19 nt, Artificial Sequence
  Description of Artificial Sequence: Synthetic oligonucleotide
  Antisense strand to SEQ ID NO: 1617761
aaugccacguaaguuggcg

SEQ ID NO: 1617763 - RNA, 19 nt, Artificial Sequence
  Description of Artificial Sequence: Synthetic oligonucleotide
  Sense strand starting at position 403 of SEQ ID NO: 1560692
ccgggcauuggugacaaau

SEQ ID NO: 1617764 - RNA, 19 nt, Artificial Sequence
  Description of Artificial Sequence: Synthetic oligonucleotide
  Antisense strand to SEQ ID NO: 1617763
auuugucaccaaugcccgg

SEQ ID NO: 1617765 - RNA, 19 nt, Artificial Sequence
  Description of Artificial Sequence: Synthetic oligonucleotide
  Sense strand starting at position 405 of SEQ ID NO: 1560692
gggcauuggugacaaauaa

SEQ ID NO: 1617766 - RNA, 19 nt, Artificial Sequence
  Description of Artificial Sequence: Synthetic oligonucleotide
  Antisense strand to SEQ ID NO: 1617765
uuauuugucaccaaugccc

SEQ ID NO: 1617767 - RNA, 19 nt, Artificial Sequence
  Description of Artificial Sequence: Synthetic oligonucleotide
  Sense strand starting at position 1071 of SEQ ID NO: 1560692
ucaugcagcuugucaucau

SEQ ID NO: 1617768 - RNA, 19 nt, Artificial Sequence
  Description of Artificial Sequence: Synthetic oligonucleotide
  Antisense strand to SEQ ID NO: 1617767
augaugacaagcugcauga

SEQ ID NO: 1617769 - RNA, 19 nt, Artificial Sequence
  Description of Artificial Sequence: Synthetic oligonucleotide
  Sense strand starting at position 1080 of SEQ ID NO: 1560692
uugucaucaucgucaacaa

SEQ ID NO: 1617770 - RNA, 19 nt, Artificial Sequence
  Description of Artificial Sequence: Synthetic oligonucleotide
  Antisense strand to SEQ ID NO: 1617769
uuguugacgaugaugacaa

SEQ ID NO: 1617771 - RNA, 19 nt, Artificial Sequence
  Description of Artificial Sequence: Synthetic oligonucleotide
  Sense strand starting at position 1575 of SEQ ID NO: 1560692
gugugagaguuugagugau

SEQ ID NO: 1617772 - RNA, 19 nt, Artificial Sequence
  Description of Artificial Sequence: Synthetic oligonucleotide
  Antisense strand to SEQ ID NO: 1617771
aucacucaaacucucacac

SEQ ID NO: 1617773 - RNA, 19 nt, Artificial Sequence
  Description of Artificial Sequence: Synthetic oligonucleotide
  Sense strand starting at position 1577 of SEQ ID NO: 1560692
gugagaguuugagugauca

SEQ ID NO: 1617774 - RNA, 19 nt, Artificial Sequence
  Description of Artificial Sequence: Synthetic oligonucleotide
  Antisense strand to SEQ ID NO: 1617773
ugaucacucaaacucucac

SEQ ID NO: 1617775 - RNA, 19 nt, Artificial Sequence
  Description of Artificial Sequence: Synthetic oligonucleotide
  Sense strand starting at position 1581 of SEQ ID NO: 1560692
gaguuugagugaucacacc

SEQ ID NO: 1617776 - RNA, 19 nt, Artificial Sequence
  Description of Artificial Sequence: Synthetic oligonucleotide
  Antisense strand to SEQ ID NO: 1617775
ggugugaucacucaaacuc

SEQ ID NO: 1617777 - RNA, 19 nt, Artificial Sequence
  Description of Artificial Sequence: Synthetic oligonucleotide
  Sense strand starting at position 1867 of SEQ ID NO: 1560692
ccucgaguucccuaaccuu

SEQ ID NO: 1617778 - RNA, 19 nt, Artificial Sequence
  Description of Artificial Sequence: Synthetic oligonucleotide
  Antisense strand to SEQ ID NO: 1617777
aagguuagggaacucgagg

SEQ ID NO: 1617779 - RNA, 19 nt, Artificial Sequence
  Description of Artificial Sequence: Synthetic oligonucleotide
  Sense strand starting at position 1870 of SEQ ID NO: 1560692
cgaguucccuaaccuugau

SEQ ID NO: 1617780 - RNA, 19 nt, Artificial Sequence
  Description of Artificial Sequence: Synthetic oligonucleotide
  Antisense strand to SEQ ID NO: 1617779
aucaagguuagggaacucg

SEQ ID NO: 1617781 - RNA, 19 nt, Artificial Sequence
  Description of Artificial Sequence: Synthetic oligonucleotide
  Sense strand starting at position 1985 of SEQ ID NO: 1560692
gcccgcaaauuuguccaua

SEQ ID NO: 1617782 - RNA, 19 nt, Artificial Sequence
  Description of Artificial Sequence: Synthetic oligonucleotide
  Antisense strand to SEQ ID NO: 1617781
uauggacaaauuugcgggc

SEQ ID NO: 1617783 - RNA, 19 nt, Artificial Sequence
  Description of Artificial Sequence: Synthetic oligonucleotide
  Sense strand starting at position 1987 of SEQ ID NO: 1560692
ccgcaaauuuguccauaca

SEQ ID NO: 1617784 - RNA, 19 nt, Artificial Sequence
  Description of Artificial Sequence: Synthetic oligonucleotide
  Antisense strand to SEQ ID NO: 1617783
uguauggacaaauuugcgg

SEQ ID NO: 1617785 - RNA, 19 nt, Artificial Sequence
  Description of Artificial Sequence: Synthetic oligonucleotide
  Sense strand starting at position 2208 of SEQ ID NO: 1560692
auucgacacucggaaaugu

SEQ ID NO: 1617786 - RNA, 19 nt, Artificial Sequence
  Description of Artificial Sequence: Synthetic oligonucleotide
  Antisense strand to SEQ ID NO: 1617785
acauuuccgagugucgaau

SEQ ID NO: 1617787 - RNA, 19 nt, Artificial Sequence
  Description of Artificial Sequence: Synthetic oligonucleotide
  Sense strand starting at position 2219 of SEQ ID NO: 1560692
ggaaauguuacaggaagcu

SEQ ID NO: 1617788 - RNA, 19 nt, Artificial Sequence
  Description of Artificial Sequence: Synthetic oligonucleotide
  Antisense strand to SEQ ID NO: 1617787
agcuuccuguaacauuucc

SEQ ID NO: 1617789 - RNA, 19 nt, Artificial Sequence
  Description of Artificial Sequence: Synthetic oligonucleotide
  Sense strand starting at position 2319 of SEQ ID NO: 1560692
accucagugucccaacuuu

SEQ ID NO: 1617790 - RNA, 19 nt, Artificial Sequence
  Description of Artificial Sequence: Synthetic oligonucleotide
  Antisense strand to SEQ ID NO: 1617789
aaaguugggacacugaggu

SEQ ID NO: 1617791 - RNA, 19 nt, Artificial Sequence
  Description of Artificial Sequence: Synthetic oligonucleotide
  Sense strand starting at position 2892 of SEQ ID NO: 1560692
ggaacaguuuccucugcac

SEQ ID NO: 1617792 - RNA, 19 nt, Artificial Sequence
  Description of Artificial Sequence: Synthetic oligonucleotide
  Antisense strand to SEQ ID NO: 1617791
gugcagaggaaacuguucc

SEQ ID NO: 1617793 - RNA, 19 nt, Artificial Sequence
  Description of Artificial Sequence: Synthetic oligonucleotide
  Sense strand starting at position 2920 of SEQ ID NO: 1560692
ccagguuucucauucucau

SEQ ID NO: 1617794 - RNA, 19 nt, Artificial Sequence
  Description of Artificial Sequence: Synthetic oligonucleotide
  Antisense strand to SEQ ID NO: 1617793
augagaaugagaaaccugg

SEQ ID NO: 1617795 - RNA, 19 nt, Artificial Sequence
  Description of Artificial Sequence: Synthetic oligonucleotide
  Sense strand starting at position 3031 of SEQ ID NO: 1560692
cuauuugcauugugacacu

SEQ ID NO: 1617796 - RNA, 19 nt, Artificial Sequence
  Description of Artificial Sequence: Synthetic oligonucleotide
  Antisense strand to SEQ ID NO: 1617795
agugucacaaugcaaauag

SEQ ID NO: 1617797 - RNA, 19 nt, Artificial Sequence
  Description of Artificial Sequence: Synthetic oligonucleotide
  Sense strand starting at position 3090 of SEQ ID NO: 1560692
cugucuagaaggugucuua

SEQ ID NO: 1617798 - RNA, 19 nt, Artificial Sequence
  Description of Artificial Sequence: Synthetic oligonucleotide
  Antisense strand to SEQ ID NO: 1617797
uaagacaccuucuagacag

SEQ ID NO: 1617799 - RNA, 19 nt, Artificial Sequence
  Description of Artificial Sequence: Synthetic oligonucleotide
  Sense strand starting at position 3093 of SEQ ID NO: 1560692
ucuagaaggugucuuaguu

SEQ ID NO: 1617800 - RNA, 19 nt, Artificial Sequence
  Description of Artificial Sequence: Synthetic oligonucleotide
  Antisense strand to SEQ ID NO: 1617799
aacuaagacaccuucuaga

SEQ ID NO: 1617801 - RNA, 19 nt, Artificial Sequence
  Description of Artificial Sequence: Synthetic oligonucleotide
  Sense strand starting at position 3111 of SEQ ID NO: 1560692
ucacuuuguguuuaucuga

SEQ ID NO: 1617802 - RNA, 19 nt, Artificial Sequence
  Description of Artificial Sequence: Synthetic oligonucleotide
  Antisense strand to SEQ ID NO: 1617801
ucagauaaacacaaaguga

SEQ ID NO: 1617803 - RNA, 19 nt, Artificial Sequence
  Description of Artificial Sequence: Synthetic oligonucleotide
  Sense strand starting at position 3114 of SEQ ID NO: 1560692
cuuuguguuuaucugaucu

SEQ ID NO: 1617804 - RNA, 19 nt, Artificial Sequence
  Description of Artificial Sequence: Synthetic oligonucleotide
  Antisense strand to SEQ ID NO: 1617803
agaucagauaaacacaaag

SEQ ID NO: 1617805 - RNA, 19 nt, Artificial Sequence
  Description of Artificial Sequence: Synthetic oligonucleotide
  Sense strand starting at position 3116 of SEQ ID NO: 1560692
uuguguuuaucugaucuug

SEQ ID NO: 1617806 - RNA, 19 nt, Artificial Sequence
  Description of Artificial Sequence: Synthetic oligonucleotide
  Antisense strand to SEQ ID NO: 1617805
caagaucagauaaacacaa

SEQ ID NO: 1617807 - RNA, 19 nt, Artificial Sequence
  Description of Artificial Sequence: Synthetic oligonucleotide
  Sense strand starting at position 3118 of SEQ ID NO: 1560692
guguuuaucugaucuugaa

SEQ ID NO: 1617808 - RNA, 19 nt, Artificial Sequence
  Description of Artificial Sequence: Synthetic oligonucleotide
  Antisense strand to SEQ ID NO: 1617807
uucaagaucagauaaacac

SEQ ID NO: 1617809 - RNA, 19 nt, Artificial Sequence
  Description of Artificial Sequence: Synthetic oligonucleotide
  Sense strand starting at position 3338 of SEQ ID NO: 1560692
ggugcagcagcgugaucau

SEQ ID NO: 1617810 - RNA, 19 nt, Artificial Sequence
  Description of Artificial Sequence: Synthetic oligonucleotide
  Antisense strand to SEQ ID NO: 1617809
augaucacgcugcugcacc

SEQ ID NO: 1617811 - RNA, 19 nt, Artificial Sequence
  Description of Artificial Sequence: Synthetic oligonucleotide
  Sense strand starting at position 6 of SEQ ID NO: 1560693
guccauggugaaugucaga

SEQ ID NO: 1617812 - RNA, 19 nt, Artificial Sequence
  Description of Artificial Sequence: Synthetic oligonucleotide
  Antisense strand to SEQ ID NO: 1617811
ucugacauucaccauggac

SEQ ID NO: 1617813 - RNA, 19 nt, Artificial Sequence
  Description of Artificial Sequence: Synthetic oligonucleotide
  Sense strand starting at position 34 of SEQ ID NO: 1560693
caauguucccguuauugau

SEQ ID NO: 1617814 - RNA, 19 nt, Artificial Sequence
  Description of Artificial Sequence: Synthetic oligonucleotide
  Antisense strand to SEQ ID NO: 1617813
aucaauaacgggaacauug

SEQ ID NO: 1617815 - RNA, 19 nt, Artificial Sequence
  Description of Artificial Sequence: Synthetic oligonucleotide
  Sense strand starting at position 164 of SEQ ID NO: 1560693
uagguuugucuggacaaau

SEQ ID NO: 1617816 - RNA, 19 nt, Artificial Sequence
  Description of Artificial Sequence: Synthetic oligonucleotide
  Antisense strand to SEQ ID NO: 1617815
auuuguccagacaaaccua

SEQ ID NO: 1617817 - RNA, 19 nt, Artificial Sequence
  Description of Artificial Sequence: Synthetic oligonucleotide
  Sense strand starting at position 258 of SEQ ID NO: 1560693
agagguaauugacaacaua

SEQ ID NO: 1617818 - RNA, 19 nt, Artificial Sequence
  Description of Artificial Sequence: Synthetic oligonucleotide
  Antisense strand to SEQ ID NO: 1617817
uauguugucaauuaccucu

SEQ ID NO: 1617819 - RNA, 19 nt, Artificial Sequence
  Description of Artificial Sequence: Synthetic oligonucleotide
  Sense strand starting at position 289 of SEQ ID NO: 1560693
ggaacacauucgcuaaaga

SEQ ID NO: 1617820 - RNA, 19 nt, Artificial Sequence
  Description of Artificial Sequence: Synthetic oligonucleotide
  Antisense strand to SEQ ID NO: 1617819
ucuuuagcgaauguguucc

SEQ ID NO: 1617821 - RNA, 19 nt, Artificial Sequence
  Description of Artificial Sequence: Synthetic oligonucleotide
  Sense strand starting at position 523 of SEQ ID NO: 1560693
ggauccagccuagguaaua

SEQ ID NO: 1617822 - RNA, 19 nt, Artificial Sequence
  Description of Artificial Sequence: Synthetic oligonucleotide
  Antisense strand to SEQ ID NO: 1617821
uauuaccuaggcuggaucc

SEQ ID NO: 1617823 - RNA, 19 nt, Artificial Sequence
  Description of Artificial Sequence: Synthetic oligonucleotide
  Sense strand starting at position 599 of SEQ ID NO: 1560693
cggcucaugcccguaguua

SEQ ID NO: 1617824 - RNA, 19 nt, Artificial Sequence
  Description of Artificial Sequence: Synthetic oligonucleotide
  Antisense strand to SEQ ID NO: 1617823
uaacuacgggcaugagccg

SEQ ID NO: 1617825 - RNA, 19 nt, Artificial Sequence
  Description of Artificial Sequence: Synthetic oligonucleotide
  Sense strand starting at position 772 of SEQ ID NO: 1560693
gagccuugagguugagauc

SEQ ID NO: 1617826 - RNA, 19 nt, Artificial Sequence
  Description of Artificial Sequence: Synthetic oligonucleotide
  Antisense strand to SEQ ID NO: 1617825
gaucucaaccucaaggcuc

SEQ ID NO: 1617827 - RNA, 19 nt, Artificial Sequence
  Description of Artificial Sequence: Synthetic oligonucleotide
  Sense strand starting at position 781 of SEQ ID NO: 1560693
gguugagauccugaagcug

SEQ ID NO: 1617828 - RNA, 19 nt, Artificial Sequence
  Description of Artificial Sequence: Synthetic oligonucleotide
  Antisense strand to SEQ ID NO: 1617827
cagcuucaggaucucaacc

SEQ ID NO: 1617829 - RNA, 19 nt, Artificial Sequence
  Description of Artificial Sequence: Synthetic oligonucleotide
  Sense strand starting at position 789 of SEQ ID NO: 1560693
uccugaagcugcucugaga

SEQ ID NO: 1617830 - RNA, 19 nt, Artificial Sequence
  Description of Artificial Sequence: Synthetic oligonucleotide
  Antisense strand to SEQ ID NO: 1617829
ucucagagcagcuucagga

SEQ ID NO: 1617831 - RNA, 19 nt, Artificial Sequence
  Description of Artificial Sequence: Synthetic oligonucleotide
  Sense strand starting at position 854 of SEQ ID NO: 1560693
uguucuaaucacuguuuau

SEQ ID NO: 1617832 - RNA, 19 nt, Artificial Sequence
  Description of Artificial Sequence: Synthetic oligonucleotide
  Antisense strand to SEQ ID NO: 1617831
auaaacagugauuagaaca

SEQ ID NO: 1617833 - RNA, 19 nt, Artificial Sequence
  Description of Artificial Sequence: Synthetic oligonucleotide
  Sense strand starting at position 880 of SEQ ID NO: 1560693
cagccuaaugguuagaucu

SEQ ID NO: 1617834 - RNA, 19 nt, Artificial Sequence
  Description of Artificial Sequence: Synthetic oligonucleotide
  Antisense strand to SEQ ID NO: 1617833
agaucuaaccauuaggcug

SEQ ID NO: 1617835 - RNA, 19 nt, Artificial Sequence
  Description of Artificial Sequence: Synthetic oligonucleotide
  Sense strand starting at position 1044 of SEQ ID NO: 1560693
aaaugugugcacugucaga

SEQ ID NO: 1617836 - RNA, 19 nt, Artificial Sequence
  Description of Artificial Sequence: Synthetic oligonucleotide
  Antisense strand to SEQ ID NO: 1617835
ucugacagugcacacauuu

SEQ ID NO: 1617837 - RNA, 19 nt, Artificial Sequence
  Description of Artificial Sequence: Synthetic oligonucleotide
  Sense strand starting at position 1097 of SEQ ID NO: 1560693
cucccuuugcaaugagaug

SEQ ID NO: 1617838 - RNA, 19 nt, Artificial Sequence
  Description of Artificial Sequence: Synthetic oligonucleotide
  Antisense strand to SEQ ID NO: 1617837
caucucauugcaaagggag

SEQ ID NO: 1617839 - RNA, 19 nt, Artificial Sequence
  Description of Artificial Sequence: Synthetic oligonucleotide
  Sense strand starting at position 1155 of SEQ ID NO: 1560693
cgcuuacagagcugagauu

SEQ ID NO: 1617840 - RNA, 19 nt, Artificial Sequence
  Description of Artificial Sequence: Synthetic oligonucleotide
  Antisense strand to SEQ ID NO: 1617839
aaucucagcucuguaagcg

SEQ ID NO: 1617841 - RNA, 19 nt, Artificial Sequence
  Description of Artificial Sequence: Synthetic oligonucleotide
  Sense strand starting at position 1156 of SEQ ID NO: 1560693
gcuuacagagcugagauua

SEQ ID NO: 1617842 - RNA, 19 nt, Artificial Sequence
  Description of Artificial Sequence: Synthetic oligonucleotide
  Antisense strand to SEQ ID NO: 1617841
uaaucucagcucuguaagc

SEQ ID NO: 1617843 - RNA, 19 nt, Artificial Sequence
  Description of Artificial Sequence: Synthetic oligonucleotide
  Sense strand starting at position 1301 of SEQ ID NO: 1560693
gcaucagaauuggcuagaa

SEQ ID NO: 1617844 - RNA, 19 nt, Artificial Sequence
  Description of Artificial Sequence: Synthetic oligonucleotide
  Antisense strand to SEQ ID NO: 1617843
uucuagccaauucugaugc

SEQ ID NO: 1617845 - RNA, 19 nt, Artificial Sequence
  Description of Artificial Sequence: Synthetic oligonucleotide
  Sense strand starting at position 1311 of SEQ ID NO: 1560693
uggcuagaagcccgaauuu

SEQ ID NO: 1617846 - RNA, 19 nt, Artificial Sequence
  Description of Artificial Sequence: Synthetic oligonucleotide
  Antisense strand to SEQ ID NO: 1617845
aaauucgggcuucuagcca

SEQ ID NO: 1617847 - RNA, 19 nt, Artificial Sequence
  Description of Artificial Sequence: Synthetic oligonucleotide
  Sense strand starting at position 1404 of SEQ ID NO: 1560693
caggcuugagcuuagggaa

SEQ ID NO: 1617848 - RNA, 19 nt, Artificial Sequence
  Description of Artificial Sequence: Synthetic oligonucleotide
  Antisense strand to SEQ ID NO: 1617847
uucccuaagcucaagccug

SEQ ID NO: 1617849 - RNA, 19 nt, Artificial Sequence
  Description of Artificial Sequence: Synthetic oligonucleotide
  Sense strand starting at position 1500 of SEQ ID NO: 1560693
gucugaguuccagacgaag

SEQ ID NO: 1617850 - RNA, 19 nt, Artificial Sequence
  Description of Artificial Sequence: Synthetic oligonucleotide
  Antisense strand to SEQ ID NO: 1617849
cuucgucuggaacucagac

SEQ ID NO: 1617851 - RNA, 19 nt, Artificial Sequence
  Description of Artificial Sequence: Synthetic oligonucleotide
  Sense strand starting at position 1502 of SEQ ID NO: 1560693
cugaguuccagacgaaguu

SEQ ID NO: 1617852 - RNA, 19 nt, Artificial Sequence
  Description of Artificial Sequence: Synthetic oligonucleotide
  Antisense strand to SEQ ID NO: 1617851
aacuucgucuggaacucag

SEQ ID NO: 1617853 - RNA, 19 nt, Artificial Sequence
  Description of Artificial Sequence: Synthetic oligonucleotide
  Sense strand starting at position 1534 of SEQ ID NO: 1560693
cuaggcucccagugggaau

SEQ ID NO: 1617854 - RNA, 19 nt, Artificial Sequence
  Description of Artificial Sequence: Synthetic oligonucleotide
  Antisense strand to SEQ ID NO: 1617853
auucccacugggagccuag

SEQ ID NO: 1617855 - RNA, 19 nt, Artificial Sequence
  Description of Artificial Sequence: Synthetic oligonucleotide
  Sense strand starting at position 1595 of SEQ ID NO: 1560693
gcgcgaucccugccugagu

SEQ ID NO: 1617856 - RNA, 19 nt, Artificial Sequence
  Description of Artificial Sequence: Synthetic oligonucleotide
  Antisense strand to SEQ ID NO: 1617855
acucaggcagggaucgcgc

SEQ ID NO: 1617857 - RNA, 19 nt, Artificial Sequence
  Description of Artificial Sequence: Synthetic oligonucleotide
  Sense strand starting at position 2426 of SEQ ID NO: 1560693
agcccagagucuuccaaca

SEQ ID NO: 1617858 - RNA, 19 nt, Artificial Sequence
  Description of Artificial Sequence: Synthetic oligonucleotide
  Antisense strand to SEQ ID NO: 1617857
uguuggaagacucugggcu

SEQ ID NO: 1617859 - RNA, 19 nt, Artificial Sequence
  Description of Artificial Sequence: Synthetic oligonucleotide
  Sense strand starting at position 2544 of SEQ ID NO: 1560693
cuauccuuccugcgagaac

SEQ ID NO: 1617860 - RNA, 19 nt, Artificial Sequence
  Description of Artificial Sequence: Synthetic oligonucleotide
  Antisense strand to SEQ ID NO: 1617859
guucucgcaggaaggauag

SEQ ID NO: 1617861 - RNA, 19 nt, Artificial Sequence
  Description of Artificial Sequence: Synthetic oligonucleotide
  Sense strand starting at position 2575 of SEQ ID NO: 1560693
ucccauugcucuguaauga

SEQ ID NO: 1617862 - RNA, 19 nt, Artificial Sequence
  Description of Artificial Sequence: Synthetic oligonucleotide
  Antisense strand to SEQ ID NO: 1617861
ucauuacagagcaauggga

SEQ ID NO: 1617863 - RNA, 19 nt, Artificial Sequence
  Description of Artificial Sequence: Synthetic oligonucleotide
  Sense strand starting at position 2576 of SEQ ID NO: 1560693
cccauugcucuguaaugac

SEQ ID NO: 1617864 - RNA, 19 nt, Artificial Sequence
  Description of Artificial Sequence: Synthetic oligonucleotide
  Antisense strand to SEQ ID NO: 1617863
gucauuacagagcaauggg

SEQ ID NO: 1617865 - RNA, 19 nt, Artificial Sequence
  Description of Artificial Sequence: Synthetic oligonucleotide
  Sense strand starting at position 2701 of SEQ ID NO: 1560693
gagcguaaugguuaagaau

SEQ ID NO: 1617866 - RNA, 19 nt, Artificial Sequence
  Description of Artificial Sequence: Synthetic oligonucleotide
  Antisense strand to SEQ ID NO: 1617865
auucuuaaccauuacgcuc

SEQ ID NO: 1617867 - RNA, 19 nt, Artificial Sequence
  Description of Artificial Sequence: Synthetic oligonucleotide
  Sense strand starting at position 2730 of SEQ ID NO: 1560693
gagggcaauugggauuuaa

SEQ ID NO: 1617868 - RNA, 19 nt, Artificial Sequence
  Description of Artificial Sequence: Synthetic oligonucleotide
  Antisense strand to SEQ ID NO: 1617867
uuaaaucccaauugcccuc

SEQ ID NO: 1617869 - RNA, 19 nt, Artificial Sequence
  Description of Artificial Sequence: Synthetic oligonucleotide
  Sense strand starting at position 3146 of SEQ ID NO: 1560693
ugccauuuauaucagaagu

SEQ ID NO: 1617870 - RNA, 19 nt, Artificial Sequence
  Description of Artificial Sequence: Synthetic oligonucleotide
  Antisense strand to SEQ ID NO: 1617869
acuucugauauaaauggca

SEQ ID NO: 1617871 - RNA, 19 nt, Artificial Sequence
  Description of Artificial Sequence: Synthetic oligonucleotide
  Sense strand starting at position 3167 of SEQ ID NO: 1560693
uguuaugcuucuccuagaa

SEQ ID NO: 1617872 - RNA, 19 nt, Artificial Sequence
  Description of Artificial Sequence: Synthetic oligonucleotide
  Antisense strand to SEQ ID NO: 1617871
uucuaggagaagcauaaca

SEQ ID NO: 1617873 - RNA, 19 nt, Artificial Sequence
  Description of Artificial Sequence: Synthetic oligonucleotide
  Sense strand starting at position 3171 of SEQ ID NO: 1560693
augcuucuccuagaaugua

SEQ ID NO: 1617874 - RNA, 19 nt, Artificial Sequence
  Description of Artificial Sequence: Synthetic oligonucleotide
  Antisense strand to SEQ ID NO: 1617873
uacauucuaggagaagcau

SEQ ID NO: 1617875 - RNA, 19 nt, Artificial Sequence
  Description of Artificial Sequence: Synthetic oligonucleotide
  Sense strand starting at position 3253 of SEQ ID NO: 1560693
aggccauauuuaucuuguu

SEQ ID NO: 1617876 - RNA, 19 nt, Artificial Sequence
  Description of Artificial Sequence: Synthetic oligonucleotide
  Antisense strand to SEQ ID NO: 1617875
aacaagauaaauauggccu

SEQ ID NO: 1617877 - RNA, 19 nt, Artificial Sequence
  Description of Artificial Sequence: Synthetic oligonucleotide
  Sense strand starting at position 3284 of SEQ ID NO: 1560693
cccagcaauccagagaugu

SEQ ID NO: 1617878 - RNA, 19 nt, Artificial Sequence
  Description of Artificial Sequence: Synthetic oligonucleotide
  Antisense strand to SEQ ID NO: 1617877
acaucucuggauugcuggg

SEQ ID NO: 1617879 - RNA, 19 nt, Artificial Sequence
  Description of Artificial Sequence: Synthetic oligonucleotide
  Sense strand starting at position 3288 of SEQ ID NO: 1560693
gcaauccagagauguuugu

SEQ ID NO: 1617880 - RNA, 19 nt, Artificial Sequence
  Description of Artificial Sequence: Synthetic oligonucleotide
  Antisense strand to SEQ ID NO: 1617879
acaaacaucucuggauugc

SEQ ID NO: 1617881 - RNA, 19 nt, Artificial Sequence
  Description of Artificial Sequence: Synthetic oligonucleotide
  Sense strand starting at position 3292 of SEQ ID NO: 1560693
uccagagauguuuguugau

SEQ ID NO: 1617882 - RNA, 19 nt, Artificial Sequence
  Description of Artificial Sequence: Synthetic oligonucleotide
  Antisense strand to SEQ ID NO: 1617881
aucaacaaacaucucugga

SEQ ID NO: 1617883 - RNA, 19 nt, Artificial Sequence
  Description of Artificial Sequence: Synthetic oligonucleotide
  Sense strand starting at position 3294 of SEQ ID NO: 1560693
cagagauguuuguugauug

SEQ ID NO: 1617884 - RNA, 19 nt, Artificial Sequence
  Description of Artificial Sequence: Synthetic oligonucleotide
  Antisense strand to SEQ ID NO: 1617883
caaucaacaaacaucucug

SEQ ID NO: 1617885 - RNA, 19 nt, Artificial Sequence
  Description of Artificial Sequence: Synthetic oligonucleotide
  Sense strand starting at position 3298 of SEQ ID NO: 1560693
gauguuuguugauugcaua

SEQ ID NO: 1617886 - RNA, 19 nt, Artificial Sequence
  Description of Artificial Sequence: Synthetic oligonucleotide
  Antisense strand to SEQ ID NO: 1617885
uaugcaaucaacaaacauc

SEQ ID NO: 1617887 - RNA, 19 nt, Artificial Sequence
  Description of Artificial Sequence: Synthetic oligonucleotide
  Sense strand starting at position 3311 of SEQ ID NO: 1560693
ugcauaaaugagcaacuuu

SEQ ID NO: 1617888 - RNA, 19 nt, Artificial Sequence
  Description of Artificial Sequence: Synthetic oligonucleotide
  Antisense strand to SEQ ID NO: 1617887
aaaguugcucauuuaugca

SEQ ID NO: 1617889 - RNA, 19 nt, Artificial Sequence
  Description of Artificial Sequence: Synthetic oligonucleotide
  Sense strand starting at position 3431 of SEQ ID NO: 1560693
guggguuaagcuggaaagu

SEQ ID NO: 1617890 - RNA, 19 nt, Artificial Sequence
  Description of Artificial Sequence: Synthetic oligonucleotide
  Antisense strand to SEQ ID NO: 1617889
acuuuccagcuuaacccac

SEQ ID NO: 1617891 - RNA, 19 nt, Artificial Sequence
  Description of Artificial Sequence: Synthetic oligonucleotide
  Sense strand starting at position 128 of SEQ ID NO: 1560694
ggcuucuacucucaguaag

SEQ ID NO: 1617892 - RNA, 19 nt, Artificial Sequence
  Description of Artificial Sequence: Synthetic oligonucleotide
  Antisense strand to SEQ ID NO: 1617891
cuuacugagaguagaagcc

SEQ ID NO: 1617893 - RNA, 19 nt, Artificial Sequence
  Description of Artificial Sequence: Synthetic oligonucleotide
  Sense strand starting at position 130 of SEQ ID NO: 1560694
cuucuacucucaguaaggu

SEQ ID NO: 1617894 - RNA, 19 nt, Artificial Sequence
  Description of Artificial Sequence: Synthetic oligonucleotide
  Antisense strand to SEQ ID NO: 1617893
accuuacugagaguagaag

SEQ ID NO: 1617895 - RNA, 19 nt, Artificial Sequence
  Description of Artificial Sequence: Synthetic oligonucleotide
  Sense strand starting at position 166 of SEQ ID NO: 1560694
gggaccuauuuggguuuca

SEQ ID NO: 1617896 - RNA, 19 nt, Artificial Sequence
  Description of Artificial Sequence: Synthetic oligonucleotide
  Antisense strand to SEQ ID NO: 1617895
ugaaacccaaauagguccc

SEQ ID NO: 1617897 - RNA, 19 nt, Artificial Sequence
  Description of Artificial Sequence: Synthetic oligonucleotide
  Sense strand starting at position 265 of SEQ ID NO: 1560694
ggcccaggugagugaugau

SEQ ID NO: 1617898 - RNA, 19 nt, Artificial Sequence
  Description of Artificial Sequence: Synthetic oligonucleotide
  Antisense strand to SEQ ID NO: 1617897
aucaucacucaccugggcc

SEQ ID NO: 1617899 - RNA, 19 nt, Artificial Sequence
  Description of Artificial Sequence: Synthetic oligonucleotide
  Sense strand starting at position 303 of SEQ ID NO: 1560694
uagcucucucccgaaggaa

SEQ ID NO: 1617900 - RNA, 19 nt, Artificial Sequence
  Description of Artificial Sequence: Synthetic oligonucleotide
  Antisense strand to SEQ ID NO: 1617899
uuccuucgggagagagcua

SEQ ID NO: 1617901 - RNA, 19 nt, Artificial Sequence
  Description of Artificial Sequence: Synthetic oligonucleotide
  Sense strand starting at position 851 of SEQ ID NO: 1560694
ggcugagugucacagggaa

SEQ ID NO: 1617902 - RNA, 19 nt, Artificial Sequence
  Description of Artificial Sequence: Synthetic oligonucleotide
  Antisense strand to SEQ ID NO: 1617901
uucccugugacacucagcc

SEQ ID NO: 1617903 - RNA, 19 nt, Artificial Sequence
  Description of Artificial Sequence: Synthetic oligonucleotide
  Sense strand starting at position 853 of SEQ ID NO: 1560694
cugagugucacagggaaca

SEQ ID NO: 1617904 - RNA, 19 nt, Artificial Sequence
  Description of Artificial Sequence: Synthetic oligonucleotide
  Antisense strand to SEQ ID NO: 1617903
uguucccugugacacucag

SEQ ID NO: 1617905 - RNA, 19 nt, Artificial Sequence
  Description of Artificial Sequence: Synthetic oligonucleotide
  Sense strand starting at position 918 of SEQ ID NO: 1560694
ggcuguuucgcuucgcaaa

SEQ ID NO: 1617906 - RNA, 19 nt, Artificial Sequence
  Description of Artificial Sequence: Synthetic oligonucleotide
  Antisense strand to SEQ ID NO: 1617905
uuugcgaagcgaaacagcc

SEQ ID NO: 1617907 - RNA, 19 nt, Artificial Sequence
  Description of Artificial Sequence: Synthetic oligonucleotide
  Sense strand starting at position 919 of SEQ ID NO: 1560694
gcuguuucgcuucgcaaag

SEQ ID NO: 1617908 - RNA, 19 nt, Artificial Sequence
  Description of Artificial Sequence: Synthetic oligonucleotide
  Antisense strand to SEQ ID NO: 1617907
cuuugcgaagcgaaacagc

SEQ ID NO: 1617909 - RNA, 19 nt, Artificial Sequence
  Description of Artificial Sequence: Synthetic oligonucleotide
  Sense strand starting at position 1938 of SEQ ID NO: 1560694
ccgccaucuuccucgguaa

SEQ ID NO: 1617910 - RNA, 19 nt, Artificial Sequence
  Description of Artificial Sequence: Synthetic oligonucleotide
  Antisense strand to SEQ ID NO: 1617909
uuaccgaggaagauggcgg

SEQ ID NO: 1617911 - RNA, 19 nt, Artificial Sequence
  Description of Artificial Sequence: Synthetic oligonucleotide
  Sense strand starting at position 1940 of SEQ ID NO: 1560694
gccaucuuccucgguaaca

SEQ ID NO: 1617912 - RNA, 19 nt, Artificial Sequence
  Description of Artificial Sequence: Synthetic oligonucleotide
  Antisense strand to SEQ ID NO: 1617911
uguuaccgaggaagauggc

SEQ ID NO: 1617913 - RNA, 19 nt, Artificial Sequence
  Description of Artificial Sequence: Synthetic oligonucleotide
  Sense strand starting at position 1941 of SEQ ID NO: 1560694
ccaucuuccucgguaacaa

SEQ ID NO: 1617914 - RNA, 19 nt, Artificial Sequence
  Description of Artificial Sequence: Synthetic oligonucleotide
  Antisense strand to SEQ ID NO: 1617913
uuguuaccgaggaagaugg

SEQ ID NO: 1617915 - RNA, 19 nt, Artificial Sequence
  Description of Artificial Sequence: Synthetic oligonucleotide
  Sense strand starting at position 2081 of SEQ ID NO: 1560694
cguagcuauauuugguaga

SEQ ID NO: 1617916 - RNA, 19 nt, Artificial Sequence
  Description of Artificial Sequence: Synthetic oligonucleotide
  Antisense strand to SEQ ID NO: 1617915
ucuaccaaauauagcuacg

SEQ ID NO: 1617917 - RNA, 19 nt, Artificial Sequence
  Description of Artificial Sequence: Synthetic oligonucleotide
  Sense strand starting at position 2082 of SEQ ID NO: 1560694
guagcuauauuugguagaa

SEQ ID NO: 1617918 - RNA, 19 nt, Artificial Sequence
  Description of Artificial Sequence: Synthetic oligonucleotide
  Antisense strand to SEQ ID NO: 1617917
uucuaccaaauauagcuac

SEQ ID NO: 1617919 - RNA, 19 nt, Artificial Sequence
  Description of Artificial Sequence: Synthetic oligonucleotide
  Sense strand starting at position 2084 of SEQ ID NO: 1560694
agcuauauuugguagaaca

SEQ ID NO: 1617920 - RNA, 19 nt, Artificial Sequence
  Description of Artificial Sequence: Synthetic oligonucleotide
  Antisense strand to SEQ ID NO: 1617919
uguucuaccaaauauagcu

SEQ ID NO: 1617921 - RNA, 19 nt, Artificial Sequence
  Description of Artificial Sequence: Synthetic oligonucleotide
  Sense strand starting at position 2123 of SEQ ID NO: 1560694
agucaauaacuacguuagu

SEQ ID NO: 1617922 - RNA, 19 nt, Artificial Sequence
  Description of Artificial Sequence: Synthetic oligonucleotide
  Antisense strand to SEQ ID NO: 1617921
acuaacguaguuauugacu

SEQ ID NO: 1617923 - RNA, 19 nt, Artificial Sequence
  Description of Artificial Sequence: Synthetic oligonucleotide
  Sense strand starting at position 2124 of SEQ ID NO: 1560694
gucaauaacuacguuaguu

SEQ ID NO: 1617924 - RNA, 19 nt, Artificial Sequence
  Description of Artificial Sequence: Synthetic oligonucleotide
  Antisense strand to SEQ ID NO: 1617923
aacuaacguaguuauugac

SEQ ID NO: 1617925 - RNA, 19 nt, Artificial Sequence
  Description of Artificial Sequence: Synthetic oligonucleotide
  Sense strand starting at position 2145 of SEQ ID NO: 1560694
auuacacauugggcuaaua

SEQ ID NO: 1617926 - RNA, 19 nt, Artificial Sequence
  Description of Artificial Sequence: Synthetic oligonucleotide
  Antisense strand to SEQ ID NO: 1617925
uauuagcccaauguguaau

SEQ ID NO: 1617927 - RNA, 19 nt, Artificial Sequence
  Description of Artificial Sequence: Synthetic oligonucleotide
  Sense strand starting at position 2170 of SEQ ID NO: 1560694
gagguuaaaucucuagguc

SEQ ID NO: 1617928 - RNA, 19 nt, Artificial Sequence
  Description of Artificial Sequence: Synthetic oligonucleotide
  Antisense strand to SEQ ID NO: 1617927
gaccuagagauuuaaccuc

SEQ ID NO: 1617929 - RNA, 19 nt, Artificial Sequence
  Description of Artificial Sequence: Synthetic oligonucleotide
  Sense strand starting at position 2171 of SEQ ID NO: 1560694
agguuaaaucucuagguca

SEQ ID NO: 1617930 - RNA, 19 nt, Artificial Sequence
  Description of Artificial Sequence: Synthetic oligonucleotide
  Antisense strand to SEQ ID NO: 1617929
ugaccuagagauuuaaccu

SEQ ID NO: 1617931 - RNA, 19 nt, Artificial Sequence
  Description of Artificial Sequence: Synthetic oligonucleotide
  Sense strand starting at position 2173 of SEQ ID NO: 1560694
guuaaaucucuaggucauu

SEQ ID NO: 1617932 - RNA, 19 nt, Artificial Sequence
  Description of Artificial Sequence: Synthetic oligonucleotide
  Antisense strand to SEQ ID NO: 1617931
aaugaccuagagauuuaac

SEQ ID NO: 1617933 - RNA, 19 nt, Artificial Sequence
  Description of Artificial Sequence: Synthetic oligonucleotide
  Sense strand starting at position 2183 of SEQ ID NO: 1560694
uaggucauuuaagagaagu

SEQ ID NO: 1617934 - RNA, 19 nt, Artificial Sequence
  Description of Artificial Sequence: Synthetic oligonucleotide
  Antisense strand to SEQ ID NO: 1617933
acuucucuuaaaugaccua

SEQ ID NO: 1617935 - RNA, 19 nt, Artificial Sequence
  Description of Artificial Sequence: Synthetic oligonucleotide
  Sense strand starting at position 2191 of SEQ ID NO: 1560694
uuaagagaagucggccuau

SEQ ID NO: 1617936 - RNA, 19 nt, Artificial Sequence
  Description of Artificial Sequence: Synthetic oligonucleotide
  Antisense strand to SEQ ID NO: 1617935
auaggccgacuucucuuaa

SEQ ID NO: 1617937 - RNA, 19 nt, Artificial Sequence
  Description of Artificial Sequence: Synthetic oligonucleotide
  Sense strand starting at position 2203 of SEQ ID NO: 1560694
ggccuauguguacagacau

SEQ ID NO: 1617938 - RNA, 19 nt, Artificial Sequence
  Description of Artificial Sequence: Synthetic oligonucleotide
  Antisense strand to SEQ ID NO: 1617937
augucuguacacauaggcc

SEQ ID NO: 1617939 - RNA, 19 nt, Artificial Sequence
  Description of Artificial Sequence: Synthetic oligonucleotide
  Sense strand starting at position 2246 of SEQ ID NO: 1560694
ggugguggaacucaauauu

SEQ ID NO: 1617940 - RNA, 19 nt, Artificial Sequence
  Description of Artificial Sequence: Synthetic oligonucleotide
  Antisense strand to SEQ ID NO: 1617939
aauauugaguuccaccacc

SEQ ID NO: 1617941 - RNA, 19 nt, Artificial Sequence
  Description of Artificial Sequence: Synthetic oligonucleotide
  Sense strand starting at position 2249 of SEQ ID NO: 1560694
gguggaacucaauauucgu

SEQ ID NO: 1617942 - RNA, 19 nt, Artificial Sequence
  Description of Artificial Sequence: Synthetic oligonucleotide
  Antisense strand to SEQ ID NO: 1617941
acgaauauugaguuccacc

SEQ ID NO: 1617943 - RNA, 19 nt, Artificial Sequence
  Description of Artificial Sequence: Synthetic oligonucleotide
  Sense strand starting at position 2257 of SEQ ID NO: 1560694
ucaauauucgugcucgcuu

SEQ ID NO: 1617944 - RNA, 19 nt, Artificial Sequence
  Description of Artificial Sequence: Synthetic oligonucleotide
  Antisense strand to SEQ ID NO: 1617943
aagcgagcacgaauauuga

SEQ ID NO: 1617945 - RNA, 19 nt, Artificial Sequence
  Description of Artificial Sequence: Synthetic oligonucleotide
  Sense strand starting at position 2441 of SEQ ID NO: 1560694
gcgaucuuagcuuguugca

SEQ ID NO: 1617946 - RNA, 19 nt, Artificial Sequence
  Description of Artificial Sequence: Synthetic oligonucleotide
  Antisense strand to SEQ ID NO: 1617945
ugcaacaagcuaagaucgc

SEQ ID NO: 1617947 - RNA, 19 nt, Artificial Sequence
  Description of Artificial Sequence: Synthetic oligonucleotide
  Sense strand starting at position 2443 of SEQ ID NO: 1560694
gaucuuagcuuguugcaac

SEQ ID NO: 1617948 - RNA, 19 nt, Artificial Sequence
  Description of Artificial Sequence: Synthetic oligonucleotide
  Antisense strand to SEQ ID NO: 1617947
guugcaacaagcuaagauc

SEQ ID NO: 1617949 - RNA, 19 nt, Artificial Sequence
  Description of Artificial Sequence: Synthetic oligonucleotide
  Sense strand starting at position 2590 of SEQ ID NO: 1560694
gguggucucuaucuacuga

SEQ ID NO: 1617950 - RNA, 19 nt, Artificial Sequence
  Description of Artificial Sequence: Synthetic oligonucleotide
  Antisense strand to SEQ ID NO: 1617949
ucaguagauagagaccacc

SEQ ID NO: 1617951 - RNA, 19 nt, Artificial Sequence
  Description of Artificial Sequence: Synthetic oligonucleotide
  Sense strand starting at position 2732 of SEQ ID NO: 1560694
cccguugaguauuccuacu

SEQ ID NO: 1617952 - RNA, 19 nt, Artificial Sequence
  Description of Artificial Sequence: Synthetic oligonucleotide
  Antisense strand to SEQ ID NO: 1617951
aguaggaauacucaacggg

SEQ ID NO: 1617953 - RNA, 19 nt, Artificial Sequence
  Description of Artificial Sequence: Synthetic oligonucleotide
  Sense strand starting at position 2734 of SEQ ID NO: 1560694
cguugaguauuccuacuuc

SEQ ID NO: 1617954 - RNA, 19 nt, Artificial Sequence
  Description of Artificial Sequence: Synthetic oligonucleotide
  Antisense strand to SEQ ID NO: 1617953
gaaguaggaauacucaacg

SEQ ID NO: 1617955 - RNA, 19 nt, Artificial Sequence
  Description of Artificial Sequence: Synthetic oligonucleotide
  Sense strand starting at position 2782 of SEQ ID NO: 1560694
gccaguuuaaugcaaugga

SEQ ID NO: 1617956 - RNA, 19 nt, Artificial Sequence
  Description of Artificial Sequence: Synthetic oligonucleotide
  Antisense strand to SEQ ID NO: 1617955
uccauugcauuaaacuggc

SEQ ID NO: 1617957 - RNA, 19 nt, Artificial Sequence
  Description of Artificial Sequence: Synthetic oligonucleotide
  Sense strand starting at position 2785 of SEQ ID NO: 1560694
aguuuaaugcaauggaugu

SEQ ID NO: 1617958 - RNA, 19 nt, Artificial Sequence
  Description of Artificial Sequence: Synthetic oligonucleotide
  Antisense strand to SEQ ID NO: 1617957
acauccauugcauuaaacu

SEQ ID NO: 1617959 - RNA, 19 nt, Artificial Sequence
  Description of Artificial Sequence: Synthetic oligonucleotide
  Sense strand starting at position 3243 of SEQ ID NO: 1560694
gcggccucacugcaugauu

SEQ ID NO: 1617960 - RNA, 19 nt, Artificial Sequence
  Description of Artificial Sequence: Synthetic oligonucleotide
  Antisense strand to SEQ ID NO: 1617959
aaucaugcagugaggccgc

SEQ ID NO: 1617961 - RNA, 19 nt, Artificial Sequence
  Description of Artificial Sequence: Synthetic oligonucleotide
  Sense strand starting at position 3265 of SEQ ID NO: 1560694
gcaagaauucugcaaauau

SEQ ID NO: 1617962 - RNA, 19 nt, Artificial Sequence
  Description of Artificial Sequence: Synthetic oligonucleotide
  Antisense strand to SEQ ID NO: 1617961
auauuugcagaauucuugc

SEQ ID NO: 1617963 - RNA, 19 nt, Artificial Sequence
  Description of Artificial Sequence: Synthetic oligonucleotide
  Sense strand starting at position 3315 of SEQ ID NO: 1560694
gcccaaauaucagaguguu

SEQ ID NO: 1617964 - RNA, 19 nt, Artificial Sequence
  Description of Artificial Sequence: Synthetic oligonucleotide
  Antisense strand to SEQ ID NO: 1617963
aacacucugauauuugggc

SEQ ID NO: 1617965 - RNA, 19 nt, Artificial Sequence
  Description of Artificial Sequence: Synthetic oligonucleotide
  Sense strand starting at position 3346 of SEQ ID NO: 1560694
ggguucaguucuccaagag

SEQ ID NO: 1617966 - RNA, 19 nt, Artificial Sequence
  Description of Artificial Sequence: Synthetic oligonucleotide
  Antisense strand to SEQ ID NO: 1617965
cucuuggagaacugaaccc

SEQ ID NO: 1617967 - RNA, 19 nt, Artificial Sequence
  Description of Artificial Sequence: Synthetic oligonucleotide
  Sense strand starting at position 3347 of SEQ ID NO: 1560694
gguucaguucuccaagagg

SEQ ID NO: 1617968 - RNA, 19 nt, Artificial Sequence
  Description of Artificial Sequence: Synthetic oligonucleotide
  Antisense strand to SEQ ID NO: 1617967
ccucuuggagaacugaacc

SEQ ID NO: 1617969 - RNA, 19 nt, Artificial Sequence
  Description of Artificial Sequence: Synthetic oligonucleotide
  Sense strand starting at position 3638 of SEQ ID NO: 1560694
cgcagaucaccugagaaca

SEQ ID NO: 1617970 - RNA, 19 nt, Artificial Sequence
  Description of Artificial Sequence: Synthetic oligonucleotide
  Antisense strand to SEQ ID NO: 1617969
uguucucaggugaucugcg

SEQ ID NO: 1617971 - RNA, 19 nt, Artificial Sequence
  Description of Artificial Sequence: Synthetic oligonucleotide
  Sense strand starting at position 85 of SEQ ID NO: 1560695
gagugcacucaaugaaaga

SEQ ID NO: 1617972 - RNA, 19 nt, Artificial Sequence
  Description of Artificial Sequence: Synthetic oligonucleotide
  Antisense strand to SEQ ID NO: 1617971
ucuuucauugagugcacuc

SEQ ID NO: 1617973 - RNA, 19 nt, Artificial Sequence
  Description of Artificial Sequence: Synthetic oligonucleotide
  Sense strand starting at position 96 of SEQ ID NO: 1560695
augaaagauucuccugcuu

SEQ ID NO: 1617974 - RNA, 19 nt, Artificial Sequence
  Description of Artificial Sequence: Synthetic oligonucleotide
  Antisense strand to SEQ ID NO: 1617973
aagcaggagaaucuuucau

SEQ ID NO: 1617975 - RNA, 19 nt, Artificial Sequence
  Description of Artificial Sequence: Synthetic oligonucleotide
  Sense strand starting at position 476 of SEQ ID NO: 1560695
gaucuauccuggcucugac

SEQ ID NO: 1617976 - RNA, 19 nt, Artificial Sequence
  Description of Artificial Sequence: Synthetic oligonucleotide
  Antisense strand to SEQ ID NO: 1617975
gucagagccaggauagauc

SEQ ID NO: 1617977 - RNA, 19 nt, Artificial Sequence
  Description of Artificial Sequence: Synthetic oligonucleotide
  Sense strand starting at position 742 of SEQ ID NO: 1560695
ucccuuaauguaugagaug

SEQ ID NO: 1617978 - RNA, 19 nt, Artificial Sequence
  Description of Artificial Sequence: Synthetic oligonucleotide
  Antisense strand to SEQ ID NO: 1617977
caucucauacauuaaggga

SEQ ID NO: 1617979 - RNA, 19 nt, Artificial Sequence
  Description of Artificial Sequence: Synthetic oligonucleotide
  Sense strand starting at position 743 of SEQ ID NO: 1560695
cccuuaauguaugagaugu

SEQ ID NO: 1617980 - RNA, 19 nt, Artificial Sequence
  Description of Artificial Sequence: Synthetic oligonucleotide
  Antisense strand to SEQ ID NO: 1617979
acaucucauacauuaaggg

SEQ ID NO: 1617981 - RNA, 19 nt, Artificial Sequence
  Description of Artificial Sequence: Synthetic oligonucleotide
  Sense strand starting at position 745 of SEQ ID NO: 1560695
cuuaauguaugagauguuu

SEQ ID NO: 1617982 - RNA, 19 nt, Artificial Sequence
  Description of Artificial Sequence: Synthetic oligonucleotide
  Antisense strand to SEQ ID NO: 1617981
aaacaucucauacauuaag

SEQ ID NO: 1617983 - RNA, 19 nt, Artificial Sequence
  Description of Artificial Sequence: Synthetic oligonucleotide
  Sense strand starting at position 754 of SEQ ID NO: 1560695
ugagauguuuccugcagcu

SEQ ID NO: 1617984 - RNA, 19 nt, Artificial Sequence
  Description of Artificial Sequence: Synthetic oligonucleotide
  Antisense strand to SEQ ID NO: 1617983
agcugcaggaaacaucuca

SEQ ID NO: 1617985 - RNA, 19 nt, Artificial Sequence
  Description of Artificial Sequence: Synthetic oligonucleotide
  Sense strand starting at position 756 of SEQ ID NO: 1560695
agauguuuccugcagcuca

SEQ ID NO: 1617986 - RNA, 19 nt, Artificial Sequence
  Description of Artificial Sequence: Synthetic oligonucleotide
  Antisense strand to SEQ ID NO: 1617985
ugagcugcaggaaacaucu

SEQ ID NO: 1617987 - RNA, 19 nt, Artificial Sequence
  Description of Artificial Sequence: Synthetic oligonucleotide
  Sense strand starting at position 1723 of SEQ ID NO: 1560695
aagugaaaggucggaguca

SEQ ID NO: 1617988 - RNA, 19 nt, Artificial Sequence
  Description of Artificial Sequence: Synthetic oligonucleotide
  Antisense strand to SEQ ID NO: 1617987
ugacuccgaccuuucacuu

SEQ ID NO: 1617989 - RNA, 19 nt, Artificial Sequence
  Description of Artificial Sequence: Synthetic oligonucleotide
  Sense strand starting at position 1732 of SEQ ID NO: 1560695
gucggagucaggcaagaaa

SEQ ID NO: 1617990 - RNA, 19 nt, Artificial Sequence
  Description of Artificial Sequence: Synthetic oligonucleotide
  Antisense strand to SEQ ID NO: 1617989
uuucuugccugacuccgac

SEQ ID NO: 1617991 - RNA, 19 nt, Artificial Sequence
  Description of Artificial Sequence: Synthetic oligonucleotide
  Sense strand starting at position 1743 of SEQ ID NO: 1560695
gcaagaaacugugcgaaac

SEQ ID NO: 1617992 - RNA, 19 nt, Artificial Sequence
  Description of Artificial Sequence: Synthetic oligonucleotide
  Antisense strand to SEQ ID NO: 1617991
guuucgcacaguuucuugc

SEQ ID NO: 1617993 - RNA, 19 nt, Artificial Sequence
  Description of Artificial Sequence: Synthetic oligonucleotide
  Sense strand starting at position 1744 of SEQ ID NO: 1560695
caagaaacugugcgaaacu

SEQ ID NO: 1617994 - RNA, 19 nt, Artificial Sequence
  Description of Artificial Sequence: Synthetic oligonucleotide
  Antisense strand to SEQ ID NO: 1617993
aguuucgcacaguuucuug

SEQ ID NO: 1617995 - RNA, 19 nt, Artificial Sequence
  Description of Artificial Sequence: Synthetic oligonucleotide
  Sense strand starting at position 1777 of SEQ ID NO: 1560695
ggguuagagucgcggaaac

SEQ ID NO: 1617996 - RNA, 19 nt, Artificial Sequence
  Description of Artificial Sequence: Synthetic oligonucleotide
  Antisense strand to SEQ ID NO: 1617995
guuuccgcgacucuaaccc

SEQ ID NO: 1617997 - RNA, 19 nt, Artificial Sequence
  Description of Artificial Sequence: Synthetic oligonucleotide
  Sense strand starting at position 1778 of SEQ ID NO: 1560695
gguuagagucgcggaaaca

SEQ ID NO: 1617998 - RNA, 19 nt, Artificial Sequence
  Description of Artificial Sequence: Synthetic oligonucleotide
  Antisense strand to SEQ ID NO: 1617997
uguuuccgcgacucuaacc

SEQ ID NO: 1617999 - RNA, 19 nt, Artificial Sequence
  Description of Artificial Sequence: Synthetic oligonucleotide
  Sense strand starting at position 2047 of SEQ ID NO: 1560695
ugggaaugcugccauguuu

SEQ ID NO: 1618000 - RNA, 19 nt, Artificial Sequence
  Description of Artificial Sequence: Synthetic oligonucleotide
  Antisense strand to SEQ ID NO: 1617999
aaacauggcagcauuccca

SEQ ID NO: 1618001 - RNA, 19 nt, Artificial Sequence
  Description of Artificial Sequence: Synthetic oligonucleotide
  Sense strand starting at position 2248 of SEQ ID NO: 1560695
guccgccucuugucucaaa

SEQ ID NO: 1618002 - RNA, 19 nt, Artificial Sequence
  Description of Artificial Sequence: Synthetic oligonucleotide
  Antisense strand to SEQ ID NO: 1618001
uuugagacaagaggcggac

SEQ ID NO: 1618003 - RNA, 19 nt, Artificial Sequence
  Description of Artificial Sequence: Synthetic oligonucleotide
  Sense strand starting at position 2279 of SEQ ID NO: 1560695
agaccugguugcuaugcaa

SEQ ID NO: 1618004 - RNA, 19 nt, Artificial Sequence
  Description of Artificial Sequence: Synthetic oligonucleotide
  Antisense strand to SEQ ID NO: 1618003
uugcauagcaaccaggucu

SEQ ID NO: 1618005 - RNA, 19 nt, Artificial Sequence
  Description of Artificial Sequence: Synthetic oligonucleotide
  Sense strand starting at position 2652 of SEQ ID NO: 1560695
uuguaaccguuagauuaag

SEQ ID NO: 1618006 - RNA, 19 nt, Artificial Sequence
  Description of Artificial Sequence: Synthetic oligonucleotide
  Antisense strand to SEQ ID NO: 1618005
cuuaaucuaacgguuacaa

SEQ ID NO: 1618007 - RNA, 19 nt, Artificial Sequence
  Description of Artificial Sequence: Synthetic oligonucleotide
  Sense strand starting at position 2663 of SEQ ID NO: 1560695
agauuaaguuucugguucu

SEQ ID NO: 1618008 - RNA, 19 nt, Artificial Sequence
  Description of Artificial Sequence: Synthetic oligonucleotide
  Antisense strand to SEQ ID NO: 1618007
agaaccagaaacuuaaucu

SEQ ID NO: 1618009 - RNA, 19 nt, Artificial Sequence
  Description of Artificial Sequence: Synthetic oligonucleotide
  Sense strand starting at position 2666 of SEQ ID NO: 1560695
uuaaguuucugguucuguu

SEQ ID NO: 1618010 - RNA, 19 nt, Artificial Sequence
  Description of Artificial Sequence: Synthetic oligonucleotide
  Antisense strand to SEQ ID NO: 1618009
aacagaaccagaaacuuaa

SEQ ID NO: 1618011 - RNA, 19 nt, Artificial Sequence
  Description of Artificial Sequence: Synthetic oligonucleotide
  Sense strand starting at position 2761 of SEQ ID NO: 1560695
gcuuuaaggucguccucaa

SEQ ID NO: 1618012 - RNA, 19 nt, Artificial Sequence
  Description of Artificial Sequence: Synthetic oligonucleotide
  Antisense strand to SEQ ID NO: 1618011
uugaggacgaccuuaaagc

SEQ ID NO: 1618013 - RNA, 19 nt, Artificial Sequence
  Description of Artificial Sequence: Synthetic oligonucleotide
  Sense strand starting at position 2886 of SEQ ID NO: 1560695
gaaacuggcuuagaacgua

SEQ ID NO: 1618014 - RNA, 19 nt, Artificial Sequence
  Description of Artificial Sequence: Synthetic oligonucleotide
  Antisense strand to SEQ ID NO: 1618013
uacguucuaagccaguuuc

SEQ ID NO: 1618015 - RNA, 19 nt, Artificial Sequence
  Description of Artificial Sequence: Synthetic oligonucleotide
  Sense strand starting at position 2889 of SEQ ID NO: 1560695
acuggcuuagaacguaaau

SEQ ID NO: 1618016 - RNA, 19 nt, Artificial Sequence
  Description of Artificial Sequence: Synthetic oligonucleotide
  Antisense strand to SEQ ID NO: 1618015
auuuacguucuaagccagu

SEQ ID NO: 1618017 - RNA, 19 nt, Artificial Sequence
  Description of Artificial Sequence: Synthetic oligonucleotide
  Sense strand starting at position 2891 of SEQ ID NO: 1560695
uggcuuagaacguaaauac

SEQ ID NO: 1618018 - RNA, 19 nt, Artificial Sequence
  Description of Artificial Sequence: Synthetic oligonucleotide
  Antisense strand to SEQ ID NO: 1618017
guauuuacguucuaagcca

SEQ ID NO: 1618019 - RNA, 19 nt, Artificial Sequence
  Description of Artificial Sequence: Synthetic oligonucleotide
  Sense strand starting at position 2907 of SEQ ID NO: 1560695
uacauuccagguggauuaa

SEQ ID NO: 1618020 - RNA, 19 nt, Artificial Sequence
  Description of Artificial Sequence: Synthetic oligonucleotide
  Antisense strand to SEQ ID NO: 1618019
uuaauccaccuggaaugua

SEQ ID NO: 1618021 - RNA, 19 nt, Artificial Sequence
  Description of Artificial Sequence: Synthetic oligonucleotide
  Sense strand starting at position 2978 of SEQ ID NO: 1560695
uaaugacugccauggaguu

SEQ ID NO: 1618022 - RNA, 19 nt, Artificial Sequence
  Description of Artificial Sequence: Synthetic oligonucleotide
  Antisense strand to SEQ ID NO: 1618021
aacuccauggcagucauua

SEQ ID NO: 1618023 - RNA, 19 nt, Artificial Sequence
  Description of Artificial Sequence: Synthetic oligonucleotide
  Sense strand starting at position 2988 of SEQ ID NO: 1560695
cauggaguuucuuagcacu

SEQ ID NO: 1618024 - RNA, 19 nt, Artificial Sequence
  Description of Artificial Sequence: Synthetic oligonucleotide
  Antisense strand to SEQ ID NO: 1618023
agugcuaagaaacuccaug

SEQ ID NO: 1618025 - RNA, 19 nt, Artificial Sequence
  Description of Artificial Sequence: Synthetic oligonucleotide
  Sense strand starting at position 2990 of SEQ ID NO: 1560695
uggaguuucuuagcacuac

SEQ ID NO: 1618026 - RNA, 19 nt, Artificial Sequence
  Description of Artificial Sequence: Synthetic oligonucleotide
  Antisense strand to SEQ ID NO: 1618025
guagugcuaagaaacucca

SEQ ID NO: 1618027 - RNA, 19 nt, Artificial Sequence
  Description of Artificial Sequence: Synthetic oligonucleotide
  Sense strand starting at position 2991 of SEQ ID NO: 1560695
ggaguuucuuagcacuaca

SEQ ID NO: 1618028 - RNA, 19 nt, Artificial Sequence
  Description of Artificial Sequence: Synthetic oligonucleotide
  Antisense strand to SEQ ID NO: 1618027
uguagugcuaagaaacucc

SEQ ID NO: 1618029 - RNA, 19 nt, Artificial Sequence
  Description of Artificial Sequence: Synthetic oligonucleotide
  Sense strand starting at position 3092 of SEQ ID NO: 1560695
aaaucuuucuagcguguuu

SEQ ID NO: 1618030 - RNA, 19 nt, Artificial Sequence
  Description of Artificial Sequence: Synthetic oligonucleotide
  Antisense strand to SEQ ID NO: 1618029
aaacacgcuagaaagauuu

SEQ ID NO: 1618031 - RNA, 19 nt, Artificial Sequence
  Description of Artificial Sequence: Synthetic oligonucleotide
  Sense strand starting at position 3101 of SEQ ID NO: 1560695
uagcguguuuguugacaga

SEQ ID NO: 1618032 - RNA, 19 nt, Artificial Sequence
  Description of Artificial Sequence: Synthetic oligonucleotide
  Antisense strand to SEQ ID NO: 1618031
ucugucaacaaacacgcua

SEQ ID NO: 1618033 - RNA, 19 nt, Artificial Sequence
  Description of Artificial Sequence: Synthetic oligonucleotide
  Sense strand starting at position 3104 of SEQ ID NO: 1560695
cguguuuguugacagaaau

SEQ ID NO: 1618034 - RNA, 19 nt, Artificial Sequence
  Description of Artificial Sequence: Synthetic oligonucleotide
  Antisense strand to SEQ ID NO: 1618033
auuucugucaacaaacacg

SEQ ID NO: 1618035 - RNA, 19 nt, Artificial Sequence
  Description of Artificial Sequence: Synthetic oligonucleotide
  Sense strand starting at position 3115 of SEQ ID NO: 1560695
acagaaauguacuacgcaa

SEQ ID NO: 1618036 - RNA, 19 nt, Artificial Sequence
  Description of Artificial Sequence: Synthetic oligonucleotide
  Antisense strand to SEQ ID NO: 1618035
uugcguaguacauuucugu

SEQ ID NO: 1618037 - RNA, 19 nt, Artificial Sequence
  Description of Artificial Sequence: Synthetic oligonucleotide
  Sense strand starting at position 3230 of SEQ ID NO: 1560695
uucuguugugcagguugaa

SEQ ID NO: 1618038 - RNA, 19 nt, Artificial Sequence
  Description of Artificial Sequence: Synthetic oligonucleotide
  Antisense strand to SEQ ID NO: 1618037
uucaaccugcacaacagaa

SEQ ID NO: 1618039 - RNA, 19 nt, Artificial Sequence
  Description of Artificial Sequence: Synthetic oligonucleotide
  Sense strand starting at position 3393 of SEQ ID NO: 1560695
ugcucuggcgugucucaaa

SEQ ID NO: 1618040 - RNA, 19 nt, Artificial Sequence
  Description of Artificial Sequence: Synthetic oligonucleotide
  Antisense strand to SEQ ID NO: 1618039
uuugagacacgccagagca

SEQ ID NO: 1618041 - RNA, 19 nt, Artificial Sequence
  Description of Artificial Sequence: Synthetic oligonucleotide
  Sense strand starting at position 3593 of SEQ ID NO: 1560695
uggugaaacuccuucuaac

SEQ ID NO: 1618042 - RNA, 19 nt, Artificial Sequence
  Description of Artificial Sequence: Synthetic oligonucleotide
  Antisense strand to SEQ ID NO: 1618041
guuagaaggaguuucacca

SEQ ID NO: 1618043 - RNA, 19 nt, Artificial Sequence
  Description of Artificial Sequence: Synthetic oligonucleotide
  Sense strand starting at position 3678 of SEQ ID NO: 1560695
ucaggagauucuccugaac

SEQ ID NO: 1618044 - RNA, 19 nt, Artificial Sequence
  Description of Artificial Sequence: Synthetic oligonucleotide
  Antisense strand to SEQ ID NO: 1618043
guucaggagaaucuccuga

SEQ ID NO: 1618045 - RNA, 19 nt, Artificial Sequence
  Description of Artificial Sequence: Synthetic oligonucleotide
  Sense strand starting at position 3841 of SEQ ID NO: 1560695
uugaauggccaguaaauau

SEQ ID NO: 1618046 - RNA, 19 nt, Artificial Sequence
  Description of Artificial Sequence: Synthetic oligonucleotide
  Antisense strand to SEQ ID NO: 1618045
auauuuacuggccauucaa

SEQ ID NO: 1618047 - RNA, 19 nt, Artificial Sequence
  Description of Artificial Sequence: Synthetic oligonucleotide
  Sense strand starting at position 3937 of SEQ ID NO: 1560695
ucacgaggucaguaucacu

SEQ ID NO: 1618048 - RNA, 19 nt, Artificial Sequence
  Description of Artificial Sequence: Synthetic oligonucleotide
  Antisense strand to SEQ ID NO: 1618047
agugauacugaccucguga

SEQ ID NO: 1618049 - RNA, 19 nt, Artificial Sequence
  Description of Artificial Sequence: Synthetic oligonucleotide
  Sense strand starting at position 3962 of SEQ ID NO: 1560695
cguggugcccaccuguaau

SEQ ID NO: 1618050 - RNA, 19 nt, Artificial Sequence
  Description of Artificial Sequence: Synthetic oligonucleotide
  Antisense strand to SEQ ID NO: 1618049
auuacaggugggcaccacg

SEQ ID NO: 1618051 - RNA, 19 nt, Artificial Sequence
  Description of Artificial Sequence: Synthetic oligonucleotide
  Sense strand starting at position 41 of SEQ ID NO: 1560696
gaaagcgagugcgugaaau

SEQ ID NO: 1618052 - RNA, 19 nt, Artificial Sequence
  Description of Artificial Sequence: Synthetic oligonucleotide
  Antisense strand to SEQ ID NO: 1618051
auuucacgcacucgcuuuc

SEQ ID NO: 1618053 - RNA, 19 nt, Artificial Sequence
  Description of Artificial Sequence: Synthetic oligonucleotide
  Sense strand starting at position 43 of SEQ ID NO: 1560696
aagcgagugcgugaaauua

SEQ ID NO: 1618054 - RNA, 19 nt, Artificial Sequence
  Description of Artificial Sequence: Synthetic oligonucleotide
  Antisense strand to SEQ ID NO: 1618053
uaauuucacgcacucgcuu

SEQ ID NO: 1618055 - RNA, 19 nt, Artificial Sequence
  Description of Artificial Sequence: Synthetic oligonucleotide
  Sense strand starting at position 45 of SEQ ID NO: 1560696
gcgagugcgugaaauuaaa

SEQ ID NO: 1618056 - RNA, 19 nt, Artificial Sequence
  Description of Artificial Sequence: Synthetic oligonucleotide
  Antisense strand to SEQ ID NO: 1618055
uuuaauuucacgcacucgc

SEQ ID NO: 1618057 - RNA, 19 nt, Artificial Sequence
  Description of Artificial Sequence: Synthetic oligonucleotide
  Sense strand starting at position 94 of SEQ ID NO: 1560696
acaagucaccaaggcuauu

SEQ ID NO: 1618058 - RNA, 19 nt, Artificial Sequence
  Description of Artificial Sequence: Synthetic oligonucleotide
  Antisense strand to SEQ ID NO: 1618057
aauagccuuggugacuugu

SEQ ID NO: 1618059 - RNA, 19 nt, Artificial Sequence
  Description of Artificial Sequence: Synthetic oligonucleotide
  Sense strand starting at position 286 of SEQ ID NO: 1560696
caauguuaaugggaccuga

SEQ ID NO: 1618060 - RNA, 19 nt, Artificial Sequence
  Description of Artificial Sequence: Synthetic oligonucleotide
  Antisense strand to SEQ ID NO: 1618059
ucaggucccauuaacauug

SEQ ID NO: 1618061 - RNA, 19 nt, Artificial Sequence
  Description of Artificial Sequence: Synthetic oligonucleotide
  Sense strand starting at position 290 of SEQ ID NO: 1560696
guuaaugggaccugaauac

SEQ ID NO: 1618062 - RNA, 19 nt, Artificial Sequence
  Description of Artificial Sequence: Synthetic oligonucleotide
  Antisense strand to SEQ ID NO: 1618061
guauucaggucccauuaac

SEQ ID NO: 1618063 - RNA, 19 nt, Artificial Sequence
  Description of Artificial Sequence: Synthetic oligonucleotide
  Sense strand starting at position 388 of SEQ ID NO: 1560696
uguauaagccaaugugaau

SEQ ID NO: 1618064 - RNA, 19 nt, Artificial Sequence
  Description of Artificial Sequence: Synthetic oligonucleotide
  Antisense strand to SEQ ID NO: 1618063
auucacauuggcuuauaca

SEQ ID NO: 1618065 - RNA, 19 nt, Artificial Sequence
  Description of Artificial Sequence: Synthetic oligonucleotide
  Sense strand starting at position 430 of SEQ ID NO: 1560696
gaagcauauugcuaagagu

SEQ ID NO: 1618066 - RNA, 19 nt, Artificial Sequence
  Description of Artificial Sequence: Synthetic oligonucleotide
  Antisense strand to SEQ ID NO: 1618065
acucuuagcaauaugcuuc

SEQ ID NO: 1618067 - RNA, 19 nt, Artificial Sequence
  Description of Artificial Sequence: Synthetic oligonucleotide
  Sense strand starting at position 492 of SEQ ID NO: 1560696
gugagagaaaccugaguua

SEQ ID NO: 1618068 - RNA, 19 nt, Artificial Sequence
  Description of Artificial Sequence: Synthetic oligonucleotide
  Antisense strand to SEQ ID NO: 1618067
uaacucagguuucucucac

SEQ ID NO: 1618069 - RNA, 19 nt, Artificial Sequence
  Description of Artificial Sequence: Synthetic oligonucleotide
  Sense strand starting at position 495 of SEQ ID NO: 1560696
agagaaaccugaguuaccu

SEQ ID NO: 1618070 - RNA, 19 nt, Artificial Sequence
  Description of Artificial Sequence: Synthetic oligonucleotide
  Antisense strand to SEQ ID NO: 1618069
agguaacucagguuucucu

SEQ ID NO: 1618071 - RNA, 19 nt, Artificial Sequence
  Description of Artificial Sequence: Synthetic oligonucleotide
  Sense strand starting at position 599 of SEQ ID NO: 1560696
cccucauaccuggaugcua

SEQ ID NO: 1618072 - RNA, 19 nt, Artificial Sequence
  Description of Artificial Sequence: Synthetic oligonucleotide
  Antisense strand to SEQ ID NO: 1618071
uagcauccagguaugaggg

SEQ ID NO: 1618073 - RNA, 19 nt, Artificial Sequence
  Description of Artificial Sequence: Synthetic oligonucleotide
  Sense strand starting at position 669 of SEQ ID NO: 1560696
ccaagaaacucuuggagaa

SEQ ID NO: 1618074 - RNA, 19 nt, Artificial Sequence
  Description of Artificial Sequence: Synthetic oligonucleotide
  Antisense strand to SEQ ID NO: 1618073
uucuccaagaguuucuugg

SEQ ID NO: 1618075 - RNA, 19 nt, Artificial Sequence
  Description of Artificial Sequence: Synthetic oligonucleotide
  Sense strand starting at position 812 of SEQ ID NO: 1560696
agcgacacucuggaguuaa

SEQ ID NO: 1618076 - RNA, 19 nt, Artificial Sequence
  Description of Artificial Sequence: Synthetic oligonucleotide
  Antisense strand to SEQ ID NO: 1618075
uuaacuccagagugucgcu

SEQ ID NO: 1618077 - RNA, 19 nt, Artificial Sequence
  Description of Artificial Sequence: Synthetic oligonucleotide
  Sense strand starting at position 832 of SEQ ID NO: 1560696
cccgacagucugggucaaa

SEQ ID NO: 1618078 - RNA, 19 nt, Artificial Sequence
  Description of Artificial Sequence: Synthetic oligonucleotide
  Antisense strand to SEQ ID NO: 1618077
uuugacccagacugucggg

SEQ ID NO: 1618079 - RNA, 19 nt, Artificial Sequence
  Description of Artificial Sequence: Synthetic oligonucleotide
  Sense strand starting at position 895 of SEQ ID NO: 1560696
aacagagcucuuggguaaa

SEQ ID NO: 1618080 - RNA, 19 nt, Artificial Sequence
  Description of Artificial Sequence: Synthetic oligonucleotide
  Antisense strand to SEQ ID NO: 1618079
uuuacccaagagcucuguu

SEQ ID NO: 1618081 - RNA, 19 nt, Artificial Sequence
  Description of Artificial Sequence: Synthetic oligonucleotide
  Sense strand starting at position 955 of SEQ ID NO: 1560696
gagcucuggcuuggucaga

SEQ ID NO: 1618082 - RNA, 19 nt, Artificial Sequence
  Description of Artificial Sequence: Synthetic oligonucleotide
  Antisense strand to SEQ ID NO: 1618081
ucugaccaagccagagcuc

SEQ ID NO: 1618083 - RNA, 19 nt, Artificial Sequence
  Description of Artificial Sequence: Synthetic oligonucleotide
  Sense strand starting at position 1072 of SEQ ID NO: 1560696
aggcgugucuagucacaga

SEQ ID NO: 1618084 - RNA, 19 nt, Artificial Sequence
  Description of Artificial Sequence: Synthetic oligonucleotide
  Antisense strand to SEQ ID NO: 1618083
ucugugacuagacacgccu

SEQ ID NO: 1618085 - RNA, 19 nt, Artificial Sequence
  Description of Artificial Sequence: Synthetic oligonucleotide
  Sense strand starting at position 1094 of SEQ ID NO: 1560696
gagacagacucuccacgua

SEQ ID NO: 1618086 - RNA, 19 nt, Artificial Sequence
  Description of Artificial Sequence: Synthetic oligonucleotide
  Antisense strand to SEQ ID NO: 1618085
uacguggagagucugucuc

SEQ ID NO: 1618087 - RNA, 19 nt, Artificial Sequence
  Description of Artificial Sequence: Synthetic oligonucleotide
  Sense strand starting at position 1351 of SEQ ID NO: 1560696
cagagaagcuucguccaga

SEQ ID NO: 1618088 - RNA, 19 nt, Artificial Sequence
  Description of Artificial Sequence: Synthetic oligonucleotide
  Antisense strand to SEQ ID NO: 1618087
ucuggacgaagcuucucug

SEQ ID NO: 1618089 - RNA, 19 nt, Artificial Sequence
  Description of Artificial Sequence: Synthetic oligonucleotide
  Sense strand starting at position 1352 of SEQ ID NO: 1560696
agagaagcuucguccagag

SEQ ID NO: 1618090 - RNA, 19 nt, Artificial Sequence
  Description of Artificial Sequence: Synthetic oligonucleotide
  Antisense strand to SEQ ID NO: 1618089
cucuggacgaagcuucucu

SEQ ID NO: 1618091 - RNA, 19 nt, Artificial Sequence
  Description of Artificial Sequence: Synthetic oligonucleotide
  Sense strand starting at position 1356 of SEQ ID NO: 1560696
aagcuucguccagagcagu

SEQ ID NO: 1618092 - RNA, 19 nt, Artificial Sequence
  Description of Artificial Sequence: Synthetic oligonucleotide
  Antisense strand to SEQ ID NO: 1618091
acugcucuggacgaagcuu

SEQ ID NO: 1618093 - RNA, 19 nt, Artificial Sequence
  Description of Artificial Sequence: Synthetic oligonucleotide
  Sense strand starting at position 2015 of SEQ ID NO: 1560696
cggaguacucuggguaguc

SEQ ID NO: 1618094 - RNA, 19 nt, Artificial Sequence
  Description of Artificial Sequence: Synthetic oligonucleotide
  Antisense strand to SEQ ID NO: 1618093
gacuacccagaguacuccg

SEQ ID NO: 1618095 - RNA, 19 nt, Artificial Sequence
  Description of Artificial Sequence: Synthetic oligonucleotide
  Sense strand starting at position 2438 of SEQ ID NO: 1560696
agacguccacguugugauu

SEQ ID NO: 1618096 - RNA, 19 nt, Artificial Sequence
  Description of Artificial Sequence: Synthetic oligonucleotide
  Antisense strand to SEQ ID NO: 1618095
aaucacaacguggacgucu

SEQ ID NO: 1618097 - RNA, 19 nt, Artificial Sequence
  Description of Artificial Sequence: Synthetic oligonucleotide
  Sense strand starting at position 2451 of SEQ ID NO: 1560696
gugauucugcgcgcagaag

SEQ ID NO: 1618098 - RNA, 19 nt, Artificial Sequence
  Description of Artificial Sequence: Synthetic oligonucleotide
  Antisense strand to SEQ ID NO: 1618097
cuucugcgcgcagaaucac

SEQ ID NO: 1618099 - RNA, 19 nt, Artificial Sequence
  Description of Artificial Sequence: Synthetic oligonucleotide
  Sense strand starting at position 2463 of SEQ ID NO: 1560696
gcagaagggucaucggagu

SEQ ID NO: 1618100 - RNA, 19 nt, Artificial Sequence
  Description of Artificial Sequence: Synthetic oligonucleotide
  Antisense strand to SEQ ID NO: 1618099
acuccgaugacccuucugc

SEQ ID NO: 1618101 - RNA, 19 nt, Artificial Sequence
  Description of Artificial Sequence: Synthetic oligonucleotide
  Sense strand starting at position 2642 of SEQ ID NO: 1560696
gguugcaaaucugcgucua

SEQ ID NO: 1618102 - RNA, 19 nt, Artificial Sequence
  Description of Artificial Sequence: Synthetic oligonucleotide
  Antisense strand to SEQ ID NO: 1618101
uagacgcagauuugcaacc

SEQ ID NO: 1618103 - RNA, 19 nt, Artificial Sequence
  Description of Artificial Sequence: Synthetic oligonucleotide
  Sense strand starting at position 2875 of SEQ ID NO: 1560696
ccgccucugccuugagauu

SEQ ID NO: 1618104 - RNA, 19 nt, Artificial Sequence
  Description of Artificial Sequence: Synthetic oligonucleotide
  Antisense strand to SEQ ID NO: 1618103
aaucucaaggcagaggcgg

SEQ ID NO: 1618105 - RNA, 19 nt, Artificial Sequence
  Description of Artificial Sequence: Synthetic oligonucleotide
  Sense strand starting at position 2902 of SEQ ID NO: 1560696
cugagaugcucauucucuu

SEQ ID NO: 1618106 - RNA, 19 nt, Artificial Sequence
  Description of Artificial Sequence: Synthetic oligonucleotide
  Antisense strand to SEQ ID NO: 1618105
aagagaaugagcaucucag

SEQ ID NO: 1618107 - RNA, 19 nt, Artificial Sequence
  Description of Artificial Sequence: Synthetic oligonucleotide
  Sense strand starting at position 3029 of SEQ ID NO: 1560696
ccuguuuauugccuuggua

SEQ ID NO: 1618108 - RNA, 19 nt, Artificial Sequence
  Description of Artificial Sequence: Synthetic oligonucleotide
  Antisense strand to SEQ ID NO: 1618107
uaccaaggcaauaaacagg

SEQ ID NO: 1618109 - RNA, 19 nt, Artificial Sequence
  Description of Artificial Sequence: Synthetic oligonucleotide
  Sense strand starting at position 3031 of SEQ ID NO: 1560696
uguuuauugccuugguaau

SEQ ID NO: 1618110 - RNA, 19 nt, Artificial Sequence
  Description of Artificial Sequence: Synthetic oligonucleotide
  Antisense strand to SEQ ID NO: 1618109
auuaccaaggcaauaaaca

SEQ ID NO: 1618111 - RNA, 19 nt, Artificial Sequence
  Description of Artificial Sequence: Synthetic oligonucleotide
  Sense strand starting at position 3032 of SEQ ID NO: 1560696
guuuauugccuugguaauu

SEQ ID NO: 1618112 - RNA, 19 nt, Artificial Sequence
  Description of Artificial Sequence: Synthetic oligonucleotide
  Antisense strand to SEQ ID NO: 1618111
aauuaccaaggcaauaaac

SEQ ID NO: 1618113 - RNA, 19 nt, Artificial Sequence
  Description of Artificial Sequence: Synthetic oligonucleotide
  Sense strand starting at position 3065 of SEQ ID NO: 1560696
gggagcucuguuggaaaug

SEQ ID NO: 1618114 - RNA, 19 nt, Artificial Sequence
  Description of Artificial Sequence: Synthetic oligonucleotide
  Antisense strand to SEQ ID NO: 1618113
cauuuccaacagagcuccc

SEQ ID NO: 1618115 - RNA, 19 nt, Artificial Sequence
  Description of Artificial Sequence: Synthetic oligonucleotide
  Sense strand starting at position 3114 of SEQ ID NO: 1560696
cggcggccucgggagaaau

SEQ ID NO: 1618116 - RNA, 19 nt, Artificial Sequence
  Description of Artificial Sequence: Synthetic oligonucleotide
  Antisense strand to SEQ ID NO: 1618115
auuucucccgaggccgccg

SEQ ID NO: 1618117 - RNA, 19 nt, Artificial Sequence
  Description of Artificial Sequence: Synthetic oligonucleotide
  Sense strand starting at position 3222 of SEQ ID NO: 1560696
gacaccuguuagucuugua

SEQ ID NO: 1618118 - RNA, 19 nt, Artificial Sequence
  Description of Artificial Sequence: Synthetic oligonucleotide
  Antisense strand to SEQ ID NO: 1618117
uacaagacuaacagguguc

SEQ ID NO: 1618119 - RNA, 19 nt, Artificial Sequence
  Description of Artificial Sequence: Synthetic oligonucleotide
  Sense strand starting at position 3227 of SEQ ID NO: 1560696
cuguuagucuuguauuugu

SEQ ID NO: 1618120 - RNA, 19 nt, Artificial Sequence
  Description of Artificial Sequence: Synthetic oligonucleotide
  Antisense strand to SEQ ID NO: 1618119
acaaauacaagacuaacag

SEQ ID NO: 1618121 - RNA, 19 nt, Artificial Sequence
  Description of Artificial Sequence: Synthetic oligonucleotide
  Sense strand starting at position 3307 of SEQ ID NO: 1560696
cgugcuucugcacauguga

SEQ ID NO: 1618122 - RNA, 19 nt, Artificial Sequence
  Description of Artificial Sequence: Synthetic oligonucleotide
  Antisense strand to SEQ ID NO: 1618121
ucacaugugcagaagcacg

SEQ ID NO: 1618123 - RNA, 19 nt, Artificial Sequence
  Description of Artificial Sequence: Synthetic oligonucleotide
  Sense strand starting at position 3456 of SEQ ID NO: 1560696
ggcccauucggagauaauu

SEQ ID NO: 1618124 - RNA, 19 nt, Artificial Sequence
  Description of Artificial Sequence: Synthetic oligonucleotide
  Antisense strand to SEQ ID NO: 1618123
aauuaucuccgaaugggcc

SEQ ID NO: 1618125 - RNA, 19 nt, Artificial Sequence
  Description of Artificial Sequence: Synthetic oligonucleotide
  Sense strand starting at position 3464 of SEQ ID NO: 1560696
cggagauaauucucucauu

SEQ ID NO: 1618126 - RNA, 19 nt, Artificial Sequence
  Description of Artificial Sequence: Synthetic oligonucleotide
  Antisense strand to SEQ ID NO: 1618125
aaugagagaauuaucuccg

SEQ ID NO: 1618127 - RNA, 19 nt, Artificial Sequence
  Description of Artificial Sequence: Synthetic oligonucleotide
  Sense strand starting at position 3800 of SEQ ID NO: 1560696
uuguaauccuggcuacuag

SEQ ID NO: 1618128 - RNA, 19 nt, Artificial Sequence
  Description of Artificial Sequence: Synthetic oligonucleotide
  Antisense strand to SEQ ID NO: 1618127
cuaguagccaggauuacaa

SEQ ID NO: 1618129 - RNA, 19 nt, Artificial Sequence
  Description of Artificial Sequence: Synthetic oligonucleotide
  Sense strand starting at position 3801 of SEQ ID NO: 1560696
uguaauccuggcuacuaga

SEQ ID NO: 1618130 - RNA, 19 nt, Artificial Sequence
  Description of Artificial Sequence: Synthetic oligonucleotide
  Antisense strand to SEQ ID NO: 1618129
ucuaguagccaggauuaca

SEQ ID NO: 1618131 - RNA, 19 nt, Artificial Sequence
  Description of Artificial Sequence: Synthetic oligonucleotide
  Sense strand starting at position 535 of SEQ ID NO: 1560697
aucuguagucuguagccau

SEQ ID NO: 1618132 - RNA, 19 nt, Artificial Sequence
  Description of Artificial Sequence: Synthetic oligonucleotide
  Antisense strand to SEQ ID NO: 1618131
auggcuacagacuacagau

SEQ ID NO: 1618133 - RNA, 19 nt, Artificial Sequence
  Description of Artificial Sequence: Synthetic oligonucleotide
  Sense strand starting at position 542 of SEQ ID NO: 1560697
gucuguagccaugucugua

SEQ ID NO: 1618134 - RNA, 19 nt, Artificial Sequence
  Description of Artificial Sequence: Synthetic oligonucleotide
  Antisense strand to SEQ ID NO: 1618133
uacagacauggcuacagac

SEQ ID NO: 1618135 - RNA, 19 nt, Artificial Sequence
  Description of Artificial Sequence: Synthetic oligonucleotide
  Sense strand starting at position 585 of SEQ ID NO: 1560697
gcaagaggaucuccuaacu

SEQ ID NO: 1618136 - RNA, 19 nt, Artificial Sequence
  Description of Artificial Sequence: Synthetic oligonucleotide
  Antisense strand to SEQ ID NO: 1618135
aguuaggagauccucuugc

SEQ ID NO: 1618137 - RNA, 19 nt, Artificial Sequence
  Description of Artificial Sequence: Synthetic oligonucleotide
  Sense strand starting at position 766 of SEQ ID NO: 1560697
gcaauagaauauccuggua

SEQ ID NO: 1618138 - RNA, 19 nt, Artificial Sequence
  Description of Artificial Sequence: Synthetic oligonucleotide
  Antisense strand to SEQ ID NO: 1618137
uaccaggauauucuauugc

SEQ ID NO: 1618139 - RNA, 19 nt, Artificial Sequence
  Description of Artificial Sequence: Synthetic oligonucleotide
  Sense strand starting at position 905 of SEQ ID NO: 1560697
agggaauaccucuggcaga

SEQ ID NO: 1618140 - RNA, 19 nt, Artificial Sequence
  Description of Artificial Sequence: Synthetic oligonucleotide
  Antisense strand to SEQ ID NO: 1618139
ucugccagagguauucccu

SEQ ID NO: 1618141 - RNA, 19 nt, Artificial Sequence
  Description of Artificial Sequence: Synthetic oligonucleotide
  Sense strand starting at position 906 of SEQ ID NO: 1560697
gggaauaccucuggcagau

SEQ ID NO: 1618142 - RNA, 19 nt, Artificial Sequence
  Description of Artificial Sequence: Synthetic oligonucleotide
  Antisense strand to SEQ ID NO: 1618141
aucugccagagguauuccc

SEQ ID NO: 1618143 - RNA, 19 nt, Artificial Sequence
  Description of Artificial Sequence: Synthetic oligonucleotide
  Sense strand starting at position 1060 of SEQ ID NO: 1560697
cugagcuucucgccaauaa

SEQ ID NO: 1618144 - RNA, 19 nt, Artificial Sequence
  Description of Artificial Sequence: Synthetic oligonucleotide
  Antisense strand to SEQ ID NO: 1618143
uuauuggcgagaagcucag

SEQ ID NO: 1618145 - RNA, 19 nt, Artificial Sequence
  Description of Artificial Sequence: Synthetic oligonucleotide
  Sense strand starting at position 1061 of SEQ ID NO: 1560697
ugagcuucucgccaauaac

SEQ ID NO: 1618146 - RNA, 19 nt, Artificial Sequence
  Description of Artificial Sequence: Synthetic oligonucleotide
  Antisense strand to SEQ ID NO: 1618145
guuauuggcgagaagcuca

SEQ ID NO: 1618147 - RNA, 19 nt, Artificial Sequence
  Description of Artificial Sequence: Synthetic oligonucleotide
  Sense strand starting at position 1064 of SEQ ID NO: 1560697
gcuucucgccaauaaccua

SEQ ID NO: 1618148 - RNA, 19 nt, Artificial Sequence
  Description of Artificial Sequence: Synthetic oligonucleotide
  Antisense strand to SEQ ID NO: 1618147
uagguuauuggcgagaagc

SEQ ID NO: 1618149 - RNA, 19 nt, Artificial Sequence
  Description of Artificial Sequence: Synthetic oligonucleotide
  Sense strand starting at position 1108 of SEQ ID NO: 1560697
agggcagaaucuccguaua

SEQ ID NO: 1618150 - RNA, 19 nt, Artificial Sequence
  Description of Artificial Sequence: Synthetic oligonucleotide
  Antisense strand to SEQ ID NO: 1618149
uauacggagauucugcccu

SEQ ID NO: 1618151 - RNA, 19 nt, Artificial Sequence
  Description of Artificial Sequence: Synthetic oligonucleotide
  Sense strand starting at position 1110 of SEQ ID NO: 1560697
ggcagaaucuccguauaag

SEQ ID NO: 1618152 - RNA, 19 nt, Artificial Sequence
  Description of Artificial Sequence: Synthetic oligonucleotide
  Antisense strand to SEQ ID NO: 1618151
cuuauacggagauucugcc

SEQ ID NO: 1618153 - RNA, 19 nt, Artificial Sequence
  Description of Artificial Sequence: Synthetic oligonucleotide
  Sense strand starting at position 1111 of SEQ ID NO: 1560697
gcagaaucuccguauaagc

SEQ ID NO: 1618154 - RNA, 19 nt, Artificial Sequence
  Description of Artificial Sequence: Synthetic oligonucleotide
  Antisense strand to SEQ ID NO: 1618153
gcuuauacggagauucugc

SEQ ID NO: 1618155 - RNA, 19 nt, Artificial Sequence
  Description of Artificial Sequence: Synthetic oligonucleotide
  Sense strand starting at position 1599 of SEQ ID NO: 1560697
uagcgcucucuccgacuaa

SEQ ID NO: 1618156 - RNA, 19 nt, Artificial Sequence
  Description of Artificial Sequence: Synthetic oligonucleotide
  Antisense strand to SEQ ID NO: 1618155
uuagucggagagagcgcua

SEQ ID NO: 1618157 - RNA, 19 nt, Artificial Sequence
  Description of Artificial Sequence: Synthetic oligonucleotide
  Sense strand starting at position 1657 of SEQ ID NO: 1560697
uuugcuucucgcugcuuaa

SEQ ID NO: 1618158 - RNA, 19 nt, Artificial Sequence
  Description of Artificial Sequence: Synthetic oligonucleotide
  Antisense strand to SEQ ID NO: 1618157
uuaagcagcgagaagcaaa

SEQ ID NO: 1618159 - RNA, 19 nt, Artificial Sequence
  Description of Artificial Sequence: Synthetic oligonucleotide
  Sense strand starting at position 2042 of SEQ ID NO: 1560697
aacguuacgucacucucaa

SEQ ID NO: 1618160 - RNA, 19 nt, Artificial Sequence
  Description of Artificial Sequence: Synthetic oligonucleotide
  Antisense strand to SEQ ID NO: 1618159
uugagagugacguaacguu

SEQ ID NO: 1618161 - RNA, 19 nt, Artificial Sequence
  Description of Artificial Sequence: Synthetic oligonucleotide
  Sense strand starting at position 2055 of SEQ ID NO: 1560697
ucucaaaucugcguccaga

SEQ ID NO: 1618162 - RNA, 19 nt, Artificial Sequence
  Description of Artificial Sequence: Synthetic oligonucleotide
  Antisense strand to SEQ ID NO: 1618161
ucuggacgcagauuugaga

SEQ ID NO: 1618163 - RNA, 19 nt, Artificial Sequence
  Description of Artificial Sequence: Synthetic oligonucleotide
  Sense strand starting at position 2063 of SEQ ID NO: 1560697
cugcguccagacugagaua

SEQ ID NO: 1618164 - RNA, 19 nt, Artificial Sequence
  Description of Artificial Sequence: Synthetic oligonucleotide
  Antisense strand to SEQ ID NO: 1618163
uaucucagucuggacgcag

SEQ ID NO: 1618165 - RNA, 19 nt, Artificial Sequence
  Description of Artificial Sequence: Synthetic oligonucleotide
  Sense strand starting at position 2064 of SEQ ID NO: 1560697
ugcguccagacugagauau

SEQ ID NO: 1618166 - RNA, 19 nt, Artificial Sequence
  Description of Artificial Sequence: Synthetic oligonucleotide
  Antisense strand to SEQ ID NO: 1618165
auaucucagucuggacgca

SEQ ID NO: 1618167 - RNA, 19 nt, Artificial Sequence
  Description of Artificial Sequence: Synthetic oligonucleotide
  Sense strand starting at position 2066 of SEQ ID NO: 1560697
cguccagacugagauaucu

SEQ ID NO: 1618168 - RNA, 19 nt, Artificial Sequence
  Description of Artificial Sequence: Synthetic oligonucleotide
  Antisense strand to SEQ ID NO: 1618167
agauaucucagucuggacg

SEQ ID NO: 1618169 - RNA, 19 nt, Artificial Sequence
  Description of Artificial Sequence: Synthetic oligonucleotide
  Sense strand starting at position 2552 of SEQ ID NO: 1560697
aggguuucugcugaacaac

SEQ ID NO: 1618170 - RNA, 19 nt, Artificial Sequence
  Description of Artificial Sequence: Synthetic oligonucleotide
  Antisense strand to SEQ ID NO: 1618169
guuguucagcagaaacccu

SEQ ID NO: 1618171 - RNA, 19 nt, Artificial Sequence
  Description of Artificial Sequence: Synthetic oligonucleotide
  Sense strand starting at position 2606 of SEQ ID NO: 1560697
agcgcucaccuuugacgaa

SEQ ID NO: 1618172 - RNA, 19 nt, Artificial Sequence
  Description of Artificial Sequence: Synthetic oligonucleotide
  Antisense strand to SEQ ID NO: 1618171
uucgucaaaggugagcgcu

SEQ ID NO: 1618173 - RNA, 19 nt, Artificial Sequence
  Description of Artificial Sequence: Synthetic oligonucleotide
  Sense strand starting at position 2741 of SEQ ID NO: 1560697
cccucuuccgaagacgauu

SEQ ID NO: 1618174 - RNA, 19 nt, Artificial Sequence
  Description of Artificial Sequence: Synthetic oligonucleotide
  Antisense strand to SEQ ID NO: 1618173
aaucgucuucggaagaggg

SEQ ID NO: 1618175 - RNA, 19 nt, Artificial Sequence
  Description of Artificial Sequence: Synthetic oligonucleotide
  Sense strand starting at position 2756 of SEQ ID NO: 1560697
gauugaguacaugguucuu

SEQ ID NO: 1618176 - RNA, 19 nt, Artificial Sequence
  Description of Artificial Sequence: Synthetic oligonucleotide
  Antisense strand to SEQ ID NO: 1618175
aagaaccauguacucaauc

SEQ ID NO: 1618177 - RNA, 19 nt, Artificial Sequence
  Description of Artificial Sequence: Synthetic oligonucleotide
  Sense strand starting at position 2758 of SEQ ID NO: 1560697
uugaguacaugguucuuua

SEQ ID NO: 1618178 - RNA, 19 nt, Artificial Sequence
  Description of Artificial Sequence: Synthetic oligonucleotide
  Antisense strand to SEQ ID NO: 1618177
uaaagaaccauguacucaa

SEQ ID NO: 1618179 - RNA, 19 nt, Artificial Sequence
  Description of Artificial Sequence: Synthetic oligonucleotide
  Sense strand starting at position 2761 of SEQ ID NO: 1560697
aguacaugguucuuuauua

SEQ ID NO: 1618180 - RNA, 19 nt, Artificial Sequence
  Description of Artificial Sequence: Synthetic oligonucleotide
  Antisense strand to SEQ ID NO: 1618179
uaauaaagaaccauguacu

SEQ ID NO: 1618181 - RNA, 19 nt, Artificial Sequence
  Description of Artificial Sequence: Synthetic oligonucleotide
  Sense strand starting at position 2762 of SEQ ID NO: 1560697
guacaugguucuuuauuaa

SEQ ID NO: 1618182 - RNA, 19 nt, Artificial Sequence
  Description of Artificial Sequence: Synthetic oligonucleotide
  Antisense strand to SEQ ID NO: 1618181
uuaauaaagaaccauguac

SEQ ID NO: 1618183 - RNA, 19 nt, Artificial Sequence
  Description of Artificial Sequence: Synthetic oligonucleotide
  Sense strand starting at position 2766 of SEQ ID NO: 1560697
augguucuuuauuaaagca

SEQ ID NO: 1618184 - RNA, 19 nt, Artificial Sequence
  Description of Artificial Sequence: Synthetic oligonucleotide
  Antisense strand to SEQ ID NO: 1618183
ugcuuuaauaaagaaccau

SEQ ID NO: 1618185 - RNA, 19 nt, Artificial Sequence
  Description of Artificial Sequence: Synthetic oligonucleotide
  Sense strand starting at position 3151 of SEQ ID NO: 1560697
uaauguuccuaggucugga

SEQ ID NO: 1618186 - RNA, 19 nt, Artificial Sequence
  Description of Artificial Sequence: Synthetic oligonucleotide
  Antisense strand to SEQ ID NO: 1618185
uccagaccuaggaacauua

SEQ ID NO: 1618187 - RNA, 19 nt, Artificial Sequence
  Description of Artificial Sequence: Synthetic oligonucleotide
  Sense strand starting at position 3169 of SEQ ID NO: 1560697
aguggucugccgagucaag

SEQ ID NO: 1618188 - RNA, 19 nt, Artificial Sequence
  Description of Artificial Sequence: Synthetic oligonucleotide
  Antisense strand to SEQ ID NO: 1618187
cuugacucggcagaccacu

SEQ ID NO: 1618189 - RNA, 19 nt, Artificial Sequence
  Description of Artificial Sequence: Synthetic oligonucleotide
  Sense strand starting at position 3170 of SEQ ID NO: 1560697
guggucugccgagucaagu

SEQ ID NO: 1618190 - RNA, 19 nt, Artificial Sequence
  Description of Artificial Sequence: Synthetic oligonucleotide
  Antisense strand to SEQ ID NO: 1618189
acuugacucggcagaccac

SEQ ID NO: 1618191 - RNA, 19 nt, Artificial Sequence
  Description of Artificial Sequence: Synthetic oligonucleotide
  Sense strand starting at position 3192 of SEQ ID NO: 1560697
gcaauagccucccugauau

SEQ ID NO: 1618192 - RNA, 19 nt, Artificial Sequence
  Description of Artificial Sequence: Synthetic oligonucleotide
  Antisense strand to SEQ ID NO: 1618191
auaucagggaggcuauugc

SEQ ID NO: 1618193 - RNA, 19 nt, Artificial Sequence
  Description of Artificial Sequence: Synthetic oligonucleotide
  Sense strand starting at position 3284 of SEQ ID NO: 1560697
agguaugaguuccuugaag

SEQ ID NO: 1618194 - RNA, 19 nt, Artificial Sequence
  Description of Artificial Sequence: Synthetic oligonucleotide
  Antisense strand to SEQ ID NO: 1618193
cuucaaggaacucauaccu

SEQ ID NO: 1618195 - RNA, 19 nt, Artificial Sequence
  Description of Artificial Sequence: Synthetic oligonucleotide
  Sense strand starting at position 3286 of SEQ ID NO: 1560697
guaugaguuccuugaaggc

SEQ ID NO: 1618196 - RNA, 19 nt, Artificial Sequence
  Description of Artificial Sequence: Synthetic oligonucleotide
  Antisense strand to SEQ ID NO: 1618195
gccuucaaggaacucauac

SEQ ID NO: 1618197 - RNA, 19 nt, Artificial Sequence
  Description of Artificial Sequence: Synthetic oligonucleotide
  Sense strand starting at position 3371 of SEQ ID NO: 1560697
guaguagcugcucaauugu

SEQ ID NO: 1618198 - RNA, 19 nt, Artificial Sequence
  Description of Artificial Sequence: Synthetic oligonucleotide
  Antisense strand to SEQ ID NO: 1618197
acaauugagcagcuacuac

SEQ ID NO: 1618199 - RNA, 19 nt, Artificial Sequence
  Description of Artificial Sequence: Synthetic oligonucleotide
  Sense strand starting at position 3378 of SEQ ID NO: 1560697
cugcucaauuguuaaugga

SEQ ID NO: 1618200 - RNA, 19 nt, Artificial Sequence
  Description of Artificial Sequence: Synthetic oligonucleotide
  Antisense strand to SEQ ID NO: 1618199
uccauuaacaauugagcag

SEQ ID NO: 1618201 - RNA, 19 nt, Artificial Sequence
  Description of Artificial Sequence: Synthetic oligonucleotide
  Sense strand starting at position 3578 of SEQ ID NO: 1560697
agccacuuccuuggagaaa

SEQ ID NO: 1618202 - RNA, 19 nt, Artificial Sequence
  Description of Artificial Sequence: Synthetic oligonucleotide
  Antisense strand to SEQ ID NO: 1618201
uuucuccaaggaaguggcu

SEQ ID NO: 1618203 - RNA, 19 nt, Artificial Sequence
  Description of Artificial Sequence: Synthetic oligonucleotide
  Sense strand starting at position 3702 of SEQ ID NO: 1560697
gagggucugcucuagguca

SEQ ID NO: 1618204 - RNA, 19 nt, Artificial Sequence
  Description of Artificial Sequence: Synthetic oligonucleotide
  Antisense strand to SEQ ID NO: 1618203
ugaccuagagcagacccuc

SEQ ID NO: 1618205 - RNA, 19 nt, Artificial Sequence
  Description of Artificial Sequence: Synthetic oligonucleotide
  Sense strand starting at position 3769 of SEQ ID NO: 1560697
cuccucuaguucuucuaga

SEQ ID NO: 1618206 - RNA, 19 nt, Artificial Sequence
  Description of Artificial Sequence: Synthetic oligonucleotide
  Antisense strand to SEQ ID NO: 1618205
ucuagaagaacuagaggag

SEQ ID NO: 1618207 - RNA, 19 nt, Artificial Sequence
  Description of Artificial Sequence: Synthetic oligonucleotide
  Sense strand starting at position 3770 of SEQ ID NO: 1560697
uccucuaguucuucuagau

SEQ ID NO: 1618208 - RNA, 19 nt, Artificial Sequence
  Description of Artificial Sequence: Synthetic oligonucleotide
  Antisense strand to SEQ ID NO: 1618207
aucuagaagaacuagagga

SEQ ID NO: 1618209 - RNA, 19 nt, Artificial Sequence
  Description of Artificial Sequence: Synthetic oligonucleotide
  Sense strand starting at position 3963 of SEQ ID NO: 1560697
gugccauggaugcgaaaga

SEQ ID NO: 1618210 - RNA, 19 nt, Artificial Sequence
  Description of Artificial Sequence: Synthetic oligonucleotide
  Antisense strand to SEQ ID NO: 1618209
ucuuucgcauccauggcac

SEQ ID NO: 1618211 - RNA, 19 nt, Artificial Sequence
  Description of Artificial Sequence: Synthetic oligonucleotide
  Sense strand starting at position 386 of SEQ ID NO: 1560698
acucgaacuccucggauca

SEQ ID NO: 1618212 - RNA, 19 nt, Artificial Sequence
  Description of Artificial Sequence: Synthetic oligonucleotide
  Antisense strand to SEQ ID NO: 1618211
ugauccgaggaguucgagu

SEQ ID NO: 1618213 - RNA, 19 nt, Artificial Sequence
  Description of Artificial Sequence: Synthetic oligonucleotide
  Sense strand starting at position 387 of SEQ ID NO: 1560698
cucgaacuccucggaucaa

SEQ ID NO: 1618214 - RNA, 19 nt, Artificial Sequence
  Description of Artificial Sequence: Synthetic oligonucleotide
  Antisense strand to SEQ ID NO: 1618213
uugauccgaggaguucgag

SEQ ID NO: 1618215 - RNA, 19 nt, Artificial Sequence
  Description of Artificial Sequence: Synthetic oligonucleotide
  Sense strand starting at position 836 of SEQ ID NO: 1560698
ggugaaucauuugaggucu

SEQ ID NO: 1618216 - RNA, 19 nt, Artificial Sequence
  Description of Artificial Sequence: Synthetic oligonucleotide
  Antisense strand to SEQ ID NO: 1618215
agaccucaaaugauucacc

SEQ ID NO: 1618217 - RNA, 19 nt, Artificial Sequence
  Description of Artificial Sequence: Synthetic oligonucleotide
  Sense strand starting at position 1211 of SEQ ID NO: 1560698
gccagcuauuucugacuaa

SEQ ID NO: 1618218 - RNA, 19 nt, Artificial Sequence
  Description of Artificial Sequence: Synthetic oligonucleotide
  Antisense strand to SEQ ID NO: 1618217
uuagucagaaauagcuggc

SEQ ID NO: 1618219 - RNA, 19 nt, Artificial Sequence
  Description of Artificial Sequence: Synthetic oligonucleotide
  Sense strand starting at position 1225 of SEQ ID NO: 1560698
acuaauugggucugcaacu

SEQ ID NO: 1618220 - RNA, 19 nt, Artificial Sequence
  Description of Artificial Sequence: Synthetic oligonucleotide
  Antisense strand to SEQ ID NO: 1618219
aguugcagacccaauuagu

SEQ ID NO: 1618221 - RNA, 19 nt, Artificial Sequence
  Description of Artificial Sequence: Synthetic oligonucleotide
  Sense strand starting at position 1226 of SEQ ID NO: 1560698
cuaauugggucugcaacua

SEQ ID NO: 1618222 - RNA, 19 nt, Artificial Sequence
  Description of Artificial Sequence: Synthetic oligonucleotide
  Antisense strand to SEQ ID NO: 1618221
uaguugcagacccaauuag

SEQ ID NO: 1618223 - RNA, 19 nt, Artificial Sequence
  Description of Artificial Sequence: Synthetic oligonucleotide
  Sense strand starting at position 1313 of SEQ ID NO: 1560698
ggaggacugugaccgugaa

SEQ ID NO: 1618224 - RNA, 19 nt, Artificial Sequence
  Description of Artificial Sequence: Synthetic oligonucleotide
  Antisense strand to SEQ ID NO: 1618223
uucacggucacaguccucc

SEQ ID NO: 1618225 - RNA, 19 nt, Artificial Sequence
  Description of Artificial Sequence: Synthetic oligonucleotide
  Sense strand starting at position 1314 of SEQ ID NO: 1560698
gaggacugugaccgugaaa

SEQ ID NO: 1618226 - RNA, 19 nt, Artificial Sequence
  Description of Artificial Sequence: Synthetic oligonucleotide
  Antisense strand to SEQ ID NO: 1618225
uuucacggucacaguccuc

SEQ ID NO: 1618227 - RNA, 19 nt, Artificial Sequence
  Description of Artificial Sequence: Synthetic oligonucleotide
  Sense strand starting at position 1317 of SEQ ID NO: 1560698
gacugugaccgugaaagua

SEQ ID NO: 1618228 - RNA, 19 nt, Artificial Sequence
  Description of Artificial Sequence: Synthetic oligonucleotide
  Antisense strand to SEQ ID NO: 1618227
uacuuucacggucacaguc

SEQ ID NO: 1618229 - RNA, 19 nt, Artificial Sequence
  Description of Artificial Sequence: Synthetic oligonucleotide
  Sense strand starting at position 1344 of SEQ ID NO: 1560698
accaccuugucaugugcua

SEQ ID NO: 1618230 - RNA, 19 nt, Artificial Sequence
  Description of Artificial Sequence: Synthetic oligonucleotide
  Antisense strand to SEQ ID NO: 1618229
uagcacaugacaagguggu

SEQ ID NO: 1618231 - RNA, 19 nt, Artificial Sequence
  Description of Artificial Sequence: Synthetic oligonucleotide
  Sense strand starting at position 1375 of SEQ ID NO: 1560698
ggaugugacucuuguuccu

SEQ ID NO: 1618232 - RNA, 19 nt, Artificial Sequence
  Description of Artificial Sequence: Synthetic oligonucleotide
  Antisense strand to SEQ ID NO: 1618231
aggaacaagagucacaucc

SEQ ID NO: 1618233 - RNA, 19 nt, Artificial Sequence
  Description of Artificial Sequence: Synthetic oligonucleotide
  Sense strand starting at position 1378 of SEQ ID NO: 1560698
ugugacucuuguuccugua

SEQ ID NO: 1618234 - RNA, 19 nt, Artificial Sequence
  Description of Artificial Sequence: Synthetic oligonucleotide
  Antisense strand to SEQ ID NO: 1618233
uacaggaacaagagucaca

SEQ ID NO: 1618235 - RNA, 19 nt, Artificial Sequence
  Description of Artificial Sequence: Synthetic oligonucleotide
  Sense strand starting at position 1464 of SEQ ID NO: 1560698
cuaccauccugcugugaca

SEQ ID NO: 1618236 - RNA, 19 nt, Artificial Sequence
  Description of Artificial Sequence: Synthetic oligonucleotide
  Antisense strand to SEQ ID NO: 1618235
ugucacagcaggaugguag

SEQ ID NO: 1618237 - RNA, 19 nt, Artificial Sequence
  Description of Artificial Sequence: Synthetic oligonucleotide
  Sense strand starting at position 1466 of SEQ ID NO: 1560698
accauccugcugugacaaa

SEQ ID NO: 1618238 - RNA, 19 nt, Artificial Sequence
  Description of Artificial Sequence: Synthetic oligonucleotide
  Antisense strand to SEQ ID NO: 1618237
uuugucacagcaggauggu

SEQ ID NO: 1618239 - RNA, 19 nt, Artificial Sequence
  Description of Artificial Sequence: Synthetic oligonucleotide
  Sense strand starting at position 1611 of SEQ ID NO: 1560698
gccucacagcaccaugauu

SEQ ID NO: 1618240 - RNA, 19 nt, Artificial Sequence
  Description of Artificial Sequence: Synthetic oligonucleotide
  Antisense strand to SEQ ID NO: 1618239
aaucauggugcugugaggc

SEQ ID NO: 1618241 - RNA, 19 nt, Artificial Sequence
  Description of Artificial Sequence: Synthetic oligonucleotide
  Sense strand starting at position 1890 of SEQ ID NO: 1560698
gagucucaacccgauauga

SEQ ID NO: 1618242 - RNA, 19 nt, Artificial Sequence
  Description of Artificial Sequence: Synthetic oligonucleotide
  Antisense strand to SEQ ID NO: 1618241
ucauaucggguugagacuc

SEQ ID NO: 1618243 - RNA, 19 nt, Artificial Sequence
  Description of Artificial Sequence: Synthetic oligonucleotide
  Sense strand starting at position 1892 of SEQ ID NO: 1560698
gucucaacccgauaugaca

SEQ ID NO: 1618244 - RNA, 19 nt, Artificial Sequence
  Description of Artificial Sequence: Synthetic oligonucleotide
  Antisense strand to SEQ ID NO: 1618243
ugucauaucggguugagac

SEQ ID NO: 1618245 - RNA, 19 nt, Artificial Sequence
  Description of Artificial Sequence: Synthetic oligonucleotide
  Sense strand starting at position 2321 of SEQ ID NO: 1560698
ccaacuugccuggauugau

SEQ ID NO: 1618246 - RNA, 19 nt, Artificial Sequence
  Description of Artificial Sequence: Synthetic oligonucleotide
  Antisense strand to SEQ ID NO: 1618245
aucaauccaggcaaguugg

SEQ ID NO: 1618247 - RNA, 19 nt, Artificial Sequence
  Description of Artificial Sequence: Synthetic oligonucleotide
  Sense strand starting at position 2335 of SEQ ID NO: 1560698
uugauuccauccugaguga

SEQ ID NO: 1618248 - RNA, 19 nt, Artificial Sequence
  Description of Artificial Sequence: Synthetic oligonucleotide
  Antisense strand to SEQ ID NO: 1618247
ucacucaggauggaaucaa

SEQ ID NO: 1618249 - RNA, 19 nt, Artificial Sequence
  Description of Artificial Sequence: Synthetic oligonucleotide
  Sense strand starting at position 2338 of SEQ ID NO: 1560698
auuccauccugagugaaau

SEQ ID NO: 1618250 - RNA, 19 nt, Artificial Sequence
  Description of Artificial Sequence: Synthetic oligonucleotide
  Antisense strand to SEQ ID NO: 1618249
auuucacucaggauggaau

SEQ ID NO: 1618251 - RNA, 19 nt, Artificial Sequence
  Description of Artificial Sequence: Synthetic oligonucleotide
  Sense strand starting at position 2339 of SEQ ID NO: 1560698
uuccauccugagugaaaua

SEQ ID NO: 1618252 - RNA, 19 nt, Artificial Sequence
  Description of Artificial Sequence: Synthetic oligonucleotide
  Antisense strand to SEQ ID NO: 1618251
uauuucacucaggauggaa

SEQ ID NO: 1618253 - RNA, 19 nt, Artificial Sequence
  Description of Artificial Sequence: Synthetic oligonucleotide
  Sense strand starting at position 2422 of SEQ ID NO: 1560698
cgcgcucgcuagaauggaa

SEQ ID NO: 1618254 - RNA, 19 nt, Artificial Sequence
  Description of Artificial Sequence: Synthetic oligonucleotide
  Antisense strand to SEQ ID NO: 1618253
uuccauucuagcgagcgcg

SEQ ID NO: 1618255 - RNA, 19 nt, Artificial Sequence
  Description of Artificial Sequence: Synthetic oligonucleotide
  Sense strand starting at position 2502 of SEQ ID NO: 1560698
ccagauaugugcucccaca

SEQ ID NO: 1618256 - RNA, 19 nt, Artificial Sequence
  Description of Artificial Sequence: Synthetic oligonucleotide
  Antisense strand to SEQ ID NO: 1618255
ugugggagcacauaucugg

SEQ ID NO: 1618257 - RNA, 19 nt, Artificial Sequence
  Description of Artificial Sequence: Synthetic oligonucleotide
  Sense strand starting at position 2776 of SEQ ID NO: 1560698
uggugaauguaucaaugug

SEQ ID NO: 1618258 - RNA, 19 nt, Artificial Sequence
  Description of Artificial Sequence: Synthetic oligonucleotide
  Antisense strand to SEQ ID NO: 1618257
cacauugauacauucacca

SEQ ID NO: 1618259 - RNA, 19 nt, Artificial Sequence
  Description of Artificial Sequence: Synthetic oligonucleotide
  Sense strand starting at position 2810 of SEQ ID NO: 1560698
uaaagauggcucugggaug

SEQ ID NO: 1618260 - RNA, 19 nt, Artificial Sequence
  Description of Artificial Sequence: Synthetic oligonucleotide
  Antisense strand to SEQ ID NO: 1618259
caucccagagccaucuuua

SEQ ID NO: 1618261 - RNA, 19 nt, Artificial Sequence
  Description of Artificial Sequence: Synthetic oligonucleotide
  Sense strand starting at position 2978 of SEQ ID NO: 1560698
gaggguuucucagaagaga

SEQ ID NO: 1618262 - RNA, 19 nt, Artificial Sequence
  Description of Artificial Sequence: Synthetic oligonucleotide
  Antisense strand to SEQ ID NO: 1618261
ucucuucugagaaacccuc

SEQ ID NO: 1618263 - RNA, 19 nt, Artificial Sequence
  Description of Artificial Sequence: Synthetic oligonucleotide
  Sense strand starting at position 3029 of SEQ ID NO: 1560698
ggaguuugccacuaggaga

SEQ ID NO: 1618264 - RNA, 19 nt, Artificial Sequence
  Description of Artificial Sequence: Synthetic oligonucleotide
  Antisense strand to SEQ ID NO: 1618263
ucuccuaguggcaaacucc

SEQ ID NO: 1618265 - RNA, 19 nt, Artificial Sequence
  Description of Artificial Sequence: Synthetic oligonucleotide
  Sense strand starting at position 3239 of SEQ ID NO: 1560698
gaggaugucucacuauguu

SEQ ID NO: 1618266 - RNA, 19 nt, Artificial Sequence
  Description of Artificial Sequence: Synthetic oligonucleotide
  Antisense strand to SEQ ID NO: 1618265
aacauagugagacauccuc

SEQ ID NO: 1618267 - RNA, 19 nt, Artificial Sequence
  Description of Artificial Sequence: Synthetic oligonucleotide
  Sense strand starting at position 3522 of SEQ ID NO: 1560698
guccaucuccuccagagaa

SEQ ID NO: 1618268 - RNA, 19 nt, Artificial Sequence
  Description of Artificial Sequence: Synthetic oligonucleotide
  Antisense strand to SEQ ID NO: 1618267
uucucuggaggagauggac

SEQ ID NO: 1618269 - RNA, 19 nt, Artificial Sequence
  Description of Artificial Sequence: Synthetic oligonucleotide
  Sense strand starting at position 3655 of SEQ ID NO: 1560698
aguuuacccgucugugaca

SEQ ID NO: 1618270 - RNA, 19 nt, Artificial Sequence
  Description of Artificial Sequence: Synthetic oligonucleotide
  Antisense strand to SEQ ID NO: 1618269
ugucacagacggguaaacu

SEQ ID NO: 1618271 - RNA, 19 nt, Artificial Sequence
  Description of Artificial Sequence: Synthetic oligonucleotide
  Sense strand starting at position 380 of SEQ ID NO: 1560699
cgaagcacuucuuugaauc

SEQ ID NO: 1618272 - RNA, 19 nt, Artificial Sequence
  Description of Artificial Sequence: Synthetic oligonucleotide
  Antisense strand to SEQ ID NO: 1618271
gauucaaagaagugcuucg

SEQ ID NO: 1618273 - RNA, 19 nt, Artificial Sequence
  Description of Artificial Sequence: Synthetic oligonucleotide
  Sense strand starting at position 415 of SEQ ID NO: 1560699
uguguaggccuguauuaug

SEQ ID NO: 1618274 - RNA, 19 nt, Artificial Sequence
  Description of Artificial Sequence: Synthetic oligonucleotide
  Antisense strand to SEQ ID NO: 1618273
cauaauacaggccuacaca

SEQ ID NO: 1618275 - RNA, 19 nt, Artificial Sequence
  Description of Artificial Sequence: Synthetic oligonucleotide
  Sense strand starting at position 418 of SEQ ID NO: 1560699
guaggccuguauuauguau

SEQ ID NO: 1618276 - RNA, 19 nt, Artificial Sequence
  Description of Artificial Sequence: Synthetic oligonucleotide
  Antisense strand to SEQ ID NO: 1618275
auacauaauacaggccuac

SEQ ID NO: 1618277 - RNA, 19 nt, Artificial Sequence
  Description of Artificial Sequence: Synthetic oligonucleotide
  Sense strand starting at position 429 of SEQ ID NO: 1560699
uuauguauucuagauguga

SEQ ID NO: 1618278 - RNA, 19 nt, Artificial Sequence
  Description of Artificial Sequence: Synthetic oligonucleotide
  Antisense strand to SEQ ID NO: 1618277
ucacaucuagaauacauaa

SEQ ID NO: 1618279 - RNA, 19 nt, Artificial Sequence
  Description of Artificial Sequence: Synthetic oligonucleotide
  Sense strand starting at position 431 of SEQ ID NO: 1560699
auguauucuagaugugagu

SEQ ID NO: 1618280 - RNA, 19 nt, Artificial Sequence
  Description of Artificial Sequence: Synthetic oligonucleotide
  Antisense strand to SEQ ID NO: 1618279
acucacaucuagaauacau

SEQ ID NO: 1618281 - RNA, 19 nt, Artificial Sequence
  Description of Artificial Sequence: Synthetic oligonucleotide
  Sense strand starting at position 433 of SEQ ID NO: 1560699
guauucuagaugugaguaa

SEQ ID NO: 1618282 - RNA, 19 nt, Artificial Sequence
  Description of Artificial Sequence: Synthetic oligonucleotide
  Antisense strand to SEQ ID NO: 1618281
uuacucacaucuagaauac

SEQ ID NO: 1618283 - RNA, 19 nt, Artificial Sequence
  Description of Artificial Sequence: Synthetic oligonucleotide
  Sense strand starting at position 434 of SEQ ID NO: 1560699
uauucuagaugugaguaau

SEQ ID NO: 1618284 - RNA, 19 nt, Artificial Sequence
  Description of Artificial Sequence: Synthetic oligonucleotide
  Antisense strand to SEQ ID NO: 1618283
auuacucacaucuagaaua

SEQ ID NO: 1618285 - RNA, 19 nt, Artificial Sequence
  Description of Artificial Sequence: Synthetic oligonucleotide
  Sense strand starting at position 437 of SEQ ID NO: 1560699
ucuagaugugaguaaucua

SEQ ID NO: 1618286 - RNA, 19 nt, Artificial Sequence
  Description of Artificial Sequence: Synthetic oligonucleotide
  Antisense strand to SEQ ID NO: 1618285
uagauuacucacaucuaga

SEQ ID NO: 1618287 - RNA, 19 nt, Artificial Sequence
  Description of Artificial Sequence: Synthetic oligonucleotide
  Sense strand starting at position 442 of SEQ ID NO: 1560699
augugaguaaucuagggug

SEQ ID NO: 1618288 - RNA, 19 nt, Artificial Sequence
  Description of Artificial Sequence: Synthetic oligonucleotide
  Antisense strand to SEQ ID NO: 1618287
cacccuagauuacucacau

SEQ ID NO: 1618289 - RNA, 19 nt, Artificial Sequence
  Description of Artificial Sequence: Synthetic oligonucleotide
  Sense strand starting at position 444 of SEQ ID NO: 1560699
gugaguaaucuagggugau

SEQ ID NO: 1618290 - RNA, 19 nt, Artificial Sequence
  Description of Artificial Sequence: Synthetic oligonucleotide
  Antisense strand to SEQ ID NO: 1618289
aucacccuagauuacucac

SEQ ID NO: 1618291 - RNA, 19 nt, Artificial Sequence
  Description of Artificial Sequence: Synthetic oligonucleotide
  Sense strand starting at position 445 of SEQ ID NO: 1560699
ugaguaaucuagggugauu

SEQ ID NO: 1618292 - RNA, 19 nt, Artificial Sequence
  Description of Artificial Sequence: Synthetic oligonucleotide
  Antisense strand to SEQ ID NO: 1618291
aaucacccuagauuacuca

SEQ ID NO: 1618293 - RNA, 19 nt, Artificial Sequence
  Description of Artificial Sequence: Synthetic oligonucleotide
  Sense strand starting at position 743 of SEQ ID NO: 1560699
auuaaagaauuagccugau

SEQ ID NO: 1618294 - RNA, 19 nt, Artificial Sequence
  Description of Artificial Sequence: Synthetic oligonucleotide
  Antisense strand to SEQ ID NO: 1618293
aucaggcuaauucuuuaau

SEQ ID NO: 1618295 - RNA, 19 nt, Artificial Sequence
  Description of Artificial Sequence: Synthetic oligonucleotide
  Sense strand starting at position 822 of SEQ ID NO: 1560699
gccagagagaucgaggcua

SEQ ID NO: 1618296 - RNA, 19 nt, Artificial Sequence
  Description of Artificial Sequence: Synthetic oligonucleotide
  Antisense strand to SEQ ID NO: 1618295
uagccucgaucucucuggc

SEQ ID NO: 1618297 - RNA, 19 nt, Artificial Sequence
  Description of Artificial Sequence: Synthetic oligonucleotide
  Sense strand starting at position 824 of SEQ ID NO: 1560699
cagagagaucgaggcuaca

SEQ ID NO: 1618298 - RNA, 19 nt, Artificial Sequence
  Description of Artificial Sequence: Synthetic oligonucleotide
  Antisense strand to SEQ ID NO: 1618297
uguagccucgaucucucug

SEQ ID NO: 1618299 - RNA, 19 nt, Artificial Sequence
  Description of Artificial Sequence: Synthetic oligonucleotide
  Sense strand starting at position 953 of SEQ ID NO: 1560699
ggauucuuccaaugcauua

SEQ ID NO: 1618300 - RNA, 19 nt, Artificial Sequence
  Description of Artificial Sequence: Synthetic oligonucleotide
  Antisense strand to SEQ ID NO: 1618299
uaaugcauuggaagaaucc

SEQ ID NO: 1618301 - RNA, 19 nt, Artificial Sequence
  Description of Artificial Sequence: Synthetic oligonucleotide
  Sense strand starting at position 969 of SEQ ID NO: 1560699
uuacaaauaucagguuguu

SEQ ID NO: 1618302 - RNA, 19 nt, Artificial Sequence
  Description of Artificial Sequence: Synthetic oligonucleotide
  Antisense strand to SEQ ID NO: 1618301
aacaaccugauauuuguaa

SEQ ID NO: 1618303 - RNA, 19 nt, Artificial Sequence
  Description of Artificial Sequence: Synthetic oligonucleotide
  Sense strand starting at position 972 of SEQ ID NO: 1560699
caaauaucagguuguugag

SEQ ID NO: 1618304 - RNA, 19 nt, Artificial Sequence
  Description of Artificial Sequence: Synthetic oligonucleotide
  Antisense strand to SEQ ID NO: 1618303
cucaacaaccugauauuug

SEQ ID NO: 1618305 - RNA, 19 nt, Artificial Sequence
  Description of Artificial Sequence: Synthetic oligonucleotide
  Sense strand starting at position 975 of SEQ ID NO: 1560699
auaucagguuguugaguuu

SEQ ID NO: 1618306 - RNA, 19 nt, Artificial Sequence
  Description of Artificial Sequence: Synthetic oligonucleotide
  Antisense strand to SEQ ID NO: 1618305
aaacucaacaaccugauau

SEQ ID NO: 1618307 - RNA, 19 nt, Artificial Sequence
  Description of Artificial Sequence: Synthetic oligonucleotide
  Sense strand starting at position 1278 of SEQ ID NO: 1560699
gcuacugaauucuugaaac

SEQ ID NO: 1618308 - RNA, 19 nt, Artificial Sequence
  Description of Artificial Sequence: Synthetic oligonucleotide
  Antisense strand to SEQ ID NO: 1618307
guuucaagaauucaguagc

SEQ ID NO: 1618309 - RNA, 19 nt, Artificial Sequence
  Description of Artificial Sequence: Synthetic oligonucleotide
  Sense strand starting at position 2102 of SEQ ID NO: 1560699
ggcgcaggcguagugaaau

SEQ ID NO: 1618310 - RNA, 19 nt, Artificial Sequence
  Description of Artificial Sequence: Synthetic oligonucleotide
  Antisense strand to SEQ ID NO: 1618309
auuucacuacgccugcgcc

SEQ ID NO: 1618311 - RNA, 19 nt, Artificial Sequence
  Description of Artificial Sequence: Synthetic oligonucleotide
  Sense strand starting at position 2114 of SEQ ID NO: 1560699
gugaaauucucagagcccu

SEQ ID NO: 1618312 - RNA, 19 nt, Artificial Sequence
  Description of Artificial Sequence: Synthetic oligonucleotide
  Antisense strand to SEQ ID NO: 1618311
agggcucugagaauuucac

SEQ ID NO: 1618313 - RNA, 19 nt, Artificial Sequence
  Description of Artificial Sequence: Synthetic oligonucleotide
  Sense strand starting at position 2616 of SEQ ID NO: 1560699
gcgaauauuuauugagcuc

SEQ ID NO: 1618314 - RNA, 19 nt, Artificial Sequence
  Description of Artificial Sequence: Synthetic oligonucleotide
  Antisense strand to SEQ ID NO: 1618313
gagcucaauaaauauucgc

SEQ ID NO: 1618315 - RNA, 19 nt, Artificial Sequence
  Description of Artificial Sequence: Synthetic oligonucleotide
  Sense strand starting at position 2652 of SEQ ID NO: 1560699
ccgauaagcuauguacaga

SEQ ID NO: 1618316 - RNA, 19 nt, Artificial Sequence
  Description of Artificial Sequence: Synthetic oligonucleotide
  Antisense strand to SEQ ID NO: 1618315
ucuguacauagcuuaucgg

SEQ ID NO: 1618317 - RNA, 19 nt, Artificial Sequence
  Description of Artificial Sequence: Synthetic oligonucleotide
  Sense strand starting at position 2655 of SEQ ID NO: 1560699
auaagcuauguacagacau

SEQ ID NO: 1618318 - RNA, 19 nt, Artificial Sequence
  Description of Artificial Sequence: Synthetic oligonucleotide
  Antisense strand to SEQ ID NO: 1618317
augucuguacauagcuuau

SEQ ID NO: 1618319 - RNA, 19 nt, Artificial Sequence
  Description of Artificial Sequence: Synthetic oligonucleotide
  Sense strand starting at position 2669 of SEQ ID NO: 1560699
gacauaauucguuguaggu

SEQ ID NO: 1618320 - RNA, 19 nt, Artificial Sequence
  Description of Artificial Sequence: Synthetic oligonucleotide
  Antisense strand to SEQ ID NO: 1618319
accuacaacgaauuauguc

SEQ ID NO: 1618321 - RNA, 19 nt, Artificial Sequence
  Description of Artificial Sequence: Synthetic oligonucleotide
  Sense strand starting at position 2684 of SEQ ID NO: 1560699
aggucucauuuccacauuu

SEQ ID NO: 1618322 - RNA, 19 nt, Artificial Sequence
  Description of Artificial Sequence: Synthetic oligonucleotide
  Antisense strand to SEQ ID NO: 1618321
aaauguggaaaugagaccu

SEQ ID NO: 1618323 - RNA, 19 nt, Artificial Sequence
  Description of Artificial Sequence: Synthetic oligonucleotide
  Sense strand starting at position 2729 of SEQ ID NO: 1560699
gguuaagucacgugcccaa

SEQ ID NO: 1618324 - RNA, 19 nt, Artificial Sequence
  Description of Artificial Sequence: Synthetic oligonucleotide
  Antisense strand to SEQ ID NO: 1618323
uugggcacgugacuuaacc

SEQ ID NO: 1618325 - RNA, 19 nt, Artificial Sequence
  Description of Artificial Sequence: Synthetic oligonucleotide
  Sense strand starting at position 2744 of SEQ ID NO: 1560699
ccaaguucucacggccuau

SEQ ID NO: 1618326 - RNA, 19 nt, Artificial Sequence
  Description of Artificial Sequence: Synthetic oligonucleotide
  Antisense strand to SEQ ID NO: 1618325
auaggccgugagaacuugg

SEQ ID NO: 1618327 - RNA, 19 nt, Artificial Sequence
  Description of Artificial Sequence: Synthetic oligonucleotide
  Sense strand starting at position 2748 of SEQ ID NO: 1560699
guucucacggccuauaaau

SEQ ID NO: 1618328 - RNA, 19 nt, Artificial Sequence
  Description of Artificial Sequence: Synthetic oligonucleotide
  Antisense strand to SEQ ID NO: 1618327
auuuauaggccgugagaac

SEQ ID NO: 1618329 - RNA, 19 nt, Artificial Sequence
  Description of Artificial Sequence: Synthetic oligonucleotide
  Sense strand starting at position 2755 of SEQ ID NO: 1560699
cggccuauaaauugaggga

SEQ ID NO: 1618330 - RNA, 19 nt, Artificial Sequence
  Description of Artificial Sequence: Synthetic oligonucleotide
  Antisense strand to SEQ ID NO: 1618329
ucccucaauuuauaggccg

SEQ ID NO: 1618331 - RNA, 19 nt, Artificial Sequence
  Description of Artificial Sequence: Synthetic oligonucleotide
  Sense strand starting at position 2758 of SEQ ID NO: 1560699
ccuauaaauugagggauuc

SEQ ID NO: 1618332 - RNA, 19 nt, Artificial Sequence
  Description of Artificial Sequence: Synthetic oligonucleotide
  Antisense strand to SEQ ID NO: 1618331
gaaucccucaauuuauagg

SEQ ID NO: 1618333 - RNA, 19 nt, Artificial Sequence
  Description of Artificial Sequence: Synthetic oligonucleotide
  Sense strand starting at position 3212 of SEQ ID NO: 1560699
uucccuggcucugguaauu

SEQ ID NO: 1618334 - RNA, 19 nt, Artificial Sequence
  Description of Artificial Sequence: Synthetic oligonucleotide
  Antisense strand to SEQ ID NO: 1618333
aauuaccagagccagggaa

SEQ ID NO: 1618335 - RNA, 19 nt, Artificial Sequence
  Description of Artificial Sequence: Synthetic oligonucleotide
  Sense strand starting at position 3280 of SEQ ID NO: 1560699
gucggugccuacuuuauua

SEQ ID NO: 1618336 - RNA, 19 nt, Artificial Sequence
  Description of Artificial Sequence: Synthetic oligonucleotide
  Antisense strand to SEQ ID NO: 1618335
uaauaaaguaggcaccgac

SEQ ID NO: 1618337 - RNA, 19 nt, Artificial Sequence
  Description of Artificial Sequence: Synthetic oligonucleotide
  Sense strand starting at position 3282 of SEQ ID NO: 1560699
cggugccuacuuuauuaua

SEQ ID NO: 1618338 - RNA, 19 nt, Artificial Sequence
  Description of Artificial Sequence: Synthetic oligonucleotide
  Antisense strand to SEQ ID NO: 1618337
uauaauaaaguaggcaccg

SEQ ID NO: 1618339 - RNA, 19 nt, Artificial Sequence
  Description of Artificial Sequence: Synthetic oligonucleotide
  Sense strand starting at position 3304 of SEQ ID NO: 1560699
guugauaauuauugucauc

SEQ ID NO: 1618340 - RNA, 19 nt, Artificial Sequence
  Description of Artificial Sequence: Synthetic oligonucleotide
  Antisense strand to SEQ ID NO: 1618339
gaugacaauaauuaucaac

SEQ ID NO: 1618341 - RNA, 19 nt, Artificial Sequence
  Description of Artificial Sequence: Synthetic oligonucleotide
  Sense strand starting at position 3544 of SEQ ID NO: 1560699
uaggauaccuccucuggga

SEQ ID NO: 1618342 - RNA, 19 nt, Artificial Sequence
  Description of Artificial Sequence: Synthetic oligonucleotide
  Antisense strand to SEQ ID NO: 1618341
ucccagaggagguauccua

SEQ ID NO: 1618343 - RNA, 19 nt, Artificial Sequence
  Description of Artificial Sequence: Synthetic oligonucleotide
  Sense strand starting at position 3546 of SEQ ID NO: 1560699
ggauaccuccucugggauu

SEQ ID NO: 1618344 - RNA, 19 nt, Artificial Sequence
  Description of Artificial Sequence: Synthetic oligonucleotide
  Antisense strand to SEQ ID NO: 1618343
aaucccagaggagguaucc

SEQ ID NO: 1618345 - RNA, 19 nt, Artificial Sequence
  Description of Artificial Sequence: Synthetic oligonucleotide
  Sense strand starting at position 3547 of SEQ ID NO: 1560699
gauaccuccucugggauua

SEQ ID NO: 1618346 - RNA, 19 nt, Artificial Sequence
  Description of Artificial Sequence: Synthetic oligonucleotide
  Antisense strand to SEQ ID NO: 1618345
uaaucccagaggagguauc

SEQ ID NO: 1618347 - RNA, 19 nt, Artificial Sequence
  Description of Artificial Sequence: Synthetic oligonucleotide
  Sense strand starting at position 3560 of SEQ ID NO: 1560699
ggauuagcccucugggauu

SEQ ID NO: 1618348 - RNA, 19 nt, Artificial Sequence
  Description of Artificial Sequence: Synthetic oligonucleotide
  Antisense strand to SEQ ID NO: 1618347
aaucccagagggcuaaucc

SEQ ID NO: 1618349 - RNA, 19 nt, Artificial Sequence
  Description of Artificial Sequence: Synthetic oligonucleotide
  Sense strand starting at position 3573 of SEQ ID NO: 1560699
gggauuccaugaugaugga

SEQ ID NO: 1618350 - RNA, 19 nt, Artificial Sequence
  Description of Artificial Sequence: Synthetic oligonucleotide
  Antisense strand to SEQ ID NO: 1618349
uccaucaucauggaauccc

SEQ ID NO: 1618351 - RNA, 19 nt, Artificial Sequence
  Description of Artificial Sequence: Synthetic oligonucleotide
  Sense strand starting at position 380 of SEQ ID NO: 1560700
cgaagcacuucuuugaauc

SEQ ID NO: 1618352 - RNA, 19 nt, Artificial Sequence
  Description of Artificial Sequence: Synthetic oligonucleotide
  Antisense strand to SEQ ID NO: 1618351
gauucaaagaagugcuucg

SEQ ID NO: 1618353 - RNA, 19 nt, Artificial Sequence
  Description of Artificial Sequence: Synthetic oligonucleotide
  Sense strand starting at position 415 of SEQ ID NO: 1560700
uguguaggccuguauuaug

SEQ ID NO: 1618354 - RNA, 19 nt, Artificial Sequence
  Description of Artificial Sequence: Synthetic oligonucleotide
  Antisense strand to SEQ ID NO: 1618353
cauaauacaggccuacaca

SEQ ID NO: 1618355 - RNA, 19 nt, Artificial Sequence
  Description of Artificial Sequence: Synthetic oligonucleotide
  Sense strand starting at position 418 of SEQ ID NO: 1560700
guaggccuguauuauguau

SEQ ID NO: 1618356 - RNA, 19 nt, Artificial Sequence
  Description of Artificial Sequence: Synthetic oligonucleotide
  Antisense strand to SEQ ID NO: 1618355
auacauaauacaggccuac

SEQ ID NO: 1618357 - RNA, 19 nt, Artificial Sequence
  Description of Artificial Sequence: Synthetic oligonucleotide
  Sense strand starting at position 429 of SEQ ID NO: 1560700
uuauguauucuagauguga

SEQ ID NO: 1618358 - RNA, 19 nt, Artificial Sequence
  Description of Artificial Sequence: Synthetic oligonucleotide
  Antisense strand to SEQ ID NO: 1618357
ucacaucuagaauacauaa

SEQ ID NO: 1618359 - RNA, 19 nt, Artificial Sequence
  Description of Artificial Sequence: Synthetic oligonucleotide
  Sense strand starting at position 431 of SEQ ID NO: 1560700
auguauucuagaugugagu

SEQ ID NO: 1618360 - RNA, 19 nt, Artificial Sequence
  Description of Artificial Sequence: Synthetic oligonucleotide
  Antisense strand to SEQ ID NO: 1618359
acucacaucuagaauacau

SEQ ID NO: 1618361 - RNA, 19 nt, Artificial Sequence
  Description of Artificial Sequence: Synthetic oligonucleotide
  Sense strand starting at position 433 of SEQ ID NO: 1560700
guauucuagaugugaguaa

SEQ ID NO: 1618362 - RNA, 19 nt, Artificial Sequence
  Description of Artificial Sequence: Synthetic oligonucleotide
  Antisense strand to SEQ ID NO: 1618361
uuacucacaucuagaauac

SEQ ID NO: 1618363 - RNA, 19 nt, Artificial Sequence
  Description of Artificial Sequence: Synthetic oligonucleotide
  Sense strand starting at position 434 of SEQ ID NO: 1560700
uauucuagaugugaguaau

SEQ ID NO: 1618364 - RNA, 19 nt, Artificial Sequence
  Description of Artificial Sequence: Synthetic oligonucleotide
  Antisense strand to SEQ ID NO: 1618363
auuacucacaucuagaaua

SEQ ID NO: 1618365 - RNA, 19 nt, Artificial Sequence
  Description of Artificial Sequence: Synthetic oligonucleotide
  Sense strand starting at position 437 of SEQ ID NO: 1560700
ucuagaugugaguaaucua

SEQ ID NO: 1618366 - RNA, 19 nt, Artificial Sequence
  Description of Artificial Sequence: Synthetic oligonucleotide
  Antisense strand to SEQ ID NO: 1618365
uagauuacucacaucuaga

SEQ ID NO: 1618367 - RNA, 19 nt, Artificial Sequence
  Description of Artificial Sequence: Synthetic oligonucleotide
  Sense strand starting at position 442 of SEQ ID NO: 1560700
augugaguaaucuagggug

SEQ ID NO: 1618368 - RNA, 19 nt, Artificial Sequence
  Description of Artificial Sequence: Synthetic oligonucleotide
  Antisense strand to SEQ ID NO: 1618367
cacccuagauuacucacau

SEQ ID NO: 1618369 - RNA, 19 nt, Artificial Sequence
  Description of Artificial Sequence: Synthetic oligonucleotide
  Sense strand starting at position 444 of SEQ ID NO: 1560700
gugaguaaucuagggugau

SEQ ID NO: 1618370 - RNA, 19 nt, Artificial Sequence
  Description of Artificial Sequence: Synthetic oligonucleotide
  Antisense strand to SEQ ID NO: 1618369
aucacccuagauuacucac

SEQ ID NO: 1618371 - RNA, 19 nt, Artificial Sequence
  Description of Artificial Sequence: Synthetic oligonucleotide
  Sense strand starting at position 445 of SEQ ID NO: 1560700
ugaguaaucuagggugauu

SEQ ID NO: 1618372 - RNA, 19 nt, Artificial Sequence
  Description of Artificial Sequence: Synthetic oligonucleotide
  Antisense strand to SEQ ID NO: 1618371
aaucacccuagauuacuca

SEQ ID NO: 1618373 - RNA, 19 nt, Artificial Sequence
  Description of Artificial Sequence: Synthetic oligonucleotide
  Sense strand starting at position 743 of SEQ ID NO: 1560700
auuaaagaauuagccugau

SEQ ID NO: 1618374 - RNA, 19 nt, Artificial Sequence
  Description of Artificial Sequence: Synthetic oligonucleotide
  Antisense strand to SEQ ID NO: 1618373
aucaggcuaauucuuuaau

SEQ ID NO: 1618375 - RNA, 19 nt, Artificial Sequence
  Description of Artificial Sequence: Synthetic oligonucleotide
  Sense strand starting at position 822 of SEQ ID NO: 1560700
gccagagagaucgaggcua

SEQ ID NO: 1618376 - RNA, 19 nt, Artificial Sequence
  Description of Artificial Sequence: Synthetic oligonucleotide
  Antisense strand to SEQ ID NO: 1618375
uagccucgaucucucuggc

SEQ ID NO: 1618377 - RNA, 19 nt, Artificial Sequence
  Description of Artificial Sequence: Synthetic oligonucleotide
  Sense strand starting at position 824 of SEQ ID NO: 1560700
cagagagaucgaggcuaca

SEQ ID NO: 1618378 - RNA, 19 nt, Artificial Sequence
  Description of Artificial Sequence: Synthetic oligonucleotide
  Antisense strand to SEQ ID NO: 1618377
uguagccucgaucucucug

SEQ ID NO: 1618379 - RNA, 19 nt, Artificial Sequence
  Description of Artificial Sequence: Synthetic oligonucleotide
  Sense strand starting at position 953 of SEQ ID NO: 1560700
ggauucuuccaaugcauua

SEQ ID NO: 1618380 - RNA, 19 nt, Artificial Sequence
  Description of Artificial Sequence: Synthetic oligonucleotide
  Antisense strand to SEQ ID NO: 1618379
uaaugcauuggaagaaucc

SEQ ID NO: 1618381 - RNA, 19 nt, Artificial Sequence
  Description of Artificial Sequence: Synthetic oligonucleotide
  Sense strand starting at position 969 of SEQ ID NO: 1560700
uuacaaauaucagguuguu

SEQ ID NO: 1618382 - RNA, 19 nt, Artificial Sequence
  Description of Artificial Sequence: Synthetic oligonucleotide
  Antisense strand to SEQ ID NO: 1618381
aacaaccugauauuuguaa

SEQ ID NO: 1618383 - RNA, 19 nt, Artificial Sequence
  Description of Artificial Sequence: Synthetic oligonucleotide
  Sense strand starting at position 972 of SEQ ID NO: 1560700
caaauaucagguuguugag

SEQ ID NO: 1618384 - RNA, 19 nt, Artificial Sequence
  Description of Artificial Sequence: Synthetic oligonucleotide
  Antisense strand to SEQ ID NO: 1618383
cucaacaaccugauauuug

SEQ ID NO: 1618385 - RNA, 19 nt, Artificial Sequence
  Description of Artificial Sequence: Synthetic oligonucleotide
  Sense strand starting at position 975 of SEQ ID NO: 1560700
auaucagguuguugaguuu

SEQ ID NO: 1618386 - RNA, 19 nt, Artificial Sequence
  Description of Artificial Sequence: Synthetic oligonucleotide
  Antisense strand to SEQ ID NO: 1618385
aaacucaacaaccugauau

SEQ ID NO: 1618387 - RNA, 19 nt, Artificial Sequence
  Description of Artificial Sequence: Synthetic oligonucleotide
  Sense strand starting at position 1278 of SEQ ID NO: 1560700
gcuacugaauucuugaaac

SEQ ID NO: 1618388 - RNA, 19 nt, Artificial Sequence
  Description of Artificial Sequence: Synthetic oligonucleotide
  Antisense strand to SEQ ID NO: 1618387
guuucaagaauucaguagc

SEQ ID NO: 1618389 - RNA, 19 nt, Artificial Sequence
  Description of Artificial Sequence: Synthetic oligonucleotide
  Sense strand starting at position 2102 of SEQ ID NO: 1560700
ggcgcaggcguagugaaau

SEQ ID NO: 1618390 - RNA, 19 nt, Artificial Sequence
  Description of Artificial Sequence: Synthetic oligonucleotide
  Antisense strand to SEQ ID NO: 1618389
auuucacuacgccugcgcc

SEQ ID NO: 1618391 - RNA, 19 nt, Artificial Sequence
  Description of Artificial Sequence: Synthetic oligonucleotide
  Sense strand starting at position 2114 of SEQ ID NO: 1560700
gugaaauucucagagcccu

SEQ ID NO: 1618392 - RNA, 19 nt, Artificial Sequence
  Description of Artificial Sequence: Synthetic oligonucleotide
  Antisense strand to SEQ ID NO: 1618391
agggcucugagaauuucac

SEQ ID NO: 1618393 - RNA, 19 nt, Artificial Sequence
  Description of Artificial Sequence: Synthetic oligonucleotide
  Sense strand starting at position 2616 of SEQ ID NO: 1560700
gcgaauauuuauugagcuc

SEQ ID NO: 1618394 - RNA, 19 nt, Artificial Sequence
  Description of Artificial Sequence: Synthetic oligonucleotide
  Antisense strand to SEQ ID NO: 1618393
gagcucaauaaauauucgc

SEQ ID NO: 1618395 - RNA, 19 nt, Artificial Sequence
  Description of Artificial Sequence: Synthetic oligonucleotide
  Sense strand starting at position 2652 of SEQ ID NO: 1560700
ccgauaagcuauguacaga

SEQ ID NO: 1618396 - RNA, 19 nt, Artificial Sequence
  Description of Artificial Sequence: Synthetic oligonucleotide
  Antisense strand to SEQ ID NO: 1618395
ucuguacauagcuuaucgg

SEQ ID NO: 1618397 - RNA, 19 nt, Artificial Sequence
  Description of Artificial Sequence: Synthetic oligonucleotide
  Sense strand starting at position 2655 of SEQ ID NO: 1560700
auaagcuauguacagacau

SEQ ID NO: 1618398 - RNA, 19 nt, Artificial Sequence
  Description of Artificial Sequence: Synthetic oligonucleotide
  Antisense strand to SEQ ID NO: 1618397
augucuguacauagcuuau

SEQ ID NO: 1618399 - RNA, 19 nt, Artificial Sequence
  Description of Artificial Sequence: Synthetic oligonucleotide
  Sense strand starting at position 2669 of SEQ ID NO: 1560700
gacauaauucguuguaggu

SEQ ID NO: 1618400 - RNA, 19 nt, Artificial Sequence
  Description of Artificial Sequence: Synthetic oligonucleotide
  Antisense strand to SEQ ID NO: 1618399
accuacaacgaauuauguc

SEQ ID NO: 1618401 - RNA, 19 nt, Artificial Sequence
  Description of Artificial Sequence: Synthetic oligonucleotide
  Sense strand starting at position 2684 of SEQ ID NO: 1560700
aggucucauuuccacauuu

SEQ ID NO: 1618402 - RNA, 19 nt, Artificial Sequence
  Description of Artificial Sequence: Synthetic oligonucleotide
  Antisense strand to SEQ ID NO: 1618401
aaauguggaaaugagaccu

SEQ ID NO: 1618403 - RNA, 19 nt, Artificial Sequence
  Description of Artificial Sequence: Synthetic oligonucleotide
  Sense strand starting at position 2729 of SEQ ID NO: 1560700
gguuaagucacgugcccaa

SEQ ID NO: 1618404 - RNA, 19 nt, Artificial Sequence
  Description of Artificial Sequence: Synthetic oligonucleotide
  Antisense strand to SEQ ID NO: 1618403
uugggcacgugacuuaacc

SEQ ID NO: 1618405 - RNA, 19 nt, Artificial Sequence
  Description of Artificial Sequence: Synthetic oligonucleotide
  Sense strand starting at position 2744 of SEQ ID NO: 1560700
ccaaguucucacggccuau

SEQ ID NO: 1618406 - RNA, 19 nt, Artificial Sequence
  Description of Artificial Sequence: Synthetic oligonucleotide
  Antisense strand to SEQ ID NO: 1618405
auaggccgugagaacuugg

SEQ ID NO: 1618407 - RNA, 19 nt, Artificial Sequence
  Description of Artificial Sequence: Synthetic oligonucleotide
  Sense strand starting at position 2748 of SEQ ID NO: 1560700
guucucacggccuauaaau

SEQ ID NO: 1618408 - RNA, 19 nt, Artificial Sequence
  Description of Artificial Sequence: Synthetic oligonucleotide
  Antisense strand to SEQ ID NO: 1618407
auuuauaggccgugagaac

SEQ ID NO: 1618409 - RNA, 19 nt, Artificial Sequence
  Description of Artificial Sequence: Synthetic oligonucleotide
  Sense strand starting at position 2755 of SEQ ID NO: 1560700
cggccuauaaauugaggga

SEQ ID NO: 1618410 - RNA, 19 nt, Artificial Sequence
  Description of Artificial Sequence: Synthetic oligonucleotide
  Antisense strand to SEQ ID NO: 1618409
ucccucaauuuauaggccg

SEQ ID NO: 1618411 - RNA, 19 nt, Artificial Sequence
  Description of Artificial Sequence: Synthetic oligonucleotide
  Sense strand starting at position 2758 of SEQ ID NO: 1560700
ccuauaaauugagggauuc

SEQ ID NO: 1618412 - RNA, 19 nt, Artificial Sequence
  Description of Artificial Sequence: Synthetic oligonucleotide
  Antisense strand to SEQ ID NO: 1618411
gaaucccucaauuuauagg

SEQ ID NO: 1618413 - RNA, 19 nt, Artificial Sequence
  Description of Artificial Sequence: Synthetic oligonucleotide
  Sense strand starting at position 3212 of SEQ ID NO: 1560700
uucccuggcucugguaauu

SEQ ID NO: 1618414 - RNA, 19 nt, Artificial Sequence
  Description of Artificial Sequence: Synthetic oligonucleotide
  Antisense strand to SEQ ID NO: 1618413
aauuaccagagccagggaa

SEQ ID NO: 1618415 - RNA, 19 nt, Artificial Sequence
  Description of Artificial Sequence: Synthetic oligonucleotide
  Sense strand starting at position 3280 of SEQ ID NO: 1560700
gucggugccuacuuuauua

SEQ ID NO: 1618416 - RNA, 19 nt, Artificial Sequence
  Description of Artificial Sequence: Synthetic oligonucleotide
  Antisense strand to SEQ ID NO: 1618415
uaauaaaguaggcaccgac

SEQ ID NO: 1618417 - RNA, 19 nt, Artificial Sequence
  Description of Artificial Sequence: Synthetic oligonucleotide
  Sense strand starting at position 3282 of SEQ ID NO: 1560700
cggugccuacuuuauuaua

SEQ ID NO: 1618418 - RNA, 19 nt, Artificial Sequence
  Description of Artificial Sequence: Synthetic oligonucleotide
  Antisense strand to SEQ ID NO: 1618417
uauaauaaaguaggcaccg

SEQ ID NO: 1618419 - RNA, 19 nt, Artificial Sequence
  Description of Artificial Sequence: Synthetic oligonucleotide
  Sense strand starting at position 3304 of SEQ ID NO: 1560700
guugauaauuauugucauc

SEQ ID NO: 1618420 - RNA, 19 nt, Artificial Sequence
  Description of Artificial Sequence: Synthetic oligonucleotide
  Antisense strand to SEQ ID NO: 1618419
gaugacaauaauuaucaac

SEQ ID NO: 1618421 - RNA, 19 nt, Artificial Sequence
  Description of Artificial Sequence: Synthetic oligonucleotide
  Sense strand starting at position 3544 of SEQ ID NO: 1560700
uaggauaccuccucuggga

SEQ ID NO: 1618422 - RNA, 19 nt, Artificial Sequence
  Description of Artificial Sequence: Synthetic oligonucleotide
  Antisense strand to SEQ ID NO: 1618421
ucccagaggagguauccua

SEQ ID NO: 1618423 - RNA, 19 nt, Artificial Sequence
  Description of Artificial Sequence: Synthetic oligonucleotide
  Sense strand starting at position 3546 of SEQ ID NO: 1560700
ggauaccuccucugggauu

SEQ ID NO: 1618424 - RNA, 19 nt, Artificial Sequence
  Description of Artificial Sequence: Synthetic oligonucleotide
  Antisense strand to SEQ ID NO: 1618423
aaucccagaggagguaucc

SEQ ID NO: 1618425 - RNA, 19 nt, Artificial Sequence
  Description of Artificial Sequence: Synthetic oligonucleotide
  Sense strand starting at position 3547 of SEQ ID NO: 1560700
gauaccuccucugggauua

SEQ ID NO: 1618426 - RNA, 19 nt, Artificial Sequence
  Description of Artificial Sequence: Synthetic oligonucleotide
  Antisense strand to SEQ ID NO: 1618425
uaaucccagaggagguauc

SEQ ID NO: 1618427 - RNA, 19 nt, Artificial Sequence
  Description of Artificial Sequence: Synthetic oligonucleotide
  Sense strand starting at position 3560 of SEQ ID NO: 1560700
ggauuagcccucugggauu

SEQ ID NO: 1618428 - RNA, 19 nt, Artificial Sequence
  Description of Artificial Sequence: Synthetic oligonucleotide
  Antisense strand to SEQ ID NO: 1618427
aaucccagagggcuaaucc

SEQ ID NO: 1618429 - RNA, 19 nt, Artificial Sequence
  Description of Artificial Sequence: Synthetic oligonucleotide
  Sense strand starting at position 3573 of SEQ ID NO: 1560700
gggauuccaugaugaugga

SEQ ID NO: 1618430 - RNA, 19 nt, Artificial Sequence
  Description of Artificial Sequence: Synthetic oligonucleotide
  Antisense strand to SEQ ID NO: 1618429
uccaucaucauggaauccc

SEQ ID NO: 1618431 - RNA, 19 nt, Artificial Sequence
  Description of Artificial Sequence: Synthetic oligonucleotide
  Sense strand starting at position 105 of SEQ ID NO: 1560701
cugacagauuccuauuggu

SEQ ID NO: 1618432 - RNA, 19 nt, Artificial Sequence
  Description of Artificial Sequence: Synthetic oligonucleotide
  Antisense strand to SEQ ID NO: 1618431
accaauaggaaucugucag

SEQ ID NO: 1618433 - RNA, 19 nt, Artificial Sequence
  Description of Artificial Sequence: Synthetic oligonucleotide
  Sense strand starting at position 114 of SEQ ID NO: 1560701
uccuauugguccuuuaagu

SEQ ID NO: 1618434 - RNA, 19 nt, Artificial Sequence
  Description of Artificial Sequence: Synthetic oligonucleotide
  Antisense strand to SEQ ID NO: 1618433
acuuaaaggaccaauagga

SEQ ID NO: 1618435 - RNA, 19 nt, Artificial Sequence
  Description of Artificial Sequence: Synthetic oligonucleotide
  Sense strand starting at position 125 of SEQ ID NO: 1560701
cuuuaagucucagcuuaga

SEQ ID NO: 1618436 - RNA, 19 nt, Artificial Sequence
  Description of Artificial Sequence: Synthetic oligonucleotide
  Antisense strand to SEQ ID NO: 1618435
ucuaagcugagacuuaaag

SEQ ID NO: 1618437 - RNA, 19 nt, Artificial Sequence
  Description of Artificial Sequence: Synthetic oligonucleotide
  Sense strand starting at position 130 of SEQ ID NO: 1560701
agucucagcuuagacauuu

SEQ ID NO: 1618438 - RNA, 19 nt, Artificial Sequence
  Description of Artificial Sequence: Synthetic oligonucleotide
  Antisense strand to SEQ ID NO: 1618437
aaaugucuaagcugagacu

SEQ ID NO: 1618439 - RNA, 19 nt, Artificial Sequence
  Description of Artificial Sequence: Synthetic oligonucleotide
  Sense strand starting at position 256 of SEQ ID NO: 1560701
cuauuaauguguuugucuc

SEQ ID NO: 1618440 - RNA, 19 nt, Artificial Sequence
  Description of Artificial Sequence: Synthetic oligonucleotide
  Antisense strand to SEQ ID NO: 1618439
gagacaaacacauuaauag

SEQ ID NO: 1618441 - RNA, 19 nt, Artificial Sequence
  Description of Artificial Sequence: Synthetic oligonucleotide
  Sense strand starting at position 331 of SEQ ID NO: 1560701
ggcuauguccaaugggaaa

SEQ ID NO: 1618442 - RNA, 19 nt, Artificial Sequence
  Description of Artificial Sequence: Synthetic oligonucleotide
  Antisense strand to SEQ ID NO: 1618441
uuucccauuggacauagcc

SEQ ID NO: 1618443 - RNA, 19 nt, Artificial Sequence
  Description of Artificial Sequence: Synthetic oligonucleotide
  Sense strand starting at position 350 of SEQ ID NO: 1560701
cauaaugucuggcacauga

SEQ ID NO: 1618444 - RNA, 19 nt, Artificial Sequence
  Description of Artificial Sequence: Synthetic oligonucleotide
  Antisense strand to SEQ ID NO: 1618443
ucaugugccagacauuaug

SEQ ID NO: 1618445 - RNA, 19 nt, Artificial Sequence
  Description of Artificial Sequence: Synthetic oligonucleotide
  Sense strand starting at position 352 of SEQ ID NO: 1560701
uaaugucuggcacaugaau

SEQ ID NO: 1618446 - RNA, 19 nt, Artificial Sequence
  Description of Artificial Sequence: Synthetic oligonucleotide
  Antisense strand to SEQ ID NO: 1618445
auucaugugccagacauua

SEQ ID NO: 1618447 - RNA, 19 nt, Artificial Sequence
  Description of Artificial Sequence: Synthetic oligonucleotide
  Sense strand starting at position 354 of SEQ ID NO: 1560701
augucuggcacaugaauga

SEQ ID NO: 1618448 - RNA, 19 nt, Artificial Sequence
  Description of Artificial Sequence: Synthetic oligonucleotide
  Antisense strand to SEQ ID NO: 1618447
ucauucaugugccagacau

SEQ ID NO: 1618449 - RNA, 19 nt, Artificial Sequence
  Description of Artificial Sequence: Synthetic oligonucleotide
  Sense strand starting at position 459 of SEQ ID NO: 1560701
acacaucaggcauguuaaa

SEQ ID NO: 1618450 - RNA, 19 nt, Artificial Sequence
  Description of Artificial Sequence: Synthetic oligonucleotide
  Antisense strand to SEQ ID NO: 1618449
uuuaacaugccugaugugu

SEQ ID NO: 1618451 - RNA, 19 nt, Artificial Sequence
  Description of Artificial Sequence: Synthetic oligonucleotide
  Sense strand starting at position 509 of SEQ ID NO: 1560701
ugaggugaguacuguuguu

SEQ ID NO: 1618452 - RNA, 19 nt, Artificial Sequence
  Description of Artificial Sequence: Synthetic oligonucleotide
  Antisense strand to SEQ ID NO: 1618451
aacaacaguacucaccuca

SEQ ID NO: 1618453 - RNA, 19 nt, Artificial Sequence
  Description of Artificial Sequence: Synthetic oligonucleotide
  Sense strand starting at position 515 of SEQ ID NO: 1560701
gaguacuguuguuauccca

SEQ ID NO: 1618454 - RNA, 19 nt, Artificial Sequence
  Description of Artificial Sequence: Synthetic oligonucleotide
  Antisense strand to SEQ ID NO: 1618453
ugggauaacaacaguacuc

SEQ ID NO: 1618455 - RNA, 19 nt, Artificial Sequence
  Description of Artificial Sequence: Synthetic oligonucleotide
  Sense strand starting at position 788 of SEQ ID NO: 1560701
guaaguaaauuguguuggu

SEQ ID NO: 1618456 - RNA, 19 nt, Artificial Sequence
  Description of Artificial Sequence: Synthetic oligonucleotide
  Antisense strand to SEQ ID NO: 1618455
accaacacaauuuacuuac

SEQ ID NO: 1618457 - RNA, 19 nt, Artificial Sequence
  Description of Artificial Sequence: Synthetic oligonucleotide
  Sense strand starting at position 789 of SEQ ID NO: 1560701
uaaguaaauuguguuggua

SEQ ID NO: 1618458 - RNA, 19 nt, Artificial Sequence
  Description of Artificial Sequence: Synthetic oligonucleotide
  Antisense strand to SEQ ID NO: 1618457
uaccaacacaauuuacuua

SEQ ID NO: 1618459 - RNA, 19 nt, Artificial Sequence
  Description of Artificial Sequence: Synthetic oligonucleotide
  Sense strand starting at position 792 of SEQ ID NO: 1560701
guaaauuguguugguacca

SEQ ID NO: 1618460 - RNA, 19 nt, Artificial Sequence
  Description of Artificial Sequence: Synthetic oligonucleotide
  Antisense strand to SEQ ID NO: 1618459
ugguaccaacacaauuuac

SEQ ID NO: 1618461 - RNA, 19 nt, Artificial Sequence
  Description of Artificial Sequence: Synthetic oligonucleotide
  Sense strand starting at position 793 of SEQ ID NO: 1560701
uaaauuguguugguaccau

SEQ ID NO: 1618462 - RNA, 19 nt, Artificial Sequence
  Description of Artificial Sequence: Synthetic oligonucleotide
  Antisense strand to SEQ ID NO: 1618461
augguaccaacacaauuua

SEQ ID NO: 1618463 - RNA, 19 nt, Artificial Sequence
  Description of Artificial Sequence: Synthetic oligonucleotide
  Sense strand starting at position 911 of SEQ ID NO: 1560701
cccagacccugaguucuua

SEQ ID NO: 1618464 - RNA, 19 nt, Artificial Sequence
  Description of Artificial Sequence: Synthetic oligonucleotide
  Antisense strand to SEQ ID NO: 1618463
uaagaacucagggucuggg

SEQ ID NO: 1618465 - RNA, 19 nt, Artificial Sequence
  Description of Artificial Sequence: Synthetic oligonucleotide
  Sense strand starting at position 915 of SEQ ID NO: 1560701
gacccugaguucuuaacag

SEQ ID NO: 1618466 - RNA, 19 nt, Artificial Sequence
  Description of Artificial Sequence: Synthetic oligonucleotide
  Antisense strand to SEQ ID NO: 1618465
cuguuaagaacucaggguc

SEQ ID NO: 1618467 - RNA, 19 nt, Artificial Sequence
  Description of Artificial Sequence: Synthetic oligonucleotide
  Sense strand starting at position 919 of SEQ ID NO: 1560701
cugaguucuuaacaguuac

SEQ ID NO: 1618468 - RNA, 19 nt, Artificial Sequence
  Description of Artificial Sequence: Synthetic oligonucleotide
  Antisense strand to SEQ ID NO: 1618467
guaacuguuaagaacucag

SEQ ID NO: 1618469 - RNA, 19 nt, Artificial Sequence
  Description of Artificial Sequence: Synthetic oligonucleotide
  Sense strand starting at position 954 of SEQ ID NO: 1560701
ugaugcuccugucuuguaa

SEQ ID NO: 1618470 - RNA, 19 nt, Artificial Sequence
  Description of Artificial Sequence: Synthetic oligonucleotide
  Antisense strand to SEQ ID NO: 1618469
uuacaagacaggagcauca

SEQ ID NO: 1618471 - RNA, 19 nt, Artificial Sequence
  Description of Artificial Sequence: Synthetic oligonucleotide
  Sense strand starting at position 956 of SEQ ID NO: 1560701
augcuccugucuuguaauu

SEQ ID NO: 1618472 - RNA, 19 nt, Artificial Sequence
  Description of Artificial Sequence: Synthetic oligonucleotide
  Antisense strand to SEQ ID NO: 1618471
aauuacaagacaggagcau

SEQ ID NO: 1618473 - RNA, 19 nt, Artificial Sequence
  Description of Artificial Sequence: Synthetic oligonucleotide
  Sense strand starting at position 958 of SEQ ID NO: 1560701
gcuccugucuuguaauugu

SEQ ID NO: 1618474 - RNA, 19 nt, Artificial Sequence
  Description of Artificial Sequence: Synthetic oligonucleotide
  Antisense strand to SEQ ID NO: 1618473
acaauuacaagacaggagc

SEQ ID NO: 1618475 - RNA, 19 nt, Artificial Sequence
  Description of Artificial Sequence: Synthetic oligonucleotide
  Sense strand starting at position 971 of SEQ ID NO: 1560701
aauuguaaaucugggugua

SEQ ID NO: 1618476 - RNA, 19 nt, Artificial Sequence
  Description of Artificial Sequence: Synthetic oligonucleotide
  Antisense strand to SEQ ID NO: 1618475
uacacccagauuuacaauu

SEQ ID NO: 1618477 - RNA, 19 nt, Artificial Sequence
  Description of Artificial Sequence: Synthetic oligonucleotide
  Sense strand starting at position 972 of SEQ ID NO: 1560701
auuguaaaucuggguguag

SEQ ID NO: 1618478 - RNA, 19 nt, Artificial Sequence
  Description of Artificial Sequence: Synthetic oligonucleotide
  Antisense strand to SEQ ID NO: 1618477
cuacacccagauuuacaau

SEQ ID NO: 1618479 - RNA, 19 nt, Artificial Sequence
  Description of Artificial Sequence: Synthetic oligonucleotide
  Sense strand starting at position 974 of SEQ ID NO: 1560701
uguaaaucuggguguaggu

SEQ ID NO: 1618480 - RNA, 19 nt, Artificial Sequence
  Description of Artificial Sequence: Synthetic oligonucleotide
  Antisense strand to SEQ ID NO: 1618479
accuacacccagauuuaca

SEQ ID NO: 1618481 - RNA, 19 nt, Artificial Sequence
  Description of Artificial Sequence: Synthetic oligonucleotide
  Sense strand starting at position 1134 of SEQ ID NO: 1560701
augaacuaccagcgaauua

SEQ ID NO: 1618482 - RNA, 19 nt, Artificial Sequence
  Description of Artificial Sequence: Synthetic oligonucleotide
  Antisense strand to SEQ ID NO: 1618481
uaauucgcugguaguucau

SEQ ID NO: 1618483 - RNA, 19 nt, Artificial Sequence
  Description of Artificial Sequence: Synthetic oligonucleotide
  Sense strand starting at position 1146 of SEQ ID NO: 1560701
cgaauuagugagugaccca

SEQ ID NO: 1618484 - RNA, 19 nt, Artificial Sequence
  Description of Artificial Sequence: Synthetic oligonucleotide
  Antisense strand to SEQ ID NO: 1618483
ugggucacucacuaauucg

SEQ ID NO: 1618485 - RNA, 19 nt, Artificial Sequence
  Description of Artificial Sequence: Synthetic oligonucleotide
  Sense strand starting at position 2241 of SEQ ID NO: 1560701
gugcuaagaucguaaccca

SEQ ID NO: 1618486 - RNA, 19 nt, Artificial Sequence
  Description of Artificial Sequence: Synthetic oligonucleotide
  Antisense strand to SEQ ID NO: 1618485
uggguuacgaucuuagcac

SEQ ID NO: 1618487 - RNA, 19 nt, Artificial Sequence
  Description of Artificial Sequence: Synthetic oligonucleotide
  Sense strand starting at position 2268 of SEQ ID NO: 1560701
gugccugugguucagcaaa

SEQ ID NO: 1618488 - RNA, 19 nt, Artificial Sequence
  Description of Artificial Sequence: Synthetic oligonucleotide
  Antisense strand to SEQ ID NO: 1618487
uuugcugaaccacaggcac

SEQ ID NO: 1618489 - RNA, 19 nt, Artificial Sequence
  Description of Artificial Sequence: Synthetic oligonucleotide
  Sense strand starting at position 2305 of SEQ ID NO: 1560701
cgccucuaccucugaguga

SEQ ID NO: 1618490 - RNA, 19 nt, Artificial Sequence
  Description of Artificial Sequence: Synthetic oligonucleotide
  Antisense strand to SEQ ID NO: 1618489
ucacucagagguagaggcg

SEQ ID NO: 1618491 - RNA, 19 nt, Artificial Sequence
  Description of Artificial Sequence: Synthetic oligonucleotide
  Sense strand starting at position 2309 of SEQ ID NO: 1560701
ucuaccucugagugaggaa

SEQ ID NO: 1618492 - RNA, 19 nt, Artificial Sequence
  Description of Artificial Sequence: Synthetic oligonucleotide
  Antisense strand to SEQ ID NO: 1618491
uuccucacucagagguaga

SEQ ID NO: 1618493 - RNA, 19 nt, Artificial Sequence
  Description of Artificial Sequence: Synthetic oligonucleotide
  Sense strand starting at position 2353 of SEQ ID NO: 1560701
gcaagacccugcuagaugu

SEQ ID NO: 1618494 - RNA, 19 nt, Artificial Sequence
  Description of Artificial Sequence: Synthetic oligonucleotide
  Antisense strand to SEQ ID NO: 1618493
acaucuagcagggucuugc

SEQ ID NO: 1618495 - RNA, 19 nt, Artificial Sequence
  Description of Artificial Sequence: Synthetic oligonucleotide
  Sense strand starting at position 2360 of SEQ ID NO: 1560701
ccugcuagauguuugauca

SEQ ID NO: 1618496 - RNA, 19 nt, Artificial Sequence
  Description of Artificial Sequence: Synthetic oligonucleotide
  Antisense strand to SEQ ID NO: 1618495
ugaucaaacaucuagcagg

SEQ ID NO: 1618497 - RNA, 19 nt, Artificial Sequence
  Description of Artificial Sequence: Synthetic oligonucleotide
  Sense strand starting at position 2361 of SEQ ID NO: 1560701
cugcuagauguuugaucau

SEQ ID NO: 1618498 - RNA, 19 nt, Artificial Sequence
  Description of Artificial Sequence: Synthetic oligonucleotide
  Antisense strand to SEQ ID NO: 1618497
augaucaaacaucuagcag

SEQ ID NO: 1618499 - RNA, 19 nt, Artificial Sequence
  Description of Artificial Sequence: Synthetic oligonucleotide
  Sense strand starting at position 2364 of SEQ ID NO: 1560701
cuagauguuugaucaucuu

SEQ ID NO: 1618500 - RNA, 19 nt, Artificial Sequence
  Description of Artificial Sequence: Synthetic oligonucleotide
  Antisense strand to SEQ ID NO: 1618499
aagaugaucaaacaucuag

SEQ ID NO: 1618501 - RNA, 19 nt, Artificial Sequence
  Description of Artificial Sequence: Synthetic oligonucleotide
  Sense strand starting at position 2406 of SEQ ID NO: 1560701
acauaaagaucagguuaua

SEQ ID NO: 1618502 - RNA, 19 nt, Artificial Sequence
  Description of Artificial Sequence: Synthetic oligonucleotide
  Antisense strand to SEQ ID NO: 1618501
uauaaccugaucuuuaugu

SEQ ID NO: 1618503 - RNA, 19 nt, Artificial Sequence
  Description of Artificial Sequence: Synthetic oligonucleotide
  Sense strand starting at position 2486 of SEQ ID NO: 1560701
cugacauaguucuggcuca

SEQ ID NO: 1618504 - RNA, 19 nt, Artificial Sequence
  Description of Artificial Sequence: Synthetic oligonucleotide
  Antisense strand to SEQ ID NO: 1618503
ugagccagaacuaugucag

SEQ ID NO: 1618505 - RNA, 19 nt, Artificial Sequence
  Description of Artificial Sequence: Synthetic oligonucleotide
  Sense strand starting at position 3119 of SEQ ID NO: 1560701
ugcugaaguauucggugaa

SEQ ID NO: 1618506 - RNA, 19 nt, Artificial Sequence
  Description of Artificial Sequence: Synthetic oligonucleotide
  Antisense strand to SEQ ID NO: 1618505
uucaccgaauacuucagca

SEQ ID NO: 1618507 - RNA, 19 nt, Artificial Sequence
  Description of Artificial Sequence: Synthetic oligonucleotide
  Sense strand starting at position 3120 of SEQ ID NO: 1560701
gcugaaguauucggugaag

SEQ ID NO: 1618508 - RNA, 19 nt, Artificial Sequence
  Description of Artificial Sequence: Synthetic oligonucleotide
  Antisense strand to SEQ ID NO: 1618507
cuucaccgaauacuucagc

SEQ ID NO: 1618509 - RNA, 19 nt, Artificial Sequence
  Description of Artificial Sequence: Synthetic oligonucleotide
  Sense strand starting at position 3442 of SEQ ID NO: 1560701
cacguugucagucagggaa

SEQ ID NO: 1618510 - RNA, 19 nt, Artificial Sequence
  Description of Artificial Sequence: Synthetic oligonucleotide
  Antisense strand to SEQ ID NO: 1618509
uucccugacugacaacgug

SEQ ID NO: 1618511 - RNA, 19 nt, Artificial Sequence
  Description of Artificial Sequence: Synthetic oligonucleotide
  Sense strand starting at position 31 of SEQ ID NO: 1560702
ggcagagauuccugacaug

SEQ ID NO: 1618512 - RNA, 19 nt, Artificial Sequence
  Description of Artificial Sequence: Synthetic oligonucleotide
  Antisense strand to SEQ ID NO: 1618511
caugucaggaaucucugcc

SEQ ID NO: 1618513 - RNA, 19 nt, Artificial Sequence
  Description of Artificial Sequence: Synthetic oligonucleotide
  Sense strand starting at position 108 of SEQ ID NO: 1560702
gagaaaguggcgugagaag

SEQ ID NO: 1618514 - RNA, 19 nt, Artificial Sequence
  Description of Artificial Sequence: Synthetic oligonucleotide
  Antisense strand to SEQ ID NO: 1618513
cuucucacgccacuuucuc

SEQ ID NO: 1618515 - RNA, 19 nt, Artificial Sequence
  Description of Artificial Sequence: Synthetic oligonucleotide
  Sense strand starting at position 184 of SEQ ID NO: 1560702
guaggaaccgcgcauuguu

SEQ ID NO: 1618516 - RNA, 19 nt, Artificial Sequence
  Description of Artificial Sequence: Synthetic oligonucleotide
  Antisense strand to SEQ ID NO: 1618515
aacaaugcgcgguuccuac

SEQ ID NO: 1618517 - RNA, 19 nt, Artificial Sequence
  Description of Artificial Sequence: Synthetic oligonucleotide
  Sense strand starting at position 192 of SEQ ID NO: 1560702
cgcgcauuguuguacacaa

SEQ ID NO: 1618518 - RNA, 19 nt, Artificial Sequence
  Description of Artificial Sequence: Synthetic oligonucleotide
  Antisense strand to SEQ ID NO: 1618517
uuguguacaacaaugcgcg

SEQ ID NO: 1618519 - RNA, 19 nt, Artificial Sequence
  Description of Artificial Sequence: Synthetic oligonucleotide
  Sense strand starting at position 256 of SEQ ID NO: 1560702
ggcagauaagcgcaucaga

SEQ ID NO: 1618520 - RNA, 19 nt, Artificial Sequence
  Description of Artificial Sequence: Synthetic oligonucleotide
  Antisense strand to SEQ ID NO: 1618519
ucugaugcgcuuaucugcc

SEQ ID NO: 1618521 - RNA, 19 nt, Artificial Sequence
  Description of Artificial Sequence: Synthetic oligonucleotide
  Sense strand starting at position 259 of SEQ ID NO: 1560702
agauaagcgcaucagagua

SEQ ID NO: 1618522 - RNA, 19 nt, Artificial Sequence
  Description of Artificial Sequence: Synthetic oligonucleotide
  Antisense strand to SEQ ID NO: 1618521
uacucugaugcgcuuaucu

SEQ ID NO: 1618523 - RNA, 19 nt, Artificial Sequence
  Description of Artificial Sequence: Synthetic oligonucleotide
  Sense strand starting at position 267 of SEQ ID NO: 1560702
gcaucagaguaagucucaa

SEQ ID NO: 1618524 - RNA, 19 nt, Artificial Sequence
  Description of Artificial Sequence: Synthetic oligonucleotide
  Antisense strand to SEQ ID NO: 1618523
uugagacuuacucugaugc

SEQ ID NO: 1618525 - RNA, 19 nt, Artificial Sequence
  Description of Artificial Sequence: Synthetic oligonucleotide
  Sense strand starting at position 298 of SEQ ID NO: 1560702
cuccacucgccacgugaau

SEQ ID NO: 1618526 - RNA, 19 nt, Artificial Sequence
  Description of Artificial Sequence: Synthetic oligonucleotide
  Antisense strand to SEQ ID NO: 1618525
auucacguggcgaguggag

SEQ ID NO: 1618527 - RNA, 19 nt, Artificial Sequence
  Description of Artificial Sequence: Synthetic oligonucleotide
  Sense strand starting at position 309 of SEQ ID NO: 1560702
acgugaaucuaccacacau

SEQ ID NO: 1618528 - RNA, 19 nt, Artificial Sequence
  Description of Artificial Sequence: Synthetic oligonucleotide
  Antisense strand to SEQ ID NO: 1618527
augugugguagauucacgu

SEQ ID NO: 1618529 - RNA, 19 nt, Artificial Sequence
  Description of Artificial Sequence: Synthetic oligonucleotide
  Sense strand starting at position 311 of SEQ ID NO: 1560702
gugaaucuaccacacaugu

SEQ ID NO: 1618530 - RNA, 19 nt, Artificial Sequence
  Description of Artificial Sequence: Synthetic oligonucleotide
  Antisense strand to SEQ ID NO: 1618529
acaugugugguagauucac

SEQ ID NO: 1618531 - RNA, 19 nt, Artificial Sequence
  Description of Artificial Sequence: Synthetic oligonucleotide
  Sense strand starting at position 357 of SEQ ID NO: 1560702
ugcacacucaugugucagu

SEQ ID NO: 1618532 - RNA, 19 nt, Artificial Sequence
  Description of Artificial Sequence: Synthetic oligonucleotide
  Antisense strand to SEQ ID NO: 1618531
acugacacaugagugugca

SEQ ID NO: 1618533 - RNA, 19 nt, Artificial Sequence
  Description of Artificial Sequence: Synthetic oligonucleotide
  Sense strand starting at position 450 of SEQ ID NO: 1560702
augcaugauugagacauuu

SEQ ID NO: 1618534 - RNA, 19 nt, Artificial Sequence
  Description of Artificial Sequence: Synthetic oligonucleotide
  Antisense strand to SEQ ID NO: 1618533
aaaugucucaaucaugcau

SEQ ID NO: 1618535 - RNA, 19 nt, Artificial Sequence
  Description of Artificial Sequence: Synthetic oligonucleotide
  Sense strand starting at position 525 of SEQ ID NO: 1560702
gagcacuuguugccggaga

SEQ ID NO: 1618536 - RNA, 19 nt, Artificial Sequence
  Description of Artificial Sequence: Synthetic oligonucleotide
  Antisense strand to SEQ ID NO: 1618535
ucuccggcaacaagugcuc

SEQ ID NO: 1618537 - RNA, 19 nt, Artificial Sequence
  Description of Artificial Sequence: Synthetic oligonucleotide
  Sense strand starting at position 529 of SEQ ID NO: 1560702
acuuguugccggagagggu

SEQ ID NO: 1618538 - RNA, 19 nt, Artificial Sequence
  Description of Artificial Sequence: Synthetic oligonucleotide
  Antisense strand to SEQ ID NO: 1618537
acccucuccggcaacaagu

SEQ ID NO: 1618539 - RNA, 19 nt, Artificial Sequence
  Description of Artificial Sequence: Synthetic oligonucleotide
  Sense strand starting at position 614 of SEQ ID NO: 1560702
cgcguccugucgucacaga

SEQ ID NO: 1618540 - RNA, 19 nt, Artificial Sequence
  Description of Artificial Sequence: Synthetic oligonucleotide
  Antisense strand to SEQ ID NO: 1618539
ucugugacgacaggacgcg

SEQ ID NO: 1618541 - RNA, 19 nt, Artificial Sequence
  Description of Artificial Sequence: Synthetic oligonucleotide
  Sense strand starting at position 679 of SEQ ID NO: 1560702
aucccuuccucagugauga

SEQ ID NO: 1618542 - RNA, 19 nt, Artificial Sequence
  Description of Artificial Sequence: Synthetic oligonucleotide
  Antisense strand to SEQ ID NO: 1618541
ucaucacugaggaagggau

SEQ ID NO: 1618543 - RNA, 19 nt, Artificial Sequence
  Description of Artificial Sequence: Synthetic oligonucleotide
  Sense strand starting at position 680 of SEQ ID NO: 1560702
ucccuuccucagugaugaa

SEQ ID NO: 1618544 - RNA, 19 nt, Artificial Sequence
  Description of Artificial Sequence: Synthetic oligonucleotide
  Antisense strand to SEQ ID NO: 1618543
uucaucacugaggaaggga

SEQ ID NO: 1618545 - RNA, 19 nt, Artificial Sequence
  Description of Artificial Sequence: Synthetic oligonucleotide
  Sense strand starting at position 830 of SEQ ID NO: 1560702
ucuccugugcccugaaguu

SEQ ID NO: 1618546 - RNA, 19 nt, Artificial Sequence
  Description of Artificial Sequence: Synthetic oligonucleotide
  Antisense strand to SEQ ID NO: 1618545
aacuucagggcacaggaga

SEQ ID NO: 1618547 - RNA, 19 nt, Artificial Sequence
  Description of Artificial Sequence: Synthetic oligonucleotide
  Sense strand starting at position 1996 of SEQ ID NO: 1560702
ucucccuugucuuguggaa

SEQ ID NO: 1618548 - RNA, 19 nt, Artificial Sequence
  Description of Artificial Sequence: Synthetic oligonucleotide
  Antisense strand to SEQ ID NO: 1618547
uuccacaagacaagggaga

SEQ ID NO: 1618549 - RNA, 19 nt, Artificial Sequence
  Description of Artificial Sequence: Synthetic oligonucleotide
  Sense strand starting at position 1998 of SEQ ID NO: 1560702
ucccuugucuuguggaaau

SEQ ID NO: 1618550 - RNA, 19 nt, Artificial Sequence
  Description of Artificial Sequence: Synthetic oligonucleotide
  Antisense strand to SEQ ID NO: 1618549
auuuccacaagacaaggga

SEQ ID NO: 1618551 - RNA, 19 nt, Artificial Sequence
  Description of Artificial Sequence: Synthetic oligonucleotide
  Sense strand starting at position 2000 of SEQ ID NO: 1560702
ccuugucuuguggaaauua

SEQ ID NO: 1618552 - RNA, 19 nt, Artificial Sequence
  Description of Artificial Sequence: Synthetic oligonucleotide
  Antisense strand to SEQ ID NO: 1618551
uaauuuccacaagacaagg

SEQ ID NO: 1618553 - RNA, 19 nt, Artificial Sequence
  Description of Artificial Sequence: Synthetic oligonucleotide
  Sense strand starting at position 2479 of SEQ ID NO: 1560702
cggagaaacaguuaagcua

SEQ ID NO: 1618554 - RNA, 19 nt, Artificial Sequence
  Description of Artificial Sequence: Synthetic oligonucleotide
  Antisense strand to SEQ ID NO: 1618553
uagcuuaacuguuucuccg

SEQ ID NO: 1618555 - RNA, 19 nt, Artificial Sequence
  Description of Artificial Sequence: Synthetic oligonucleotide
  Sense strand starting at position 2774 of SEQ ID NO: 1560702
uuaggagucucuggcucua

SEQ ID NO: 1618556 - RNA, 19 nt, Artificial Sequence
  Description of Artificial Sequence: Synthetic oligonucleotide
  Antisense strand to SEQ ID NO: 1618555
uagagccagagacuccuaa

SEQ ID NO: 1618557 - RNA, 19 nt, Artificial Sequence
  Description of Artificial Sequence: Synthetic oligonucleotide
  Sense strand starting at position 3147 of SEQ ID NO: 1560702
gggcuuggacucugaagca

SEQ ID NO: 1618558 - RNA, 19 nt, Artificial Sequence
  Description of Artificial Sequence: Synthetic oligonucleotide
  Antisense strand to SEQ ID NO: 1618557
ugcuucagaguccaagccc

SEQ ID NO: 1618559 - RNA, 19 nt, Artificial Sequence
  Description of Artificial Sequence: Synthetic oligonucleotide
  Sense strand starting at position 3208 of SEQ ID NO: 1560702
gagaaauaaguguguggga

SEQ ID NO: 1618560 - RNA, 19 nt, Artificial Sequence
  Description of Artificial Sequence: Synthetic oligonucleotide
  Antisense strand to SEQ ID NO: 1618559
ucccacacacuuauuucuc

SEQ ID NO: 1618561 - RNA, 19 nt, Artificial Sequence
  Description of Artificial Sequence: Synthetic oligonucleotide
  Sense strand starting at position 3213 of SEQ ID NO: 1560702
auaagugugugggagagaa

SEQ ID NO: 1618562 - RNA, 19 nt, Artificial Sequence
  Description of Artificial Sequence: Synthetic oligonucleotide
  Antisense strand to SEQ ID NO: 1618561
uucucucccacacacuuau

SEQ ID NO: 1618563 - RNA, 19 nt, Artificial Sequence
  Description of Artificial Sequence: Synthetic oligonucleotide
  Sense strand starting at position 3449 of SEQ ID NO: 1560702
cuggcugucucccuuaaau

SEQ ID NO: 1618564 - RNA, 19 nt, Artificial Sequence
  Description of Artificial Sequence: Synthetic oligonucleotide
  Antisense strand to SEQ ID NO: 1618563
auuuaagggagacagccag

SEQ ID NO: 1618565 - RNA, 19 nt, Artificial Sequence
  Description of Artificial Sequence: Synthetic oligonucleotide
  Sense strand starting at position 3451 of SEQ ID NO: 1560702
ggcugucucccuuaaauag

SEQ ID NO: 1618566 - RNA, 19 nt, Artificial Sequence
  Description of Artificial Sequence: Synthetic oligonucleotide
  Antisense strand to SEQ ID NO: 1618565
cuauuuaagggagacagcc

SEQ ID NO: 1618567 - RNA, 19 nt, Artificial Sequence
  Description of Artificial Sequence: Synthetic oligonucleotide
  Sense strand starting at position 3731 of SEQ ID NO: 1560702
cguggagcccucuaugagu

SEQ ID NO: 1618568 - RNA, 19 nt, Artificial Sequence
  Description of Artificial Sequence: Synthetic oligonucleotide
  Antisense strand to SEQ ID NO: 1618567
acucauagagggcuccacg

SEQ ID NO: 1618569 - RNA, 19 nt, Artificial Sequence
  Description of Artificial Sequence: Synthetic oligonucleotide
  Sense strand starting at position 3734 of SEQ ID NO: 1560702
ggagcccucuaugaguaga

SEQ ID NO: 1618570 - RNA, 19 nt, Artificial Sequence
  Description of Artificial Sequence: Synthetic oligonucleotide
  Antisense strand to SEQ ID NO: 1618569
ucuacucauagagggcucc

SEQ ID NO: 1618571 - RNA, 19 nt, Artificial Sequence
  Description of Artificial Sequence: Synthetic oligonucleotide
  Sense strand starting at position 3737 of SEQ ID NO: 1560702
gcccucuaugaguagaucu

SEQ ID NO: 1618572 - RNA, 19 nt, Artificial Sequence
  Description of Artificial Sequence: Synthetic oligonucleotide
  Antisense strand to SEQ ID NO: 1618571
agaucuacucauagagggc

SEQ ID NO: 1618573 - RNA, 19 nt, Artificial Sequence
  Description of Artificial Sequence: Synthetic oligonucleotide
  Sense strand starting at position 219 of SEQ ID NO: 1560703
cccacaugagcuggacaaa

SEQ ID NO: 1618574 - RNA, 19 nt, Artificial Sequence
  Description of Artificial Sequence: Synthetic oligonucleotide
  Antisense strand to SEQ ID NO: 1618573
uuuguccagcucauguggg

SEQ ID NO: 1618575 - RNA, 19 nt, Artificial Sequence
  Description of Artificial Sequence: Synthetic oligonucleotide
  Sense strand starting at position 473 of SEQ ID NO: 1560703
guucuagaaccuggcugau

SEQ ID NO: 1618576 - RNA, 19 nt, Artificial Sequence
  Description of Artificial Sequence: Synthetic oligonucleotide
  Antisense strand to SEQ ID NO: 1618575
aucagccagguucuagaac

SEQ ID NO: 1618577 - RNA, 19 nt, Artificial Sequence
  Description of Artificial Sequence: Synthetic oligonucleotide
  Sense strand starting at position 688 of SEQ ID NO: 1560703
agccucgcucucuaacaaa

SEQ ID NO: 1618578 - RNA, 19 nt, Artificial Sequence
  Description of Artificial Sequence: Synthetic oligonucleotide
  Antisense strand to SEQ ID NO: 1618577
uuuguuagagagcgaggcu

SEQ ID NO: 1618579 - RNA, 19 nt, Artificial Sequence
  Description of Artificial Sequence: Synthetic oligonucleotide
  Sense strand starting at position 2700 of SEQ ID NO: 1560703
ucgcgaucccacuggacuu

SEQ ID NO: 1618580 - RNA, 19 nt, Artificial Sequence
  Description of Artificial Sequence: Synthetic oligonucleotide
  Antisense strand to SEQ ID NO: 1618579
aaguccagugggaucgcga

SEQ ID NO: 1618581 - RNA, 19 nt, Artificial Sequence
  Description of Artificial Sequence: Synthetic oligonucleotide
  Sense strand starting at position 120 of SEQ ID NO: 1560704
agucauuguucccaagggu

SEQ ID NO: 1618582 - RNA, 19 nt, Artificial Sequence
  Description of Artificial Sequence: Synthetic oligonucleotide
  Antisense strand to SEQ ID NO: 1618581
acccuugggaacaaugacu

SEQ ID NO: 1618583 - RNA, 19 nt, Artificial Sequence
  Description of Artificial Sequence: Synthetic oligonucleotide
  Sense strand starting at position 209 of SEQ ID NO: 1560704
gcugaaaugccacaugugu

SEQ ID NO: 1618584 - RNA, 19 nt, Artificial Sequence
  Description of Artificial Sequence: Synthetic oligonucleotide
  Antisense strand to SEQ ID NO: 1618583
acacauguggcauuucagc

SEQ ID NO: 1618585 - RNA, 19 nt, Artificial Sequence
  Description of Artificial Sequence: Synthetic oligonucleotide
  Sense strand starting at position 349 of SEQ ID NO: 1560704
agucuuaucgaugggcacu

SEQ ID NO: 1618586 - RNA, 19 nt, Artificial Sequence
  Description of Artificial Sequence: Synthetic oligonucleotide
  Antisense strand to SEQ ID NO: 1618585
agugcccaucgauaagacu

SEQ ID NO: 1618587 - RNA, 19 nt, Artificial Sequence
  Description of Artificial Sequence: Synthetic oligonucleotide
  Sense strand starting at position 581 of SEQ ID NO: 1560704
ccagguugcccuggcagaa

SEQ ID NO: 1618588 - RNA, 19 nt, Artificial Sequence
  Description of Artificial Sequence: Synthetic oligonucleotide
  Antisense strand to SEQ ID NO: 1618587
uucugccagggcaaccugg

SEQ ID NO: 1618589 - RNA, 19 nt, Artificial Sequence
  Description of Artificial Sequence: Synthetic oligonucleotide
  Sense strand starting at position 655 of SEQ ID NO: 1560704
cccaguuggucacccuaau

SEQ ID NO: 1618590 - RNA, 19 nt, Artificial Sequence
  Description of Artificial Sequence: Synthetic oligonucleotide
  Antisense strand to SEQ ID NO: 1618589
auuagggugaccaacuggg

SEQ ID NO: 1618591 - RNA, 19 nt, Artificial Sequence
  Description of Artificial Sequence: Synthetic oligonucleotide
  Sense strand starting at position 782 of SEQ ID NO: 1560704
acuagaaagucauguaguc

SEQ ID NO: 1618592 - RNA, 19 nt, Artificial Sequence
  Description of Artificial Sequence: Synthetic oligonucleotide
  Antisense strand to SEQ ID NO: 1618591
gacuacaugacuuucuagu

SEQ ID NO: 1618593 - RNA, 19 nt, Artificial Sequence
  Description of Artificial Sequence: Synthetic oligonucleotide
  Sense strand starting at position 787 of SEQ ID NO: 1560704
aaagucauguagucagaug

SEQ ID NO: 1618594 - RNA, 19 nt, Artificial Sequence
  Description of Artificial Sequence: Synthetic oligonucleotide
  Antisense strand to SEQ ID NO: 1618593
caucugacuacaugacuuu

SEQ ID NO: 1618595 - RNA, 19 nt, Artificial Sequence
  Description of Artificial Sequence: Synthetic oligonucleotide
  Sense strand starting at position 792 of SEQ ID NO: 1560704
cauguagucagauggugag

SEQ ID NO: 1618596 - RNA, 19 nt, Artificial Sequence
  Description of Artificial Sequence: Synthetic oligonucleotide
  Antisense strand to SEQ ID NO: 1618595
cucaccaucugacuacaug

SEQ ID NO: 1618597 - RNA, 19 nt, Artificial Sequence
  Description of Artificial Sequence: Synthetic oligonucleotide
  Sense strand starting at position 911 of SEQ ID NO: 1560704
gcucauggcucaggcagau

SEQ ID NO: 1618598 - RNA, 19 nt, Artificial Sequence
  Description of Artificial Sequence: Synthetic oligonucleotide
  Antisense strand to SEQ ID NO: 1618597
aucugccugagccaugagc

SEQ ID NO: 1618599 - RNA, 19 nt, Artificial Sequence
  Description of Artificial Sequence: Synthetic oligonucleotide
  Sense strand starting at position 1318 of SEQ ID NO: 1560704
gcucauagggcagacagau

SEQ ID NO: 1618600 - RNA, 19 nt, Artificial Sequence
  Description of Artificial Sequence: Synthetic oligonucleotide
  Antisense strand to SEQ ID NO: 1618599
aucugucugcccuaugagc

SEQ ID NO: 1618601 - RNA, 19 nt, Artificial Sequence
  Description of Artificial Sequence: Synthetic oligonucleotide
  Sense strand starting at position 1714 of SEQ ID NO: 1560704
cgcacaggucguugaggaa

SEQ ID NO: 1618602 - RNA, 19 nt, Artificial Sequence
  Description of Artificial Sequence: Synthetic oligonucleotide
  Antisense strand to SEQ ID NO: 1618601
uuccucaacgaccugugcg

SEQ ID NO: 1618603 - RNA, 19 nt, Artificial Sequence
  Description of Artificial Sequence: Synthetic oligonucleotide
  Sense strand starting at position 2484 of SEQ ID NO: 1560704
auugguuacuaacgguaau

SEQ ID NO: 1618604 - RNA, 19 nt, Artificial Sequence
  Description of Artificial Sequence: Synthetic oligonucleotide
  Antisense strand to SEQ ID NO: 1618603
auuaccguuaguaaccaau

SEQ ID NO: 1618605 - RNA, 19 nt, Artificial Sequence
  Description of Artificial Sequence: Synthetic oligonucleotide
  Sense strand starting at position 2487 of SEQ ID NO: 1560704
gguuacuaacgguaaugau

SEQ ID NO: 1618606 - RNA, 19 nt, Artificial Sequence
  Description of Artificial Sequence: Synthetic oligonucleotide
  Antisense strand to SEQ ID NO: 1618605
aucauuaccguuaguaacc

SEQ ID NO: 1618607 - RNA, 19 nt, Artificial Sequence
  Description of Artificial Sequence: Synthetic oligonucleotide
  Sense strand starting at position 2544 of SEQ ID NO: 1560704
gagcguugccugcaaagag

SEQ ID NO: 1618608 - RNA, 19 nt, Artificial Sequence
  Description of Artificial Sequence: Synthetic oligonucleotide
  Antisense strand to SEQ ID NO: 1618607
cucuuugcaggcaacgcuc

SEQ ID NO: 1618609 - RNA, 19 nt, Artificial Sequence
  Description of Artificial Sequence: Synthetic oligonucleotide
  Sense strand starting at position 2630 of SEQ ID NO: 1560704
gugagucaggcgucuguga

SEQ ID NO: 1618610 - RNA, 19 nt, Artificial Sequence
  Description of Artificial Sequence: Synthetic oligonucleotide
  Antisense strand to SEQ ID NO: 1618609
ucacagacgccugacucac

SEQ ID NO: 1618611 - RNA, 19 nt, Artificial Sequence
  Description of Artificial Sequence: Synthetic oligonucleotide
  Sense strand starting at position 2632 of SEQ ID NO: 1560704
gagucaggcgucugugacu

SEQ ID NO: 1618612 - RNA, 19 nt, Artificial Sequence
  Description of Artificial Sequence: Synthetic oligonucleotide
  Antisense strand to SEQ ID NO: 1618611
agucacagacgccugacuc

SEQ ID NO: 1618613 - RNA, 19 nt, Artificial Sequence
  Description of Artificial Sequence: Synthetic oligonucleotide
  Sense strand starting at position 3315 of SEQ ID NO: 1560704
ucacuaugaugcuuagguu

SEQ ID NO: 1618614 - RNA, 19 nt, Artificial Sequence
  Description of Artificial Sequence: Synthetic oligonucleotide
  Antisense strand to SEQ ID NO: 1618613
aaccuaagcaucauaguga

SEQ ID NO: 1618615 - RNA, 19 nt, Artificial Sequence
  Description of Artificial Sequence: Synthetic oligonucleotide
  Sense strand starting at position 3324 of SEQ ID NO: 1560704
ugcuuagguugaccucaaa

SEQ ID NO: 1618616 - RNA, 19 nt, Artificial Sequence
  Description of Artificial Sequence: Synthetic oligonucleotide
  Antisense strand to SEQ ID NO: 1618615
uuugaggucaaccuaagca

SEQ ID NO: 1618617 - RNA, 19 nt, Artificial Sequence
  Description of Artificial Sequence: Synthetic oligonucleotide
  Sense strand starting at position 3376 of SEQ ID NO: 1560704
uccagaagcucugggauua

SEQ ID NO: 1618618 - RNA, 19 nt, Artificial Sequence
  Description of Artificial Sequence: Synthetic oligonucleotide
  Antisense strand to SEQ ID NO: 1618617
uaaucccagagcuucugga

SEQ ID NO: 1618619 - RNA, 19 nt, Artificial Sequence
  Description of Artificial Sequence: Synthetic oligonucleotide
  Sense strand starting at position 3755 of SEQ ID NO: 1560704
caguauauuuggccuugca

SEQ ID NO: 1618620 - RNA, 19 nt, Artificial Sequence
  Description of Artificial Sequence: Synthetic oligonucleotide
  Antisense strand to SEQ ID NO: 1618619
ugcaaggccaaauauacug

SEQ ID NO: 1618621 - RNA, 19 nt, Artificial Sequence
  Description of Artificial Sequence: Synthetic oligonucleotide
  Sense strand starting at position 3770 of SEQ ID NO: 1560704
ugcagucugcagugaggua

SEQ ID NO: 1618622 - RNA, 19 nt, Artificial Sequence
  Description of Artificial Sequence: Synthetic oligonucleotide
  Antisense strand to SEQ ID NO: 1618621
uaccucacugcagacugca

SEQ ID NO: 1618623 - RNA, 19 nt, Artificial Sequence
  Description of Artificial Sequence: Synthetic oligonucleotide
  Sense strand starting at position 3771 of SEQ ID NO: 1560704
gcagucugcagugagguau

SEQ ID NO: 1618624 - RNA, 19 nt, Artificial Sequence
  Description of Artificial Sequence: Synthetic oligonucleotide
  Antisense strand to SEQ ID NO: 1618623
auaccucacugcagacugc

SEQ ID NO: 1618625 - RNA, 19 nt, Artificial Sequence
  Description of Artificial Sequence: Synthetic oligonucleotide
  Sense strand starting at position 3861 of SEQ ID NO: 1560704
agguccuugcaguauggaa

SEQ ID NO: 1618626 - RNA, 19 nt, Artificial Sequence
  Description of Artificial Sequence: Synthetic oligonucleotide
  Antisense strand to SEQ ID NO: 1618625
uuccauacugcaaggaccu

SEQ ID NO: 1618627 - RNA, 19 nt, Artificial Sequence
  Description of Artificial Sequence: Synthetic oligonucleotide
  Sense strand starting at position 3877 of SEQ ID NO: 1560704
gaaggagaaucguuggauc

SEQ ID NO: 1618628 - RNA, 19 nt, Artificial Sequence
  Description of Artificial Sequence: Synthetic oligonucleotide
  Antisense strand to SEQ ID NO: 1618627
gauccaacgauucuccuuc

SEQ ID NO: 1618629 - RNA, 19 nt, Artificial Sequence
  Description of Artificial Sequence: Synthetic oligonucleotide
  Sense strand starting at position 3879 of SEQ ID NO: 1560704
aggagaaucguuggaucca

SEQ ID NO: 1618630 - RNA, 19 nt, Artificial Sequence
  Description of Artificial Sequence: Synthetic oligonucleotide
  Antisense strand to SEQ ID NO: 1618629
uggauccaacgauucuccu

SEQ ID NO: 1618631 - RNA, 19 nt, Artificial Sequence
  Description of Artificial Sequence: Synthetic oligonucleotide
  Sense strand starting at position 3880 of SEQ ID NO: 1560704
ggagaaucguuggauccag

SEQ ID NO: 1618632 - RNA, 19 nt, Artificial Sequence
  Description of Artificial Sequence: Synthetic oligonucleotide
  Antisense strand to SEQ ID NO: 1618631
cuggauccaacgauucucc

SEQ ID NO: 1618633 - RNA, 19 nt, Artificial Sequence
  Description of Artificial Sequence: Synthetic oligonucleotide
  Sense strand starting at position 3896 of SEQ ID NO: 1560704
cagacuugguuccacugau

SEQ ID NO: 1618634 - RNA, 19 nt, Artificial Sequence
  Description of Artificial Sequence: Synthetic oligonucleotide
  Antisense strand to SEQ ID NO: 1618633
aucaguggaaccaagucug

SEQ ID NO: 1618635 - RNA, 19 nt, Artificial Sequence
  Description of Artificial Sequence: Synthetic oligonucleotide
  Sense strand starting at position 250 of SEQ ID NO: 1560705
caagcuugugccugcugaa

SEQ ID NO: 1618636 - RNA, 19 nt, Artificial Sequence
  Description of Artificial Sequence: Synthetic oligonucleotide
  Antisense strand to SEQ ID NO: 1618635
uucagcaggcacaagcuug

SEQ ID NO: 1618637 - RNA, 19 nt, Artificial Sequence
  Description of Artificial Sequence: Synthetic oligonucleotide
  Sense strand starting at position 307 of SEQ ID NO: 1560705
cugcuccauccuugucaua

SEQ ID NO: 1618638 - RNA, 19 nt, Artificial Sequence
  Description of Artificial Sequence: Synthetic oligonucleotide
  Antisense strand to SEQ ID NO: 1618637
uaugacaaggauggagcag

SEQ ID NO: 1618639 - RNA, 19 nt, Artificial Sequence
  Description of Artificial Sequence: Synthetic oligonucleotide
  Sense strand starting at position 309 of SEQ ID NO: 1560705
gcuccauccuugucauaug

SEQ ID NO: 1618640 - RNA, 19 nt, Artificial Sequence
  Description of Artificial Sequence: Synthetic oligonucleotide
  Antisense strand to SEQ ID NO: 1618639
cauaugacaaggauggagc

SEQ ID NO: 1618641 - RNA, 19 nt, Artificial Sequence
  Description of Artificial Sequence: Synthetic oligonucleotide
  Sense strand starting at position 310 of SEQ ID NO: 1560705
cuccauccuugucauauga

SEQ ID NO: 1618642 - RNA, 19 nt, Artificial Sequence
  Description of Artificial Sequence: Synthetic oligonucleotide
  Antisense strand to SEQ ID NO: 1618641
ucauaugacaaggauggag

SEQ ID NO: 1618643 - RNA, 19 nt, Artificial Sequence
  Description of Artificial Sequence: Synthetic oligonucleotide
  Sense strand starting at position 373 of SEQ ID NO: 1560705
ccaaguaagucucuguuaa

SEQ ID NO: 1618644 - RNA, 19 nt, Artificial Sequence
  Description of Artificial Sequence: Synthetic oligonucleotide
  Antisense strand to SEQ ID NO: 1618643
uuaacagagacuuacuugg

SEQ ID NO: 1618645 - RNA, 19 nt, Artificial Sequence
  Description of Artificial Sequence: Synthetic oligonucleotide
  Sense strand starting at position 377 of SEQ ID NO: 1560705
guaagucucuguuaauucu

SEQ ID NO: 1618646 - RNA, 19 nt, Artificial Sequence
  Description of Artificial Sequence: Synthetic oligonucleotide
  Antisense strand to SEQ ID NO: 1618645
agaauuaacagagacuuac

SEQ ID NO: 1618647 - RNA, 19 nt, Artificial Sequence
  Description of Artificial Sequence: Synthetic oligonucleotide
  Sense strand starting at position 673 of SEQ ID NO: 1560705
ggccuuacuugggauuaca

SEQ ID NO: 1618648 - RNA, 19 nt, Artificial Sequence
  Description of Artificial Sequence: Synthetic oligonucleotide
  Antisense strand to SEQ ID NO: 1618647
uguaaucccaaguaaggcc

SEQ ID NO: 1618649 - RNA, 19 nt, Artificial Sequence
  Description of Artificial Sequence: Synthetic oligonucleotide
  Sense strand starting at position 768 of SEQ ID NO: 1560705
aggaucauuuguuguugua

SEQ ID NO: 1618650 - RNA, 19 nt, Artificial Sequence
  Description of Artificial Sequence: Synthetic oligonucleotide
  Antisense strand to SEQ ID NO: 1618649
uacaacaacaaaugauccu

SEQ ID NO: 1618651 - RNA, 19 nt, Artificial Sequence
  Description of Artificial Sequence: Synthetic oligonucleotide
  Sense strand starting at position 770 of SEQ ID NO: 1560705
gaucauuuguuguuguauc

SEQ ID NO: 1618652 - RNA, 19 nt, Artificial Sequence
  Description of Artificial Sequence: Synthetic oligonucleotide
  Antisense strand to SEQ ID NO: 1618651
gauacaacaacaaaugauc

SEQ ID NO: 1618653 - RNA, 19 nt, Artificial Sequence
  Description of Artificial Sequence: Synthetic oligonucleotide
  Sense strand starting at position 780 of SEQ ID NO: 1560705
uguuguaucuuggugucua

SEQ ID NO: 1618654 - RNA, 19 nt, Artificial Sequence
  Description of Artificial Sequence: Synthetic oligonucleotide
  Antisense strand to SEQ ID NO: 1618653
uagacaccaagauacaaca

SEQ ID NO: 1618655 - RNA, 19 nt, Artificial Sequence
  Description of Artificial Sequence: Synthetic oligonucleotide
  Sense strand starting at position 784 of SEQ ID NO: 1560705
guaucuuggugucuagaac

SEQ ID NO: 1618656 - RNA, 19 nt, Artificial Sequence
  Description of Artificial Sequence: Synthetic oligonucleotide
  Antisense strand to SEQ ID NO: 1618655
guucuagacaccaagauac

SEQ ID NO: 1618657 - RNA, 19 nt, Artificial Sequence
  Description of Artificial Sequence: Synthetic oligonucleotide
  Sense strand starting at position 785 of SEQ ID NO: 1560705
uaucuuggugucuagaaca

SEQ ID NO: 1618658 - RNA, 19 nt, Artificial Sequence
  Description of Artificial Sequence: Synthetic oligonucleotide
  Antisense strand to SEQ ID NO: 1618657
uguucuagacaccaagaua

SEQ ID NO: 1618659 - RNA, 19 nt, Artificial Sequence
  Description of Artificial Sequence: Synthetic oligonucleotide
  Sense strand starting at position 1824 of SEQ ID NO: 1560705
cuguaagcccaaggaaauu

SEQ ID NO: 1618660 - RNA, 19 nt, Artificial Sequence
  Description of Artificial Sequence: Synthetic oligonucleotide
  Antisense strand to SEQ ID NO: 1618659
aauuuccuugggcuuacag

SEQ ID NO: 1618661 - RNA, 19 nt, Artificial Sequence
  Description of Artificial Sequence: Synthetic oligonucleotide
  Sense strand starting at position 1910 of SEQ ID NO: 1560705
ccuagauaaggugguugaa

SEQ ID NO: 1618662 - RNA, 19 nt, Artificial Sequence
  Description of Artificial Sequence: Synthetic oligonucleotide
  Antisense strand to SEQ ID NO: 1618661
uucaaccaccuuaucuagg

SEQ ID NO: 1618663 - RNA, 19 nt, Artificial Sequence
  Description of Artificial Sequence: Synthetic oligonucleotide
  Sense strand starting at position 1912 of SEQ ID NO: 1560705
uagauaaggugguugaaau

SEQ ID NO: 1618664 - RNA, 19 nt, Artificial Sequence
  Description of Artificial Sequence: Synthetic oligonucleotide
  Antisense strand to SEQ ID NO: 1618663
auuucaaccaccuuaucua

SEQ ID NO: 1618665 - RNA, 19 nt, Artificial Sequence
  Description of Artificial Sequence: Synthetic oligonucleotide
  Sense strand starting at position 1936 of SEQ ID NO: 1560705
auuccaucuucucuugagu

SEQ ID NO: 1618666 - RNA, 19 nt, Artificial Sequence
  Description of Artificial Sequence: Synthetic oligonucleotide
  Antisense strand to SEQ ID NO: 1618665
acucaagagaagauggaau

SEQ ID NO: 1618667 - RNA, 19 nt, Artificial Sequence
  Description of Artificial Sequence: Synthetic oligonucleotide
  Sense strand starting at position 2066 of SEQ ID NO: 1560705
gcccuuugauuaccagaaa

SEQ ID NO: 1618668 - RNA, 19 nt, Artificial Sequence
  Description of Artificial Sequence: Synthetic oligonucleotide
  Antisense strand to SEQ ID NO: 1618667
uuucugguaaucaaagggc

SEQ ID NO: 1618669 - RNA, 19 nt, Artificial Sequence
  Description of Artificial Sequence: Synthetic oligonucleotide
  Sense strand starting at position 2092 of SEQ ID NO: 1560705
gcccuugaguacugacuga

SEQ ID NO: 1618670 - RNA, 19 nt, Artificial Sequence
  Description of Artificial Sequence: Synthetic oligonucleotide
  Antisense strand to SEQ ID NO: 1618669
ucagucaguacucaagggc

SEQ ID NO: 1618671 - RNA, 19 nt, Artificial Sequence
  Description of Artificial Sequence: Synthetic oligonucleotide
  Sense strand starting at position 2096 of SEQ ID NO: 1560705
uugaguacugacugaauau

SEQ ID NO: 1618672 - RNA, 19 nt, Artificial Sequence
  Description of Artificial Sequence: Synthetic oligonucleotide
  Antisense strand to SEQ ID NO: 1618671
auauucagucaguacucaa

SEQ ID NO: 1618673 - RNA, 19 nt, Artificial Sequence
  Description of Artificial Sequence: Synthetic oligonucleotide
  Sense strand starting at position 2107 of SEQ ID NO: 1560705
cugaauauuguaugcugaa

SEQ ID NO: 1618674 - RNA, 19 nt, Artificial Sequence
  Description of Artificial Sequence: Synthetic oligonucleotide
  Antisense strand to SEQ ID NO: 1618673
uucagcauacaauauucag

SEQ ID NO: 1618675 - RNA, 19 nt, Artificial Sequence
  Description of Artificial Sequence: Synthetic oligonucleotide
  Sense strand starting at position 2108 of SEQ ID NO: 1560705
ugaauauuguaugcugaac

SEQ ID NO: 1618676 - RNA, 19 nt, Artificial Sequence
  Description of Artificial Sequence: Synthetic oligonucleotide
  Antisense strand to SEQ ID NO: 1618675
guucagcauacaauauuca

SEQ ID NO: 1618677 - RNA, 19 nt, Artificial Sequence
  Description of Artificial Sequence: Synthetic oligonucleotide
  Sense strand starting at position 2173 of SEQ ID NO: 1560705
gacgcuucccacuggauga

SEQ ID NO: 1618678 - RNA, 19 nt, Artificial Sequence
  Description of Artificial Sequence: Synthetic oligonucleotide
  Antisense strand to SEQ ID NO: 1618677
ucauccagugggaagcguc

SEQ ID NO: 1618679 - RNA, 19 nt, Artificial Sequence
  Description of Artificial Sequence: Synthetic oligonucleotide
  Sense strand starting at position 2307 of SEQ ID NO: 1560705
ucaaauggauacucuguau

SEQ ID NO: 1618680 - RNA, 19 nt, Artificial Sequence
  Description of Artificial Sequence: Synthetic oligonucleotide
  Antisense strand to SEQ ID NO: 1618679
auacagaguauccauuuga

SEQ ID NO: 1618681 - RNA, 19 nt, Artificial Sequence
  Description of Artificial Sequence: Synthetic oligonucleotide
  Sense strand starting at position 2322 of SEQ ID NO: 1560705
guaucaugucaggaggagu

SEQ ID NO: 1618682 - RNA, 19 nt, Artificial Sequence
  Description of Artificial Sequence: Synthetic oligonucleotide
  Antisense strand to SEQ ID NO: 1618681
acuccuccugacaugauac

SEQ ID NO: 1618683 - RNA, 19 nt, Artificial Sequence
  Description of Artificial Sequence: Synthetic oligonucleotide
  Sense strand starting at position 2674 of SEQ ID NO: 1560705
guaccauuaugcccaguua

SEQ ID NO: 1618684 - RNA, 19 nt, Artificial Sequence
  Description of Artificial Sequence: Synthetic oligonucleotide
  Antisense strand to SEQ ID NO: 1618683
uaacugggcauaaugguac

SEQ ID NO: 1618685 - RNA, 19 nt, Artificial Sequence
  Description of Artificial Sequence: Synthetic oligonucleotide
  Sense strand starting at position 2939 of SEQ ID NO: 1560705
cagccucucgaguagaaua

SEQ ID NO: 1618686 - RNA, 19 nt, Artificial Sequence
  Description of Artificial Sequence: Synthetic oligonucleotide
  Antisense strand to SEQ ID NO: 1618685
uauucuacucgagaggcug

SEQ ID NO: 1618687 - RNA, 19 nt, Artificial Sequence
  Description of Artificial Sequence: Synthetic oligonucleotide
  Sense strand starting at position 2941 of SEQ ID NO: 1560705
gccucucgaguagaauagu

SEQ ID NO: 1618688 - RNA, 19 nt, Artificial Sequence
  Description of Artificial Sequence: Synthetic oligonucleotide
  Antisense strand to SEQ ID NO: 1618687
acuauucuacucgagaggc

SEQ ID NO: 1618689 - RNA, 19 nt, Artificial Sequence
  Description of Artificial Sequence: Synthetic oligonucleotide
  Sense strand starting at position 2949 of SEQ ID NO: 1560705
aguagaauaguaggcaagu

SEQ ID NO: 1618690 - RNA, 19 nt, Artificial Sequence
  Description of Artificial Sequence: Synthetic oligonucleotide
  Antisense strand to SEQ ID NO: 1618689
acuugccuacuauucuacu

SEQ ID NO: 1618691 - RNA, 19 nt, Artificial Sequence
  Description of Artificial Sequence: Synthetic oligonucleotide
  Sense strand starting at position 2966 of SEQ ID NO: 1560705
gucaccauucuuggaugau

SEQ ID NO: 1618692 - RNA, 19 nt, Artificial Sequence
  Description of Artificial Sequence: Synthetic oligonucleotide
  Antisense strand to SEQ ID NO: 1618691
aucauccaagaauggugac

SEQ ID NO: 1618693 - RNA, 19 nt, Artificial Sequence
  Description of Artificial Sequence: Synthetic oligonucleotide
  Sense strand starting at position 2967 of SEQ ID NO: 1560705
ucaccauucuuggaugauu

SEQ ID NO: 1618694 - RNA, 19 nt, Artificial Sequence
  Description of Artificial Sequence: Synthetic oligonucleotide
  Antisense strand to SEQ ID NO: 1618693
aaucauccaagaaugguga

SEQ ID NO: 1618695 - RNA, 19 nt, Artificial Sequence
  Description of Artificial Sequence: Synthetic oligonucleotide
  Sense strand starting at position 3109 of SEQ ID NO: 1560705
accaaugccuggccuauaa

SEQ ID NO: 1618696 - RNA, 19 nt, Artificial Sequence
  Description of Artificial Sequence: Synthetic oligonucleotide
  Antisense strand to SEQ ID NO: 1618695
uuauaggccaggcauuggu

SEQ ID NO: 1618697 - RNA, 19 nt, Artificial Sequence
  Description of Artificial Sequence: Synthetic oligonucleotide
  Sense strand starting at position 3145 of SEQ ID NO: 1560705
auggaaguguggaguuaag

SEQ ID NO: 1618698 - RNA, 19 nt, Artificial Sequence
  Description of Artificial Sequence: Synthetic oligonucleotide
  Antisense strand to SEQ ID NO: 1618697
cuuaacuccacacuuccau

SEQ ID NO: 1618699 - RNA, 19 nt, Artificial Sequence
  Description of Artificial Sequence: Synthetic oligonucleotide
  Sense strand starting at position 3209 of SEQ ID NO: 1560705
ggcuaagacuuguauccag

SEQ ID NO: 1618700 - RNA, 19 nt, Artificial Sequence
  Description of Artificial Sequence: Synthetic oligonucleotide
  Antisense strand to SEQ ID NO: 1618699
cuggauacaagucuuagcc

SEQ ID NO: 1618701 - RNA, 19 nt, Artificial Sequence
  Description of Artificial Sequence: Synthetic oligonucleotide
  Sense strand starting at position 3280 of SEQ ID NO: 1560705
gauggagucucauauugca

SEQ ID NO: 1618702 - RNA, 19 nt, Artificial Sequence
  Description of Artificial Sequence: Synthetic oligonucleotide
  Antisense strand to SEQ ID NO: 1618701
ugcaauaugagacuccauc

SEQ ID NO: 1618703 - RNA, 19 nt, Artificial Sequence
  Description of Artificial Sequence: Synthetic oligonucleotide
  Sense strand starting at position 3288 of SEQ ID NO: 1560705
cucauauugcagugguaca

SEQ ID NO: 1618704 - RNA, 19 nt, Artificial Sequence
  Description of Artificial Sequence: Synthetic oligonucleotide
  Antisense strand to SEQ ID NO: 1618703
uguaccacugcaauaugag

SEQ ID NO: 1618705 - RNA, 19 nt, Artificial Sequence
  Description of Artificial Sequence: Synthetic oligonucleotide
  Sense strand starting at position 3530 of SEQ ID NO: 1560705
ccgcgucuggccugaaaga

SEQ ID NO: 1618706 - RNA, 19 nt, Artificial Sequence
  Description of Artificial Sequence: Synthetic oligonucleotide
  Antisense strand to SEQ ID NO: 1618705
ucuuucaggccagacgcgg

SEQ ID NO: 1618707 - RNA, 19 nt, Artificial Sequence
  Description of Artificial Sequence: Synthetic oligonucleotide
  Sense strand starting at position 3531 of SEQ ID NO: 1560705
cgcgucuggccugaaagau

SEQ ID NO: 1618708 - RNA, 19 nt, Artificial Sequence
  Description of Artificial Sequence: Synthetic oligonucleotide
  Antisense strand to SEQ ID NO: 1618707
aucuuucaggccagacgcg

SEQ ID NO: 1618709 - RNA, 19 nt, Artificial Sequence
  Description of Artificial Sequence: Synthetic oligonucleotide
  Sense strand starting at position 3678 of SEQ ID NO: 1560705
ugacuauaagugugagcca

SEQ ID NO: 1618710 - RNA, 19 nt, Artificial Sequence
  Description of Artificial Sequence: Synthetic oligonucleotide
  Antisense strand to SEQ ID NO: 1618709
uggcucacacuuauaguca

SEQ ID NO: 1618711 - RNA, 19 nt, Artificial Sequence
  Description of Artificial Sequence: Synthetic oligonucleotide
  Sense strand starting at position 3745 of SEQ ID NO: 1560705
gagacauuguuucgcucuu

SEQ ID NO: 1618712 - RNA, 19 nt, Artificial Sequence
  Description of Artificial Sequence: Synthetic oligonucleotide
  Antisense strand to SEQ ID NO: 1618711
aagagcgaaacaaugucuc

SEQ ID NO: 1618713 - RNA, 19 nt, Artificial Sequence
  Description of Artificial Sequence: Synthetic oligonucleotide
  Sense strand starting at position 3749 of SEQ ID NO: 1560705
cauuguuucgcucuuguca

SEQ ID NO: 1618714 - RNA, 19 nt, Artificial Sequence
  Description of Artificial Sequence: Synthetic oligonucleotide
  Antisense strand to SEQ ID NO: 1618713
ugacaagagcgaaacaaug

SEQ ID NO: 1618715 - RNA, 19 nt, Artificial Sequence
  Description of Artificial Sequence: Synthetic oligonucleotide
  Sense strand starting at position 84 of SEQ ID NO: 1560706
ccacacaagugcuaugcaa

SEQ ID NO: 1618716 - RNA, 19 nt, Artificial Sequence
  Description of Artificial Sequence: Synthetic oligonucleotide
  Antisense strand to SEQ ID NO: 1618715
uugcauagcacuugugugg

SEQ ID NO: 1618717 - RNA, 19 nt, Artificial Sequence
  Description of Artificial Sequence: Synthetic oligonucleotide
  Sense strand starting at position 86 of SEQ ID NO: 1560706
acacaagugcuaugcaaau

SEQ ID NO: 1618718 - RNA, 19 nt, Artificial Sequence
  Description of Artificial Sequence: Synthetic oligonucleotide
  Antisense strand to SEQ ID NO: 1618717
auuugcauagcacuugugu

SEQ ID NO: 1618719 - RNA, 19 nt, Artificial Sequence
  Description of Artificial Sequence: Synthetic oligonucleotide
  Sense strand starting at position 450 of SEQ ID NO: 1560706
caagcuugugccugcugaa

SEQ ID NO: 1618720 - RNA, 19 nt, Artificial Sequence
  Description of Artificial Sequence: Synthetic oligonucleotide
  Antisense strand to SEQ ID NO: 1618719
uucagcaggcacaagcuug

SEQ ID NO: 1618721 - RNA, 19 nt, Artificial Sequence
  Description of Artificial Sequence: Synthetic oligonucleotide
  Sense strand starting at position 507 of SEQ ID NO: 1560706
cugcuccauccuugucaua

SEQ ID NO: 1618722 - RNA, 19 nt, Artificial Sequence
  Description of Artificial Sequence: Synthetic oligonucleotide
  Antisense strand to SEQ ID NO: 1618721
uaugacaaggauggagcag

SEQ ID NO: 1618723 - RNA, 19 nt, Artificial Sequence
  Description of Artificial Sequence: Synthetic oligonucleotide
  Sense strand starting at position 509 of SEQ ID NO: 1560706
gcuccauccuugucauaug

SEQ ID NO: 1618724 - RNA, 19 nt, Artificial Sequence
  Description of Artificial Sequence: Synthetic oligonucleotide
  Antisense strand to SEQ ID NO: 1618723
cauaugacaaggauggagc

SEQ ID NO: 1618725 - RNA, 19 nt, Artificial Sequence
  Description of Artificial Sequence: Synthetic oligonucleotide
  Sense strand starting at position 510 of SEQ ID NO: 1560706
cuccauccuugucauauga

SEQ ID NO: 1618726 - RNA, 19 nt, Artificial Sequence
  Description of Artificial Sequence: Synthetic oligonucleotide
  Antisense strand to SEQ ID NO: 1618725
ucauaugacaaggauggag

SEQ ID NO: 1618727 - RNA, 19 nt, Artificial Sequence
  Description of Artificial Sequence: Synthetic oligonucleotide
  Sense strand starting at position 573 of SEQ ID NO: 1560706
ccaaguaagucucuguuaa

SEQ ID NO: 1618728 - RNA, 19 nt, Artificial Sequence
  Description of Artificial Sequence: Synthetic oligonucleotide
  Antisense strand to SEQ ID NO: 1618727
uuaacagagacuuacuugg

SEQ ID NO: 1618729 - RNA, 19 nt, Artificial Sequence
  Description of Artificial Sequence: Synthetic oligonucleotide
  Sense strand starting at position 577 of SEQ ID NO: 1560706
guaagucucuguuaauucu

SEQ ID NO: 1618730 - RNA, 19 nt, Artificial Sequence
  Description of Artificial Sequence: Synthetic oligonucleotide
  Antisense strand to SEQ ID NO: 1618729
agaauuaacagagacuuac

SEQ ID NO: 1618731 - RNA, 19 nt, Artificial Sequence
  Description of Artificial Sequence: Synthetic oligonucleotide
  Sense strand starting at position 873 of SEQ ID NO: 1560706
ggccuuacuugggauuaca

SEQ ID NO: 1618732 - RNA, 19 nt, Artificial Sequence
  Description of Artificial Sequence: Synthetic oligonucleotide
  Antisense strand to SEQ ID NO: 1618731
uguaaucccaaguaaggcc

SEQ ID NO: 1618733 - RNA, 19 nt, Artificial Sequence
  Description of Artificial Sequence: Synthetic oligonucleotide
  Sense strand starting at position 968 of SEQ ID NO: 1560706
aggaucauuuguuguugua

SEQ ID NO: 1618734 - RNA, 19 nt, Artificial Sequence
  Description of Artificial Sequence: Synthetic oligonucleotide
  Antisense strand to SEQ ID NO: 1618733
uacaacaacaaaugauccu

SEQ ID NO: 1618735 - RNA, 19 nt, Artificial Sequence
  Description of Artificial Sequence: Synthetic oligonucleotide
  Sense strand starting at position 970 of SEQ ID NO: 1560706
gaucauuuguuguuguauc

SEQ ID NO: 1618736 - RNA, 19 nt, Artificial Sequence
  Description of Artificial Sequence: Synthetic oligonucleotide
  Antisense strand to SEQ ID NO: 1618735
gauacaacaacaaaugauc

SEQ ID NO: 1618737 - RNA, 19 nt, Artificial Sequence
  Description of Artificial Sequence: Synthetic oligonucleotide
  Sense strand starting at position 980 of SEQ ID NO: 1560706
uguuguaucuuggugucua

SEQ ID NO: 1618738 - RNA, 19 nt, Artificial Sequence
  Description of Artificial Sequence: Synthetic oligonucleotide
  Antisense strand to SEQ ID NO: 1618737
uagacaccaagauacaaca

SEQ ID NO: 1618739 - RNA, 19 nt, Artificial Sequence
  Description of Artificial Sequence: Synthetic oligonucleotide
  Sense strand starting at position 984 of SEQ ID NO: 1560706
guaucuuggugucuagaac

SEQ ID NO: 1618740 - RNA, 19 nt, Artificial Sequence
  Description of Artificial Sequence: Synthetic oligonucleotide
  Antisense strand to SEQ ID NO: 1618739
guucuagacaccaagauac

SEQ ID NO: 1618741 - RNA, 19 nt, Artificial Sequence
  Description of Artificial Sequence: Synthetic oligonucleotide
  Sense strand starting at position 985 of SEQ ID NO: 1560706
uaucuuggugucuagaaca

SEQ ID NO: 1618742 - RNA, 19 nt, Artificial Sequence
  Description of Artificial Sequence: Synthetic oligonucleotide
  Antisense strand to SEQ ID NO: 1618741
uguucuagacaccaagaua

SEQ ID NO: 1618743 - RNA, 19 nt, Artificial Sequence
  Description of Artificial Sequence: Synthetic oligonucleotide
  Sense strand starting at position 2024 of SEQ ID NO: 1560706
cuguaagcccaaggaaauu

SEQ ID NO: 1618744 - RNA, 19 nt, Artificial Sequence
  Description of Artificial Sequence: Synthetic oligonucleotide
  Antisense strand to SEQ ID NO: 1618743
aauuuccuugggcuuacag

SEQ ID NO: 1618745 - RNA, 19 nt, Artificial Sequence
  Description of Artificial Sequence: Synthetic oligonucleotide
  Sense strand starting at position 2110 of SEQ ID NO: 1560706
ccuagauaaggugguugaa

SEQ ID NO: 1618746 - RNA, 19 nt, Artificial Sequence
  Description of Artificial Sequence: Synthetic oligonucleotide
  Antisense strand to SEQ ID NO: 1618745
uucaaccaccuuaucuagg

SEQ ID NO: 1618747 - RNA, 19 nt, Artificial Sequence
  Description of Artificial Sequence: Synthetic oligonucleotide
  Sense strand starting at position 2112 of SEQ ID NO: 1560706
uagauaaggugguugaaau

SEQ ID NO: 1618748 - RNA, 19 nt, Artificial Sequence
  Description of Artificial Sequence: Synthetic oligonucleotide
  Antisense strand to SEQ ID NO: 1618747
auuucaaccaccuuaucua

SEQ ID NO: 1618749 - RNA, 19 nt, Artificial Sequence
  Description of Artificial Sequence: Synthetic oligonucleotide
  Sense strand starting at position 2136 of SEQ ID NO: 1560706
auuccaucuucucuugagu

SEQ ID NO: 1618750 - RNA, 19 nt, Artificial Sequence
  Description of Artificial Sequence: Synthetic oligonucleotide
  Antisense strand to SEQ ID NO: 1618749
acucaagagaagauggaau

SEQ ID NO: 1618751 - RNA, 19 nt, Artificial Sequence
  Description of Artificial Sequence: Synthetic oligonucleotide
  Sense strand starting at position 2266 of SEQ ID NO: 1560706
gcccuuugauuaccagaaa

SEQ ID NO: 1618752 - RNA, 19 nt, Artificial Sequence
  Description of Artificial Sequence: Synthetic oligonucleotide
  Antisense strand to SEQ ID NO: 1618751
uuucugguaaucaaagggc

SEQ ID NO: 1618753 - RNA, 19 nt, Artificial Sequence
  Description of Artificial Sequence: Synthetic oligonucleotide
  Sense strand starting at position 2296 of SEQ ID NO: 1560706
uugaguacugacugaauau

SEQ ID NO: 1618754 - RNA, 19 nt, Artificial Sequence
  Description of Artificial Sequence: Synthetic oligonucleotide
  Antisense strand to SEQ ID NO: 1618753
auauucagucaguacucaa

SEQ ID NO: 1618755 - RNA, 19 nt, Artificial Sequence
  Description of Artificial Sequence: Synthetic oligonucleotide
  Sense strand starting at position 2307 of SEQ ID NO: 1560706
cugaauauuguaugcugaa

SEQ ID NO: 1618756 - RNA, 19 nt, Artificial Sequence
  Description of Artificial Sequence: Synthetic oligonucleotide
  Antisense strand to SEQ ID NO: 1618755
uucagcauacaauauucag

SEQ ID NO: 1618757 - RNA, 19 nt, Artificial Sequence
  Description of Artificial Sequence: Synthetic oligonucleotide
  Sense strand starting at position 2308 of SEQ ID NO: 1560706
ugaauauuguaugcugaac

SEQ ID NO: 1618758 - RNA, 19 nt, Artificial Sequence
  Description of Artificial Sequence: Synthetic oligonucleotide
  Antisense strand to SEQ ID NO: 1618757
guucagcauacaauauuca

SEQ ID NO: 1618759 - RNA, 19 nt, Artificial Sequence
  Description of Artificial Sequence: Synthetic oligonucleotide
  Sense strand starting at position 2373 of SEQ ID NO: 1560706
gacgcuucccacuggauga

SEQ ID NO: 1618760 - RNA, 19 nt, Artificial Sequence
  Description of Artificial Sequence: Synthetic oligonucleotide
  Antisense strand to SEQ ID NO: 1618759
ucauccagugggaagcguc

SEQ ID NO: 1618761 - RNA, 19 nt, Artificial Sequence
  Description of Artificial Sequence: Synthetic oligonucleotide
  Sense strand starting at position 2507 of SEQ ID NO: 1560706
ucaaauggauacucuguau

SEQ ID NO: 1618762 - RNA, 19 nt, Artificial Sequence
  Description of Artificial Sequence: Synthetic oligonucleotide
  Antisense strand to SEQ ID NO: 1618761
auacagaguauccauuuga

SEQ ID NO: 1618763 - RNA, 19 nt, Artificial Sequence
  Description of Artificial Sequence: Synthetic oligonucleotide
  Sense strand starting at position 2522 of SEQ ID NO: 1560706
guaucaugucaggaggagu

SEQ ID NO: 1618764 - RNA, 19 nt, Artificial Sequence
  Description of Artificial Sequence: Synthetic oligonucleotide
  Antisense strand to SEQ ID NO: 1618763
acuccuccugacaugauac

SEQ ID NO: 1618765 - RNA, 19 nt, Artificial Sequence
  Description of Artificial Sequence: Synthetic oligonucleotide
  Sense strand starting at position 2874 of SEQ ID NO: 1560706
guaccauuaugcccaguua

SEQ ID NO: 1618766 - RNA, 19 nt, Artificial Sequence
  Description of Artificial Sequence: Synthetic oligonucleotide
  Antisense strand to SEQ ID NO: 1618765
uaacugggcauaaugguac

SEQ ID NO: 1618767 - RNA, 19 nt, Artificial Sequence
  Description of Artificial Sequence: Synthetic oligonucleotide
  Sense strand starting at position 3139 of SEQ ID NO: 1560706
cagccucucgaguagaaua

SEQ ID NO: 1618768 - RNA, 19 nt, Artificial Sequence
  Description of Artificial Sequence: Synthetic oligonucleotide
  Antisense strand to SEQ ID NO: 1618767
uauucuacucgagaggcug

SEQ ID NO: 1618769 - RNA, 19 nt, Artificial Sequence
  Description of Artificial Sequence: Synthetic oligonucleotide
  Sense strand starting at position 3141 of SEQ ID NO: 1560706
gccucucgaguagaauagu

SEQ ID NO: 1618770 - RNA, 19 nt, Artificial Sequence
  Description of Artificial Sequence: Synthetic oligonucleotide
  Antisense strand to SEQ ID NO: 1618769
acuauucuacucgagaggc

SEQ ID NO: 1618771 - RNA, 19 nt, Artificial Sequence
  Description of Artificial Sequence: Synthetic oligonucleotide
  Sense strand starting at position 3149 of SEQ ID NO: 1560706
aguagaauaguaggcaagu

SEQ ID NO: 1618772 - RNA, 19 nt, Artificial Sequence
  Description of Artificial Sequence: Synthetic oligonucleotide
  Antisense strand to SEQ ID NO: 1618771
acuugccuacuauucuacu

SEQ ID NO: 1618773 - RNA, 19 nt, Artificial Sequence
  Description of Artificial Sequence: Synthetic oligonucleotide
  Sense strand starting at position 3166 of SEQ ID NO: 1560706
gucaccauucuuggaugau

SEQ ID NO: 1618774 - RNA, 19 nt, Artificial Sequence
  Description of Artificial Sequence: Synthetic oligonucleotide
  Antisense strand to SEQ ID NO: 1618773
aucauccaagaauggugac

SEQ ID NO: 1618775 - RNA, 19 nt, Artificial Sequence
  Description of Artificial Sequence: Synthetic oligonucleotide
  Sense strand starting at position 3167 of SEQ ID NO: 1560706
ucaccauucuuggaugauu

SEQ ID NO: 1618776 - RNA, 19 nt, Artificial Sequence
  Description of Artificial Sequence: Synthetic oligonucleotide
  Antisense strand to SEQ ID NO: 1618775
aaucauccaagaaugguga

SEQ ID NO: 1618777 - RNA, 19 nt, Artificial Sequence
  Description of Artificial Sequence: Synthetic oligonucleotide
  Sense strand starting at position 3309 of SEQ ID NO: 1560706
accaaugccuggccuauaa

SEQ ID NO: 1618778 - RNA, 19 nt, Artificial Sequence
  Description of Artificial Sequence: Synthetic oligonucleotide
  Antisense strand to SEQ ID NO: 1618777
uuauaggccaggcauuggu

SEQ ID NO: 1618779 - RNA, 19 nt, Artificial Sequence
  Description of Artificial Sequence: Synthetic oligonucleotide
  Sense strand starting at position 3345 of SEQ ID NO: 1560706
auggaaguguggaguuaag

SEQ ID NO: 1618780 - RNA, 19 nt, Artificial Sequence
  Description of Artificial Sequence: Synthetic oligonucleotide
  Antisense strand to SEQ ID NO: 1618779
cuuaacuccacacuuccau

SEQ ID NO: 1618781 - RNA, 19 nt, Artificial Sequence
  Description of Artificial Sequence: Synthetic oligonucleotide
  Sense strand starting at position 3409 of SEQ ID NO: 1560706
ggcuaagacuuguauccag

SEQ ID NO: 1618782 - RNA, 19 nt, Artificial Sequence
  Description of Artificial Sequence: Synthetic oligonucleotide
  Antisense strand to SEQ ID NO: 1618781
cuggauacaagucuuagcc

SEQ ID NO: 1618783 - RNA, 19 nt, Artificial Sequence
  Description of Artificial Sequence: Synthetic oligonucleotide
  Sense strand starting at position 3480 of SEQ ID NO: 1560706
gauggagucucauauugca

SEQ ID NO: 1618784 - RNA, 19 nt, Artificial Sequence
  Description of Artificial Sequence: Synthetic oligonucleotide
  Antisense strand to SEQ ID NO: 1618783
ugcaauaugagacuccauc

SEQ ID NO: 1618785 - RNA, 19 nt, Artificial Sequence
  Description of Artificial Sequence: Synthetic oligonucleotide
  Sense strand starting at position 3488 of SEQ ID NO: 1560706
cucauauugcagugguaca

SEQ ID NO: 1618786 - RNA, 19 nt, Artificial Sequence
  Description of Artificial Sequence: Synthetic oligonucleotide
  Antisense strand to SEQ ID NO: 1618785
uguaccacugcaauaugag

SEQ ID NO: 1618787 - RNA, 19 nt, Artificial Sequence
  Description of Artificial Sequence: Synthetic oligonucleotide
  Sense strand starting at position 3730 of SEQ ID NO: 1560706
ccgcgucuggccugaaaga

SEQ ID NO: 1618788 - RNA, 19 nt, Artificial Sequence
  Description of Artificial Sequence: Synthetic oligonucleotide
  Antisense strand to SEQ ID NO: 1618787
ucuuucaggccagacgcgg

SEQ ID NO: 1618789 - RNA, 19 nt, Artificial Sequence
  Description of Artificial Sequence: Synthetic oligonucleotide
  Sense strand starting at position 3731 of SEQ ID NO: 1560706
cgcgucuggccugaaagau

SEQ ID NO: 1618790 - RNA, 19 nt, Artificial Sequence
  Description of Artificial Sequence: Synthetic oligonucleotide
  Antisense strand to SEQ ID NO: 1618789
aucuuucaggccagacgcg

SEQ ID NO: 1618791 - RNA, 19 nt, Artificial Sequence
  Description of Artificial Sequence: Synthetic oligonucleotide
  Sense strand starting at position 3878 of SEQ ID NO: 1560706
ugacuauaagugugagcca

SEQ ID NO: 1618792 - RNA, 19 nt, Artificial Sequence
  Description of Artificial Sequence: Synthetic oligonucleotide
  Antisense strand to SEQ ID NO: 1618791
uggcucacacuuauaguca

SEQ ID NO: 1618793 - RNA, 19 nt, Artificial Sequence
  Description of Artificial Sequence: Synthetic oligonucleotide
  Sense strand starting at position 3949 of SEQ ID NO: 1560706
cauuguuucgcucuuguca

SEQ ID NO: 1618794 - RNA, 19 nt, Artificial Sequence
  Description of Artificial Sequence: Synthetic oligonucleotide
  Antisense strand to SEQ ID NO: 1618793
ugacaagagcgaaacaaug

SEQ ID NO: 1618795 - RNA, 19 nt, Artificial Sequence
  Description of Artificial Sequence: Synthetic oligonucleotide
  Sense strand starting at position 14 of SEQ ID NO: 1560707
gcgguaccuacgugucuuu

SEQ ID NO: 1618796 - RNA, 19 nt, Artificial Sequence
  Description of Artificial Sequence: Synthetic oligonucleotide
  Antisense strand to SEQ ID NO: 1618795
aaagacacguagguaccgc

SEQ ID NO: 1618797 - RNA, 19 nt, Artificial Sequence
  Description of Artificial Sequence: Synthetic oligonucleotide
  Sense strand starting at position 21 of SEQ ID NO: 1560707
cuacgugucuuuguggaga

SEQ ID NO: 1618798 - RNA, 19 nt, Artificial Sequence
  Description of Artificial Sequence: Synthetic oligonucleotide
  Antisense strand to SEQ ID NO: 1618797
ucuccacaaagacacguag

SEQ ID NO: 1618799 - RNA, 19 nt, Artificial Sequence
  Description of Artificial Sequence: Synthetic oligonucleotide
  Sense strand starting at position 23 of SEQ ID NO: 1560707
acgugucuuuguggagaag

SEQ ID NO: 1618800 - RNA, 19 nt, Artificial Sequence
  Description of Artificial Sequence: Synthetic oligonucleotide
  Antisense strand to SEQ ID NO: 1618799
cuucuccacaaagacacgu

SEQ ID NO: 1618801 - RNA, 19 nt, Artificial Sequence
  Description of Artificial Sequence: Synthetic oligonucleotide
  Sense strand starting at position 669 of SEQ ID NO: 1560707
gggugaaaguaacaagaaa

SEQ ID NO: 1618802 - RNA, 19 nt, Artificial Sequence
  Description of Artificial Sequence: Synthetic oligonucleotide
  Antisense strand to SEQ ID NO: 1618801
uuucuuguuacuuucaccc

SEQ ID NO: 1618803 - RNA, 19 nt, Artificial Sequence
  Description of Artificial Sequence: Synthetic oligonucleotide
  Sense strand starting at position 693 of SEQ ID NO: 1560707
guuauaauguaucaacguu

SEQ ID NO: 1618804 - RNA, 19 nt, Artificial Sequence
  Description of Artificial Sequence: Synthetic oligonucleotide
  Antisense strand to SEQ ID NO: 1618803
aacguugauacauuauaac

SEQ ID NO: 1618805 - RNA, 19 nt, Artificial Sequence
  Description of Artificial Sequence: Synthetic oligonucleotide
  Sense strand starting at position 1140 of SEQ ID NO: 1560707
gccgccuucguccgggaaa

SEQ ID NO: 1618806 - RNA, 19 nt, Artificial Sequence
  Description of Artificial Sequence: Synthetic oligonucleotide
  Antisense strand to SEQ ID NO: 1618805
uuucccggacgaaggcggc

SEQ ID NO: 1618807 - RNA, 19 nt, Artificial Sequence
  Description of Artificial Sequence: Synthetic oligonucleotide
  Sense strand starting at position 2360 of SEQ ID NO: 1560707
gcggcugucguccaggaaa

SEQ ID NO: 1618808 - RNA, 19 nt, Artificial Sequence
  Description of Artificial Sequence: Synthetic oligonucleotide
  Antisense strand to SEQ ID NO: 1618807
uuuccuggacgacagccgc

SEQ ID NO: 1618809 - RNA, 19 nt, Artificial Sequence
  Description of Artificial Sequence: Synthetic oligonucleotide
  Sense strand starting at position 2440 of SEQ ID NO: 1560707
ugucaauggugaccucaga

SEQ ID NO: 1618810 - RNA, 19 nt, Artificial Sequence
  Description of Artificial Sequence: Synthetic oligonucleotide
  Antisense strand to SEQ ID NO: 1618809
ucugaggucaccauugaca

SEQ ID NO: 1618811 - RNA, 19 nt, Artificial Sequence
  Description of Artificial Sequence: Synthetic oligonucleotide
  Sense strand starting at position 2722 of SEQ ID NO: 1560707
acacgaauguggugugcau

SEQ ID NO: 1618812 - RNA, 19 nt, Artificial Sequence
  Description of Artificial Sequence: Synthetic oligonucleotide
  Antisense strand to SEQ ID NO: 1618811
augcacaccacauucgugu

SEQ ID NO: 1618813 - RNA, 19 nt, Artificial Sequence
  Description of Artificial Sequence: Synthetic oligonucleotide
  Sense strand starting at position 2764 of SEQ ID NO: 1560707
ugaggaugguccugguuga

SEQ ID NO: 1618814 - RNA, 19 nt, Artificial Sequence
  Description of Artificial Sequence: Synthetic oligonucleotide
  Antisense strand to SEQ ID NO: 1618813
ucaaccaggaccauccuca

SEQ ID NO: 1618815 - RNA, 19 nt, Artificial Sequence
  Description of Artificial Sequence: Synthetic oligonucleotide
  Sense strand starting at position 3088 of SEQ ID NO: 1560707
ugacuaggaguuugucaca

SEQ ID NO: 1618816 - RNA, 19 nt, Artificial Sequence
  Description of Artificial Sequence: Synthetic oligonucleotide
  Antisense strand to SEQ ID NO: 1618815
ugugacaaacuccuaguca

SEQ ID NO: 1618817 - RNA, 19 nt, Artificial Sequence
  Description of Artificial Sequence: Synthetic oligonucleotide
  Sense strand starting at position 3091 of SEQ ID NO: 1560707
cuaggaguuugucacauaa

SEQ ID NO: 1618818 - RNA, 19 nt, Artificial Sequence
  Description of Artificial Sequence: Synthetic oligonucleotide
  Antisense strand to SEQ ID NO: 1618817
uuaugugacaaacuccuag

SEQ ID NO: 1618819 - RNA, 19 nt, Artificial Sequence
  Description of Artificial Sequence: Synthetic oligonucleotide
  Sense strand starting at position 3733 of SEQ ID NO: 1560707
agacgaugguccaggaagu

SEQ ID NO: 1618820 - RNA, 19 nt, Artificial Sequence
  Description of Artificial Sequence: Synthetic oligonucleotide
  Antisense strand to SEQ ID NO: 1618819
acuuccuggaccaucgucu

SEQ ID NO: 1618821 - RNA, 19 nt, Artificial Sequence
  Description of Artificial Sequence: Synthetic oligonucleotide
  Sense strand starting at position 3751 of SEQ ID NO: 1560707
ugggaauggcuugagcagu

SEQ ID NO: 1618822 - RNA, 19 nt, Artificial Sequence
  Description of Artificial Sequence: Synthetic oligonucleotide
  Antisense strand to SEQ ID NO: 1618821
acugcucaagccauuccca

SEQ ID NO: 1618823 - RNA, 19 nt, Artificial Sequence
  Description of Artificial Sequence: Synthetic oligonucleotide
  Sense strand starting at position 3752 of SEQ ID NO: 1560707
gggaauggcuugagcaguu

SEQ ID NO: 1618824 - RNA, 19 nt, Artificial Sequence
  Description of Artificial Sequence: Synthetic oligonucleotide
  Antisense strand to SEQ ID NO: 1618823
aacugcucaagccauuccc

SEQ ID NO: 1618825 - RNA, 19 nt, Artificial Sequence
  Description of Artificial Sequence: Synthetic oligonucleotide
  Sense strand starting at position 3762 of SEQ ID NO: 1560707
ugagcaguucugggagcuu

SEQ ID NO: 1618826 - RNA, 19 nt, Artificial Sequence
  Description of Artificial Sequence: Synthetic oligonucleotide
  Antisense strand to SEQ ID NO: 1618825
aagcucccagaacugcuca

SEQ ID NO: 1618827 - RNA, 19 nt, Artificial Sequence
  Description of Artificial Sequence: Synthetic oligonucleotide
  Sense strand starting at position 3874 of SEQ ID NO: 1560707
ggcucauucugcuuccagu

SEQ ID NO: 1618828 - RNA, 19 nt, Artificial Sequence
  Description of Artificial Sequence: Synthetic oligonucleotide
  Antisense strand to SEQ ID NO: 1618827
acuggaagcagaaugagcc

SEQ ID NO: 1618829 - RNA, 19 nt, Artificial Sequence
  Description of Artificial Sequence: Synthetic oligonucleotide
  Sense strand starting at position 3880 of SEQ ID NO: 1560707
uucugcuuccagugagaac

SEQ ID NO: 1618830 - RNA, 19 nt, Artificial Sequence
  Description of Artificial Sequence: Synthetic oligonucleotide
  Antisense strand to SEQ ID NO: 1618829
guucucacuggaagcagaa

SEQ ID NO: 1618831 - RNA, 19 nt, Artificial Sequence
  Description of Artificial Sequence: Synthetic oligonucleotide
  Sense strand starting at position 3883 of SEQ ID NO: 1560707
ugcuuccagugagaacaaa

SEQ ID NO: 1618832 - RNA, 19 nt, Artificial Sequence
  Description of Artificial Sequence: Synthetic oligonucleotide
  Antisense strand to SEQ ID NO: 1618831
uuuguucucacuggaagca

SEQ ID NO: 1618833 - RNA, 19 nt, Artificial Sequence
  Description of Artificial Sequence: Synthetic oligonucleotide
  Sense strand starting at position 3918 of SEQ ID NO: 1560707
guggacuggugccaaauga

SEQ ID NO: 1618834 - RNA, 19 nt, Artificial Sequence
  Description of Artificial Sequence: Synthetic oligonucleotide
  Antisense strand to SEQ ID NO: 1618833
ucauuuggcaccaguccac

SEQ ID NO: 1618835 - RNA, 19 nt, Artificial Sequence
  Description of Artificial Sequence: Synthetic oligonucleotide
  Sense strand starting at position 39 of SEQ ID NO: 1560708
ucugaagggugaccauuaa

SEQ ID NO: 1618836 - RNA, 19 nt, Artificial Sequence
  Description of Artificial Sequence: Synthetic oligonucleotide
  Antisense strand to SEQ ID NO: 1618835
uuaauggucacccuucaga

SEQ ID NO: 1618837 - RNA, 19 nt, Artificial Sequence
  Description of Artificial Sequence: Synthetic oligonucleotide
  Sense strand starting at position 222 of SEQ ID NO: 1560708
ucugcaucccuguaggaga

SEQ ID NO: 1618838 - RNA, 19 nt, Artificial Sequence
  Description of Artificial Sequence: Synthetic oligonucleotide
  Antisense strand to SEQ ID NO: 1618837
ucuccuacagggaugcaga

SEQ ID NO: 1618839 - RNA, 19 nt, Artificial Sequence
  Description of Artificial Sequence: Synthetic oligonucleotide
  Sense strand starting at position 457 of SEQ ID NO: 1560708
gggagucugacuugugcca

SEQ ID NO: 1618840 - RNA, 19 nt, Artificial Sequence
  Description of Artificial Sequence: Synthetic oligonucleotide
  Antisense strand to SEQ ID NO: 1618839
uggcacaagucagacuccc

SEQ ID NO: 1618841 - RNA, 19 nt, Artificial Sequence
  Description of Artificial Sequence: Synthetic oligonucleotide
  Sense strand starting at position 506 of SEQ ID NO: 1560708
guguguugcccagauucca

SEQ ID NO: 1618842 - RNA, 19 nt, Artificial Sequence
  Description of Artificial Sequence: Synthetic oligonucleotide
  Antisense strand to SEQ ID NO: 1618841
uggaaucugggcaacacac

SEQ ID NO: 1618843 - RNA, 19 nt, Artificial Sequence
  Description of Artificial Sequence: Synthetic oligonucleotide
  Sense strand starting at position 650 of SEQ ID NO: 1560708
acuaauucucgaugaagga

SEQ ID NO: 1618844 - RNA, 19 nt, Artificial Sequence
  Description of Artificial Sequence: Synthetic oligonucleotide
  Antisense strand to SEQ ID NO: 1618843
uccuucaucgagaauuagu

SEQ ID NO: 1618845 - RNA, 19 nt, Artificial Sequence
  Description of Artificial Sequence: Synthetic oligonucleotide
  Sense strand starting at position 944 of SEQ ID NO: 1560708
guaacuucugcgcacagaa

SEQ ID NO: 1618846 - RNA, 19 nt, Artificial Sequence
  Description of Artificial Sequence: Synthetic oligonucleotide
  Antisense strand to SEQ ID NO: 1618845
uucugugcgcagaaguuac

SEQ ID NO: 1618847 - RNA, 19 nt, Artificial Sequence
  Description of Artificial Sequence: Synthetic oligonucleotide
  Sense strand starting at position 1110 of SEQ ID NO: 1560708
aagcgaaaguuucuuccuu

SEQ ID NO: 1618848 - RNA, 19 nt, Artificial Sequence
  Description of Artificial Sequence: Synthetic oligonucleotide
  Antisense strand to SEQ ID NO: 1618847
aaggaagaaacuuucgcuu

SEQ ID NO: 1618849 - RNA, 19 nt, Artificial Sequence
  Description of Artificial Sequence: Synthetic oligonucleotide
  Sense strand starting at position 1154 of SEQ ID NO: 1560708
ucuguugucuuauccuaga

SEQ ID NO: 1618850 - RNA, 19 nt, Artificial Sequence
  Description of Artificial Sequence: Synthetic oligonucleotide
  Antisense strand to SEQ ID NO: 1618849
ucuaggauaagacaacaga

SEQ ID NO: 1618851 - RNA, 19 nt, Artificial Sequence
  Description of Artificial Sequence: Synthetic oligonucleotide
  Sense strand starting at position 1159 of SEQ ID NO: 1560708
ugucuuauccuagacaguc

SEQ ID NO: 1618852 - RNA, 19 nt, Artificial Sequence
  Description of Artificial Sequence: Synthetic oligonucleotide
  Antisense strand to SEQ ID NO: 1618851
gacugucuaggauaagaca

SEQ ID NO: 1618853 - RNA, 19 nt, Artificial Sequence
  Description of Artificial Sequence: Synthetic oligonucleotide
  Sense strand starting at position 1309 of SEQ ID NO: 1560708
ggaggaggcuccagaagua

SEQ ID NO: 1618854 - RNA, 19 nt, Artificial Sequence
  Description of Artificial Sequence: Synthetic oligonucleotide
  Antisense strand to SEQ ID NO: 1618853
uacuucuggagccuccucc

SEQ ID NO: 1618855 - RNA, 19 nt, Artificial Sequence
  Description of Artificial Sequence: Synthetic oligonucleotide
  Sense strand starting at position 1348 of SEQ ID NO: 1560708
ugguccaacucuucugaga

SEQ ID NO: 1618856 - RNA, 19 nt, Artificial Sequence
  Description of Artificial Sequence: Synthetic oligonucleotide
  Antisense strand to SEQ ID NO: 1618855
ucucagaagaguuggacca

SEQ ID NO: 1618857 - RNA, 19 nt, Artificial Sequence
  Description of Artificial Sequence: Synthetic oligonucleotide
  Sense strand starting at position 1434 of SEQ ID NO: 1560708
ccgcgucgggaguucaaau

SEQ ID NO: 1618858 - RNA, 19 nt, Artificial Sequence
  Description of Artificial Sequence: Synthetic oligonucleotide
  Antisense strand to SEQ ID NO: 1618857
auuugaacucccgacgcgg

SEQ ID NO: 1618859 - RNA, 19 nt, Artificial Sequence
  Description of Artificial Sequence: Synthetic oligonucleotide
  Sense strand starting at position 2333 of SEQ ID NO: 1560708
ggcugcucgcuguuaauac

SEQ ID NO: 1618860 - RNA, 19 nt, Artificial Sequence
  Description of Artificial Sequence: Synthetic oligonucleotide
  Antisense strand to SEQ ID NO: 1618859
guauuaacagcgagcagcc

SEQ ID NO: 1618861 - RNA, 19 nt, Artificial Sequence
  Description of Artificial Sequence: Synthetic oligonucleotide
  Sense strand starting at position 2396 of SEQ ID NO: 1560708
cccagagugucagugauag

SEQ ID NO: 1618862 - RNA, 19 nt, Artificial Sequence
  Description of Artificial Sequence: Synthetic oligonucleotide
  Antisense strand to SEQ ID NO: 1618861
cuaucacugacacucuggg

SEQ ID NO: 1618863 - RNA, 19 nt, Artificial Sequence
  Description of Artificial Sequence: Synthetic oligonucleotide
  Sense strand starting at position 2398 of SEQ ID NO: 1560708
cagagugucagugauagag

SEQ ID NO: 1618864 - RNA, 19 nt, Artificial Sequence
  Description of Artificial Sequence: Synthetic oligonucleotide
  Antisense strand to SEQ ID NO: 1618863
cucuaucacugacacucug

SEQ ID NO: 1618865 - RNA, 19 nt, Artificial Sequence
  Description of Artificial Sequence: Synthetic oligonucleotide
  Sense strand starting at position 2457 of SEQ ID NO: 1560708
gcacuuucgcacccgugau

SEQ ID NO: 1618866 - RNA, 19 nt, Artificial Sequence
  Description of Artificial Sequence: Synthetic oligonucleotide
  Antisense strand to SEQ ID NO: 1618865
aucacgggugcgaaagugc

SEQ ID NO: 1618867 - RNA, 19 nt, Artificial Sequence
  Description of Artificial Sequence: Synthetic oligonucleotide
  Sense strand starting at position 2467 of SEQ ID NO: 1560708
acccgugaugagcaaacua

SEQ ID NO: 1618868 - RNA, 19 nt, Artificial Sequence
  Description of Artificial Sequence: Synthetic oligonucleotide
  Antisense strand to SEQ ID NO: 1618867
uaguuugcucaucacgggu

SEQ ID NO: 1618869 - RNA, 19 nt, Artificial Sequence
  Description of Artificial Sequence: Synthetic oligonucleotide
  Sense strand starting at position 2522 of SEQ ID NO: 1560708
gcaccagucggagagguuu

SEQ ID NO: 1618870 - RNA, 19 nt, Artificial Sequence
  Description of Artificial Sequence: Synthetic oligonucleotide
  Antisense strand to SEQ ID NO: 1618869
aaaccucuccgacuggugc

SEQ ID NO: 1618871 - RNA, 19 nt, Artificial Sequence
  Description of Artificial Sequence: Synthetic oligonucleotide
  Sense strand starting at position 2638 of SEQ ID NO: 1560708
auugaacauuucuggaaca

SEQ ID NO: 1618872 - RNA, 19 nt, Artificial Sequence
  Description of Artificial Sequence: Synthetic oligonucleotide
  Antisense strand to SEQ ID NO: 1618871
uguuccagaaauguucaau

SEQ ID NO: 1618873 - RNA, 19 nt, Artificial Sequence
  Description of Artificial Sequence: Synthetic oligonucleotide
  Sense strand starting at position 2663 of SEQ ID NO: 1560708
cguucugauccugaggguu

SEQ ID NO: 1618874 - RNA, 19 nt, Artificial Sequence
  Description of Artificial Sequence: Synthetic oligonucleotide
  Antisense strand to SEQ ID NO: 1618873
aacccucaggaucagaacg

SEQ ID NO: 1618875 - RNA, 19 nt, Artificial Sequence
  Description of Artificial Sequence: Synthetic oligonucleotide
  Sense strand starting at position 2712 of SEQ ID NO: 1560708
gggcguuuagaguggagga

SEQ ID NO: 1618876 - RNA, 19 nt, Artificial Sequence
  Description of Artificial Sequence: Synthetic oligonucleotide
  Antisense strand to SEQ ID NO: 1618875
uccuccacucuaaacgccc

SEQ ID NO: 1618877 - RNA, 19 nt, Artificial Sequence
  Description of Artificial Sequence: Synthetic oligonucleotide
  Sense strand starting at position 2713 of SEQ ID NO: 1560708
ggcguuuagaguggaggau

SEQ ID NO: 1618878 - RNA, 19 nt, Artificial Sequence
  Description of Artificial Sequence: Synthetic oligonucleotide
  Antisense strand to SEQ ID NO: 1618877
auccuccacucuaaacgcc

SEQ ID NO: 1618879 - RNA, 19 nt, Artificial Sequence
  Description of Artificial Sequence: Synthetic oligonucleotide
  Sense strand starting at position 2754 of SEQ ID NO: 1560708
ccuuaaauuugagacggau

SEQ ID NO: 1618880 - RNA, 19 nt, Artificial Sequence
  Description of Artificial Sequence: Synthetic oligonucleotide
  Antisense strand to SEQ ID NO: 1618879
auccgucucaaauuuaagg

SEQ ID NO: 1618881 - RNA, 19 nt, Artificial Sequence
  Description of Artificial Sequence: Synthetic oligonucleotide
  Sense strand starting at position 2769 of SEQ ID NO: 1560708
ggauaagugccgugaaucu

SEQ ID NO: 1618882 - RNA, 19 nt, Artificial Sequence
  Description of Artificial Sequence: Synthetic oligonucleotide
  Antisense strand to SEQ ID NO: 1618881
agauucacggcacuuaucc

SEQ ID NO: 1618883 - RNA, 19 nt, Artificial Sequence
  Description of Artificial Sequence: Synthetic oligonucleotide
  Sense strand starting at position 2957 of SEQ ID NO: 1560708
gaugucuggcuugcgcaaa

SEQ ID NO: 1618884 - RNA, 19 nt, Artificial Sequence
  Description of Artificial Sequence: Synthetic oligonucleotide
  Antisense strand to SEQ ID NO: 1618883
uuugcgcaagccagacauc

SEQ ID NO: 1618885 - RNA, 19 nt, Artificial Sequence
  Description of Artificial Sequence: Synthetic oligonucleotide
  Sense strand starting at position 3080 of SEQ ID NO: 1560708
gaaugagucucauuccugu

SEQ ID NO: 1618886 - RNA, 19 nt, Artificial Sequence
  Description of Artificial Sequence: Synthetic oligonucleotide
  Antisense strand to SEQ ID NO: 1618885
acaggaaugagacucauuc

SEQ ID NO: 1618887 - RNA, 19 nt, Artificial Sequence
  Description of Artificial Sequence: Synthetic oligonucleotide
  Sense strand starting at position 3094 of SEQ ID NO: 1560708
ccuguuucccagugaucag

SEQ ID NO: 1618888 - RNA, 19 nt, Artificial Sequence
  Description of Artificial Sequence: Synthetic oligonucleotide
  Antisense strand to SEQ ID NO: 1618887
cugaucacugggaaacagg

SEQ ID NO: 1618889 - RNA, 19 nt, Artificial Sequence
  Description of Artificial Sequence: Synthetic oligonucleotide
  Sense strand starting at position 3105 of SEQ ID NO: 1560708
gugaucagccaaugaauag

SEQ ID NO: 1618890 - RNA, 19 nt, Artificial Sequence
  Description of Artificial Sequence: Synthetic oligonucleotide
  Antisense strand to SEQ ID NO: 1618889
cuauucauuggcugaucac

SEQ ID NO: 1618891 - RNA, 19 nt, Artificial Sequence
  Description of Artificial Sequence: Synthetic oligonucleotide
  Sense strand starting at position 3115 of SEQ ID NO: 1560708
aaugaauagugagaacuug

SEQ ID NO: 1618892 - RNA, 19 nt, Artificial Sequence
  Description of Artificial Sequence: Synthetic oligonucleotide
  Antisense strand to SEQ ID NO: 1618891
caaguucucacuauucauu

SEQ ID NO: 1618893 - RNA, 19 nt, Artificial Sequence
  Description of Artificial Sequence: Synthetic oligonucleotide
  Sense strand starting at position 3167 of SEQ ID NO: 1560708
auuacucaguccucugaga

SEQ ID NO: 1618894 - RNA, 19 nt, Artificial Sequence
  Description of Artificial Sequence: Synthetic oligonucleotide
  Antisense strand to SEQ ID NO: 1618893
ucucagaggacugaguaau

SEQ ID NO: 1618895 - RNA, 19 nt, Artificial Sequence
  Description of Artificial Sequence: Synthetic oligonucleotide
  Sense strand starting at position 3244 of SEQ ID NO: 1560708
ugguuuacaucauugagau

SEQ ID NO: 1618896 - RNA, 19 nt, Artificial Sequence
  Description of Artificial Sequence: Synthetic oligonucleotide
  Antisense strand to SEQ ID NO: 1618895
aucucaaugauguaaacca

SEQ ID NO: 1618897 - RNA, 19 nt, Artificial Sequence
  Description of Artificial Sequence: Synthetic oligonucleotide
  Sense strand starting at position 3245 of SEQ ID NO: 1560708
gguuuacaucauugagauu

SEQ ID NO: 1618898 - RNA, 19 nt, Artificial Sequence
  Description of Artificial Sequence: Synthetic oligonucleotide
  Antisense strand to SEQ ID NO: 1618897
aaucucaaugauguaaacc

SEQ ID NO: 1618899 - RNA, 19 nt, Artificial Sequence
  Description of Artificial Sequence: Synthetic oligonucleotide
  Sense strand starting at position 3282 of SEQ ID NO: 1560708
guugaagaguccucacuga

SEQ ID NO: 1618900 - RNA, 19 nt, Artificial Sequence
  Description of Artificial Sequence: Synthetic oligonucleotide
  Antisense strand to SEQ ID NO: 1618899
ucagugaggacucuucaac

SEQ ID NO: 1618901 - RNA, 19 nt, Artificial Sequence
  Description of Artificial Sequence: Synthetic oligonucleotide
  Sense strand starting at position 3308 of SEQ ID NO: 1560708
aagaguugguuccuuccuu

SEQ ID NO: 1618902 - RNA, 19 nt, Artificial Sequence
  Description of Artificial Sequence: Synthetic oligonucleotide
  Antisense strand to SEQ ID NO: 1618901
aaggaaggaaccaacucuu

SEQ ID NO: 1618903 - RNA, 19 nt, Artificial Sequence
  Description of Artificial Sequence: Synthetic oligonucleotide
  Sense strand starting at position 3313 of SEQ ID NO: 1560708
uugguuccuuccuuuauua

SEQ ID NO: 1618904 - RNA, 19 nt, Artificial Sequence
  Description of Artificial Sequence: Synthetic oligonucleotide
  Antisense strand to SEQ ID NO: 1618903
uaauaaaggaaggaaccaa

SEQ ID NO: 1618905 - RNA, 19 nt, Artificial Sequence
  Description of Artificial Sequence: Synthetic oligonucleotide
  Sense strand starting at position 3315 of SEQ ID NO: 1560708
gguuccuuccuuuauuauu

SEQ ID NO: 1618906 - RNA, 19 nt, Artificial Sequence
  Description of Artificial Sequence: Synthetic oligonucleotide
  Antisense strand to SEQ ID NO: 1618905
aauaauaaaggaaggaacc

SEQ ID NO: 1618907 - RNA, 19 nt, Artificial Sequence
  Description of Artificial Sequence: Synthetic oligonucleotide
  Sense strand starting at position 3539 of SEQ ID NO: 1560708
agggcuuggcaagaaucau

SEQ ID NO: 1618908 - RNA, 19 nt, Artificial Sequence
  Description of Artificial Sequence: Synthetic oligonucleotide
  Antisense strand to SEQ ID NO: 1618907
augauucuugccaagcccu

SEQ ID NO: 1618909 - RNA, 19 nt, Artificial Sequence
  Description of Artificial Sequence: Synthetic oligonucleotide
  Sense strand starting at position 3545 of SEQ ID NO: 1560708
uggcaagaaucaucacaua

SEQ ID NO: 1618910 - RNA, 19 nt, Artificial Sequence
  Description of Artificial Sequence: Synthetic oligonucleotide
  Antisense strand to SEQ ID NO: 1618909
uaugugaugauucuugcca

SEQ ID NO: 1618911 - RNA, 19 nt, Artificial Sequence
  Description of Artificial Sequence: Synthetic oligonucleotide
  Sense strand starting at position 3593 of SEQ ID NO: 1560708
aggguauuguggcuuggaa

SEQ ID NO: 1618912 - RNA, 19 nt, Artificial Sequence
  Description of Artificial Sequence: Synthetic oligonucleotide
  Antisense strand to SEQ ID NO: 1618911
uuccaagccacaauacccu

SEQ ID NO: 1618913 - RNA, 19 nt, Artificial Sequence
  Description of Artificial Sequence: Synthetic oligonucleotide
  Sense strand starting at position 3770 of SEQ ID NO: 1560708
agcuauucuguggaggcua

SEQ ID NO: 1618914 - RNA, 19 nt, Artificial Sequence
  Description of Artificial Sequence: Synthetic oligonucleotide
  Antisense strand to SEQ ID NO: 1618913
uagccuccacagaauagcu

SEQ ID NO: 1618915 - RNA, 19 nt, Artificial Sequence
  Description of Artificial Sequence: Synthetic oligonucleotide
  Sense strand starting at position 137 of SEQ ID NO: 1560709
cccagagucugguauacag

SEQ ID NO: 1618916 - RNA, 19 nt, Artificial Sequence
  Description of Artificial Sequence: Synthetic oligonucleotide
  Antisense strand to SEQ ID NO: 1618915
cuguauaccagacucuggg

SEQ ID NO: 1618917 - RNA, 19 nt, Artificial Sequence
  Description of Artificial Sequence: Synthetic oligonucleotide
  Sense strand starting at position 152 of SEQ ID NO: 1560709
acagcaggcgccuaauaaa

SEQ ID NO: 1618918 - RNA, 19 nt, Artificial Sequence
  Description of Artificial Sequence: Synthetic oligonucleotide
  Antisense strand to SEQ ID NO: 1618917
uuuauuaggcgccugcugu

SEQ ID NO: 1618919 - RNA, 19 nt, Artificial Sequence
  Description of Artificial Sequence: Synthetic oligonucleotide
  Sense strand starting at position 322 of SEQ ID NO: 1560709
guaggaauguuugcccagu

SEQ ID NO: 1618920 - RNA, 19 nt, Artificial Sequence
  Description of Artificial Sequence: Synthetic oligonucleotide
  Antisense strand to SEQ ID NO: 1618919
acugggcaaacauuccuac

SEQ ID NO: 1618921 - RNA, 19 nt, Artificial Sequence
  Description of Artificial Sequence: Synthetic oligonucleotide
  Sense strand starting at position 324 of SEQ ID NO: 1560709
aggaauguuugcccaguga

SEQ ID NO: 1618922 - RNA, 19 nt, Artificial Sequence
  Description of Artificial Sequence: Synthetic oligonucleotide
  Antisense strand to SEQ ID NO: 1618921
ucacugggcaaacauuccu

SEQ ID NO: 1618923 - RNA, 19 nt, Artificial Sequence
  Description of Artificial Sequence: Synthetic oligonucleotide
  Sense strand starting at position 384 of SEQ ID NO: 1560709
gacgucaacuccgggagaa

SEQ ID NO: 1618924 - RNA, 19 nt, Artificial Sequence
  Description of Artificial Sequence: Synthetic oligonucleotide
  Antisense strand to SEQ ID NO: 1618923
uucucccggaguugacguc

SEQ ID NO: 1618925 - RNA, 19 nt, Artificial Sequence
  Description of Artificial Sequence: Synthetic oligonucleotide
  Sense strand starting at position 385 of SEQ ID NO: 1560709
acgucaacuccgggagaaa

SEQ ID NO: 1618926 - RNA, 19 nt, Artificial Sequence
  Description of Artificial Sequence: Synthetic oligonucleotide
  Antisense strand to SEQ ID NO: 1618925
uuucucccggaguugacgu

SEQ ID NO: 1618927 - RNA, 19 nt, Artificial Sequence
  Description of Artificial Sequence: Synthetic oligonucleotide
  Sense strand starting at position 946 of SEQ ID NO: 1560709
cugagacucuuccugcaac

SEQ ID NO: 1618928 - RNA, 19 nt, Artificial Sequence
  Description of Artificial Sequence: Synthetic oligonucleotide
  Antisense strand to SEQ ID NO: 1618927
guugcaggaagagucucag

SEQ ID NO: 1618929 - RNA, 19 nt, Artificial Sequence
  Description of Artificial Sequence: Synthetic oligonucleotide
  Sense strand starting at position 947 of SEQ ID NO: 1560709
ugagacucuuccugcaaca

SEQ ID NO: 1618930 - RNA, 19 nt, Artificial Sequence
  Description of Artificial Sequence: Synthetic oligonucleotide
  Antisense strand to SEQ ID NO: 1618929
uguugcaggaagagucuca

SEQ ID NO: 1618931 - RNA, 19 nt, Artificial Sequence
  Description of Artificial Sequence: Synthetic oligonucleotide
  Sense strand starting at position 1148 of SEQ ID NO: 1560709
gaacucuguugauaccaga

SEQ ID NO: 1618932 - RNA, 19 nt, Artificial Sequence
  Description of Artificial Sequence: Synthetic oligonucleotide
  Antisense strand to SEQ ID NO: 1618931
ucugguaucaacagaguuc

SEQ ID NO: 1618933 - RNA, 19 nt, Artificial Sequence
  Description of Artificial Sequence: Synthetic oligonucleotide
  Sense strand starting at position 1162 of SEQ ID NO: 1560709
ccagaaugaaacuggguuu

SEQ ID NO: 1618934 - RNA, 19 nt, Artificial Sequence
  Description of Artificial Sequence: Synthetic oligonucleotide
  Antisense strand to SEQ ID NO: 1618933
aaacccaguuucauucugg

SEQ ID NO: 1618935 - RNA, 19 nt, Artificial Sequence
  Description of Artificial Sequence: Synthetic oligonucleotide
  Sense strand starting at position 1214 of SEQ ID NO: 1560709
gccaguuggcucuauguga

SEQ ID NO: 1618936 - RNA, 19 nt, Artificial Sequence
  Description of Artificial Sequence: Synthetic oligonucleotide
  Antisense strand to SEQ ID NO: 1618935
ucacauagagccaacuggc

SEQ ID NO: 1618937 - RNA, 19 nt, Artificial Sequence
  Description of Artificial Sequence: Synthetic oligonucleotide
  Sense strand starting at position 1322 of SEQ ID NO: 1560709
ugcagucacccuugaguca

SEQ ID NO: 1618938 - RNA, 19 nt, Artificial Sequence
  Description of Artificial Sequence: Synthetic oligonucleotide
  Antisense strand to SEQ ID NO: 1618937
ugacucaagggugacugca

SEQ ID NO: 1618939 - RNA, 19 nt, Artificial Sequence
  Description of Artificial Sequence: Synthetic oligonucleotide
  Sense strand starting at position 1323 of SEQ ID NO: 1560709
gcagucacccuugagucau

SEQ ID NO: 1618940 - RNA, 19 nt, Artificial Sequence
  Description of Artificial Sequence: Synthetic oligonucleotide
  Antisense strand to SEQ ID NO: 1618939
augacucaagggugacugc

SEQ ID NO: 1618941 - RNA, 19 nt, Artificial Sequence
  Description of Artificial Sequence: Synthetic oligonucleotide
  Sense strand starting at position 1334 of SEQ ID NO: 1560709
ugagucaucucagcuccuu

SEQ ID NO: 1618942 - RNA, 19 nt, Artificial Sequence
  Description of Artificial Sequence: Synthetic oligonucleotide
  Antisense strand to SEQ ID NO: 1618941
aaggagcugagaugacuca

SEQ ID NO: 1618943 - RNA, 19 nt, Artificial Sequence
  Description of Artificial Sequence: Synthetic oligonucleotide
  Sense strand starting at position 1585 of SEQ ID NO: 1560709
ggauaagcaucucuccaga

SEQ ID NO: 1618944 - RNA, 19 nt, Artificial Sequence
  Description of Artificial Sequence: Synthetic oligonucleotide
  Antisense strand to SEQ ID NO: 1618943
ucuggagagaugcuuaucc

SEQ ID NO: 1618945 - RNA, 19 nt, Artificial Sequence
  Description of Artificial Sequence: Synthetic oligonucleotide
  Sense strand starting at position 1598 of SEQ ID NO: 1560709
uccagaagccucuggaauu

SEQ ID NO: 1618946 - RNA, 19 nt, Artificial Sequence
  Description of Artificial Sequence: Synthetic oligonucleotide
  Antisense strand to SEQ ID NO: 1618945
aauuccagaggcuucugga

SEQ ID NO: 1618947 - RNA, 19 nt, Artificial Sequence
  Description of Artificial Sequence: Synthetic oligonucleotide
  Sense strand starting at position 1599 of SEQ ID NO: 1560709
ccagaagccucuggaauuc

SEQ ID NO: 1618948 - RNA, 19 nt, Artificial Sequence
  Description of Artificial Sequence: Synthetic oligonucleotide
  Antisense strand to SEQ ID NO: 1618947
gaauuccagaggcuucugg

SEQ ID NO: 1618949 - RNA, 19 nt, Artificial Sequence
  Description of Artificial Sequence: Synthetic oligonucleotide
  Sense strand starting at position 1678 of SEQ ID NO: 1560709
cuuggagggcucugggauu

SEQ ID NO: 1618950 - RNA, 19 nt, Artificial Sequence
  Description of Artificial Sequence: Synthetic oligonucleotide
  Antisense strand to SEQ ID NO: 1618949
aaucccagagcccuccaag

SEQ ID NO: 1618951 - RNA, 19 nt, Artificial Sequence
  Description of Artificial Sequence: Synthetic oligonucleotide
  Sense strand starting at position 2794 of SEQ ID NO: 1560709
guggcacgcuauuauaauc

SEQ ID NO: 1618952 - RNA, 19 nt, Artificial Sequence
  Description of Artificial Sequence: Synthetic oligonucleotide
  Antisense strand to SEQ ID NO: 1618951
gauuauaauagcgugccac

SEQ ID NO: 1618953 - RNA, 19 nt, Artificial Sequence
  Description of Artificial Sequence: Synthetic oligonucleotide
  Sense strand starting at position 3038 of SEQ ID NO: 1560709
cuggauucuuagucaaggu

SEQ ID NO: 1618954 - RNA, 19 nt, Artificial Sequence
  Description of Artificial Sequence: Synthetic oligonucleotide
  Antisense strand to SEQ ID NO: 1618953
accuugacuaagaauccag

SEQ ID NO: 1618955 - RNA, 19 nt, Artificial Sequence
  Description of Artificial Sequence: Synthetic oligonucleotide
  Sense strand starting at position 3235 of SEQ ID NO: 1560709
ucagucucuucuucgagua

SEQ ID NO: 1618956 - RNA, 19 nt, Artificial Sequence
  Description of Artificial Sequence: Synthetic oligonucleotide
  Antisense strand to SEQ ID NO: 1618955
uacucgaagaagagacuga

SEQ ID NO: 1618957 - RNA, 19 nt, Artificial Sequence
  Description of Artificial Sequence: Synthetic oligonucleotide
  Sense strand starting at position 3236 of SEQ ID NO: 1560709
cagucucuucuucgaguaa

SEQ ID NO: 1618958 - RNA, 19 nt, Artificial Sequence
  Description of Artificial Sequence: Synthetic oligonucleotide
  Antisense strand to SEQ ID NO: 1618957
uuacucgaagaagagacug

SEQ ID NO: 1618959 - RNA, 19 nt, Artificial Sequence
  Description of Artificial Sequence: Synthetic oligonucleotide
  Sense strand starting at position 3237 of SEQ ID NO: 1560709
agucucuucuucgaguaaa

SEQ ID NO: 1618960 - RNA, 19 nt, Artificial Sequence
  Description of Artificial Sequence: Synthetic oligonucleotide
  Antisense strand to SEQ ID NO: 1618959
uuuacucgaagaagagacu

SEQ ID NO: 1618961 - RNA, 19 nt, Artificial Sequence
  Description of Artificial Sequence: Synthetic oligonucleotide
  Sense strand starting at position 3662 of SEQ ID NO: 1560709
cgcugcugggugugugaaa

SEQ ID NO: 1618962 - RNA, 19 nt, Artificial Sequence
  Description of Artificial Sequence: Synthetic oligonucleotide
  Antisense strand to SEQ ID NO: 1618961
uuucacacacccagcagcg

SEQ ID NO: 1618963 - RNA, 19 nt, Artificial Sequence
  Description of Artificial Sequence: Synthetic oligonucleotide
  Sense strand starting at position 3751 of SEQ ID NO: 1560709
cuggcuuguagauagggaa

SEQ ID NO: 1618964 - RNA, 19 nt, Artificial Sequence
  Description of Artificial Sequence: Synthetic oligonucleotide
  Antisense strand to SEQ ID NO: 1618963
uucccuaucuacaagccag

SEQ ID NO: 1618965 - RNA, 19 nt, Artificial Sequence
  Description of Artificial Sequence: Synthetic oligonucleotide
  Sense strand starting at position 70 of SEQ ID NO: 1560710
aggagaguauuucaggaga

SEQ ID NO: 1618966 - RNA, 19 nt, Artificial Sequence
  Description of Artificial Sequence: Synthetic oligonucleotide
  Antisense strand to SEQ ID NO: 1618965
ucuccugaaauacucuccu

SEQ ID NO: 1618967 - RNA, 19 nt, Artificial Sequence
  Description of Artificial Sequence: Synthetic oligonucleotide
  Sense strand starting at position 72 of SEQ ID NO: 1560710
gagaguauuucaggagagg

SEQ ID NO: 1618968 - RNA, 19 nt, Artificial Sequence
  Description of Artificial Sequence: Synthetic oligonucleotide
  Antisense strand to SEQ ID NO: 1618967
ccucuccugaaauacucuc

SEQ ID NO: 1618969 - RNA, 19 nt, Artificial Sequence
  Description of Artificial Sequence: Synthetic oligonucleotide
  Sense strand starting at position 592 of SEQ ID NO: 1560710
ugggaauucuucccagucu

SEQ ID NO: 1618970 - RNA, 19 nt, Artificial Sequence
  Description of Artificial Sequence: Synthetic oligonucleotide
  Antisense strand to SEQ ID NO: 1618969
agacugggaagaauuccca

SEQ ID NO: 1618971 - RNA, 19 nt, Artificial Sequence
  Description of Artificial Sequence: Synthetic oligonucleotide
  Sense strand starting at position 593 of SEQ ID NO: 1560710
gggaauucuucccagucuc

SEQ ID NO: 1618972 - RNA, 19 nt, Artificial Sequence
  Description of Artificial Sequence: Synthetic oligonucleotide
  Antisense strand to SEQ ID NO: 1618971
gagacugggaagaauuccc

SEQ ID NO: 1618973 - RNA, 19 nt, Artificial Sequence
  Description of Artificial Sequence: Synthetic oligonucleotide
  Sense strand starting at position 766 of SEQ ID NO: 1560710
cagugaagcgauuacauaa

SEQ ID NO: 1618974 - RNA, 19 nt, Artificial Sequence
  Description of Artificial Sequence: Synthetic oligonucleotide
  Antisense strand to SEQ ID NO: 1618973
uuauguaaucgcuucacug

SEQ ID NO: 1618975 - RNA, 19 nt, Artificial Sequence
  Description of Artificial Sequence: Synthetic oligonucleotide
  Sense strand starting at position 1588 of SEQ ID NO: 1560710
gcugguuucuucugcacca

SEQ ID NO: 1618976 - RNA, 19 nt, Artificial Sequence
  Description of Artificial Sequence: Synthetic oligonucleotide
  Antisense strand to SEQ ID NO: 1618975
uggugcagaagaaaccagc

SEQ ID NO: 1618977 - RNA, 19 nt, Artificial Sequence
  Description of Artificial Sequence: Synthetic oligonucleotide
  Sense strand starting at position 2581 of SEQ ID NO: 1560710
ccgaguuugcuuugugguu

SEQ ID NO: 1618978 - RNA, 19 nt, Artificial Sequence
  Description of Artificial Sequence: Synthetic oligonucleotide
  Antisense strand to SEQ ID NO: 1618977
aaccacaaagcaaacucgg

SEQ ID NO: 1618979 - RNA, 19 nt, Artificial Sequence
  Description of Artificial Sequence: Synthetic oligonucleotide
  Sense strand starting at position 2625 of SEQ ID NO: 1560710
gaccgaggucugugaagga

SEQ ID NO: 1618980 - RNA, 19 nt, Artificial Sequence
  Description of Artificial Sequence: Synthetic oligonucleotide
  Antisense strand to SEQ ID NO: 1618979
uccuucacagaccucgguc

SEQ ID NO: 1618981 - RNA, 19 nt, Artificial Sequence
  Description of Artificial Sequence: Synthetic oligonucleotide
  Sense strand starting at position 2646 of SEQ ID NO: 1560710
cuuccucuguccucgaaua

SEQ ID NO: 1618982 - RNA, 19 nt, Artificial Sequence
  Description of Artificial Sequence: Synthetic oligonucleotide
  Antisense strand to SEQ ID NO: 1618981
uauucgaggacagaggaag

SEQ ID NO: 1618983 - RNA, 19 nt, Artificial Sequence
  Description of Artificial Sequence: Synthetic oligonucleotide
  Sense strand starting at position 2651 of SEQ ID NO: 1560710
ucuguccucgaauagcauu

SEQ ID NO: 1618984 - RNA, 19 nt, Artificial Sequence
  Description of Artificial Sequence: Synthetic oligonucleotide
  Antisense strand to SEQ ID NO: 1618983
aaugcuauucgaggacaga

SEQ ID NO: 1618985 - RNA, 19 nt, Artificial Sequence
  Description of Artificial Sequence: Synthetic oligonucleotide
  Sense strand starting at position 3144 of SEQ ID NO: 1560710
ugcccugacucuuggcaau

SEQ ID NO: 1618986 - RNA, 19 nt, Artificial Sequence
  Description of Artificial Sequence: Synthetic oligonucleotide
  Antisense strand to SEQ ID NO: 1618985
auugccaagagucagggca

SEQ ID NO: 1618987 - RNA, 19 nt, Artificial Sequence
  Description of Artificial Sequence: Synthetic oligonucleotide
  Sense strand starting at position 3219 of SEQ ID NO: 1560710
gugugcgugugaacacaua

SEQ ID NO: 1618988 - RNA, 19 nt, Artificial Sequence
  Description of Artificial Sequence: Synthetic oligonucleotide
  Antisense strand to SEQ ID NO: 1618987
uauguguucacacgcacac

SEQ ID NO: 1618989 - RNA, 19 nt, Artificial Sequence
  Description of Artificial Sequence: Synthetic oligonucleotide
  Sense strand starting at position 3327 of SEQ ID NO: 1560710
guaaauagugcuuggagga

SEQ ID NO: 1618990 - RNA, 19 nt, Artificial Sequence
  Description of Artificial Sequence: Synthetic oligonucleotide
  Antisense strand to SEQ ID NO: 1618989
uccuccaagcacuauuuac

SEQ ID NO: 1618991 - RNA, 19 nt, Artificial Sequence
  Description of Artificial Sequence: Synthetic oligonucleotide
  Sense strand starting at position 3328 of SEQ ID NO: 1560710
uaaauagugcuuggaggaa

SEQ ID NO: 1618992 - RNA, 19 nt, Artificial Sequence
  Description of Artificial Sequence: Synthetic oligonucleotide
  Antisense strand to SEQ ID NO: 1618991
uuccuccaagcacuauuua

SEQ ID NO: 1618993 - RNA, 19 nt, Artificial Sequence
  Description of Artificial Sequence: Synthetic oligonucleotide
  Sense strand starting at position 3392 of SEQ ID NO: 1560710
ggguuguguggucguguga

SEQ ID NO: 1618994 - RNA, 19 nt, Artificial Sequence
  Description of Artificial Sequence: Synthetic oligonucleotide
  Antisense strand to SEQ ID NO: 1618993
ucacacgaccacacaaccc

SEQ ID NO: 1618995 - RNA, 19 nt, Artificial Sequence
  Description of Artificial Sequence: Synthetic oligonucleotide
  Sense strand starting at position 3396 of SEQ ID NO: 1560710
uguguggucgugugagcuu

SEQ ID NO: 1618996 - RNA, 19 nt, Artificial Sequence
  Description of Artificial Sequence: Synthetic oligonucleotide
  Antisense strand to SEQ ID NO: 1618995
aagcucacacgaccacaca

SEQ ID NO: 1618997 - RNA, 19 nt, Artificial Sequence
  Description of Artificial Sequence: Synthetic oligonucleotide
  Sense strand starting at position 3492 of SEQ ID NO: 1560710
cccagaagucuagaagugu

SEQ ID NO: 1618998 - RNA, 19 nt, Artificial Sequence
  Description of Artificial Sequence: Synthetic oligonucleotide
  Antisense strand to SEQ ID NO: 1618997
acacuucuagacuucuggg

SEQ ID NO: 1618999 - RNA, 19 nt, Artificial Sequence
  Description of Artificial Sequence: Synthetic oligonucleotide
  Sense strand starting at position 3517 of SEQ ID NO: 1560710
agcuuugcuuccuccaagu

SEQ ID NO: 1619000 - RNA, 19 nt, Artificial Sequence
  Description of Artificial Sequence: Synthetic oligonucleotide
  Antisense strand to SEQ ID NO: 1618999
acuuggaggaagcaaagcu

SEQ ID NO: 1619001 - RNA, 19 nt, Artificial Sequence
  Description of Artificial Sequence: Synthetic oligonucleotide
  Sense strand starting at position 3530 of SEQ ID NO: 1560710
ccaagugcucuaggaggau

SEQ ID NO: 1619002 - RNA, 19 nt, Artificial Sequence
  Description of Artificial Sequence: Synthetic oligonucleotide
  Antisense strand to SEQ ID NO: 1619001
auccuccuagagcacuugg

SEQ ID NO: 1619003 - RNA, 19 nt, Artificial Sequence
  Description of Artificial Sequence: Synthetic oligonucleotide
  Sense strand starting at position 3636 of SEQ ID NO: 1560710
ugugucuccucuucuuauu

SEQ ID NO: 1619004 - RNA, 19 nt, Artificial Sequence
  Description of Artificial Sequence: Synthetic oligonucleotide
  Antisense strand to SEQ ID NO: 1619003
aauaagaagaggagacaca

SEQ ID NO: 1619005 - RNA, 19 nt, Artificial Sequence
  Description of Artificial Sequence: Synthetic oligonucleotide
  Sense strand starting at position 54 of SEQ ID NO: 1560711
gugccagaagcaugagaca

SEQ ID NO: 1619006 - RNA, 19 nt, Artificial Sequence
  Description of Artificial Sequence: Synthetic oligonucleotide
  Antisense strand to SEQ ID NO: 1619005
ugucucaugcuucuggcac

SEQ ID NO: 1619007 - RNA, 19 nt, Artificial Sequence
  Description of Artificial Sequence: Synthetic oligonucleotide
  Sense strand starting at position 202 of SEQ ID NO: 1560711
cucucuaacggcggagauu

SEQ ID NO: 1619008 - RNA, 19 nt, Artificial Sequence
  Description of Artificial Sequence: Synthetic oligonucleotide
  Antisense strand to SEQ ID NO: 1619007
aaucuccgccguuagagag

SEQ ID NO: 1619009 - RNA, 19 nt, Artificial Sequence
  Description of Artificial Sequence: Synthetic oligonucleotide
  Sense strand starting at position 298 of SEQ ID NO: 1560711
aagaaaugaucccauguug

SEQ ID NO: 1619010 - RNA, 19 nt, Artificial Sequence
  Description of Artificial Sequence: Synthetic oligonucleotide
  Antisense strand to SEQ ID NO: 1619009
caacaugggaucauuucuu

SEQ ID NO: 1619011 - RNA, 19 nt, Artificial Sequence
  Description of Artificial Sequence: Synthetic oligonucleotide
  Sense strand starting at position 328 of SEQ ID NO: 1560711
ugcuucugggcuugaggaa

SEQ ID NO: 1619012 - RNA, 19 nt, Artificial Sequence
  Description of Artificial Sequence: Synthetic oligonucleotide
  Antisense strand to SEQ ID NO: 1619011
uuccucaagcccagaagca

SEQ ID NO: 1619013 - RNA, 19 nt, Artificial Sequence
  Description of Artificial Sequence: Synthetic oligonucleotide
  Sense strand starting at position 412 of SEQ ID NO: 1560711
gcaggaaggccucguguuu

SEQ ID NO: 1619014 - RNA, 19 nt, Artificial Sequence
  Description of Artificial Sequence: Synthetic oligonucleotide
  Antisense strand to SEQ ID NO: 1619013
aaacacgaggccuuccugc

SEQ ID NO: 1619015 - RNA, 19 nt, Artificial Sequence
  Description of Artificial Sequence: Synthetic oligonucleotide
  Sense strand starting at position 418 of SEQ ID NO: 1560711
aggccucguguuuaugaga

SEQ ID NO: 1619016 - RNA, 19 nt, Artificial Sequence
  Description of Artificial Sequence: Synthetic oligonucleotide
  Antisense strand to SEQ ID NO: 1619015
ucucauaaacacgaggccu

SEQ ID NO: 1619017 - RNA, 19 nt, Artificial Sequence
  Description of Artificial Sequence: Synthetic oligonucleotide
  Sense strand starting at position 571 of SEQ ID NO: 1560711
gaggguaguggcugaaaga

SEQ ID NO: 1619018 - RNA, 19 nt, Artificial Sequence
  Description of Artificial Sequence: Synthetic oligonucleotide
  Antisense strand to SEQ ID NO: 1619017
ucuuucagccacuacccuc

SEQ ID NO: 1619019 - RNA, 19 nt, Artificial Sequence
  Description of Artificial Sequence: Synthetic oligonucleotide
  Sense strand starting at position 608 of SEQ ID NO: 1560711
gcugaugggcguuagauga

SEQ ID NO: 1619020 - RNA, 19 nt, Artificial Sequence
  Description of Artificial Sequence: Synthetic oligonucleotide
  Antisense strand to SEQ ID NO: 1619019
ucaucuaacgcccaucagc

SEQ ID NO: 1619021 - RNA, 19 nt, Artificial Sequence
  Description of Artificial Sequence: Synthetic oligonucleotide
  Sense strand starting at position 618 of SEQ ID NO: 1560711
guuagaugaagugggagau

SEQ ID NO: 1619022 - RNA, 19 nt, Artificial Sequence
  Description of Artificial Sequence: Synthetic oligonucleotide
  Antisense strand to SEQ ID NO: 1619021
aucucccacuucaucuaac

SEQ ID NO: 1619023 - RNA, 19 nt, Artificial Sequence
  Description of Artificial Sequence: Synthetic oligonucleotide
  Sense strand starting at position 646 of SEQ ID NO: 1560711
aaagguuguacaggagacu

SEQ ID NO: 1619024 - RNA, 19 nt, Artificial Sequence
  Description of Artificial Sequence: Synthetic oligonucleotide
  Antisense strand to SEQ ID NO: 1619023
agucuccuguacaaccuuu

SEQ ID NO: 1619025 - RNA, 19 nt, Artificial Sequence
  Description of Artificial Sequence: Synthetic oligonucleotide
  Sense strand starting at position 667 of SEQ ID NO: 1560711
aggacugugacgugaccaa

SEQ ID NO: 1619026 - RNA, 19 nt, Artificial Sequence
  Description of Artificial Sequence: Synthetic oligonucleotide
  Antisense strand to SEQ ID NO: 1619025
uuggucacgucacaguccu

SEQ ID NO: 1619027 - RNA, 19 nt, Artificial Sequence
  Description of Artificial Sequence: Synthetic oligonucleotide
  Sense strand starting at position 1233 of SEQ ID NO: 1560711
ucauaucugagcugagguu

SEQ ID NO: 1619028 - RNA, 19 nt, Artificial Sequence
  Description of Artificial Sequence: Synthetic oligonucleotide
  Antisense strand to SEQ ID NO: 1619027
aaccucagcucagauauga

SEQ ID NO: 1619029 - RNA, 19 nt, Artificial Sequence
  Description of Artificial Sequence: Synthetic oligonucleotide
  Sense strand starting at position 1359 of SEQ ID NO: 1560711
aaaggucuacugggcagau

SEQ ID NO: 1619030 - RNA, 19 nt, Artificial Sequence
  Description of Artificial Sequence: Synthetic oligonucleotide
  Antisense strand to SEQ ID NO: 1619029
aucugcccaguagaccuuu

SEQ ID NO: 1619031 - RNA, 19 nt, Artificial Sequence
  Description of Artificial Sequence: Synthetic oligonucleotide
  Sense strand starting at position 1448 of SEQ ID NO: 1560711
ggcugaagucccgagagcu

SEQ ID NO: 1619032 - RNA, 19 nt, Artificial Sequence
  Description of Artificial Sequence: Synthetic oligonucleotide
  Antisense strand to SEQ ID NO: 1619031
agcucucgggacuucagcc

SEQ ID NO: 1619033 - RNA, 19 nt, Artificial Sequence
  Description of Artificial Sequence: Synthetic oligonucleotide
  Sense strand starting at position 1449 of SEQ ID NO: 1560711
gcugaagucccgagagcug

SEQ ID NO: 1619034 - RNA, 19 nt, Artificial Sequence
  Description of Artificial Sequence: Synthetic oligonucleotide
  Antisense strand to SEQ ID NO: 1619033
cagcucucgggacuucagc

SEQ ID NO: 1619035 - RNA, 19 nt, Artificial Sequence
  Description of Artificial Sequence: Synthetic oligonucleotide
  Sense strand starting at position 2464 of SEQ ID NO: 1560711
cugcuauguaauggaacga

SEQ ID NO: 1619036 - RNA, 19 nt, Artificial Sequence
  Description of Artificial Sequence: Synthetic oligonucleotide
  Antisense strand to SEQ ID NO: 1619035
ucguuccauuacauagcag

SEQ ID NO: 1619037 - RNA, 19 nt, Artificial Sequence
  Description of Artificial Sequence: Synthetic oligonucleotide
  Sense strand starting at position 2798 of SEQ ID NO: 1560711
cuugcauaauccuuggcaa

SEQ ID NO: 1619038 - RNA, 19 nt, Artificial Sequence
  Description of Artificial Sequence: Synthetic oligonucleotide
  Antisense strand to SEQ ID NO: 1619037
uugccaaggauuaugcaag

SEQ ID NO: 1619039 - RNA, 19 nt, Artificial Sequence
  Description of Artificial Sequence: Synthetic oligonucleotide
  Sense strand starting at position 2799 of SEQ ID NO: 1560711
uugcauaauccuuggcaaa

SEQ ID NO: 1619040 - RNA, 19 nt, Artificial Sequence
  Description of Artificial Sequence: Synthetic oligonucleotide
  Antisense strand to SEQ ID NO: 1619039
uuugccaaggauuaugcaa

SEQ ID NO: 1619041 - RNA, 19 nt, Artificial Sequence
  Description of Artificial Sequence: Synthetic oligonucleotide
  Sense strand starting at position 2800 of SEQ ID NO: 1560711
ugcauaauccuuggcaaac

SEQ ID NO: 1619042 - RNA, 19 nt, Artificial Sequence
  Description of Artificial Sequence: Synthetic oligonucleotide
  Antisense strand to SEQ ID NO: 1619041
guuugccaaggauuaugca

SEQ ID NO: 1619043 - RNA, 19 nt, Artificial Sequence
  Description of Artificial Sequence: Synthetic oligonucleotide
  Sense strand starting at position 2863 of SEQ ID NO: 1560711
aucugugaaauagguugaa

SEQ ID NO: 1619044 - RNA, 19 nt, Artificial Sequence
  Description of Artificial Sequence: Synthetic oligonucleotide
  Antisense strand to SEQ ID NO: 1619043
uucaaccuauuucacagau

SEQ ID NO: 1619045 - RNA, 19 nt, Artificial Sequence
  Description of Artificial Sequence: Synthetic oligonucleotide
  Sense strand starting at position 2881 of SEQ ID NO: 1560711
agaacaguacugugugauu

SEQ ID NO: 1619046 - RNA, 19 nt, Artificial Sequence
  Description of Artificial Sequence: Synthetic oligonucleotide
  Antisense strand to SEQ ID NO: 1619045
aaucacacaguacuguucu

SEQ ID NO: 1619047 - RNA, 19 nt, Artificial Sequence
  Description of Artificial Sequence: Synthetic oligonucleotide
  Sense strand starting at position 2883 of SEQ ID NO: 1560711
aacaguacugugugauucu

SEQ ID NO: 1619048 - RNA, 19 nt, Artificial Sequence
  Description of Artificial Sequence: Synthetic oligonucleotide
  Antisense strand to SEQ ID NO: 1619047
agaaucacacaguacuguu

SEQ ID NO: 1619049 - RNA, 19 nt, Artificial Sequence
  Description of Artificial Sequence: Synthetic oligonucleotide
  Sense strand starting at position 2902 of SEQ ID NO: 1560711
ucaugcuaauuugaaugau

SEQ ID NO: 1619050 - RNA, 19 nt, Artificial Sequence
  Description of Artificial Sequence: Synthetic oligonucleotide
  Antisense strand to SEQ ID NO: 1619049
aucauucaaauuagcauga

SEQ ID NO: 1619051 - RNA, 19 nt, Artificial Sequence
  Description of Artificial Sequence: Synthetic oligonucleotide
  Sense strand starting at position 2953 of SEQ ID NO: 1560711
ccaagagagucacauguuu

SEQ ID NO: 1619052 - RNA, 19 nt, Artificial Sequence
  Description of Artificial Sequence: Synthetic oligonucleotide
  Antisense strand to SEQ ID NO: 1619051
aaacaugugacucucuugg

SEQ ID NO: 1619053 - RNA, 19 nt, Artificial Sequence
  Description of Artificial Sequence: Synthetic oligonucleotide
  Sense strand starting at position 2989 of SEQ ID NO: 1560711
auaaguucuggcgauccau

SEQ ID NO: 1619054 - RNA, 19 nt, Artificial Sequence
  Description of Artificial Sequence: Synthetic oligonucleotide
  Antisense strand to SEQ ID NO: 1619053
auggaucgccagaacuuau

SEQ ID NO: 1619055 - RNA, 19 nt, Artificial Sequence
  Description of Artificial Sequence: Synthetic oligonucleotide
  Sense strand starting at position 3019 of SEQ ID NO: 1560711
gugacuacauaauaaugua

SEQ ID NO: 1619056 - RNA, 19 nt, Artificial Sequence
  Description of Artificial Sequence: Synthetic oligonucleotide
  Antisense strand to SEQ ID NO: 1619055
uacauuauuauguagucac

SEQ ID NO: 1619057 - RNA, 19 nt, Artificial Sequence
  Description of Artificial Sequence: Synthetic oligonucleotide
  Sense strand starting at position 3419 of SEQ ID NO: 1560711
aguauauguggugauggau

SEQ ID NO: 1619058 - RNA, 19 nt, Artificial Sequence
  Description of Artificial Sequence: Synthetic oligonucleotide
  Antisense strand to SEQ ID NO: 1619057
auccaucaccacauauacu

SEQ ID NO: 1619059 - RNA, 19 nt, Artificial Sequence
  Description of Artificial Sequence: Synthetic oligonucleotide
  Sense strand starting at position 3425 of SEQ ID NO: 1560711
uguggugauggauauguca

SEQ ID NO: 1619060 - RNA, 19 nt, Artificial Sequence
  Description of Artificial Sequence: Synthetic oligonucleotide
  Antisense strand to SEQ ID NO: 1619059
ugacauauccaucaccaca

SEQ ID NO: 1619061 - RNA, 19 nt, Artificial Sequence
  Description of Artificial Sequence: Synthetic oligonucleotide
  Sense strand starting at position 3427 of SEQ ID NO: 1560711
uggugauggauaugucaau

SEQ ID NO: 1619062 - RNA, 19 nt, Artificial Sequence
  Description of Artificial Sequence: Synthetic oligonucleotide
  Antisense strand to SEQ ID NO: 1619061
auugacauauccaucacca

SEQ ID NO: 1619063 - RNA, 19 nt, Artificial Sequence
  Description of Artificial Sequence: Synthetic oligonucleotide
  Sense strand starting at position 3445 of SEQ ID NO: 1560711
uuagccugauuuguuuauu

SEQ ID NO: 1619064 - RNA, 19 nt, Artificial Sequence
  Description of Artificial Sequence: Synthetic oligonucleotide
  Antisense strand to SEQ ID NO: 1619063
aauaaacaaaucaggcuaa

SEQ ID NO: 1619065 - RNA, 19 nt, Artificial Sequence
  Description of Artificial Sequence: Synthetic oligonucleotide
  Sense strand starting at position 3549 of SEQ ID NO: 1560711
agaugaggucucugcugga

SEQ ID NO: 1619066 - RNA, 19 nt, Artificial Sequence
  Description of Artificial Sequence: Synthetic oligonucleotide
  Antisense strand to SEQ ID NO: 1619065
uccagcagagaccucaucu

SEQ ID NO: 1619067 - RNA, 19 nt, Artificial Sequence
  Description of Artificial Sequence: Synthetic oligonucleotide
  Sense strand starting at position 3681 of SEQ ID NO: 1560711
cggcuaguuugguuauuua

SEQ ID NO: 1619068 - RNA, 19 nt, Artificial Sequence
  Description of Artificial Sequence: Synthetic oligonucleotide
  Antisense strand to SEQ ID NO: 1619067
uaaauaaccaaacuagccg

SEQ ID NO: 1619069 - RNA, 19 nt, Artificial Sequence
  Description of Artificial Sequence: Synthetic oligonucleotide
  Sense strand starting at position 3714 of SEQ ID NO: 1560711
gagcgaucucacuauguug

SEQ ID NO: 1619070 - RNA, 19 nt, Artificial Sequence
  Description of Artificial Sequence: Synthetic oligonucleotide
  Antisense strand to SEQ ID NO: 1619069
caacauagugagaucgcuc

SEQ ID NO: 1619071 - RNA, 19 nt, Artificial Sequence
  Description of Artificial Sequence: Synthetic oligonucleotide
  Sense strand starting at position 3844 of SEQ ID NO: 1560711
aagagagaaucucauguua

SEQ ID NO: 1619072 - RNA, 19 nt, Artificial Sequence
  Description of Artificial Sequence: Synthetic oligonucleotide
  Antisense strand to SEQ ID NO: 1619071
uaacaugagauucucucuu

SEQ ID NO: 1619073 - RNA, 19 nt, Artificial Sequence
  Description of Artificial Sequence: Synthetic oligonucleotide
  Sense strand starting at position 3846 of SEQ ID NO: 1560711
gagagaaucucauguuauc

SEQ ID NO: 1619074 - RNA, 19 nt, Artificial Sequence
  Description of Artificial Sequence: Synthetic oligonucleotide
  Antisense strand to SEQ ID NO: 1619073
gauaacaugagauucucuc

SEQ ID NO: 1619075 - RNA, 19 nt, Artificial Sequence
  Description of Artificial Sequence: Synthetic oligonucleotide
  Sense strand starting at position 3905 of SEQ ID NO: 1560711
uugauuuauugaggaucac

SEQ ID NO: 1619076 - RNA, 19 nt, Artificial Sequence
  Description of Artificial Sequence: Synthetic oligonucleotide
  Antisense strand to SEQ ID NO: 1619075
gugauccucaauaaaucaa

SEQ ID NO: 1619077 - RNA, 19 nt, Artificial Sequence
  Description of Artificial Sequence: Synthetic oligonucleotide
  Sense strand starting at position 3938 of SEQ ID NO: 1560711
accuguaaacuguguuuau

SEQ ID NO: 1619078 - RNA, 19 nt, Artificial Sequence
  Description of Artificial Sequence: Synthetic oligonucleotide
  Antisense strand to SEQ ID NO: 1619077
auaaacacaguuuacaggu

SEQ ID NO: 1619079 - RNA, 19 nt, Artificial Sequence
  Description of Artificial Sequence: Synthetic oligonucleotide
  Sense strand starting at position 3939 of SEQ ID NO: 1560711
ccuguaaacuguguuuaug

SEQ ID NO: 1619080 - RNA, 19 nt, Artificial Sequence
  Description of Artificial Sequence: Synthetic oligonucleotide
  Antisense strand to SEQ ID NO: 1619079
cauaaacacaguuuacagg

SEQ ID NO: 1619081 - RNA, 19 nt, Artificial Sequence
  Description of Artificial Sequence: Synthetic oligonucleotide
  Sense strand starting at position 3945 of SEQ ID NO: 1560711
aacuguguuuaugugggaa

SEQ ID NO: 1619082 - RNA, 19 nt, Artificial Sequence
  Description of Artificial Sequence: Synthetic oligonucleotide
  Antisense strand to SEQ ID NO: 1619081
uucccacauaaacacaguu

SEQ ID NO: 1619083 - RNA, 19 nt, Artificial Sequence
  Description of Artificial Sequence: Synthetic oligonucleotide
  Sense strand starting at position 3949 of SEQ ID NO: 1560711
guguuuaugugggaaauag

SEQ ID NO: 1619084 - RNA, 19 nt, Artificial Sequence
  Description of Artificial Sequence: Synthetic oligonucleotide
  Antisense strand to SEQ ID NO: 1619083
cuauuucccacauaaacac

SEQ ID NO: 1619085 - RNA, 19 nt, Artificial Sequence
  Description of Artificial Sequence: Synthetic oligonucleotide
  Sense strand starting at position 259 of SEQ ID NO: 1560712
ugacuaguuccucaaggca

SEQ ID NO: 1619086 - RNA, 19 nt, Artificial Sequence
  Description of Artificial Sequence: Synthetic oligonucleotide
  Antisense strand to SEQ ID NO: 1619085
ugccuugaggaacuaguca

SEQ ID NO: 1619087 - RNA, 19 nt, Artificial Sequence
  Description of Artificial Sequence: Synthetic oligonucleotide
  Sense strand starting at position 525 of SEQ ID NO: 1560712
uuugaauacgggcaguuua

SEQ ID NO: 1619088 - RNA, 19 nt, Artificial Sequence
  Description of Artificial Sequence: Synthetic oligonucleotide
  Antisense strand to SEQ ID NO: 1619087
uaaacugcccguauucaaa

SEQ ID NO: 1619089 - RNA, 19 nt, Artificial Sequence
  Description of Artificial Sequence: Synthetic oligonucleotide
  Sense strand starting at position 535 of SEQ ID NO: 1560712
ggcaguuuauugcauguca

SEQ ID NO: 1619090 - RNA, 19 nt, Artificial Sequence
  Description of Artificial Sequence: Synthetic oligonucleotide
  Antisense strand to SEQ ID NO: 1619089
ugacaugcaauaaacugcc

SEQ ID NO: 1619091 - RNA, 19 nt, Artificial Sequence
  Description of Artificial Sequence: Synthetic oligonucleotide
  Sense strand starting at position 562 of SEQ ID NO: 1560712
cguauaaacuguuaaggag

SEQ ID NO: 1619092 - RNA, 19 nt, Artificial Sequence
  Description of Artificial Sequence: Synthetic oligonucleotide
  Antisense strand to SEQ ID NO: 1619091
cuccuuaacaguuuauacg

SEQ ID NO: 1619093 - RNA, 19 nt, Artificial Sequence
  Description of Artificial Sequence: Synthetic oligonucleotide
  Sense strand starting at position 565 of SEQ ID NO: 1560712
auaaacuguuaaggagaaa

SEQ ID NO: 1619094 - RNA, 19 nt, Artificial Sequence
  Description of Artificial Sequence: Synthetic oligonucleotide
  Antisense strand to SEQ ID NO: 1619093
uuucuccuuaacaguuuau

SEQ ID NO: 1619095 - RNA, 19 nt, Artificial Sequence
  Description of Artificial Sequence: Synthetic oligonucleotide
  Sense strand starting at position 947 of SEQ ID NO: 1560712
guguacaaagacuggaaau

SEQ ID NO: 1619096 - RNA, 19 nt, Artificial Sequence
  Description of Artificial Sequence: Synthetic oligonucleotide
  Antisense strand to SEQ ID NO: 1619095
auuuccagucuuuguacac

SEQ ID NO: 1619097 - RNA, 19 nt, Artificial Sequence
  Description of Artificial Sequence: Synthetic oligonucleotide
  Sense strand starting at position 1181 of SEQ ID NO: 1560712
gcaagaagggccuauucga

SEQ ID NO: 1619098 - RNA, 19 nt, Artificial Sequence
  Description of Artificial Sequence: Synthetic oligonucleotide
  Antisense strand to SEQ ID NO: 1619097
ucgaauaggcccuucuugc

SEQ ID NO: 1619099 - RNA, 19 nt, Artificial Sequence
  Description of Artificial Sequence: Synthetic oligonucleotide
  Sense strand starting at position 1231 of SEQ ID NO: 1560712
ccugaagcccugcagaauu

SEQ ID NO: 1619100 - RNA, 19 nt, Artificial Sequence
  Description of Artificial Sequence: Synthetic oligonucleotide
  Antisense strand to SEQ ID NO: 1619099
aauucugcagggcuucagg

SEQ ID NO: 1619101 - RNA, 19 nt, Artificial Sequence
  Description of Artificial Sequence: Synthetic oligonucleotide
  Sense strand starting at position 2102 of SEQ ID NO: 1560712
cggaccuacuuuccuuaaa

SEQ ID NO: 1619102 - RNA, 19 nt, Artificial Sequence
  Description of Artificial Sequence: Synthetic oligonucleotide
  Antisense strand to SEQ ID NO: 1619101
uuuaaggaaaguagguccg

SEQ ID NO: 1619103 - RNA, 19 nt, Artificial Sequence
  Description of Artificial Sequence: Synthetic oligonucleotide
  Sense strand starting at position 3218 of SEQ ID NO: 1560712
caucgaaagugagcaaaua

SEQ ID NO: 1619104 - RNA, 19 nt, Artificial Sequence
  Description of Artificial Sequence: Synthetic oligonucleotide
  Antisense strand to SEQ ID NO: 1619103
uauuugcucacuuucgaug

SEQ ID NO: 1619105 - RNA, 19 nt, Artificial Sequence
  Description of Artificial Sequence: Synthetic oligonucleotide
  Sense strand starting at position 3296 of SEQ ID NO: 1560712
gcuggagugaugugaacag

SEQ ID NO: 1619106 - RNA, 19 nt, Artificial Sequence
  Description of Artificial Sequence: Synthetic oligonucleotide
  Antisense strand to SEQ ID NO: 1619105
cuguucacaucacuccagc

SEQ ID NO: 1619107 - RNA, 19 nt, Artificial Sequence
  Description of Artificial Sequence: Synthetic oligonucleotide
  Sense strand starting at position 3459 of SEQ ID NO: 1560712
ccugaaguuugcuccaucu

SEQ ID NO: 1619108 - RNA, 19 nt, Artificial Sequence
  Description of Artificial Sequence: Synthetic oligonucleotide
  Antisense strand to SEQ ID NO: 1619107
agauggagcaaacuucagg

SEQ ID NO: 1619109 - RNA, 19 nt, Artificial Sequence
  Description of Artificial Sequence: Synthetic oligonucleotide
  Sense strand starting at position 3461 of SEQ ID NO: 1560712
ugaaguuugcuccaucuca

SEQ ID NO: 1619110 - RNA, 19 nt, Artificial Sequence
  Description of Artificial Sequence: Synthetic oligonucleotide
  Antisense strand to SEQ ID NO: 1619109
ugagauggagcaaacuuca

SEQ ID NO: 1619111 - RNA, 19 nt, Artificial Sequence
  Description of Artificial Sequence: Synthetic oligonucleotide
  Sense strand starting at position 3769 of SEQ ID NO: 1560712
guacguguuucaggcaucu

SEQ ID NO: 1619112 - RNA, 19 nt, Artificial Sequence
  Description of Artificial Sequence: Synthetic oligonucleotide
  Antisense strand to SEQ ID NO: 1619111
agaugccugaaacacguac

SEQ ID NO: 1619113 - RNA, 19 nt, Artificial Sequence
  Description of Artificial Sequence: Synthetic oligonucleotide
  Sense strand starting at position 3843 of SEQ ID NO: 1560712
uggcuauaacugcgaguag

SEQ ID NO: 1619114 - RNA, 19 nt, Artificial Sequence
  Description of Artificial Sequence: Synthetic oligonucleotide
  Antisense strand to SEQ ID NO: 1619113
cuacucgcaguuauagcca

SEQ ID NO: 1619115 - RNA, 19 nt, Artificial Sequence
  Description of Artificial Sequence: Synthetic oligonucleotide
  Sense strand starting at position 37 of SEQ ID NO: 1560713
gggucugucugucuugauc

SEQ ID NO: 1619116 - RNA, 19 nt, Artificial Sequence
  Description of Artificial Sequence: Synthetic oligonucleotide
  Antisense strand to SEQ ID NO: 1619115
gaucaagacagacagaccc

SEQ ID NO: 1619117 - RNA, 19 nt, Artificial Sequence
  Description of Artificial Sequence: Synthetic oligonucleotide
  Sense strand starting at position 39 of SEQ ID NO: 1560713
gucugucugucuugaucac

SEQ ID NO: 1619118 - RNA, 19 nt, Artificial Sequence
  Description of Artificial Sequence: Synthetic oligonucleotide
  Antisense strand to SEQ ID NO: 1619117
gugaucaagacagacagac

SEQ ID NO: 1619119 - RNA, 19 nt, Artificial Sequence
  Description of Artificial Sequence: Synthetic oligonucleotide
  Sense strand starting at position 56 of SEQ ID NO: 1560713
acugcugugucuccaggau

SEQ ID NO: 1619120 - RNA, 19 nt, Artificial Sequence
  Description of Artificial Sequence: Synthetic oligonucleotide
  Antisense strand to SEQ ID NO: 1619119
auccuggagacacagcagu

SEQ ID NO: 1619121 - RNA, 19 nt, Artificial Sequence
  Description of Artificial Sequence: Synthetic oligonucleotide
  Sense strand starting at position 60 of SEQ ID NO: 1560713
cugugucuccaggaugcaa

SEQ ID NO: 1619122 - RNA, 19 nt, Artificial Sequence
  Description of Artificial Sequence: Synthetic oligonucleotide
  Antisense strand to SEQ ID NO: 1619121
uugcauccuggagacacag

SEQ ID NO: 1619123 - RNA, 19 nt, Artificial Sequence
  Description of Artificial Sequence: Synthetic oligonucleotide
  Sense strand starting at position 120 of SEQ ID NO: 1560713
ggaauaaugugcuaccauu

SEQ ID NO: 1619124 - RNA, 19 nt, Artificial Sequence
  Description of Artificial Sequence: Synthetic oligonucleotide
  Antisense strand to SEQ ID NO: 1619123
aaugguagcacauuauucc

SEQ ID NO: 1619125 - RNA, 19 nt, Artificial Sequence
  Description of Artificial Sequence: Synthetic oligonucleotide
  Sense strand starting at position 156 of SEQ ID NO: 1560713
ugacaacaguaauaguaau

SEQ ID NO: 1619126 - RNA, 19 nt, Artificial Sequence
  Description of Artificial Sequence: Synthetic oligonucleotide
  Antisense strand to SEQ ID NO: 1619125
auuacuauuacuguuguca

SEQ ID NO: 1619127 - RNA, 19 nt, Artificial Sequence
  Description of Artificial Sequence: Synthetic oligonucleotide
  Sense strand starting at position 810 of SEQ ID NO: 1560713
agauaaagugcuuaccaug

SEQ ID NO: 1619128 - RNA, 19 nt, Artificial Sequence
  Description of Artificial Sequence: Synthetic oligonucleotide
  Antisense strand to SEQ ID NO: 1619127
caugguaagcacuuuaucu

SEQ ID NO: 1619129 - RNA, 19 nt, Artificial Sequence
  Description of Artificial Sequence: Synthetic oligonucleotide
  Sense strand starting at position 1001 of SEQ ID NO: 1560713
gguguuugguaaucuacgu

SEQ ID NO: 1619130 - RNA, 19 nt, Artificial Sequence
  Description of Artificial Sequence: Synthetic oligonucleotide
  Antisense strand to SEQ ID NO: 1619129
acguagauuaccaaacacc

SEQ ID NO: 1619131 - RNA, 19 nt, Artificial Sequence
  Description of Artificial Sequence: Synthetic oligonucleotide
  Sense strand starting at position 1036 of SEQ ID NO: 1560713
acccaucugugccucagau

SEQ ID NO: 1619132 - RNA, 19 nt, Artificial Sequence
  Description of Artificial Sequence: Synthetic oligonucleotide
  Antisense strand to SEQ ID NO: 1619131
aucugaggcacagaugggu

SEQ ID NO: 1619133 - RNA, 19 nt, Artificial Sequence
  Description of Artificial Sequence: Synthetic oligonucleotide
  Sense strand starting at position 1524 of SEQ ID NO: 1560713
gggugcucaccagguagua

SEQ ID NO: 1619134 - RNA, 19 nt, Artificial Sequence
  Description of Artificial Sequence: Synthetic oligonucleotide
  Antisense strand to SEQ ID NO: 1619133
uacuaccuggugagcaccc

SEQ ID NO: 1619135 - RNA, 19 nt, Artificial Sequence
  Description of Artificial Sequence: Synthetic oligonucleotide
  Sense strand starting at position 2123 of SEQ ID NO: 1560713
ucagcccucugggaacauu

SEQ ID NO: 1619136 - RNA, 19 nt, Artificial Sequence
  Description of Artificial Sequence: Synthetic oligonucleotide
  Antisense strand to SEQ ID NO: 1619135
aauguucccagagggcuga

SEQ ID NO: 1619137 - RNA, 19 nt, Artificial Sequence
  Description of Artificial Sequence: Synthetic oligonucleotide
  Sense strand starting at position 2132 of SEQ ID NO: 1560713
ugggaacauucgggaaacu

SEQ ID NO: 1619138 - RNA, 19 nt, Artificial Sequence
  Description of Artificial Sequence: Synthetic oligonucleotide
  Antisense strand to SEQ ID NO: 1619137
aguuucccgaauguuccca

SEQ ID NO: 1619139 - RNA, 19 nt, Artificial Sequence
  Description of Artificial Sequence: Synthetic oligonucleotide
  Sense strand starting at position 2174 of SEQ ID NO: 1560713
ggagcucauuggugcgaau

SEQ ID NO: 1619140 - RNA, 19 nt, Artificial Sequence
  Description of Artificial Sequence: Synthetic oligonucleotide
  Antisense strand to SEQ ID NO: 1619139
auucgcaccaaugagcucc

SEQ ID NO: 1619141 - RNA, 19 nt, Artificial Sequence
  Description of Artificial Sequence: Synthetic oligonucleotide
  Sense strand starting at position 2207 of SEQ ID NO: 1560713
cucgcuguccagggauaga

SEQ ID NO: 1619142 - RNA, 19 nt, Artificial Sequence
  Description of Artificial Sequence: Synthetic oligonucleotide
  Antisense strand to SEQ ID NO: 1619141
ucuaucccuggacagcgag

SEQ ID NO: 1619143 - RNA, 19 nt, Artificial Sequence
  Description of Artificial Sequence: Synthetic oligonucleotide
  Sense strand starting at position 2434 of SEQ ID NO: 1560713
cggccucagucgcuaaaga

SEQ ID NO: 1619144 - RNA, 19 nt, Artificial Sequence
  Description of Artificial Sequence: Synthetic oligonucleotide
  Antisense strand to SEQ ID NO: 1619143
ucuuuagcgacugaggccg

SEQ ID NO: 1619145 - RNA, 19 nt, Artificial Sequence
  Description of Artificial Sequence: Synthetic oligonucleotide
  Sense strand starting at position 2435 of SEQ ID NO: 1560713
ggccucagucgcuaaagaa

SEQ ID NO: 1619146 - RNA, 19 nt, Artificial Sequence
  Description of Artificial Sequence: Synthetic oligonucleotide
  Antisense strand to SEQ ID NO: 1619145
uucuuuagcgacugaggcc

SEQ ID NO: 1619147 - RNA, 19 nt, Artificial Sequence
  Description of Artificial Sequence: Synthetic oligonucleotide
  Sense strand starting at position 2479 of SEQ ID NO: 1560713
cucgacugauuccaugauu

SEQ ID NO: 1619148 - RNA, 19 nt, Artificial Sequence
  Description of Artificial Sequence: Synthetic oligonucleotide
  Antisense strand to SEQ ID NO: 1619147
aaucauggaaucagucgag

SEQ ID NO: 1619149 - RNA, 19 nt, Artificial Sequence
  Description of Artificial Sequence: Synthetic oligonucleotide
  Sense strand starting at position 2524 of SEQ ID NO: 1560713
ugauaagagucccauuuau

SEQ ID NO: 1619150 - RNA, 19 nt, Artificial Sequence
  Description of Artificial Sequence: Synthetic oligonucleotide
  Antisense strand to SEQ ID NO: 1619149
auaaaugggacucuuauca

SEQ ID NO: 1619151 - RNA, 19 nt, Artificial Sequence
  Description of Artificial Sequence: Synthetic oligonucleotide
  Sense strand starting at position 2588 of SEQ ID NO: 1560713
accaauccgugucaacuau

SEQ ID NO: 1619152 - RNA, 19 nt, Artificial Sequence
  Description of Artificial Sequence: Synthetic oligonucleotide
  Antisense strand to SEQ ID NO: 1619151
auaguugacacggauuggu

SEQ ID NO: 1619153 - RNA, 19 nt, Artificial Sequence
  Description of Artificial Sequence: Synthetic oligonucleotide
  Sense strand starting at position 2595 of SEQ ID NO: 1560713
cgugucaacuaucugauua

SEQ ID NO: 1619154 - RNA, 19 nt, Artificial Sequence
  Description of Artificial Sequence: Synthetic oligonucleotide
  Antisense strand to SEQ ID NO: 1619153
uaaucagauaguugacacg

SEQ ID NO: 1619155 - RNA, 19 nt, Artificial Sequence
  Description of Artificial Sequence: Synthetic oligonucleotide
  Sense strand starting at position 2635 of SEQ ID NO: 1560713
ugggcagacguccauguaa

SEQ ID NO: 1619156 - RNA, 19 nt, Artificial Sequence
  Description of Artificial Sequence: Synthetic oligonucleotide
  Antisense strand to SEQ ID NO: 1619155
uuacauggacgucugccca

SEQ ID NO: 1619157 - RNA, 19 nt, Artificial Sequence
  Description of Artificial Sequence: Synthetic oligonucleotide
  Sense strand starting at position 2637 of SEQ ID NO: 1560713
ggcagacguccauguaaac

SEQ ID NO: 1619158 - RNA, 19 nt, Artificial Sequence
  Description of Artificial Sequence: Synthetic oligonucleotide
  Antisense strand to SEQ ID NO: 1619157
guuuacauggacgucugcc

SEQ ID NO: 1619159 - RNA, 19 nt, Artificial Sequence
  Description of Artificial Sequence: Synthetic oligonucleotide
  Sense strand starting at position 2661 of SEQ ID NO: 1560713
aguagaaacccuuaguuau

SEQ ID NO: 1619160 - RNA, 19 nt, Artificial Sequence
  Description of Artificial Sequence: Synthetic oligonucleotide
  Antisense strand to SEQ ID NO: 1619159
auaacuaaggguuucuacu

SEQ ID NO: 1619161 - RNA, 19 nt, Artificial Sequence
  Description of Artificial Sequence: Synthetic oligonucleotide
  Sense strand starting at position 2671 of SEQ ID NO: 1560713
cuuaguuaugagcgcaaac

SEQ ID NO: 1619162 - RNA, 19 nt, Artificial Sequence
  Description of Artificial Sequence: Synthetic oligonucleotide
  Antisense strand to SEQ ID NO: 1619161
guuugcgcucauaacuaag

SEQ ID NO: 1619163 - RNA, 19 nt, Artificial Sequence
  Description of Artificial Sequence: Synthetic oligonucleotide
  Sense strand starting at position 2673 of SEQ ID NO: 1560713
uaguuaugagcgcaaacca

SEQ ID NO: 1619164 - RNA, 19 nt, Artificial Sequence
  Description of Artificial Sequence: Synthetic oligonucleotide
  Antisense strand to SEQ ID NO: 1619163
ugguuugcgcucauaacua

SEQ ID NO: 1619165 - RNA, 19 nt, Artificial Sequence
  Description of Artificial Sequence: Synthetic oligonucleotide
  Sense strand starting at position 2718 of SEQ ID NO: 1560713
ccaaucagcuccggguaua

SEQ ID NO: 1619166 - RNA, 19 nt, Artificial Sequence
  Description of Artificial Sequence: Synthetic oligonucleotide
  Antisense strand to SEQ ID NO: 1619165
uauacccggagcugauugg

SEQ ID NO: 1619167 - RNA, 19 nt, Artificial Sequence
  Description of Artificial Sequence: Synthetic oligonucleotide
  Sense strand starting at position 2719 of SEQ ID NO: 1560713
caaucagcuccggguauaa

SEQ ID NO: 1619168 - RNA, 19 nt, Artificial Sequence
  Description of Artificial Sequence: Synthetic oligonucleotide
  Antisense strand to SEQ ID NO: 1619167
uuauacccggagcugauug

SEQ ID NO: 1619169 - RNA, 19 nt, Artificial Sequence
  Description of Artificial Sequence: Synthetic oligonucleotide
  Sense strand starting at position 3054 of SEQ ID NO: 1560713
cagggugcucgggaauguu

SEQ ID NO: 1619170 - RNA, 19 nt, Artificial Sequence
  Description of Artificial Sequence: Synthetic oligonucleotide
  Antisense strand to SEQ ID NO: 1619169
aacauucccgagcacccug

SEQ ID NO: 1619171 - RNA, 19 nt, Artificial Sequence
  Description of Artificial Sequence: Synthetic oligonucleotide
  Sense strand starting at position 3062 of SEQ ID NO: 1560713
ucgggaauguucucaggaa

SEQ ID NO: 1619172 - RNA, 19 nt, Artificial Sequence
  Description of Artificial Sequence: Synthetic oligonucleotide
  Antisense strand to SEQ ID NO: 1619171
uuccugagaacauucccga

SEQ ID NO: 1619173 - RNA, 19 nt, Artificial Sequence
  Description of Artificial Sequence: Synthetic oligonucleotide
  Sense strand starting at position 3063 of SEQ ID NO: 1560713
cgggaauguucucaggaag

SEQ ID NO: 1619174 - RNA, 19 nt, Artificial Sequence
  Description of Artificial Sequence: Synthetic oligonucleotide
  Antisense strand to SEQ ID NO: 1619173
cuuccugagaacauucccg

SEQ ID NO: 1619175 - RNA, 19 nt, Artificial Sequence
  Description of Artificial Sequence: Synthetic oligonucleotide
  Sense strand starting at position 3104 of SEQ ID NO: 1560713
cuggguacaugugaacuau

SEQ ID NO: 1619176 - RNA, 19 nt, Artificial Sequence
  Description of Artificial Sequence: Synthetic oligonucleotide
  Antisense strand to SEQ ID NO: 1619175
auaguucacauguacccag

SEQ ID NO: 1619177 - RNA, 19 nt, Artificial Sequence
  Description of Artificial Sequence: Synthetic oligonucleotide
  Sense strand starting at position 3108 of SEQ ID NO: 1560713
guacaugugaacuauuguu

SEQ ID NO: 1619178 - RNA, 19 nt, Artificial Sequence
  Description of Artificial Sequence: Synthetic oligonucleotide
  Antisense strand to SEQ ID NO: 1619177
aacaauaguucacauguac

SEQ ID NO: 1619179 - RNA, 19 nt, Artificial Sequence
  Description of Artificial Sequence: Synthetic oligonucleotide
  Sense strand starting at position 3546 of SEQ ID NO: 1560713
gcaagaucuuggcucgcua

SEQ ID NO: 1619180 - RNA, 19 nt, Artificial Sequence
  Description of Artificial Sequence: Synthetic oligonucleotide
  Antisense strand to SEQ ID NO: 1619179
uagcgagccaagaucuugc

SEQ ID NO: 1619181 - RNA, 19 nt, Artificial Sequence
  Description of Artificial Sequence: Synthetic oligonucleotide
  Sense strand starting at position 3548 of SEQ ID NO: 1560713
aagaucuuggcucgcuaca

SEQ ID NO: 1619182 - RNA, 19 nt, Artificial Sequence
  Description of Artificial Sequence: Synthetic oligonucleotide
  Antisense strand to SEQ ID NO: 1619181
uguagcgagccaagaucuu

SEQ ID NO: 1619183 - RNA, 19 nt, Artificial Sequence
  Description of Artificial Sequence: Synthetic oligonucleotide
  Sense strand starting at position 21 of SEQ ID NO: 1560714
guggguugucaggagcaca

SEQ ID NO: 1619184 - RNA, 19 nt, Artificial Sequence
  Description of Artificial Sequence: Synthetic oligonucleotide
  Antisense strand to SEQ ID NO: 1619183
ugugcuccugacaacccac

SEQ ID NO: 1619185 - RNA, 19 nt, Artificial Sequence
  Description of Artificial Sequence: Synthetic oligonucleotide
  Sense strand starting at position 368 of SEQ ID NO: 1560714
gugcucccaccuuguagaa

SEQ ID NO: 1619186 - RNA, 19 nt, Artificial Sequence
  Description of Artificial Sequence: Synthetic oligonucleotide
  Antisense strand to SEQ ID NO: 1619185
uucuacaaggugggagcac

SEQ ID NO: 1619187 - RNA, 19 nt, Artificial Sequence
  Description of Artificial Sequence: Synthetic oligonucleotide
  Sense strand starting at position 370 of SEQ ID NO: 1560714
gcucccaccuuguagaauu

SEQ ID NO: 1619188 - RNA, 19 nt, Artificial Sequence
  Description of Artificial Sequence: Synthetic oligonucleotide
  Antisense strand to SEQ ID NO: 1619187
aauucuacaaggugggagc

SEQ ID NO: 1619189 - RNA, 19 nt, Artificial Sequence
  Description of Artificial Sequence: Synthetic oligonucleotide
  Sense strand starting at position 493 of SEQ ID NO: 1560714
ggaaguacuguugagacga

SEQ ID NO: 1619190 - RNA, 19 nt, Artificial Sequence
  Description of Artificial Sequence: Synthetic oligonucleotide
  Antisense strand to SEQ ID NO: 1619189
ucgucucaacaguacuucc

SEQ ID NO: 1619191 - RNA, 19 nt, Artificial Sequence
  Description of Artificial Sequence: Synthetic oligonucleotide
  Sense strand starting at position 716 of SEQ ID NO: 1560714
aguugagggaguuguguua

SEQ ID NO: 1619192 - RNA, 19 nt, Artificial Sequence
  Description of Artificial Sequence: Synthetic oligonucleotide
  Antisense strand to SEQ ID NO: 1619191
uaacacaacucccucaacu

SEQ ID NO: 1619193 - RNA, 19 nt, Artificial Sequence
  Description of Artificial Sequence: Synthetic oligonucleotide
  Sense strand starting at position 801 of SEQ ID NO: 1560714
gcugucuuuaccgagccua

SEQ ID NO: 1619194 - RNA, 19 nt, Artificial Sequence
  Description of Artificial Sequence: Synthetic oligonucleotide
  Antisense strand to SEQ ID NO: 1619193
uaggcucgguaaagacagc

SEQ ID NO: 1619195 - RNA, 19 nt, Artificial Sequence
  Description of Artificial Sequence: Synthetic oligonucleotide
  Sense strand starting at position 922 of SEQ ID NO: 1560714
ucaugucucaacugagugu

SEQ ID NO: 1619196 - RNA, 19 nt, Artificial Sequence
  Description of Artificial Sequence: Synthetic oligonucleotide
  Antisense strand to SEQ ID NO: 1619195
acacucaguugagacauga

SEQ ID NO: 1619197 - RNA, 19 nt, Artificial Sequence
  Description of Artificial Sequence: Synthetic oligonucleotide
  Sense strand starting at position 954 of SEQ ID NO: 1560714
gggaaaugcucucaaccuc

SEQ ID NO: 1619198 - RNA, 19 nt, Artificial Sequence
  Description of Artificial Sequence: Synthetic oligonucleotide
  Antisense strand to SEQ ID NO: 1619197
gagguugagagcauuuccc

SEQ ID NO: 1619199 - RNA, 19 nt, Artificial Sequence
  Description of Artificial Sequence: Synthetic oligonucleotide
  Sense strand starting at position 1353 of SEQ ID NO: 1560714
ccgcaaacaugcucgcuau

SEQ ID NO: 1619200 - RNA, 19 nt, Artificial Sequence
  Description of Artificial Sequence: Synthetic oligonucleotide
  Antisense strand to SEQ ID NO: 1619199
auagcgagcauguuugcgg

SEQ ID NO: 1619201 - RNA, 19 nt, Artificial Sequence
  Description of Artificial Sequence: Synthetic oligonucleotide
  Sense strand starting at position 1354 of SEQ ID NO: 1560714
cgcaaacaugcucgcuaua

SEQ ID NO: 1619202 - RNA, 19 nt, Artificial Sequence
  Description of Artificial Sequence: Synthetic oligonucleotide
  Antisense strand to SEQ ID NO: 1619201
uauagcgagcauguuugcg

SEQ ID NO: 1619203 - RNA, 19 nt, Artificial Sequence
  Description of Artificial Sequence: Synthetic oligonucleotide
  Sense strand starting at position 1359 of SEQ ID NO: 1560714
acaugcucgcuauaagagu

SEQ ID NO: 1619204 - RNA, 19 nt, Artificial Sequence
  Description of Artificial Sequence: Synthetic oligonucleotide
  Antisense strand to SEQ ID NO: 1619203
acucuuauagcgagcaugu

SEQ ID NO: 1619205 - RNA, 19 nt, Artificial Sequence
  Description of Artificial Sequence: Synthetic oligonucleotide
  Sense strand starting at position 1365 of SEQ ID NO: 1560714
ucgcuauaagaguguaagu

SEQ ID NO: 1619206 - RNA, 19 nt, Artificial Sequence
  Description of Artificial Sequence: Synthetic oligonucleotide
  Antisense strand to SEQ ID NO: 1619205
acuuacacucuuauagcga

SEQ ID NO: 1619207 - RNA, 19 nt, Artificial Sequence
  Description of Artificial Sequence: Synthetic oligonucleotide
  Sense strand starting at position 1367 of SEQ ID NO: 1560714
gcuauaagaguguaaguca

SEQ ID NO: 1619208 - RNA, 19 nt, Artificial Sequence
  Description of Artificial Sequence: Synthetic oligonucleotide
  Antisense strand to SEQ ID NO: 1619207
ugacuuacacucuuauagc

SEQ ID NO: 1619209 - RNA, 19 nt, Artificial Sequence
  Description of Artificial Sequence: Synthetic oligonucleotide
  Sense strand starting at position 1404 of SEQ ID NO: 1560714
gcaaguuccucaguccauu

SEQ ID NO: 1619210 - RNA, 19 nt, Artificial Sequence
  Description of Artificial Sequence: Synthetic oligonucleotide
  Antisense strand to SEQ ID NO: 1619209
aauggacugaggaacuugc

SEQ ID NO: 1619211 - RNA, 19 nt, Artificial Sequence
  Description of Artificial Sequence: Synthetic oligonucleotide
  Sense strand starting at position 1703 of SEQ ID NO: 1560714
gucgggugucgggaucaaa

SEQ ID NO: 1619212 - RNA, 19 nt, Artificial Sequence
  Description of Artificial Sequence: Synthetic oligonucleotide
  Antisense strand to SEQ ID NO: 1619211
uuugaucccgacacccgac

SEQ ID NO: 1619213 - RNA, 19 nt, Artificial Sequence
  Description of Artificial Sequence: Synthetic oligonucleotide
  Sense strand starting at position 2050 of SEQ ID NO: 1560714
cggccaaucgcauaaggau

SEQ ID NO: 1619214 - RNA, 19 nt, Artificial Sequence
  Description of Artificial Sequence: Synthetic oligonucleotide
  Antisense strand to SEQ ID NO: 1619213
auccuuaugcgauuggccg

SEQ ID NO: 1619215 - RNA, 19 nt, Artificial Sequence
  Description of Artificial Sequence: Synthetic oligonucleotide
  Sense strand starting at position 2145 of SEQ ID NO: 1560714
cccgaagaguauugaccaa

SEQ ID NO: 1619216 - RNA, 19 nt, Artificial Sequence
  Description of Artificial Sequence: Synthetic oligonucleotide
  Antisense strand to SEQ ID NO: 1619215
uuggucaauacucuucggg

SEQ ID NO: 1619217 - RNA, 19 nt, Artificial Sequence
  Description of Artificial Sequence: Synthetic oligonucleotide
  Sense strand starting at position 2251 of SEQ ID NO: 1560714
cccgcaugccgauugguaa

SEQ ID NO: 1619218 - RNA, 19 nt, Artificial Sequence
  Description of Artificial Sequence: Synthetic oligonucleotide
  Antisense strand to SEQ ID NO: 1619217
uuaccaaucggcaugcggg

SEQ ID NO: 1619219 - RNA, 19 nt, Artificial Sequence
  Description of Artificial Sequence: Synthetic oligonucleotide
  Sense strand starting at position 2413 of SEQ ID NO: 1560714
ccgcguuaggguuggucaa

SEQ ID NO: 1619220 - RNA, 19 nt, Artificial Sequence
  Description of Artificial Sequence: Synthetic oligonucleotide
  Antisense strand to SEQ ID NO: 1619219
uugaccaacccuaacgcgg

SEQ ID NO: 1619221 - RNA, 19 nt, Artificial Sequence
  Description of Artificial Sequence: Synthetic oligonucleotide
  Sense strand starting at position 2414 of SEQ ID NO: 1560714
cgcguuaggguuggucaau

SEQ ID NO: 1619222 - RNA, 19 nt, Artificial Sequence
  Description of Artificial Sequence: Synthetic oligonucleotide
  Antisense strand to SEQ ID NO: 1619221
auugaccaacccuaacgcg

SEQ ID NO: 1619223 - RNA, 19 nt, Artificial Sequence
  Description of Artificial Sequence: Synthetic oligonucleotide
  Sense strand starting at position 2415 of SEQ ID NO: 1560714
gcguuaggguuggucaauc

SEQ ID NO: 1619224 - RNA, 19 nt, Artificial Sequence
  Description of Artificial Sequence: Synthetic oligonucleotide
  Antisense strand to SEQ ID NO: 1619223
gauugaccaacccuaacgc

SEQ ID NO: 1619225 - RNA, 19 nt, Artificial Sequence
  Description of Artificial Sequence: Synthetic oligonucleotide
  Sense strand starting at position 2426 of SEQ ID NO: 1560714
ggucaaucuuaggcaguua

SEQ ID NO: 1619226 - RNA, 19 nt, Artificial Sequence
  Description of Artificial Sequence: Synthetic oligonucleotide
  Antisense strand to SEQ ID NO: 1619225
uaacugccuaagauugacc

SEQ ID NO: 1619227 - RNA, 19 nt, Artificial Sequence
  Description of Artificial Sequence: Synthetic oligonucleotide
  Sense strand starting at position 2477 of SEQ ID NO: 1560714
uccagauucuccuggacuu

SEQ ID NO: 1619228 - RNA, 19 nt, Artificial Sequence
  Description of Artificial Sequence: Synthetic oligonucleotide
  Antisense strand to SEQ ID NO: 1619227
aaguccaggagaaucugga

SEQ ID NO: 1619229 - RNA, 19 nt, Artificial Sequence
  Description of Artificial Sequence: Synthetic oligonucleotide
  Sense strand starting at position 2478 of SEQ ID NO: 1560714
ccagauucuccuggacuua

SEQ ID NO: 1619230 - RNA, 19 nt, Artificial Sequence
  Description of Artificial Sequence: Synthetic oligonucleotide
  Antisense strand to SEQ ID NO: 1619229
uaaguccaggagaaucugg

SEQ ID NO: 1619231 - RNA, 19 nt, Artificial Sequence
  Description of Artificial Sequence: Synthetic oligonucleotide
  Sense strand starting at position 2508 of SEQ ID NO: 1560714
ugugaucuguggccagaaa

SEQ ID NO: 1619232 - RNA, 19 nt, Artificial Sequence
  Description of Artificial Sequence: Synthetic oligonucleotide
  Antisense strand to SEQ ID NO: 1619231
uuucuggccacagaucaca

SEQ ID NO: 1619233 - RNA, 19 nt, Artificial Sequence
  Description of Artificial Sequence: Synthetic oligonucleotide
  Sense strand starting at position 2509 of SEQ ID NO: 1560714
gugaucuguggccagaaac

SEQ ID NO: 1619234 - RNA, 19 nt, Artificial Sequence
  Description of Artificial Sequence: Synthetic oligonucleotide
  Antisense strand to SEQ ID NO: 1619233
guuucuggccacagaucac

SEQ ID NO: 1619235 - RNA, 19 nt, Artificial Sequence
  Description of Artificial Sequence: Synthetic oligonucleotide
  Sense strand starting at position 2835 of SEQ ID NO: 1560714
ggaugaugauaggcgugaa

SEQ ID NO: 1619236 - RNA, 19 nt, Artificial Sequence
  Description of Artificial Sequence: Synthetic oligonucleotide
  Antisense strand to SEQ ID NO: 1619235
uucacgccuaucaucaucc

SEQ ID NO: 1619237 - RNA, 19 nt, Artificial Sequence
  Description of Artificial Sequence: Synthetic oligonucleotide
  Sense strand starting at position 2838 of SEQ ID NO: 1560714
ugaugauaggcgugaacca

SEQ ID NO: 1619238 - RNA, 19 nt, Artificial Sequence
  Description of Artificial Sequence: Synthetic oligonucleotide
  Antisense strand to SEQ ID NO: 1619237
ugguucacgccuaucauca

SEQ ID NO: 1619239 - RNA, 19 nt, Artificial Sequence
  Description of Artificial Sequence: Synthetic oligonucleotide
  Sense strand starting at position 2886 of SEQ ID NO: 1560714
uggaaaucccuaugcauuc

SEQ ID NO: 1619240 - RNA, 19 nt, Artificial Sequence
  Description of Artificial Sequence: Synthetic oligonucleotide
  Antisense strand to SEQ ID NO: 1619239
gaaugcauagggauuucca

SEQ ID NO: 1619241 - RNA, 19 nt, Artificial Sequence
  Description of Artificial Sequence: Synthetic oligonucleotide
  Sense strand starting at position 2887 of SEQ ID NO: 1560714
ggaaaucccuaugcauucu

SEQ ID NO: 1619242 - RNA, 19 nt, Artificial Sequence
  Description of Artificial Sequence: Synthetic oligonucleotide
  Antisense strand to SEQ ID NO: 1619241
agaaugcauagggauuucc

SEQ ID NO: 1619243 - RNA, 19 nt, Artificial Sequence
  Description of Artificial Sequence: Synthetic oligonucleotide
  Sense strand starting at position 2906 of SEQ ID NO: 1560714
cuacuagagucgcaaacua

SEQ ID NO: 1619244 - RNA, 19 nt, Artificial Sequence
  Description of Artificial Sequence: Synthetic oligonucleotide
  Antisense strand to SEQ ID NO: 1619243
uaguuugcgacucuaguag

SEQ ID NO: 1619245 - RNA, 19 nt, Artificial Sequence
  Description of Artificial Sequence: Synthetic oligonucleotide
  Sense strand starting at position 2932 of SEQ ID NO: 1560714
ugggcuguuaacuguugaa

SEQ ID NO: 1619246 - RNA, 19 nt, Artificial Sequence
  Description of Artificial Sequence: Synthetic oligonucleotide
  Antisense strand to SEQ ID NO: 1619245
uucaacaguuaacagccca

SEQ ID NO: 1619247 - RNA, 19 nt, Artificial Sequence
  Description of Artificial Sequence: Synthetic oligonucleotide
  Sense strand starting at position 3161 of SEQ ID NO: 1560714
auguacguccuauguaaau

SEQ ID NO: 1619248 - RNA, 19 nt, Artificial Sequence
  Description of Artificial Sequence: Synthetic oligonucleotide
  Antisense strand to SEQ ID NO: 1619247
auuuacauaggacguacau

SEQ ID NO: 1619249 - RNA, 19 nt, Artificial Sequence
  Description of Artificial Sequence: Synthetic oligonucleotide
  Sense strand starting at position 3202 of SEQ ID NO: 1560714
aaagucauuuacuggaugu

SEQ ID NO: 1619250 - RNA, 19 nt, Artificial Sequence
  Description of Artificial Sequence: Synthetic oligonucleotide
  Antisense strand to SEQ ID NO: 1619249
acauccaguaaaugacuuu

SEQ ID NO: 1619251 - RNA, 19 nt, Artificial Sequence
  Description of Artificial Sequence: Synthetic oligonucleotide
  Sense strand starting at position 3249 of SEQ ID NO: 1560714
ccugucauagcugaauugu

SEQ ID NO: 1619252 - RNA, 19 nt, Artificial Sequence
  Description of Artificial Sequence: Synthetic oligonucleotide
  Antisense strand to SEQ ID NO: 1619251
acaauucagcuaugacagg

SEQ ID NO: 1619253 - RNA, 19 nt, Artificial Sequence
  Description of Artificial Sequence: Synthetic oligonucleotide
  Sense strand starting at position 3258 of SEQ ID NO: 1560714
gcugaauuguuuccauuug

SEQ ID NO: 1619254 - RNA, 19 nt, Artificial Sequence
  Description of Artificial Sequence: Synthetic oligonucleotide
  Antisense strand to SEQ ID NO: 1619253
caaauggaaacaauucagc

SEQ ID NO: 1619255 - RNA, 19 nt, Artificial Sequence
  Description of Artificial Sequence: Synthetic oligonucleotide
  Sense strand starting at position 3359 of SEQ ID NO: 1560714
ugaugagcuaaagguguuu

SEQ ID NO: 1619256 - RNA, 19 nt, Artificial Sequence
  Description of Artificial Sequence: Synthetic oligonucleotide
  Antisense strand to SEQ ID NO: 1619255
aaacaccuuuagcucauca

SEQ ID NO: 1619257 - RNA, 19 nt, Artificial Sequence
  Description of Artificial Sequence: Synthetic oligonucleotide
  Sense strand starting at position 3387 of SEQ ID NO: 1560714
uuuaaauggucagucaaga

SEQ ID NO: 1619258 - RNA, 19 nt, Artificial Sequence
  Description of Artificial Sequence: Synthetic oligonucleotide
  Antisense strand to SEQ ID NO: 1619257
ucuugacugaccauuuaaa

SEQ ID NO: 1619259 - RNA, 19 nt, Artificial Sequence
  Description of Artificial Sequence: Synthetic oligonucleotide
  Sense strand starting at position 3742 of SEQ ID NO: 1560714
ucacguuuggcucagaauu

SEQ ID NO: 1619260 - RNA, 19 nt, Artificial Sequence
  Description of Artificial Sequence: Synthetic oligonucleotide
  Antisense strand to SEQ ID NO: 1619259
aauucugagccaaacguga

SEQ ID NO: 1619261 - RNA, 19 nt, Artificial Sequence
  Description of Artificial Sequence: Synthetic oligonucleotide
  Sense strand starting at position 3744 of SEQ ID NO: 1560714
acguuuggcucagaauuaa

SEQ ID NO: 1619262 - RNA, 19 nt, Artificial Sequence
  Description of Artificial Sequence: Synthetic oligonucleotide
  Antisense strand to SEQ ID NO: 1619261
uuaauucugagccaaacgu

SEQ ID NO: 1619263 - RNA, 19 nt, Artificial Sequence
  Description of Artificial Sequence: Synthetic oligonucleotide
  Sense strand starting at position 34 of SEQ ID NO: 1560715
ucgaaugacugcucuggga

SEQ ID NO: 1619264 - RNA, 19 nt, Artificial Sequence
  Description of Artificial Sequence: Synthetic oligonucleotide
  Antisense strand to SEQ ID NO: 1619263
ucccagagcagucauucga

SEQ ID NO: 1619265 - RNA, 19 nt, Artificial Sequence
  Description of Artificial Sequence: Synthetic oligonucleotide
  Sense strand starting at position 36 of SEQ ID NO: 1560715
gaaugacugcucugggaug

SEQ ID NO: 1619266 - RNA, 19 nt, Artificial Sequence
  Description of Artificial Sequence: Synthetic oligonucleotide
  Antisense strand to SEQ ID NO: 1619265
caucccagagcagucauuc

SEQ ID NO: 1619267 - RNA, 19 nt, Artificial Sequence
  Description of Artificial Sequence: Synthetic oligonucleotide
  Sense strand starting at position 197 of SEQ ID NO: 1560715
auagauagguccugaugcu

SEQ ID NO: 1619268 - RNA, 19 nt, Artificial Sequence
  Description of Artificial Sequence: Synthetic oligonucleotide
  Antisense strand to SEQ ID NO: 1619267
agcaucaggaccuaucuau

SEQ ID NO: 1619269 - RNA, 19 nt, Artificial Sequence
  Description of Artificial Sequence: Synthetic oligonucleotide
  Sense strand starting at position 198 of SEQ ID NO: 1560715
uagauagguccugaugcua

SEQ ID NO: 1619270 - RNA, 19 nt, Artificial Sequence
  Description of Artificial Sequence: Synthetic oligonucleotide
  Antisense strand to SEQ ID NO: 1619269
uagcaucaggaccuaucua

SEQ ID NO: 1619271 - RNA, 19 nt, Artificial Sequence
  Description of Artificial Sequence: Synthetic oligonucleotide
  Sense strand starting at position 206 of SEQ ID NO: 1560715
uccugaugcuacugguuga

SEQ ID NO: 1619272 - RNA, 19 nt, Artificial Sequence
  Description of Artificial Sequence: Synthetic oligonucleotide
  Antisense strand to SEQ ID NO: 1619271
ucaaccaguagcaucagga

SEQ ID NO: 1619273 - RNA, 19 nt, Artificial Sequence
  Description of Artificial Sequence: Synthetic oligonucleotide
  Sense strand starting at position 230 of SEQ ID NO: 1560715
uugaucuugccauaccuga

SEQ ID NO: 1619274 - RNA, 19 nt, Artificial Sequence
  Description of Artificial Sequence: Synthetic oligonucleotide
  Antisense strand to SEQ ID NO: 1619273
ucagguauggcaagaucaa

SEQ ID NO: 1619275 - RNA, 19 nt, Artificial Sequence
  Description of Artificial Sequence: Synthetic oligonucleotide
  Sense strand starting at position 255 of SEQ ID NO: 1560715
cuguauaaguguuuccgua

SEQ ID NO: 1619276 - RNA, 19 nt, Artificial Sequence
  Description of Artificial Sequence: Synthetic oligonucleotide
  Antisense strand to SEQ ID NO: 1619275
uacggaaacacuuauacag

SEQ ID NO: 1619277 - RNA, 19 nt, Artificial Sequence
  Description of Artificial Sequence: Synthetic oligonucleotide
  Sense strand starting at position 257 of SEQ ID NO: 1560715
guauaaguguuuccguacu

SEQ ID NO: 1619278 - RNA, 19 nt, Artificial Sequence
  Description of Artificial Sequence: Synthetic oligonucleotide
  Antisense strand to SEQ ID NO: 1619277
aguacggaaacacuuauac

SEQ ID NO: 1619279 - RNA, 19 nt, Artificial Sequence
  Description of Artificial Sequence: Synthetic oligonucleotide
  Sense strand starting at position 259 of SEQ ID NO: 1560715
auaaguguuuccguacuag

SEQ ID NO: 1619280 - RNA, 19 nt, Artificial Sequence
  Description of Artificial Sequence: Synthetic oligonucleotide
  Antisense strand to SEQ ID NO: 1619279
cuaguacggaaacacuuau

SEQ ID NO: 1619281 - RNA, 19 nt, Artificial Sequence
  Description of Artificial Sequence: Synthetic oligonucleotide
  Sense strand starting at position 263 of SEQ ID NO: 1560715
guguuuccguacuagaacu

SEQ ID NO: 1619282 - RNA, 19 nt, Artificial Sequence
  Description of Artificial Sequence: Synthetic oligonucleotide
  Antisense strand to SEQ ID NO: 1619281
aguucuaguacggaaacac

SEQ ID NO: 1619283 - RNA, 19 nt, Artificial Sequence
  Description of Artificial Sequence: Synthetic oligonucleotide
  Sense strand starting at position 303 of SEQ ID NO: 1560715
uggauaaagugguuugggu

SEQ ID NO: 1619284 - RNA, 19 nt, Artificial Sequence
  Description of Artificial Sequence: Synthetic oligonucleotide
  Antisense strand to SEQ ID NO: 1619283
acccaaaccacuuuaucca

SEQ ID NO: 1619285 - RNA, 19 nt, Artificial Sequence
  Description of Artificial Sequence: Synthetic oligonucleotide
  Sense strand starting at position 305 of SEQ ID NO: 1560715
gauaaagugguuuggguuu

SEQ ID NO: 1619286 - RNA, 19 nt, Artificial Sequence
  Description of Artificial Sequence: Synthetic oligonucleotide
  Antisense strand to SEQ ID NO: 1619285
aaacccaaaccacuuuauc

SEQ ID NO: 1619287 - RNA, 19 nt, Artificial Sequence
  Description of Artificial Sequence: Synthetic oligonucleotide
  Sense strand starting at position 311 of SEQ ID NO: 1560715
gugguuuggguuugggauu

SEQ ID NO: 1619288 - RNA, 19 nt, Artificial Sequence
  Description of Artificial Sequence: Synthetic oligonucleotide
  Antisense strand to SEQ ID NO: 1619287
aaucccaaacccaaaccac

SEQ ID NO: 1619289 - RNA, 19 nt, Artificial Sequence
  Description of Artificial Sequence: Synthetic oligonucleotide
  Sense strand starting at position 322 of SEQ ID NO: 1560715
uugggauucuuucucuugu

SEQ ID NO: 1619290 - RNA, 19 nt, Artificial Sequence
  Description of Artificial Sequence: Synthetic oligonucleotide
  Antisense strand to SEQ ID NO: 1619289
acaagagaaagaaucccaa

SEQ ID NO: 1619291 - RNA, 19 nt, Artificial Sequence
  Description of Artificial Sequence: Synthetic oligonucleotide
  Sense strand starting at position 323 of SEQ ID NO: 1560715
ugggauucuuucucuugua

SEQ ID NO: 1619292 - RNA, 19 nt, Artificial Sequence
  Description of Artificial Sequence: Synthetic oligonucleotide
  Antisense strand to SEQ ID NO: 1619291
uacaagagaaagaauccca

SEQ ID NO: 1619293 - RNA, 19 nt, Artificial Sequence
  Description of Artificial Sequence: Synthetic oligonucleotide
  Sense strand starting at position 324 of SEQ ID NO: 1560715
gggauucuuucucuuguau

SEQ ID NO: 1619294 - RNA, 19 nt, Artificial Sequence
  Description of Artificial Sequence: Synthetic oligonucleotide
  Antisense strand to SEQ ID NO: 1619293
auacaagagaaagaauccc

SEQ ID NO: 1619295 - RNA, 19 nt, Artificial Sequence
  Description of Artificial Sequence: Synthetic oligonucleotide
  Sense strand starting at position 756 of SEQ ID NO: 1560715
ccaagcaguuccgguauga

SEQ ID NO: 1619296 - RNA, 19 nt, Artificial Sequence
  Description of Artificial Sequence: Synthetic oligonucleotide
  Antisense strand to SEQ ID NO: 1619295
ucauaccggaacugcuugg

SEQ ID NO: 1619297 - RNA, 19 nt, Artificial Sequence
  Description of Artificial Sequence: Synthetic oligonucleotide
  Sense strand starting at position 828 of SEQ ID NO: 1560715
gagugagccagcugaugaa

SEQ ID NO: 1619298 - RNA, 19 nt, Artificial Sequence
  Description of Artificial Sequence: Synthetic oligonucleotide
  Antisense strand to SEQ ID NO: 1619297
uucaucagcuggcucacuc

SEQ ID NO: 1619299 - RNA, 19 nt, Artificial Sequence
  Description of Artificial Sequence: Synthetic oligonucleotide
  Sense strand starting at position 896 of SEQ ID NO: 1560715
gcgggugagcuggaucaua

SEQ ID NO: 1619300 - RNA, 19 nt, Artificial Sequence
  Description of Artificial Sequence: Synthetic oligonucleotide
  Antisense strand to SEQ ID NO: 1619299
uaugauccagcucacccgc

SEQ ID NO: 1619301 - RNA, 19 nt, Artificial Sequence
  Description of Artificial Sequence: Synthetic oligonucleotide
  Sense strand starting at position 901 of SEQ ID NO: 1560715
ugagcuggaucauauagaa

SEQ ID NO: 1619302 - RNA, 19 nt, Artificial Sequence
  Description of Artificial Sequence: Synthetic oligonucleotide
  Antisense strand to SEQ ID NO: 1619301
uucuauaugauccagcuca

SEQ ID NO: 1619303 - RNA, 19 nt, Artificial Sequence
  Description of Artificial Sequence: Synthetic oligonucleotide
  Sense strand starting at position 924 of SEQ ID NO: 1560715
ggaggagggcgcuauggau

SEQ ID NO: 1619304 - RNA, 19 nt, Artificial Sequence
  Description of Artificial Sequence: Synthetic oligonucleotide
  Antisense strand to SEQ ID NO: 1619303
auccauagcgcccuccucc

SEQ ID NO: 1619305 - RNA, 19 nt, Artificial Sequence
  Description of Artificial Sequence: Synthetic oligonucleotide
  Sense strand starting at position 1176 of SEQ ID NO: 1560715
cgauuaaggaguuagguuu

SEQ ID NO: 1619306 - RNA, 19 nt, Artificial Sequence
  Description of Artificial Sequence: Synthetic oligonucleotide
  Antisense strand to SEQ ID NO: 1619305
aaaccuaacuccuuaaucg

SEQ ID NO: 1619307 - RNA, 19 nt, Artificial Sequence
  Description of Artificial Sequence: Synthetic oligonucleotide
  Sense strand starting at position 1337 of SEQ ID NO: 1560715
uguauagugggucacugua

SEQ ID NO: 1619308 - RNA, 19 nt, Artificial Sequence
  Description of Artificial Sequence: Synthetic oligonucleotide
  Antisense strand to SEQ ID NO: 1619307
uacagugacccacuauaca

SEQ ID NO: 1619309 - RNA, 19 nt, Artificial Sequence
  Description of Artificial Sequence: Synthetic oligonucleotide
  Sense strand starting at position 1662 of SEQ ID NO: 1560715
cagggauuugggcgucgga

SEQ ID NO: 1619310 - RNA, 19 nt, Artificial Sequence
  Description of Artificial Sequence: Synthetic oligonucleotide
  Antisense strand to SEQ ID NO: 1619309
uccgacgcccaaaucccug

SEQ ID NO: 1619311 - RNA, 19 nt, Artificial Sequence
  Description of Artificial Sequence: Synthetic oligonucleotide
  Sense strand starting at position 2353 of SEQ ID NO: 1560715
caaccugcugucuagaguu

SEQ ID NO: 1619312 - RNA, 19 nt, Artificial Sequence
  Description of Artificial Sequence: Synthetic oligonucleotide
  Antisense strand to SEQ ID NO: 1619311
aacucuagacagcagguug

SEQ ID NO: 1619313 - RNA, 19 nt, Artificial Sequence
  Description of Artificial Sequence: Synthetic oligonucleotide
  Sense strand starting at position 2359 of SEQ ID NO: 1560715
gcugucuagaguuagggau

SEQ ID NO: 1619314 - RNA, 19 nt, Artificial Sequence
  Description of Artificial Sequence: Synthetic oligonucleotide
  Antisense strand to SEQ ID NO: 1619313
aucccuaacucuagacagc

SEQ ID NO: 1619315 - RNA, 19 nt, Artificial Sequence
  Description of Artificial Sequence: Synthetic oligonucleotide
  Sense strand starting at position 2363 of SEQ ID NO: 1560715
ucuagaguuagggauguau

SEQ ID NO: 1619316 - RNA, 19 nt, Artificial Sequence
  Description of Artificial Sequence: Synthetic oligonucleotide
  Antisense strand to SEQ ID NO: 1619315
auacaucccuaacucuaga

SEQ ID NO: 1619317 - RNA, 19 nt, Artificial Sequence
  Description of Artificial Sequence: Synthetic oligonucleotide
  Sense strand starting at position 2425 of SEQ ID NO: 1560715
guuaaaugaucuuccaagg

SEQ ID NO: 1619318 - RNA, 19 nt, Artificial Sequence
  Description of Artificial Sequence: Synthetic oligonucleotide
  Antisense strand to SEQ ID NO: 1619317
ccuuggaagaucauuuaac

SEQ ID NO: 1619319 - RNA, 19 nt, Artificial Sequence
  Description of Artificial Sequence: Synthetic oligonucleotide
  Sense strand starting at position 2490 of SEQ ID NO: 1560715
ggcuguuucugggccauuu

SEQ ID NO: 1619320 - RNA, 19 nt, Artificial Sequence
  Description of Artificial Sequence: Synthetic oligonucleotide
  Antisense strand to SEQ ID NO: 1619319
aaauggcccagaaacagcc

SEQ ID NO: 1619321 - RNA, 19 nt, Artificial Sequence
  Description of Artificial Sequence: Synthetic oligonucleotide
  Sense strand starting at position 3040 of SEQ ID NO: 1560715
caggaagucuguccugauu

SEQ ID NO: 1619322 - RNA, 19 nt, Artificial Sequence
  Description of Artificial Sequence: Synthetic oligonucleotide
  Antisense strand to SEQ ID NO: 1619321
aaucaggacagacuuccug

SEQ ID NO: 1619323 - RNA, 19 nt, Artificial Sequence
  Description of Artificial Sequence: Synthetic oligonucleotide
  Sense strand starting at position 3049 of SEQ ID NO: 1560715
uguccugauuccuggccaa

SEQ ID NO: 1619324 - RNA, 19 nt, Artificial Sequence
  Description of Artificial Sequence: Synthetic oligonucleotide
  Antisense strand to SEQ ID NO: 1619323
uuggccaggaaucaggaca

SEQ ID NO: 1619325 - RNA, 19 nt, Artificial Sequence
  Description of Artificial Sequence: Synthetic oligonucleotide
  Sense strand starting at position 3080 of SEQ ID NO: 1560715
ccuugagacucuuguuacu

SEQ ID NO: 1619326 - RNA, 19 nt, Artificial Sequence
  Description of Artificial Sequence: Synthetic oligonucleotide
  Antisense strand to SEQ ID NO: 1619325
aguaacaagagucucaagg

SEQ ID NO: 1619327 - RNA, 19 nt, Artificial Sequence
  Description of Artificial Sequence: Synthetic oligonucleotide
  Sense strand starting at position 3082 of SEQ ID NO: 1560715
uugagacucuuguuacucu

SEQ ID NO: 1619328 - RNA, 19 nt, Artificial Sequence
  Description of Artificial Sequence: Synthetic oligonucleotide
  Antisense strand to SEQ ID NO: 1619327
agaguaacaagagucucaa

SEQ ID NO: 1619329 - RNA, 19 nt, Artificial Sequence
  Description of Artificial Sequence: Synthetic oligonucleotide
  Sense strand starting at position 3086 of SEQ ID NO: 1560715
gacucuuguuacucuggaa

SEQ ID NO: 1619330 - RNA, 19 nt, Artificial Sequence
  Description of Artificial Sequence: Synthetic oligonucleotide
  Antisense strand to SEQ ID NO: 1619329
uuccagaguaacaagaguc

SEQ ID NO: 1619331 - RNA, 19 nt, Artificial Sequence
  Description of Artificial Sequence: Synthetic oligonucleotide
  Sense strand starting at position 3108 of SEQ ID NO: 1560715
gaccaugucuguggucaca

SEQ ID NO: 1619332 - RNA, 19 nt, Artificial Sequence
  Description of Artificial Sequence: Synthetic oligonucleotide
  Antisense strand to SEQ ID NO: 1619331
ugugaccacagacaugguc

SEQ ID NO: 1619333 - RNA, 19 nt, Artificial Sequence
  Description of Artificial Sequence: Synthetic oligonucleotide
  Sense strand starting at position 3143 of SEQ ID NO: 1560715
agcauuugcugaugagagg

SEQ ID NO: 1619334 - RNA, 19 nt, Artificial Sequence
  Description of Artificial Sequence: Synthetic oligonucleotide
  Antisense strand to SEQ ID NO: 1619333
ccucucaucagcaaaugcu

SEQ ID NO: 1619335 - RNA, 19 nt, Artificial Sequence
  Description of Artificial Sequence: Synthetic oligonucleotide
  Sense strand starting at position 3982 of SEQ ID NO: 1560715
agaacugcccucugguaga

SEQ ID NO: 1619336 - RNA, 19 nt, Artificial Sequence
  Description of Artificial Sequence: Synthetic oligonucleotide
  Antisense strand to SEQ ID NO: 1619335
ucuaccagagggcaguucu

SEQ ID NO: 1619337 - RNA, 19 nt, Artificial Sequence
  Description of Artificial Sequence: Synthetic oligonucleotide
  Sense strand starting at position 220 of SEQ ID NO: 1560716
ccagucuucccagaccuau

SEQ ID NO: 1619338 - RNA, 19 nt, Artificial Sequence
  Description of Artificial Sequence: Synthetic oligonucleotide
  Antisense strand to SEQ ID NO: 1619337
auaggucugggaagacugg

SEQ ID NO: 1619339 - RNA, 19 nt, Artificial Sequence
  Description of Artificial Sequence: Synthetic oligonucleotide
  Sense strand starting at position 1667 of SEQ ID NO: 1560716
cgcccuuauucccugauuu

SEQ ID NO: 1619340 - RNA, 19 nt, Artificial Sequence
  Description of Artificial Sequence: Synthetic oligonucleotide
  Antisense strand to SEQ ID NO: 1619339
aaaucagggaauaagggcg

SEQ ID NO: 1619341 - RNA, 19 nt, Artificial Sequence
  Description of Artificial Sequence: Synthetic oligonucleotide
  Sense strand starting at position 1668 of SEQ ID NO: 1560716
gcccuuauucccugauuug

SEQ ID NO: 1619342 - RNA, 19 nt, Artificial Sequence
  Description of Artificial Sequence: Synthetic oligonucleotide
  Antisense strand to SEQ ID NO: 1619341
caaaucagggaauaagggc

SEQ ID NO: 1619343 - RNA, 19 nt, Artificial Sequence
  Description of Artificial Sequence: Synthetic oligonucleotide
  Sense strand starting at position 2038 of SEQ ID NO: 1560716
gcauuaucucccgcgguca

SEQ ID NO: 1619344 - RNA, 19 nt, Artificial Sequence
  Description of Artificial Sequence: Synthetic oligonucleotide
  Antisense strand to SEQ ID NO: 1619343
ugaccgcgggagauaaugc

SEQ ID NO: 1619345 - RNA, 19 nt, Artificial Sequence
  Description of Artificial Sequence: Synthetic oligonucleotide
  Sense strand starting at position 2323 of SEQ ID NO: 1560716
uguaaacucagggauugca

SEQ ID NO: 1619346 - RNA, 19 nt, Artificial Sequence
  Description of Artificial Sequence: Synthetic oligonucleotide
  Antisense strand to SEQ ID NO: 1619345
ugcaaucccugaguuuaca

SEQ ID NO: 1619347 - RNA, 19 nt, Artificial Sequence
  Description of Artificial Sequence: Synthetic oligonucleotide
  Sense strand starting at position 2339 of SEQ ID NO: 1560716
gcaagcuugucuuuggcaa

SEQ ID NO: 1619348 - RNA, 19 nt, Artificial Sequence
  Description of Artificial Sequence: Synthetic oligonucleotide
  Antisense strand to SEQ ID NO: 1619347
uugccaaagacaagcuugc

SEQ ID NO: 1619349 - RNA, 19 nt, Artificial Sequence
  Description of Artificial Sequence: Synthetic oligonucleotide
  Sense strand starting at position 2340 of SEQ ID NO: 1560716
caagcuugucuuuggcaau

SEQ ID NO: 1619350 - RNA, 19 nt, Artificial Sequence
  Description of Artificial Sequence: Synthetic oligonucleotide
  Antisense strand to SEQ ID NO: 1619349
auugccaaagacaagcuug

SEQ ID NO: 1619351 - RNA, 19 nt, Artificial Sequence
  Description of Artificial Sequence: Synthetic oligonucleotide
  Sense strand starting at position 2381 of SEQ ID NO: 1560716
gaagaauucuccucuguug

SEQ ID NO: 1619352 - RNA, 19 nt, Artificial Sequence
  Description of Artificial Sequence: Synthetic oligonucleotide
  Antisense strand to SEQ ID NO: 1619351
caacagaggagaauucuuc

SEQ ID NO: 1619353 - RNA, 19 nt, Artificial Sequence
  Description of Artificial Sequence: Synthetic oligonucleotide
  Sense strand starting at position 2383 of SEQ ID NO: 1560716
agaauucuccucuguuguu

SEQ ID NO: 1619354 - RNA, 19 nt, Artificial Sequence
  Description of Artificial Sequence: Synthetic oligonucleotide
  Antisense strand to SEQ ID NO: 1619353
aacaacagaggagaauucu

SEQ ID NO: 1619355 - RNA, 19 nt, Artificial Sequence
  Description of Artificial Sequence: Synthetic oligonucleotide
  Sense strand starting at position 2440 of SEQ ID NO: 1560716
uucugauacucagaucuga

SEQ ID NO: 1619356 - RNA, 19 nt, Artificial Sequence
  Description of Artificial Sequence: Synthetic oligonucleotide
  Antisense strand to SEQ ID NO: 1619355
ucagaucugaguaucagaa

SEQ ID NO: 1619357 - RNA, 19 nt, Artificial Sequence
  Description of Artificial Sequence: Synthetic oligonucleotide
  Sense strand starting at position 2752 of SEQ ID NO: 1560716
gucucaaguacuugaaggu

SEQ ID NO: 1619358 - RNA, 19 nt, Artificial Sequence
  Description of Artificial Sequence: Synthetic oligonucleotide
  Antisense strand to SEQ ID NO: 1619357
accuucaaguacuugagac

SEQ ID NO: 1619359 - RNA, 19 nt, Artificial Sequence
  Description of Artificial Sequence: Synthetic oligonucleotide
  Sense strand starting at position 2817 of SEQ ID NO: 1560716
caaugauagcgccaaugca

SEQ ID NO: 1619360 - RNA, 19 nt, Artificial Sequence
  Description of Artificial Sequence: Synthetic oligonucleotide
  Antisense strand to SEQ ID NO: 1619359
ugcauuggcgcuaucauug

SEQ ID NO: 1619361 - RNA, 19 nt, Artificial Sequence
  Description of Artificial Sequence: Synthetic oligonucleotide
  Sense strand starting at position 2880 of SEQ ID NO: 1560716
ggagucgucuucucucaac

SEQ ID NO: 1619362 - RNA, 19 nt, Artificial Sequence
  Description of Artificial Sequence: Synthetic oligonucleotide
  Antisense strand to SEQ ID NO: 1619361
guugagagaagacgacucc

SEQ ID NO: 1619363 - RNA, 19 nt, Artificial Sequence
  Description of Artificial Sequence: Synthetic oligonucleotide
  Sense strand starting at position 3007 of SEQ ID NO: 1560716
gguucaugcagagaggugu

SEQ ID NO: 1619364 - RNA, 19 nt, Artificial Sequence
  Description of Artificial Sequence: Synthetic oligonucleotide
  Antisense strand to SEQ ID NO: 1619363
acaccucucugcaugaacc

SEQ ID NO: 1619365 - RNA, 19 nt, Artificial Sequence
  Description of Artificial Sequence: Synthetic oligonucleotide
  Sense strand starting at position 3015 of SEQ ID NO: 1560716
cagagagguguuugcuaaa

SEQ ID NO: 1619366 - RNA, 19 nt, Artificial Sequence
  Description of Artificial Sequence: Synthetic oligonucleotide
  Antisense strand to SEQ ID NO: 1619365
uuuagcaaacaccucucug

SEQ ID NO: 1619367 - RNA, 19 nt, Artificial Sequence
  Description of Artificial Sequence: Synthetic oligonucleotide
  Sense strand starting at position 3062 of SEQ ID NO: 1560716
gcccuuagugggcaagagu

SEQ ID NO: 1619368 - RNA, 19 nt, Artificial Sequence
  Description of Artificial Sequence: Synthetic oligonucleotide
  Antisense strand to SEQ ID NO: 1619367
acucuugcccacuaagggc

SEQ ID NO: 1619369 - RNA, 19 nt, Artificial Sequence
  Description of Artificial Sequence: Synthetic oligonucleotide
  Sense strand starting at position 3078 of SEQ ID NO: 1560716
aguaggugucuggacggaa

SEQ ID NO: 1619370 - RNA, 19 nt, Artificial Sequence
  Description of Artificial Sequence: Synthetic oligonucleotide
  Antisense strand to SEQ ID NO: 1619369
uuccguccagacaccuacu

SEQ ID NO: 1619371 - RNA, 19 nt, Artificial Sequence
  Description of Artificial Sequence: Synthetic oligonucleotide
  Sense strand starting at position 3184 of SEQ ID NO: 1560716
uguagcaucguuuagcaaa

SEQ ID NO: 1619372 - RNA, 19 nt, Artificial Sequence
  Description of Artificial Sequence: Synthetic oligonucleotide
  Antisense strand to SEQ ID NO: 1619371
uuugcuaaacgaugcuaca

SEQ ID NO: 1619373 - RNA, 19 nt, Artificial Sequence
  Description of Artificial Sequence: Synthetic oligonucleotide
  Sense strand starting at position 3236 of SEQ ID NO: 1560716
gagcauuuguuauaugcac

SEQ ID NO: 1619374 - RNA, 19 nt, Artificial Sequence
  Description of Artificial Sequence: Synthetic oligonucleotide
  Antisense strand to SEQ ID NO: 1619373
gugcauauaacaaaugcuc

SEQ ID NO: 1619375 - RNA, 19 nt, Artificial Sequence
  Description of Artificial Sequence: Synthetic oligonucleotide
  Sense strand starting at position 3238 of SEQ ID NO: 1560716
gcauuuguuauaugcacga

SEQ ID NO: 1619376 - RNA, 19 nt, Artificial Sequence
  Description of Artificial Sequence: Synthetic oligonucleotide
  Antisense strand to SEQ ID NO: 1619375
ucgugcauauaacaaaugc

SEQ ID NO: 1619377 - RNA, 19 nt, Artificial Sequence
  Description of Artificial Sequence: Synthetic oligonucleotide
  Sense strand starting at position 3242 of SEQ ID NO: 1560716
uuguuauaugcacgacacu

SEQ ID NO: 1619378 - RNA, 19 nt, Artificial Sequence
  Description of Artificial Sequence: Synthetic oligonucleotide
  Antisense strand to SEQ ID NO: 1619377
agugucgugcauauaacaa

SEQ ID NO: 1619379 - RNA, 19 nt, Artificial Sequence
  Description of Artificial Sequence: Synthetic oligonucleotide
  Sense strand starting at position 3243 of SEQ ID NO: 1560716
uguuauaugcacgacacua

SEQ ID NO: 1619380 - RNA, 19 nt, Artificial Sequence
  Description of Artificial Sequence: Synthetic oligonucleotide
  Antisense strand to SEQ ID NO: 1619379
uagugucgugcauauaaca

SEQ ID NO: 1619381 - RNA, 19 nt, Artificial Sequence
  Description of Artificial Sequence: Synthetic oligonucleotide
  Sense strand starting at position 3256 of SEQ ID NO: 1560716
acacuaugaugagugcuuu

SEQ ID NO: 1619382 - RNA, 19 nt, Artificial Sequence
  Description of Artificial Sequence: Synthetic oligonucleotide
  Antisense strand to SEQ ID NO: 1619381
aaagcacucaucauagugu

SEQ ID NO: 1619383 - RNA, 19 nt, Artificial Sequence
  Description of Artificial Sequence: Synthetic oligonucleotide
  Sense strand starting at position 3257 of SEQ ID NO: 1560716
cacuaugaugagugcuuua

SEQ ID NO: 1619384 - RNA, 19 nt, Artificial Sequence
  Description of Artificial Sequence: Synthetic oligonucleotide
  Antisense strand to SEQ ID NO: 1619383
uaaagcacucaucauagug

SEQ ID NO: 1619385 - RNA, 19 nt, Artificial Sequence
  Description of Artificial Sequence: Synthetic oligonucleotide
  Sense strand starting at position 3260 of SEQ ID NO: 1560716
uaugaugagugcuuuaccu

SEQ ID NO: 1619386 - RNA, 19 nt, Artificial Sequence
  Description of Artificial Sequence: Synthetic oligonucleotide
  Antisense strand to SEQ ID NO: 1619385
agguaaagcacucaucaua

SEQ ID NO: 1619387 - RNA, 19 nt, Artificial Sequence
  Description of Artificial Sequence: Synthetic oligonucleotide
  Sense strand starting at position 3270 of SEQ ID NO: 1560716
gcuuuaccugcguagcaaa

SEQ ID NO: 1619388 - RNA, 19 nt, Artificial Sequence
  Description of Artificial Sequence: Synthetic oligonucleotide
  Antisense strand to SEQ ID NO: 1619387
uuugcuacgcagguaaagc

SEQ ID NO: 1619389 - RNA, 19 nt, Artificial Sequence
  Description of Artificial Sequence: Synthetic oligonucleotide
  Sense strand starting at position 3282 of SEQ ID NO: 1560716
uagcaaacuuaugagagga

SEQ ID NO: 1619390 - RNA, 19 nt, Artificial Sequence
  Description of Artificial Sequence: Synthetic oligonucleotide
  Antisense strand to SEQ ID NO: 1619389
uccucucauaaguuugcua

SEQ ID NO: 1619391 - RNA, 19 nt, Artificial Sequence
  Description of Artificial Sequence: Synthetic oligonucleotide
  Sense strand starting at position 3284 of SEQ ID NO: 1560716
gcaaacuuaugagaggauu

SEQ ID NO: 1619392 - RNA, 19 nt, Artificial Sequence
  Description of Artificial Sequence: Synthetic oligonucleotide
  Antisense strand to SEQ ID NO: 1619391
aauccucucauaaguuugc

SEQ ID NO: 1619393 - RNA, 19 nt, Artificial Sequence
  Description of Artificial Sequence: Synthetic oligonucleotide
  Sense strand starting at position 3480 of SEQ ID NO: 1560716
auggcagccauggguuaaa

SEQ ID NO: 1619394 - RNA, 19 nt, Artificial Sequence
  Description of Artificial Sequence: Synthetic oligonucleotide
  Antisense strand to SEQ ID NO: 1619393
uuuaacccauggcugccau

SEQ ID NO: 1619395 - RNA, 19 nt, Artificial Sequence
  Description of Artificial Sequence: Synthetic oligonucleotide
  Sense strand starting at position 3489 of SEQ ID NO: 1560716
auggguuaaaucggcugau

SEQ ID NO: 1619396 - RNA, 19 nt, Artificial Sequence
  Description of Artificial Sequence: Synthetic oligonucleotide
  Antisense strand to SEQ ID NO: 1619395
aucagccgauuuaacccau

SEQ ID NO: 1619397 - RNA, 19 nt, Artificial Sequence
  Description of Artificial Sequence: Synthetic oligonucleotide
  Sense strand starting at position 3490 of SEQ ID NO: 1560716
uggguuaaaucggcugauu

SEQ ID NO: 1619398 - RNA, 19 nt, Artificial Sequence
  Description of Artificial Sequence: Synthetic oligonucleotide
  Antisense strand to SEQ ID NO: 1619397
aaucagccgauuuaaccca

SEQ ID NO: 1619399 - RNA, 19 nt, Artificial Sequence
  Description of Artificial Sequence: Synthetic oligonucleotide
  Sense strand starting at position 3492 of SEQ ID NO: 1560716
gguuaaaucggcugauuau

SEQ ID NO: 1619400 - RNA, 19 nt, Artificial Sequence
  Description of Artificial Sequence: Synthetic oligonucleotide
  Antisense strand to SEQ ID NO: 1619399
auaaucagccgauuuaacc

SEQ ID NO: 1619401 - RNA, 19 nt, Artificial Sequence
  Description of Artificial Sequence: Synthetic oligonucleotide
  Sense strand starting at position 3493 of SEQ ID NO: 1560716
guuaaaucggcugauuaug

SEQ ID NO: 1619402 - RNA, 19 nt, Artificial Sequence
  Description of Artificial Sequence: Synthetic oligonucleotide
  Antisense strand to SEQ ID NO: 1619401
cauaaucagccgauuuaac

SEQ ID NO: 1619403 - RNA, 19 nt, Artificial Sequence
  Description of Artificial Sequence: Synthetic oligonucleotide
  Sense strand starting at position 3495 of SEQ ID NO: 1560716
uaaaucggcugauuaugaa

SEQ ID NO: 1619404 - RNA, 19 nt, Artificial Sequence
  Description of Artificial Sequence: Synthetic oligonucleotide
  Antisense strand to SEQ ID NO: 1619403
uucauaaucagccgauuua

SEQ ID NO: 1619405 - RNA, 19 nt, Artificial Sequence
  Description of Artificial Sequence: Synthetic oligonucleotide
  Sense strand starting at position 3613 of SEQ ID NO: 1560716
ggccguagacgagaggauu

SEQ ID NO: 1619406 - RNA, 19 nt, Artificial Sequence
  Description of Artificial Sequence: Synthetic oligonucleotide
  Antisense strand to SEQ ID NO: 1619405
aauccucucgucuacggcc

SEQ ID NO: 1619407 - RNA, 19 nt, Artificial Sequence
  Description of Artificial Sequence: Synthetic oligonucleotide
  Sense strand starting at position 3777 of SEQ ID NO: 1560716
cuuugcuccuugcuugauu

SEQ ID NO: 1619408 - RNA, 19 nt, Artificial Sequence
  Description of Artificial Sequence: Synthetic oligonucleotide
  Antisense strand to SEQ ID NO: 1619407
aaucaagcaaggagcaaag

SEQ ID NO: 1619409 - RNA, 19 nt, Artificial Sequence
  Description of Artificial Sequence: Synthetic oligonucleotide
  Sense strand starting at position 3779 of SEQ ID NO: 1560716
uugcuccuugcuugauuua

SEQ ID NO: 1619410 - RNA, 19 nt, Artificial Sequence
  Description of Artificial Sequence: Synthetic oligonucleotide
  Antisense strand to SEQ ID NO: 1619409
uaaaucaagcaaggagcaa

SEQ ID NO: 1619411 - RNA, 19 nt, Artificial Sequence
  Description of Artificial Sequence: Synthetic oligonucleotide
  Sense strand starting at position 3780 of SEQ ID NO: 1560716
ugcuccuugcuugauuuau

SEQ ID NO: 1619412 - RNA, 19 nt, Artificial Sequence
  Description of Artificial Sequence: Synthetic oligonucleotide
  Antisense strand to SEQ ID NO: 1619411
auaaaucaagcaaggagca

SEQ ID NO: 1619413 - RNA, 19 nt, Artificial Sequence
  Description of Artificial Sequence: Synthetic oligonucleotide
  Sense strand starting at position 3862 of SEQ ID NO: 1560716
cugcuucuagaauggaaag

SEQ ID NO: 1619414 - RNA, 19 nt, Artificial Sequence
  Description of Artificial Sequence: Synthetic oligonucleotide
  Antisense strand to SEQ ID NO: 1619413
cuuuccauucuagaagcag

SEQ ID NO: 1619415 - RNA, 19 nt, Artificial Sequence
  Description of Artificial Sequence: Synthetic oligonucleotide
  Sense strand starting at position 3906 of SEQ ID NO: 1560716
ggccucguuuggagaggaa

SEQ ID NO: 1619416 - RNA, 19 nt, Artificial Sequence
  Description of Artificial Sequence: Synthetic oligonucleotide
  Antisense strand to SEQ ID NO: 1619415
uuccucuccaaacgaggcc

SEQ ID NO: 1619417 - RNA, 19 nt, Artificial Sequence
  Description of Artificial Sequence: Synthetic oligonucleotide
  Sense strand starting at position 96 of SEQ ID NO: 1560717
gcuacaaugugauuucgac

SEQ ID NO: 1619418 - RNA, 19 nt, Artificial Sequence
  Description of Artificial Sequence: Synthetic oligonucleotide
  Antisense strand to SEQ ID NO: 1619417
gucgaaaucacauuguagc

SEQ ID NO: 1619419 - RNA, 19 nt, Artificial Sequence
  Description of Artificial Sequence: Synthetic oligonucleotide
  Sense strand starting at position 100 of SEQ ID NO: 1560717
caaugugauuucgacauag

SEQ ID NO: 1619420 - RNA, 19 nt, Artificial Sequence
  Description of Artificial Sequence: Synthetic oligonucleotide
  Antisense strand to SEQ ID NO: 1619419
cuaugucgaaaucacauug

SEQ ID NO: 1619421 - RNA, 19 nt, Artificial Sequence
  Description of Artificial Sequence: Synthetic oligonucleotide
  Sense strand starting at position 501 of SEQ ID NO: 1560717
gaguguugcccaggaugga

SEQ ID NO: 1619422 - RNA, 19 nt, Artificial Sequence
  Description of Artificial Sequence: Synthetic oligonucleotide
  Antisense strand to SEQ ID NO: 1619421
uccauccugggcaacacuc

SEQ ID NO: 1619423 - RNA, 19 nt, Artificial Sequence
  Description of Artificial Sequence: Synthetic oligonucleotide
  Sense strand starting at position 843 of SEQ ID NO: 1560717
cgaggaaugguuuagucuu

SEQ ID NO: 1619424 - RNA, 19 nt, Artificial Sequence
  Description of Artificial Sequence: Synthetic oligonucleotide
  Antisense strand to SEQ ID NO: 1619423
aagacuaaaccauuccucg

SEQ ID NO: 1619425 - RNA, 19 nt, Artificial Sequence
  Description of Artificial Sequence: Synthetic oligonucleotide
  Sense strand starting at position 1026 of SEQ ID NO: 1560717
ucagucgggcuccagaauu

SEQ ID NO: 1619426 - RNA, 19 nt, Artificial Sequence
  Description of Artificial Sequence: Synthetic oligonucleotide
  Antisense strand to SEQ ID NO: 1619425
aauucuggagcccgacuga

SEQ ID NO: 1619427 - RNA, 19 nt, Artificial Sequence
  Description of Artificial Sequence: Synthetic oligonucleotide
  Sense strand starting at position 1051 of SEQ ID NO: 1560717
cccuaacccuuagaugaug

SEQ ID NO: 1619428 - RNA, 19 nt, Artificial Sequence
  Description of Artificial Sequence: Synthetic oligonucleotide
  Antisense strand to SEQ ID NO: 1619427
caucaucuaaggguuaggg

SEQ ID NO: 1619429 - RNA, 19 nt, Artificial Sequence
  Description of Artificial Sequence: Synthetic oligonucleotide
  Sense strand starting at position 1127 of SEQ ID NO: 1560717
cccuuugacagguggagaa

SEQ ID NO: 1619430 - RNA, 19 nt, Artificial Sequence
  Description of Artificial Sequence: Synthetic oligonucleotide
  Antisense strand to SEQ ID NO: 1619429
uucuccaccugucaaaggg

SEQ ID NO: 1619431 - RNA, 19 nt, Artificial Sequence
  Description of Artificial Sequence: Synthetic oligonucleotide
  Sense strand starting at position 1166 of SEQ ID NO: 1560717
gcacuuucccaaggguaca

SEQ ID NO: 1619432 - RNA, 19 nt, Artificial Sequence
  Description of Artificial Sequence: Synthetic oligonucleotide
  Antisense strand to SEQ ID NO: 1619431
uguacccuugggaaagugc

SEQ ID NO: 1619433 - RNA, 19 nt, Artificial Sequence
  Description of Artificial Sequence: Synthetic oligonucleotide
  Sense strand starting at position 1186 of SEQ ID NO: 1560717
gcccaaagucaucgugacu

SEQ ID NO: 1619434 - RNA, 19 nt, Artificial Sequence
  Description of Artificial Sequence: Synthetic oligonucleotide
  Antisense strand to SEQ ID NO: 1619433
agucacgaugacuuugggc

SEQ ID NO: 1619435 - RNA, 19 nt, Artificial Sequence
  Description of Artificial Sequence: Synthetic oligonucleotide
  Sense strand starting at position 1191 of SEQ ID NO: 1560717
aagucaucgugacuccuga

SEQ ID NO: 1619436 - RNA, 19 nt, Artificial Sequence
  Description of Artificial Sequence: Synthetic oligonucleotide
  Antisense strand to SEQ ID NO: 1619435
ucaggagucacgaugacuu

SEQ ID NO: 1619437 - RNA, 19 nt, Artificial Sequence
  Description of Artificial Sequence: Synthetic oligonucleotide
  Sense strand starting at position 1195 of SEQ ID NO: 1560717
caucgugacuccugaaauc

SEQ ID NO: 1619438 - RNA, 19 nt, Artificial Sequence
  Description of Artificial Sequence: Synthetic oligonucleotide
  Antisense strand to SEQ ID NO: 1619437
gauuucaggagucacgaug

SEQ ID NO: 1619439 - RNA, 19 nt, Artificial Sequence
  Description of Artificial Sequence: Synthetic oligonucleotide
  Sense strand starting at position 2041 of SEQ ID NO: 1560717
agaccucucuggcccaauu

SEQ ID NO: 1619440 - RNA, 19 nt, Artificial Sequence
  Description of Artificial Sequence: Synthetic oligonucleotide
  Antisense strand to SEQ ID NO: 1619439
aauugggccagagaggucu

SEQ ID NO: 1619441 - RNA, 19 nt, Artificial Sequence
  Description of Artificial Sequence: Synthetic oligonucleotide
  Sense strand starting at position 2068 of SEQ ID NO: 1560717
gacuguuaagccugaagga

SEQ ID NO: 1619442 - RNA, 19 nt, Artificial Sequence
  Description of Artificial Sequence: Synthetic oligonucleotide
  Antisense strand to SEQ ID NO: 1619441
uccuucaggcuuaacaguc

SEQ ID NO: 1619443 - RNA, 19 nt, Artificial Sequence
  Description of Artificial Sequence: Synthetic oligonucleotide
  Sense strand starting at position 2104 of SEQ ID NO: 1560717
gugggcaguucuggaguga

SEQ ID NO: 1619444 - RNA, 19 nt, Artificial Sequence
  Description of Artificial Sequence: Synthetic oligonucleotide
  Antisense strand to SEQ ID NO: 1619443
ucacuccagaacugcccac

SEQ ID NO: 1619445 - RNA, 19 nt, Artificial Sequence
  Description of Artificial Sequence: Synthetic oligonucleotide
  Sense strand starting at position 2108 of SEQ ID NO: 1560717
gcaguucuggagugagcaa

SEQ ID NO: 1619446 - RNA, 19 nt, Artificial Sequence
  Description of Artificial Sequence: Synthetic oligonucleotide
  Antisense strand to SEQ ID NO: 1619445
uugcucacuccagaacugc

SEQ ID NO: 1619447 - RNA, 19 nt, Artificial Sequence
  Description of Artificial Sequence: Synthetic oligonucleotide
  Sense strand starting at position 2139 of SEQ ID NO: 1560717
gccaauaacgcuuaaacuu

SEQ ID NO: 1619448 - RNA, 19 nt, Artificial Sequence
  Description of Artificial Sequence: Synthetic oligonucleotide
  Antisense strand to SEQ ID NO: 1619447
aaguuuaagcguuauuggc

SEQ ID NO: 1619449 - RNA, 19 nt, Artificial Sequence
  Description of Artificial Sequence: Synthetic oligonucleotide
  Sense strand starting at position 2603 of SEQ ID NO: 1560717
gggccuuauugcccucaga

SEQ ID NO: 1619450 - RNA, 19 nt, Artificial Sequence
  Description of Artificial Sequence: Synthetic oligonucleotide
  Antisense strand to SEQ ID NO: 1619449
ucugagggcaauaaggccc

SEQ ID NO: 1619451 - RNA, 19 nt, Artificial Sequence
  Description of Artificial Sequence: Synthetic oligonucleotide
  Sense strand starting at position 2606 of SEQ ID NO: 1560717
ccuuauugcccucagaaag

SEQ ID NO: 1619452 - RNA, 19 nt, Artificial Sequence
  Description of Artificial Sequence: Synthetic oligonucleotide
  Antisense strand to SEQ ID NO: 1619451
cuuucugagggcaauaagg

SEQ ID NO: 1619453 - RNA, 19 nt, Artificial Sequence
  Description of Artificial Sequence: Synthetic oligonucleotide
  Sense strand starting at position 2944 of SEQ ID NO: 1560717
ugggcaagaucauggcuua

SEQ ID NO: 1619454 - RNA, 19 nt, Artificial Sequence
  Description of Artificial Sequence: Synthetic oligonucleotide
  Antisense strand to SEQ ID NO: 1619453
uaagccaugaucuugccca

SEQ ID NO: 1619455 - RNA, 19 nt, Artificial Sequence
  Description of Artificial Sequence: Synthetic oligonucleotide
  Sense strand starting at position 3573 of SEQ ID NO: 1560717
gcaauucucccgcauuggu

SEQ ID NO: 1619456 - RNA, 19 nt, Artificial Sequence
  Description of Artificial Sequence: Synthetic oligonucleotide
  Antisense strand to SEQ ID NO: 1619455
accaaugcgggagaauugc

SEQ ID NO: 1619457 - RNA, 19 nt, Artificial Sequence
  Description of Artificial Sequence: Synthetic oligonucleotide
  Sense strand starting at position 3651 of SEQ ID NO: 1560717
uuaccauguucccgauaga

SEQ ID NO: 1619458 - RNA, 19 nt, Artificial Sequence
  Description of Artificial Sequence: Synthetic oligonucleotide
  Antisense strand to SEQ ID NO: 1619457
ucuaucgggaacaugguaa

SEQ ID NO: 1619459 - RNA, 19 nt, Artificial Sequence
  Description of Artificial Sequence: Synthetic oligonucleotide
  Sense strand starting at position 3652 of SEQ ID NO: 1560717
uaccauguucccgauagac

SEQ ID NO: 1619460 - RNA, 19 nt, Artificial Sequence
  Description of Artificial Sequence: Synthetic oligonucleotide
  Antisense strand to SEQ ID NO: 1619459
gucuaucgggaacauggua

SEQ ID NO: 1619461 - RNA, 19 nt, Artificial Sequence
  Description of Artificial Sequence: Synthetic oligonucleotide
  Sense strand starting at position 3654 of SEQ ID NO: 1560717
ccauguucccgauagaccu

SEQ ID NO: 1619462 - RNA, 19 nt, Artificial Sequence
  Description of Artificial Sequence: Synthetic oligonucleotide
  Antisense strand to SEQ ID NO: 1619461
aggucuaucgggaacaugg

SEQ ID NO: 1619463 - RNA, 19 nt, Artificial Sequence
  Description of Artificial Sequence: Synthetic oligonucleotide
  Sense strand starting at position 3738 of SEQ ID NO: 1560717
gugcguucuggacagagca

SEQ ID NO: 1619464 - RNA, 19 nt, Artificial Sequence
  Description of Artificial Sequence: Synthetic oligonucleotide
  Antisense strand to SEQ ID NO: 1619463
ugcucuguccagaacgcac

SEQ ID NO: 1619465 - RNA, 19 nt, Artificial Sequence
  Description of Artificial Sequence: Synthetic oligonucleotide
  Sense strand starting at position 3760 of SEQ ID NO: 1560717
cugacaacguggucuguga

SEQ ID NO: 1619466 - RNA, 19 nt, Artificial Sequence
  Description of Artificial Sequence: Synthetic oligonucleotide
  Antisense strand to SEQ ID NO: 1619465
ucacagaccacguugucag

SEQ ID NO: 1619467 - RNA, 19 nt, Artificial Sequence
  Description of Artificial Sequence: Synthetic oligonucleotide
  Sense strand starting at position 3764 of SEQ ID NO: 1560717
caacguggucugugaacca

SEQ ID NO: 1619468 - RNA, 19 nt, Artificial Sequence
  Description of Artificial Sequence: Synthetic oligonucleotide
  Antisense strand to SEQ ID NO: 1619467
ugguucacagaccacguug

SEQ ID NO: 1619469 - RNA, 19 nt, Artificial Sequence
  Description of Artificial Sequence: Synthetic oligonucleotide
  Sense strand starting at position 3812 of SEQ ID NO: 1560717
uuaugagauucagugacgu

SEQ ID NO: 1619470 - RNA, 19 nt, Artificial Sequence
  Description of Artificial Sequence: Synthetic oligonucleotide
  Antisense strand to SEQ ID NO: 1619469
acgucacugaaucucauaa

SEQ ID NO: 1619471 - RNA, 19 nt, Artificial Sequence
  Description of Artificial Sequence: Synthetic oligonucleotide
  Sense strand starting at position 1133 of SEQ ID NO: 1560718
cccaaagugccgggaauaa

SEQ ID NO: 1619472 - RNA, 19 nt, Artificial Sequence
  Description of Artificial Sequence: Synthetic oligonucleotide
  Antisense strand to SEQ ID NO: 1619471
uuauucccggcacuuuggg

SEQ ID NO: 1619473 - RNA, 19 nt, Artificial Sequence
  Description of Artificial Sequence: Synthetic oligonucleotide
  Sense strand starting at position 1213 of SEQ ID NO: 1560718
aguaacuuuaagugggauu

SEQ ID NO: 1619474 - RNA, 19 nt, Artificial Sequence
  Description of Artificial Sequence: Synthetic oligonucleotide
  Antisense strand to SEQ ID NO: 1619473
aaucccacuuaaaguuacu

SEQ ID NO: 1619475 - RNA, 19 nt, Artificial Sequence
  Description of Artificial Sequence: Synthetic oligonucleotide
  Sense strand starting at position 1297 of SEQ ID NO: 1560718
cuaugugucugucuuuaag

SEQ ID NO: 1619476 - RNA, 19 nt, Artificial Sequence
  Description of Artificial Sequence: Synthetic oligonucleotide
  Antisense strand to SEQ ID NO: 1619475
cuuaaagacagacacauag

SEQ ID NO: 1619477 - RNA, 19 nt, Artificial Sequence
  Description of Artificial Sequence: Synthetic oligonucleotide
  Sense strand starting at position 1306 of SEQ ID NO: 1560718
ugucuuuaaggccgaacau

SEQ ID NO: 1619478 - RNA, 19 nt, Artificial Sequence
  Description of Artificial Sequence: Synthetic oligonucleotide
  Antisense strand to SEQ ID NO: 1619477
auguucggccuuaaagaca

SEQ ID NO: 1619479 - RNA, 19 nt, Artificial Sequence
  Description of Artificial Sequence: Synthetic oligonucleotide
  Sense strand starting at position 1307 of SEQ ID NO: 1560718
gucuuuaaggccgaacauu

SEQ ID NO: 1619480 - RNA, 19 nt, Artificial Sequence
  Description of Artificial Sequence: Synthetic oligonucleotide
  Antisense strand to SEQ ID NO: 1619479
aauguucggccuuaaagac

SEQ ID NO: 1619481 - RNA, 19 nt, Artificial Sequence
  Description of Artificial Sequence: Synthetic oligonucleotide
  Sense strand starting at position 1403 of SEQ ID NO: 1560718
ugcugaaguggccaauuaa

SEQ ID NO: 1619482 - RNA, 19 nt, Artificial Sequence
  Description of Artificial Sequence: Synthetic oligonucleotide
  Antisense strand to SEQ ID NO: 1619481
uuaauuggccacuucagca

SEQ ID NO: 1619483 - RNA, 19 nt, Artificial Sequence
  Description of Artificial Sequence: Synthetic oligonucleotide
  Sense strand starting at position 1418 of SEQ ID NO: 1560718
uuaaacgggcuccauaauu

SEQ ID NO: 1619484 - RNA, 19 nt, Artificial Sequence
  Description of Artificial Sequence: Synthetic oligonucleotide
  Antisense strand to SEQ ID NO: 1619483
aauuauggagcccguuuaa

SEQ ID NO: 1619485 - RNA, 19 nt, Artificial Sequence
  Description of Artificial Sequence: Synthetic oligonucleotide
  Sense strand starting at position 1439 of SEQ ID NO: 1560718
uuugaauguuugguaacgu

SEQ ID NO: 1619486 - RNA, 19 nt, Artificial Sequence
  Description of Artificial Sequence: Synthetic oligonucleotide
  Antisense strand to SEQ ID NO: 1619485
acguuaccaaacauucaaa

SEQ ID NO: 1619487 - RNA, 19 nt, Artificial Sequence
  Description of Artificial Sequence: Synthetic oligonucleotide
  Sense strand starting at position 1642 of SEQ ID NO: 1560718
ggguccaaucgcuacagua

SEQ ID NO: 1619488 - RNA, 19 nt, Artificial Sequence
  Description of Artificial Sequence: Synthetic oligonucleotide
  Antisense strand to SEQ ID NO: 1619487
uacuguagcgauuggaccc

SEQ ID NO: 1619489 - RNA, 19 nt, Artificial Sequence
  Description of Artificial Sequence: Synthetic oligonucleotide
  Sense strand starting at position 1644 of SEQ ID NO: 1560718
guccaaucgcuacaguauc

SEQ ID NO: 1619490 - RNA, 19 nt, Artificial Sequence
  Description of Artificial Sequence: Synthetic oligonucleotide
  Antisense strand to SEQ ID NO: 1619489
gauacuguagcgauuggac

SEQ ID NO: 1619491 - RNA, 19 nt, Artificial Sequence
  Description of Artificial Sequence: Synthetic oligonucleotide
  Sense strand starting at position 1793 of SEQ ID NO: 1560718
cugucaauuccucagugca

SEQ ID NO: 1619492 - RNA, 19 nt, Artificial Sequence
  Description of Artificial Sequence: Synthetic oligonucleotide
  Antisense strand to SEQ ID NO: 1619491
ugcacugaggaauugacag

SEQ ID NO: 1619493 - RNA, 19 nt, Artificial Sequence
  Description of Artificial Sequence: Synthetic oligonucleotide
  Sense strand starting at position 1993 of SEQ ID NO: 1560718
gcacguuuccggaagacgu

SEQ ID NO: 1619494 - RNA, 19 nt, Artificial Sequence
  Description of Artificial Sequence: Synthetic oligonucleotide
  Antisense strand to SEQ ID NO: 1619493
acgucuuccggaaacgugc

SEQ ID NO: 1619495 - RNA, 19 nt, Artificial Sequence
  Description of Artificial Sequence: Synthetic oligonucleotide
  Sense strand starting at position 2063 of SEQ ID NO: 1560718
cguggaggugucugggaaa

SEQ ID NO: 1619496 - RNA, 19 nt, Artificial Sequence
  Description of Artificial Sequence: Synthetic oligonucleotide
  Antisense strand to SEQ ID NO: 1619495
uuucccagacaccuccacg

SEQ ID NO: 1619497 - RNA, 19 nt, Artificial Sequence
  Description of Artificial Sequence: Synthetic oligonucleotide
  Sense strand starting at position 2065 of SEQ ID NO: 1560718
uggaggugucugggaaaug

SEQ ID NO: 1619498 - RNA, 19 nt, Artificial Sequence
  Description of Artificial Sequence: Synthetic oligonucleotide
  Antisense strand to SEQ ID NO: 1619497
cauuucccagacaccucca

SEQ ID NO: 1619499 - RNA, 19 nt, Artificial Sequence
  Description of Artificial Sequence: Synthetic oligonucleotide
  Sense strand starting at position 2155 of SEQ ID NO: 1560718
ggaggcguucaagggauau

SEQ ID NO: 1619500 - RNA, 19 nt, Artificial Sequence
  Description of Artificial Sequence: Synthetic oligonucleotide
  Antisense strand to SEQ ID NO: 1619499
auaucccuugaacgccucc

SEQ ID NO: 1619501 - RNA, 19 nt, Artificial Sequence
  Description of Artificial Sequence: Synthetic oligonucleotide
  Sense strand starting at position 2228 of SEQ ID NO: 1560718
cuuuauauguuccugauuc

SEQ ID NO: 1619502 - RNA, 19 nt, Artificial Sequence
  Description of Artificial Sequence: Synthetic oligonucleotide
  Antisense strand to SEQ ID NO: 1619501
gaaucaggaacauauaaag

SEQ ID NO: 1619503 - RNA, 19 nt, Artificial Sequence
  Description of Artificial Sequence: Synthetic oligonucleotide
  Sense strand starting at position 2230 of SEQ ID NO: 1560718
uuauauguuccugauucca

SEQ ID NO: 1619504 - RNA, 19 nt, Artificial Sequence
  Description of Artificial Sequence: Synthetic oligonucleotide
  Antisense strand to SEQ ID NO: 1619503
uggaaucaggaacauauaa

SEQ ID NO: 1619505 - RNA, 19 nt, Artificial Sequence
  Description of Artificial Sequence: Synthetic oligonucleotide
  Sense strand starting at position 2232 of SEQ ID NO: 1560718
auauguuccugauuccauc

SEQ ID NO: 1619506 - RNA, 19 nt, Artificial Sequence
  Description of Artificial Sequence: Synthetic oligonucleotide
  Antisense strand to SEQ ID NO: 1619505
gauggaaucaggaacauau

SEQ ID NO: 1619507 - RNA, 19 nt, Artificial Sequence
  Description of Artificial Sequence: Synthetic oligonucleotide
  Sense strand starting at position 2302 of SEQ ID NO: 1560718
agucuaauauacuccagua

SEQ ID NO: 1619508 - RNA, 19 nt, Artificial Sequence
  Description of Artificial Sequence: Synthetic oligonucleotide
  Antisense strand to SEQ ID NO: 1619507
uacuggaguauauuagacu

SEQ ID NO: 1619509 - RNA, 19 nt, Artificial Sequence
  Description of Artificial Sequence: Synthetic oligonucleotide
  Sense strand starting at position 2323 of SEQ ID NO: 1560718
gcuggagucuaaucacugu

SEQ ID NO: 1619510 - RNA, 19 nt, Artificial Sequence
  Description of Artificial Sequence: Synthetic oligonucleotide
  Antisense strand to SEQ ID NO: 1619509
acagugauuagacuccagc

SEQ ID NO: 1619511 - RNA, 19 nt, Artificial Sequence
  Description of Artificial Sequence: Synthetic oligonucleotide
  Sense strand starting at position 2326 of SEQ ID NO: 1560718
ggagucuaaucacuguuaa

SEQ ID NO: 1619512 - RNA, 19 nt, Artificial Sequence
  Description of Artificial Sequence: Synthetic oligonucleotide
  Antisense strand to SEQ ID NO: 1619511
uuaacagugauuagacucc

SEQ ID NO: 1619513 - RNA, 19 nt, Artificial Sequence
  Description of Artificial Sequence: Synthetic oligonucleotide
  Sense strand starting at position 2479 of SEQ ID NO: 1560718
ccuuaacccgcuugaucua

SEQ ID NO: 1619514 - RNA, 19 nt, Artificial Sequence
  Description of Artificial Sequence: Synthetic oligonucleotide
  Antisense strand to SEQ ID NO: 1619513
uagaucaagcggguuaagg

SEQ ID NO: 1619515 - RNA, 19 nt, Artificial Sequence
  Description of Artificial Sequence: Synthetic oligonucleotide
  Sense strand starting at position 2507 of SEQ ID NO: 1560718
ucacaauugagagguaggu

SEQ ID NO: 1619516 - RNA, 19 nt, Artificial Sequence
  Description of Artificial Sequence: Synthetic oligonucleotide
  Antisense strand to SEQ ID NO: 1619515
accuaccucucaauuguga

SEQ ID NO: 1619517 - RNA, 19 nt, Artificial Sequence
  Description of Artificial Sequence: Synthetic oligonucleotide
  Sense strand starting at position 2511 of SEQ ID NO: 1560718
aauugagagguagguacua

SEQ ID NO: 1619518 - RNA, 19 nt, Artificial Sequence
  Description of Artificial Sequence: Synthetic oligonucleotide
  Antisense strand to SEQ ID NO: 1619517
uaguaccuaccucucaauu

SEQ ID NO: 1619519 - RNA, 19 nt, Artificial Sequence
  Description of Artificial Sequence: Synthetic oligonucleotide
  Sense strand starting at position 2557 of SEQ ID NO: 1560718
cugaguucucagggaggua

SEQ ID NO: 1619520 - RNA, 19 nt, Artificial Sequence
  Description of Artificial Sequence: Synthetic oligonucleotide
  Antisense strand to SEQ ID NO: 1619519
uaccucccugagaacucag

SEQ ID NO: 1619521 - RNA, 19 nt, Artificial Sequence
  Description of Artificial Sequence: Synthetic oligonucleotide
  Sense strand starting at position 2562 of SEQ ID NO: 1560718
uucucagggagguaaaguu

SEQ ID NO: 1619522 - RNA, 19 nt, Artificial Sequence
  Description of Artificial Sequence: Synthetic oligonucleotide
  Antisense strand to SEQ ID NO: 1619521
aacuuuaccucccugagaa

SEQ ID NO: 1619523 - RNA, 19 nt, Artificial Sequence
  Description of Artificial Sequence: Synthetic oligonucleotide
  Sense strand starting at position 2635 of SEQ ID NO: 1560718
aaccgaaaguccgucuuua

SEQ ID NO: 1619524 - RNA, 19 nt, Artificial Sequence
  Description of Artificial Sequence: Synthetic oligonucleotide
  Antisense strand to SEQ ID NO: 1619523
uaaagacggacuuucgguu

SEQ ID NO: 1619525 - RNA, 19 nt, Artificial Sequence
  Description of Artificial Sequence: Synthetic oligonucleotide
  Sense strand starting at position 2639 of SEQ ID NO: 1560718
gaaaguccgucuuuaacag

SEQ ID NO: 1619526 - RNA, 19 nt, Artificial Sequence
  Description of Artificial Sequence: Synthetic oligonucleotide
  Antisense strand to SEQ ID NO: 1619525
cuguuaaagacggacuuuc

SEQ ID NO: 1619527 - RNA, 19 nt, Artificial Sequence
  Description of Artificial Sequence: Synthetic oligonucleotide
  Sense strand starting at position 2745 of SEQ ID NO: 1560718
ucugccauccuuuggaaua

SEQ ID NO: 1619528 - RNA, 19 nt, Artificial Sequence
  Description of Artificial Sequence: Synthetic oligonucleotide
  Antisense strand to SEQ ID NO: 1619527
uauuccaaaggauggcaga

SEQ ID NO: 1619529 - RNA, 19 nt, Artificial Sequence
  Description of Artificial Sequence: Synthetic oligonucleotide
  Sense strand starting at position 2779 of SEQ ID NO: 1560718
agagccaggcagugauuau

SEQ ID NO: 1619530 - RNA, 19 nt, Artificial Sequence
  Description of Artificial Sequence: Synthetic oligonucleotide
  Antisense strand to SEQ ID NO: 1619529
auaaucacugccuggcucu

SEQ ID NO: 1619531 - RNA, 19 nt, Artificial Sequence
  Description of Artificial Sequence: Synthetic oligonucleotide
  Sense strand starting at position 3299 of SEQ ID NO: 1560718
gcgucuugggucucuggua

SEQ ID NO: 1619532 - RNA, 19 nt, Artificial Sequence
  Description of Artificial Sequence: Synthetic oligonucleotide
  Antisense strand to SEQ ID NO: 1619531
uaccagagacccaagacgc

SEQ ID NO: 1619533 - RNA, 19 nt, Artificial Sequence
  Description of Artificial Sequence: Synthetic oligonucleotide
  Sense strand starting at position 3327 of SEQ ID NO: 1560718
ggguccugggucuaaaguu

SEQ ID NO: 1619534 - RNA, 19 nt, Artificial Sequence
  Description of Artificial Sequence: Synthetic oligonucleotide
  Antisense strand to SEQ ID NO: 1619533
aacuuuagacccaggaccc

SEQ ID NO: 1619535 - RNA, 19 nt, Artificial Sequence
  Description of Artificial Sequence: Synthetic oligonucleotide
  Sense strand starting at position 3339 of SEQ ID NO: 1560718
uaaaguucuggauggaggu

SEQ ID NO: 1619536 - RNA, 19 nt, Artificial Sequence
  Description of Artificial Sequence: Synthetic oligonucleotide
  Antisense strand to SEQ ID NO: 1619535
accuccauccagaacuuua

SEQ ID NO: 1619537 - RNA, 19 nt, Artificial Sequence
  Description of Artificial Sequence: Synthetic oligonucleotide
  Sense strand starting at position 3340 of SEQ ID NO: 1560718
aaaguucuggauggaggua

SEQ ID NO: 1619538 - RNA, 19 nt, Artificial Sequence
  Description of Artificial Sequence: Synthetic oligonucleotide
  Antisense strand to SEQ ID NO: 1619537
uaccuccauccagaacuuu

SEQ ID NO: 1619539 - RNA, 19 nt, Artificial Sequence
  Description of Artificial Sequence: Synthetic oligonucleotide
  Sense strand starting at position 3509 of SEQ ID NO: 1560718
gugaacagacuccauuagu

SEQ ID NO: 1619540 - RNA, 19 nt, Artificial Sequence
  Description of Artificial Sequence: Synthetic oligonucleotide
  Antisense strand to SEQ ID NO: 1619539
acuaauggagucuguucac

SEQ ID NO: 1619541 - RNA, 19 nt, Artificial Sequence
  Description of Artificial Sequence: Synthetic oligonucleotide
  Sense strand starting at position 3514 of SEQ ID NO: 1560718
cagacuccauuaguugaga

SEQ ID NO: 1619542 - RNA, 19 nt, Artificial Sequence
  Description of Artificial Sequence: Synthetic oligonucleotide
  Antisense strand to SEQ ID NO: 1619541
ucucaacuaauggagucug

SEQ ID NO: 1619543 - RNA, 19 nt, Artificial Sequence
  Description of Artificial Sequence: Synthetic oligonucleotide
  Sense strand starting at position 3636 of SEQ ID NO: 1560718
aaggguuaguggguauuaa

SEQ ID NO: 1619544 - RNA, 19 nt, Artificial Sequence
  Description of Artificial Sequence: Synthetic oligonucleotide
  Antisense strand to SEQ ID NO: 1619543
uuaauacccacuaacccuu

SEQ ID NO: 1619545 - RNA, 19 nt, Artificial Sequence
  Description of Artificial Sequence: Synthetic oligonucleotide
  Sense strand starting at position 3637 of SEQ ID NO: 1560718
aggguuaguggguauuaaa

SEQ ID NO: 1619546 - RNA, 19 nt, Artificial Sequence
  Description of Artificial Sequence: Synthetic oligonucleotide
  Antisense strand to SEQ ID NO: 1619545
uuuaauacccacuaacccu

SEQ ID NO: 1619547 - RNA, 19 nt, Artificial Sequence
  Description of Artificial Sequence: Synthetic oligonucleotide
  Sense strand starting at position 3654 of SEQ ID NO: 1560718
aauuaugugcccuguauga

SEQ ID NO: 1619548 - RNA, 19 nt, Artificial Sequence
  Description of Artificial Sequence: Synthetic oligonucleotide
  Antisense strand to SEQ ID NO: 1619547
ucauacagggcacauaauu

SEQ ID NO: 1619549 - RNA, 19 nt, Artificial Sequence
  Description of Artificial Sequence: Synthetic oligonucleotide
  Sense strand starting at position 3656 of SEQ ID NO: 1560718
uuaugugcccuguaugaac

SEQ ID NO: 1619550 - RNA, 19 nt, Artificial Sequence
  Description of Artificial Sequence: Synthetic oligonucleotide
  Antisense strand to SEQ ID NO: 1619549
guucauacagggcacauaa

SEQ ID NO: 1619551 - RNA, 19 nt, Artificial Sequence
  Description of Artificial Sequence: Synthetic oligonucleotide
  Sense strand starting at position 640 of SEQ ID NO: 1560719
ggguuauuaucccagagaa

SEQ ID NO: 1619552 - RNA, 19 nt, Artificial Sequence
  Description of Artificial Sequence: Synthetic oligonucleotide
  Antisense strand to SEQ ID NO: 1619551
uucucugggauaauaaccc

SEQ ID NO: 1619553 - RNA, 19 nt, Artificial Sequence
  Description of Artificial Sequence: Synthetic oligonucleotide
  Sense strand starting at position 654 of SEQ ID NO: 1560719
gagaacagaucuuagagua

SEQ ID NO: 1619554 - RNA, 19 nt, Artificial Sequence
  Description of Artificial Sequence: Synthetic oligonucleotide
  Antisense strand to SEQ ID NO: 1619553
uacucuaagaucuguucuc

SEQ ID NO: 1619555 - RNA, 19 nt, Artificial Sequence
  Description of Artificial Sequence: Synthetic oligonucleotide
  Sense strand starting at position 695 of SEQ ID NO: 1560719
uuaggcauuguuuaaagca

SEQ ID NO: 1619556 - RNA, 19 nt, Artificial Sequence
  Description of Artificial Sequence: Synthetic oligonucleotide
  Antisense strand to SEQ ID NO: 1619555
ugcuuuaaacaaugccuaa

SEQ ID NO: 1619557 - RNA, 19 nt, Artificial Sequence
  Description of Artificial Sequence: Synthetic oligonucleotide
  Sense strand starting at position 852 of SEQ ID NO: 1560719
agugcaguaccucaaucuu

SEQ ID NO: 1619558 - RNA, 19 nt, Artificial Sequence
  Description of Artificial Sequence: Synthetic oligonucleotide
  Antisense strand to SEQ ID NO: 1619557
aagauugagguacugcacu

SEQ ID NO: 1619559 - RNA, 19 nt, Artificial Sequence
  Description of Artificial Sequence: Synthetic oligonucleotide
  Sense strand starting at position 960 of SEQ ID NO: 1560719
cucggcuaaucuucguauu

SEQ ID NO: 1619560 - RNA, 19 nt, Artificial Sequence
  Description of Artificial Sequence: Synthetic oligonucleotide
  Antisense strand to SEQ ID NO: 1619559
aauacgaagauuagccgag

SEQ ID NO: 1619561 - RNA, 19 nt, Artificial Sequence
  Description of Artificial Sequence: Synthetic oligonucleotide
  Sense strand starting at position 961 of SEQ ID NO: 1560719
ucggcuaaucuucguauuu

SEQ ID NO: 1619562 - RNA, 19 nt, Artificial Sequence
  Description of Artificial Sequence: Synthetic oligonucleotide
  Antisense strand to SEQ ID NO: 1619561
aaauacgaagauuagccga

SEQ ID NO: 1619563 - RNA, 19 nt, Artificial Sequence
  Description of Artificial Sequence: Synthetic oligonucleotide
  Sense strand starting at position 2287 of SEQ ID NO: 1560719
cugcaucuccaacgauagu

SEQ ID NO: 1619564 - RNA, 19 nt, Artificial Sequence
  Description of Artificial Sequence: Synthetic oligonucleotide
  Antisense strand to SEQ ID NO: 1619563
acuaucguuggagaugcag

SEQ ID NO: 1619565 - RNA, 19 nt, Artificial Sequence
  Description of Artificial Sequence: Synthetic oligonucleotide
  Sense strand starting at position 2511 of SEQ ID NO: 1560719
ggcgcagacguuugcuuua

SEQ ID NO: 1619566 - RNA, 19 nt, Artificial Sequence
  Description of Artificial Sequence: Synthetic oligonucleotide
  Antisense strand to SEQ ID NO: 1619565
uaaagcaaacgucugcgcc

SEQ ID NO: 1619567 - RNA, 19 nt, Artificial Sequence
  Description of Artificial Sequence: Synthetic oligonucleotide
  Sense strand starting at position 2516 of SEQ ID NO: 1560719
agacguuugcuuuacggaa

SEQ ID NO: 1619568 - RNA, 19 nt, Artificial Sequence
  Description of Artificial Sequence: Synthetic oligonucleotide
  Antisense strand to SEQ ID NO: 1619567
uuccguaaagcaaacgucu

SEQ ID NO: 1619569 - RNA, 19 nt, Artificial Sequence
  Description of Artificial Sequence: Synthetic oligonucleotide
  Sense strand starting at position 2518 of SEQ ID NO: 1560719
acguuugcuuuacggaaga

SEQ ID NO: 1619570 - RNA, 19 nt, Artificial Sequence
  Description of Artificial Sequence: Synthetic oligonucleotide
  Antisense strand to SEQ ID NO: 1619569
ucuuccguaaagcaaacgu

SEQ ID NO: 1619571 - RNA, 19 nt, Artificial Sequence
  Description of Artificial Sequence: Synthetic oligonucleotide
  Sense strand starting at position 2520 of SEQ ID NO: 1560719
guuugcuuuacggaagaau

SEQ ID NO: 1619572 - RNA, 19 nt, Artificial Sequence
  Description of Artificial Sequence: Synthetic oligonucleotide
  Antisense strand to SEQ ID NO: 1619571
auucuuccguaaagcaaac

SEQ ID NO: 1619573 - RNA, 19 nt, Artificial Sequence
  Description of Artificial Sequence: Synthetic oligonucleotide
  Sense strand starting at position 2533 of SEQ ID NO: 1560719
aagaauuggguuugcaaga

SEQ ID NO: 1619574 - RNA, 19 nt, Artificial Sequence
  Description of Artificial Sequence: Synthetic oligonucleotide
  Antisense strand to SEQ ID NO: 1619573
ucuugcaaacccaauucuu

SEQ ID NO: 1619575 - RNA, 19 nt, Artificial Sequence
  Description of Artificial Sequence: Synthetic oligonucleotide
  Sense strand starting at position 2534 of SEQ ID NO: 1560719
agaauuggguuugcaagau

SEQ ID NO: 1619576 - RNA, 19 nt, Artificial Sequence
  Description of Artificial Sequence: Synthetic oligonucleotide
  Antisense strand to SEQ ID NO: 1619575
aucuugcaaacccaauucu

SEQ ID NO: 1619577 - RNA, 19 nt, Artificial Sequence
  Description of Artificial Sequence: Synthetic oligonucleotide
  Sense strand starting at position 2566 of SEQ ID NO: 1560719
gggcgaaccuguaguagga

SEQ ID NO: 1619578 - RNA, 19 nt, Artificial Sequence
  Description of Artificial Sequence: Synthetic oligonucleotide
  Antisense strand to SEQ ID NO: 1619577
uccuacuacagguucgccc

SEQ ID NO: 1619579 - RNA, 19 nt, Artificial Sequence
  Description of Artificial Sequence: Synthetic oligonucleotide
  Sense strand starting at position 2568 of SEQ ID NO: 1560719
gcgaaccuguaguaggaau

SEQ ID NO: 1619580 - RNA, 19 nt, Artificial Sequence
  Description of Artificial Sequence: Synthetic oligonucleotide
  Antisense strand to SEQ ID NO: 1619579
auuccuacuacagguucgc

SEQ ID NO: 1619581 - RNA, 19 nt, Artificial Sequence
  Description of Artificial Sequence: Synthetic oligonucleotide
  Sense strand starting at position 2588 of SEQ ID NO: 1560719
uuaguuauuucccaaguua

SEQ ID NO: 1619582 - RNA, 19 nt, Artificial Sequence
  Description of Artificial Sequence: Synthetic oligonucleotide
  Antisense strand to SEQ ID NO: 1619581
uaacuugggaaauaacuaa

SEQ ID NO: 1619583 - RNA, 19 nt, Artificial Sequence
  Description of Artificial Sequence: Synthetic oligonucleotide
  Sense strand starting at position 2605 of SEQ ID NO: 1560719
uagccaacgucuugugcau

SEQ ID NO: 1619584 - RNA, 19 nt, Artificial Sequence
  Description of Artificial Sequence: Synthetic oligonucleotide
  Antisense strand to SEQ ID NO: 1619583
augcacaagacguuggcua

SEQ ID NO: 1619585 - RNA, 19 nt, Artificial Sequence
  Description of Artificial Sequence: Synthetic oligonucleotide
  Sense strand starting at position 2752 of SEQ ID NO: 1560719
aggaacuugcuaugugaca

SEQ ID NO: 1619586 - RNA, 19 nt, Artificial Sequence
  Description of Artificial Sequence: Synthetic oligonucleotide
  Antisense strand to SEQ ID NO: 1619585
ugucacauagcaaguuccu

SEQ ID NO: 1619587 - RNA, 19 nt, Artificial Sequence
  Description of Artificial Sequence: Synthetic oligonucleotide
  Sense strand starting at position 2753 of SEQ ID NO: 1560719
ggaacuugcuaugugacau

SEQ ID NO: 1619588 - RNA, 19 nt, Artificial Sequence
  Description of Artificial Sequence: Synthetic oligonucleotide
  Antisense strand to SEQ ID NO: 1619587
augucacauagcaaguucc

SEQ ID NO: 1619589 - RNA, 19 nt, Artificial Sequence
  Description of Artificial Sequence: Synthetic oligonucleotide
  Sense strand starting at position 2869 of SEQ ID NO: 1560719
gguggagcucuugcguuua

SEQ ID NO: 1619590 - RNA, 19 nt, Artificial Sequence
  Description of Artificial Sequence: Synthetic oligonucleotide
  Antisense strand to SEQ ID NO: 1619589
uaaacgcaagagcuccacc

SEQ ID NO: 1619591 - RNA, 19 nt, Artificial Sequence
  Description of Artificial Sequence: Synthetic oligonucleotide
  Sense strand starting at position 2871 of SEQ ID NO: 1560719
uggagcucuugcguuuaga

SEQ ID NO: 1619592 - RNA, 19 nt, Artificial Sequence
  Description of Artificial Sequence: Synthetic oligonucleotide
  Antisense strand to SEQ ID NO: 1619591
ucuaaacgcaagagcucca

SEQ ID NO: 1619593 - RNA, 19 nt, Artificial Sequence
  Description of Artificial Sequence: Synthetic oligonucleotide
  Sense strand starting at position 2932 of SEQ ID NO: 1560719
ggcaguuaaauagaguuaa

SEQ ID NO: 1619594 - RNA, 19 nt, Artificial Sequence
  Description of Artificial Sequence: Synthetic oligonucleotide
  Antisense strand to SEQ ID NO: 1619593
uuaacucuauuuaacugcc

SEQ ID NO: 1619595 - RNA, 19 nt, Artificial Sequence
  Description of Artificial Sequence: Synthetic oligonucleotide
  Sense strand starting at position 3011 of SEQ ID NO: 1560719
ugcuauauuccgguguucu

SEQ ID NO: 1619596 - RNA, 19 nt, Artificial Sequence
  Description of Artificial Sequence: Synthetic oligonucleotide
  Antisense strand to SEQ ID NO: 1619595
agaacaccggaauauagca

SEQ ID NO: 1619597 - RNA, 19 nt, Artificial Sequence
  Description of Artificial Sequence: Synthetic oligonucleotide
  Sense strand starting at position 3012 of SEQ ID NO: 1560719
gcuauauuccgguguucua

SEQ ID NO: 1619598 - RNA, 19 nt, Artificial Sequence
  Description of Artificial Sequence: Synthetic oligonucleotide
  Antisense strand to SEQ ID NO: 1619597
uagaacaccggaauauagc

SEQ ID NO: 1619599 - RNA, 19 nt, Artificial Sequence
  Description of Artificial Sequence: Synthetic oligonucleotide
  Sense strand starting at position 3015 of SEQ ID NO: 1560719
auauuccgguguucuagau

SEQ ID NO: 1619600 - RNA, 19 nt, Artificial Sequence
  Description of Artificial Sequence: Synthetic oligonucleotide
  Antisense strand to SEQ ID NO: 1619599
aucuagaacaccggaauau

SEQ ID NO: 1619601 - RNA, 19 nt, Artificial Sequence
  Description of Artificial Sequence: Synthetic oligonucleotide
  Sense strand starting at position 3021 of SEQ ID NO: 1560719
cgguguucuagauguugca

SEQ ID NO: 1619602 - RNA, 19 nt, Artificial Sequence
  Description of Artificial Sequence: Synthetic oligonucleotide
  Antisense strand to SEQ ID NO: 1619601
ugcaacaucuagaacaccg

SEQ ID NO: 1619603 - RNA, 19 nt, Artificial Sequence
  Description of Artificial Sequence: Synthetic oligonucleotide
  Sense strand starting at position 3024 of SEQ ID NO: 1560719
uguucuagauguugcaaau

SEQ ID NO: 1619604 - RNA, 19 nt, Artificial Sequence
  Description of Artificial Sequence: Synthetic oligonucleotide
  Antisense strand to SEQ ID NO: 1619603
auuugcaacaucuagaaca

SEQ ID NO: 1619605 - RNA, 19 nt, Artificial Sequence
  Description of Artificial Sequence: Synthetic oligonucleotide
  Sense strand starting at position 3034 of SEQ ID NO: 1560719
guugcaaauaugcggugaa

SEQ ID NO: 1619606 - RNA, 19 nt, Artificial Sequence
  Description of Artificial Sequence: Synthetic oligonucleotide
  Antisense strand to SEQ ID NO: 1619605
uucaccgcauauuugcaac

SEQ ID NO: 1619607 - RNA, 19 nt, Artificial Sequence
  Description of Artificial Sequence: Synthetic oligonucleotide
  Sense strand starting at position 3035 of SEQ ID NO: 1560719
uugcaaauaugcggugaau

SEQ ID NO: 1619608 - RNA, 19 nt, Artificial Sequence
  Description of Artificial Sequence: Synthetic oligonucleotide
  Antisense strand to SEQ ID NO: 1619607
auucaccgcauauuugcaa

SEQ ID NO: 1619609 - RNA, 19 nt, Artificial Sequence
  Description of Artificial Sequence: Synthetic oligonucleotide
  Sense strand starting at position 3037 of SEQ ID NO: 1560719
gcaaauaugcggugaauaa

SEQ ID NO: 1619610 - RNA, 19 nt, Artificial Sequence
  Description of Artificial Sequence: Synthetic oligonucleotide
  Antisense strand to SEQ ID NO: 1619609
uuauucaccgcauauuugc

SEQ ID NO: 1619611 - RNA, 19 nt, Artificial Sequence
  Description of Artificial Sequence: Synthetic oligonucleotide
  Sense strand starting at position 3038 of SEQ ID NO: 1560719
caaauaugcggugaauaau

SEQ ID NO: 1619612 - RNA, 19 nt, Artificial Sequence
  Description of Artificial Sequence: Synthetic oligonucleotide
  Antisense strand to SEQ ID NO: 1619611
auuauucaccgcauauuug

SEQ ID NO: 1619613 - RNA, 19 nt, Artificial Sequence
  Description of Artificial Sequence: Synthetic oligonucleotide
  Sense strand starting at position 3041 of SEQ ID NO: 1560719
auaugcggugaauaauaau

SEQ ID NO: 1619614 - RNA, 19 nt, Artificial Sequence
  Description of Artificial Sequence: Synthetic oligonucleotide
  Antisense strand to SEQ ID NO: 1619613
auuauuauucaccgcauau

SEQ ID NO: 1619615 - RNA, 19 nt, Artificial Sequence
  Description of Artificial Sequence: Synthetic oligonucleotide
  Sense strand starting at position 3044 of SEQ ID NO: 1560719
ugcggugaauaauaauaaa

SEQ ID NO: 1619616 - RNA, 19 nt, Artificial Sequence
  Description of Artificial Sequence: Synthetic oligonucleotide
  Antisense strand to SEQ ID NO: 1619615
uuuauuauuauucaccgca

SEQ ID NO: 1619617 - RNA, 19 nt, Artificial Sequence
  Description of Artificial Sequence: Synthetic oligonucleotide
  Sense strand starting at position 3099 of SEQ ID NO: 1560719
ucacaauaucucuguguug

SEQ ID NO: 1619618 - RNA, 19 nt, Artificial Sequence
  Description of Artificial Sequence: Synthetic oligonucleotide
  Antisense strand to SEQ ID NO: 1619617
caacacagagauauuguga

SEQ ID NO: 1619619 - RNA, 19 nt, Artificial Sequence
  Description of Artificial Sequence: Synthetic oligonucleotide
  Sense strand starting at position 3101 of SEQ ID NO: 1560719
acaauaucucuguguugag

SEQ ID NO: 1619620 - RNA, 19 nt, Artificial Sequence
  Description of Artificial Sequence: Synthetic oligonucleotide
  Antisense strand to SEQ ID NO: 1619619
cucaacacagagauauugu

SEQ ID NO: 1619621 - RNA, 19 nt, Artificial Sequence
  Description of Artificial Sequence: Synthetic oligonucleotide
  Sense strand starting at position 3178 of SEQ ID NO: 1560719
gccuguuugaagugcuuua

SEQ ID NO: 1619622 - RNA, 19 nt, Artificial Sequence
  Description of Artificial Sequence: Synthetic oligonucleotide
  Antisense strand to SEQ ID NO: 1619621
uaaagcacuucaaacaggc

SEQ ID NO: 1619623 - RNA, 19 nt, Artificial Sequence
  Description of Artificial Sequence: Synthetic oligonucleotide
  Sense strand starting at position 3242 of SEQ ID NO: 1560719
gugccauuauuucucccau

SEQ ID NO: 1619624 - RNA, 19 nt, Artificial Sequence
  Description of Artificial Sequence: Synthetic oligonucleotide
  Antisense strand to SEQ ID NO: 1619623
augggagaaauaauggcac

SEQ ID NO: 1619625 - RNA, 19 nt, Artificial Sequence
  Description of Artificial Sequence: Synthetic oligonucleotide
  Sense strand starting at position 3350 of SEQ ID NO: 1560719
ugugcuuucuggccuagaa

SEQ ID NO: 1619626 - RNA, 19 nt, Artificial Sequence
  Description of Artificial Sequence: Synthetic oligonucleotide
  Antisense strand to SEQ ID NO: 1619625
uucuaggccagaaagcaca

SEQ ID NO: 1619627 - RNA, 19 nt, Artificial Sequence
  Description of Artificial Sequence: Synthetic oligonucleotide
  Sense strand starting at position 3352 of SEQ ID NO: 1560719
ugcuuucuggccuagaauc

SEQ ID NO: 1619628 - RNA, 19 nt, Artificial Sequence
  Description of Artificial Sequence: Synthetic oligonucleotide
  Antisense strand to SEQ ID NO: 1619627
gauucuaggccagaaagca

SEQ ID NO: 1619629 - RNA, 19 nt, Artificial Sequence
  Description of Artificial Sequence: Synthetic oligonucleotide
  Sense strand starting at position 3708 of SEQ ID NO: 1560719
gcccucucaugaucugagu

SEQ ID NO: 1619630 - RNA, 19 nt, Artificial Sequence
  Description of Artificial Sequence: Synthetic oligonucleotide
  Antisense strand to SEQ ID NO: 1619629
acucagaucaugagagggc

SEQ ID NO: 1619631 - RNA, 19 nt, Artificial Sequence
  Description of Artificial Sequence: Synthetic oligonucleotide
  Sense strand starting at position 394 of SEQ ID NO: 1560720
ggguuauuaucccagagaa

SEQ ID NO: 1619632 - RNA, 19 nt, Artificial Sequence
  Description of Artificial Sequence: Synthetic oligonucleotide
  Antisense strand to SEQ ID NO: 1619631
uucucugggauaauaaccc

SEQ ID NO: 1619633 - RNA, 19 nt, Artificial Sequence
  Description of Artificial Sequence: Synthetic oligonucleotide
  Sense strand starting at position 408 of SEQ ID NO: 1560720
gagaacagaucuuagagua

SEQ ID NO: 1619634 - RNA, 19 nt, Artificial Sequence
  Description of Artificial Sequence: Synthetic oligonucleotide
  Antisense strand to SEQ ID NO: 1619633
uacucuaagaucuguucuc

SEQ ID NO: 1619635 - RNA, 19 nt, Artificial Sequence
  Description of Artificial Sequence: Synthetic oligonucleotide
  Sense strand starting at position 449 of SEQ ID NO: 1560720
uuaggcauuguuuaaagca

SEQ ID NO: 1619636 - RNA, 19 nt, Artificial Sequence
  Description of Artificial Sequence: Synthetic oligonucleotide
  Antisense strand to SEQ ID NO: 1619635
ugcuuuaaacaaugccuaa

SEQ ID NO: 1619637 - RNA, 19 nt, Artificial Sequence
  Description of Artificial Sequence: Synthetic oligonucleotide
  Sense strand starting at position 606 of SEQ ID NO: 1560720
agugcaguaccucaaucuu

SEQ ID NO: 1619638 - RNA, 19 nt, Artificial Sequence
  Description of Artificial Sequence: Synthetic oligonucleotide
  Antisense strand to SEQ ID NO: 1619637
aagauugagguacugcacu

SEQ ID NO: 1619639 - RNA, 19 nt, Artificial Sequence
  Description of Artificial Sequence: Synthetic oligonucleotide
  Sense strand starting at position 714 of SEQ ID NO: 1560720
cucggcuaaucuucguauu

SEQ ID NO: 1619640 - RNA, 19 nt, Artificial Sequence
  Description of Artificial Sequence: Synthetic oligonucleotide
  Antisense strand to SEQ ID NO: 1619639
aauacgaagauuagccgag

SEQ ID NO: 1619641 - RNA, 19 nt, Artificial Sequence
  Description of Artificial Sequence: Synthetic oligonucleotide
  Sense strand starting at position 715 of SEQ ID NO: 1560720
ucggcuaaucuucguauuu

SEQ ID NO: 1619642 - RNA, 19 nt, Artificial Sequence
  Description of Artificial Sequence: Synthetic oligonucleotide
  Antisense strand to SEQ ID NO: 1619641
aaauacgaagauuagccga

SEQ ID NO: 1619643 - RNA, 19 nt, Artificial Sequence
  Description of Artificial Sequence: Synthetic oligonucleotide
  Sense strand starting at position 2041 of SEQ ID NO: 1560720
cugcaucuccaacgauagu

SEQ ID NO: 1619644 - RNA, 19 nt, Artificial Sequence
  Description of Artificial Sequence: Synthetic oligonucleotide
  Antisense strand to SEQ ID NO: 1619643
acuaucguuggagaugcag

SEQ ID NO: 1619645 - RNA, 19 nt, Artificial Sequence
  Description of Artificial Sequence: Synthetic oligonucleotide
  Sense strand starting at position 2265 of SEQ ID NO: 1560720
ggcgcagacguuugcuuua

SEQ ID NO: 1619646 - RNA, 19 nt, Artificial Sequence
  Description of Artificial Sequence: Synthetic oligonucleotide
  Antisense strand to SEQ ID NO: 1619645
uaaagcaaacgucugcgcc

SEQ ID NO: 1619647 - RNA, 19 nt, Artificial Sequence
  Description of Artificial Sequence: Synthetic oligonucleotide
  Sense strand starting at position 2270 of SEQ ID NO: 1560720
agacguuugcuuuacggaa

SEQ ID NO: 1619648 - RNA, 19 nt, Artificial Sequence
  Description of Artificial Sequence: Synthetic oligonucleotide
  Antisense strand to SEQ ID NO: 1619647
uuccguaaagcaaacgucu

SEQ ID NO: 1619649 - RNA, 19 nt, Artificial Sequence
  Description of Artificial Sequence: Synthetic oligonucleotide
  Sense strand starting at position 2274 of SEQ ID NO: 1560720
guuugcuuuacggaagaau

SEQ ID NO: 1619650 - RNA, 19 nt, Artificial Sequence
  Description of Artificial Sequence: Synthetic oligonucleotide
  Antisense strand to SEQ ID NO: 1619649
auucuuccguaaagcaaac

SEQ ID NO: 1619651 - RNA, 19 nt, Artificial Sequence
  Description of Artificial Sequence: Synthetic oligonucleotide
  Sense strand starting at position 2287 of SEQ ID NO: 1560720
aagaauuggguuugcaaga

SEQ ID NO: 1619652 - RNA, 19 nt, Artificial Sequence
  Description of Artificial Sequence: Synthetic oligonucleotide
  Antisense strand to SEQ ID NO: 1619651
ucuugcaaacccaauucuu

SEQ ID NO: 1619653 - RNA, 19 nt, Artificial Sequence
  Description of Artificial Sequence: Synthetic oligonucleotide
  Sense strand starting at position 2288 of SEQ ID NO: 1560720
agaauuggguuugcaagau

SEQ ID NO: 1619654 - RNA, 19 nt, Artificial Sequence
  Description of Artificial Sequence: Synthetic oligonucleotide
  Antisense strand to SEQ ID NO: 1619653
aucuugcaaacccaauucu

SEQ ID NO: 1619655 - RNA, 19 nt, Artificial Sequence
  Description of Artificial Sequence: Synthetic oligonucleotide
  Sense strand starting at position 2320 of SEQ ID NO: 1560720
gggcgaaccuguaguagga

SEQ ID NO: 1619656 - RNA, 19 nt, Artificial Sequence
  Description of Artificial Sequence: Synthetic oligonucleotide
  Antisense strand to SEQ ID NO: 1619655
uccuacuacagguucgccc

SEQ ID NO: 1619657 - RNA, 19 nt, Artificial Sequence
  Description of Artificial Sequence: Synthetic oligonucleotide
  Sense strand starting at position 2322 of SEQ ID NO: 1560720
gcgaaccuguaguaggaau

SEQ ID NO: 1619658 - RNA, 19 nt, Artificial Sequence
  Description of Artificial Sequence: Synthetic oligonucleotide
  Antisense strand to SEQ ID NO: 1619657
auuccuacuacagguucgc

SEQ ID NO: 1619659 - RNA, 19 nt, Artificial Sequence
  Description of Artificial Sequence: Synthetic oligonucleotide
  Sense strand starting at position 2342 of SEQ ID NO: 1560720
uuaguuauuucccaaguua

SEQ ID NO: 1619660 - RNA, 19 nt, Artificial Sequence
  Description of Artificial Sequence: Synthetic oligonucleotide
  Antisense strand to SEQ ID NO: 1619659
uaacuugggaaauaacuaa

SEQ ID NO: 1619661 - RNA, 19 nt, Artificial Sequence
  Description of Artificial Sequence: Synthetic oligonucleotide
  Sense strand starting at position 2506 of SEQ ID NO: 1560720
aggaacuugcuaugugaca

SEQ ID NO: 1619662 - RNA, 19 nt, Artificial Sequence
  Description of Artificial Sequence: Synthetic oligonucleotide
  Antisense strand to SEQ ID NO: 1619661
ugucacauagcaaguuccu

SEQ ID NO: 1619663 - RNA, 19 nt, Artificial Sequence
  Description of Artificial Sequence: Synthetic oligonucleotide
  Sense strand starting at position 2507 of SEQ ID NO: 1560720
ggaacuugcuaugugacau

SEQ ID NO: 1619664 - RNA, 19 nt, Artificial Sequence
  Description of Artificial Sequence: Synthetic oligonucleotide
  Antisense strand to SEQ ID NO: 1619663
augucacauagcaaguucc

SEQ ID NO: 1619665 - RNA, 19 nt, Artificial Sequence
  Description of Artificial Sequence: Synthetic oligonucleotide
  Sense strand starting at position 2623 of SEQ ID NO: 1560720
gguggagcucuugcguuua

SEQ ID NO: 1619666 - RNA, 19 nt, Artificial Sequence
  Description of Artificial Sequence: Synthetic oligonucleotide
  Antisense strand to SEQ ID NO: 1619665
uaaacgcaagagcuccacc

SEQ ID NO: 1619667 - RNA, 19 nt, Artificial Sequence
  Description of Artificial Sequence: Synthetic oligonucleotide
  Sense strand starting at position 2625 of SEQ ID NO: 1560720
uggagcucuugcguuuaga

SEQ ID NO: 1619668 - RNA, 19 nt, Artificial Sequence
  Description of Artificial Sequence: Synthetic oligonucleotide
  Antisense strand to SEQ ID NO: 1619667
ucuaaacgcaagagcucca

SEQ ID NO: 1619669 - RNA, 19 nt, Artificial Sequence
  Description of Artificial Sequence: Synthetic oligonucleotide
  Sense strand starting at position 2686 of SEQ ID NO: 1560720
ggcaguuaaauagaguuaa

SEQ ID NO: 1619670 - RNA, 19 nt, Artificial Sequence
  Description of Artificial Sequence: Synthetic oligonucleotide
  Antisense strand to SEQ ID NO: 1619669
uuaacucuauuuaacugcc

SEQ ID NO: 1619671 - RNA, 19 nt, Artificial Sequence
  Description of Artificial Sequence: Synthetic oligonucleotide
  Sense strand starting at position 2765 of SEQ ID NO: 1560720
ugcuauauuccgguguucu

SEQ ID NO: 1619672 - RNA, 19 nt, Artificial Sequence
  Description of Artificial Sequence: Synthetic oligonucleotide
  Antisense strand to SEQ ID NO: 1619671
agaacaccggaauauagca

SEQ ID NO: 1619673 - RNA, 19 nt, Artificial Sequence
  Description of Artificial Sequence: Synthetic oligonucleotide
  Sense strand starting at position 2766 of SEQ ID NO: 1560720
gcuauauuccgguguucua

SEQ ID NO: 1619674 - RNA, 19 nt, Artificial Sequence
  Description of Artificial Sequence: Synthetic oligonucleotide
  Antisense strand to SEQ ID NO: 1619673
uagaacaccggaauauagc

SEQ ID NO: 1619675 - RNA, 19 nt, Artificial Sequence
  Description of Artificial Sequence: Synthetic oligonucleotide
  Sense strand starting at position 2769 of SEQ ID NO: 1560720
auauuccgguguucuagau

SEQ ID NO: 1619676 - RNA, 19 nt, Artificial Sequence
  Description of Artificial Sequence: Synthetic oligonucleotide
  Antisense strand to SEQ ID NO: 1619675
aucuagaacaccggaauau

SEQ ID NO: 1619677 - RNA, 19 nt, Artificial Sequence
  Description of Artificial Sequence: Synthetic oligonucleotide
  Sense strand starting at position 2775 of SEQ ID NO: 1560720
cgguguucuagauguugca

SEQ ID NO: 1619678 - RNA, 19 nt, Artificial Sequence
  Description of Artificial Sequence: Synthetic oligonucleotide
  Antisense strand to SEQ ID NO: 1619677
ugcaacaucuagaacaccg

SEQ ID NO: 1619679 - RNA, 19 nt, Artificial Sequence
  Description of Artificial Sequence: Synthetic oligonucleotide
  Sense strand starting at position 2788 of SEQ ID NO: 1560720
guugcaaauaugcggugaa

SEQ ID NO: 1619680 - RNA, 19 nt, Artificial Sequence
  Description of Artificial Sequence: Synthetic oligonucleotide
  Antisense strand to SEQ ID NO: 1619679
uucaccgcauauuugcaac

SEQ ID NO: 1619681 - RNA, 19 nt, Artificial Sequence
  Description of Artificial Sequence: Synthetic oligonucleotide
  Sense strand starting at position 2791 of SEQ ID NO: 1560720
gcaaauaugcggugaauaa

SEQ ID NO: 1619682 - RNA, 19 nt, Artificial Sequence
  Description of Artificial Sequence: Synthetic oligonucleotide
  Antisense strand to SEQ ID NO: 1619681
uuauucaccgcauauuugc

SEQ ID NO: 1619683 - RNA, 19 nt, Artificial Sequence
  Description of Artificial Sequence: Synthetic oligonucleotide
  Sense strand starting at position 2792 of SEQ ID NO: 1560720
caaauaugcggugaauaau

SEQ ID NO: 1619684 - RNA, 19 nt, Artificial Sequence
  Description of Artificial Sequence: Synthetic oligonucleotide
  Antisense strand to SEQ ID NO: 1619683
auuauucaccgcauauuug

SEQ ID NO: 1619685 - RNA, 19 nt, Artificial Sequence
  Description of Artificial Sequence: Synthetic oligonucleotide
  Sense strand starting at position 2795 of SEQ ID NO: 1560720
auaugcggugaauaauaau

SEQ ID NO: 1619686 - RNA, 19 nt, Artificial Sequence
  Description of Artificial Sequence: Synthetic oligonucleotide
  Antisense strand to SEQ ID NO: 1619685
auuauuauucaccgcauau

SEQ ID NO: 1619687 - RNA, 19 nt, Artificial Sequence
  Description of Artificial Sequence: Synthetic oligonucleotide
  Sense strand starting at position 2798 of SEQ ID NO: 1560720
ugcggugaauaauaauaaa

SEQ ID NO: 1619688 - RNA, 19 nt, Artificial Sequence
  Description of Artificial Sequence: Synthetic oligonucleotide
  Antisense strand to SEQ ID NO: 1619687
uuuauuauuauucaccgca

SEQ ID NO: 1619689 - RNA, 19 nt, Artificial Sequence
  Description of Artificial Sequence: Synthetic oligonucleotide
  Sense strand starting at position 2853 of SEQ ID NO: 1560720
ucacaauaucucuguguug

SEQ ID NO: 1619690 - RNA, 19 nt, Artificial Sequence
  Description of Artificial Sequence: Synthetic oligonucleotide
  Antisense strand to SEQ ID NO: 1619689
caacacagagauauuguga

SEQ ID NO: 1619691 - RNA, 19 nt, Artificial Sequence
  Description of Artificial Sequence: Synthetic oligonucleotide
  Sense strand starting at position 2855 of SEQ ID NO: 1560720
acaauaucucuguguugag

SEQ ID NO: 1619692 - RNA, 19 nt, Artificial Sequence
  Description of Artificial Sequence: Synthetic oligonucleotide
  Antisense strand to SEQ ID NO: 1619691
cucaacacagagauauugu

SEQ ID NO: 1619693 - RNA, 19 nt, Artificial Sequence
  Description of Artificial Sequence: Synthetic oligonucleotide
  Sense strand starting at position 2932 of SEQ ID NO: 1560720
gccuguuugaagugcuuua

SEQ ID NO: 1619694 - RNA, 19 nt, Artificial Sequence
  Description of Artificial Sequence: Synthetic oligonucleotide
  Antisense strand to SEQ ID NO: 1619693
uaaagcacuucaaacaggc

SEQ ID NO: 1619695 - RNA, 19 nt, Artificial Sequence
  Description of Artificial Sequence: Synthetic oligonucleotide
  Sense strand starting at position 2996 of SEQ ID NO: 1560720
gugccauuauuucucccau

SEQ ID NO: 1619696 - RNA, 19 nt, Artificial Sequence
  Description of Artificial Sequence: Synthetic oligonucleotide
  Antisense strand to SEQ ID NO: 1619695
augggagaaauaauggcac

SEQ ID NO: 1619697 - RNA, 19 nt, Artificial Sequence
  Description of Artificial Sequence: Synthetic oligonucleotide
  Sense strand starting at position 3104 of SEQ ID NO: 1560720
ugugcuuucuggccuagaa

SEQ ID NO: 1619698 - RNA, 19 nt, Artificial Sequence
  Description of Artificial Sequence: Synthetic oligonucleotide
  Antisense strand to SEQ ID NO: 1619697
uucuaggccagaaagcaca

SEQ ID NO: 1619699 - RNA, 19 nt, Artificial Sequence
  Description of Artificial Sequence: Synthetic oligonucleotide
  Sense strand starting at position 3106 of SEQ ID NO: 1560720
ugcuuucuggccuagaauc

SEQ ID NO: 1619700 - RNA, 19 nt, Artificial Sequence
  Description of Artificial Sequence: Synthetic oligonucleotide
  Antisense strand to SEQ ID NO: 1619699
gauucuaggccagaaagca

SEQ ID NO: 1619701 - RNA, 19 nt, Artificial Sequence
  Description of Artificial Sequence: Synthetic oligonucleotide
  Sense strand starting at position 3462 of SEQ ID NO: 1560720
gcccucucaugaucugagu

SEQ ID NO: 1619702 - RNA, 19 nt, Artificial Sequence
  Description of Artificial Sequence: Synthetic oligonucleotide
  Antisense strand to SEQ ID NO: 1619701
acucagaucaugagagggc

SEQ ID NO: 1619703 - RNA, 19 nt, Artificial Sequence
  Description of Artificial Sequence: Synthetic oligonucleotide
  Sense strand starting at position 3873 of SEQ ID NO: 1560720
ucauuauaaucugugguaa

SEQ ID NO: 1619704 - RNA, 19 nt, Artificial Sequence
  Description of Artificial Sequence: Synthetic oligonucleotide
  Antisense strand to SEQ ID NO: 1619703
uuaccacagauuauaauga

SEQ ID NO: 1619705 - RNA, 19 nt, Artificial Sequence
  Description of Artificial Sequence: Synthetic oligonucleotide
  Sense strand starting at position 3884 of SEQ ID NO: 1560720
ugugguaaaugcugugaag

SEQ ID NO: 1619706 - RNA, 19 nt, Artificial Sequence
  Description of Artificial Sequence: Synthetic oligonucleotide
  Antisense strand to SEQ ID NO: 1619705
cuucacagcauuuaccaca

SEQ ID NO: 1619707 - RNA, 19 nt, Artificial Sequence
  Description of Artificial Sequence: Synthetic oligonucleotide
  Sense strand starting at position 3887 of SEQ ID NO: 1560720
gguaaaugcugugaaggca

SEQ ID NO: 1619708 - RNA, 19 nt, Artificial Sequence
  Description of Artificial Sequence: Synthetic oligonucleotide
  Antisense strand to SEQ ID NO: 1619707
ugccuucacagcauuuacc

SEQ ID NO: 1619709 - RNA, 19 nt, Artificial Sequence
  Description of Artificial Sequence: Synthetic oligonucleotide
  Sense strand starting at position 3926 of SEQ ID NO: 1560720
ggacuucucagaggaggug

SEQ ID NO: 1619710 - RNA, 19 nt, Artificial Sequence
  Description of Artificial Sequence: Synthetic oligonucleotide
  Antisense strand to SEQ ID NO: 1619709
caccuccucugagaagucc

SEQ ID NO: 1619711 - RNA, 19 nt, Artificial Sequence
  Description of Artificial Sequence: Synthetic oligonucleotide
  Sense strand starting at position 354 of SEQ ID NO: 1560721
ucuuguugggugggaugaa

SEQ ID NO: 1619712 - RNA, 19 nt, Artificial Sequence
  Description of Artificial Sequence: Synthetic oligonucleotide
  Antisense strand to SEQ ID NO: 1619711
uucaucccacccaacaaga

SEQ ID NO: 1619713 - RNA, 19 nt, Artificial Sequence
  Description of Artificial Sequence: Synthetic oligonucleotide
  Sense strand starting at position 452 of SEQ ID NO: 1560721
acucuucuccaggagcaga

SEQ ID NO: 1619714 - RNA, 19 nt, Artificial Sequence
  Description of Artificial Sequence: Synthetic oligonucleotide
  Antisense strand to SEQ ID NO: 1619713
ucugcuccuggagaagagu

SEQ ID NO: 1619715 - RNA, 19 nt, Artificial Sequence
  Description of Artificial Sequence: Synthetic oligonucleotide
  Sense strand starting at position 478 of SEQ ID NO: 1560721
aguggagucauagauguau

SEQ ID NO: 1619716 - RNA, 19 nt, Artificial Sequence
  Description of Artificial Sequence: Synthetic oligonucleotide
  Antisense strand to SEQ ID NO: 1619715
auacaucuaugacuccacu

SEQ ID NO: 1619717 - RNA, 19 nt, Artificial Sequence
  Description of Artificial Sequence: Synthetic oligonucleotide
  Sense strand starting at position 480 of SEQ ID NO: 1560721
uggagucauagauguauuc

SEQ ID NO: 1619718 - RNA, 19 nt, Artificial Sequence
  Description of Artificial Sequence: Synthetic oligonucleotide
  Antisense strand to SEQ ID NO: 1619717
gaauacaucuaugacucca

SEQ ID NO: 1619719 - RNA, 19 nt, Artificial Sequence
  Description of Artificial Sequence: Synthetic oligonucleotide
  Sense strand starting at position 517 of SEQ ID NO: 1560721
uuuccacucguggagugau

SEQ ID NO: 1619720 - RNA, 19 nt, Artificial Sequence
  Description of Artificial Sequence: Synthetic oligonucleotide
  Antisense strand to SEQ ID NO: 1619719
aucacuccacgaguggaaa

SEQ ID NO: 1619721 - RNA, 19 nt, Artificial Sequence
  Description of Artificial Sequence: Synthetic oligonucleotide
  Sense strand starting at position 552 of SEQ ID NO: 1560721
ugagacuaaagugguagau

SEQ ID NO: 1619722 - RNA, 19 nt, Artificial Sequence
  Description of Artificial Sequence: Synthetic oligonucleotide
  Antisense strand to SEQ ID NO: 1619721
aucuaccacuuuagucuca

SEQ ID NO: 1619723 - RNA, 19 nt, Artificial Sequence
  Description of Artificial Sequence: Synthetic oligonucleotide
  Sense strand starting at position 558 of SEQ ID NO: 1560721
uaaagugguagauggagau

SEQ ID NO: 1619724 - RNA, 19 nt, Artificial Sequence
  Description of Artificial Sequence: Synthetic oligonucleotide
  Antisense strand to SEQ ID NO: 1619723
aucuccaucuaccacuuua

SEQ ID NO: 1619725 - RNA, 19 nt, Artificial Sequence
  Description of Artificial Sequence: Synthetic oligonucleotide
  Sense strand starting at position 564 of SEQ ID NO: 1560721
gguagauggagaugugguu

SEQ ID NO: 1619726 - RNA, 19 nt, Artificial Sequence
  Description of Artificial Sequence: Synthetic oligonucleotide
  Antisense strand to SEQ ID NO: 1619725
aaccacaucuccaucuacc

SEQ ID NO: 1619727 - RNA, 19 nt, Artificial Sequence
  Description of Artificial Sequence: Synthetic oligonucleotide
  Sense strand starting at position 577 of SEQ ID NO: 1560721
gugguugucagcgcugaag

SEQ ID NO: 1619728 - RNA, 19 nt, Artificial Sequence
  Description of Artificial Sequence: Synthetic oligonucleotide
  Antisense strand to SEQ ID NO: 1619727
cuucagcgcugacaaccac

SEQ ID NO: 1619729 - RNA, 19 nt, Artificial Sequence
  Description of Artificial Sequence: Synthetic oligonucleotide
  Sense strand starting at position 666 of SEQ ID NO: 1560721
ggguauauccauggucuca

SEQ ID NO: 1619730 - RNA, 19 nt, Artificial Sequence
  Description of Artificial Sequence: Synthetic oligonucleotide
  Antisense strand to SEQ ID NO: 1619729
ugagaccauggauauaccc

SEQ ID NO: 1619731 - RNA, 19 nt, Artificial Sequence
  Description of Artificial Sequence: Synthetic oligonucleotide
  Sense strand starting at position 720 of SEQ ID NO: 1560721
cugcuuuguggauauugau

SEQ ID NO: 1619732 - RNA, 19 nt, Artificial Sequence
  Description of Artificial Sequence: Synthetic oligonucleotide
  Antisense strand to SEQ ID NO: 1619731
aucaauauccacaaagcag

SEQ ID NO: 1619733 - RNA, 19 nt, Artificial Sequence
  Description of Artificial Sequence: Synthetic oligonucleotide
  Sense strand starting at position 752 of SEQ ID NO: 1560721
aggaaauugugcuucugac

SEQ ID NO: 1619734 - RNA, 19 nt, Artificial Sequence
  Description of Artificial Sequence: Synthetic oligonucleotide
  Antisense strand to SEQ ID NO: 1619733
gucagaagcacaauuuccu

SEQ ID NO: 1619735 - RNA, 19 nt, Artificial Sequence
  Description of Artificial Sequence: Synthetic oligonucleotide
  Sense strand starting at position 879 of SEQ ID NO: 1560721
gagacucuggccugagaau

SEQ ID NO: 1619736 - RNA, 19 nt, Artificial Sequence
  Description of Artificial Sequence: Synthetic oligonucleotide
  Antisense strand to SEQ ID NO: 1619735
auucucaggccagagucuc

SEQ ID NO: 1619737 - RNA, 19 nt, Artificial Sequence
  Description of Artificial Sequence: Synthetic oligonucleotide
  Sense strand starting at position 893 of SEQ ID NO: 1560721
agaauaugcuggucucuga

SEQ ID NO: 1619738 - RNA, 19 nt, Artificial Sequence
  Description of Artificial Sequence: Synthetic oligonucleotide
  Antisense strand to SEQ ID NO: 1619737
ucagagaccagcauauucu

SEQ ID NO: 1619739 - RNA, 19 nt, Artificial Sequence
  Description of Artificial Sequence: Synthetic oligonucleotide
  Sense strand starting at position 1004 of SEQ ID NO: 1560721
agggauauccagugguuga

SEQ ID NO: 1619740 - RNA, 19 nt, Artificial Sequence
  Description of Artificial Sequence: Synthetic oligonucleotide
  Antisense strand to SEQ ID NO: 1619739
ucaaccacuggauaucccu

SEQ ID NO: 1619741 - RNA, 19 nt, Artificial Sequence
  Description of Artificial Sequence: Synthetic oligonucleotide
  Sense strand starting at position 1005 of SEQ ID NO: 1560721
gggauauccagugguugau

SEQ ID NO: 1619742 - RNA, 19 nt, Artificial Sequence
  Description of Artificial Sequence: Synthetic oligonucleotide
  Antisense strand to SEQ ID NO: 1619741
aucaaccacuggauauccc

SEQ ID NO: 1619743 - RNA, 19 nt, Artificial Sequence
  Description of Artificial Sequence: Synthetic oligonucleotide
  Sense strand starting at position 1008 of SEQ ID NO: 1560721
auauccagugguugauaga

SEQ ID NO: 1619744 - RNA, 19 nt, Artificial Sequence
  Description of Artificial Sequence: Synthetic oligonucleotide
  Antisense strand to SEQ ID NO: 1619743
ucuaucaaccacuggauau

SEQ ID NO: 1619745 - RNA, 19 nt, Artificial Sequence
  Description of Artificial Sequence: Synthetic oligonucleotide
  Sense strand starting at position 1089 of SEQ ID NO: 1560721
ggaagaauaaaguguccca

SEQ ID NO: 1619746 - RNA, 19 nt, Artificial Sequence
  Description of Artificial Sequence: Synthetic oligonucleotide
  Antisense strand to SEQ ID NO: 1619745
ugggacacuuuauucuucc

SEQ ID NO: 1619747 - RNA, 19 nt, Artificial Sequence
  Description of Artificial Sequence: Synthetic oligonucleotide
  Sense strand starting at position 1092 of SEQ ID NO: 1560721
agaauaaagugucccaaau

SEQ ID NO: 1619748 - RNA, 19 nt, Artificial Sequence
  Description of Artificial Sequence: Synthetic oligonucleotide
  Antisense strand to SEQ ID NO: 1619747
auuugggacacuuuauucu

SEQ ID NO: 1619749 - RNA, 19 nt, Artificial Sequence
  Description of Artificial Sequence: Synthetic oligonucleotide
  Sense strand starting at position 1107 of SEQ ID NO: 1560721
aaaugauggguuuguccuu

SEQ ID NO: 1619750 - RNA, 19 nt, Artificial Sequence
  Description of Artificial Sequence: Synthetic oligonucleotide
  Antisense strand to SEQ ID NO: 1619749
aaggacaaacccaucauuu

SEQ ID NO: 1619751 - RNA, 19 nt, Artificial Sequence
  Description of Artificial Sequence: Synthetic oligonucleotide
  Sense strand starting at position 1130 of SEQ ID NO: 1560721
gaguaugugagucaguaac

SEQ ID NO: 1619752 - RNA, 19 nt, Artificial Sequence
  Description of Artificial Sequence: Synthetic oligonucleotide
  Antisense strand to SEQ ID NO: 1619751
guuacugacucacauacuc

SEQ ID NO: 1619753 - RNA, 19 nt, Artificial Sequence
  Description of Artificial Sequence: Synthetic oligonucleotide
  Sense strand starting at position 1237 of SEQ ID NO: 1560721
acaggaauauaucuugugu

SEQ ID NO: 1619754 - RNA, 19 nt, Artificial Sequence
  Description of Artificial Sequence: Synthetic oligonucleotide
  Antisense strand to SEQ ID NO: 1619753
acacaagauauauuccugu

SEQ ID NO: 1619755 - RNA, 19 nt, Artificial Sequence
  Description of Artificial Sequence: Synthetic oligonucleotide
  Sense strand starting at position 1511 of SEQ ID NO: 1560721
gugucauuccucuagaggu

SEQ ID NO: 1619756 - RNA, 19 nt, Artificial Sequence
  Description of Artificial Sequence: Synthetic oligonucleotide
  Antisense strand to SEQ ID NO: 1619755
accucuagaggaaugacac

SEQ ID NO: 1619757 - RNA, 19 nt, Artificial Sequence
  Description of Artificial Sequence: Synthetic oligonucleotide
  Sense strand starting at position 1665 of SEQ ID NO: 1560721
agaugucuuaggugacaag

SEQ ID NO: 1619758 - RNA, 19 nt, Artificial Sequence
  Description of Artificial Sequence: Synthetic oligonucleotide
  Antisense strand to SEQ ID NO: 1619757
cuugucaccuaagacaucu

SEQ ID NO: 1619759 - RNA, 19 nt, Artificial Sequence
  Description of Artificial Sequence: Synthetic oligonucleotide
  Sense strand starting at position 1690 of SEQ ID NO: 1560721
ccugucaguccugaaucca

SEQ ID NO: 1619760 - RNA, 19 nt, Artificial Sequence
  Description of Artificial Sequence: Synthetic oligonucleotide
  Antisense strand to SEQ ID NO: 1619759
uggauucaggacugacagg

SEQ ID NO: 1619761 - RNA, 19 nt, Artificial Sequence
  Description of Artificial Sequence: Synthetic oligonucleotide
  Sense strand starting at position 1869 of SEQ ID NO: 1560721
uucugagcucccugaaacu

SEQ ID NO: 1619762 - RNA, 19 nt, Artificial Sequence
  Description of Artificial Sequence: Synthetic oligonucleotide
  Antisense strand to SEQ ID NO: 1619761
aguuucagggagcucagaa

SEQ ID NO: 1619763 - RNA, 19 nt, Artificial Sequence
  Description of Artificial Sequence: Synthetic oligonucleotide
  Sense strand starting at position 2122 of SEQ ID NO: 1560721
gugucugcagaauagaauu

SEQ ID NO: 1619764 - RNA, 19 nt, Artificial Sequence
  Description of Artificial Sequence: Synthetic oligonucleotide
  Antisense strand to SEQ ID NO: 1619763
aauucuauucugcagacac

SEQ ID NO: 1619765 - RNA, 19 nt, Artificial Sequence
  Description of Artificial Sequence: Synthetic oligonucleotide
  Sense strand starting at position 3024 of SEQ ID NO: 1560721
gugauacuggcagauacua

SEQ ID NO: 1619766 - RNA, 19 nt, Artificial Sequence
  Description of Artificial Sequence: Synthetic oligonucleotide
  Antisense strand to SEQ ID NO: 1619765
uaguaucugccaguaucac

SEQ ID NO: 1619767 - RNA, 19 nt, Artificial Sequence
  Description of Artificial Sequence: Synthetic oligonucleotide
  Sense strand starting at position 3043 of SEQ ID NO: 1560721
aggcucuugaauugagaag

SEQ ID NO: 1619768 - RNA, 19 nt, Artificial Sequence
  Description of Artificial Sequence: Synthetic oligonucleotide
  Antisense strand to SEQ ID NO: 1619767
cuucucaauucaagagccu

SEQ ID NO: 1619769 - RNA, 19 nt, Artificial Sequence
  Description of Artificial Sequence: Synthetic oligonucleotide
  Sense strand starting at position 3044 of SEQ ID NO: 1560721
ggcucuugaauugagaagu

SEQ ID NO: 1619770 - RNA, 19 nt, Artificial Sequence
  Description of Artificial Sequence: Synthetic oligonucleotide
  Antisense strand to SEQ ID NO: 1619769
acuucucaauucaagagcc

SEQ ID NO: 1619771 - RNA, 19 nt, Artificial Sequence
  Description of Artificial Sequence: Synthetic oligonucleotide
  Sense strand starting at position 3054 of SEQ ID NO: 1560721
uugagaaguggaggucaga

SEQ ID NO: 1619772 - RNA, 19 nt, Artificial Sequence
  Description of Artificial Sequence: Synthetic oligonucleotide
  Antisense strand to SEQ ID NO: 1619771
ucugaccuccacuucucaa

SEQ ID NO: 1619773 - RNA, 19 nt, Artificial Sequence
  Description of Artificial Sequence: Synthetic oligonucleotide
  Sense strand starting at position 3124 of SEQ ID NO: 1560721
ucaggaaucaguggaaguu

SEQ ID NO: 1619774 - RNA, 19 nt, Artificial Sequence
  Description of Artificial Sequence: Synthetic oligonucleotide
  Antisense strand to SEQ ID NO: 1619773
aacuuccacugauuccuga

SEQ ID NO: 1619775 - RNA, 19 nt, Artificial Sequence
  Description of Artificial Sequence: Synthetic oligonucleotide
  Sense strand starting at position 3137 of SEQ ID NO: 1560721
gaaguugcucuugauuaaa

SEQ ID NO: 1619776 - RNA, 19 nt, Artificial Sequence
  Description of Artificial Sequence: Synthetic oligonucleotide
  Antisense strand to SEQ ID NO: 1619775
uuuaaucaagagcaacuuc

SEQ ID NO: 1619777 - RNA, 19 nt, Artificial Sequence
  Description of Artificial Sequence: Synthetic oligonucleotide
  Sense strand starting at position 3510 of SEQ ID NO: 1560721
gguugaaucauguaaaggu

SEQ ID NO: 1619778 - RNA, 19 nt, Artificial Sequence
  Description of Artificial Sequence: Synthetic oligonucleotide
  Antisense strand to SEQ ID NO: 1619777
accuuuacaugauucaacc

SEQ ID NO: 1619779 - RNA, 19 nt, Artificial Sequence
  Description of Artificial Sequence: Synthetic oligonucleotide
  Sense strand starting at position 3518 of SEQ ID NO: 1560721
cauguaaaggucuagcgau

SEQ ID NO: 1619780 - RNA, 19 nt, Artificial Sequence
  Description of Artificial Sequence: Synthetic oligonucleotide
  Antisense strand to SEQ ID NO: 1619779
aucgcuagaccuuuacaug

SEQ ID NO: 1619781 - RNA, 19 nt, Artificial Sequence
  Description of Artificial Sequence: Synthetic oligonucleotide
  Sense strand starting at position 3639 of SEQ ID NO: 1560721
gggcauuacuaugauuuga

SEQ ID NO: 1619782 - RNA, 19 nt, Artificial Sequence
  Description of Artificial Sequence: Synthetic oligonucleotide
  Antisense strand to SEQ ID NO: 1619781
ucaaaucauaguaaugccc

SEQ ID NO: 1619783 - RNA, 19 nt, Artificial Sequence
  Description of Artificial Sequence: Synthetic oligonucleotide
  Sense strand starting at position 3725 of SEQ ID NO: 1560721
agaggugauugggugauga

SEQ ID NO: 1619784 - RNA, 19 nt, Artificial Sequence
  Description of Artificial Sequence: Synthetic oligonucleotide
  Antisense strand to SEQ ID NO: 1619783
ucaucacccaaucaccucu

SEQ ID NO: 1619785 - RNA, 19 nt, Artificial Sequence
  Description of Artificial Sequence: Synthetic oligonucleotide
  Sense strand starting at position 3788 of SEQ ID NO: 1560721
auggauuagugggcuaaca

SEQ ID NO: 1619786 - RNA, 19 nt, Artificial Sequence
  Description of Artificial Sequence: Synthetic oligonucleotide
  Antisense strand to SEQ ID NO: 1619785
uguuagcccacuaauccau

SEQ ID NO: 1619787 - RNA, 19 nt, Artificial Sequence
  Description of Artificial Sequence: Synthetic oligonucleotide
  Sense strand starting at position 3790 of SEQ ID NO: 1560721
ggauuagugggcuaacaug

SEQ ID NO: 1619788 - RNA, 19 nt, Artificial Sequence
  Description of Artificial Sequence: Synthetic oligonucleotide
  Antisense strand to SEQ ID NO: 1619787
cauguuagcccacuaaucc

SEQ ID NO: 1619789 - RNA, 19 nt, Artificial Sequence
  Description of Artificial Sequence: Synthetic oligonucleotide
  Sense strand starting at position 3813 of SEQ ID NO: 1560721
gggacuugguggcuuuaaa

SEQ ID NO: 1619790 - RNA, 19 nt, Artificial Sequence
  Description of Artificial Sequence: Synthetic oligonucleotide
  Antisense strand to SEQ ID NO: 1619789
uuuaaagccaccaaguccc

SEQ ID NO: 1619791 - RNA, 19 nt, Artificial Sequence
  Description of Artificial Sequence: Synthetic oligonucleotide
  Sense strand starting at position 5 of SEQ ID NO: 1560722
aacagcugacagugagaaa

SEQ ID NO: 1619792 - RNA, 19 nt, Artificial Sequence
  Description of Artificial Sequence: Synthetic oligonucleotide
  Antisense strand to SEQ ID NO: 1619791
uuucucacugucagcuguu

SEQ ID NO: 1619793 - RNA, 19 nt, Artificial Sequence
  Description of Artificial Sequence: Synthetic oligonucleotide
  Sense strand starting at position 59 of SEQ ID NO: 1560722
ccugaaggccuauaaccau

SEQ ID NO: 1619794 - RNA, 19 nt, Artificial Sequence
  Description of Artificial Sequence: Synthetic oligonucleotide
  Antisense strand to SEQ ID NO: 1619793
augguuauaggccuucagg

SEQ ID NO: 1619795 - RNA, 19 nt, Artificial Sequence
  Description of Artificial Sequence: Synthetic oligonucleotide
  Sense strand starting at position 65 of SEQ ID NO: 1560722
ggccuauaaccaugggauu

SEQ ID NO: 1619796 - RNA, 19 nt, Artificial Sequence
  Description of Artificial Sequence: Synthetic oligonucleotide
  Antisense strand to SEQ ID NO: 1619795
aaucccaugguuauaggcc

SEQ ID NO: 1619797 - RNA, 19 nt, Artificial Sequence
  Description of Artificial Sequence: Synthetic oligonucleotide
  Sense strand starting at position 185 of SEQ ID NO: 1560722
cugagcacugucuacugaa

SEQ ID NO: 1619798 - RNA, 19 nt, Artificial Sequence
  Description of Artificial Sequence: Synthetic oligonucleotide
  Antisense strand to SEQ ID NO: 1619797
uucaguagacagugcucag

SEQ ID NO: 1619799 - RNA, 19 nt, Artificial Sequence
  Description of Artificial Sequence: Synthetic oligonucleotide
  Sense strand starting at position 195 of SEQ ID NO: 1560722
ucuacugaauugcuggaaa

SEQ ID NO: 1619800 - RNA, 19 nt, Artificial Sequence
  Description of Artificial Sequence: Synthetic oligonucleotide
  Antisense strand to SEQ ID NO: 1619799
uuuccagcaauucaguaga

SEQ ID NO: 1619801 - RNA, 19 nt, Artificial Sequence
  Description of Artificial Sequence: Synthetic oligonucleotide
  Sense strand starting at position 198 of SEQ ID NO: 1560722
acugaauugcuggaaagca

SEQ ID NO: 1619802 - RNA, 19 nt, Artificial Sequence
  Description of Artificial Sequence: Synthetic oligonucleotide
  Antisense strand to SEQ ID NO: 1619801
ugcuuuccagcaauucagu

SEQ ID NO: 1619803 - RNA, 19 nt, Artificial Sequence
  Description of Artificial Sequence: Synthetic oligonucleotide
  Sense strand starting at position 259 of SEQ ID NO: 1560722
ccagaucuuuccuugaguu

SEQ ID NO: 1619804 - RNA, 19 nt, Artificial Sequence
  Description of Artificial Sequence: Synthetic oligonucleotide
  Antisense strand to SEQ ID NO: 1619803
aacucaaggaaagaucugg

SEQ ID NO: 1619805 - RNA, 19 nt, Artificial Sequence
  Description of Artificial Sequence: Synthetic oligonucleotide
  Sense strand starting at position 261 of SEQ ID NO: 1560722
agaucuuuccuugaguuac

SEQ ID NO: 1619806 - RNA, 19 nt, Artificial Sequence
  Description of Artificial Sequence: Synthetic oligonucleotide
  Antisense strand to SEQ ID NO: 1619805
guaacucaaggaaagaucu

SEQ ID NO: 1619807 - RNA, 19 nt, Artificial Sequence
  Description of Artificial Sequence: Synthetic oligonucleotide
  Sense strand starting at position 335 of SEQ ID NO: 1560722
aaagacauuucuggaagug

SEQ ID NO: 1619808 - RNA, 19 nt, Artificial Sequence
  Description of Artificial Sequence: Synthetic oligonucleotide
  Antisense strand to SEQ ID NO: 1619807
cacuuccagaaaugucuuu

SEQ ID NO: 1619809 - RNA, 19 nt, Artificial Sequence
  Description of Artificial Sequence: Synthetic oligonucleotide
  Sense strand starting at position 349 of SEQ ID NO: 1560722
aaguguaaccuuggaagca

SEQ ID NO: 1619810 - RNA, 19 nt, Artificial Sequence
  Description of Artificial Sequence: Synthetic oligonucleotide
  Antisense strand to SEQ ID NO: 1619809
ugcuuccaagguuacacuu

SEQ ID NO: 1619811 - RNA, 19 nt, Artificial Sequence
  Description of Artificial Sequence: Synthetic oligonucleotide
  Sense strand starting at position 393 of SEQ ID NO: 1560722
gaacgagaaucagugccaa

SEQ ID NO: 1619812 - RNA, 19 nt, Artificial Sequence
  Description of Artificial Sequence: Synthetic oligonucleotide
  Antisense strand to SEQ ID NO: 1619811
uuggcacugauucucguuc

SEQ ID NO: 1619813 - RNA, 19 nt, Artificial Sequence
  Description of Artificial Sequence: Synthetic oligonucleotide
  Sense strand starting at position 451 of SEQ ID NO: 1560722
gguaucuccugaucaagau

SEQ ID NO: 1619814 - RNA, 19 nt, Artificial Sequence
  Description of Artificial Sequence: Synthetic oligonucleotide
  Antisense strand to SEQ ID NO: 1619813
aucuugaucaggagauacc

SEQ ID NO: 1619815 - RNA, 19 nt, Artificial Sequence
  Description of Artificial Sequence: Synthetic oligonucleotide
  Sense strand starting at position 452 of SEQ ID NO: 1560722
guaucuccugaucaagauu

SEQ ID NO: 1619816 - RNA, 19 nt, Artificial Sequence
  Description of Artificial Sequence: Synthetic oligonucleotide
  Antisense strand to SEQ ID NO: 1619815
aaucuugaucaggagauac

SEQ ID NO: 1619817 - RNA, 19 nt, Artificial Sequence
  Description of Artificial Sequence: Synthetic oligonucleotide
  Sense strand starting at position 492 of SEQ ID NO: 1560722
uuucuaaguccugaaguua

SEQ ID NO: 1619818 - RNA, 19 nt, Artificial Sequence
  Description of Artificial Sequence: Synthetic oligonucleotide
  Antisense strand to SEQ ID NO: 1619817
uaacuucaggacuuagaaa

SEQ ID NO: 1619819 - RNA, 19 nt, Artificial Sequence
  Description of Artificial Sequence: Synthetic oligonucleotide
  Sense strand starting at position 646 of SEQ ID NO: 1560722
caauguguccuggaacgaa

SEQ ID NO: 1619820 - RNA, 19 nt, Artificial Sequence
  Description of Artificial Sequence: Synthetic oligonucleotide
  Antisense strand to SEQ ID NO: 1619819
uucguuccaggacacauug

SEQ ID NO: 1619821 - RNA, 19 nt, Artificial Sequence
  Description of Artificial Sequence: Synthetic oligonucleotide
  Sense strand starting at position 649 of SEQ ID NO: 1560722
uguguccuggaacgaaauu

SEQ ID NO: 1619822 - RNA, 19 nt, Artificial Sequence
  Description of Artificial Sequence: Synthetic oligonucleotide
  Antisense strand to SEQ ID NO: 1619821
aauuucguuccaggacaca

SEQ ID NO: 1619823 - RNA, 19 nt, Artificial Sequence
  Description of Artificial Sequence: Synthetic oligonucleotide
  Sense strand starting at position 661 of SEQ ID NO: 1560722
cgaaauuugcacggugguu

SEQ ID NO: 1619824 - RNA, 19 nt, Artificial Sequence
  Description of Artificial Sequence: Synthetic oligonucleotide
  Antisense strand to SEQ ID NO: 1619823
aaccaccgugcaaauuucg

SEQ ID NO: 1619825 - RNA, 19 nt, Artificial Sequence
  Description of Artificial Sequence: Synthetic oligonucleotide
  Sense strand starting at position 663 of SEQ ID NO: 1560722
aaauuugcacggugguuua

SEQ ID NO: 1619826 - RNA, 19 nt, Artificial Sequence
  Description of Artificial Sequence: Synthetic oligonucleotide
  Antisense strand to SEQ ID NO: 1619825
uaaaccaccgugcaaauuu

SEQ ID NO: 1619827 - RNA, 19 nt, Artificial Sequence
  Description of Artificial Sequence: Synthetic oligonucleotide
  Sense strand starting at position 747 of SEQ ID NO: 1560722
gccucaaguagaugguuua

SEQ ID NO: 1619828 - RNA, 19 nt, Artificial Sequence
  Description of Artificial Sequence: Synthetic oligonucleotide
  Antisense strand to SEQ ID NO: 1619827
uaaaccaucuacuugaggc

SEQ ID NO: 1619829 - RNA, 19 nt, Artificial Sequence
  Description of Artificial Sequence: Synthetic oligonucleotide
  Sense strand starting at position 748 of SEQ ID NO: 1560722
ccucaaguagaugguuuaa

SEQ ID NO: 1619830 - RNA, 19 nt, Artificial Sequence
  Description of Artificial Sequence: Synthetic oligonucleotide
  Antisense strand to SEQ ID NO: 1619829
uuaaaccaucuacuugagg

SEQ ID NO: 1619831 - RNA, 19 nt, Artificial Sequence
  Description of Artificial Sequence: Synthetic oligonucleotide
  Sense strand starting at position 771 of SEQ ID NO: 1560722
acaaucuugcauugagaug

SEQ ID NO: 1619832 - RNA, 19 nt, Artificial Sequence
  Description of Artificial Sequence: Synthetic oligonucleotide
  Antisense strand to SEQ ID NO: 1619831
caucucaaugcaagauugu

SEQ ID NO: 1619833 - RNA, 19 nt, Artificial Sequence
  Description of Artificial Sequence: Synthetic oligonucleotide
  Sense strand starting at position 893 of SEQ ID NO: 1560722
agguucuaucuagaucagu

SEQ ID NO: 1619834 - RNA, 19 nt, Artificial Sequence
  Description of Artificial Sequence: Synthetic oligonucleotide
  Antisense strand to SEQ ID NO: 1619833
acugaucuagauagaaccu

SEQ ID NO: 1619835 - RNA, 19 nt, Artificial Sequence
  Description of Artificial Sequence: Synthetic oligonucleotide
  Sense strand starting at position 924 of SEQ ID NO: 1560722
cugaauaaaucaucuccgu

SEQ ID NO: 1619836 - RNA, 19 nt, Artificial Sequence
  Description of Artificial Sequence: Synthetic oligonucleotide
  Antisense strand to SEQ ID NO: 1619835
acggagaugauuuauucag

SEQ ID NO: 1619837 - RNA, 19 nt, Artificial Sequence
  Description of Artificial Sequence: Synthetic oligonucleotide
  Sense strand starting at position 1017 of SEQ ID NO: 1560722
ggaguuaacaguugaccac

SEQ ID NO: 1619838 - RNA, 19 nt, Artificial Sequence
  Description of Artificial Sequence: Synthetic oligonucleotide
  Antisense strand to SEQ ID NO: 1619837
guggucaacuguuaacucc

SEQ ID NO: 1619839 - RNA, 19 nt, Artificial Sequence
  Description of Artificial Sequence: Synthetic oligonucleotide
  Sense strand starting at position 1081 of SEQ ID NO: 1560722
cugccaugucccugaaaga

SEQ ID NO: 1619840 - RNA, 19 nt, Artificial Sequence
  Description of Artificial Sequence: Synthetic oligonucleotide
  Antisense strand to SEQ ID NO: 1619839
ucuuucagggacauggcag

SEQ ID NO: 1619841 - RNA, 19 nt, Artificial Sequence
  Description of Artificial Sequence: Synthetic oligonucleotide
  Sense strand starting at position 1082 of SEQ ID NO: 1560722
ugccaugucccugaaagaa

SEQ ID NO: 1619842 - RNA, 19 nt, Artificial Sequence
  Description of Artificial Sequence: Synthetic oligonucleotide
  Antisense strand to SEQ ID NO: 1619841
uucuuucagggacauggca

SEQ ID NO: 1619843 - RNA, 19 nt, Artificial Sequence
  Description of Artificial Sequence: Synthetic oligonucleotide
  Sense strand starting at position 1187 of SEQ ID NO: 1560722
gguggaauuuagcaacaac

SEQ ID NO: 1619844 - RNA, 19 nt, Artificial Sequence
  Description of Artificial Sequence: Synthetic oligonucleotide
  Antisense strand to SEQ ID NO: 1619843
guuguugcuaaauuccacc

SEQ ID NO: 1619845 - RNA, 19 nt, Artificial Sequence
  Description of Artificial Sequence: Synthetic oligonucleotide
  Sense strand starting at position 1259 of SEQ ID NO: 1560722
uggcguuuccagcaagaga

SEQ ID NO: 1619846 - RNA, 19 nt, Artificial Sequence
  Description of Artificial Sequence: Synthetic oligonucleotide
  Antisense strand to SEQ ID NO: 1619845
ucucuugcuggaaacgcca

SEQ ID NO: 1619847 - RNA, 19 nt, Artificial Sequence
  Description of Artificial Sequence: Synthetic oligonucleotide
  Sense strand starting at position 2242 of SEQ ID NO: 1560722
gcccuuuguccugcaguca

SEQ ID NO: 1619848 - RNA, 19 nt, Artificial Sequence
  Description of Artificial Sequence: Synthetic oligonucleotide
  Antisense strand to SEQ ID NO: 1619847
ugacugcaggacaaagggc

SEQ ID NO: 1619849 - RNA, 19 nt, Artificial Sequence
  Description of Artificial Sequence: Synthetic oligonucleotide
  Sense strand starting at position 2344 of SEQ ID NO: 1560722
uuucgagaaucuuccaggu

SEQ ID NO: 1619850 - RNA, 19 nt, Artificial Sequence
  Description of Artificial Sequence: Synthetic oligonucleotide
  Antisense strand to SEQ ID NO: 1619849
accuggaagauucucgaaa

SEQ ID NO: 1619851 - RNA, 19 nt, Artificial Sequence
  Description of Artificial Sequence: Synthetic oligonucleotide
  Sense strand starting at position 2348 of SEQ ID NO: 1560722
gagaaucuuccagguccua

SEQ ID NO: 1619852 - RNA, 19 nt, Artificial Sequence
  Description of Artificial Sequence: Synthetic oligonucleotide
  Antisense strand to SEQ ID NO: 1619851
uaggaccuggaagauucuc

SEQ ID NO: 1619853 - RNA, 19 nt, Artificial Sequence
  Description of Artificial Sequence: Synthetic oligonucleotide
  Sense strand starting at position 2865 of SEQ ID NO: 1560722
gccgaauuggcagauccuu

SEQ ID NO: 1619854 - RNA, 19 nt, Artificial Sequence
  Description of Artificial Sequence: Synthetic oligonucleotide
  Antisense strand to SEQ ID NO: 1619853
aaggaucugccaauucggc

SEQ ID NO: 1619855 - RNA, 19 nt, Artificial Sequence
  Description of Artificial Sequence: Synthetic oligonucleotide
  Sense strand starting at position 2878 of SEQ ID NO: 1560722
auccuuuaagcccaaggau

SEQ ID NO: 1619856 - RNA, 19 nt, Artificial Sequence
  Description of Artificial Sequence: Synthetic oligonucleotide
  Antisense strand to SEQ ID NO: 1619855
auccuugggcuuaaaggau

SEQ ID NO: 1619857 - RNA, 19 nt, Artificial Sequence
  Description of Artificial Sequence: Synthetic oligonucleotide
  Sense strand starting at position 3334 of SEQ ID NO: 1560722
aauagaagguuugugucuu

SEQ ID NO: 1619858 - RNA, 19 nt, Artificial Sequence
  Description of Artificial Sequence: Synthetic oligonucleotide
  Antisense strand to SEQ ID NO: 1619857
aagacacaaaccuucuauu

SEQ ID NO: 1619859 - RNA, 19 nt, Artificial Sequence
  Description of Artificial Sequence: Synthetic oligonucleotide
  Sense strand starting at position 3581 of SEQ ID NO: 1560722
caccauggcuggcuaagau

SEQ ID NO: 1619860 - RNA, 19 nt, Artificial Sequence
  Description of Artificial Sequence: Synthetic oligonucleotide
  Antisense strand to SEQ ID NO: 1619859
aucuuagccagccauggug

SEQ ID NO: 1619861 - RNA, 19 nt, Artificial Sequence
  Description of Artificial Sequence: Synthetic oligonucleotide
  Sense strand starting at position 3726 of SEQ ID NO: 1560722
agccgucucaguuugucua

SEQ ID NO: 1619862 - RNA, 19 nt, Artificial Sequence
  Description of Artificial Sequence: Synthetic oligonucleotide
  Antisense strand to SEQ ID NO: 1619861
uagacaaacugagacggcu

SEQ ID NO: 1619863 - RNA, 19 nt, Artificial Sequence
  Description of Artificial Sequence: Synthetic oligonucleotide
  Sense strand starting at position 3730 of SEQ ID NO: 1560722
gucucaguuugucuauaaa

SEQ ID NO: 1619864 - RNA, 19 nt, Artificial Sequence
  Description of Artificial Sequence: Synthetic oligonucleotide
  Antisense strand to SEQ ID NO: 1619863
uuuauagacaaacugagac

SEQ ID NO: 1619865 - RNA, 19 nt, Artificial Sequence
  Description of Artificial Sequence: Synthetic oligonucleotide
  Sense strand starting at position 3768 of SEQ ID NO: 1560722
ggugguuggcaagaacuau

SEQ ID NO: 1619866 - RNA, 19 nt, Artificial Sequence
  Description of Artificial Sequence: Synthetic oligonucleotide
  Antisense strand to SEQ ID NO: 1619865
auaguucuugccaaccacc

SEQ ID NO: 1619867 - RNA, 19 nt, Artificial Sequence
  Description of Artificial Sequence: Synthetic oligonucleotide
  Sense strand starting at position 3779 of SEQ ID NO: 1560722
agaacuaugucucugauau

SEQ ID NO: 1619868 - RNA, 19 nt, Artificial Sequence
  Description of Artificial Sequence: Synthetic oligonucleotide
  Antisense strand to SEQ ID NO: 1619867
auaucagagacauaguucu

SEQ ID NO: 1619869 - RNA, 19 nt, Artificial Sequence
  Description of Artificial Sequence: Synthetic oligonucleotide
  Sense strand starting at position 3866 of SEQ ID NO: 1560722
agacauaucgccugagguc

SEQ ID NO: 1619870 - RNA, 19 nt, Artificial Sequence
  Description of Artificial Sequence: Synthetic oligonucleotide
  Antisense strand to SEQ ID NO: 1619869
gaccucaggcgauaugucu

SEQ ID NO: 1619871 - RNA, 19 nt, Artificial Sequence
  Description of Artificial Sequence: Synthetic oligonucleotide
  Sense strand starting at position 204 of SEQ ID NO: 1560723
uacagcugauguguuaaga

SEQ ID NO: 1619872 - RNA, 19 nt, Artificial Sequence
  Description of Artificial Sequence: Synthetic oligonucleotide
  Antisense strand to SEQ ID NO: 1619871
ucuuaacacaucagcugua

SEQ ID NO: 1619873 - RNA, 19 nt, Artificial Sequence
  Description of Artificial Sequence: Synthetic oligonucleotide
  Sense strand starting at position 327 of SEQ ID NO: 1560723
guuugccaacucuaagaaa

SEQ ID NO: 1619874 - RNA, 19 nt, Artificial Sequence
  Description of Artificial Sequence: Synthetic oligonucleotide
  Antisense strand to SEQ ID NO: 1619873
uuucuuagaguuggcaaac

SEQ ID NO: 1619875 - RNA, 19 nt, Artificial Sequence
  Description of Artificial Sequence: Synthetic oligonucleotide
  Sense strand starting at position 673 of SEQ ID NO: 1560723
ccaacucuaguaugaauga

SEQ ID NO: 1619876 - RNA, 19 nt, Artificial Sequence
  Description of Artificial Sequence: Synthetic oligonucleotide
  Antisense strand to SEQ ID NO: 1619875
ucauucauacuagaguugg

SEQ ID NO: 1619877 - RNA, 19 nt, Artificial Sequence
  Description of Artificial Sequence: Synthetic oligonucleotide
  Sense strand starting at position 686 of SEQ ID NO: 1560723
gaaugaauauagccugagu

SEQ ID NO: 1619878 - RNA, 19 nt, Artificial Sequence
  Description of Artificial Sequence: Synthetic oligonucleotide
  Antisense strand to SEQ ID NO: 1619877
acucaggcuauauucauuc

SEQ ID NO: 1619879 - RNA, 19 nt, Artificial Sequence
  Description of Artificial Sequence: Synthetic oligonucleotide
  Sense strand starting at position 688 of SEQ ID NO: 1560723
augaauauagccugaguca

SEQ ID NO: 1619880 - RNA, 19 nt, Artificial Sequence
  Description of Artificial Sequence: Synthetic oligonucleotide
  Antisense strand to SEQ ID NO: 1619879
ugacucaggcuauauucau

SEQ ID NO: 1619881 - RNA, 19 nt, Artificial Sequence
  Description of Artificial Sequence: Synthetic oligonucleotide
  Sense strand starting at position 689 of SEQ ID NO: 1560723
ugaauauagccugagucaa

SEQ ID NO: 1619882 - RNA, 19 nt, Artificial Sequence
  Description of Artificial Sequence: Synthetic oligonucleotide
  Antisense strand to SEQ ID NO: 1619881
uugacucaggcuauauuca

SEQ ID NO: 1619883 - RNA, 19 nt, Artificial Sequence
  Description of Artificial Sequence: Synthetic oligonucleotide
  Sense strand starting at position 764 of SEQ ID NO: 1560723
ggguugugggcccagaaga

SEQ ID NO: 1619884 - RNA, 19 nt, Artificial Sequence
  Description of Artificial Sequence: Synthetic oligonucleotide
  Antisense strand to SEQ ID NO: 1619883
ucuucugggcccacaaccc

SEQ ID NO: 1619885 - RNA, 19 nt, Artificial Sequence
  Description of Artificial Sequence: Synthetic oligonucleotide
  Sense strand starting at position 797 of SEQ ID NO: 1560723
gggugaaggugacaucuga

SEQ ID NO: 1619886 - RNA, 19 nt, Artificial Sequence
  Description of Artificial Sequence: Synthetic oligonucleotide
  Antisense strand to SEQ ID NO: 1619885
ucagaugucaccuucaccc

SEQ ID NO: 1619887 - RNA, 19 nt, Artificial Sequence
  Description of Artificial Sequence: Synthetic oligonucleotide
  Sense strand starting at position 801 of SEQ ID NO: 1560723
gaaggugacaucugacgga

SEQ ID NO: 1619888 - RNA, 19 nt, Artificial Sequence
  Description of Artificial Sequence: Synthetic oligonucleotide
  Antisense strand to SEQ ID NO: 1619887
uccgucagaugucaccuuc

SEQ ID NO: 1619889 - RNA, 19 nt, Artificial Sequence
  Description of Artificial Sequence: Synthetic oligonucleotide
  Sense strand starting at position 877 of SEQ ID NO: 1560723
gugugcaaagccuggaaau

SEQ ID NO: 1619890 - RNA, 19 nt, Artificial Sequence
  Description of Artificial Sequence: Synthetic oligonucleotide
  Antisense strand to SEQ ID NO: 1619889
auuuccaggcuuugcacac

SEQ ID NO: 1619891 - RNA, 19 nt, Artificial Sequence
  Description of Artificial Sequence: Synthetic oligonucleotide
  Sense strand starting at position 879 of SEQ ID NO: 1560723
gugcaaagccuggaaauga

SEQ ID NO: 1619892 - RNA, 19 nt, Artificial Sequence
  Description of Artificial Sequence: Synthetic oligonucleotide
  Antisense strand to SEQ ID NO: 1619891
ucauuuccaggcuuugcac

SEQ ID NO: 1619893 - RNA, 19 nt, Artificial Sequence
  Description of Artificial Sequence: Synthetic oligonucleotide
  Sense strand starting at position 987 of SEQ ID NO: 1560723
cacuuaacucgaggaugca

SEQ ID NO: 1619894 - RNA, 19 nt, Artificial Sequence
  Description of Artificial Sequence: Synthetic oligonucleotide
  Antisense strand to SEQ ID NO: 1619893
ugcauccucgaguuaagug

SEQ ID NO: 1619895 - RNA, 19 nt, Artificial Sequence
  Description of Artificial Sequence: Synthetic oligonucleotide
  Sense strand starting at position 1070 of SEQ ID NO: 1560723
ggcucugaguccucagcca

SEQ ID NO: 1619896 - RNA, 19 nt, Artificial Sequence
  Description of Artificial Sequence: Synthetic oligonucleotide
  Antisense strand to SEQ ID NO: 1619895
uggcugaggacucagagcc

SEQ ID NO: 1619897 - RNA, 19 nt, Artificial Sequence
  Description of Artificial Sequence: Synthetic oligonucleotide
  Sense strand starting at position 1366 of SEQ ID NO: 1560723
ggcauagggcaccgugaau

SEQ ID NO: 1619898 - RNA, 19 nt, Artificial Sequence
  Description of Artificial Sequence: Synthetic oligonucleotide
  Antisense strand to SEQ ID NO: 1619897
auucacggugcccuaugcc

SEQ ID NO: 1619899 - RNA, 19 nt, Artificial Sequence
  Description of Artificial Sequence: Synthetic oligonucleotide
  Sense strand starting at position 2018 of SEQ ID NO: 1560723
agagacucguucucugcaa

SEQ ID NO: 1619900 - RNA, 19 nt, Artificial Sequence
  Description of Artificial Sequence: Synthetic oligonucleotide
  Antisense strand to SEQ ID NO: 1619899
uugcagagaacgagucucu

SEQ ID NO: 1619901 - RNA, 19 nt, Artificial Sequence
  Description of Artificial Sequence: Synthetic oligonucleotide
  Sense strand starting at position 2020 of SEQ ID NO: 1560723
agacucguucucugcaagu

SEQ ID NO: 1619902 - RNA, 19 nt, Artificial Sequence
  Description of Artificial Sequence: Synthetic oligonucleotide
  Antisense strand to SEQ ID NO: 1619901
acuugcagagaacgagucu

SEQ ID NO: 1619903 - RNA, 19 nt, Artificial Sequence
  Description of Artificial Sequence: Synthetic oligonucleotide
  Sense strand starting at position 2070 of SEQ ID NO: 1560723
cucagcugcuagucuagaa

SEQ ID NO: 1619904 - RNA, 19 nt, Artificial Sequence
  Description of Artificial Sequence: Synthetic oligonucleotide
  Antisense strand to SEQ ID NO: 1619903
uucuagacuagcagcugag

SEQ ID NO: 1619905 - RNA, 19 nt, Artificial Sequence
  Description of Artificial Sequence: Synthetic oligonucleotide
  Sense strand starting at position 2255 of SEQ ID NO: 1560723
ugugaagaaucugcaauuc

SEQ ID NO: 1619906 - RNA, 19 nt, Artificial Sequence
  Description of Artificial Sequence: Synthetic oligonucleotide
  Antisense strand to SEQ ID NO: 1619905
gaauugcagauucuucaca

SEQ ID NO: 1619907 - RNA, 19 nt, Artificial Sequence
  Description of Artificial Sequence: Synthetic oligonucleotide
  Sense strand starting at position 2268 of SEQ ID NO: 1560723
caauuccaguucugggaaa

SEQ ID NO: 1619908 - RNA, 19 nt, Artificial Sequence
  Description of Artificial Sequence: Synthetic oligonucleotide
  Antisense strand to SEQ ID NO: 1619907
uuucccagaacuggaauug

SEQ ID NO: 1619909 - RNA, 19 nt, Artificial Sequence
  Description of Artificial Sequence: Synthetic oligonucleotide
  Sense strand starting at position 2269 of SEQ ID NO: 1560723
aauuccaguucugggaaau

SEQ ID NO: 1619910 - RNA, 19 nt, Artificial Sequence
  Description of Artificial Sequence: Synthetic oligonucleotide
  Antisense strand to SEQ ID NO: 1619909
auuucccagaacuggaauu

SEQ ID NO: 1619911 - RNA, 19 nt, Artificial Sequence
  Description of Artificial Sequence: Synthetic oligonucleotide
  Sense strand starting at position 2270 of SEQ ID NO: 1560723
auuccaguucugggaaauc

SEQ ID NO: 1619912 - RNA, 19 nt, Artificial Sequence
  Description of Artificial Sequence: Synthetic oligonucleotide
  Antisense strand to SEQ ID NO: 1619911
gauuucccagaacuggaau

SEQ ID NO: 1619913 - RNA, 19 nt, Artificial Sequence
  Description of Artificial Sequence: Synthetic oligonucleotide
  Sense strand starting at position 2281 of SEQ ID NO: 1560723
gggaaaucaucccaaagga

SEQ ID NO: 1619914 - RNA, 19 nt, Artificial Sequence
  Description of Artificial Sequence: Synthetic oligonucleotide
  Antisense strand to SEQ ID NO: 1619913
uccuuugggaugauuuccc

SEQ ID NO: 1619915 - RNA, 19 nt, Artificial Sequence
  Description of Artificial Sequence: Synthetic oligonucleotide
  Sense strand starting at position 2298 of SEQ ID NO: 1560723
gaaaucaucugugggauac

SEQ ID NO: 1619916 - RNA, 19 nt, Artificial Sequence
  Description of Artificial Sequence: Synthetic oligonucleotide
  Antisense strand to SEQ ID NO: 1619915
guaucccacagaugauuuc

SEQ ID NO: 1619917 - RNA, 19 nt, Artificial Sequence
  Description of Artificial Sequence: Synthetic oligonucleotide
  Sense strand starting at position 2310 of SEQ ID NO: 1560723
gggauacgcagcuauugau

SEQ ID NO: 1619918 - RNA, 19 nt, Artificial Sequence
  Description of Artificial Sequence: Synthetic oligonucleotide
  Antisense strand to SEQ ID NO: 1619917
aucaauagcugcguauccc

SEQ ID NO: 1619919 - RNA, 19 nt, Artificial Sequence
  Description of Artificial Sequence: Synthetic oligonucleotide
  Sense strand starting at position 2313 of SEQ ID NO: 1560723
auacgcagcuauugauuua

SEQ ID NO: 1619920 - RNA, 19 nt, Artificial Sequence
  Description of Artificial Sequence: Synthetic oligonucleotide
  Antisense strand to SEQ ID NO: 1619919
uaaaucaauagcugcguau

SEQ ID NO: 1619921 - RNA, 19 nt, Artificial Sequence
  Description of Artificial Sequence: Synthetic oligonucleotide
  Sense strand starting at position 2316 of SEQ ID NO: 1560723
cgcagcuauugauuuaaag

SEQ ID NO: 1619922 - RNA, 19 nt, Artificial Sequence
  Description of Artificial Sequence: Synthetic oligonucleotide
  Antisense strand to SEQ ID NO: 1619921
cuuuaaaucaauagcugcg

SEQ ID NO: 1619923 - RNA, 19 nt, Artificial Sequence
  Description of Artificial Sequence: Synthetic oligonucleotide
  Sense strand starting at position 2347 of SEQ ID NO: 1560723
ggaccaucaugagcuuuga

SEQ ID NO: 1619924 - RNA, 19 nt, Artificial Sequence
  Description of Artificial Sequence: Synthetic oligonucleotide
  Antisense strand to SEQ ID NO: 1619923
ucaaagcucaugauggucc

SEQ ID NO: 1619925 - RNA, 19 nt, Artificial Sequence
  Description of Artificial Sequence: Synthetic oligonucleotide
  Sense strand starting at position 2360 of SEQ ID NO: 1560723
cuuugaaaucuuggguaua

SEQ ID NO: 1619926 - RNA, 19 nt, Artificial Sequence
  Description of Artificial Sequence: Synthetic oligonucleotide
  Antisense strand to SEQ ID NO: 1619925
uauacccaagauuucaaag

SEQ ID NO: 1619927 - RNA, 19 nt, Artificial Sequence
  Description of Artificial Sequence: Synthetic oligonucleotide
  Sense strand starting at position 2361 of SEQ ID NO: 1560723
uuugaaaucuuggguauaa

SEQ ID NO: 1619928 - RNA, 19 nt, Artificial Sequence
  Description of Artificial Sequence: Synthetic oligonucleotide
  Antisense strand to SEQ ID NO: 1619927
uuauacccaagauuucaaa

SEQ ID NO: 1619929 - RNA, 19 nt, Artificial Sequence
  Description of Artificial Sequence: Synthetic oligonucleotide
  Sense strand starting at position 2362 of SEQ ID NO: 1560723
uugaaaucuuggguauaac

SEQ ID NO: 1619930 - RNA, 19 nt, Artificial Sequence
  Description of Artificial Sequence: Synthetic oligonucleotide
  Antisense strand to SEQ ID NO: 1619929
guuauacccaagauuucaa

SEQ ID NO: 1619931 - RNA, 19 nt, Artificial Sequence
  Description of Artificial Sequence: Synthetic oligonucleotide
  Sense strand starting at position 2370 of SEQ ID NO: 1560723
uuggguauaacuugaagau

SEQ ID NO: 1619932 - RNA, 19 nt, Artificial Sequence
  Description of Artificial Sequence: Synthetic oligonucleotide
  Antisense strand to SEQ ID NO: 1619931
aucuucaaguuauacccaa

SEQ ID NO: 1619933 - RNA, 19 nt, Artificial Sequence
  Description of Artificial Sequence: Synthetic oligonucleotide
  Sense strand starting at position 2396 of SEQ ID NO: 1560723
caggcacaauacguuuaaa

SEQ ID NO: 1619934 - RNA, 19 nt, Artificial Sequence
  Description of Artificial Sequence: Synthetic oligonucleotide
  Antisense strand to SEQ ID NO: 1619933
uuuaaacguauugugccug

SEQ ID NO: 1619935 - RNA, 19 nt, Artificial Sequence
  Description of Artificial Sequence: Synthetic oligonucleotide
  Sense strand starting at position 2429 of SEQ ID NO: 1560723
agaauuuauugccuguagu

SEQ ID NO: 1619936 - RNA, 19 nt, Artificial Sequence
  Description of Artificial Sequence: Synthetic oligonucleotide
  Antisense strand to SEQ ID NO: 1619935
acuacaggcaauaaauucu

SEQ ID NO: 1619937 - RNA, 19 nt, Artificial Sequence
  Description of Artificial Sequence: Synthetic oligonucleotide
  Sense strand starting at position 2430 of SEQ ID NO: 1560723
gaauuuauugccuguaguc

SEQ ID NO: 1619938 - RNA, 19 nt, Artificial Sequence
  Description of Artificial Sequence: Synthetic oligonucleotide
  Antisense strand to SEQ ID NO: 1619937
gacuacaggcaauaaauuc

SEQ ID NO: 1619939 - RNA, 19 nt, Artificial Sequence
  Description of Artificial Sequence: Synthetic oligonucleotide
  Sense strand starting at position 2568 of SEQ ID NO: 1560723
aggagaggcucucacucua

SEQ ID NO: 1619940 - RNA, 19 nt, Artificial Sequence
  Description of Artificial Sequence: Synthetic oligonucleotide
  Antisense strand to SEQ ID NO: 1619939
uagagugagagccucuccu

SEQ ID NO: 1619941 - RNA, 19 nt, Artificial Sequence
  Description of Artificial Sequence: Synthetic oligonucleotide
  Sense strand starting at position 2712 of SEQ ID NO: 1560723
gccucaauuccuggguugu

SEQ ID NO: 1619942 - RNA, 19 nt, Artificial Sequence
  Description of Artificial Sequence: Synthetic oligonucleotide
  Antisense strand to SEQ ID NO: 1619941
acaacccaggaauugaggc

SEQ ID NO: 1619943 - RNA, 19 nt, Artificial Sequence
  Description of Artificial Sequence: Synthetic oligonucleotide
  Sense strand starting at position 2824 of SEQ ID NO: 1560723
gaggucgucuguuccaguu

SEQ ID NO: 1619944 - RNA, 19 nt, Artificial Sequence
  Description of Artificial Sequence: Synthetic oligonucleotide
  Antisense strand to SEQ ID NO: 1619943
aacuggaacagacgaccuc

SEQ ID NO: 1619945 - RNA, 19 nt, Artificial Sequence
  Description of Artificial Sequence: Synthetic oligonucleotide
  Sense strand starting at position 2836 of SEQ ID NO: 1560723
uccaguuuguggugauuua

SEQ ID NO: 1619946 - RNA, 19 nt, Artificial Sequence
  Description of Artificial Sequence: Synthetic oligonucleotide
  Antisense strand to SEQ ID NO: 1619945
uaaaucaccacaaacugga

SEQ ID NO: 1619947 - RNA, 19 nt, Artificial Sequence
  Description of Artificial Sequence: Synthetic oligonucleotide
  Sense strand starting at position 2858 of SEQ ID NO: 1560723
aucuuaucuuccucuggua

SEQ ID NO: 1619948 - RNA, 19 nt, Artificial Sequence
  Description of Artificial Sequence: Synthetic oligonucleotide
  Antisense strand to SEQ ID NO: 1619947
uaccagaggaagauaagau

SEQ ID NO: 1619949 - RNA, 19 nt, Artificial Sequence
  Description of Artificial Sequence: Synthetic oligonucleotide
  Sense strand starting at position 2977 of SEQ ID NO: 1560723
agagaacuuucccaguuau

SEQ ID NO: 1619950 - RNA, 19 nt, Artificial Sequence
  Description of Artificial Sequence: Synthetic oligonucleotide
  Antisense strand to SEQ ID NO: 1619949
auaacugggaaaguucucu

SEQ ID NO: 1619951 - RNA, 19 nt, Artificial Sequence
  Description of Artificial Sequence: Synthetic oligonucleotide
  Sense strand starting at position 442 of SEQ ID NO: 1560724
ccaucaccguccuguuaua

SEQ ID NO: 1619952 - RNA, 19 nt, Artificial Sequence
  Description of Artificial Sequence: Synthetic oligonucleotide
  Antisense strand to SEQ ID NO: 1619951
uauaacaggacggugaugg

SEQ ID NO: 1619953 - RNA, 19 nt, Artificial Sequence
  Description of Artificial Sequence: Synthetic oligonucleotide
  Sense strand starting at position 482 of SEQ ID NO: 1560724
ggacccuuagccugaagga

SEQ ID NO: 1619954 - RNA, 19 nt, Artificial Sequence
  Description of Artificial Sequence: Synthetic oligonucleotide
  Antisense strand to SEQ ID NO: 1619953
uccuucaggcuaagggucc

SEQ ID NO: 1619955 - RNA, 19 nt, Artificial Sequence
  Description of Artificial Sequence: Synthetic oligonucleotide
  Sense strand starting at position 817 of SEQ ID NO: 1560724
cucgcuucuuccucagaua

SEQ ID NO: 1619956 - RNA, 19 nt, Artificial Sequence
  Description of Artificial Sequence: Synthetic oligonucleotide
  Antisense strand to SEQ ID NO: 1619955
uaucugaggaagaagcgag

SEQ ID NO: 1619957 - RNA, 19 nt, Artificial Sequence
  Description of Artificial Sequence: Synthetic oligonucleotide
  Sense strand starting at position 879 of SEQ ID NO: 1560724
guccuucucccaggaucua

SEQ ID NO: 1619958 - RNA, 19 nt, Artificial Sequence
  Description of Artificial Sequence: Synthetic oligonucleotide
  Antisense strand to SEQ ID NO: 1619957
uagauccugggagaaggac

SEQ ID NO: 1619959 - RNA, 19 nt, Artificial Sequence
  Description of Artificial Sequence: Synthetic oligonucleotide
  Sense strand starting at position 2572 of SEQ ID NO: 1560724
cagccaucgcccgagauca

SEQ ID NO: 1619960 - RNA, 19 nt, Artificial Sequence
  Description of Artificial Sequence: Synthetic oligonucleotide
  Antisense strand to SEQ ID NO: 1619959
ugaucucgggcgauggcug

SEQ ID NO: 1619961 - RNA, 19 nt, Artificial Sequence
  Description of Artificial Sequence: Synthetic oligonucleotide
  Sense strand starting at position 2723 of SEQ ID NO: 1560724
caucgcucacgcugagaau

SEQ ID NO: 1619962 - RNA, 19 nt, Artificial Sequence
  Description of Artificial Sequence: Synthetic oligonucleotide
  Antisense strand to SEQ ID NO: 1619961
auucucagcgugagcgaug

SEQ ID NO: 1619963 - RNA, 19 nt, Artificial Sequence
  Description of Artificial Sequence: Synthetic oligonucleotide
  Sense strand starting at position 3260 of SEQ ID NO: 1560724
cccacucuuccagacguau

SEQ ID NO: 1619964 - RNA, 19 nt, Artificial Sequence
  Description of Artificial Sequence: Synthetic oligonucleotide
  Antisense strand to SEQ ID NO: 1619963
auacgucuggaagaguggg

SEQ ID NO: 1619965 - RNA, 19 nt, Artificial Sequence
  Description of Artificial Sequence: Synthetic oligonucleotide
  Sense strand starting at position 3301 of SEQ ID NO: 1560724
agcccucuccucugcagaa

SEQ ID NO: 1619966 - RNA, 19 nt, Artificial Sequence
  Description of Artificial Sequence: Synthetic oligonucleotide
  Antisense strand to SEQ ID NO: 1619965
uucugcagaggagagggcu

SEQ ID NO: 1619967 - RNA, 19 nt, Artificial Sequence
  Description of Artificial Sequence: Synthetic oligonucleotide
  Sense strand starting at position 3343 of SEQ ID NO: 1560724
cagucuuucuagggaccca

SEQ ID NO: 1619968 - RNA, 19 nt, Artificial Sequence
  Description of Artificial Sequence: Synthetic oligonucleotide
  Antisense strand to SEQ ID NO: 1619967
ugggucccuagaaagacug

SEQ ID NO: 1619969 - RNA, 19 nt, Artificial Sequence
  Description of Artificial Sequence: Synthetic oligonucleotide
  Sense strand starting at position 3404 of SEQ ID NO: 1560724
acccuagacuguugcuuau

SEQ ID NO: 1619970 - RNA, 19 nt, Artificial Sequence
  Description of Artificial Sequence: Synthetic oligonucleotide
  Antisense strand to SEQ ID NO: 1619969
auaagcaacagucuagggu

SEQ ID NO: 1619971 - RNA, 19 nt, Artificial Sequence
  Description of Artificial Sequence: Synthetic oligonucleotide
  Sense strand starting at position 3733 of SEQ ID NO: 1560724
cacgguugccguggugaca

SEQ ID NO: 1619972 - RNA, 19 nt, Artificial Sequence
  Description of Artificial Sequence: Synthetic oligonucleotide
  Antisense strand to SEQ ID NO: 1619971
ugucaccacggcaaccgug

SEQ ID NO: 1619973 - RNA, 19 nt, Artificial Sequence
  Description of Artificial Sequence: Synthetic oligonucleotide
  Sense strand starting at position 3842 of SEQ ID NO: 1560724
ggaagaccguuaccauaga

SEQ ID NO: 1619974 - RNA, 19 nt, Artificial Sequence
  Description of Artificial Sequence: Synthetic oligonucleotide
  Antisense strand to SEQ ID NO: 1619973
ucuaugguaacggucuucc

SEQ ID NO: 1619975 - RNA, 19 nt, Artificial Sequence
  Description of Artificial Sequence: Synthetic oligonucleotide
  Sense strand starting at position 3843 of SEQ ID NO: 1560724
gaagaccguuaccauagaa

SEQ ID NO: 1619976 - RNA, 19 nt, Artificial Sequence
  Description of Artificial Sequence: Synthetic oligonucleotide
  Antisense strand to SEQ ID NO: 1619975
uucuaugguaacggucuuc

SEQ ID NO: 1619977 - RNA, 19 nt, Artificial Sequence
  Description of Artificial Sequence: Synthetic oligonucleotide
  Sense strand starting at position 3870 of SEQ ID NO: 1560724
uguuuaggguuuguuuagu

SEQ ID NO: 1619978 - RNA, 19 nt, Artificial Sequence
  Description of Artificial Sequence: Synthetic oligonucleotide
  Antisense strand to SEQ ID NO: 1619977
acuaaacaaacccuaaaca

SEQ ID NO: 1619979 - RNA, 19 nt, Artificial Sequence
  Description of Artificial Sequence: Synthetic oligonucleotide
  Sense strand starting at position 3875 of SEQ ID NO: 1560724
aggguuuguuuagugcaga

SEQ ID NO: 1619980 - RNA, 19 nt, Artificial Sequence
  Description of Artificial Sequence: Synthetic oligonucleotide
  Antisense strand to SEQ ID NO: 1619979
ucugcacuaaacaaacccu

SEQ ID NO: 1619981 - RNA, 19 nt, Artificial Sequence
  Description of Artificial Sequence: Synthetic oligonucleotide
  Sense strand starting at position 3876 of SEQ ID NO: 1560724
ggguuuguuuagugcagag

SEQ ID NO: 1619982 - RNA, 19 nt, Artificial Sequence
  Description of Artificial Sequence: Synthetic oligonucleotide
  Antisense strand to SEQ ID NO: 1619981
cucugcacuaaacaaaccc

SEQ ID NO: 1619983 - RNA, 19 nt, Artificial Sequence
  Description of Artificial Sequence: Synthetic oligonucleotide
  Sense strand starting at position 1046 of SEQ ID NO: 1560725
cagccaucgcccgagauca

SEQ ID NO: 1619984 - RNA, 19 nt, Artificial Sequence
  Description of Artificial Sequence: Synthetic oligonucleotide
  Antisense strand to SEQ ID NO: 1619983
ugaucucgggcgauggcug

SEQ ID NO: 1619985 - RNA, 19 nt, Artificial Sequence
  Description of Artificial Sequence: Synthetic oligonucleotide
  Sense strand starting at position 1197 of SEQ ID NO: 1560725
caucgcucacgcugagaau

SEQ ID NO: 1619986 - RNA, 19 nt, Artificial Sequence
  Description of Artificial Sequence: Synthetic oligonucleotide
  Antisense strand to SEQ ID NO: 1619985
auucucagcgugagcgaug

SEQ ID NO: 1619987 - RNA, 19 nt, Artificial Sequence
  Description of Artificial Sequence: Synthetic oligonucleotide
  Sense strand starting at position 1734 of SEQ ID NO: 1560725
cccacucuuccagacguau

SEQ ID NO: 1619988 - RNA, 19 nt, Artificial Sequence
  Description of Artificial Sequence: Synthetic oligonucleotide
  Antisense strand to SEQ ID NO: 1619987
auacgucuggaagaguggg

SEQ ID NO: 1619989 - RNA, 19 nt, Artificial Sequence
  Description of Artificial Sequence: Synthetic oligonucleotide
  Sense strand starting at position 1775 of SEQ ID NO: 1560725
agcccucuccucugcagaa

SEQ ID NO: 1619990 - RNA, 19 nt, Artificial Sequence
  Description of Artificial Sequence: Synthetic oligonucleotide
  Antisense strand to SEQ ID NO: 1619989
uucugcagaggagagggcu

SEQ ID NO: 1619991 - RNA, 19 nt, Artificial Sequence
  Description of Artificial Sequence: Synthetic oligonucleotide
  Sense strand starting at position 1817 of SEQ ID NO: 1560725
cagucuuucuagggaccca

SEQ ID NO: 1619992 - RNA, 19 nt, Artificial Sequence
  Description of Artificial Sequence: Synthetic oligonucleotide
  Antisense strand to SEQ ID NO: 1619991
ugggucccuagaaagacug

SEQ ID NO: 1619993 - RNA, 19 nt, Artificial Sequence
  Description of Artificial Sequence: Synthetic oligonucleotide
  Sense strand starting at position 1878 of SEQ ID NO: 1560725
acccuagacuguugcuuau

SEQ ID NO: 1619994 - RNA, 19 nt, Artificial Sequence
  Description of Artificial Sequence: Synthetic oligonucleotide
  Antisense strand to SEQ ID NO: 1619993
auaagcaacagucuagggu

SEQ ID NO: 1619995 - RNA, 19 nt, Artificial Sequence
  Description of Artificial Sequence: Synthetic oligonucleotide
  Sense strand starting at position 2207 of SEQ ID NO: 1560725
cacgguugccguggugaca

SEQ ID NO: 1619996 - RNA, 19 nt, Artificial Sequence
  Description of Artificial Sequence: Synthetic oligonucleotide
  Antisense strand to SEQ ID NO: 1619995
ugucaccacggcaaccgug

SEQ ID NO: 1619997 - RNA, 19 nt, Artificial Sequence
  Description of Artificial Sequence: Synthetic oligonucleotide
  Sense strand starting at position 2316 of SEQ ID NO: 1560725
ggaagaccguuaccauaga

SEQ ID NO: 1619998 - RNA, 19 nt, Artificial Sequence
  Description of Artificial Sequence: Synthetic oligonucleotide
  Antisense strand to SEQ ID NO: 1619997
ucuaugguaacggucuucc

SEQ ID NO: 1619999 - RNA, 19 nt, Artificial Sequence
  Description of Artificial Sequence: Synthetic oligonucleotide
  Sense strand starting at position 2317 of SEQ ID NO: 1560725
gaagaccguuaccauagaa

SEQ ID NO: 1620000 - RNA, 19 nt, Artificial Sequence
  Description of Artificial Sequence: Synthetic oligonucleotide
  Antisense strand to SEQ ID NO: 1619999
uucuaugguaacggucuuc

SEQ ID NO: 1620001 - RNA, 19 nt, Artificial Sequence
  Description of Artificial Sequence: Synthetic oligonucleotide
  Sense strand starting at position 2344 of SEQ ID NO: 1560725
uguuuaggguuuguuuagu

SEQ ID NO: 1620002 - RNA, 19 nt, Artificial Sequence
  Description of Artificial Sequence: Synthetic oligonucleotide
  Antisense strand to SEQ ID NO: 1620001
acuaaacaaacccuaaaca

SEQ ID NO: 1620003 - RNA, 19 nt, Artificial Sequence
  Description of Artificial Sequence: Synthetic oligonucleotide
  Sense strand starting at position 2349 of SEQ ID NO: 1560725
aggguuuguuuagugcaga

SEQ ID NO: 1620004 - RNA, 19 nt, Artificial Sequence
  Description of Artificial Sequence: Synthetic oligonucleotide
  Antisense strand to SEQ ID NO: 1620003
ucugcacuaaacaaacccu

SEQ ID NO: 1620005 - RNA, 19 nt, Artificial Sequence
  Description of Artificial Sequence: Synthetic oligonucleotide
  Sense strand starting at position 2350 of SEQ ID NO: 1560725
ggguuuguuuagugcagag

SEQ ID NO: 1620006 - RNA, 19 nt, Artificial Sequence
  Description of Artificial Sequence: Synthetic oligonucleotide
  Antisense strand to SEQ ID NO: 1620005
cucugcacuaaacaaaccc

SEQ ID NO: 1620007 - RNA, 19 nt, Artificial Sequence
  Description of Artificial Sequence: Synthetic oligonucleotide
  Sense strand starting at position 2461 of SEQ ID NO: 1560725
ccuuccuugccggaugaaa

SEQ ID NO: 1620008 - RNA, 19 nt, Artificial Sequence
  Description of Artificial Sequence: Synthetic oligonucleotide
  Antisense strand to SEQ ID NO: 1620007
uuucauccggcaaggaagg

SEQ ID NO: 1620009 - RNA, 19 nt, Artificial Sequence
  Description of Artificial Sequence: Synthetic oligonucleotide
  Sense strand starting at position 2577 of SEQ ID NO: 1560725
aauugagagcaguauuccu

SEQ ID NO: 1620010 - RNA, 19 nt, Artificial Sequence
  Description of Artificial Sequence: Synthetic oligonucleotide
  Antisense strand to SEQ ID NO: 1620009
aggaauacugcucucaauu

SEQ ID NO: 1620011 - RNA, 19 nt, Artificial Sequence
  Description of Artificial Sequence: Synthetic oligonucleotide
  Sense strand starting at position 2584 of SEQ ID NO: 1560725
agcaguauuccugggcuuu

SEQ ID NO: 1620012 - RNA, 19 nt, Artificial Sequence
  Description of Artificial Sequence: Synthetic oligonucleotide
  Antisense strand to SEQ ID NO: 1620011
aaagcccaggaauacugcu

SEQ ID NO: 1620013 - RNA, 19 nt, Artificial Sequence
  Description of Artificial Sequence: Synthetic oligonucleotide
  Sense strand starting at position 2585 of SEQ ID NO: 1560725
gcaguauuccugggcuuua

SEQ ID NO: 1620014 - RNA, 19 nt, Artificial Sequence
  Description of Artificial Sequence: Synthetic oligonucleotide
  Antisense strand to SEQ ID NO: 1620013
uaaagcccaggaauacugc

SEQ ID NO: 1620015 - RNA, 19 nt, Artificial Sequence
  Description of Artificial Sequence: Synthetic oligonucleotide
  Sense strand starting at position 2614 of SEQ ID NO: 1560725
ggcuacgaucccugacuga

SEQ ID NO: 1620016 - RNA, 19 nt, Artificial Sequence
  Description of Artificial Sequence: Synthetic oligonucleotide
  Antisense strand to SEQ ID NO: 1620015
ucagucagggaucguagcc

SEQ ID NO: 1620017 - RNA, 19 nt, Artificial Sequence
  Description of Artificial Sequence: Synthetic oligonucleotide
  Sense strand starting at position 2652 of SEQ ID NO: 1560725
gaggcuagauuccuguauu

SEQ ID NO: 1620018 - RNA, 19 nt, Artificial Sequence
  Description of Artificial Sequence: Synthetic oligonucleotide
  Antisense strand to SEQ ID NO: 1620017
aauacaggaaucuagccuc

SEQ ID NO: 1620019 - RNA, 19 nt, Artificial Sequence
  Description of Artificial Sequence: Synthetic oligonucleotide
  Sense strand starting at position 2653 of SEQ ID NO: 1560725
aggcuagauuccuguauuu

SEQ ID NO: 1620020 - RNA, 19 nt, Artificial Sequence
  Description of Artificial Sequence: Synthetic oligonucleotide
  Antisense strand to SEQ ID NO: 1620019
aaauacaggaaucuagccu

SEQ ID NO: 1620021 - RNA, 19 nt, Artificial Sequence
  Description of Artificial Sequence: Synthetic oligonucleotide
  Sense strand starting at position 2748 of SEQ ID NO: 1560725
ggacgcaggucucagauau

SEQ ID NO: 1620022 - RNA, 19 nt, Artificial Sequence
  Description of Artificial Sequence: Synthetic oligonucleotide
  Antisense strand to SEQ ID NO: 1620021
auaucugagaccugcgucc

SEQ ID NO: 1620023 - RNA, 19 nt, Artificial Sequence
  Description of Artificial Sequence: Synthetic oligonucleotide
  Sense strand starting at position 2865 of SEQ ID NO: 1560725
ggcugaggcccagauucuu

SEQ ID NO: 1620024 - RNA, 19 nt, Artificial Sequence
  Description of Artificial Sequence: Synthetic oligonucleotide
  Antisense strand to SEQ ID NO: 1620023
aagaaucugggccucagcc

SEQ ID NO: 1620025 - RNA, 19 nt, Artificial Sequence
  Description of Artificial Sequence: Synthetic oligonucleotide
  Sense strand starting at position 2871 of SEQ ID NO: 1560725
ggcccagauucuuggcuca

SEQ ID NO: 1620026 - RNA, 19 nt, Artificial Sequence
  Description of Artificial Sequence: Synthetic oligonucleotide
  Antisense strand to SEQ ID NO: 1620025
ugagccaagaaucugggcc

SEQ ID NO: 1620027 - RNA, 19 nt, Artificial Sequence
  Description of Artificial Sequence: Synthetic oligonucleotide
  Sense strand starting at position 2873 of SEQ ID NO: 1560725
cccagauucuuggcucaaa

SEQ ID NO: 1620028 - RNA, 19 nt, Artificial Sequence
  Description of Artificial Sequence: Synthetic oligonucleotide
  Antisense strand to SEQ ID NO: 1620027
uuugagccaagaaucuggg

SEQ ID NO: 1620029 - RNA, 19 nt, Artificial Sequence
  Description of Artificial Sequence: Synthetic oligonucleotide
  Sense strand starting at position 3004 of SEQ ID NO: 1560725
aggagacucugcucuauua

SEQ ID NO: 1620030 - RNA, 19 nt, Artificial Sequence
  Description of Artificial Sequence: Synthetic oligonucleotide
  Antisense strand to SEQ ID NO: 1620029
uaauagagcagagucuccu

SEQ ID NO: 1620031 - RNA, 19 nt, Artificial Sequence
  Description of Artificial Sequence: Synthetic oligonucleotide
  Sense strand starting at position 3111 of SEQ ID NO: 1560725
ucuggaaggcagcgauauu

SEQ ID NO: 1620032 - RNA, 19 nt, Artificial Sequence
  Description of Artificial Sequence: Synthetic oligonucleotide
  Antisense strand to SEQ ID NO: 1620031
aauaucgcugccuuccaga

SEQ ID NO: 1620033 - RNA, 19 nt, Artificial Sequence
  Description of Artificial Sequence: Synthetic oligonucleotide
  Sense strand starting at position 3811 of SEQ ID NO: 1560725
gcuugaugugcuucugcaa

SEQ ID NO: 1620034 - RNA, 19 nt, Artificial Sequence
  Description of Artificial Sequence: Synthetic oligonucleotide
  Antisense strand to SEQ ID NO: 1620033
uugcagaagcacaucaagc

SEQ ID NO: 1620035 - RNA, 19 nt, Artificial Sequence
  Description of Artificial Sequence: Synthetic oligonucleotide
  Sense strand starting at position 27 of SEQ ID NO: 1560726
cccacucuuccagacguau

SEQ ID NO: 1620036 - RNA, 19 nt, Artificial Sequence
  Description of Artificial Sequence: Synthetic oligonucleotide
  Antisense strand to SEQ ID NO: 1620035
auacgucuggaagaguggg

SEQ ID NO: 1620037 - RNA, 19 nt, Artificial Sequence
  Description of Artificial Sequence: Synthetic oligonucleotide
  Sense strand starting at position 68 of SEQ ID NO: 1560726
agcccucuccucugcagaa

SEQ ID NO: 1620038 - RNA, 19 nt, Artificial Sequence
  Description of Artificial Sequence: Synthetic oligonucleotide
  Antisense strand to SEQ ID NO: 1620037
uucugcagaggagagggcu

SEQ ID NO: 1620039 - RNA, 19 nt, Artificial Sequence
  Description of Artificial Sequence: Synthetic oligonucleotide
  Sense strand starting at position 500 of SEQ ID NO: 1560726
cacgguugccguggugaca

SEQ ID NO: 1620040 - RNA, 19 nt, Artificial Sequence
  Description of Artificial Sequence: Synthetic oligonucleotide
  Antisense strand to SEQ ID NO: 1620039
ugucaccacggcaaccgug

SEQ ID NO: 1620041 - RNA, 19 nt, Artificial Sequence
  Description of Artificial Sequence: Synthetic oligonucleotide
  Sense strand starting at position 609 of SEQ ID NO: 1560726
ggaagaccguuaccauaga

SEQ ID NO: 1620042 - RNA, 19 nt, Artificial Sequence
  Description of Artificial Sequence: Synthetic oligonucleotide
  Antisense strand to SEQ ID NO: 1620041
ucuaugguaacggucuucc

SEQ ID NO: 1620043 - RNA, 19 nt, Artificial Sequence
  Description of Artificial Sequence: Synthetic oligonucleotide
  Sense strand starting at position 610 of SEQ ID NO: 1560726
gaagaccguuaccauagaa

SEQ ID NO: 1620044 - RNA, 19 nt, Artificial Sequence
  Description of Artificial Sequence: Synthetic oligonucleotide
  Antisense strand to SEQ ID NO: 1620043
uucuaugguaacggucuuc

SEQ ID NO: 1620045 - RNA, 19 nt, Artificial Sequence
  Description of Artificial Sequence: Synthetic oligonucleotide
  Sense strand starting at position 637 of SEQ ID NO: 1560726
uguuuaggguuuguuuagu

SEQ ID NO: 1620046 - RNA, 19 nt, Artificial Sequence
  Description of Artificial Sequence: Synthetic oligonucleotide
  Antisense strand to SEQ ID NO: 1620045
acuaaacaaacccuaaaca

SEQ ID NO: 1620047 - RNA, 19 nt, Artificial Sequence
  Description of Artificial Sequence: Synthetic oligonucleotide
  Sense strand starting at position 642 of SEQ ID NO: 1560726
aggguuuguuuagugcaga

SEQ ID NO: 1620048 - RNA, 19 nt, Artificial Sequence
  Description of Artificial Sequence: Synthetic oligonucleotide
  Antisense strand to SEQ ID NO: 1620047
ucugcacuaaacaaacccu

SEQ ID NO: 1620049 - RNA, 19 nt, Artificial Sequence
  Description of Artificial Sequence: Synthetic oligonucleotide
  Sense strand starting at position 754 of SEQ ID NO: 1560726
ccuuccuugccggaugaaa

SEQ ID NO: 1620050 - RNA, 19 nt, Artificial Sequence
  Description of Artificial Sequence: Synthetic oligonucleotide
  Antisense strand to SEQ ID NO: 1620049
uuucauccggcaaggaagg

SEQ ID NO: 1620051 - RNA, 19 nt, Artificial Sequence
  Description of Artificial Sequence: Synthetic oligonucleotide
  Sense strand starting at position 870 of SEQ ID NO: 1560726
aauugagagcaguauuccu

SEQ ID NO: 1620052 - RNA, 19 nt, Artificial Sequence
  Description of Artificial Sequence: Synthetic oligonucleotide
  Antisense strand to SEQ ID NO: 1620051
aggaauacugcucucaauu

SEQ ID NO: 1620053 - RNA, 19 nt, Artificial Sequence
  Description of Artificial Sequence: Synthetic oligonucleotide
  Sense strand starting at position 877 of SEQ ID NO: 1560726
agcaguauuccugggcuuu

SEQ ID NO: 1620054 - RNA, 19 nt, Artificial Sequence
  Description of Artificial Sequence: Synthetic oligonucleotide
  Antisense strand to SEQ ID NO: 1620053
aaagcccaggaauacugcu

SEQ ID NO: 1620055 - RNA, 19 nt, Artificial Sequence
  Description of Artificial Sequence: Synthetic oligonucleotide
  Sense strand starting at position 878 of SEQ ID NO: 1560726
gcaguauuccugggcuuua

SEQ ID NO: 1620056 - RNA, 19 nt, Artificial Sequence
  Description of Artificial Sequence: Synthetic oligonucleotide
  Antisense strand to SEQ ID NO: 1620055
uaaagcccaggaauacugc

SEQ ID NO: 1620057 - RNA, 19 nt, Artificial Sequence
  Description of Artificial Sequence: Synthetic oligonucleotide
  Sense strand starting at position 907 of SEQ ID NO: 1560726
ggcuacgaucccugacuga

SEQ ID NO: 1620058 - RNA, 19 nt, Artificial Sequence
  Description of Artificial Sequence: Synthetic oligonucleotide
  Antisense strand to SEQ ID NO: 1620057
ucagucagggaucguagcc

SEQ ID NO: 1620059 - RNA, 19 nt, Artificial Sequence
  Description of Artificial Sequence: Synthetic oligonucleotide
  Sense strand starting at position 945 of SEQ ID NO: 1560726
gaggcuagauuccuguauu

SEQ ID NO: 1620060 - RNA, 19 nt, Artificial Sequence
  Description of Artificial Sequence: Synthetic oligonucleotide
  Antisense strand to SEQ ID NO: 1620059
aauacaggaaucuagccuc

SEQ ID NO: 1620061 - RNA, 19 nt, Artificial Sequence
  Description of Artificial Sequence: Synthetic oligonucleotide
  Sense strand starting at position 946 of SEQ ID NO: 1560726
aggcuagauuccuguauuu

SEQ ID NO: 1620062 - RNA, 19 nt, Artificial Sequence
  Description of Artificial Sequence: Synthetic oligonucleotide
  Antisense strand to SEQ ID NO: 1620061
aaauacaggaaucuagccu

SEQ ID NO: 1620063 - RNA, 19 nt, Artificial Sequence
  Description of Artificial Sequence: Synthetic oligonucleotide
  Sense strand starting at position 1041 of SEQ ID NO: 1560726
ggacgcaggucucagauau

SEQ ID NO: 1620064 - RNA, 19 nt, Artificial Sequence
  Description of Artificial Sequence: Synthetic oligonucleotide
  Antisense strand to SEQ ID NO: 1620063
auaucugagaccugcgucc

SEQ ID NO: 1620065 - RNA, 19 nt, Artificial Sequence
  Description of Artificial Sequence: Synthetic oligonucleotide
  Sense strand starting at position 1158 of SEQ ID NO: 1560726
ggcugaggcccagauucuu

SEQ ID NO: 1620066 - RNA, 19 nt, Artificial Sequence
  Description of Artificial Sequence: Synthetic oligonucleotide
  Antisense strand to SEQ ID NO: 1620065
aagaaucugggccucagcc

SEQ ID NO: 1620067 - RNA, 19 nt, Artificial Sequence
  Description of Artificial Sequence: Synthetic oligonucleotide
  Sense strand starting at position 1166 of SEQ ID NO: 1560726
cccagauucuuggcucaaa

SEQ ID NO: 1620068 - RNA, 19 nt, Artificial Sequence
  Description of Artificial Sequence: Synthetic oligonucleotide
  Antisense strand to SEQ ID NO: 1620067
uuugagccaagaaucuggg

SEQ ID NO: 1620069 - RNA, 19 nt, Artificial Sequence
  Description of Artificial Sequence: Synthetic oligonucleotide
  Sense strand starting at position 1297 of SEQ ID NO: 1560726
aggagacucugcucuauua

SEQ ID NO: 1620070 - RNA, 19 nt, Artificial Sequence
  Description of Artificial Sequence: Synthetic oligonucleotide
  Antisense strand to SEQ ID NO: 1620069
uaauagagcagagucuccu

SEQ ID NO: 1620071 - RNA, 19 nt, Artificial Sequence
  Description of Artificial Sequence: Synthetic oligonucleotide
  Sense strand starting at position 1404 of SEQ ID NO: 1560726
ucuggaaggcagcgauauu

SEQ ID NO: 1620072 - RNA, 19 nt, Artificial Sequence
  Description of Artificial Sequence: Synthetic oligonucleotide
  Antisense strand to SEQ ID NO: 1620071
aauaucgcugccuuccaga

SEQ ID NO: 1620073 - RNA, 19 nt, Artificial Sequence
  Description of Artificial Sequence: Synthetic oligonucleotide
  Sense strand starting at position 2104 of SEQ ID NO: 1560726
gcuugaugugcuucugcaa

SEQ ID NO: 1620074 - RNA, 19 nt, Artificial Sequence
  Description of Artificial Sequence: Synthetic oligonucleotide
  Antisense strand to SEQ ID NO: 1620073
uugcagaagcacaucaagc

SEQ ID NO: 1620075 - RNA, 19 nt, Artificial Sequence
  Description of Artificial Sequence: Synthetic oligonucleotide
  Sense strand starting at position 2854 of SEQ ID NO: 1560726
gagugagucaucgggugug

SEQ ID NO: 1620076 - RNA, 19 nt, Artificial Sequence
  Description of Artificial Sequence: Synthetic oligonucleotide
  Antisense strand to SEQ ID NO: 1620075
cacacccgaugacucacuc

SEQ ID NO: 1620077 - RNA, 19 nt, Artificial Sequence
  Description of Artificial Sequence: Synthetic oligonucleotide
  Sense strand starting at position 2903 of SEQ ID NO: 1560726
agcaacucaugucuguaau

SEQ ID NO: 1620078 - RNA, 19 nt, Artificial Sequence
  Description of Artificial Sequence: Synthetic oligonucleotide
  Antisense strand to SEQ ID NO: 1620077
auuacagacaugaguugcu

SEQ ID NO: 1620079 - RNA, 19 nt, Artificial Sequence
  Description of Artificial Sequence: Synthetic oligonucleotide
  Sense strand starting at position 3236 of SEQ ID NO: 1560726
gucuuuguaaucugggauc

SEQ ID NO: 1620080 - RNA, 19 nt, Artificial Sequence
  Description of Artificial Sequence: Synthetic oligonucleotide
  Antisense strand to SEQ ID NO: 1620079
gaucccagauuacaaagac

SEQ ID NO: 1620081 - RNA, 19 nt, Artificial Sequence
  Description of Artificial Sequence: Synthetic oligonucleotide
  Sense strand starting at position 3238 of SEQ ID NO: 1560726
cuuuguaaucugggaucau

SEQ ID NO: 1620082 - RNA, 19 nt, Artificial Sequence
  Description of Artificial Sequence: Synthetic oligonucleotide
  Antisense strand to SEQ ID NO: 1620081
augaucccagauuacaaag

SEQ ID NO: 1620083 - RNA, 19 nt, Artificial Sequence
  Description of Artificial Sequence: Synthetic oligonucleotide
  Sense strand starting at position 3239 of SEQ ID NO: 1560726
uuuguaaucugggaucauc

SEQ ID NO: 1620084 - RNA, 19 nt, Artificial Sequence
  Description of Artificial Sequence: Synthetic oligonucleotide
  Antisense strand to SEQ ID NO: 1620083
gaugaucccagauuacaaa

SEQ ID NO: 1620085 - RNA, 19 nt, Artificial Sequence
  Description of Artificial Sequence: Synthetic oligonucleotide
  Sense strand starting at position 3272 of SEQ ID NO: 1560726
gguucagagugguuaccca

SEQ ID NO: 1620086 - RNA, 19 nt, Artificial Sequence
  Description of Artificial Sequence: Synthetic oligonucleotide
  Antisense strand to SEQ ID NO: 1620085
uggguaaccacucugaacc

SEQ ID NO: 1620087 - RNA, 19 nt, Artificial Sequence
  Description of Artificial Sequence: Synthetic oligonucleotide
  Sense strand starting at position 3436 of SEQ ID NO: 1560726
ggagcuccuugaucagaag

SEQ ID NO: 1620088 - RNA, 19 nt, Artificial Sequence
  Description of Artificial Sequence: Synthetic oligonucleotide
  Antisense strand to SEQ ID NO: 1620087
cuucugaucaaggagcucc

SEQ ID NO: 1620089 - RNA, 19 nt, Artificial Sequence
  Description of Artificial Sequence: Synthetic oligonucleotide
  Sense strand starting at position 3453 of SEQ ID NO: 1560726
agcaauacugugcggguua

SEQ ID NO: 1620090 - RNA, 19 nt, Artificial Sequence
  Description of Artificial Sequence: Synthetic oligonucleotide
  Antisense strand to SEQ ID NO: 1620089
uaacccgcacaguauugcu

SEQ ID NO: 1620091 - RNA, 19 nt, Artificial Sequence
  Description of Artificial Sequence: Synthetic oligonucleotide
  Sense strand starting at position 3466 of SEQ ID NO: 1560726
ggguuaacaugagggugaa

SEQ ID NO: 1620092 - RNA, 19 nt, Artificial Sequence
  Description of Artificial Sequence: Synthetic oligonucleotide
  Antisense strand to SEQ ID NO: 1620091
uucacccucauguuaaccc

SEQ ID NO: 1620093 - RNA, 19 nt, Artificial Sequence
  Description of Artificial Sequence: Synthetic oligonucleotide
  Sense strand starting at position 3467 of SEQ ID NO: 1560726
gguuaacaugagggugaau

SEQ ID NO: 1620094 - RNA, 19 nt, Artificial Sequence
  Description of Artificial Sequence: Synthetic oligonucleotide
  Antisense strand to SEQ ID NO: 1620093
auucacccucauguuaacc

SEQ ID NO: 1620095 - RNA, 19 nt, Artificial Sequence
  Description of Artificial Sequence: Synthetic oligonucleotide
  Sense strand starting at position 3557 of SEQ ID NO: 1560726
cccagaguuguuuacucga

SEQ ID NO: 1620096 - RNA, 19 nt, Artificial Sequence
  Description of Artificial Sequence: Synthetic oligonucleotide
  Antisense strand to SEQ ID NO: 1620095
ucgaguaaacaacucuggg

SEQ ID NO: 1620097 - RNA, 19 nt, Artificial Sequence
  Description of Artificial Sequence: Synthetic oligonucleotide
  Sense strand starting at position 3562 of SEQ ID NO: 1560726
aguuguuuacucgagggag

SEQ ID NO: 1620098 - RNA, 19 nt, Artificial Sequence
  Description of Artificial Sequence: Synthetic oligonucleotide
  Antisense strand to SEQ ID NO: 1620097
cucccucgaguaaacaacu

SEQ ID NO: 1620099 - RNA, 19 nt, Artificial Sequence
  Description of Artificial Sequence: Synthetic oligonucleotide
  Sense strand starting at position 3563 of SEQ ID NO: 1560726
guuguuuacucgagggagg

SEQ ID NO: 1620100 - RNA, 19 nt, Artificial Sequence
  Description of Artificial Sequence: Synthetic oligonucleotide
  Antisense strand to SEQ ID NO: 1620099
ccucccucgaguaaacaac

SEQ ID NO: 1620101 - RNA, 19 nt, Artificial Sequence
  Description of Artificial Sequence: Synthetic oligonucleotide
  Sense strand starting at position 3564 of SEQ ID NO: 1560726
uuguuuacucgagggagga

SEQ ID NO: 1620102 - RNA, 19 nt, Artificial Sequence
  Description of Artificial Sequence: Synthetic oligonucleotide
  Antisense strand to SEQ ID NO: 1620101
uccucccucgaguaaacaa

SEQ ID NO: 1620103 - RNA, 19 nt, Artificial Sequence
  Description of Artificial Sequence: Synthetic oligonucleotide
  Sense strand starting at position 3565 of SEQ ID NO: 1560726
uguuuacucgagggaggaa

SEQ ID NO: 1620104 - RNA, 19 nt, Artificial Sequence
  Description of Artificial Sequence: Synthetic oligonucleotide
  Antisense strand to SEQ ID NO: 1620103
uuccucccucgaguaaaca

SEQ ID NO: 1620105 - RNA, 19 nt, Artificial Sequence
  Description of Artificial Sequence: Synthetic oligonucleotide
  Sense strand starting at position 3652 of SEQ ID NO: 1560726
uuggucuuccuaggaaacu

SEQ ID NO: 1620106 - RNA, 19 nt, Artificial Sequence
  Description of Artificial Sequence: Synthetic oligonucleotide
  Antisense strand to SEQ ID NO: 1620105
aguuuccuaggaagaccaa

SEQ ID NO: 1620107 - RNA, 19 nt, Artificial Sequence
  Description of Artificial Sequence: Synthetic oligonucleotide
  Sense strand starting at position 3713 of SEQ ID NO: 1560726
gggcauucaucagugacgu

SEQ ID NO: 1620108 - RNA, 19 nt, Artificial Sequence
  Description of Artificial Sequence: Synthetic oligonucleotide
  Antisense strand to SEQ ID NO: 1620107
acgucacugaugaaugccc

SEQ ID NO: 1620109 - RNA, 19 nt, Artificial Sequence
  Description of Artificial Sequence: Synthetic oligonucleotide
  Sense strand starting at position 3714 of SEQ ID NO: 1560726
ggcauucaucagugacgua

SEQ ID NO: 1620110 - RNA, 19 nt, Artificial Sequence
  Description of Artificial Sequence: Synthetic oligonucleotide
  Antisense strand to SEQ ID NO: 1620109
uacgucacugaugaaugcc

SEQ ID NO: 1620111 - RNA, 19 nt, Artificial Sequence
  Description of Artificial Sequence: Synthetic oligonucleotide
  Sense strand starting at position 3824 of SEQ ID NO: 1560726
guggucaucugaucuacca

SEQ ID NO: 1620112 - RNA, 19 nt, Artificial Sequence
  Description of Artificial Sequence: Synthetic oligonucleotide
  Antisense strand to SEQ ID NO: 1620111
ugguagaucagaugaccac

SEQ ID NO: 1620113 - RNA, 19 nt, Artificial Sequence
  Description of Artificial Sequence: Synthetic oligonucleotide
  Sense strand starting at position 3912 of SEQ ID NO: 1560726
gugguuuccacucgcaaca

SEQ ID NO: 1620114 - RNA, 19 nt, Artificial Sequence
  Description of Artificial Sequence: Synthetic oligonucleotide
  Antisense strand to SEQ ID NO: 1620113
uguugcgaguggaaaccac

SEQ ID NO: 1620115 - RNA, 19 nt, Artificial Sequence
  Description of Artificial Sequence: Synthetic oligonucleotide
  Sense strand starting at position 33 of SEQ ID NO: 1560727
guccuucucccaggaucua

SEQ ID NO: 1620116 - RNA, 19 nt, Artificial Sequence
  Description of Artificial Sequence: Synthetic oligonucleotide
  Antisense strand to SEQ ID NO: 1620115
uagauccugggagaaggac

SEQ ID NO: 1620117 - RNA, 19 nt, Artificial Sequence
  Description of Artificial Sequence: Synthetic oligonucleotide
  Sense strand starting at position 1726 of SEQ ID NO: 1560727
cagccaucgcccgagauca

SEQ ID NO: 1620118 - RNA, 19 nt, Artificial Sequence
  Description of Artificial Sequence: Synthetic oligonucleotide
  Antisense strand to SEQ ID NO: 1620117
ugaucucgggcgauggcug

SEQ ID NO: 1620119 - RNA, 19 nt, Artificial Sequence
  Description of Artificial Sequence: Synthetic oligonucleotide
  Sense strand starting at position 1877 of SEQ ID NO: 1560727
caucgcucacgcugagaau

SEQ ID NO: 1620120 - RNA, 19 nt, Artificial Sequence
  Description of Artificial Sequence: Synthetic oligonucleotide
  Antisense strand to SEQ ID NO: 1620119
auucucagcgugagcgaug

SEQ ID NO: 1620121 - RNA, 19 nt, Artificial Sequence
  Description of Artificial Sequence: Synthetic oligonucleotide
  Sense strand starting at position 2414 of SEQ ID NO: 1560727
cccacucuuccagacguau

SEQ ID NO: 1620122 - RNA, 19 nt, Artificial Sequence
  Description of Artificial Sequence: Synthetic oligonucleotide
  Antisense strand to SEQ ID NO: 1620121
auacgucuggaagaguggg

SEQ ID NO: 1620123 - RNA, 19 nt, Artificial Sequence
  Description of Artificial Sequence: Synthetic oligonucleotide
  Sense strand starting at position 2455 of SEQ ID NO: 1560727
agcccucuccucugcagaa

SEQ ID NO: 1620124 - RNA, 19 nt, Artificial Sequence
  Description of Artificial Sequence: Synthetic oligonucleotide
  Antisense strand to SEQ ID NO: 1620123
uucugcagaggagagggcu

SEQ ID NO: 1620125 - RNA, 19 nt, Artificial Sequence
  Description of Artificial Sequence: Synthetic oligonucleotide
  Sense strand starting at position 2497 of SEQ ID NO: 1560727
cagucuuucuagggaccca

SEQ ID NO: 1620126 - RNA, 19 nt, Artificial Sequence
  Description of Artificial Sequence: Synthetic oligonucleotide
  Antisense strand to SEQ ID NO: 1620125
ugggucccuagaaagacug

SEQ ID NO: 1620127 - RNA, 19 nt, Artificial Sequence
  Description of Artificial Sequence: Synthetic oligonucleotide
  Sense strand starting at position 2558 of SEQ ID NO: 1560727
acccuagacuguugcuuau

SEQ ID NO: 1620128 - RNA, 19 nt, Artificial Sequence
  Description of Artificial Sequence: Synthetic oligonucleotide
  Antisense strand to SEQ ID NO: 1620127
auaagcaacagucuagggu

SEQ ID NO: 1620129 - RNA, 19 nt, Artificial Sequence
  Description of Artificial Sequence: Synthetic oligonucleotide
  Sense strand starting at position 2887 of SEQ ID NO: 1560727
cacgguugccguggugaca

SEQ ID NO: 1620130 - RNA, 19 nt, Artificial Sequence
  Description of Artificial Sequence: Synthetic oligonucleotide
  Antisense strand to SEQ ID NO: 1620129
ugucaccacggcaaccgug

SEQ ID NO: 1620131 - RNA, 19 nt, Artificial Sequence
  Description of Artificial Sequence: Synthetic oligonucleotide
  Sense strand starting at position 2996 of SEQ ID NO: 1560727
ggaagaccguuaccauaga

SEQ ID NO: 1620132 - RNA, 19 nt, Artificial Sequence
  Description of Artificial Sequence: Synthetic oligonucleotide
  Antisense strand to SEQ ID NO: 1620131
ucuaugguaacggucuucc

SEQ ID NO: 1620133 - RNA, 19 nt, Artificial Sequence
  Description of Artificial Sequence: Synthetic oligonucleotide
  Sense strand starting at position 2997 of SEQ ID NO: 1560727
gaagaccguuaccauagaa

SEQ ID NO: 1620134 - RNA, 19 nt, Artificial Sequence
  Description of Artificial Sequence: Synthetic oligonucleotide
  Antisense strand to SEQ ID NO: 1620133
uucuaugguaacggucuuc

SEQ ID NO: 1620135 - RNA, 19 nt, Artificial Sequence
  Description of Artificial Sequence: Synthetic oligonucleotide
  Sense strand starting at position 3024 of SEQ ID NO: 1560727
uguuuaggguuuguuuagu

SEQ ID NO: 1620136 - RNA, 19 nt, Artificial Sequence
  Description of Artificial Sequence: Synthetic oligonucleotide
  Antisense strand to SEQ ID NO: 1620135
acuaaacaaacccuaaaca

SEQ ID NO: 1620137 - RNA, 19 nt, Artificial Sequence
  Description of Artificial Sequence: Synthetic oligonucleotide
  Sense strand starting at position 3029 of SEQ ID NO: 1560727
aggguuuguuuagugcaga

SEQ ID NO: 1620138 - RNA, 19 nt, Artificial Sequence
  Description of Artificial Sequence: Synthetic oligonucleotide
  Antisense strand to SEQ ID NO: 1620137
ucugcacuaaacaaacccu

SEQ ID NO: 1620139 - RNA, 19 nt, Artificial Sequence
  Description of Artificial Sequence: Synthetic oligonucleotide
  Sense strand starting at position 3030 of SEQ ID NO: 1560727
ggguuuguuuagugcagag

SEQ ID NO: 1620140 - RNA, 19 nt, Artificial Sequence
  Description of Artificial Sequence: Synthetic oligonucleotide
  Antisense strand to SEQ ID NO: 1620139
cucugcacuaaacaaaccc

SEQ ID NO: 1620141 - RNA, 19 nt, Artificial Sequence
  Description of Artificial Sequence: Synthetic oligonucleotide
  Sense strand starting at position 3141 of SEQ ID NO: 1560727
ccuuccuugccggaugaaa

SEQ ID NO: 1620142 - RNA, 19 nt, Artificial Sequence
  Description of Artificial Sequence: Synthetic oligonucleotide
  Antisense strand to SEQ ID NO: 1620141
uuucauccggcaaggaagg

SEQ ID NO: 1620143 - RNA, 19 nt, Artificial Sequence
  Description of Artificial Sequence: Synthetic oligonucleotide
  Sense strand starting at position 3257 of SEQ ID NO: 1560727
aauugagagcaguauuccu

SEQ ID NO: 1620144 - RNA, 19 nt, Artificial Sequence
  Description of Artificial Sequence: Synthetic oligonucleotide
  Antisense strand to SEQ ID NO: 1620143
aggaauacugcucucaauu

SEQ ID NO: 1620145 - RNA, 19 nt, Artificial Sequence
  Description of Artificial Sequence: Synthetic oligonucleotide
  Sense strand starting at position 3264 of SEQ ID NO: 1560727
agcaguauuccugggcuuu

SEQ ID NO: 1620146 - RNA, 19 nt, Artificial Sequence
  Description of Artificial Sequence: Synthetic oligonucleotide
  Antisense strand to SEQ ID NO: 1620145
aaagcccaggaauacugcu

SEQ ID NO: 1620147 - RNA, 19 nt, Artificial Sequence
  Description of Artificial Sequence: Synthetic oligonucleotide
  Sense strand starting at position 3265 of SEQ ID NO: 1560727
gcaguauuccugggcuuua

SEQ ID NO: 1620148 - RNA, 19 nt, Artificial Sequence
  Description of Artificial Sequence: Synthetic oligonucleotide
  Antisense strand to SEQ ID NO: 1620147
uaaagcccaggaauacugc

SEQ ID NO: 1620149 - RNA, 19 nt, Artificial Sequence
  Description of Artificial Sequence: Synthetic oligonucleotide
  Sense strand starting at position 3294 of SEQ ID NO: 1560727
ggcuacgaucccugacuga

SEQ ID NO: 1620150 - RNA, 19 nt, Artificial Sequence
  Description of Artificial Sequence: Synthetic oligonucleotide
  Antisense strand to SEQ ID NO: 1620149
ucagucagggaucguagcc

SEQ ID NO: 1620151 - RNA, 19 nt, Artificial Sequence
  Description of Artificial Sequence: Synthetic oligonucleotide
  Sense strand starting at position 3332 of SEQ ID NO: 1560727
gaggcuagauuccuguauu

SEQ ID NO: 1620152 - RNA, 19 nt, Artificial Sequence
  Description of Artificial Sequence: Synthetic oligonucleotide
  Antisense strand to SEQ ID NO: 1620151
aauacaggaaucuagccuc

SEQ ID NO: 1620153 - RNA, 19 nt, Artificial Sequence
  Description of Artificial Sequence: Synthetic oligonucleotide
  Sense strand starting at position 3333 of SEQ ID NO: 1560727
aggcuagauuccuguauuu

SEQ ID NO: 1620154 - RNA, 19 nt, Artificial Sequence
  Description of Artificial Sequence: Synthetic oligonucleotide
  Antisense strand to SEQ ID NO: 1620153
aaauacaggaaucuagccu

SEQ ID NO: 1620155 - RNA, 19 nt, Artificial Sequence
  Description of Artificial Sequence: Synthetic oligonucleotide
  Sense strand starting at position 3428 of SEQ ID NO: 1560727
ggacgcaggucucagauau

SEQ ID NO: 1620156 - RNA, 19 nt, Artificial Sequence
  Description of Artificial Sequence: Synthetic oligonucleotide
  Antisense strand to SEQ ID NO: 1620155
auaucugagaccugcgucc

SEQ ID NO: 1620157 - RNA, 19 nt, Artificial Sequence
  Description of Artificial Sequence: Synthetic oligonucleotide
  Sense strand starting at position 3545 of SEQ ID NO: 1560727
ggcugaggcccagauucuu

SEQ ID NO: 1620158 - RNA, 19 nt, Artificial Sequence
  Description of Artificial Sequence: Synthetic oligonucleotide
  Antisense strand to SEQ ID NO: 1620157
aagaaucugggccucagcc

SEQ ID NO: 1620159 - RNA, 19 nt, Artificial Sequence
  Description of Artificial Sequence: Synthetic oligonucleotide
  Sense strand starting at position 3551 of SEQ ID NO: 1560727
ggcccagauucuuggcuca

SEQ ID NO: 1620160 - RNA, 19 nt, Artificial Sequence
  Description of Artificial Sequence: Synthetic oligonucleotide
  Antisense strand to SEQ ID NO: 1620159
ugagccaagaaucugggcc

SEQ ID NO: 1620161 - RNA, 19 nt, Artificial Sequence
  Description of Artificial Sequence: Synthetic oligonucleotide
  Sense strand starting at position 3553 of SEQ ID NO: 1560727
cccagauucuuggcucaaa

SEQ ID NO: 1620162 - RNA, 19 nt, Artificial Sequence
  Description of Artificial Sequence: Synthetic oligonucleotide
  Antisense strand to SEQ ID NO: 1620161
uuugagccaagaaucuggg

SEQ ID NO: 1620163 - RNA, 19 nt, Artificial Sequence
  Description of Artificial Sequence: Synthetic oligonucleotide
  Sense strand starting at position 3684 of SEQ ID NO: 1560727
aggagacucugcucuauua

SEQ ID NO: 1620164 - RNA, 19 nt, Artificial Sequence
  Description of Artificial Sequence: Synthetic oligonucleotide
  Antisense strand to SEQ ID NO: 1620163
uaauagagcagagucuccu

SEQ ID NO: 1620165 - RNA, 19 nt, Artificial Sequence
  Description of Artificial Sequence: Synthetic oligonucleotide
  Sense strand starting at position 3791 of SEQ ID NO: 1560727
ucuggaaggcagcgauauu

SEQ ID NO: 1620166 - RNA, 19 nt, Artificial Sequence
  Description of Artificial Sequence: Synthetic oligonucleotide
  Antisense strand to SEQ ID NO: 1620165
aauaucgcugccuuccaga

SEQ ID NO: 1620167 - RNA, 19 nt, Artificial Sequence
  Description of Artificial Sequence: Synthetic oligonucleotide
  Sense strand starting at position 35 of SEQ ID NO: 1560728
ggaagaccguuaccauaga

SEQ ID NO: 1620168 - RNA, 19 nt, Artificial Sequence
  Description of Artificial Sequence: Synthetic oligonucleotide
  Antisense strand to SEQ ID NO: 1620167
ucuaugguaacggucuucc

SEQ ID NO: 1620169 - RNA, 19 nt, Artificial Sequence
  Description of Artificial Sequence: Synthetic oligonucleotide
  Sense strand starting at position 36 of SEQ ID NO: 1560728
gaagaccguuaccauagaa

SEQ ID NO: 1620170 - RNA, 19 nt, Artificial Sequence
  Description of Artificial Sequence: Synthetic oligonucleotide
  Antisense strand to SEQ ID NO: 1620169
uucuaugguaacggucuuc

SEQ ID NO: 1620171 - RNA, 19 nt, Artificial Sequence
  Description of Artificial Sequence: Synthetic oligonucleotide
  Sense strand starting at position 63 of SEQ ID NO: 1560728
uguuuaggguuuguuuagu

SEQ ID NO: 1620172 - RNA, 19 nt, Artificial Sequence
  Description of Artificial Sequence: Synthetic oligonucleotide
  Antisense strand to SEQ ID NO: 1620171
acuaaacaaacccuaaaca

SEQ ID NO: 1620173 - RNA, 19 nt, Artificial Sequence
  Description of Artificial Sequence: Synthetic oligonucleotide
  Sense strand starting at position 68 of SEQ ID NO: 1560728
aggguuuguuuagugcaga

SEQ ID NO: 1620174 - RNA, 19 nt, Artificial Sequence
  Description of Artificial Sequence: Synthetic oligonucleotide
  Antisense strand to SEQ ID NO: 1620173
ucugcacuaaacaaacccu

SEQ ID NO: 1620175 - RNA, 19 nt, Artificial Sequence
  Description of Artificial Sequence: Synthetic oligonucleotide
  Sense strand starting at position 180 of SEQ ID NO: 1560728
ccuuccuugccggaugaaa

SEQ ID NO: 1620176 - RNA, 19 nt, Artificial Sequence
  Description of Artificial Sequence: Synthetic oligonucleotide
  Antisense strand to SEQ ID NO: 1620175
uuucauccggcaaggaagg

SEQ ID NO: 1620177 - RNA, 19 nt, Artificial Sequence
  Description of Artificial Sequence: Synthetic oligonucleotide
  Sense strand starting at position 296 of SEQ ID NO: 1560728
aauugagagcaguauuccu

SEQ ID NO: 1620178 - RNA, 19 nt, Artificial Sequence
  Description of Artificial Sequence: Synthetic oligonucleotide
  Antisense strand to SEQ ID NO: 1620177
aggaauacugcucucaauu

SEQ ID NO: 1620179 - RNA, 19 nt, Artificial Sequence
  Description of Artificial Sequence: Synthetic oligonucleotide
  Sense strand starting at position 303 of SEQ ID NO: 1560728
agcaguauuccugggcuuu

SEQ ID NO: 1620180 - RNA, 19 nt, Artificial Sequence
  Description of Artificial Sequence: Synthetic oligonucleotide
  Antisense strand to SEQ ID NO: 1620179
aaagcccaggaauacugcu

SEQ ID NO: 1620181 - RNA, 19 nt, Artificial Sequence
  Description of Artificial Sequence: Synthetic oligonucleotide
  Sense strand starting at position 304 of SEQ ID NO: 1560728
gcaguauuccugggcuuua

SEQ ID NO: 1620182 - RNA, 19 nt, Artificial Sequence
  Description of Artificial Sequence: Synthetic oligonucleotide
  Antisense strand to SEQ ID NO: 1620181
uaaagcccaggaauacugc

SEQ ID NO: 1620183 - RNA, 19 nt, Artificial Sequence
  Description of Artificial Sequence: Synthetic oligonucleotide
  Sense strand starting at position 333 of SEQ ID NO: 1560728
ggcuacgaucccugacuga

SEQ ID NO: 1620184 - RNA, 19 nt, Artificial Sequence
  Description of Artificial Sequence: Synthetic oligonucleotide
  Antisense strand to SEQ ID NO: 1620183
ucagucagggaucguagcc

SEQ ID NO: 1620185 - RNA, 19 nt, Artificial Sequence
  Description of Artificial Sequence: Synthetic oligonucleotide
  Sense strand starting at position 371 of SEQ ID NO: 1560728
gaggcuagauuccuguauu

SEQ ID NO: 1620186 - RNA, 19 nt, Artificial Sequence
  Description of Artificial Sequence: Synthetic oligonucleotide
  Antisense strand to SEQ ID NO: 1620185
aauacaggaaucuagccuc

SEQ ID NO: 1620187 - RNA, 19 nt, Artificial Sequence
  Description of Artificial Sequence: Synthetic oligonucleotide
  Sense strand starting at position 372 of SEQ ID NO: 1560728
aggcuagauuccuguauuu

SEQ ID NO: 1620188 - RNA, 19 nt, Artificial Sequence
  Description of Artificial Sequence: Synthetic oligonucleotide
  Antisense strand to SEQ ID NO: 1620187
aaauacaggaaucuagccu

SEQ ID NO: 1620189 - RNA, 19 nt, Artificial Sequence
  Description of Artificial Sequence: Synthetic oligonucleotide
  Sense strand starting at position 467 of SEQ ID NO: 1560728
ggacgcaggucucagauau

SEQ ID NO: 1620190 - RNA, 19 nt, Artificial Sequence
  Description of Artificial Sequence: Synthetic oligonucleotide
  Antisense strand to SEQ ID NO: 1620189
auaucugagaccugcgucc

SEQ ID NO: 1620191 - RNA, 19 nt, Artificial Sequence
  Description of Artificial Sequence: Synthetic oligonucleotide
  Sense strand starting at position 584 of SEQ ID NO: 1560728
ggcugaggcccagauucuu

SEQ ID NO: 1620192 - RNA, 19 nt, Artificial Sequence
  Description of Artificial Sequence: Synthetic oligonucleotide
  Antisense strand to SEQ ID NO: 1620191
aagaaucugggccucagcc

SEQ ID NO: 1620193 - RNA, 19 nt, Artificial Sequence
  Description of Artificial Sequence: Synthetic oligonucleotide
  Sense strand starting at position 590 of SEQ ID NO: 1560728
ggcccagauucuuggcuca

SEQ ID NO: 1620194 - RNA, 19 nt, Artificial Sequence
  Description of Artificial Sequence: Synthetic oligonucleotide
  Antisense strand to SEQ ID NO: 1620193
ugagccaagaaucugggcc

SEQ ID NO: 1620195 - RNA, 19 nt, Artificial Sequence
  Description of Artificial Sequence: Synthetic oligonucleotide
  Sense strand starting at position 592 of SEQ ID NO: 1560728
cccagauucuuggcucaaa

SEQ ID NO: 1620196 - RNA, 19 nt, Artificial Sequence
  Description of Artificial Sequence: Synthetic oligonucleotide
  Antisense strand to SEQ ID NO: 1620195
uuugagccaagaaucuggg

SEQ ID NO: 1620197 - RNA, 19 nt, Artificial Sequence
  Description of Artificial Sequence: Synthetic oligonucleotide
  Sense strand starting at position 723 of SEQ ID NO: 1560728
aggagacucugcucuauua

SEQ ID NO: 1620198 - RNA, 19 nt, Artificial Sequence
  Description of Artificial Sequence: Synthetic oligonucleotide
  Antisense strand to SEQ ID NO: 1620197
uaauagagcagagucuccu

SEQ ID NO: 1620199 - RNA, 19 nt, Artificial Sequence
  Description of Artificial Sequence: Synthetic oligonucleotide
  Sense strand starting at position 830 of SEQ ID NO: 1560728
ucuggaaggcagcgauauu

SEQ ID NO: 1620200 - RNA, 19 nt, Artificial Sequence
  Description of Artificial Sequence: Synthetic oligonucleotide
  Antisense strand to SEQ ID NO: 1620199
aauaucgcugccuuccaga

SEQ ID NO: 1620201 - RNA, 19 nt, Artificial Sequence
  Description of Artificial Sequence: Synthetic oligonucleotide
  Sense strand starting at position 1530 of SEQ ID NO: 1560728
gcuugaugugcuucugcaa

SEQ ID NO: 1620202 - RNA, 19 nt, Artificial Sequence
  Description of Artificial Sequence: Synthetic oligonucleotide
  Antisense strand to SEQ ID NO: 1620201
uugcagaagcacaucaagc

SEQ ID NO: 1620203 - RNA, 19 nt, Artificial Sequence
  Description of Artificial Sequence: Synthetic oligonucleotide
  Sense strand starting at position 2280 of SEQ ID NO: 1560728
gagugagucaucgggugug

SEQ ID NO: 1620204 - RNA, 19 nt, Artificial Sequence
  Description of Artificial Sequence: Synthetic oligonucleotide
  Antisense strand to SEQ ID NO: 1620203
cacacccgaugacucacuc

SEQ ID NO: 1620205 - RNA, 19 nt, Artificial Sequence
  Description of Artificial Sequence: Synthetic oligonucleotide
  Sense strand starting at position 2329 of SEQ ID NO: 1560728
agcaacucaugucuguaau

SEQ ID NO: 1620206 - RNA, 19 nt, Artificial Sequence
  Description of Artificial Sequence: Synthetic oligonucleotide
  Antisense strand to SEQ ID NO: 1620205
auuacagacaugaguugcu

SEQ ID NO: 1620207 - RNA, 19 nt, Artificial Sequence
  Description of Artificial Sequence: Synthetic oligonucleotide
  Sense strand starting at position 2662 of SEQ ID NO: 1560728
gucuuuguaaucugggauc

SEQ ID NO: 1620208 - RNA, 19 nt, Artificial Sequence
  Description of Artificial Sequence: Synthetic oligonucleotide
  Antisense strand to SEQ ID NO: 1620207
gaucccagauuacaaagac

SEQ ID NO: 1620209 - RNA, 19 nt, Artificial Sequence
  Description of Artificial Sequence: Synthetic oligonucleotide
  Sense strand starting at position 2664 of SEQ ID NO: 1560728
cuuuguaaucugggaucau

SEQ ID NO: 1620210 - RNA, 19 nt, Artificial Sequence
  Description of Artificial Sequence: Synthetic oligonucleotide
  Antisense strand to SEQ ID NO: 1620209
augaucccagauuacaaag

SEQ ID NO: 1620211 - RNA, 19 nt, Artificial Sequence
  Description of Artificial Sequence: Synthetic oligonucleotide
  Sense strand starting at position 2665 of SEQ ID NO: 1560728
uuuguaaucugggaucauc

SEQ ID NO: 1620212 - RNA, 19 nt, Artificial Sequence
  Description of Artificial Sequence: Synthetic oligonucleotide
  Antisense strand to SEQ ID NO: 1620211
gaugaucccagauuacaaa

SEQ ID NO: 1620213 - RNA, 19 nt, Artificial Sequence
  Description of Artificial Sequence: Synthetic oligonucleotide
  Sense strand starting at position 2673 of SEQ ID NO: 1560728
cugggaucaucuggcaugu

SEQ ID NO: 1620214 - RNA, 19 nt, Artificial Sequence
  Description of Artificial Sequence: Synthetic oligonucleotide
  Antisense strand to SEQ ID NO: 1620213
acaugccagaugaucccag

SEQ ID NO: 1620215 - RNA, 19 nt, Artificial Sequence
  Description of Artificial Sequence: Synthetic oligonucleotide
  Sense strand starting at position 2698 of SEQ ID NO: 1560728
gguucagagugguuaccca

SEQ ID NO: 1620216 - RNA, 19 nt, Artificial Sequence
  Description of Artificial Sequence: Synthetic oligonucleotide
  Antisense strand to SEQ ID NO: 1620215
uggguaaccacucugaacc

SEQ ID NO: 1620217 - RNA, 19 nt, Artificial Sequence
  Description of Artificial Sequence: Synthetic oligonucleotide
  Sense strand starting at position 2708 of SEQ ID NO: 1560728
gguuacccauccuguaaca

SEQ ID NO: 1620218 - RNA, 19 nt, Artificial Sequence
  Description of Artificial Sequence: Synthetic oligonucleotide
  Antisense strand to SEQ ID NO: 1620217
uguuacaggauggguaacc

SEQ ID NO: 1620219 - RNA, 19 nt, Artificial Sequence
  Description of Artificial Sequence: Synthetic oligonucleotide
  Sense strand starting at position 2862 of SEQ ID NO: 1560728
ggagcuccuugaucagaag

SEQ ID NO: 1620220 - RNA, 19 nt, Artificial Sequence
  Description of Artificial Sequence: Synthetic oligonucleotide
  Antisense strand to SEQ ID NO: 1620219
cuucugaucaaggagcucc

SEQ ID NO: 1620221 - RNA, 19 nt, Artificial Sequence
  Description of Artificial Sequence: Synthetic oligonucleotide
  Sense strand starting at position 2879 of SEQ ID NO: 1560728
agcaauacugugcggguua

SEQ ID NO: 1620222 - RNA, 19 nt, Artificial Sequence
  Description of Artificial Sequence: Synthetic oligonucleotide
  Antisense strand to SEQ ID NO: 1620221
uaacccgcacaguauugcu

SEQ ID NO: 1620223 - RNA, 19 nt, Artificial Sequence
  Description of Artificial Sequence: Synthetic oligonucleotide
  Sense strand starting at position 2892 of SEQ ID NO: 1560728
ggguuaacaugagggugaa

SEQ ID NO: 1620224 - RNA, 19 nt, Artificial Sequence
  Description of Artificial Sequence: Synthetic oligonucleotide
  Antisense strand to SEQ ID NO: 1620223
uucacccucauguuaaccc

SEQ ID NO: 1620225 - RNA, 19 nt, Artificial Sequence
  Description of Artificial Sequence: Synthetic oligonucleotide
  Sense strand starting at position 2893 of SEQ ID NO: 1560728
gguuaacaugagggugaau

SEQ ID NO: 1620226 - RNA, 19 nt, Artificial Sequence
  Description of Artificial Sequence: Synthetic oligonucleotide
  Antisense strand to SEQ ID NO: 1620225
auucacccucauguuaacc

SEQ ID NO: 1620227 - RNA, 19 nt, Artificial Sequence
  Description of Artificial Sequence: Synthetic oligonucleotide
  Sense strand starting at position 2983 of SEQ ID NO: 1560728
cccagaguuguuuacucga

SEQ ID NO: 1620228 - RNA, 19 nt, Artificial Sequence
  Description of Artificial Sequence: Synthetic oligonucleotide
  Antisense strand to SEQ ID NO: 1620227
ucgaguaaacaacucuggg

SEQ ID NO: 1620229 - RNA, 19 nt, Artificial Sequence
  Description of Artificial Sequence: Synthetic oligonucleotide
  Sense strand starting at position 2988 of SEQ ID NO: 1560728
aguuguuuacucgagggag

SEQ ID NO: 1620230 - RNA, 19 nt, Artificial Sequence
  Description of Artificial Sequence: Synthetic oligonucleotide
  Antisense strand to SEQ ID NO: 1620229
cucccucgaguaaacaacu

SEQ ID NO: 1620231 - RNA, 19 nt, Artificial Sequence
  Description of Artificial Sequence: Synthetic oligonucleotide
  Sense strand starting at position 2989 of SEQ ID NO: 1560728
guuguuuacucgagggagg

SEQ ID NO: 1620232 - RNA, 19 nt, Artificial Sequence
  Description of Artificial Sequence: Synthetic oligonucleotide
  Antisense strand to SEQ ID NO: 1620231
ccucccucgaguaaacaac

SEQ ID NO: 1620233 - RNA, 19 nt, Artificial Sequence
  Description of Artificial Sequence: Synthetic oligonucleotide
  Sense strand starting at position 2990 of SEQ ID NO: 1560728
uuguuuacucgagggagga

SEQ ID NO: 1620234 - RNA, 19 nt, Artificial Sequence
  Description of Artificial Sequence: Synthetic oligonucleotide
  Antisense strand to SEQ ID NO: 1620233
uccucccucgaguaaacaa

SEQ ID NO: 1620235 - RNA, 19 nt, Artificial Sequence
  Description of Artificial Sequence: Synthetic oligonucleotide
  Sense strand starting at position 2991 of SEQ ID NO: 1560728
uguuuacucgagggaggaa

SEQ ID NO: 1620236 - RNA, 19 nt, Artificial Sequence
  Description of Artificial Sequence: Synthetic oligonucleotide
  Antisense strand to SEQ ID NO: 1620235
uuccucccucgaguaaaca

SEQ ID NO: 1620237 - RNA, 19 nt, Artificial Sequence
  Description of Artificial Sequence: Synthetic oligonucleotide
  Sense strand starting at position 3078 of SEQ ID NO: 1560728
uuggucuuccuaggaaacu

SEQ ID NO: 1620238 - RNA, 19 nt, Artificial Sequence
  Description of Artificial Sequence: Synthetic oligonucleotide
  Antisense strand to SEQ ID NO: 1620237
aguuuccuaggaagaccaa

SEQ ID NO: 1620239 - RNA, 19 nt, Artificial Sequence
  Description of Artificial Sequence: Synthetic oligonucleotide
  Sense strand starting at position 3139 of SEQ ID NO: 1560728
gggcauucaucagugacgu

SEQ ID NO: 1620240 - RNA, 19 nt, Artificial Sequence
  Description of Artificial Sequence: Synthetic oligonucleotide
  Antisense strand to SEQ ID NO: 1620239
acgucacugaugaaugccc

SEQ ID NO: 1620241 - RNA, 19 nt, Artificial Sequence
  Description of Artificial Sequence: Synthetic oligonucleotide
  Sense strand starting at position 3140 of SEQ ID NO: 1560728
ggcauucaucagugacgua

SEQ ID NO: 1620242 - RNA, 19 nt, Artificial Sequence
  Description of Artificial Sequence: Synthetic oligonucleotide
  Antisense strand to SEQ ID NO: 1620241
uacgucacugaugaaugcc

SEQ ID NO: 1620243 - RNA, 19 nt, Artificial Sequence
  Description of Artificial Sequence: Synthetic oligonucleotide
  Sense strand starting at position 3250 of SEQ ID NO: 1560728
guggucaucugaucuacca

SEQ ID NO: 1620244 - RNA, 19 nt, Artificial Sequence
  Description of Artificial Sequence: Synthetic oligonucleotide
  Antisense strand to SEQ ID NO: 1620243
ugguagaucagaugaccac

SEQ ID NO: 1620245 - RNA, 19 nt, Artificial Sequence
  Description of Artificial Sequence: Synthetic oligonucleotide
  Sense strand starting at position 3338 of SEQ ID NO: 1560728
gugguuuccacucgcaaca

SEQ ID NO: 1620246 - RNA, 19 nt, Artificial Sequence
  Description of Artificial Sequence: Synthetic oligonucleotide
  Antisense strand to SEQ ID NO: 1620245
uguugcgaguggaaaccac

SEQ ID NO: 1620247 - RNA, 19 nt, Artificial Sequence
  Description of Artificial Sequence: Synthetic oligonucleotide
  Sense strand starting at position 44 of SEQ ID NO: 1560729
uggguccgaggguauaauu

SEQ ID NO: 1620248 - RNA, 19 nt, Artificial Sequence
  Description of Artificial Sequence: Synthetic oligonucleotide
  Antisense strand to SEQ ID NO: 1620247
aauuauacccucggaccca

SEQ ID NO: 1620249 - RNA, 19 nt, Artificial Sequence
  Description of Artificial Sequence: Synthetic oligonucleotide
  Sense strand starting at position 243 of SEQ ID NO: 1560729
gcaugauuccugcggugag

SEQ ID NO: 1620250 - RNA, 19 nt, Artificial Sequence
  Description of Artificial Sequence: Synthetic oligonucleotide
  Antisense strand to SEQ ID NO: 1620249
cucaccgcaggaaucaugc

SEQ ID NO: 1620251 - RNA, 19 nt, Artificial Sequence
  Description of Artificial Sequence: Synthetic oligonucleotide
  Sense strand starting at position 244 of SEQ ID NO: 1560729
caugauuccugcggugagu

SEQ ID NO: 1620252 - RNA, 19 nt, Artificial Sequence
  Description of Artificial Sequence: Synthetic oligonucleotide
  Antisense strand to SEQ ID NO: 1620251
acucaccgcaggaaucaug

SEQ ID NO: 1620253 - RNA, 19 nt, Artificial Sequence
  Description of Artificial Sequence: Synthetic oligonucleotide
  Sense strand starting at position 255 of SEQ ID NO: 1560729
cggugaguuccucauagag

SEQ ID NO: 1620254 - RNA, 19 nt, Artificial Sequence
  Description of Artificial Sequence: Synthetic oligonucleotide
  Antisense strand to SEQ ID NO: 1620253
cucuaugaggaacucaccg

SEQ ID NO: 1620255 - RNA, 19 nt, Artificial Sequence
  Description of Artificial Sequence: Synthetic oligonucleotide
  Sense strand starting at position 257 of SEQ ID NO: 1560729
gugaguuccucauagagag

SEQ ID NO: 1620256 - RNA, 19 nt, Artificial Sequence
  Description of Artificial Sequence: Synthetic oligonucleotide
  Antisense strand to SEQ ID NO: 1620255
cucucuaugaggaacucac

SEQ ID NO: 1620257 - RNA, 19 nt, Artificial Sequence
  Description of Artificial Sequence: Synthetic oligonucleotide
  Sense strand starting at position 279 of SEQ ID NO: 1560729
gccucaucuccacagaaag

SEQ ID NO: 1620258 - RNA, 19 nt, Artificial Sequence
  Description of Artificial Sequence: Synthetic oligonucleotide
  Antisense strand to SEQ ID NO: 1620257
cuuucuguggagaugaggc

SEQ ID NO: 1620259 - RNA, 19 nt, Artificial Sequence
  Description of Artificial Sequence: Synthetic oligonucleotide
  Sense strand starting at position 342 of SEQ ID NO: 1560729
ccauucccugcaugaagaa

SEQ ID NO: 1620260 - RNA, 19 nt, Artificial Sequence
  Description of Artificial Sequence: Synthetic oligonucleotide
  Antisense strand to SEQ ID NO: 1620259
uucuucaugcagggaaugg

SEQ ID NO: 1620261 - RNA, 19 nt, Artificial Sequence
  Description of Artificial Sequence: Synthetic oligonucleotide
  Sense strand starting at position 503 of SEQ ID NO: 1560729
gaaggucccuuggaaucua

SEQ ID NO: 1620262 - RNA, 19 nt, Artificial Sequence
  Description of Artificial Sequence: Synthetic oligonucleotide
  Antisense strand to SEQ ID NO: 1620261
uagauuccaagggaccuuc

SEQ ID NO: 1620263 - RNA, 19 nt, Artificial Sequence
  Description of Artificial Sequence: Synthetic oligonucleotide
  Sense strand starting at position 1708 of SEQ ID NO: 1560729
gaaggaaacuccugucaca

SEQ ID NO: 1620264 - RNA, 19 nt, Artificial Sequence
  Description of Artificial Sequence: Synthetic oligonucleotide
  Antisense strand to SEQ ID NO: 1620263
ugugacaggaguuuccuuc

SEQ ID NO: 1620265 - RNA, 19 nt, Artificial Sequence
  Description of Artificial Sequence: Synthetic oligonucleotide
  Sense strand starting at position 1711 of SEQ ID NO: 1560729
ggaaacuccugucacaaag

SEQ ID NO: 1620266 - RNA, 19 nt, Artificial Sequence
  Description of Artificial Sequence: Synthetic oligonucleotide
  Antisense strand to SEQ ID NO: 1620265
cuuugugacaggaguuucc

SEQ ID NO: 1620267 - RNA, 19 nt, Artificial Sequence
  Description of Artificial Sequence: Synthetic oligonucleotide
  Sense strand starting at position 2036 of SEQ ID NO: 1560729
uuuaaugaguccugagacu

SEQ ID NO: 1620268 - RNA, 19 nt, Artificial Sequence
  Description of Artificial Sequence: Synthetic oligonucleotide
  Antisense strand to SEQ ID NO: 1620267
agucucaggacucauuaaa

SEQ ID NO: 1620269 - RNA, 19 nt, Artificial Sequence
  Description of Artificial Sequence: Synthetic oligonucleotide
  Sense strand starting at position 2110 of SEQ ID NO: 1560729
uguucuaaagggcgagaaa

SEQ ID NO: 1620270 - RNA, 19 nt, Artificial Sequence
  Description of Artificial Sequence: Synthetic oligonucleotide
  Antisense strand to SEQ ID NO: 1620269
uuucucgcccuuuagaaca

SEQ ID NO: 1620271 - RNA, 19 nt, Artificial Sequence
  Description of Artificial Sequence: Synthetic oligonucleotide
  Sense strand starting at position 2111 of SEQ ID NO: 1560729
guucuaaagggcgagaaau

SEQ ID NO: 1620272 - RNA, 19 nt, Artificial Sequence
  Description of Artificial Sequence: Synthetic oligonucleotide
  Antisense strand to SEQ ID NO: 1620271
auuucucgcccuuuagaac

SEQ ID NO: 1620273 - RNA, 19 nt, Artificial Sequence
  Description of Artificial Sequence: Synthetic oligonucleotide
  Sense strand starting at position 2232 of SEQ ID NO: 1560729
uccagaaucucagggagga

SEQ ID NO: 1620274 - RNA, 19 nt, Artificial Sequence
  Description of Artificial Sequence: Synthetic oligonucleotide
  Antisense strand to SEQ ID NO: 1620273
uccucccugagauucugga

SEQ ID NO: 1620275 - RNA, 19 nt, Artificial Sequence
  Description of Artificial Sequence: Synthetic oligonucleotide
  Sense strand starting at position 2306 of SEQ ID NO: 1560729
auucuuggguucccuagaa

SEQ ID NO: 1620276 - RNA, 19 nt, Artificial Sequence
  Description of Artificial Sequence: Synthetic oligonucleotide
  Antisense strand to SEQ ID NO: 1620275
uucuagggaacccaagaau

SEQ ID NO: 1620277 - RNA, 19 nt, Artificial Sequence
  Description of Artificial Sequence: Synthetic oligonucleotide
  Sense strand starting at position 2407 of SEQ ID NO: 1560729
agagcucuggcaugaagca

SEQ ID NO: 1620278 - RNA, 19 nt, Artificial Sequence
  Description of Artificial Sequence: Synthetic oligonucleotide
  Antisense strand to SEQ ID NO: 1620277
ugcuucaugccagagcucu

SEQ ID NO: 1620279 - RNA, 19 nt, Artificial Sequence
  Description of Artificial Sequence: Synthetic oligonucleotide
  Sense strand starting at position 2823 of SEQ ID NO: 1560729
accugugacuuucugaaug

SEQ ID NO: 1620280 - RNA, 19 nt, Artificial Sequence
  Description of Artificial Sequence: Synthetic oligonucleotide
  Antisense strand to SEQ ID NO: 1620279
cauucagaaagucacaggu

SEQ ID NO: 1620281 - RNA, 19 nt, Artificial Sequence
  Description of Artificial Sequence: Synthetic oligonucleotide
  Sense strand starting at position 2966 of SEQ ID NO: 1560729
gggacugccuggcuaguaa

SEQ ID NO: 1620282 - RNA, 19 nt, Artificial Sequence
  Description of Artificial Sequence: Synthetic oligonucleotide
  Antisense strand to SEQ ID NO: 1620281
uuacuagccaggcaguccc

SEQ ID NO: 1620283 - RNA, 19 nt, Artificial Sequence
  Description of Artificial Sequence: Synthetic oligonucleotide
  Sense strand starting at position 3079 of SEQ ID NO: 1560729
gccggaaauuucuccgccu

SEQ ID NO: 1620284 - RNA, 19 nt, Artificial Sequence
  Description of Artificial Sequence: Synthetic oligonucleotide
  Antisense strand to SEQ ID NO: 1620283
aggcggagaaauuuccggc

SEQ ID NO: 1620285 - RNA, 19 nt, Artificial Sequence
  Description of Artificial Sequence: Synthetic oligonucleotide
  Sense strand starting at position 3121 of SEQ ID NO: 1560729
gcgucaguuccaugugaug

SEQ ID NO: 1620286 - RNA, 19 nt, Artificial Sequence
  Description of Artificial Sequence: Synthetic oligonucleotide
  Antisense strand to SEQ ID NO: 1620285
caucacauggaacugacgc

SEQ ID NO: 1620287 - RNA, 19 nt, Artificial Sequence
  Description of Artificial Sequence: Synthetic oligonucleotide
  Sense strand starting at position 3123 of SEQ ID NO: 1560729
gucaguuccaugugauguc

SEQ ID NO: 1620288 - RNA, 19 nt, Artificial Sequence
  Description of Artificial Sequence: Synthetic oligonucleotide
  Antisense strand to SEQ ID NO: 1620287
gacaucacauggaacugac

SEQ ID NO: 1620289 - RNA, 19 nt, Artificial Sequence
  Description of Artificial Sequence: Synthetic oligonucleotide
  Sense strand starting at position 3258 of SEQ ID NO: 1560729
gggcucaauucagagggaa

SEQ ID NO: 1620290 - RNA, 19 nt, Artificial Sequence
  Description of Artificial Sequence: Synthetic oligonucleotide
  Antisense strand to SEQ ID NO: 1620289
uucccucugaauugagccc

SEQ ID NO: 1620291 - RNA, 19 nt, Artificial Sequence
  Description of Artificial Sequence: Synthetic oligonucleotide
  Sense strand starting at position 3317 of SEQ ID NO: 1560729
uggagaacuucaguuggca

SEQ ID NO: 1620292 - RNA, 19 nt, Artificial Sequence
  Description of Artificial Sequence: Synthetic oligonucleotide
  Antisense strand to SEQ ID NO: 1620291
ugccaacugaaguucucca

SEQ ID NO: 1620293 - RNA, 19 nt, Artificial Sequence
  Description of Artificial Sequence: Synthetic oligonucleotide
  Sense strand starting at position 3373 of SEQ ID NO: 1560729
gcgcgucaagccucuuauu

SEQ ID NO: 1620294 - RNA, 19 nt, Artificial Sequence
  Description of Artificial Sequence: Synthetic oligonucleotide
  Antisense strand to SEQ ID NO: 1620293
aauaagaggcuugacgcgc

SEQ ID NO: 1620295 - RNA, 19 nt, Artificial Sequence
  Description of Artificial Sequence: Synthetic oligonucleotide
  Sense strand starting at position 3382 of SEQ ID NO: 1560729
gccucuuauuucucggcau

SEQ ID NO: 1620296 - RNA, 19 nt, Artificial Sequence
  Description of Artificial Sequence: Synthetic oligonucleotide
  Antisense strand to SEQ ID NO: 1620295
augccgagaaauaagaggc

SEQ ID NO: 1620297 - RNA, 19 nt, Artificial Sequence
  Description of Artificial Sequence: Synthetic oligonucleotide
  Sense strand starting at position 3383 of SEQ ID NO: 1560729
ccucuuauuucucggcauu

SEQ ID NO: 1620298 - RNA, 19 nt, Artificial Sequence
  Description of Artificial Sequence: Synthetic oligonucleotide
  Antisense strand to SEQ ID NO: 1620297
aaugccgagaaauaagagg

SEQ ID NO: 1620299 - RNA, 19 nt, Artificial Sequence
  Description of Artificial Sequence: Synthetic oligonucleotide
  Sense strand starting at position 3384 of SEQ ID NO: 1560729
cucuuauuucucggcauua

SEQ ID NO: 1620300 - RNA, 19 nt, Artificial Sequence
  Description of Artificial Sequence: Synthetic oligonucleotide
  Antisense strand to SEQ ID NO: 1620299
uaaugccgagaaauaagag

SEQ ID NO: 1620301 - RNA, 19 nt, Artificial Sequence
  Description of Artificial Sequence: Synthetic oligonucleotide
  Sense strand starting at position 3385 of SEQ ID NO: 1560729
ucuuauuucucggcauuaa

SEQ ID NO: 1620302 - RNA, 19 nt, Artificial Sequence
  Description of Artificial Sequence: Synthetic oligonucleotide
  Antisense strand to SEQ ID NO: 1620301
uuaaugccgagaaauaaga

SEQ ID NO: 1620303 - RNA, 19 nt, Artificial Sequence
  Description of Artificial Sequence: Synthetic oligonucleotide
  Sense strand starting at position 3424 of SEQ ID NO: 1560729
uauggugucuuugugauuu

SEQ ID NO: 1620304 - RNA, 19 nt, Artificial Sequence
  Description of Artificial Sequence: Synthetic oligonucleotide
  Antisense strand to SEQ ID NO: 1620303
aaaucacaaagacaccaua

SEQ ID NO: 1620305 - RNA, 19 nt, Artificial Sequence
  Description of Artificial Sequence: Synthetic oligonucleotide
  Sense strand starting at position 3426 of SEQ ID NO: 1560729
uggugucuuugugauuugu

SEQ ID NO: 1620306 - RNA, 19 nt, Artificial Sequence
  Description of Artificial Sequence: Synthetic oligonucleotide
  Antisense strand to SEQ ID NO: 1620305
acaaaucacaaagacacca

SEQ ID NO: 1620307 - RNA, 19 nt, Artificial Sequence
  Description of Artificial Sequence: Synthetic oligonucleotide
  Sense strand starting at position 3428 of SEQ ID NO: 1560729
gugucuuugugauuuguuu

SEQ ID NO: 1620308 - RNA, 19 nt, Artificial Sequence
  Description of Artificial Sequence: Synthetic oligonucleotide
  Antisense strand to SEQ ID NO: 1620307
aaacaaaucacaaagacac

SEQ ID NO: 1620309 - RNA, 19 nt, Artificial Sequence
  Description of Artificial Sequence: Synthetic oligonucleotide
  Sense strand starting at position 3432 of SEQ ID NO: 1560729
cuuugugauuuguuuguuu

SEQ ID NO: 1620310 - RNA, 19 nt, Artificial Sequence
  Description of Artificial Sequence: Synthetic oligonucleotide
  Antisense strand to SEQ ID NO: 1620309
aaacaaacaaaucacaaag

SEQ ID NO: 1620311 - RNA, 19 nt, Artificial Sequence
  Description of Artificial Sequence: Synthetic oligonucleotide
  Sense strand starting at position 3543 of SEQ ID NO: 1560729
accucaguaguucggagua

SEQ ID NO: 1620312 - RNA, 19 nt, Artificial Sequence
  Description of Artificial Sequence: Synthetic oligonucleotide
  Antisense strand to SEQ ID NO: 1620311
uacuccgaacuacugaggu

SEQ ID NO: 1620313 - RNA, 19 nt, Artificial Sequence
  Description of Artificial Sequence: Synthetic oligonucleotide
  Sense strand starting at position 3769 of SEQ ID NO: 1560729
ccgugaugucacggugucu

SEQ ID NO: 1620314 - RNA, 19 nt, Artificial Sequence
  Description of Artificial Sequence: Synthetic oligonucleotide
  Antisense strand to SEQ ID NO: 1620313
agacaccgugacaucacgg

SEQ ID NO: 1620315 - RNA, 19 nt, Artificial Sequence
  Description of Artificial Sequence: Synthetic oligonucleotide
  Sense strand starting at position 3819 of SEQ ID NO: 1560729
gauugcagucccugacaaa

SEQ ID NO: 1620316 - RNA, 19 nt, Artificial Sequence
  Description of Artificial Sequence: Synthetic oligonucleotide
  Antisense strand to SEQ ID NO: 1620315
uuugucagggacugcaauc

SEQ ID NO: 1620317 - RNA, 19 nt, Artificial Sequence
  Description of Artificial Sequence: Synthetic oligonucleotide
  Sense strand starting at position 3843 of SEQ ID NO: 1560729
ccaggagguuugucuacgu

SEQ ID NO: 1620318 - RNA, 19 nt, Artificial Sequence
  Description of Artificial Sequence: Synthetic oligonucleotide
  Antisense strand to SEQ ID NO: 1620317
acguagacaaaccuccugg

SEQ ID NO: 1620319 - RNA, 19 nt, Artificial Sequence
  Description of Artificial Sequence: Synthetic oligonucleotide
  Sense strand starting at position 3846 of SEQ ID NO: 1560729
ggagguuugucuacgucga

SEQ ID NO: 1620320 - RNA, 19 nt, Artificial Sequence
  Description of Artificial Sequence: Synthetic oligonucleotide
  Antisense strand to SEQ ID NO: 1620319
ucgacguagacaaaccucc

SEQ ID NO: 1620321 - RNA, 19 nt, Artificial Sequence
  Description of Artificial Sequence: Synthetic oligonucleotide
  Sense strand starting at position 3847 of SEQ ID NO: 1560729
gagguuugucuacgucgau

SEQ ID NO: 1620322 - RNA, 19 nt, Artificial Sequence
  Description of Artificial Sequence: Synthetic oligonucleotide
  Antisense strand to SEQ ID NO: 1620321
aucgacguagacaaaccuc

SEQ ID NO: 1620323 - RNA, 19 nt, Artificial Sequence
  Description of Artificial Sequence: Synthetic oligonucleotide
  Sense strand starting at position 373 of SEQ ID NO: 1560730
gcggagaaggcugaggauu

SEQ ID NO: 1620324 - RNA, 19 nt, Artificial Sequence
  Description of Artificial Sequence: Synthetic oligonucleotide
  Antisense strand to SEQ ID NO: 1620323
aauccucagccuucuccgc

SEQ ID NO: 1620325 - RNA, 19 nt, Artificial Sequence
  Description of Artificial Sequence: Synthetic oligonucleotide
  Sense strand starting at position 381 of SEQ ID NO: 1560730
ggcugaggauucccgggau

SEQ ID NO: 1620326 - RNA, 19 nt, Artificial Sequence
  Description of Artificial Sequence: Synthetic oligonucleotide
  Antisense strand to SEQ ID NO: 1620325
aucccgggaauccucagcc

SEQ ID NO: 1620327 - RNA, 19 nt, Artificial Sequence
  Description of Artificial Sequence: Synthetic oligonucleotide
  Sense strand starting at position 384 of SEQ ID NO: 1560730
ugaggauucccgggauuca

SEQ ID NO: 1620328 - RNA, 19 nt, Artificial Sequence
  Description of Artificial Sequence: Synthetic oligonucleotide
  Antisense strand to SEQ ID NO: 1620327
ugaaucccgggaauccuca

SEQ ID NO: 1620329 - RNA, 19 nt, Artificial Sequence
  Description of Artificial Sequence: Synthetic oligonucleotide
  Sense strand starting at position 566 of SEQ ID NO: 1560730
caguaagaguaccaaagaa

SEQ ID NO: 1620330 - RNA, 19 nt, Artificial Sequence
  Description of Artificial Sequence: Synthetic oligonucleotide
  Antisense strand to SEQ ID NO: 1620329
uucuuugguacucuuacug

SEQ ID NO: 1620331 - RNA, 19 nt, Artificial Sequence
  Description of Artificial Sequence: Synthetic oligonucleotide
  Sense strand starting at position 613 of SEQ ID NO: 1560730
cagucucgggagugaaaua

SEQ ID NO: 1620332 - RNA, 19 nt, Artificial Sequence
  Description of Artificial Sequence: Synthetic oligonucleotide
  Antisense strand to SEQ ID NO: 1620331
uauuucacucccgagacug

SEQ ID NO: 1620333 - RNA, 19 nt, Artificial Sequence
  Description of Artificial Sequence: Synthetic oligonucleotide
  Sense strand starting at position 614 of SEQ ID NO: 1560730
agucucgggagugaaauaa

SEQ ID NO: 1620334 - RNA, 19 nt, Artificial Sequence
  Description of Artificial Sequence: Synthetic oligonucleotide
  Antisense strand to SEQ ID NO: 1620333
uuauuucacucccgagacu

SEQ ID NO: 1620335 - RNA, 19 nt, Artificial Sequence
  Description of Artificial Sequence: Synthetic oligonucleotide
  Sense strand starting at position 644 of SEQ ID NO: 1560730
ugauaagaguaccuacuau

SEQ ID NO: 1620336 - RNA, 19 nt, Artificial Sequence
  Description of Artificial Sequence: Synthetic oligonucleotide
  Antisense strand to SEQ ID NO: 1620335
auaguagguacucuuauca

SEQ ID NO: 1620337 - RNA, 19 nt, Artificial Sequence
  Description of Artificial Sequence: Synthetic oligonucleotide
  Sense strand starting at position 768 of SEQ ID NO: 1560730
gugcaaugccacgaucaug

SEQ ID NO: 1620338 - RNA, 19 nt, Artificial Sequence
  Description of Artificial Sequence: Synthetic oligonucleotide
  Antisense strand to SEQ ID NO: 1620337
caugaucguggcauugcac

SEQ ID NO: 1620339 - RNA, 19 nt, Artificial Sequence
  Description of Artificial Sequence: Synthetic oligonucleotide
  Sense strand starting at position 1046 of SEQ ID NO: 1560730
gggugaucagcauguccau

SEQ ID NO: 1620340 - RNA, 19 nt, Artificial Sequence
  Description of Artificial Sequence: Synthetic oligonucleotide
  Antisense strand to SEQ ID NO: 1620339
auggacaugcugaucaccc

SEQ ID NO: 1620341 - RNA, 19 nt, Artificial Sequence
  Description of Artificial Sequence: Synthetic oligonucleotide
  Sense strand starting at position 1055 of SEQ ID NO: 1560730
gcauguccauuucucugau

SEQ ID NO: 1620342 - RNA, 19 nt, Artificial Sequence
  Description of Artificial Sequence: Synthetic oligonucleotide
  Antisense strand to SEQ ID NO: 1620341
aucagagaaauggacaugc

SEQ ID NO: 1620343 - RNA, 19 nt, Artificial Sequence
  Description of Artificial Sequence: Synthetic oligonucleotide
  Sense strand starting at position 1058 of SEQ ID NO: 1560730
uguccauuucucugaugug

SEQ ID NO: 1620344 - RNA, 19 nt, Artificial Sequence
  Description of Artificial Sequence: Synthetic oligonucleotide
  Antisense strand to SEQ ID NO: 1620343
cacaucagagaaauggaca

SEQ ID NO: 1620345 - RNA, 19 nt, Artificial Sequence
  Description of Artificial Sequence: Synthetic oligonucleotide
  Sense strand starting at position 1061 of SEQ ID NO: 1560730
ccauuucucugauguggaa

SEQ ID NO: 1620346 - RNA, 19 nt, Artificial Sequence
  Description of Artificial Sequence: Synthetic oligonucleotide
  Antisense strand to SEQ ID NO: 1620345
uuccacaucagagaaaugg

SEQ ID NO: 1620347 - RNA, 19 nt, Artificial Sequence
  Description of Artificial Sequence: Synthetic oligonucleotide
  Sense strand starting at position 1185 of SEQ ID NO: 1560730
cuggaaagaacuuguagca

SEQ ID NO: 1620348 - RNA, 19 nt, Artificial Sequence
  Description of Artificial Sequence: Synthetic oligonucleotide
  Antisense strand to SEQ ID NO: 1620347
ugcuacaaguucuuuccag

SEQ ID NO: 1620349 - RNA, 19 nt, Artificial Sequence
  Description of Artificial Sequence: Synthetic oligonucleotide
  Sense strand starting at position 1216 of SEQ ID NO: 1560730
caugaauuucugcguccca

SEQ ID NO: 1620350 - RNA, 19 nt, Artificial Sequence
  Description of Artificial Sequence: Synthetic oligonucleotide
  Antisense strand to SEQ ID NO: 1620349
ugggacgcagaaauucaug

SEQ ID NO: 1620351 - RNA, 19 nt, Artificial Sequence
  Description of Artificial Sequence: Synthetic oligonucleotide
  Sense strand starting at position 1229 of SEQ ID NO: 1560730
gucccaguuggugauuacu

SEQ ID NO: 1620352 - RNA, 19 nt, Artificial Sequence
  Description of Artificial Sequence: Synthetic oligonucleotide
  Antisense strand to SEQ ID NO: 1620351
aguaaucaccaacugggac

SEQ ID NO: 1620353 - RNA, 19 nt, Artificial Sequence
  Description of Artificial Sequence: Synthetic oligonucleotide
  Sense strand starting at position 1335 of SEQ ID NO: 1560730
cacaguuggucucuggagu

SEQ ID NO: 1620354 - RNA, 19 nt, Artificial Sequence
  Description of Artificial Sequence: Synthetic oligonucleotide
  Antisense strand to SEQ ID NO: 1620353
acuccagagaccaacugug

SEQ ID NO: 1620355 - RNA, 19 nt, Artificial Sequence
  Description of Artificial Sequence: Synthetic oligonucleotide
  Sense strand starting at position 1350 of SEQ ID NO: 1560730
gaguguucuucuccaccag

SEQ ID NO: 1620356 - RNA, 19 nt, Artificial Sequence
  Description of Artificial Sequence: Synthetic oligonucleotide
  Antisense strand to SEQ ID NO: 1620355
cugguggagaagaacacuc

SEQ ID NO: 1620357 - RNA, 19 nt, Artificial Sequence
  Description of Artificial Sequence: Synthetic oligonucleotide
  Sense strand starting at position 1433 of SEQ ID NO: 1560730
auaacucaccucgagucaa

SEQ ID NO: 1620358 - RNA, 19 nt, Artificial Sequence
  Description of Artificial Sequence: Synthetic oligonucleotide
  Antisense strand to SEQ ID NO: 1620357
uugacucgaggugaguuau

SEQ ID NO: 1620359 - RNA, 19 nt, Artificial Sequence
  Description of Artificial Sequence: Synthetic oligonucleotide
  Sense strand starting at position 1575 of SEQ ID NO: 1560730
ccgauucugacacgugaga

SEQ ID NO: 1620360 - RNA, 19 nt, Artificial Sequence
  Description of Artificial Sequence: Synthetic oligonucleotide
  Antisense strand to SEQ ID NO: 1620359
ucucacgugucagaaucgg

SEQ ID NO: 1620361 - RNA, 19 nt, Artificial Sequence
  Description of Artificial Sequence: Synthetic oligonucleotide
  Sense strand starting at position 2133 of SEQ ID NO: 1560730
ccaaucagaaguugucgaa

SEQ ID NO: 1620362 - RNA, 19 nt, Artificial Sequence
  Description of Artificial Sequence: Synthetic oligonucleotide
  Antisense strand to SEQ ID NO: 1620361
uucgacaacuucugauugg

SEQ ID NO: 1620363 - RNA, 19 nt, Artificial Sequence
  Description of Artificial Sequence: Synthetic oligonucleotide
  Sense strand starting at position 2137 of SEQ ID NO: 1560730
ucagaaguugucgaagggu

SEQ ID NO: 1620364 - RNA, 19 nt, Artificial Sequence
  Description of Artificial Sequence: Synthetic oligonucleotide
  Antisense strand to SEQ ID NO: 1620363
acccuucgacaacuucuga

SEQ ID NO: 1620365 - RNA, 19 nt, Artificial Sequence
  Description of Artificial Sequence: Synthetic oligonucleotide
  Sense strand starting at position 2308 of SEQ ID NO: 1560730
cgcuuugugcgcaaggcau

SEQ ID NO: 1620366 - RNA, 19 nt, Artificial Sequence
  Description of Artificial Sequence: Synthetic oligonucleotide
  Antisense strand to SEQ ID NO: 1620365
augccuugcgcacaaagcg

SEQ ID NO: 1620367 - RNA, 19 nt, Artificial Sequence
  Description of Artificial Sequence: Synthetic oligonucleotide
  Sense strand starting at position 2489 of SEQ ID NO: 1560730
ggugugggccgugauacua

SEQ ID NO: 1620368 - RNA, 19 nt, Artificial Sequence
  Description of Artificial Sequence: Synthetic oligonucleotide
  Antisense strand to SEQ ID NO: 1620367
uaguaucacggcccacacc

SEQ ID NO: 1620369 - RNA, 19 nt, Artificial Sequence
  Description of Artificial Sequence: Synthetic oligonucleotide
  Sense strand starting at position 2498 of SEQ ID NO: 1560730
cgugauacuaucggaauaa

SEQ ID NO: 1620370 - RNA, 19 nt, Artificial Sequence
  Description of Artificial Sequence: Synthetic oligonucleotide
  Antisense strand to SEQ ID NO: 1620369
uuauuccgauaguaucacg

SEQ ID NO: 1620371 - RNA, 19 nt, Artificial Sequence
  Description of Artificial Sequence: Synthetic oligonucleotide
  Sense strand starting at position 2509 of SEQ ID NO: 1560730
cggaauaacaaugaucguu

SEQ ID NO: 1620372 - RNA, 19 nt, Artificial Sequence
  Description of Artificial Sequence: Synthetic oligonucleotide
  Antisense strand to SEQ ID NO: 1620371
aacgaucauuguuauuccg

SEQ ID NO: 1620373 - RNA, 19 nt, Artificial Sequence
  Description of Artificial Sequence: Synthetic oligonucleotide
  Sense strand starting at position 2518 of SEQ ID NO: 1560730
aaugaucguuuaucaagca

SEQ ID NO: 1620374 - RNA, 19 nt, Artificial Sequence
  Description of Artificial Sequence: Synthetic oligonucleotide
  Antisense strand to SEQ ID NO: 1620373
ugcuugauaaacgaucauu

SEQ ID NO: 1620375 - RNA, 19 nt, Artificial Sequence
  Description of Artificial Sequence: Synthetic oligonucleotide
  Sense strand starting at position 2605 of SEQ ID NO: 1560730
gcccuugaaauuggugcua

SEQ ID NO: 1620376 - RNA, 19 nt, Artificial Sequence
  Description of Artificial Sequence: Synthetic oligonucleotide
  Antisense strand to SEQ ID NO: 1620375
uagcaccaauuucaagggc

SEQ ID NO: 1620377 - RNA, 19 nt, Artificial Sequence
  Description of Artificial Sequence: Synthetic oligonucleotide
  Sense strand starting at position 2661 of SEQ ID NO: 1560730
uuagaaagaggguguuaau

SEQ ID NO: 1620378 - RNA, 19 nt, Artificial Sequence
  Description of Artificial Sequence: Synthetic oligonucleotide
  Antisense strand to SEQ ID NO: 1620377
auuaacacccucuuucuaa

SEQ ID NO: 1620379 - RNA, 19 nt, Artificial Sequence
  Description of Artificial Sequence: Synthetic oligonucleotide
  Sense strand starting at position 2668 of SEQ ID NO: 1560730
gaggguguuaauugcagaa

SEQ ID NO: 1620380 - RNA, 19 nt, Artificial Sequence
  Description of Artificial Sequence: Synthetic oligonucleotide
  Antisense strand to SEQ ID NO: 1620379
uucugcaauuaacacccuc

SEQ ID NO: 1620381 - RNA, 19 nt, Artificial Sequence
  Description of Artificial Sequence: Synthetic oligonucleotide
  Sense strand starting at position 2672 of SEQ ID NO: 1560730
guguuaauugcagaaaguc

SEQ ID NO: 1620382 - RNA, 19 nt, Artificial Sequence
  Description of Artificial Sequence: Synthetic oligonucleotide
  Antisense strand to SEQ ID NO: 1620381
gacuuucugcaauuaacac

SEQ ID NO: 1620383 - RNA, 19 nt, Artificial Sequence
  Description of Artificial Sequence: Synthetic oligonucleotide
  Sense strand starting at position 3491 of SEQ ID NO: 1560730
cuggccauccuauauaaga

SEQ ID NO: 1620384 - RNA, 19 nt, Artificial Sequence
  Description of Artificial Sequence: Synthetic oligonucleotide
  Antisense strand to SEQ ID NO: 1620383
ucuuauauaggauggccag

SEQ ID NO: 1620385 - RNA, 19 nt, Artificial Sequence
  Description of Artificial Sequence: Synthetic oligonucleotide
  Sense strand starting at position 3554 of SEQ ID NO: 1560730
uucucauagcacugggagu

SEQ ID NO: 1620386 - RNA, 19 nt, Artificial Sequence
  Description of Artificial Sequence: Synthetic oligonucleotide
  Antisense strand to SEQ ID NO: 1620385
acucccagugcuaugagaa

SEQ ID NO: 1620387 - RNA, 19 nt, Artificial Sequence
  Description of Artificial Sequence: Synthetic oligonucleotide
  Sense strand starting at position 3565 of SEQ ID NO: 1560730
cugggaguguuugcuaauu

SEQ ID NO: 1620388 - RNA, 19 nt, Artificial Sequence
  Description of Artificial Sequence: Synthetic oligonucleotide
  Antisense strand to SEQ ID NO: 1620387
aauuagcaaacacucccag

SEQ ID NO: 1620389 - RNA, 19 nt, Artificial Sequence
  Description of Artificial Sequence: Synthetic oligonucleotide
  Sense strand starting at position 3701 of SEQ ID NO: 1560730
uguugaguaaaugguaaug

SEQ ID NO: 1620390 - RNA, 19 nt, Artificial Sequence
  Description of Artificial Sequence: Synthetic oligonucleotide
  Antisense strand to SEQ ID NO: 1620389
cauuaccauuuacucaaca

SEQ ID NO: 1620391 - RNA, 19 nt, Artificial Sequence
  Description of Artificial Sequence: Synthetic oligonucleotide
  Sense strand starting at position 3713 of SEQ ID NO: 1560730
gguaaugagugcuuguauu

SEQ ID NO: 1620392 - RNA, 19 nt, Artificial Sequence
  Description of Artificial Sequence: Synthetic oligonucleotide
  Antisense strand to SEQ ID NO: 1620391
aauacaagcacucauuacc

SEQ ID NO: 1620393 - RNA, 19 nt, Artificial Sequence
  Description of Artificial Sequence: Synthetic oligonucleotide
  Sense strand starting at position 3723 of SEQ ID NO: 1560730
gcuuguauugaguggauua

SEQ ID NO: 1620394 - RNA, 19 nt, Artificial Sequence
  Description of Artificial Sequence: Synthetic oligonucleotide
  Antisense strand to SEQ ID NO: 1620393
uaauccacucaauacaagc

SEQ ID NO: 1620395 - RNA, 19 nt, Artificial Sequence
  Description of Artificial Sequence: Synthetic oligonucleotide
  Sense strand starting at position 3724 of SEQ ID NO: 1560730
cuuguauugaguggauuaa

SEQ ID NO: 1620396 - RNA, 19 nt, Artificial Sequence
  Description of Artificial Sequence: Synthetic oligonucleotide
  Antisense strand to SEQ ID NO: 1620395
uuaauccacucaauacaag

SEQ ID NO: 1620397 - RNA, 19 nt, Artificial Sequence
  Description of Artificial Sequence: Synthetic oligonucleotide
  Sense strand starting at position 3725 of SEQ ID NO: 1560730
uuguauugaguggauuaag

SEQ ID NO: 1620398 - RNA, 19 nt, Artificial Sequence
  Description of Artificial Sequence: Synthetic oligonucleotide
  Antisense strand to SEQ ID NO: 1620397
cuuaauccacucaauacaa

SEQ ID NO: 1620399 - RNA, 19 nt, Artificial Sequence
  Description of Artificial Sequence: Synthetic oligonucleotide
  Sense strand starting at position 3743 of SEQ ID NO: 1560730
gugaauuagugccuacaaa

SEQ ID NO: 1620400 - RNA, 19 nt, Artificial Sequence
  Description of Artificial Sequence: Synthetic oligonucleotide
  Antisense strand to SEQ ID NO: 1620399
uuuguaggcacuaauucac

SEQ ID NO: 1620401 - RNA, 19 nt, Artificial Sequence
  Description of Artificial Sequence: Synthetic oligonucleotide
  Sense strand starting at position 3744 of SEQ ID NO: 1560730
ugaauuagugccuacaaag

SEQ ID NO: 1620402 - RNA, 19 nt, Artificial Sequence
  Description of Artificial Sequence: Synthetic oligonucleotide
  Antisense strand to SEQ ID NO: 1620401
cuuuguaggcacuaauuca

SEQ ID NO: 1620403 - RNA, 19 nt, Artificial Sequence
  Description of Artificial Sequence: Synthetic oligonucleotide
  Sense strand starting at position 92 of SEQ ID NO: 1560731
uagggcucaugguuucuaa

SEQ ID NO: 1620404 - RNA, 19 nt, Artificial Sequence
  Description of Artificial Sequence: Synthetic oligonucleotide
  Antisense strand to SEQ ID NO: 1620403
uuagaaaccaugagcccua

SEQ ID NO: 1620405 - RNA, 19 nt, Artificial Sequence
  Description of Artificial Sequence: Synthetic oligonucleotide
  Sense strand starting at position 223 of SEQ ID NO: 1560731
accacuccuccaggaagau

SEQ ID NO: 1620406 - RNA, 19 nt, Artificial Sequence
  Description of Artificial Sequence: Synthetic oligonucleotide
  Antisense strand to SEQ ID NO: 1620405
aucuuccuggaggaguggu

SEQ ID NO: 1620407 - RNA, 19 nt, Artificial Sequence
  Description of Artificial Sequence: Synthetic oligonucleotide
  Sense strand starting at position 255 of SEQ ID NO: 1560731
gacagaggugggugucauu

SEQ ID NO: 1620408 - RNA, 19 nt, Artificial Sequence
  Description of Artificial Sequence: Synthetic oligonucleotide
  Antisense strand to SEQ ID NO: 1620407
aaugacacccaccucuguc

SEQ ID NO: 1620409 - RNA, 19 nt, Artificial Sequence
  Description of Artificial Sequence: Synthetic oligonucleotide
  Sense strand starting at position 283 of SEQ ID NO: 1560731
ucuaucauccucugcgaua

SEQ ID NO: 1620410 - RNA, 19 nt, Artificial Sequence
  Description of Artificial Sequence: Synthetic oligonucleotide
  Antisense strand to SEQ ID NO: 1620409
uaucgcagaggaugauaga

SEQ ID NO: 1620411 - RNA, 19 nt, Artificial Sequence
  Description of Artificial Sequence: Synthetic oligonucleotide
  Sense strand starting at position 284 of SEQ ID NO: 1560731
cuaucauccucugcgauac

SEQ ID NO: 1620412 - RNA, 19 nt, Artificial Sequence
  Description of Artificial Sequence: Synthetic oligonucleotide
  Antisense strand to SEQ ID NO: 1620411
guaucgcagaggaugauag

SEQ ID NO: 1620413 - RNA, 19 nt, Artificial Sequence
  Description of Artificial Sequence: Synthetic oligonucleotide
  Sense strand starting at position 334 of SEQ ID NO: 1560731
ccgacuguugacuaagcau

SEQ ID NO: 1620414 - RNA, 19 nt, Artificial Sequence
  Description of Artificial Sequence: Synthetic oligonucleotide
  Antisense strand to SEQ ID NO: 1620413
augcuuagucaacagucgg

SEQ ID NO: 1620415 - RNA, 19 nt, Artificial Sequence
  Description of Artificial Sequence: Synthetic oligonucleotide
  Sense strand starting at position 397 of SEQ ID NO: 1560731
gcaaaucacuuccuguguu

SEQ ID NO: 1620416 - RNA, 19 nt, Artificial Sequence
  Description of Artificial Sequence: Synthetic oligonucleotide
  Antisense strand to SEQ ID NO: 1620415
aacacaggaagugauuugc

SEQ ID NO: 1620417 - RNA, 19 nt, Artificial Sequence
  Description of Artificial Sequence: Synthetic oligonucleotide
  Sense strand starting at position 460 of SEQ ID NO: 1560731
gcuugcuucucaucuugga

SEQ ID NO: 1620418 - RNA, 19 nt, Artificial Sequence
  Description of Artificial Sequence: Synthetic oligonucleotide
  Antisense strand to SEQ ID NO: 1620417
uccaagaugagaagcaagc

SEQ ID NO: 1620419 - RNA, 19 nt, Artificial Sequence
  Description of Artificial Sequence: Synthetic oligonucleotide
  Sense strand starting at position 464 of SEQ ID NO: 1560731
gcuucucaucuuggaagaa

SEQ ID NO: 1620420 - RNA, 19 nt, Artificial Sequence
  Description of Artificial Sequence: Synthetic oligonucleotide
  Antisense strand to SEQ ID NO: 1620419
uucuuccaagaugagaagc

SEQ ID NO: 1620421 - RNA, 19 nt, Artificial Sequence
  Description of Artificial Sequence: Synthetic oligonucleotide
  Sense strand starting at position 515 of SEQ ID NO: 1560731
augguuugggugugaauuc

SEQ ID NO: 1620422 - RNA, 19 nt, Artificial Sequence
  Description of Artificial Sequence: Synthetic oligonucleotide
  Antisense strand to SEQ ID NO: 1620421
gaauucacacccaaaccau

SEQ ID NO: 1620423 - RNA, 19 nt, Artificial Sequence
  Description of Artificial Sequence: Synthetic oligonucleotide
  Sense strand starting at position 1022 of SEQ ID NO: 1560731
gcugaaguggucuacacag

SEQ ID NO: 1620424 - RNA, 19 nt, Artificial Sequence
  Description of Artificial Sequence: Synthetic oligonucleotide
  Antisense strand to SEQ ID NO: 1620423
cuguguagaccacuucagc

SEQ ID NO: 1620425 - RNA, 19 nt, Artificial Sequence
  Description of Artificial Sequence: Synthetic oligonucleotide
  Sense strand starting at position 1078 of SEQ ID NO: 1560731
uuacuuugcgucuuauggu

SEQ ID NO: 1620426 - RNA, 19 nt, Artificial Sequence
  Description of Artificial Sequence: Synthetic oligonucleotide
  Antisense strand to SEQ ID NO: 1620425
accauaagacgcaaaguaa

SEQ ID NO: 1620427 - RNA, 19 nt, Artificial Sequence
  Description of Artificial Sequence: Synthetic oligonucleotide
  Sense strand starting at position 1110 of SEQ ID NO: 1560731
uaggaauagcgccaugauc

SEQ ID NO: 1620428 - RNA, 19 nt, Artificial Sequence
  Description of Artificial Sequence: Synthetic oligonucleotide
  Antisense strand to SEQ ID NO: 1620427
gaucauggcgcuauuccua

SEQ ID NO: 1620429 - RNA, 19 nt, Artificial Sequence
  Description of Artificial Sequence: Synthetic oligonucleotide
  Sense strand starting at position 1112 of SEQ ID NO: 1560731
ggaauagcgccaugaucac

SEQ ID NO: 1620430 - RNA, 19 nt, Artificial Sequence
  Description of Artificial Sequence: Synthetic oligonucleotide
  Antisense strand to SEQ ID NO: 1620429
gugaucauggcgcuauucc

SEQ ID NO: 1620431 - RNA, 19 nt, Artificial Sequence
  Description of Artificial Sequence: Synthetic oligonucleotide
  Sense strand starting at position 1143 of SEQ ID NO: 1560731
guugcuaucaucgacagac

SEQ ID NO: 1620432 - RNA, 19 nt, Artificial Sequence
  Description of Artificial Sequence: Synthetic oligonucleotide
  Antisense strand to SEQ ID NO: 1620431
gucugucgaugauagcaac

SEQ ID NO: 1620433 - RNA, 19 nt, Artificial Sequence
  Description of Artificial Sequence: Synthetic oligonucleotide
  Sense strand starting at position 1317 of SEQ ID NO: 1560731
ucgcuuguuagacauagcu

SEQ ID NO: 1620434 - RNA, 19 nt, Artificial Sequence
  Description of Artificial Sequence: Synthetic oligonucleotide
  Antisense strand to SEQ ID NO: 1620433
agcuaugucuaacaagcga

SEQ ID NO: 1620435 - RNA, 19 nt, Artificial Sequence
  Description of Artificial Sequence: Synthetic oligonucleotide
  Sense strand starting at position 1416 of SEQ ID NO: 1560731
uccgcaucuagacggauuu

SEQ ID NO: 1620436 - RNA, 19 nt, Artificial Sequence
  Description of Artificial Sequence: Synthetic oligonucleotide
  Antisense strand to SEQ ID NO: 1620435
aaauccgucuagaugcgga

SEQ ID NO: 1620437 - RNA, 19 nt, Artificial Sequence
  Description of Artificial Sequence: Synthetic oligonucleotide
  Sense strand starting at position 1439 of SEQ ID NO: 1560731
auaugacaucugugggaac

SEQ ID NO: 1620438 - RNA, 19 nt, Artificial Sequence
  Description of Artificial Sequence: Synthetic oligonucleotide
  Antisense strand to SEQ ID NO: 1620437
guucccacagaugucauau

SEQ ID NO: 1620439 - RNA, 19 nt, Artificial Sequence
  Description of Artificial Sequence: Synthetic oligonucleotide
  Sense strand starting at position 1571 of SEQ ID NO: 1560731
cccugcagacucugugauu

SEQ ID NO: 1620440 - RNA, 19 nt, Artificial Sequence
  Description of Artificial Sequence: Synthetic oligonucleotide
  Antisense strand to SEQ ID NO: 1620439
aaucacagagucugcaggg

SEQ ID NO: 1620441 - RNA, 19 nt, Artificial Sequence
  Description of Artificial Sequence: Synthetic oligonucleotide
  Sense strand starting at position 1676 of SEQ ID NO: 1560731
ggagcuugcucccugguaa

SEQ ID NO: 1620442 - RNA, 19 nt, Artificial Sequence
  Description of Artificial Sequence: Synthetic oligonucleotide
  Antisense strand to SEQ ID NO: 1620441
uuaccagggagcaagcucc

SEQ ID NO: 1620443 - RNA, 19 nt, Artificial Sequence
  Description of Artificial Sequence: Synthetic oligonucleotide
  Sense strand starting at position 1677 of SEQ ID NO: 1560731
gagcuugcucccugguaag

SEQ ID NO: 1620444 - RNA, 19 nt, Artificial Sequence
  Description of Artificial Sequence: Synthetic oligonucleotide
  Antisense strand to SEQ ID NO: 1620443
cuuaccagggagcaagcuc

SEQ ID NO: 1620445 - RNA, 19 nt, Artificial Sequence
  Description of Artificial Sequence: Synthetic oligonucleotide
  Sense strand starting at position 1895 of SEQ ID NO: 1560731
uccugaaugggucgugaug

SEQ ID NO: 1620446 - RNA, 19 nt, Artificial Sequence
  Description of Artificial Sequence: Synthetic oligonucleotide
  Antisense strand to SEQ ID NO: 1620445
caucacgacccauucagga

SEQ ID NO: 1620447 - RNA, 19 nt, Artificial Sequence
  Description of Artificial Sequence: Synthetic oligonucleotide
  Sense strand starting at position 1986 of SEQ ID NO: 1560731
ggcuuuaguuccucuuaca

SEQ ID NO: 1620448 - RNA, 19 nt, Artificial Sequence
  Description of Artificial Sequence: Synthetic oligonucleotide
  Antisense strand to SEQ ID NO: 1620447
uguaagaggaacuaaagcc

SEQ ID NO: 1620449 - RNA, 19 nt, Artificial Sequence
  Description of Artificial Sequence: Synthetic oligonucleotide
  Sense strand starting at position 3015 of SEQ ID NO: 1560731
ucagaagucacacguguuu

SEQ ID NO: 1620450 - RNA, 19 nt, Artificial Sequence
  Description of Artificial Sequence: Synthetic oligonucleotide
  Antisense strand to SEQ ID NO: 1620449
aaacacgugugacuucuga

SEQ ID NO: 1620451 - RNA, 19 nt, Artificial Sequence
  Description of Artificial Sequence: Synthetic oligonucleotide
  Sense strand starting at position 3070 of SEQ ID NO: 1560731
ucugaaaggucccugacuu

SEQ ID NO: 1620452 - RNA, 19 nt, Artificial Sequence
  Description of Artificial Sequence: Synthetic oligonucleotide
  Antisense strand to SEQ ID NO: 1620451
aagucagggaccuuucaga

SEQ ID NO: 1620453 - RNA, 19 nt, Artificial Sequence
  Description of Artificial Sequence: Synthetic oligonucleotide
  Sense strand starting at position 3081 of SEQ ID NO: 1560731
ccugacuuuggaugucaca

SEQ ID NO: 1620454 - RNA, 19 nt, Artificial Sequence
  Description of Artificial Sequence: Synthetic oligonucleotide
  Antisense strand to SEQ ID NO: 1620453
ugugacauccaaagucagg

SEQ ID NO: 1620455 - RNA, 19 nt, Artificial Sequence
  Description of Artificial Sequence: Synthetic oligonucleotide
  Sense strand starting at position 3124 of SEQ ID NO: 1560731
ggcuacuuccuggaugacu

SEQ ID NO: 1620456 - RNA, 19 nt, Artificial Sequence
  Description of Artificial Sequence: Synthetic oligonucleotide
  Antisense strand to SEQ ID NO: 1620455
agucauccaggaaguagcc

SEQ ID NO: 1620457 - RNA, 19 nt, Artificial Sequence
  Description of Artificial Sequence: Synthetic oligonucleotide
  Sense strand starting at position 3126 of SEQ ID NO: 1560731
cuacuuccuggaugacuua

SEQ ID NO: 1620458 - RNA, 19 nt, Artificial Sequence
  Description of Artificial Sequence: Synthetic oligonucleotide
  Antisense strand to SEQ ID NO: 1620457
uaagucauccaggaaguag

SEQ ID NO: 1620459 - RNA, 19 nt, Artificial Sequence
  Description of Artificial Sequence: Synthetic oligonucleotide
  Sense strand starting at position 3221 of SEQ ID NO: 1560731
ugagcuggucuuugggaca

SEQ ID NO: 1620460 - RNA, 19 nt, Artificial Sequence
  Description of Artificial Sequence: Synthetic oligonucleotide
  Antisense strand to SEQ ID NO: 1620459
ugucccaaagaccagcuca

SEQ ID NO: 1620461 - RNA, 19 nt, Artificial Sequence
  Description of Artificial Sequence: Synthetic oligonucleotide
  Sense strand starting at position 3260 of SEQ ID NO: 1560731
ccucuugacaugugaggaa

SEQ ID NO: 1620462 - RNA, 19 nt, Artificial Sequence
  Description of Artificial Sequence: Synthetic oligonucleotide
  Antisense strand to SEQ ID NO: 1620461
uuccucacaugucaagagg

SEQ ID NO: 1620463 - RNA, 19 nt, Artificial Sequence
  Description of Artificial Sequence: Synthetic oligonucleotide
  Sense strand starting at position 3283 of SEQ ID NO: 1560731
caguucuaauagguuguua

SEQ ID NO: 1620464 - RNA, 19 nt, Artificial Sequence
  Description of Artificial Sequence: Synthetic oligonucleotide
  Antisense strand to SEQ ID NO: 1620463
uaacaaccuauuagaacug

SEQ ID NO: 1620465 - RNA, 19 nt, Artificial Sequence
  Description of Artificial Sequence: Synthetic oligonucleotide
  Sense strand starting at position 3285 of SEQ ID NO: 1560731
guucuaauagguuguuacu

SEQ ID NO: 1620466 - RNA, 19 nt, Artificial Sequence
  Description of Artificial Sequence: Synthetic oligonucleotide
  Antisense strand to SEQ ID NO: 1620465
aguaacaaccuauuagaac

SEQ ID NO: 1620467 - RNA, 19 nt, Artificial Sequence
  Description of Artificial Sequence: Synthetic oligonucleotide
  Sense strand starting at position 3385 of SEQ ID NO: 1560731
uuugguccagggcgauaaa

SEQ ID NO: 1620468 - RNA, 19 nt, Artificial Sequence
  Description of Artificial Sequence: Synthetic oligonucleotide
  Antisense strand to SEQ ID NO: 1620467
uuuaucgcccuggaccaaa

SEQ ID NO: 1620469 - RNA, 19 nt, Artificial Sequence
  Description of Artificial Sequence: Synthetic oligonucleotide
  Sense strand starting at position 3477 of SEQ ID NO: 1560731
ggaaucuccugagcgaguu

SEQ ID NO: 1620470 - RNA, 19 nt, Artificial Sequence
  Description of Artificial Sequence: Synthetic oligonucleotide
  Antisense strand to SEQ ID NO: 1620469
aacucgcucaggagauucc

SEQ ID NO: 1620471 - RNA, 19 nt, Artificial Sequence
  Description of Artificial Sequence: Synthetic oligonucleotide
  Sense strand starting at position 3478 of SEQ ID NO: 1560731
gaaucuccugagcgaguuu

SEQ ID NO: 1620472 - RNA, 19 nt, Artificial Sequence
  Description of Artificial Sequence: Synthetic oligonucleotide
  Antisense strand to SEQ ID NO: 1620471
aaacucgcucaggagauuc

SEQ ID NO: 1620473 - RNA, 19 nt, Artificial Sequence
  Description of Artificial Sequence: Synthetic oligonucleotide
  Sense strand starting at position 3485 of SEQ ID NO: 1560731
cugagcgaguuugcagaau

SEQ ID NO: 1620474 - RNA, 19 nt, Artificial Sequence
  Description of Artificial Sequence: Synthetic oligonucleotide
  Antisense strand to SEQ ID NO: 1620473
auucugcaaacucgcucag

SEQ ID NO: 1620475 - RNA, 19 nt, Artificial Sequence
  Description of Artificial Sequence: Synthetic oligonucleotide
  Sense strand starting at position 3519 of SEQ ID NO: 1560731
augcaauucucagcaaugu

SEQ ID NO: 1620476 - RNA, 19 nt, Artificial Sequence
  Description of Artificial Sequence: Synthetic oligonucleotide
  Antisense strand to SEQ ID NO: 1620475
acauugcugagaauugcau

SEQ ID NO: 1620477 - RNA, 19 nt, Artificial Sequence
  Description of Artificial Sequence: Synthetic oligonucleotide
  Sense strand starting at position 3543 of SEQ ID NO: 1560731
ggcacucaagagugaauau

SEQ ID NO: 1620478 - RNA, 19 nt, Artificial Sequence
  Description of Artificial Sequence: Synthetic oligonucleotide
  Antisense strand to SEQ ID NO: 1620477
auauucacucuugagugcc

SEQ ID NO: 1620479 - RNA, 19 nt, Artificial Sequence
  Description of Artificial Sequence: Synthetic oligonucleotide
  Sense strand starting at position 3641 of SEQ ID NO: 1560731
gcgaguaagcuggaguuaa

SEQ ID NO: 1620480 - RNA, 19 nt, Artificial Sequence
  Description of Artificial Sequence: Synthetic oligonucleotide
  Antisense strand to SEQ ID NO: 1620479
uuaacuccagcuuacucgc

SEQ ID NO: 1620481 - RNA, 19 nt, Artificial Sequence
  Description of Artificial Sequence: Synthetic oligonucleotide
  Sense strand starting at position 3693 of SEQ ID NO: 1560731
augcuaagcgcucaagcaa

SEQ ID NO: 1620482 - RNA, 19 nt, Artificial Sequence
  Description of Artificial Sequence: Synthetic oligonucleotide
  Antisense strand to SEQ ID NO: 1620481
uugcuugagcgcuuagcau

SEQ ID NO: 1620483 - RNA, 19 nt, Artificial Sequence
  Description of Artificial Sequence: Synthetic oligonucleotide
  Sense strand starting at position 164 of SEQ ID NO: 1560732
ggcacagagacuugaccaa

SEQ ID NO: 1620484 - RNA, 19 nt, Artificial Sequence
  Description of Artificial Sequence: Synthetic oligonucleotide
  Antisense strand to SEQ ID NO: 1620483
uuggucaagucucugugcc

SEQ ID NO: 1620485 - RNA, 19 nt, Artificial Sequence
  Description of Artificial Sequence: Synthetic oligonucleotide
  Sense strand starting at position 320 of SEQ ID NO: 1560732
caauguuugcaggaggcau

SEQ ID NO: 1620486 - RNA, 19 nt, Artificial Sequence
  Description of Artificial Sequence: Synthetic oligonucleotide
  Antisense strand to SEQ ID NO: 1620485
augccuccugcaaacauug

SEQ ID NO: 1620487 - RNA, 19 nt, Artificial Sequence
  Description of Artificial Sequence: Synthetic oligonucleotide
  Sense strand starting at position 391 of SEQ ID NO: 1560732
uccuaaaggccaggauauu

SEQ ID NO: 1620488 - RNA, 19 nt, Artificial Sequence
  Description of Artificial Sequence: Synthetic oligonucleotide
  Antisense strand to SEQ ID NO: 1620487
aauauccuggccuuuagga

SEQ ID NO: 1620489 - RNA, 19 nt, Artificial Sequence
  Description of Artificial Sequence: Synthetic oligonucleotide
  Sense strand starting at position 470 of SEQ ID NO: 1560732
ucaucuccugaaugagcua

SEQ ID NO: 1620490 - RNA, 19 nt, Artificial Sequence
  Description of Artificial Sequence: Synthetic oligonucleotide
  Antisense strand to SEQ ID NO: 1620489
uagcucauucaggagauga

SEQ ID NO: 1620491 - RNA, 19 nt, Artificial Sequence
  Description of Artificial Sequence: Synthetic oligonucleotide
  Sense strand starting at position 473 of SEQ ID NO: 1560732
ucuccugaaugagcuauaa

SEQ ID NO: 1620492 - RNA, 19 nt, Artificial Sequence
  Description of Artificial Sequence: Synthetic oligonucleotide
  Antisense strand to SEQ ID NO: 1620491
uuauagcucauucaggaga

SEQ ID NO: 1620493 - RNA, 19 nt, Artificial Sequence
  Description of Artificial Sequence: Synthetic oligonucleotide
  Sense strand starting at position 565 of SEQ ID NO: 1560732
agaaaugaaugccaaucaa

SEQ ID NO: 1620494 - RNA, 19 nt, Artificial Sequence
  Description of Artificial Sequence: Synthetic oligonucleotide
  Antisense strand to SEQ ID NO: 1620493
uugauuggcauucauuucu

SEQ ID NO: 1620495 - RNA, 19 nt, Artificial Sequence
  Description of Artificial Sequence: Synthetic oligonucleotide
  Sense strand starting at position 626 of SEQ ID NO: 1560732
gccugucagaugugaauaa

SEQ ID NO: 1620496 - RNA, 19 nt, Artificial Sequence
  Description of Artificial Sequence: Synthetic oligonucleotide
  Antisense strand to SEQ ID NO: 1620495
uuauucacaucugacaggc

SEQ ID NO: 1620497 - RNA, 19 nt, Artificial Sequence
  Description of Artificial Sequence: Synthetic oligonucleotide
  Sense strand starting at position 630 of SEQ ID NO: 1560732
gucagaugugaauaacuuu

SEQ ID NO: 1620498 - RNA, 19 nt, Artificial Sequence
  Description of Artificial Sequence: Synthetic oligonucleotide
  Antisense strand to SEQ ID NO: 1620497
aaaguuauucacaucugac

SEQ ID NO: 1620499 - RNA, 19 nt, Artificial Sequence
  Description of Artificial Sequence: Synthetic oligonucleotide
  Sense strand starting at position 637 of SEQ ID NO: 1560732
gugaauaacuuuccuguag

SEQ ID NO: 1620500 - RNA, 19 nt, Artificial Sequence
  Description of Artificial Sequence: Synthetic oligonucleotide
  Antisense strand to SEQ ID NO: 1620499
cuacaggaaaguuauucac

SEQ ID NO: 1620501 - RNA, 19 nt, Artificial Sequence
  Description of Artificial Sequence: Synthetic oligonucleotide
  Sense strand starting at position 731 of SEQ ID NO: 1560732
gacucucuggcuggaaagu

SEQ ID NO: 1620502 - RNA, 19 nt, Artificial Sequence
  Description of Artificial Sequence: Synthetic oligonucleotide
  Antisense strand to SEQ ID NO: 1620501
acuuuccagccagagaguc

SEQ ID NO: 1620503 - RNA, 19 nt, Artificial Sequence
  Description of Artificial Sequence: Synthetic oligonucleotide
  Sense strand starting at position 949 of SEQ ID NO: 1560732
gcgacaguccuguacauga

SEQ ID NO: 1620504 - RNA, 19 nt, Artificial Sequence
  Description of Artificial Sequence: Synthetic oligonucleotide
  Antisense strand to SEQ ID NO: 1620503
ucauguacaggacugucgc

SEQ ID NO: 1620505 - RNA, 19 nt, Artificial Sequence
  Description of Artificial Sequence: Synthetic oligonucleotide
  Sense strand starting at position 1144 of SEQ ID NO: 1560732
ccagcuguuaagugugaag

SEQ ID NO: 1620506 - RNA, 19 nt, Artificial Sequence
  Description of Artificial Sequence: Synthetic oligonucleotide
  Antisense strand to SEQ ID NO: 1620505
cuucacacuuaacagcugg

SEQ ID NO: 1620507 - RNA, 19 nt, Artificial Sequence
  Description of Artificial Sequence: Synthetic oligonucleotide
  Sense strand starting at position 1295 of SEQ ID NO: 1560732
agccuacccucaguucuua

SEQ ID NO: 1620508 - RNA, 19 nt, Artificial Sequence
  Description of Artificial Sequence: Synthetic oligonucleotide
  Antisense strand to SEQ ID NO: 1620507
uaagaacugaggguaggcu

SEQ ID NO: 1620509 - RNA, 19 nt, Artificial Sequence
  Description of Artificial Sequence: Synthetic oligonucleotide
  Sense strand starting at position 1306 of SEQ ID NO: 1560732
aguucuuaccgugacuucu

SEQ ID NO: 1620510 - RNA, 19 nt, Artificial Sequence
  Description of Artificial Sequence: Synthetic oligonucleotide
  Antisense strand to SEQ ID NO: 1620509
agaagucacgguaagaacu

SEQ ID NO: 1620511 - RNA, 19 nt, Artificial Sequence
  Description of Artificial Sequence: Synthetic oligonucleotide
  Sense strand starting at position 1314 of SEQ ID NO: 1560732
ccgugacuucuacuccguu

SEQ ID NO: 1620512 - RNA, 19 nt, Artificial Sequence
  Description of Artificial Sequence: Synthetic oligonucleotide
  Antisense strand to SEQ ID NO: 1620511
aacggaguagaagucacgg

SEQ ID NO: 1620513 - RNA, 19 nt, Artificial Sequence
  Description of Artificial Sequence: Synthetic oligonucleotide
  Sense strand starting at position 2110 of SEQ ID NO: 1560732
ccuacuguccgacagauca

SEQ ID NO: 1620514 - RNA, 19 nt, Artificial Sequence
  Description of Artificial Sequence: Synthetic oligonucleotide
  Antisense strand to SEQ ID NO: 1620513
ugaucugucggacaguagg

SEQ ID NO: 1620515 - RNA, 19 nt, Artificial Sequence
  Description of Artificial Sequence: Synthetic oligonucleotide
  Sense strand starting at position 2647 of SEQ ID NO: 1560732
cgcuuuccuccgcuacgaa

SEQ ID NO: 1620516 - RNA, 19 nt, Artificial Sequence
  Description of Artificial Sequence: Synthetic oligonucleotide
  Antisense strand to SEQ ID NO: 1620515
uucguagcggaggaaagcg

SEQ ID NO: 1620517 - RNA, 19 nt, Artificial Sequence
  Description of Artificial Sequence: Synthetic oligonucleotide
  Sense strand starting at position 2709 of SEQ ID NO: 1560732
gcugaaacgcgcuuagauc

SEQ ID NO: 1620518 - RNA, 19 nt, Artificial Sequence
  Description of Artificial Sequence: Synthetic oligonucleotide
  Antisense strand to SEQ ID NO: 1620517
gaucuaagcgcguuucagc

SEQ ID NO: 1620519 - RNA, 19 nt, Artificial Sequence
  Description of Artificial Sequence: Synthetic oligonucleotide
  Sense strand starting at position 2748 of SEQ ID NO: 1560732
gaugucgcucuuggaauua

SEQ ID NO: 1620520 - RNA, 19 nt, Artificial Sequence
  Description of Artificial Sequence: Synthetic oligonucleotide
  Antisense strand to SEQ ID NO: 1620519
uaauuccaagagcgacauc

SEQ ID NO: 1620521 - RNA, 19 nt, Artificial Sequence
  Description of Artificial Sequence: Synthetic oligonucleotide
  Sense strand starting at position 2758 of SEQ ID NO: 1560732
uuggaauuaucguuaugca

SEQ ID NO: 1620522 - RNA, 19 nt, Artificial Sequence
  Description of Artificial Sequence: Synthetic oligonucleotide
  Antisense strand to SEQ ID NO: 1620521
ugcauaacgauaauuccaa

SEQ ID NO: 1620523 - RNA, 19 nt, Artificial Sequence
  Description of Artificial Sequence: Synthetic oligonucleotide
  Sense strand starting at position 2759 of SEQ ID NO: 1560732
uggaauuaucguuaugcag

SEQ ID NO: 1620524 - RNA, 19 nt, Artificial Sequence
  Description of Artificial Sequence: Synthetic oligonucleotide
  Antisense strand to SEQ ID NO: 1620523
cugcauaacgauaauucca

SEQ ID NO: 1620525 - RNA, 19 nt, Artificial Sequence
  Description of Artificial Sequence: Synthetic oligonucleotide
  Sense strand starting at position 2763 of SEQ ID NO: 1560732
auuaucguuaugcagugaa

SEQ ID NO: 1620526 - RNA, 19 nt, Artificial Sequence
  Description of Artificial Sequence: Synthetic oligonucleotide
  Antisense strand to SEQ ID NO: 1620525
uucacugcauaacgauaau

SEQ ID NO: 1620527 - RNA, 19 nt, Artificial Sequence
  Description of Artificial Sequence: Synthetic oligonucleotide
  Sense strand starting at position 2766 of SEQ ID NO: 1560732
aucguuaugcagugaacaa

SEQ ID NO: 1620528 - RNA, 19 nt, Artificial Sequence
  Description of Artificial Sequence: Synthetic oligonucleotide
  Antisense strand to SEQ ID NO: 1620527
uuguucacugcauaacgau

SEQ ID NO: 1620529 - RNA, 19 nt, Artificial Sequence
  Description of Artificial Sequence: Synthetic oligonucleotide
  Sense strand starting at position 2767 of SEQ ID NO: 1560732
ucguuaugcagugaacaag

SEQ ID NO: 1620530 - RNA, 19 nt, Artificial Sequence
  Description of Artificial Sequence: Synthetic oligonucleotide
  Antisense strand to SEQ ID NO: 1620529
cuuguucacugcauaacga

SEQ ID NO: 1620531 - RNA, 19 nt, Artificial Sequence
  Description of Artificial Sequence: Synthetic oligonucleotide
  Sense strand starting at position 2781 of SEQ ID NO: 1560732
acaaguguugggcgaccaa

SEQ ID NO: 1620532 - RNA, 19 nt, Artificial Sequence
  Description of Artificial Sequence: Synthetic oligonucleotide
  Antisense strand to SEQ ID NO: 1620531
uuggucgcccaacacuugu

SEQ ID NO: 1620533 - RNA, 19 nt, Artificial Sequence
  Description of Artificial Sequence: Synthetic oligonucleotide
  Sense strand starting at position 2920 of SEQ ID NO: 1560732
guugaauacugaccgagag

SEQ ID NO: 1620534 - RNA, 19 nt, Artificial Sequence
  Description of Artificial Sequence: Synthetic oligonucleotide
  Antisense strand to SEQ ID NO: 1620533
cucucggucaguauucaac

SEQ ID NO: 1620535 - RNA, 19 nt, Artificial Sequence
  Description of Artificial Sequence: Synthetic oligonucleotide
  Sense strand starting at position 2932 of SEQ ID NO: 1560732
ccgagagcuaggcaugaau

SEQ ID NO: 1620536 - RNA, 19 nt, Artificial Sequence
  Description of Artificial Sequence: Synthetic oligonucleotide
  Antisense strand to SEQ ID NO: 1620535
auucaugccuagcucucgg

SEQ ID NO: 1620537 - RNA, 19 nt, Artificial Sequence
  Description of Artificial Sequence: Synthetic oligonucleotide
  Sense strand starting at position 2934 of SEQ ID NO: 1560732
gagagcuaggcaugaauga

SEQ ID NO: 1620538 - RNA, 19 nt, Artificial Sequence
  Description of Artificial Sequence: Synthetic oligonucleotide
  Antisense strand to SEQ ID NO: 1620537
ucauucaugccuagcucuc

SEQ ID NO: 1620539 - RNA, 19 nt, Artificial Sequence
  Description of Artificial Sequence: Synthetic oligonucleotide
  Sense strand starting at position 2957 of SEQ ID NO: 1560732
gaggcuauauuugucuagu

SEQ ID NO: 1620540 - RNA, 19 nt, Artificial Sequence
  Description of Artificial Sequence: Synthetic oligonucleotide
  Antisense strand to SEQ ID NO: 1620539
acuagacaaauauagccuc

SEQ ID NO: 1620541 - RNA, 19 nt, Artificial Sequence
  Description of Artificial Sequence: Synthetic oligonucleotide
  Sense strand starting at position 2958 of SEQ ID NO: 1560732
aggcuauauuugucuaguu

SEQ ID NO: 1620542 - RNA, 19 nt, Artificial Sequence
  Description of Artificial Sequence: Synthetic oligonucleotide
  Antisense strand to SEQ ID NO: 1620541
aacuagacaaauauagccu

SEQ ID NO: 1620543 - RNA, 19 nt, Artificial Sequence
  Description of Artificial Sequence: Synthetic oligonucleotide
  Sense strand starting at position 3018 of SEQ ID NO: 1560732
aagugaaauuggccagcaa

SEQ ID NO: 1620544 - RNA, 19 nt, Artificial Sequence
  Description of Artificial Sequence: Synthetic oligonucleotide
  Antisense strand to SEQ ID NO: 1620543
uugcuggccaauuucacuu

SEQ ID NO: 1620545 - RNA, 19 nt, Artificial Sequence
  Description of Artificial Sequence: Synthetic oligonucleotide
  Sense strand starting at position 3057 of SEQ ID NO: 1560732
cuugccguaaccgauagau

SEQ ID NO: 1620546 - RNA, 19 nt, Artificial Sequence
  Description of Artificial Sequence: Synthetic oligonucleotide
  Antisense strand to SEQ ID NO: 1620545
aucuaucgguuacggcaag

SEQ ID NO: 1620547 - RNA, 19 nt, Artificial Sequence
  Description of Artificial Sequence: Synthetic oligonucleotide
  Sense strand starting at position 3059 of SEQ ID NO: 1560732
ugccguaaccgauagauug

SEQ ID NO: 1620548 - RNA, 19 nt, Artificial Sequence
  Description of Artificial Sequence: Synthetic oligonucleotide
  Antisense strand to SEQ ID NO: 1620547
caaucuaucgguuacggca

SEQ ID NO: 1620549 - RNA, 19 nt, Artificial Sequence
  Description of Artificial Sequence: Synthetic oligonucleotide
  Sense strand starting at position 3226 of SEQ ID NO: 1560732
ucucuuucuggcugugaga

SEQ ID NO: 1620550 - RNA, 19 nt, Artificial Sequence
  Description of Artificial Sequence: Synthetic oligonucleotide
  Antisense strand to SEQ ID NO: 1620549
ucucacagccagaaagaga

SEQ ID NO: 1620551 - RNA, 19 nt, Artificial Sequence
  Description of Artificial Sequence: Synthetic oligonucleotide
  Sense strand starting at position 3228 of SEQ ID NO: 1560732
ucuuucuggcugugagacu

SEQ ID NO: 1620552 - RNA, 19 nt, Artificial Sequence
  Description of Artificial Sequence: Synthetic oligonucleotide
  Antisense strand to SEQ ID NO: 1620551
agucucacagccagaaaga

SEQ ID NO: 1620553 - RNA, 19 nt, Artificial Sequence
  Description of Artificial Sequence: Synthetic oligonucleotide
  Sense strand starting at position 3371 of SEQ ID NO: 1560732
uggcgaacauuugcuaagu

SEQ ID NO: 1620554 - RNA, 19 nt, Artificial Sequence
  Description of Artificial Sequence: Synthetic oligonucleotide
  Antisense strand to SEQ ID NO: 1620553
acuuagcaaauguucgcca

SEQ ID NO: 1620555 - RNA, 19 nt, Artificial Sequence
  Description of Artificial Sequence: Synthetic oligonucleotide
  Sense strand starting at position 3372 of SEQ ID NO: 1560732
ggcgaacauuugcuaaguu

SEQ ID NO: 1620556 - RNA, 19 nt, Artificial Sequence
  Description of Artificial Sequence: Synthetic oligonucleotide
  Antisense strand to SEQ ID NO: 1620555
aacuuagcaaauguucgcc

SEQ ID NO: 1620557 - RNA, 19 nt, Artificial Sequence
  Description of Artificial Sequence: Synthetic oligonucleotide
  Sense strand starting at position 3422 of SEQ ID NO: 1560732
caacauugucugggucuca

SEQ ID NO: 1620558 - RNA, 19 nt, Artificial Sequence
  Description of Artificial Sequence: Synthetic oligonucleotide
  Antisense strand to SEQ ID NO: 1620557
ugagacccagacaauguug

SEQ ID NO: 1620559 - RNA, 19 nt, Artificial Sequence
  Description of Artificial Sequence: Synthetic oligonucleotide
  Sense strand starting at position 3683 of SEQ ID NO: 1560732
ugaugagucagcgauuccu

SEQ ID NO: 1620560 - RNA, 19 nt, Artificial Sequence
  Description of Artificial Sequence: Synthetic oligonucleotide
  Antisense strand to SEQ ID NO: 1620559
aggaaucgcugacucauca

SEQ ID NO: 1620561 - RNA, 19 nt, Artificial Sequence
  Description of Artificial Sequence: Synthetic oligonucleotide
  Sense strand starting at position 3709 of SEQ ID NO: 1560732
ggucccuucuuuccuauua

SEQ ID NO: 1620562 - RNA, 19 nt, Artificial Sequence
  Description of Artificial Sequence: Synthetic oligonucleotide
  Antisense strand to SEQ ID NO: 1620561
uaauaggaaagaagggacc

SEQ ID NO: 1620563 - RNA, 19 nt, Artificial Sequence
  Description of Artificial Sequence: Synthetic oligonucleotide
  Sense strand starting at position 54 of SEQ ID NO: 1560733
caggaaguuucuguaguca

SEQ ID NO: 1620564 - RNA, 19 nt, Artificial Sequence
  Description of Artificial Sequence: Synthetic oligonucleotide
  Antisense strand to SEQ ID NO: 1620563
ugacuacagaaacuuccug

SEQ ID NO: 1620565 - RNA, 19 nt, Artificial Sequence
  Description of Artificial Sequence: Synthetic oligonucleotide
  Sense strand starting at position 147 of SEQ ID NO: 1560733
agugaaauaguaugcaucu

SEQ ID NO: 1620566 - RNA, 19 nt, Artificial Sequence
  Description of Artificial Sequence: Synthetic oligonucleotide
  Antisense strand to SEQ ID NO: 1620565
agaugcauacuauuucacu

SEQ ID NO: 1620567 - RNA, 19 nt, Artificial Sequence
  Description of Artificial Sequence: Synthetic oligonucleotide
  Sense strand starting at position 148 of SEQ ID NO: 1560733
gugaaauaguaugcaucuu

SEQ ID NO: 1620568 - RNA, 19 nt, Artificial Sequence
  Description of Artificial Sequence: Synthetic oligonucleotide
  Antisense strand to SEQ ID NO: 1620567
aagaugcauacuauuucac

SEQ ID NO: 1620569 - RNA, 19 nt, Artificial Sequence
  Description of Artificial Sequence: Synthetic oligonucleotide
  Sense strand starting at position 156 of SEQ ID NO: 1560733
guaugcaucuuaccgcauu

SEQ ID NO: 1620570 - RNA, 19 nt, Artificial Sequence
  Description of Artificial Sequence: Synthetic oligonucleotide
  Antisense strand to SEQ ID NO: 1620569
aaugcgguaagaugcauac

SEQ ID NO: 1620571 - RNA, 19 nt, Artificial Sequence
  Description of Artificial Sequence: Synthetic oligonucleotide
  Sense strand starting at position 159 of SEQ ID NO: 1560733
ugcaucuuaccgcauugau

SEQ ID NO: 1620572 - RNA, 19 nt, Artificial Sequence
  Description of Artificial Sequence: Synthetic oligonucleotide
  Antisense strand to SEQ ID NO: 1620571
aucaaugcgguaagaugca

SEQ ID NO: 1620573 - RNA, 19 nt, Artificial Sequence
  Description of Artificial Sequence: Synthetic oligonucleotide
  Sense strand starting at position 162 of SEQ ID NO: 1560733
aucuuaccgcauugaugau

SEQ ID NO: 1620574 - RNA, 19 nt, Artificial Sequence
  Description of Artificial Sequence: Synthetic oligonucleotide
  Antisense strand to SEQ ID NO: 1620573
aucaucaaugcgguaagau

SEQ ID NO: 1620575 - RNA, 19 nt, Artificial Sequence
  Description of Artificial Sequence: Synthetic oligonucleotide
  Sense strand starting at position 168 of SEQ ID NO: 1560733
ccgcauugaugauucuauc

SEQ ID NO: 1620576 - RNA, 19 nt, Artificial Sequence
  Description of Artificial Sequence: Synthetic oligonucleotide
  Antisense strand to SEQ ID NO: 1620575
gauagaaucaucaaugcgg

SEQ ID NO: 1620577 - RNA, 19 nt, Artificial Sequence
  Description of Artificial Sequence: Synthetic oligonucleotide
  Sense strand starting at position 174 of SEQ ID NO: 1560733
ugaugauucuaucaagaac

SEQ ID NO: 1620578 - RNA, 19 nt, Artificial Sequence
  Description of Artificial Sequence: Synthetic oligonucleotide
  Antisense strand to SEQ ID NO: 1620577
guucuugauagaaucauca

SEQ ID NO: 1620579 - RNA, 19 nt, Artificial Sequence
  Description of Artificial Sequence: Synthetic oligonucleotide
  Sense strand starting at position 266 of SEQ ID NO: 1560733
cuuugaggugcagacuauu

SEQ ID NO: 1620580 - RNA, 19 nt, Artificial Sequence
  Description of Artificial Sequence: Synthetic oligonucleotide
  Antisense strand to SEQ ID NO: 1620579
aauagucugcaccucaaag

SEQ ID NO: 1620581 - RNA, 19 nt, Artificial Sequence
  Description of Artificial Sequence: Synthetic oligonucleotide
  Sense strand starting at position 319 of SEQ ID NO: 1560733
acaguaacuuacucagaug

SEQ ID NO: 1620582 - RNA, 19 nt, Artificial Sequence
  Description of Artificial Sequence: Synthetic oligonucleotide
  Antisense strand to SEQ ID NO: 1620581
caucugaguaaguuacugu

SEQ ID NO: 1620583 - RNA, 19 nt, Artificial Sequence
  Description of Artificial Sequence: Synthetic oligonucleotide
  Sense strand starting at position 322 of SEQ ID NO: 1560733
guaacuuacucagaugaca

SEQ ID NO: 1620584 - RNA, 19 nt, Artificial Sequence
  Description of Artificial Sequence: Synthetic oligonucleotide
  Antisense strand to SEQ ID NO: 1620583
ugucaucugaguaaguuac

SEQ ID NO: 1620585 - RNA, 19 nt, Artificial Sequence
  Description of Artificial Sequence: Synthetic oligonucleotide
  Sense strand starting at position 493 of SEQ ID NO: 1560733
acaguuacuagcuaucgga

SEQ ID NO: 1620586 - RNA, 19 nt, Artificial Sequence
  Description of Artificial Sequence: Synthetic oligonucleotide
  Antisense strand to SEQ ID NO: 1620585
uccgauagcuaguaacugu

SEQ ID NO: 1620587 - RNA, 19 nt, Artificial Sequence
  Description of Artificial Sequence: Synthetic oligonucleotide
  Sense strand starting at position 827 of SEQ ID NO: 1560733
ucuccucuuccgcggagaa

SEQ ID NO: 1620588 - RNA, 19 nt, Artificial Sequence
  Description of Artificial Sequence: Synthetic oligonucleotide
  Antisense strand to SEQ ID NO: 1620587
uucuccgcggaagaggaga

SEQ ID NO: 1620589 - RNA, 19 nt, Artificial Sequence
  Description of Artificial Sequence: Synthetic oligonucleotide
  Sense strand starting at position 828 of SEQ ID NO: 1560733
cuccucuuccgcggagaaa

SEQ ID NO: 1620590 - RNA, 19 nt, Artificial Sequence
  Description of Artificial Sequence: Synthetic oligonucleotide
  Antisense strand to SEQ ID NO: 1620589
uuucuccgcggaagaggag

SEQ ID NO: 1620591 - RNA, 19 nt, Artificial Sequence
  Description of Artificial Sequence: Synthetic oligonucleotide
  Sense strand starting at position 968 of SEQ ID NO: 1560733
uggugauaccguugaucuu

SEQ ID NO: 1620592 - RNA, 19 nt, Artificial Sequence
  Description of Artificial Sequence: Synthetic oligonucleotide
  Antisense strand to SEQ ID NO: 1620591
aagaucaacgguaucacca

SEQ ID NO: 1620593 - RNA, 19 nt, Artificial Sequence
  Description of Artificial Sequence: Synthetic oligonucleotide
  Sense strand starting at position 1088 of SEQ ID NO: 1560733
ggaucugguucucuucgaa

SEQ ID NO: 1620594 - RNA, 19 nt, Artificial Sequence
  Description of Artificial Sequence: Synthetic oligonucleotide
  Antisense strand to SEQ ID NO: 1620593
uucgaagagaaccagaucc

SEQ ID NO: 1620595 - RNA, 19 nt, Artificial Sequence
  Description of Artificial Sequence: Synthetic oligonucleotide
  Sense strand starting at position 1091 of SEQ ID NO: 1560733
ucugguucucuucgaauga

SEQ ID NO: 1620596 - RNA, 19 nt, Artificial Sequence
  Description of Artificial Sequence: Synthetic oligonucleotide
  Antisense strand to SEQ ID NO: 1620595
ucauucgaagagaaccaga

SEQ ID NO: 1620597 - RNA, 19 nt, Artificial Sequence
  Description of Artificial Sequence: Synthetic oligonucleotide
  Sense strand starting at position 1095 of SEQ ID NO: 1560733
guucucuucgaaugagaag

SEQ ID NO: 1620598 - RNA, 19 nt, Artificial Sequence
  Description of Artificial Sequence: Synthetic oligonucleotide
  Antisense strand to SEQ ID NO: 1620597
cuucucauucgaagagaac

SEQ ID NO: 1620599 - RNA, 19 nt, Artificial Sequence
  Description of Artificial Sequence: Synthetic oligonucleotide
  Sense strand starting at position 1367 of SEQ ID NO: 1560733
gucggaagcgccuaagagu

SEQ ID NO: 1620600 - RNA, 19 nt, Artificial Sequence
  Description of Artificial Sequence: Synthetic oligonucleotide
  Antisense strand to SEQ ID NO: 1620599
acucuuaggcgcuuccgac

SEQ ID NO: 1620601 - RNA, 19 nt, Artificial Sequence
  Description of Artificial Sequence: Synthetic oligonucleotide
  Sense strand starting at position 1438 of SEQ ID NO: 1560733
cgcugaagaguugauagaa

SEQ ID NO: 1620602 - RNA, 19 nt, Artificial Sequence
  Description of Artificial Sequence: Synthetic oligonucleotide
  Antisense strand to SEQ ID NO: 1620601
uucuaucaacucuucagcg

SEQ ID NO: 1620603 - RNA, 19 nt, Artificial Sequence
  Description of Artificial Sequence: Synthetic oligonucleotide
  Sense strand starting at position 1509 of SEQ ID NO: 1560733
ggaggugucugcaggaguu

SEQ ID NO: 1620604 - RNA, 19 nt, Artificial Sequence
  Description of Artificial Sequence: Synthetic oligonucleotide
  Antisense strand to SEQ ID NO: 1620603
aacuccugcagacaccucc

SEQ ID NO: 1620605 - RNA, 19 nt, Artificial Sequence
  Description of Artificial Sequence: Synthetic oligonucleotide
  Sense strand starting at position 1515 of SEQ ID NO: 1560733
gucugcaggaguuagagaa

SEQ ID NO: 1620606 - RNA, 19 nt, Artificial Sequence
  Description of Artificial Sequence: Synthetic oligonucleotide
  Antisense strand to SEQ ID NO: 1620605
uucucuaacuccugcagac

SEQ ID NO: 1620607 - RNA, 19 nt, Artificial Sequence
  Description of Artificial Sequence: Synthetic oligonucleotide
  Sense strand starting at position 1584 of SEQ ID NO: 1560733
gggucuuagaugcaugaag

SEQ ID NO: 1620608 - RNA, 19 nt, Artificial Sequence
  Description of Artificial Sequence: Synthetic oligonucleotide
  Antisense strand to SEQ ID NO: 1620607
cuucaugcaucuaagaccc

SEQ ID NO: 1620609 - RNA, 19 nt, Artificial Sequence
  Description of Artificial Sequence: Synthetic oligonucleotide
  Sense strand starting at position 1586 of SEQ ID NO: 1560733
gucuuagaugcaugaagau

SEQ ID NO: 1620610 - RNA, 19 nt, Artificial Sequence
  Description of Artificial Sequence: Synthetic oligonucleotide
  Antisense strand to SEQ ID NO: 1620609
aucuucaugcaucuaagac

SEQ ID NO: 1620611 - RNA, 19 nt, Artificial Sequence
  Description of Artificial Sequence: Synthetic oligonucleotide
  Sense strand starting at position 1691 of SEQ ID NO: 1560733
gucuguaagaccgauauga

SEQ ID NO: 1620612 - RNA, 19 nt, Artificial Sequence
  Description of Artificial Sequence: Synthetic oligonucleotide
  Antisense strand to SEQ ID NO: 1620611
ucauaucggucuuacagac

SEQ ID NO: 1620613 - RNA, 19 nt, Artificial Sequence
  Description of Artificial Sequence: Synthetic oligonucleotide
  Sense strand starting at position 1756 of SEQ ID NO: 1560733
uccuguaucacuggaagag

SEQ ID NO: 1620614 - RNA, 19 nt, Artificial Sequence
  Description of Artificial Sequence: Synthetic oligonucleotide
  Antisense strand to SEQ ID NO: 1620613
cucuuccagugauacagga

SEQ ID NO: 1620615 - RNA, 19 nt, Artificial Sequence
  Description of Artificial Sequence: Synthetic oligonucleotide
  Sense strand starting at position 1871 of SEQ ID NO: 1560733
cccguaucacaaggagaca

SEQ ID NO: 1620616 - RNA, 19 nt, Artificial Sequence
  Description of Artificial Sequence: Synthetic oligonucleotide
  Antisense strand to SEQ ID NO: 1620615
ugucuccuugugauacggg

SEQ ID NO: 1620617 - RNA, 19 nt, Artificial Sequence
  Description of Artificial Sequence: Synthetic oligonucleotide
  Sense strand starting at position 2339 of SEQ ID NO: 1560733
gagcuuggaugggagagau

SEQ ID NO: 1620618 - RNA, 19 nt, Artificial Sequence
  Description of Artificial Sequence: Synthetic oligonucleotide
  Antisense strand to SEQ ID NO: 1620617
aucucucccauccaagcuc

SEQ ID NO: 1620619 - RNA, 19 nt, Artificial Sequence
  Description of Artificial Sequence: Synthetic oligonucleotide
  Sense strand starting at position 2449 of SEQ ID NO: 1560733
gcgcuuugucuccuugaca

SEQ ID NO: 1620620 - RNA, 19 nt, Artificial Sequence
  Description of Artificial Sequence: Synthetic oligonucleotide
  Antisense strand to SEQ ID NO: 1620619
ugucaaggagacaaagcgc

SEQ ID NO: 1620621 - RNA, 19 nt, Artificial Sequence
  Description of Artificial Sequence: Synthetic oligonucleotide
  Sense strand starting at position 2450 of SEQ ID NO: 1560733
cgcuuugucuccuugacaa

SEQ ID NO: 1620622 - RNA, 19 nt, Artificial Sequence
  Description of Artificial Sequence: Synthetic oligonucleotide
  Antisense strand to SEQ ID NO: 1620621
uugucaaggagacaaagcg

SEQ ID NO: 1620623 - RNA, 19 nt, Artificial Sequence
  Description of Artificial Sequence: Synthetic oligonucleotide
  Sense strand starting at position 2827 of SEQ ID NO: 1560733
ggcugagaaguguguucgu

SEQ ID NO: 1620624 - RNA, 19 nt, Artificial Sequence
  Description of Artificial Sequence: Synthetic oligonucleotide
  Antisense strand to SEQ ID NO: 1620623
acgaacacacuucucagcc

SEQ ID NO: 1620625 - RNA, 19 nt, Artificial Sequence
  Description of Artificial Sequence: Synthetic oligonucleotide
  Sense strand starting at position 2830 of SEQ ID NO: 1560733
ugagaaguguguucguuag

SEQ ID NO: 1620626 - RNA, 19 nt, Artificial Sequence
  Description of Artificial Sequence: Synthetic oligonucleotide
  Antisense strand to SEQ ID NO: 1620625
cuaacgaacacacuucuca

SEQ ID NO: 1620627 - RNA, 19 nt, Artificial Sequence
  Description of Artificial Sequence: Synthetic oligonucleotide
  Sense strand starting at position 2832 of SEQ ID NO: 1560733
agaaguguguucguuagca

SEQ ID NO: 1620628 - RNA, 19 nt, Artificial Sequence
  Description of Artificial Sequence: Synthetic oligonucleotide
  Antisense strand to SEQ ID NO: 1620627
ugcuaacgaacacacuucu

SEQ ID NO: 1620629 - RNA, 19 nt, Artificial Sequence
  Description of Artificial Sequence: Synthetic oligonucleotide
  Sense strand starting at position 2834 of SEQ ID NO: 1560733
aaguguguucguuagcauc

SEQ ID NO: 1620630 - RNA, 19 nt, Artificial Sequence
  Description of Artificial Sequence: Synthetic oligonucleotide
  Antisense strand to SEQ ID NO: 1620629
gaugcuaacgaacacacuu

SEQ ID NO: 1620631 - RNA, 19 nt, Artificial Sequence
  Description of Artificial Sequence: Synthetic oligonucleotide
  Sense strand starting at position 2857 of SEQ ID NO: 1560733
aggaguccucaaggucauu

SEQ ID NO: 1620632 - RNA, 19 nt, Artificial Sequence
  Description of Artificial Sequence: Synthetic oligonucleotide
  Antisense strand to SEQ ID NO: 1620631
aaugaccuugaggacuccu

SEQ ID NO: 1620633 - RNA, 19 nt, Artificial Sequence
  Description of Artificial Sequence: Synthetic oligonucleotide
  Sense strand starting at position 3471 of SEQ ID NO: 1560733
caagacuacuggguagagu

SEQ ID NO: 1620634 - RNA, 19 nt, Artificial Sequence
  Description of Artificial Sequence: Synthetic oligonucleotide
  Antisense strand to SEQ ID NO: 1620633
acucuacccaguagucuug

SEQ ID NO: 1620635 - RNA, 19 nt, Artificial Sequence
  Description of Artificial Sequence: Synthetic oligonucleotide
  Sense strand starting at position 3636 of SEQ ID NO: 1560733
ggaagaugucuaggugaaa

SEQ ID NO: 1620636 - RNA, 19 nt, Artificial Sequence
  Description of Artificial Sequence: Synthetic oligonucleotide
  Antisense strand to SEQ ID NO: 1620635
uuucaccuagacaucuucc

SEQ ID NO: 1620637 - RNA, 19 nt, Artificial Sequence
  Description of Artificial Sequence: Synthetic oligonucleotide
  Sense strand starting at position 3637 of SEQ ID NO: 1560733
gaagaugucuaggugaaac

SEQ ID NO: 1620638 - RNA, 19 nt, Artificial Sequence
  Description of Artificial Sequence: Synthetic oligonucleotide
  Antisense strand to SEQ ID NO: 1620637
guuucaccuagacaucuuc

SEQ ID NO: 1620639 - RNA, 19 nt, Artificial Sequence
  Description of Artificial Sequence: Synthetic oligonucleotide
  Sense strand starting at position 3695 of SEQ ID NO: 1560733
ucagguaagauguggugaa

SEQ ID NO: 1620640 - RNA, 19 nt, Artificial Sequence
  Description of Artificial Sequence: Synthetic oligonucleotide
  Antisense strand to SEQ ID NO: 1620639
uucaccacaucuuaccuga

SEQ ID NO: 1620641 - RNA, 19 nt, Artificial Sequence
  Description of Artificial Sequence: Synthetic oligonucleotide
  Sense strand starting at position 3699 of SEQ ID NO: 1560733
guaagauguggugaaugua

SEQ ID NO: 1620642 - RNA, 19 nt, Artificial Sequence
  Description of Artificial Sequence: Synthetic oligonucleotide
  Antisense strand to SEQ ID NO: 1620641
uacauucaccacaucuuac

SEQ ID NO: 1620643 - RNA, 19 nt, Artificial Sequence
  Description of Artificial Sequence: Synthetic oligonucleotide
  Sense strand starting at position 68 of SEQ ID NO: 1560734
gugcaaagucucugacagu

SEQ ID NO: 1620644 - RNA, 19 nt, Artificial Sequence
  Description of Artificial Sequence: Synthetic oligonucleotide
  Antisense strand to SEQ ID NO: 1620643
acugucagagacuuugcac

SEQ ID NO: 1620645 - RNA, 19 nt, Artificial Sequence
  Description of Artificial Sequence: Synthetic oligonucleotide
  Sense strand starting at position 170 of SEQ ID NO: 1560734
gaucaugcgucacugcaga

SEQ ID NO: 1620646 - RNA, 19 nt, Artificial Sequence
  Description of Artificial Sequence: Synthetic oligonucleotide
  Antisense strand to SEQ ID NO: 1620645
ucugcagugacgcaugauc

SEQ ID NO: 1620647 - RNA, 19 nt, Artificial Sequence
  Description of Artificial Sequence: Synthetic oligonucleotide
  Sense strand starting at position 255 of SEQ ID NO: 1560734
uccggcuaauuucuuaauu

SEQ ID NO: 1620648 - RNA, 19 nt, Artificial Sequence
  Description of Artificial Sequence: Synthetic oligonucleotide
  Antisense strand to SEQ ID NO: 1620647
aauuaagaaauuagccgga

SEQ ID NO: 1620649 - RNA, 19 nt, Artificial Sequence
  Description of Artificial Sequence: Synthetic oligonucleotide
  Sense strand starting at position 470 of SEQ ID NO: 1560734
accucauuccugcgcuaca

SEQ ID NO: 1620650 - RNA, 19 nt, Artificial Sequence
  Description of Artificial Sequence: Synthetic oligonucleotide
  Antisense strand to SEQ ID NO: 1620649
uguagcgcaggaaugaggu

SEQ ID NO: 1620651 - RNA, 19 nt, Artificial Sequence
  Description of Artificial Sequence: Synthetic oligonucleotide
  Sense strand starting at position 492 of SEQ ID NO: 1560734
cucucuuuaccagguggau

SEQ ID NO: 1620652 - RNA, 19 nt, Artificial Sequence
  Description of Artificial Sequence: Synthetic oligonucleotide
  Antisense strand to SEQ ID NO: 1620651
auccaccugguaaagagag

SEQ ID NO: 1620653 - RNA, 19 nt, Artificial Sequence
  Description of Artificial Sequence: Synthetic oligonucleotide
  Sense strand starting at position 928 of SEQ ID NO: 1560734
cacugugccuucgagaacu

SEQ ID NO: 1620654 - RNA, 19 nt, Artificial Sequence
  Description of Artificial Sequence: Synthetic oligonucleotide
  Antisense strand to SEQ ID NO: 1620653
aguucucgaaggcacagug

SEQ ID NO: 1620655 - RNA, 19 nt, Artificial Sequence
  Description of Artificial Sequence: Synthetic oligonucleotide
  Sense strand starting at position 1306 of SEQ ID NO: 1560734
ggcaacgaguagugauuga

SEQ ID NO: 1620656 - RNA, 19 nt, Artificial Sequence
  Description of Artificial Sequence: Synthetic oligonucleotide
  Antisense strand to SEQ ID NO: 1620655
ucaaucacuacucguugcc

SEQ ID NO: 1620657 - RNA, 19 nt, Artificial Sequence
  Description of Artificial Sequence: Synthetic oligonucleotide
  Sense strand starting at position 1310 of SEQ ID NO: 1560734
acgaguagugauugacaag

SEQ ID NO: 1620658 - RNA, 19 nt, Artificial Sequence
  Description of Artificial Sequence: Synthetic oligonucleotide
  Antisense strand to SEQ ID NO: 1620657
cuugucaaucacuacucgu

SEQ ID NO: 1620659 - RNA, 19 nt, Artificial Sequence
  Description of Artificial Sequence: Synthetic oligonucleotide
  Sense strand starting at position 3211 of SEQ ID NO: 1560734
gacacaugcucacugagag

SEQ ID NO: 1620660 - RNA, 19 nt, Artificial Sequence
  Description of Artificial Sequence: Synthetic oligonucleotide
  Antisense strand to SEQ ID NO: 1620659
cucucagugagcauguguc

SEQ ID NO: 1620661 - RNA, 19 nt, Artificial Sequence
  Description of Artificial Sequence: Synthetic oligonucleotide
  Sense strand starting at position 3212 of SEQ ID NO: 1560734
acacaugcucacugagagu

SEQ ID NO: 1620662 - RNA, 19 nt, Artificial Sequence
  Description of Artificial Sequence: Synthetic oligonucleotide
  Antisense strand to SEQ ID NO: 1620661
acucucagugagcaugugu

SEQ ID NO: 1620663 - RNA, 19 nt, Artificial Sequence
  Description of Artificial Sequence: Synthetic oligonucleotide
  Sense strand starting at position 3215 of SEQ ID NO: 1560734
caugcucacugagagucau

SEQ ID NO: 1620664 - RNA, 19 nt, Artificial Sequence
  Description of Artificial Sequence: Synthetic oligonucleotide
  Antisense strand to SEQ ID NO: 1620663
augacucucagugagcaug

SEQ ID NO: 1620665 - RNA, 19 nt, Artificial Sequence
  Description of Artificial Sequence: Synthetic oligonucleotide
  Sense strand starting at position 3274 of SEQ ID NO: 1560734
gaaccuguucuccgggcua

SEQ ID NO: 1620666 - RNA, 19 nt, Artificial Sequence
  Description of Artificial Sequence: Synthetic oligonucleotide
  Antisense strand to SEQ ID NO: 1620665
uagcccggagaacagguuc

SEQ ID NO: 1620667 - RNA, 19 nt, Artificial Sequence
  Description of Artificial Sequence: Synthetic oligonucleotide
  Sense strand starting at position 3687 of SEQ ID NO: 1560734
gacauuaggcggcgagaaa

SEQ ID NO: 1620668 - RNA, 19 nt, Artificial Sequence
  Description of Artificial Sequence: Synthetic oligonucleotide
  Antisense strand to SEQ ID NO: 1620667
uuucucgccgccuaauguc

SEQ ID NO: 1620669 - RNA, 19 nt, Artificial Sequence
  Description of Artificial Sequence: Synthetic oligonucleotide
  Sense strand starting at position 3761 of SEQ ID NO: 1560734
cggccucguugccaaacua

SEQ ID NO: 1620670 - RNA, 19 nt, Artificial Sequence
  Description of Artificial Sequence: Synthetic oligonucleotide
  Antisense strand to SEQ ID NO: 1620669
uaguuuggcaacgaggccg

SEQ ID NO: 1620671 - RNA, 19 nt, Artificial Sequence
  Description of Artificial Sequence: Synthetic oligonucleotide
  Sense strand starting at position 102 of SEQ ID NO: 1560735
ugaccaggccuccgagaaa

SEQ ID NO: 1620672 - RNA, 19 nt, Artificial Sequence
  Description of Artificial Sequence: Synthetic oligonucleotide
  Antisense strand to SEQ ID NO: 1620671
uuucucggaggccugguca

SEQ ID NO: 1620673 - RNA, 19 nt, Artificial Sequence
  Description of Artificial Sequence: Synthetic oligonucleotide
  Sense strand starting at position 105 of SEQ ID NO: 1560735
ccaggccuccgagaaagau

SEQ ID NO: 1620674 - RNA, 19 nt, Artificial Sequence
  Description of Artificial Sequence: Synthetic oligonucleotide
  Antisense strand to SEQ ID NO: 1620673
aucuuucucggaggccugg

SEQ ID NO: 1620675 - RNA, 19 nt, Artificial Sequence
  Description of Artificial Sequence: Synthetic oligonucleotide
  Sense strand starting at position 282 of SEQ ID NO: 1560735
aggccacuugagugacuau

SEQ ID NO: 1620676 - RNA, 19 nt, Artificial Sequence
  Description of Artificial Sequence: Synthetic oligonucleotide
  Antisense strand to SEQ ID NO: 1620675
auagucacucaaguggccu

SEQ ID NO: 1620677 - RNA, 19 nt, Artificial Sequence
  Description of Artificial Sequence: Synthetic oligonucleotide
  Sense strand starting at position 343 of SEQ ID NO: 1560735
cugcucaugugaucugaga

SEQ ID NO: 1620678 - RNA, 19 nt, Artificial Sequence
  Description of Artificial Sequence: Synthetic oligonucleotide
  Antisense strand to SEQ ID NO: 1620677
ucucagaucacaugagcag

SEQ ID NO: 1620679 - RNA, 19 nt, Artificial Sequence
  Description of Artificial Sequence: Synthetic oligonucleotide
  Sense strand starting at position 345 of SEQ ID NO: 1560735
gcucaugugaucugagaca

SEQ ID NO: 1620680 - RNA, 19 nt, Artificial Sequence
  Description of Artificial Sequence: Synthetic oligonucleotide
  Antisense strand to SEQ ID NO: 1620679
ugucucagaucacaugagc

SEQ ID NO: 1620681 - RNA, 19 nt, Artificial Sequence
  Description of Artificial Sequence: Synthetic oligonucleotide
  Sense strand starting at position 491 of SEQ ID NO: 1560735
gagugucccagagguagau

SEQ ID NO: 1620682 - RNA, 19 nt, Artificial Sequence
  Description of Artificial Sequence: Synthetic oligonucleotide
  Antisense strand to SEQ ID NO: 1620681
aucuaccucugggacacuc

SEQ ID NO: 1620683 - RNA, 19 nt, Artificial Sequence
  Description of Artificial Sequence: Synthetic oligonucleotide
  Sense strand starting at position 520 of SEQ ID NO: 1560735
gggugugagugccugauuu

SEQ ID NO: 1620684 - RNA, 19 nt, Artificial Sequence
  Description of Artificial Sequence: Synthetic oligonucleotide
  Antisense strand to SEQ ID NO: 1620683
aaaucaggcacucacaccc

SEQ ID NO: 1620685 - RNA, 19 nt, Artificial Sequence
  Description of Artificial Sequence: Synthetic oligonucleotide
  Sense strand starting at position 524 of SEQ ID NO: 1560735
gugagugccugauuugauc

SEQ ID NO: 1620686 - RNA, 19 nt, Artificial Sequence
  Description of Artificial Sequence: Synthetic oligonucleotide
  Antisense strand to SEQ ID NO: 1620685
gaucaaaucaggcacucac

SEQ ID NO: 1620687 - RNA, 19 nt, Artificial Sequence
  Description of Artificial Sequence: Synthetic oligonucleotide
  Sense strand starting at position 818 of SEQ ID NO: 1560735
gcugccucccuguagauau

SEQ ID NO: 1620688 - RNA, 19 nt, Artificial Sequence
  Description of Artificial Sequence: Synthetic oligonucleotide
  Antisense strand to SEQ ID NO: 1620687
auaucuacagggaggcagc

SEQ ID NO: 1620689 - RNA, 19 nt, Artificial Sequence
  Description of Artificial Sequence: Synthetic oligonucleotide
  Sense strand starting at position 1054 of SEQ ID NO: 1560735
gggcgcaucuuaguauaua

SEQ ID NO: 1620690 - RNA, 19 nt, Artificial Sequence
  Description of Artificial Sequence: Synthetic oligonucleotide
  Antisense strand to SEQ ID NO: 1620689
uauauacuaagaugcgccc

SEQ ID NO: 1620691 - RNA, 19 nt, Artificial Sequence
  Description of Artificial Sequence: Synthetic oligonucleotide
  Sense strand starting at position 1223 of SEQ ID NO: 1560735
gaguccugaccucauguga

SEQ ID NO: 1620692 - RNA, 19 nt, Artificial Sequence
  Description of Artificial Sequence: Synthetic oligonucleotide
  Antisense strand to SEQ ID NO: 1620691
ucacaugaggucaggacuc

SEQ ID NO: 1620693 - RNA, 19 nt, Artificial Sequence
  Description of Artificial Sequence: Synthetic oligonucleotide
  Sense strand starting at position 1506 of SEQ ID NO: 1560735
acgagaaccuccucacuuu

SEQ ID NO: 1620694 - RNA, 19 nt, Artificial Sequence
  Description of Artificial Sequence: Synthetic oligonucleotide
  Antisense strand to SEQ ID NO: 1620693
aaagugaggagguucucgu

SEQ ID NO: 1620695 - RNA, 19 nt, Artificial Sequence
  Description of Artificial Sequence: Synthetic oligonucleotide
  Sense strand starting at position 1735 of SEQ ID NO: 1560735
uccuccucgguccgagaaa

SEQ ID NO: 1620696 - RNA, 19 nt, Artificial Sequence
  Description of Artificial Sequence: Synthetic oligonucleotide
  Antisense strand to SEQ ID NO: 1620695
uuucucggaccgaggagga

SEQ ID NO: 1620697 - RNA, 19 nt, Artificial Sequence
  Description of Artificial Sequence: Synthetic oligonucleotide
  Sense strand starting at position 2334 of SEQ ID NO: 1560735
gcaggcacugcguuacauu

SEQ ID NO: 1620698 - RNA, 19 nt, Artificial Sequence
  Description of Artificial Sequence: Synthetic oligonucleotide
  Antisense strand to SEQ ID NO: 1620697
aauguaacgcagugccugc

SEQ ID NO: 1620699 - RNA, 19 nt, Artificial Sequence
  Description of Artificial Sequence: Synthetic oligonucleotide
  Sense strand starting at position 2344 of SEQ ID NO: 1560735
cguuacauucuuuauggga

SEQ ID NO: 1620700 - RNA, 19 nt, Artificial Sequence
  Description of Artificial Sequence: Synthetic oligonucleotide
  Antisense strand to SEQ ID NO: 1620699
ucccauaaagaauguaacg

SEQ ID NO: 1620701 - RNA, 19 nt, Artificial Sequence
  Description of Artificial Sequence: Synthetic oligonucleotide
  Sense strand starting at position 2358 of SEQ ID NO: 1560735
ugggaauuagcucguuuaa

SEQ ID NO: 1620702 - RNA, 19 nt, Artificial Sequence
  Description of Artificial Sequence: Synthetic oligonucleotide
  Antisense strand to SEQ ID NO: 1620701
uuaaacgagcuaauuccca

SEQ ID NO: 1620703 - RNA, 19 nt, Artificial Sequence
  Description of Artificial Sequence: Synthetic oligonucleotide
  Sense strand starting at position 2360 of SEQ ID NO: 1560735
ggaauuagcucguuuaaac

SEQ ID NO: 1620704 - RNA, 19 nt, Artificial Sequence
  Description of Artificial Sequence: Synthetic oligonucleotide
  Antisense strand to SEQ ID NO: 1620703
guuuaaacgagcuaauucc

SEQ ID NO: 1620705 - RNA, 19 nt, Artificial Sequence
  Description of Artificial Sequence: Synthetic oligonucleotide
  Sense strand starting at position 2369 of SEQ ID NO: 1560735
ucguuuaaacuacacagua

SEQ ID NO: 1620706 - RNA, 19 nt, Artificial Sequence
  Description of Artificial Sequence: Synthetic oligonucleotide
  Antisense strand to SEQ ID NO: 1620705
uacuguguaguuuaaacga

SEQ ID NO: 1620707 - RNA, 19 nt, Artificial Sequence
  Description of Artificial Sequence: Synthetic oligonucleotide
  Sense strand starting at position 2759 of SEQ ID NO: 1560735
gaagaaagcuggucaagau

SEQ ID NO: 1620708 - RNA, 19 nt, Artificial Sequence
  Description of Artificial Sequence: Synthetic oligonucleotide
  Antisense strand to SEQ ID NO: 1620707
aucuugaccagcuuucuuc

SEQ ID NO: 1620709 - RNA, 19 nt, Artificial Sequence
  Description of Artificial Sequence: Synthetic oligonucleotide
  Sense strand starting at position 2768 of SEQ ID NO: 1560735
uggucaagaucaucacaca

SEQ ID NO: 1620710 - RNA, 19 nt, Artificial Sequence
  Description of Artificial Sequence: Synthetic oligonucleotide
  Antisense strand to SEQ ID NO: 1620709
ugugugaugaucuugacca

SEQ ID NO: 1620711 - RNA, 19 nt, Artificial Sequence
  Description of Artificial Sequence: Synthetic oligonucleotide
  Sense strand starting at position 2858 of SEQ ID NO: 1560735
ugaugcuuaccggaugcua

SEQ ID NO: 1620712 - RNA, 19 nt, Artificial Sequence
  Description of Artificial Sequence: Synthetic oligonucleotide
  Antisense strand to SEQ ID NO: 1620711
uagcauccgguaagcauca

SEQ ID NO: 1620713 - RNA, 19 nt, Artificial Sequence
  Description of Artificial Sequence: Synthetic oligonucleotide
  Sense strand starting at position 2871 of SEQ ID NO: 1560735
augcuagguucuguuagca

SEQ ID NO: 1620714 - RNA, 19 nt, Artificial Sequence
  Description of Artificial Sequence: Synthetic oligonucleotide
  Antisense strand to SEQ ID NO: 1620713
ugcuaacagaaccuagcau

SEQ ID NO: 1620715 - RNA, 19 nt, Artificial Sequence
  Description of Artificial Sequence: Synthetic oligonucleotide
  Sense strand starting at position 2897 of SEQ ID NO: 1560735
ugcacuaacucguuuacuu

SEQ ID NO: 1620716 - RNA, 19 nt, Artificial Sequence
  Description of Artificial Sequence: Synthetic oligonucleotide
  Antisense strand to SEQ ID NO: 1620715
aaguaaacgaguuagugca

SEQ ID NO: 1620717 - RNA, 19 nt, Artificial Sequence
  Description of Artificial Sequence: Synthetic oligonucleotide
  Sense strand starting at position 2970 of SEQ ID NO: 1560735
gcgguaacuuaaguucaga

SEQ ID NO: 1620718 - RNA, 19 nt, Artificial Sequence
  Description of Artificial Sequence: Synthetic oligonucleotide
  Antisense strand to SEQ ID NO: 1620717
ucugaacuuaaguuaccgc

SEQ ID NO: 1620719 - RNA, 19 nt, Artificial Sequence
  Description of Artificial Sequence: Synthetic oligonucleotide
  Sense strand starting at position 3080 of SEQ ID NO: 1560735
gagcgcuuacaauguuaga

SEQ ID NO: 1620720 - RNA, 19 nt, Artificial Sequence
  Description of Artificial Sequence: Synthetic oligonucleotide
  Antisense strand to SEQ ID NO: 1620719
ucuaacauuguaagcgcuc

SEQ ID NO: 1620721 - RNA, 19 nt, Artificial Sequence
  Description of Artificial Sequence: Synthetic oligonucleotide
  Sense strand starting at position 3095 of SEQ ID NO: 1560735
uagagugguucuuugcaca

SEQ ID NO: 1620722 - RNA, 19 nt, Artificial Sequence
  Description of Artificial Sequence: Synthetic oligonucleotide
  Antisense strand to SEQ ID NO: 1620721
ugugcaaagaaccacucua

SEQ ID NO: 1620723 - RNA, 19 nt, Artificial Sequence
  Description of Artificial Sequence: Synthetic oligonucleotide
  Sense strand starting at position 3109 of SEQ ID NO: 1560735
gcacacuuuccaggaaucu

SEQ ID NO: 1620724 - RNA, 19 nt, Artificial Sequence
  Description of Artificial Sequence: Synthetic oligonucleotide
  Antisense strand to SEQ ID NO: 1620723
agauuccuggaaagugugc

SEQ ID NO: 1620725 - RNA, 19 nt, Artificial Sequence
  Description of Artificial Sequence: Synthetic oligonucleotide
  Sense strand starting at position 3118 of SEQ ID NO: 1560735
ccaggaaucugucauuuaa

SEQ ID NO: 1620726 - RNA, 19 nt, Artificial Sequence
  Description of Artificial Sequence: Synthetic oligonucleotide
  Antisense strand to SEQ ID NO: 1620725
uuaaaugacagauuccugg

SEQ ID NO: 1620727 - RNA, 19 nt, Artificial Sequence
  Description of Artificial Sequence: Synthetic oligonucleotide
  Sense strand starting at position 3141 of SEQ ID NO: 1560735
ugcucuaucugagaaacca

SEQ ID NO: 1620728 - RNA, 19 nt, Artificial Sequence
  Description of Artificial Sequence: Synthetic oligonucleotide
  Antisense strand to SEQ ID NO: 1620727
ugguuucucagauagagca

SEQ ID NO: 1620729 - RNA, 19 nt, Artificial Sequence
  Description of Artificial Sequence: Synthetic oligonucleotide
  Sense strand starting at position 3216 of SEQ ID NO: 1560735
augugaugggacugagauu

SEQ ID NO: 1620730 - RNA, 19 nt, Artificial Sequence
  Description of Artificial Sequence: Synthetic oligonucleotide
  Antisense strand to SEQ ID NO: 1620729
aaucucagucccaucacau

SEQ ID NO: 1620731 - RNA, 19 nt, Artificial Sequence
  Description of Artificial Sequence: Synthetic oligonucleotide
  Sense strand starting at position 3264 of SEQ ID NO: 1560735
gagucauuccugcagggug

SEQ ID NO: 1620732 - RNA, 19 nt, Artificial Sequence
  Description of Artificial Sequence: Synthetic oligonucleotide
  Antisense strand to SEQ ID NO: 1620731
cacccugcaggaaugacuc

SEQ ID NO: 1620733 - RNA, 19 nt, Artificial Sequence
  Description of Artificial Sequence: Synthetic oligonucleotide
  Sense strand starting at position 3272 of SEQ ID NO: 1560735
ccugcagggugcucugaaa

SEQ ID NO: 1620734 - RNA, 19 nt, Artificial Sequence
  Description of Artificial Sequence: Synthetic oligonucleotide
  Antisense strand to SEQ ID NO: 1620733
uuucagagcacccugcagg

SEQ ID NO: 1620735 - RNA, 19 nt, Artificial Sequence
  Description of Artificial Sequence: Synthetic oligonucleotide
  Sense strand starting at position 3419 of SEQ ID NO: 1560735
gggauccacugugauuaac

SEQ ID NO: 1620736 - RNA, 19 nt, Artificial Sequence
  Description of Artificial Sequence: Synthetic oligonucleotide
  Antisense strand to SEQ ID NO: 1620735
guuaaucacaguggauccc

SEQ ID NO: 1620737 - RNA, 19 nt, Artificial Sequence
  Description of Artificial Sequence: Synthetic oligonucleotide
  Sense strand starting at position 3499 of SEQ ID NO: 1560735
caccguacguuuccucauu

SEQ ID NO: 1620738 - RNA, 19 nt, Artificial Sequence
  Description of Artificial Sequence: Synthetic oligonucleotide
  Antisense strand to SEQ ID NO: 1620737
aaugaggaaacguacggug

SEQ ID NO: 1620739 - RNA, 19 nt, Artificial Sequence
  Description of Artificial Sequence: Synthetic oligonucleotide
  Sense strand starting at position 3501 of SEQ ID NO: 1560735
ccguacguuuccucauuga

SEQ ID NO: 1620740 - RNA, 19 nt, Artificial Sequence
  Description of Artificial Sequence: Synthetic oligonucleotide
  Antisense strand to SEQ ID NO: 1620739
ucaaugaggaaacguacgg

SEQ ID NO: 1620741 - RNA, 19 nt, Artificial Sequence
  Description of Artificial Sequence: Synthetic oligonucleotide
  Sense strand starting at position 3578 of SEQ ID NO: 1560735
guccuaauucgggaaacgu

SEQ ID NO: 1620742 - RNA, 19 nt, Artificial Sequence
  Description of Artificial Sequence: Synthetic oligonucleotide
  Antisense strand to SEQ ID NO: 1620741
acguuucccgaauuaggac

SEQ ID NO: 1620743 - RNA, 19 nt, Artificial Sequence
  Description of Artificial Sequence: Synthetic oligonucleotide
  Sense strand starting at position 3591 of SEQ ID NO: 1560735
aaacgugcaccuugacuaa

SEQ ID NO: 1620744 - RNA, 19 nt, Artificial Sequence
  Description of Artificial Sequence: Synthetic oligonucleotide
  Antisense strand to SEQ ID NO: 1620743
uuagucaaggugcacguuu

SEQ ID NO: 1620745 - RNA, 19 nt, Artificial Sequence
  Description of Artificial Sequence: Synthetic oligonucleotide
  Sense strand starting at position 3734 of SEQ ID NO: 1560735
gggauaucagcuuaccgag

SEQ ID NO: 1620746 - RNA, 19 nt, Artificial Sequence
  Description of Artificial Sequence: Synthetic oligonucleotide
  Antisense strand to SEQ ID NO: 1620745
cucgguaagcugauauccc

SEQ ID NO: 1620747 - RNA, 19 nt, Artificial Sequence
  Description of Artificial Sequence: Synthetic oligonucleotide
  Sense strand starting at position 3779 of SEQ ID NO: 1560735
cauagauauguaggacauc

SEQ ID NO: 1620748 - RNA, 19 nt, Artificial Sequence
  Description of Artificial Sequence: Synthetic oligonucleotide
  Antisense strand to SEQ ID NO: 1620747
gauguccuacauaucuaug

SEQ ID NO: 1620749 - RNA, 19 nt, Artificial Sequence
  Description of Artificial Sequence: Synthetic oligonucleotide
  Sense strand starting at position 3881 of SEQ ID NO: 1560735
ggaugucucaugcaaggau

SEQ ID NO: 1620750 - RNA, 19 nt, Artificial Sequence
  Description of Artificial Sequence: Synthetic oligonucleotide
  Antisense strand to SEQ ID NO: 1620749
auccuugcaugagacaucc

SEQ ID NO: 1620751 - RNA, 19 nt, Artificial Sequence
  Description of Artificial Sequence: Synthetic oligonucleotide
  Sense strand starting at position 614 of SEQ ID NO: 1560736
gguuccuugacuugaacgu

SEQ ID NO: 1620752 - RNA, 19 nt, Artificial Sequence
  Description of Artificial Sequence: Synthetic oligonucleotide
  Antisense strand to SEQ ID NO: 1620751
acguucaagucaaggaacc

SEQ ID NO: 1620753 - RNA, 19 nt, Artificial Sequence
  Description of Artificial Sequence: Synthetic oligonucleotide
  Sense strand starting at position 671 of SEQ ID NO: 1560736
uuagucaacuaucacgauu

SEQ ID NO: 1620754 - RNA, 19 nt, Artificial Sequence
  Description of Artificial Sequence: Synthetic oligonucleotide
  Antisense strand to SEQ ID NO: 1620753
aaucgugauaguugacuaa

SEQ ID NO: 1620755 - RNA, 19 nt, Artificial Sequence
  Description of Artificial Sequence: Synthetic oligonucleotide
  Sense strand starting at position 702 of SEQ ID NO: 1560736
cgggagguggucgagagau

SEQ ID NO: 1620756 - RNA, 19 nt, Artificial Sequence
  Description of Artificial Sequence: Synthetic oligonucleotide
  Antisense strand to SEQ ID NO: 1620755
aucucucgaccaccucccg

SEQ ID NO: 1620757 - RNA, 19 nt, Artificial Sequence
  Description of Artificial Sequence: Synthetic oligonucleotide
  Sense strand starting at position 704 of SEQ ID NO: 1560736
ggagguggucgagagauau

SEQ ID NO: 1620758 - RNA, 19 nt, Artificial Sequence
  Description of Artificial Sequence: Synthetic oligonucleotide
  Antisense strand to SEQ ID NO: 1620757
auaucucucgaccaccucc

SEQ ID NO: 1620759 - RNA, 19 nt, Artificial Sequence
  Description of Artificial Sequence: Synthetic oligonucleotide
  Sense strand starting at position 708 of SEQ ID NO: 1560736
guggucgagagauaugcuu

SEQ ID NO: 1620760 - RNA, 19 nt, Artificial Sequence
  Description of Artificial Sequence: Synthetic oligonucleotide
  Antisense strand to SEQ ID NO: 1620759
aagcauaucucucgaccac

SEQ ID NO: 1620761 - RNA, 19 nt, Artificial Sequence
  Description of Artificial Sequence: Synthetic oligonucleotide
  Sense strand starting at position 710 of SEQ ID NO: 1560736
ggucgagagauaugcuucu

SEQ ID NO: 1620762 - RNA, 19 nt, Artificial Sequence
  Description of Artificial Sequence: Synthetic oligonucleotide
  Antisense strand to SEQ ID NO: 1620761
agaagcauaucucucgacc

SEQ ID NO: 1620763 - RNA, 19 nt, Artificial Sequence
  Description of Artificial Sequence: Synthetic oligonucleotide
  Sense strand starting at position 1005 of SEQ ID NO: 1560736
ggagaaggcuggucuuaag

SEQ ID NO: 1620764 - RNA, 19 nt, Artificial Sequence
  Description of Artificial Sequence: Synthetic oligonucleotide
  Antisense strand to SEQ ID NO: 1620763
cuuaagaccagccuucucc

SEQ ID NO: 1620765 - RNA, 19 nt, Artificial Sequence
  Description of Artificial Sequence: Synthetic oligonucleotide
  Sense strand starting at position 1016 of SEQ ID NO: 1560736
gucuuaagucgacauccca

SEQ ID NO: 1620766 - RNA, 19 nt, Artificial Sequence
  Description of Artificial Sequence: Synthetic oligonucleotide
  Antisense strand to SEQ ID NO: 1620765
ugggaugucgacuuaagac

SEQ ID NO: 1620767 - RNA, 19 nt, Artificial Sequence
  Description of Artificial Sequence: Synthetic oligonucleotide
  Sense strand starting at position 1035 of SEQ ID NO: 1560736
ucuugaaguucuugaguag

SEQ ID NO: 1620768 - RNA, 19 nt, Artificial Sequence
  Description of Artificial Sequence: Synthetic oligonucleotide
  Antisense strand to SEQ ID NO: 1620767
cuacucaagaacuucaaga

SEQ ID NO: 1620769 - RNA, 19 nt, Artificial Sequence
  Description of Artificial Sequence: Synthetic oligonucleotide
  Sense strand starting at position 1038 of SEQ ID NO: 1560736
ugaaguucuugaguaggca

SEQ ID NO: 1620770 - RNA, 19 nt, Artificial Sequence
  Description of Artificial Sequence: Synthetic oligonucleotide
  Antisense strand to SEQ ID NO: 1620769
ugccuacucaagaacuuca

SEQ ID NO: 1620771 - RNA, 19 nt, Artificial Sequence
  Description of Artificial Sequence: Synthetic oligonucleotide
  Sense strand starting at position 1109 of SEQ ID NO: 1560736
cguggaauccuggagguuc

SEQ ID NO: 1620772 - RNA, 19 nt, Artificial Sequence
  Description of Artificial Sequence: Synthetic oligonucleotide
  Antisense strand to SEQ ID NO: 1620771
gaaccuccaggauuccacg

SEQ ID NO: 1620773 - RNA, 19 nt, Artificial Sequence
  Description of Artificial Sequence: Synthetic oligonucleotide
  Sense strand starting at position 1666 of SEQ ID NO: 1560736
gugucuucagcugguguga

SEQ ID NO: 1620774 - RNA, 19 nt, Artificial Sequence
  Description of Artificial Sequence: Synthetic oligonucleotide
  Antisense strand to SEQ ID NO: 1620773
ucacaccagcugaagacac

SEQ ID NO: 1620775 - RNA, 19 nt, Artificial Sequence
  Description of Artificial Sequence: Synthetic oligonucleotide
  Sense strand starting at position 1797 of SEQ ID NO: 1560736
ggacuuggcuccucaaucu

SEQ ID NO: 1620776 - RNA, 19 nt, Artificial Sequence
  Description of Artificial Sequence: Synthetic oligonucleotide
  Antisense strand to SEQ ID NO: 1620775
agauugaggagccaagucc

SEQ ID NO: 1620777 - RNA, 19 nt, Artificial Sequence
  Description of Artificial Sequence: Synthetic oligonucleotide
  Sense strand starting at position 1990 of SEQ ID NO: 1560736
aggcguuucccagagcaga

SEQ ID NO: 1620778 - RNA, 19 nt, Artificial Sequence
  Description of Artificial Sequence: Synthetic oligonucleotide
  Antisense strand to SEQ ID NO: 1620777
ucugcucugggaaacgccu

SEQ ID NO: 1620779 - RNA, 19 nt, Artificial Sequence
  Description of Artificial Sequence: Synthetic oligonucleotide
  Sense strand starting at position 2035 of SEQ ID NO: 1560736
cccagagacucuucuaagu

SEQ ID NO: 1620780 - RNA, 19 nt, Artificial Sequence
  Description of Artificial Sequence: Synthetic oligonucleotide
  Antisense strand to SEQ ID NO: 1620779
acuuagaagagucucuggg

SEQ ID NO: 1620781 - RNA, 19 nt, Artificial Sequence
  Description of Artificial Sequence: Synthetic oligonucleotide
  Sense strand starting at position 2057 of SEQ ID NO: 1560736
gguggagcuuaggauuuaa

SEQ ID NO: 1620782 - RNA, 19 nt, Artificial Sequence
  Description of Artificial Sequence: Synthetic oligonucleotide
  Antisense strand to SEQ ID NO: 1620781
uuaaauccuaagcuccacc

SEQ ID NO: 1620783 - RNA, 19 nt, Artificial Sequence
  Description of Artificial Sequence: Synthetic oligonucleotide
  Sense strand starting at position 2181 of SEQ ID NO: 1560736
cucugugaccucugggaag

SEQ ID NO: 1620784 - RNA, 19 nt, Artificial Sequence
  Description of Artificial Sequence: Synthetic oligonucleotide
  Antisense strand to SEQ ID NO: 1620783
cuucccagaggucacagag

SEQ ID NO: 1620785 - RNA, 19 nt, Artificial Sequence
  Description of Artificial Sequence: Synthetic oligonucleotide
  Sense strand starting at position 2242 of SEQ ID NO: 1560736
gaaaguccaugucugcaaa

SEQ ID NO: 1620786 - RNA, 19 nt, Artificial Sequence
  Description of Artificial Sequence: Synthetic oligonucleotide
  Antisense strand to SEQ ID NO: 1620785
uuugcagacauggacuuuc

SEQ ID NO: 1620787 - RNA, 19 nt, Artificial Sequence
  Description of Artificial Sequence: Synthetic oligonucleotide
  Sense strand starting at position 2245 of SEQ ID NO: 1560736
aguccaugucugcaaauau

SEQ ID NO: 1620788 - RNA, 19 nt, Artificial Sequence
  Description of Artificial Sequence: Synthetic oligonucleotide
  Antisense strand to SEQ ID NO: 1620787
auauuugcagacauggacu

SEQ ID NO: 1620789 - RNA, 19 nt, Artificial Sequence
  Description of Artificial Sequence: Synthetic oligonucleotide
  Sense strand starting at position 2835 of SEQ ID NO: 1560736
agagaaagauaugaagcuu

SEQ ID NO: 1620790 - RNA, 19 nt, Artificial Sequence
  Description of Artificial Sequence: Synthetic oligonucleotide
  Antisense strand to SEQ ID NO: 1620789
aagcuucauaucuuucucu

SEQ ID NO: 1620791 - RNA, 19 nt, Artificial Sequence
  Description of Artificial Sequence: Synthetic oligonucleotide
  Sense strand starting at position 2862 of SEQ ID NO: 1560736
uaaggaauguauccaaggu

SEQ ID NO: 1620792 - RNA, 19 nt, Artificial Sequence
  Description of Artificial Sequence: Synthetic oligonucleotide
  Antisense strand to SEQ ID NO: 1620791
accuuggauacauuccuua

SEQ ID NO: 1620793 - RNA, 19 nt, Artificial Sequence
  Description of Artificial Sequence: Synthetic oligonucleotide
  Sense strand starting at position 2866 of SEQ ID NO: 1560736
gaauguauccaaggucaca

SEQ ID NO: 1620794 - RNA, 19 nt, Artificial Sequence
  Description of Artificial Sequence: Synthetic oligonucleotide
  Antisense strand to SEQ ID NO: 1620793
ugugaccuuggauacauuc

SEQ ID NO: 1620795 - RNA, 19 nt, Artificial Sequence
  Description of Artificial Sequence: Synthetic oligonucleotide
  Sense strand starting at position 2911 of SEQ ID NO: 1560736
ucauaaucacucugggaac

SEQ ID NO: 1620796 - RNA, 19 nt, Artificial Sequence
  Description of Artificial Sequence: Synthetic oligonucleotide
  Antisense strand to SEQ ID NO: 1620795
guucccagagugauuauga

SEQ ID NO: 1620797 - RNA, 19 nt, Artificial Sequence
  Description of Artificial Sequence: Synthetic oligonucleotide
  Sense strand starting at position 2925 of SEQ ID NO: 1560736
ggaacugggaauugauguu

SEQ ID NO: 1620798 - RNA, 19 nt, Artificial Sequence
  Description of Artificial Sequence: Synthetic oligonucleotide
  Antisense strand to SEQ ID NO: 1620797
aacaucaauucccaguucc

SEQ ID NO: 1620799 - RNA, 19 nt, Artificial Sequence
  Description of Artificial Sequence: Synthetic oligonucleotide
  Sense strand starting at position 3103 of SEQ ID NO: 1560736
agacccuguuucuacauau

SEQ ID NO: 1620800 - RNA, 19 nt, Artificial Sequence
  Description of Artificial Sequence: Synthetic oligonucleotide
  Antisense strand to SEQ ID NO: 1620799
auauguagaaacagggucu

SEQ ID NO: 1620801 - RNA, 19 nt, Artificial Sequence
  Description of Artificial Sequence: Synthetic oligonucleotide
  Sense strand starting at position 3155 of SEQ ID NO: 1560736
cuguaauccuagcuaguga

SEQ ID NO: 1620802 - RNA, 19 nt, Artificial Sequence
  Description of Artificial Sequence: Synthetic oligonucleotide
  Antisense strand to SEQ ID NO: 1620801
ucacuagcuaggauuacag

SEQ ID NO: 1620803 - RNA, 19 nt, Artificial Sequence
  Description of Artificial Sequence: Synthetic oligonucleotide
  Sense strand starting at position 3753 of SEQ ID NO: 1560736
cauauugggugcuggaaau

SEQ ID NO: 1620804 - RNA, 19 nt, Artificial Sequence
  Description of Artificial Sequence: Synthetic oligonucleotide
  Antisense strand to SEQ ID NO: 1620803
auuuccagcacccaauaug

SEQ ID NO: 1620805 - RNA, 19 nt, Artificial Sequence
  Description of Artificial Sequence: Synthetic oligonucleotide
  Sense strand starting at position 3763 of SEQ ID NO: 1560736
gcuggaaauucagcaguga

SEQ ID NO: 1620806 - RNA, 19 nt, Artificial Sequence
  Description of Artificial Sequence: Synthetic oligonucleotide
  Antisense strand to SEQ ID NO: 1620805
ucacugcugaauuuccagc

SEQ ID NO: 1620807 - RNA, 19 nt, Artificial Sequence
  Description of Artificial Sequence: Synthetic oligonucleotide
  Sense strand starting at position 3824 of SEQ ID NO: 1560736
gcgaccaguaaaugagaaa

SEQ ID NO: 1620808 - RNA, 19 nt, Artificial Sequence
  Description of Artificial Sequence: Synthetic oligonucleotide
  Antisense strand to SEQ ID NO: 1620807
uuucucauuuacuggucgc

SEQ ID NO: 1620809 - RNA, 19 nt, Artificial Sequence
  Description of Artificial Sequence: Synthetic oligonucleotide
  Sense strand starting at position 3869 of SEQ ID NO: 1560736
cugugaaccggguguucua

SEQ ID NO: 1620810 - RNA, 19 nt, Artificial Sequence
  Description of Artificial Sequence: Synthetic oligonucleotide
  Antisense strand to SEQ ID NO: 1620809
uagaacacccgguucacag

SEQ ID NO: 1620811 - RNA, 19 nt, Artificial Sequence
  Description of Artificial Sequence: Synthetic oligonucleotide
  Sense strand starting at position 3921 of SEQ ID NO: 1560736
ugagaccacuaagaagaau

SEQ ID NO: 1620812 - RNA, 19 nt, Artificial Sequence
  Description of Artificial Sequence: Synthetic oligonucleotide
  Antisense strand to SEQ ID NO: 1620811
auucuucuuaguggucuca

SEQ ID NO: 1620813 - RNA, 19 nt, Artificial Sequence
  Description of Artificial Sequence: Synthetic oligonucleotide
  Sense strand starting at position 3932 of SEQ ID NO: 1560736
agaagaaucuuccaggaag

SEQ ID NO: 1620814 - RNA, 19 nt, Artificial Sequence
  Description of Artificial Sequence: Synthetic oligonucleotide
  Antisense strand to SEQ ID NO: 1620813
cuuccuggaagauucuucu

SEQ ID NO: 1620815 - RNA, 19 nt, Artificial Sequence
  Description of Artificial Sequence: Synthetic oligonucleotide
  Sense strand starting at position 397 of SEQ ID NO: 1560737
ucaccuaagccguguuuga

SEQ ID NO: 1620816 - RNA, 19 nt, Artificial Sequence
  Description of Artificial Sequence: Synthetic oligonucleotide
  Antisense strand to SEQ ID NO: 1620815
ucaaacacggcuuagguga

SEQ ID NO: 1620817 - RNA, 19 nt, Artificial Sequence
  Description of Artificial Sequence: Synthetic oligonucleotide
  Sense strand starting at position 435 of SEQ ID NO: 1560737
guaagacccuguuucuaug

SEQ ID NO: 1620818 - RNA, 19 nt, Artificial Sequence
  Description of Artificial Sequence: Synthetic oligonucleotide
  Antisense strand to SEQ ID NO: 1620817
cauagaaacagggucuuac

SEQ ID NO: 1620819 - RNA, 19 nt, Artificial Sequence
  Description of Artificial Sequence: Synthetic oligonucleotide
  Sense strand starting at position 442 of SEQ ID NO: 1560737
ccuguuucuaugggaggaa

SEQ ID NO: 1620820 - RNA, 19 nt, Artificial Sequence
  Description of Artificial Sequence: Synthetic oligonucleotide
  Antisense strand to SEQ ID NO: 1620819
uuccucccauagaaacagg

SEQ ID NO: 1620821 - RNA, 19 nt, Artificial Sequence
  Description of Artificial Sequence: Synthetic oligonucleotide
  Sense strand starting at position 443 of SEQ ID NO: 1560737
cuguuucuaugggaggaaa

SEQ ID NO: 1620822 - RNA, 19 nt, Artificial Sequence
  Description of Artificial Sequence: Synthetic oligonucleotide
  Antisense strand to SEQ ID NO: 1620821
uuuccucccauagaaacag

SEQ ID NO: 1620823 - RNA, 19 nt, Artificial Sequence
  Description of Artificial Sequence: Synthetic oligonucleotide
  Sense strand starting at position 1310 of SEQ ID NO: 1560737
agagaccugucucaagaua

SEQ ID NO: 1620824 - RNA, 19 nt, Artificial Sequence
  Description of Artificial Sequence: Synthetic oligonucleotide
  Antisense strand to SEQ ID NO: 1620823
uaucuugagacaggucucu

SEQ ID NO: 1620825 - RNA, 19 nt, Artificial Sequence
  Description of Artificial Sequence: Synthetic oligonucleotide
  Sense strand starting at position 2181 of SEQ ID NO: 1560737
gugggagguuccuuauugu

SEQ ID NO: 1620826 - RNA, 19 nt, Artificial Sequence
  Description of Artificial Sequence: Synthetic oligonucleotide
  Antisense strand to SEQ ID NO: 1620825
acaauaaggaaccucccac

SEQ ID NO: 1620827 - RNA, 19 nt, Artificial Sequence
  Description of Artificial Sequence: Synthetic oligonucleotide
  Sense strand starting at position 2184 of SEQ ID NO: 1560737
ggagguuccuuauugucac

SEQ ID NO: 1620828 - RNA, 19 nt, Artificial Sequence
  Description of Artificial Sequence: Synthetic oligonucleotide
  Antisense strand to SEQ ID NO: 1620827
gugacaauaaggaaccucc

SEQ ID NO: 1620829 - RNA, 19 nt, Artificial Sequence
  Description of Artificial Sequence: Synthetic oligonucleotide
  Sense strand starting at position 2185 of SEQ ID NO: 1560737
gagguuccuuauugucaca

SEQ ID NO: 1620830 - RNA, 19 nt, Artificial Sequence
  Description of Artificial Sequence: Synthetic oligonucleotide
  Antisense strand to SEQ ID NO: 1620829
ugugacaauaaggaaccuc

SEQ ID NO: 1620831 - RNA, 19 nt, Artificial Sequence
  Description of Artificial Sequence: Synthetic oligonucleotide
  Sense strand starting at position 2443 of SEQ ID NO: 1560737
agcaguuaccaguaacuua

SEQ ID NO: 1620832 - RNA, 19 nt, Artificial Sequence
  Description of Artificial Sequence: Synthetic oligonucleotide
  Antisense strand to SEQ ID NO: 1620831
uaaguuacugguaacugcu

SEQ ID NO: 1620833 - RNA, 19 nt, Artificial Sequence
  Description of Artificial Sequence: Synthetic oligonucleotide
  Sense strand starting at position 2581 of SEQ ID NO: 1560737
ccagcugucucugaaagga

SEQ ID NO: 1620834 - RNA, 19 nt, Artificial Sequence
  Description of Artificial Sequence: Synthetic oligonucleotide
  Antisense strand to SEQ ID NO: 1620833
uccuuucagagacagcugg

SEQ ID NO: 1620835 - RNA, 19 nt, Artificial Sequence
  Description of Artificial Sequence: Synthetic oligonucleotide
  Sense strand starting at position 2589 of SEQ ID NO: 1560737
cucugaaaggaguguggua

SEQ ID NO: 1620836 - RNA, 19 nt, Artificial Sequence
  Description of Artificial Sequence: Synthetic oligonucleotide
  Antisense strand to SEQ ID NO: 1620835
uaccacacuccuuucagag

SEQ ID NO: 1620837 - RNA, 19 nt, Artificial Sequence
  Description of Artificial Sequence: Synthetic oligonucleotide
  Sense strand starting at position 2602 of SEQ ID NO: 1560737
gugguagucccaggcucau

SEQ ID NO: 1620838 - RNA, 19 nt, Artificial Sequence
  Description of Artificial Sequence: Synthetic oligonucleotide
  Antisense strand to SEQ ID NO: 1620837
augagccugggacuaccac

SEQ ID NO: 1620839 - RNA, 19 nt, Artificial Sequence
  Description of Artificial Sequence: Synthetic oligonucleotide
  Sense strand starting at position 2672 of SEQ ID NO: 1560737
cuggucucccuccaagagu

SEQ ID NO: 1620840 - RNA, 19 nt, Artificial Sequence
  Description of Artificial Sequence: Synthetic oligonucleotide
  Antisense strand to SEQ ID NO: 1620839
acucuuggagggagaccag

SEQ ID NO: 1620841 - RNA, 19 nt, Artificial Sequence
  Description of Artificial Sequence: Synthetic oligonucleotide
  Sense strand starting at position 2698 of SEQ ID NO: 1560737
ucgguugucuuaguggaac

SEQ ID NO: 1620842 - RNA, 19 nt, Artificial Sequence
  Description of Artificial Sequence: Synthetic oligonucleotide
  Antisense strand to SEQ ID NO: 1620841
guuccacuaagacaaccga

SEQ ID NO: 1620843 - RNA, 19 nt, Artificial Sequence
  Description of Artificial Sequence: Synthetic oligonucleotide
  Sense strand starting at position 3208 of SEQ ID NO: 1560737
gaaagaacccucuggaguu

SEQ ID NO: 1620844 - RNA, 19 nt, Artificial Sequence
  Description of Artificial Sequence: Synthetic oligonucleotide
  Antisense strand to SEQ ID NO: 1620843
aacuccagaggguucuuuc

SEQ ID NO: 1620845 - RNA, 19 nt, Artificial Sequence
  Description of Artificial Sequence: Synthetic oligonucleotide
  Sense strand starting at position 3602 of SEQ ID NO: 1560737
aacgcuugacuccaguuau

SEQ ID NO: 1620846 - RNA, 19 nt, Artificial Sequence
  Description of Artificial Sequence: Synthetic oligonucleotide
  Antisense strand to SEQ ID NO: 1620845
auaacuggagucaagcguu

SEQ ID NO: 1620847 - RNA, 19 nt, Artificial Sequence
  Description of Artificial Sequence: Synthetic oligonucleotide
  Sense strand starting at position 3613 of SEQ ID NO: 1560737
ccaguuauuagaggcugca

SEQ ID NO: 1620848 - RNA, 19 nt, Artificial Sequence
  Description of Artificial Sequence: Synthetic oligonucleotide
  Antisense strand to SEQ ID NO: 1620847
ugcagccucuaauaacugg

SEQ ID NO: 1620849 - RNA, 19 nt, Artificial Sequence
  Description of Artificial Sequence: Synthetic oligonucleotide
  Sense strand starting at position 83 of SEQ ID NO: 1560738
gaaccuguuuccuucugga

SEQ ID NO: 1620850 - RNA, 19 nt, Artificial Sequence
  Description of Artificial Sequence: Synthetic oligonucleotide
  Antisense strand to SEQ ID NO: 1620849
uccagaaggaaacagguuc

SEQ ID NO: 1620851 - RNA, 19 nt, Artificial Sequence
  Description of Artificial Sequence: Synthetic oligonucleotide
  Sense strand starting at position 119 of SEQ ID NO: 1560738
cuaacacucucagagaugu

SEQ ID NO: 1620852 - RNA, 19 nt, Artificial Sequence
  Description of Artificial Sequence: Synthetic oligonucleotide
  Antisense strand to SEQ ID NO: 1620851
acaucucugagaguguuag

SEQ ID NO: 1620853 - RNA, 19 nt, Artificial Sequence
  Description of Artificial Sequence: Synthetic oligonucleotide
  Sense strand starting at position 178 of SEQ ID NO: 1560738
ggagguagguuugauuugu

SEQ ID NO: 1620854 - RNA, 19 nt, Artificial Sequence
  Description of Artificial Sequence: Synthetic oligonucleotide
  Antisense strand to SEQ ID NO: 1620853
acaaaucaaaccuaccucc

SEQ ID NO: 1620855 - RNA, 19 nt, Artificial Sequence
  Description of Artificial Sequence: Synthetic oligonucleotide
  Sense strand starting at position 182 of SEQ ID NO: 1560738
guagguuugauuugugauc

SEQ ID NO: 1620856 - RNA, 19 nt, Artificial Sequence
  Description of Artificial Sequence: Synthetic oligonucleotide
  Antisense strand to SEQ ID NO: 1620855
gaucacaaaucaaaccuac

SEQ ID NO: 1620857 - RNA, 19 nt, Artificial Sequence
  Description of Artificial Sequence: Synthetic oligonucleotide
  Sense strand starting at position 184 of SEQ ID NO: 1560738
agguuugauuugugaucuc

SEQ ID NO: 1620858 - RNA, 19 nt, Artificial Sequence
  Description of Artificial Sequence: Synthetic oligonucleotide
  Antisense strand to SEQ ID NO: 1620857
gagaucacaaaucaaaccu

SEQ ID NO: 1620859 - RNA, 19 nt, Artificial Sequence
  Description of Artificial Sequence: Synthetic oligonucleotide
  Sense strand starting at position 392 of SEQ ID NO: 1560738
cucagcaugucucugucau

SEQ ID NO: 1620860 - RNA, 19 nt, Artificial Sequence
  Description of Artificial Sequence: Synthetic oligonucleotide
  Antisense strand to SEQ ID NO: 1620859
augacagagacaugcugag

SEQ ID NO: 1620861 - RNA, 19 nt, Artificial Sequence
  Description of Artificial Sequence: Synthetic oligonucleotide
  Sense strand starting at position 393 of SEQ ID NO: 1560738
ucagcaugucucugucauc

SEQ ID NO: 1620862 - RNA, 19 nt, Artificial Sequence
  Description of Artificial Sequence: Synthetic oligonucleotide
  Antisense strand to SEQ ID NO: 1620861
gaugacagagacaugcuga

SEQ ID NO: 1620863 - RNA, 19 nt, Artificial Sequence
  Description of Artificial Sequence: Synthetic oligonucleotide
  Sense strand starting at position 398 of SEQ ID NO: 1560738
augucucugucaucccuau

SEQ ID NO: 1620864 - RNA, 19 nt, Artificial Sequence
  Description of Artificial Sequence: Synthetic oligonucleotide
  Antisense strand to SEQ ID NO: 1620863
auagggaugacagagacau

SEQ ID NO: 1620865 - RNA, 19 nt, Artificial Sequence
  Description of Artificial Sequence: Synthetic oligonucleotide
  Sense strand starting at position 410 of SEQ ID NO: 1560738
ucccuauuacucgaggauc

SEQ ID NO: 1620866 - RNA, 19 nt, Artificial Sequence
  Description of Artificial Sequence: Synthetic oligonucleotide
  Antisense strand to SEQ ID NO: 1620865
gauccucgaguaauaggga

SEQ ID NO: 1620867 - RNA, 19 nt, Artificial Sequence
  Description of Artificial Sequence: Synthetic oligonucleotide
  Sense strand starting at position 412 of SEQ ID NO: 1560738
ccuauuacucgaggaucac

SEQ ID NO: 1620868 - RNA, 19 nt, Artificial Sequence
  Description of Artificial Sequence: Synthetic oligonucleotide
  Antisense strand to SEQ ID NO: 1620867
gugauccucgaguaauagg

SEQ ID NO: 1620869 - RNA, 19 nt, Artificial Sequence
  Description of Artificial Sequence: Synthetic oligonucleotide
  Sense strand starting at position 471 of SEQ ID NO: 1560738
cccugucucucccuguuau

SEQ ID NO: 1620870 - RNA, 19 nt, Artificial Sequence
  Description of Artificial Sequence: Synthetic oligonucleotide
  Antisense strand to SEQ ID NO: 1620869
auaacagggagagacaggg

SEQ ID NO: 1620871 - RNA, 19 nt, Artificial Sequence
  Description of Artificial Sequence: Synthetic oligonucleotide
  Sense strand starting at position 857 of SEQ ID NO: 1560738
cugagaccuccacagucuu

SEQ ID NO: 1620872 - RNA, 19 nt, Artificial Sequence
  Description of Artificial Sequence: Synthetic oligonucleotide
  Antisense strand to SEQ ID NO: 1620871
aagacuguggaggucucag

SEQ ID NO: 1620873 - RNA, 19 nt, Artificial Sequence
  Description of Artificial Sequence: Synthetic oligonucleotide
  Sense strand starting at position 1307 of SEQ ID NO: 1560738
ccuuccucgccucaagaua

SEQ ID NO: 1620874 - RNA, 19 nt, Artificial Sequence
  Description of Artificial Sequence: Synthetic oligonucleotide
  Antisense strand to SEQ ID NO: 1620873
uaucuugaggcgaggaagg

SEQ ID NO: 1620875 - RNA, 19 nt, Artificial Sequence
  Description of Artificial Sequence: Synthetic oligonucleotide
  Sense strand starting at position 1660 of SEQ ID NO: 1560738
gcuuccuucccggaauugu

SEQ ID NO: 1620876 - RNA, 19 nt, Artificial Sequence
  Description of Artificial Sequence: Synthetic oligonucleotide
  Antisense strand to SEQ ID NO: 1620875
acaauuccgggaaggaagc

SEQ ID NO: 1620877 - RNA, 19 nt, Artificial Sequence
  Description of Artificial Sequence: Synthetic oligonucleotide
  Sense strand starting at position 2218 of SEQ ID NO: 1560738
uugacaguucugcgcagaa

SEQ ID NO: 1620878 - RNA, 19 nt, Artificial Sequence
  Description of Artificial Sequence: Synthetic oligonucleotide
  Antisense strand to SEQ ID NO: 1620877
uucugcgcagaacugucaa

SEQ ID NO: 1620879 - RNA, 19 nt, Artificial Sequence
  Description of Artificial Sequence: Synthetic oligonucleotide
  Sense strand starting at position 2220 of SEQ ID NO: 1560738
gacaguucugcgcagaacu

SEQ ID NO: 1620880 - RNA, 19 nt, Artificial Sequence
  Description of Artificial Sequence: Synthetic oligonucleotide
  Antisense strand to SEQ ID NO: 1620879
aguucugcgcagaacuguc

SEQ ID NO: 1620881 - RNA, 19 nt, Artificial Sequence
  Description of Artificial Sequence: Synthetic oligonucleotide
  Sense strand starting at position 2222 of SEQ ID NO: 1560738
caguucugcgcagaacuua

SEQ ID NO: 1620882 - RNA, 19 nt, Artificial Sequence
  Description of Artificial Sequence: Synthetic oligonucleotide
  Antisense strand to SEQ ID NO: 1620881
uaaguucugcgcagaacug

SEQ ID NO: 1620883 - RNA, 19 nt, Artificial Sequence
  Description of Artificial Sequence: Synthetic oligonucleotide
  Sense strand starting at position 2391 of SEQ ID NO: 1560738
uuaagagguucucuaacuc

SEQ ID NO: 1620884 - RNA, 19 nt, Artificial Sequence
  Description of Artificial Sequence: Synthetic oligonucleotide
  Antisense strand to SEQ ID NO: 1620883
gaguuagagaaccucuuaa

SEQ ID NO: 1620885 - RNA, 19 nt, Artificial Sequence
  Description of Artificial Sequence: Synthetic oligonucleotide
  Sense strand starting at position 2838 of SEQ ID NO: 1560738
ggaguuugagucuaguuca

SEQ ID NO: 1620886 - RNA, 19 nt, Artificial Sequence
  Description of Artificial Sequence: Synthetic oligonucleotide
  Antisense strand to SEQ ID NO: 1620885
ugaacuagacucaaacucc

SEQ ID NO: 1620887 - RNA, 19 nt, Artificial Sequence
  Description of Artificial Sequence: Synthetic oligonucleotide
  Sense strand starting at position 2841 of SEQ ID NO: 1560738
guuugagucuaguucaagu

SEQ ID NO: 1620888 - RNA, 19 nt, Artificial Sequence
  Description of Artificial Sequence: Synthetic oligonucleotide
  Antisense strand to SEQ ID NO: 1620887
acuugaacuagacucaaac

SEQ ID NO: 1620889 - RNA, 19 nt, Artificial Sequence
  Description of Artificial Sequence: Synthetic oligonucleotide
  Sense strand starting at position 2941 of SEQ ID NO: 1560738
uugaguugcugguuucuga

SEQ ID NO: 1620890 - RNA, 19 nt, Artificial Sequence
  Description of Artificial Sequence: Synthetic oligonucleotide
  Antisense strand to SEQ ID NO: 1620889
ucagaaaccagcaacucaa

SEQ ID NO: 1620891 - RNA, 19 nt, Artificial Sequence
  Description of Artificial Sequence: Synthetic oligonucleotide
  Sense strand starting at position 3082 of SEQ ID NO: 1560738
ggaaguauuccacacgugu

SEQ ID NO: 1620892 - RNA, 19 nt, Artificial Sequence
  Description of Artificial Sequence: Synthetic oligonucleotide
  Antisense strand to SEQ ID NO: 1620891
acacguguggaauacuucc

SEQ ID NO: 1620893 - RNA, 19 nt, Artificial Sequence
  Description of Artificial Sequence: Synthetic oligonucleotide
  Sense strand starting at position 3228 of SEQ ID NO: 1560738
augagccuauggucauaua

SEQ ID NO: 1620894 - RNA, 19 nt, Artificial Sequence
  Description of Artificial Sequence: Synthetic oligonucleotide
  Antisense strand to SEQ ID NO: 1620893
uauaugaccauaggcucau

SEQ ID NO: 1620895 - RNA, 19 nt, Artificial Sequence
  Description of Artificial Sequence: Synthetic oligonucleotide
  Sense strand starting at position 3284 of SEQ ID NO: 1560738
gacaaauaguuugugcaga

SEQ ID NO: 1620896 - RNA, 19 nt, Artificial Sequence
  Description of Artificial Sequence: Synthetic oligonucleotide
  Antisense strand to SEQ ID NO: 1620895
ucugcacaaacuauuuguc

SEQ ID NO: 1620897 - RNA, 19 nt, Artificial Sequence
  Description of Artificial Sequence: Synthetic oligonucleotide
  Sense strand starting at position 3286 of SEQ ID NO: 1560738
caaauaguuugugcagaag

SEQ ID NO: 1620898 - RNA, 19 nt, Artificial Sequence
  Description of Artificial Sequence: Synthetic oligonucleotide
  Antisense strand to SEQ ID NO: 1620897
cuucugcacaaacuauuug

SEQ ID NO: 1620899 - RNA, 19 nt, Artificial Sequence
  Description of Artificial Sequence: Synthetic oligonucleotide
  Sense strand starting at position 3289 of SEQ ID NO: 1560738
auaguuugugcagaagaau

SEQ ID NO: 1620900 - RNA, 19 nt, Artificial Sequence
  Description of Artificial Sequence: Synthetic oligonucleotide
  Antisense strand to SEQ ID NO: 1620899
auucuucugcacaaacuau

SEQ ID NO: 1620901 - RNA, 19 nt, Artificial Sequence
  Description of Artificial Sequence: Synthetic oligonucleotide
  Sense strand starting at position 3308 of SEQ ID NO: 1560738
uccaaauaaucugcguaga

SEQ ID NO: 1620902 - RNA, 19 nt, Artificial Sequence
  Description of Artificial Sequence: Synthetic oligonucleotide
  Antisense strand to SEQ ID NO: 1620901
ucuacgcagauuauuugga

SEQ ID NO: 1620903 - RNA, 19 nt, Artificial Sequence
  Description of Artificial Sequence: Synthetic oligonucleotide
  Sense strand starting at position 3309 of SEQ ID NO: 1560738
ccaaauaaucugcguagau

SEQ ID NO: 1620904 - RNA, 19 nt, Artificial Sequence
  Description of Artificial Sequence: Synthetic oligonucleotide
  Antisense strand to SEQ ID NO: 1620903
aucuacgcagauuauuugg

SEQ ID NO: 1620905 - RNA, 19 nt, Artificial Sequence
  Description of Artificial Sequence: Synthetic oligonucleotide
  Sense strand starting at position 3310 of SEQ ID NO: 1560738
caaauaaucugcguagaua

SEQ ID NO: 1620906 - RNA, 19 nt, Artificial Sequence
  Description of Artificial Sequence: Synthetic oligonucleotide
  Antisense strand to SEQ ID NO: 1620905
uaucuacgcagauuauuug

SEQ ID NO: 1620907 - RNA, 19 nt, Artificial Sequence
  Description of Artificial Sequence: Synthetic oligonucleotide
  Sense strand starting at position 3311 of SEQ ID NO: 1560738
aaauaaucugcguagauac

SEQ ID NO: 1620908 - RNA, 19 nt, Artificial Sequence
  Description of Artificial Sequence: Synthetic oligonucleotide
  Antisense strand to SEQ ID NO: 1620907
guaucuacgcagauuauuu

SEQ ID NO: 1620909 - RNA, 19 nt, Artificial Sequence
  Description of Artificial Sequence: Synthetic oligonucleotide
  Sense strand starting at position 3321 of SEQ ID NO: 1560738
cguagauacucugcucuca

SEQ ID NO: 1620910 - RNA, 19 nt, Artificial Sequence
  Description of Artificial Sequence: Synthetic oligonucleotide
  Antisense strand to SEQ ID NO: 1620909
ugagagcagaguaucuacg

SEQ ID NO: 1620911 - RNA, 19 nt, Artificial Sequence
  Description of Artificial Sequence: Synthetic oligonucleotide
  Sense strand starting at position 3367 of SEQ ID NO: 1560738
guaaguauggacugugcau

SEQ ID NO: 1620912 - RNA, 19 nt, Artificial Sequence
  Description of Artificial Sequence: Synthetic oligonucleotide
  Antisense strand to SEQ ID NO: 1620911
augcacaguccauacuuac

SEQ ID NO: 1620913 - RNA, 19 nt, Artificial Sequence
  Description of Artificial Sequence: Synthetic oligonucleotide
  Sense strand starting at position 3458 of SEQ ID NO: 1560738
cauugacaucuaggugauu

SEQ ID NO: 1620914 - RNA, 19 nt, Artificial Sequence
  Description of Artificial Sequence: Synthetic oligonucleotide
  Antisense strand to SEQ ID NO: 1620913
aaucaccuagaugucaaug

SEQ ID NO: 1620915 - RNA, 19 nt, Artificial Sequence
  Description of Artificial Sequence: Synthetic oligonucleotide
  Sense strand starting at position 3460 of SEQ ID NO: 1560738
uugacaucuaggugauuga

SEQ ID NO: 1620916 - RNA, 19 nt, Artificial Sequence
  Description of Artificial Sequence: Synthetic oligonucleotide
  Antisense strand to SEQ ID NO: 1620915
ucaaucaccuagaugucaa

SEQ ID NO: 1620917 - RNA, 19 nt, Artificial Sequence
  Description of Artificial Sequence: Synthetic oligonucleotide
  Sense strand starting at position 3464 of SEQ ID NO: 1560738
caucuaggugauugagguu

SEQ ID NO: 1620918 - RNA, 19 nt, Artificial Sequence
  Description of Artificial Sequence: Synthetic oligonucleotide
  Antisense strand to SEQ ID NO: 1620917
aaccucaaucaccuagaug

SEQ ID NO: 1620919 - RNA, 19 nt, Artificial Sequence
  Description of Artificial Sequence: Synthetic oligonucleotide
  Sense strand starting at position 3519 of SEQ ID NO: 1560738
ucuuuacuucugggaucuu

SEQ ID NO: 1620920 - RNA, 19 nt, Artificial Sequence
  Description of Artificial Sequence: Synthetic oligonucleotide
  Antisense strand to SEQ ID NO: 1620919
aagaucccagaaguaaaga

SEQ ID NO: 1620921 - RNA, 19 nt, Artificial Sequence
  Description of Artificial Sequence: Synthetic oligonucleotide
  Sense strand starting at position 3643 of SEQ ID NO: 1560738
aucuguaguccugguacuu

SEQ ID NO: 1620922 - RNA, 19 nt, Artificial Sequence
  Description of Artificial Sequence: Synthetic oligonucleotide
  Antisense strand to SEQ ID NO: 1620921
aaguaccaggacuacagau

SEQ ID NO: 1620923 - RNA, 19 nt, Artificial Sequence
  Description of Artificial Sequence: Synthetic oligonucleotide
  Sense strand starting at position 3854 of SEQ ID NO: 1560738
cggagauugccucacugca

SEQ ID NO: 1620924 - RNA, 19 nt, Artificial Sequence
  Description of Artificial Sequence: Synthetic oligonucleotide
  Antisense strand to SEQ ID NO: 1620923
ugcagugaggcaaucuccg

SEQ ID NO: 1620925 - RNA, 19 nt, Artificial Sequence
  Description of Artificial Sequence: Synthetic oligonucleotide
  Sense strand starting at position 3967 of SEQ ID NO: 1560738
aggagacgugacugcuaaa

SEQ ID NO: 1620926 - RNA, 19 nt, Artificial Sequence
  Description of Artificial Sequence: Synthetic oligonucleotide
  Antisense strand to SEQ ID NO: 1620925
uuuagcagucacgucuccu

SEQ ID NO: 1620927 - RNA, 19 nt, Artificial Sequence
  Description of Artificial Sequence: Synthetic oligonucleotide
  Sense strand starting at position 3974 of SEQ ID NO: 1560738
gugacugcuaaauguaaug

SEQ ID NO: 1620928 - RNA, 19 nt, Artificial Sequence
  Description of Artificial Sequence: Synthetic oligonucleotide
  Antisense strand to SEQ ID NO: 1620927
cauuacauuuagcagucac

SEQ ID NO: 1620929 - RNA, 19 nt, Artificial Sequence
  Description of Artificial Sequence: Synthetic oligonucleotide
  Sense strand starting at position 76 of SEQ ID NO: 1560739
gguggagucuggccauguu

SEQ ID NO: 1620930 - RNA, 19 nt, Artificial Sequence
  Description of Artificial Sequence: Synthetic oligonucleotide
  Antisense strand to SEQ ID NO: 1620929
aacauggccagacuccacc

SEQ ID NO: 1620931 - RNA, 19 nt, Artificial Sequence
  Description of Artificial Sequence: Synthetic oligonucleotide
  Sense strand starting at position 166 of SEQ ID NO: 1560739
aggugugagccaugucucu

SEQ ID NO: 1620932 - RNA, 19 nt, Artificial Sequence
  Description of Artificial Sequence: Synthetic oligonucleotide
  Antisense strand to SEQ ID NO: 1620931
agagacauggcucacaccu

SEQ ID NO: 1620933 - RNA, 19 nt, Artificial Sequence
  Description of Artificial Sequence: Synthetic oligonucleotide
  Sense strand starting at position 172 of SEQ ID NO: 1560739
gagccaugucucuggccaa

SEQ ID NO: 1620934 - RNA, 19 nt, Artificial Sequence
  Description of Artificial Sequence: Synthetic oligonucleotide
  Antisense strand to SEQ ID NO: 1620933
uuggccagagacauggcuc

SEQ ID NO: 1620935 - RNA, 19 nt, Artificial Sequence
  Description of Artificial Sequence: Synthetic oligonucleotide
  Sense strand starting at position 209 of SEQ ID NO: 1560739
ccaguuugaugggcgugau

SEQ ID NO: 1620936 - RNA, 19 nt, Artificial Sequence
  Description of Artificial Sequence: Synthetic oligonucleotide
  Antisense strand to SEQ ID NO: 1620935
aucacgcccaucaaacugg

SEQ ID NO: 1620937 - RNA, 19 nt, Artificial Sequence
  Description of Artificial Sequence: Synthetic oligonucleotide
  Sense strand starting at position 233 of SEQ ID NO: 1560739
ggagucucaguuuaaaugu

SEQ ID NO: 1620938 - RNA, 19 nt, Artificial Sequence
  Description of Artificial Sequence: Synthetic oligonucleotide
  Antisense strand to SEQ ID NO: 1620937
acauuuaaacugagacucc

SEQ ID NO: 1620939 - RNA, 19 nt, Artificial Sequence
  Description of Artificial Sequence: Synthetic oligonucleotide
  Sense strand starting at position 283 of SEQ ID NO: 1560739
gugucacaggucuggaaac

SEQ ID NO: 1620940 - RNA, 19 nt, Artificial Sequence
  Description of Artificial Sequence: Synthetic oligonucleotide
  Antisense strand to SEQ ID NO: 1620939
guuuccagaccugugacac

SEQ ID NO: 1620941 - RNA, 19 nt, Artificial Sequence
  Description of Artificial Sequence: Synthetic oligonucleotide
  Sense strand starting at position 306 of SEQ ID NO: 1560739
guaccuaaucaucagagcu

SEQ ID NO: 1620942 - RNA, 19 nt, Artificial Sequence
  Description of Artificial Sequence: Synthetic oligonucleotide
  Antisense strand to SEQ ID NO: 1620941
agcucugaugauuagguac

SEQ ID NO: 1620943 - RNA, 19 nt, Artificial Sequence
  Description of Artificial Sequence: Synthetic oligonucleotide
  Sense strand starting at position 313 of SEQ ID NO: 1560739
aucaucagagcucauagua

SEQ ID NO: 1620944 - RNA, 19 nt, Artificial Sequence
  Description of Artificial Sequence: Synthetic oligonucleotide
  Antisense strand to SEQ ID NO: 1620943
uacuaugagcucugaugau

SEQ ID NO: 1620945 - RNA, 19 nt, Artificial Sequence
  Description of Artificial Sequence: Synthetic oligonucleotide
  Sense strand starting at position 991 of SEQ ID NO: 1560739
ucuagagucucaguguugu

SEQ ID NO: 1620946 - RNA, 19 nt, Artificial Sequence
  Description of Artificial Sequence: Synthetic oligonucleotide
  Antisense strand to SEQ ID NO: 1620945
acaacacugagacucuaga

SEQ ID NO: 1620947 - RNA, 19 nt, Artificial Sequence
  Description of Artificial Sequence: Synthetic oligonucleotide
  Sense strand starting at position 1004 of SEQ ID NO: 1560739
uguuguaagaucugggacu

SEQ ID NO: 1620948 - RNA, 19 nt, Artificial Sequence
  Description of Artificial Sequence: Synthetic oligonucleotide
  Antisense strand to SEQ ID NO: 1620947
agucccagaucuuacaaca

SEQ ID NO: 1620949 - RNA, 19 nt, Artificial Sequence
  Description of Artificial Sequence: Synthetic oligonucleotide
  Sense strand starting at position 1006 of SEQ ID NO: 1560739
uuguaagaucugggacuua

SEQ ID NO: 1620950 - RNA, 19 nt, Artificial Sequence
  Description of Artificial Sequence: Synthetic oligonucleotide
  Antisense strand to SEQ ID NO: 1620949
uaagucccagaucuuacaa

SEQ ID NO: 1620951 - RNA, 19 nt, Artificial Sequence
  Description of Artificial Sequence: Synthetic oligonucleotide
  Sense strand starting at position 1668 of SEQ ID NO: 1560739
gaaaucuggucuuaagaga

SEQ ID NO: 1620952 - RNA, 19 nt, Artificial Sequence
  Description of Artificial Sequence: Synthetic oligonucleotide
  Antisense strand to SEQ ID NO: 1620951
ucucuuaagaccagauuuc

SEQ ID NO: 1620953 - RNA, 19 nt, Artificial Sequence
  Description of Artificial Sequence: Synthetic oligonucleotide
  Sense strand starting at position 1673 of SEQ ID NO: 1560739
cuggucuuaagagauguca

SEQ ID NO: 1620954 - RNA, 19 nt, Artificial Sequence
  Description of Artificial Sequence: Synthetic oligonucleotide
  Antisense strand to SEQ ID NO: 1620953
ugacaucucuuaagaccag

SEQ ID NO: 1620955 - RNA, 19 nt, Artificial Sequence
  Description of Artificial Sequence: Synthetic oligonucleotide
  Sense strand starting at position 1675 of SEQ ID NO: 1560739
ggucuuaagagaugucaga

SEQ ID NO: 1620956 - RNA, 19 nt, Artificial Sequence
  Description of Artificial Sequence: Synthetic oligonucleotide
  Antisense strand to SEQ ID NO: 1620955
ucugacaucucuuaagacc

SEQ ID NO: 1620957 - RNA, 19 nt, Artificial Sequence
  Description of Artificial Sequence: Synthetic oligonucleotide
  Sense strand starting at position 1711 of SEQ ID NO: 1560739
gacagccugguuuagagau

SEQ ID NO: 1620958 - RNA, 19 nt, Artificial Sequence
  Description of Artificial Sequence: Synthetic oligonucleotide
  Antisense strand to SEQ ID NO: 1620957
aucucuaaaccaggcuguc

SEQ ID NO: 1620959 - RNA, 19 nt, Artificial Sequence
  Description of Artificial Sequence: Synthetic oligonucleotide
  Sense strand starting at position 2055 of SEQ ID NO: 1560739
augaaaucuguccgcaggu

SEQ ID NO: 1620960 - RNA, 19 nt, Artificial Sequence
  Description of Artificial Sequence: Synthetic oligonucleotide
  Antisense strand to SEQ ID NO: 1620959
accugcggacagauuucau

SEQ ID NO: 1620961 - RNA, 19 nt, Artificial Sequence
  Description of Artificial Sequence: Synthetic oligonucleotide
  Sense strand starting at position 2057 of SEQ ID NO: 1560739
gaaaucuguccgcagguga

SEQ ID NO: 1620962 - RNA, 19 nt, Artificial Sequence
  Description of Artificial Sequence: Synthetic oligonucleotide
  Antisense strand to SEQ ID NO: 1620961
ucaccugcggacagauuuc

SEQ ID NO: 1620963 - RNA, 19 nt, Artificial Sequence
  Description of Artificial Sequence: Synthetic oligonucleotide
  Sense strand starting at position 2281 of SEQ ID NO: 1560739
acuuauuaaccacaagugu

SEQ ID NO: 1620964 - RNA, 19 nt, Artificial Sequence
  Description of Artificial Sequence: Synthetic oligonucleotide
  Antisense strand to SEQ ID NO: 1620963
acacuugugguuaauaagu

SEQ ID NO: 1620965 - RNA, 19 nt, Artificial Sequence
  Description of Artificial Sequence: Synthetic oligonucleotide
  Sense strand starting at position 2292 of SEQ ID NO: 1560739
acaaguguuuccuuggcca

SEQ ID NO: 1620966 - RNA, 19 nt, Artificial Sequence
  Description of Artificial Sequence: Synthetic oligonucleotide
  Antisense strand to SEQ ID NO: 1620965
uggccaaggaaacacuugu

SEQ ID NO: 1620967 - RNA, 19 nt, Artificial Sequence
  Description of Artificial Sequence: Synthetic oligonucleotide
  Sense strand starting at position 2322 of SEQ ID NO: 1560739
ccagcagguaucugugaag

SEQ ID NO: 1620968 - RNA, 19 nt, Artificial Sequence
  Description of Artificial Sequence: Synthetic oligonucleotide
  Antisense strand to SEQ ID NO: 1620967
cuucacagauaccugcugg

SEQ ID NO: 1620969 - RNA, 19 nt, Artificial Sequence
  Description of Artificial Sequence: Synthetic oligonucleotide
  Sense strand starting at position 2442 of SEQ ID NO: 1560739
gaaguauguuucuuguuga

SEQ ID NO: 1620970 - RNA, 19 nt, Artificial Sequence
  Description of Artificial Sequence: Synthetic oligonucleotide
  Antisense strand to SEQ ID NO: 1620969
ucaacaagaaacauacuuc

SEQ ID NO: 1620971 - RNA, 19 nt, Artificial Sequence
  Description of Artificial Sequence: Synthetic oligonucleotide
  Sense strand starting at position 2445 of SEQ ID NO: 1560739
guauguuucuuguugacaa

SEQ ID NO: 1620972 - RNA, 19 nt, Artificial Sequence
  Description of Artificial Sequence: Synthetic oligonucleotide
  Antisense strand to SEQ ID NO: 1620971
uugucaacaagaaacauac

SEQ ID NO: 1620973 - RNA, 19 nt, Artificial Sequence
  Description of Artificial Sequence: Synthetic oligonucleotide
  Sense strand starting at position 2447 of SEQ ID NO: 1560739
auguuucuuguugacaaca

SEQ ID NO: 1620974 - RNA, 19 nt, Artificial Sequence
  Description of Artificial Sequence: Synthetic oligonucleotide
  Antisense strand to SEQ ID NO: 1620973
uguugucaacaagaaacau

SEQ ID NO: 1620975 - RNA, 19 nt, Artificial Sequence
  Description of Artificial Sequence: Synthetic oligonucleotide
  Sense strand starting at position 2460 of SEQ ID NO: 1560739
acaacagaucauuggguau

SEQ ID NO: 1620976 - RNA, 19 nt, Artificial Sequence
  Description of Artificial Sequence: Synthetic oligonucleotide
  Antisense strand to SEQ ID NO: 1620975
auacccaaugaucuguugu

SEQ ID NO: 1620977 - RNA, 19 nt, Artificial Sequence
  Description of Artificial Sequence: Synthetic oligonucleotide
  Sense strand starting at position 2754 of SEQ ID NO: 1560739
aaauuuaugugauggaauc

SEQ ID NO: 1620978 - RNA, 19 nt, Artificial Sequence
  Description of Artificial Sequence: Synthetic oligonucleotide
  Antisense strand to SEQ ID NO: 1620977
gauuccaucacauaaauuu

SEQ ID NO: 1620979 - RNA, 19 nt, Artificial Sequence
  Description of Artificial Sequence: Synthetic oligonucleotide
  Sense strand starting at position 2761 of SEQ ID NO: 1560739
ugugauggaaucugaauuc

SEQ ID NO: 1620980 - RNA, 19 nt, Artificial Sequence
  Description of Artificial Sequence: Synthetic oligonucleotide
  Antisense strand to SEQ ID NO: 1620979
gaauucagauuccaucaca

SEQ ID NO: 1620981 - RNA, 19 nt, Artificial Sequence
  Description of Artificial Sequence: Synthetic oligonucleotide
  Sense strand starting at position 2785 of SEQ ID NO: 1560739
guguguuagcuugaauuuc

SEQ ID NO: 1620982 - RNA, 19 nt, Artificial Sequence
  Description of Artificial Sequence: Synthetic oligonucleotide
  Antisense strand to SEQ ID NO: 1620981
gaaauucaagcuaacacac

SEQ ID NO: 1620983 - RNA, 19 nt, Artificial Sequence
  Description of Artificial Sequence: Synthetic oligonucleotide
  Sense strand starting at position 2828 of SEQ ID NO: 1560739
uuuaaauucucugucggaa

SEQ ID NO: 1620984 - RNA, 19 nt, Artificial Sequence
  Description of Artificial Sequence: Synthetic oligonucleotide
  Antisense strand to SEQ ID NO: 1620983
uuccgacagagaauuuaaa

SEQ ID NO: 1620985 - RNA, 19 nt, Artificial Sequence
  Description of Artificial Sequence: Synthetic oligonucleotide
  Sense strand starting at position 2881 of SEQ ID NO: 1560739
cuugguggcuuauuugauu

SEQ ID NO: 1620986 - RNA, 19 nt, Artificial Sequence
  Description of Artificial Sequence: Synthetic oligonucleotide
  Antisense strand to SEQ ID NO: 1620985
aaucaaauaagccaccaag

SEQ ID NO: 1620987 - RNA, 19 nt, Artificial Sequence
  Description of Artificial Sequence: Synthetic oligonucleotide
  Sense strand starting at position 2894 of SEQ ID NO: 1560739
uugauuuguuugguaaggu

SEQ ID NO: 1620988 - RNA, 19 nt, Artificial Sequence
  Description of Artificial Sequence: Synthetic oligonucleotide
  Antisense strand to SEQ ID NO: 1620987
accuuaccaaacaaaucaa

SEQ ID NO: 1620989 - RNA, 19 nt, Artificial Sequence
  Description of Artificial Sequence: Synthetic oligonucleotide
  Sense strand starting at position 2895 of SEQ ID NO: 1560739
ugauuuguuugguaagguc

SEQ ID NO: 1620990 - RNA, 19 nt, Artificial Sequence
  Description of Artificial Sequence: Synthetic oligonucleotide
  Antisense strand to SEQ ID NO: 1620989
gaccuuaccaaacaaauca

SEQ ID NO: 1620991 - RNA, 19 nt, Artificial Sequence
  Description of Artificial Sequence: Synthetic oligonucleotide
  Sense strand starting at position 2926 of SEQ ID NO: 1560739
uggccuugaugcuuauaga

SEQ ID NO: 1620992 - RNA, 19 nt, Artificial Sequence
  Description of Artificial Sequence: Synthetic oligonucleotide
  Antisense strand to SEQ ID NO: 1620991
ucuauaagcaucaaggcca

SEQ ID NO: 1620993 - RNA, 19 nt, Artificial Sequence
  Description of Artificial Sequence: Synthetic oligonucleotide
  Sense strand starting at position 2927 of SEQ ID NO: 1560739
ggccuugaugcuuauagau

SEQ ID NO: 1620994 - RNA, 19 nt, Artificial Sequence
  Description of Artificial Sequence: Synthetic oligonucleotide
  Antisense strand to SEQ ID NO: 1620993
aucuauaagcaucaaggcc

SEQ ID NO: 1620995 - RNA, 19 nt, Artificial Sequence
  Description of Artificial Sequence: Synthetic oligonucleotide
  Sense strand starting at position 2958 of SEQ ID NO: 1560739
cugggcauugaugaguuau

SEQ ID NO: 1620996 - RNA, 19 nt, Artificial Sequence
  Description of Artificial Sequence: Synthetic oligonucleotide
  Antisense strand to SEQ ID NO: 1620995
auaacucaucaaugcccag

SEQ ID NO: 1620997 - RNA, 19 nt, Artificial Sequence
  Description of Artificial Sequence: Synthetic oligonucleotide
  Sense strand starting at position 3590 of SEQ ID NO: 1560739
uggccauguuagguauuua

SEQ ID NO: 1620998 - RNA, 19 nt, Artificial Sequence
  Description of Artificial Sequence: Synthetic oligonucleotide
  Antisense strand to SEQ ID NO: 1620997
uaaauaccuaacauggcca

SEQ ID NO: 1620999 - RNA, 19 nt, Artificial Sequence
  Description of Artificial Sequence: Synthetic oligonucleotide
  Sense strand starting at position 3594 of SEQ ID NO: 1560739
cauguuagguauuuauugu

SEQ ID NO: 1621000 - RNA, 19 nt, Artificial Sequence
  Description of Artificial Sequence: Synthetic oligonucleotide
  Antisense strand to SEQ ID NO: 1620999
acaauaaauaccuaacaug

SEQ ID NO: 1621001 - RNA, 19 nt, Artificial Sequence
  Description of Artificial Sequence: Synthetic oligonucleotide
  Sense strand starting at position 3620 of SEQ ID NO: 1560739
gcagacaaggcuuguuugu

SEQ ID NO: 1621002 - RNA, 19 nt, Artificial Sequence
  Description of Artificial Sequence: Synthetic oligonucleotide
  Antisense strand to SEQ ID NO: 1621001
acaaacaagccuugucugc

SEQ ID NO: 1621003 - RNA, 19 nt, Artificial Sequence
  Description of Artificial Sequence: Synthetic oligonucleotide
  Sense strand starting at position 3766 of SEQ ID NO: 1560739
cuaucuuaguggucuuaga

SEQ ID NO: 1621004 - RNA, 19 nt, Artificial Sequence
  Description of Artificial Sequence: Synthetic oligonucleotide
  Antisense strand to SEQ ID NO: 1621003
ucuaagaccacuaagauag

SEQ ID NO: 1621005 - RNA, 19 nt, Artificial Sequence
  Description of Artificial Sequence: Synthetic oligonucleotide
  Sense strand starting at position 3972 of SEQ ID NO: 1560739
ugccuacuaucacugggau

SEQ ID NO: 1621006 - RNA, 19 nt, Artificial Sequence
  Description of Artificial Sequence: Synthetic oligonucleotide
  Antisense strand to SEQ ID NO: 1621005
aucccagugauaguaggca

SEQ ID NO: 1621007 - RNA, 19 nt, Artificial Sequence
  Description of Artificial Sequence: Synthetic oligonucleotide
  Sense strand starting at position 3973 of SEQ ID NO: 1560739
gccuacuaucacugggauu

SEQ ID NO: 1621008 - RNA, 19 nt, Artificial Sequence
  Description of Artificial Sequence: Synthetic oligonucleotide
  Antisense strand to SEQ ID NO: 1621007
aaucccagugauaguaggc

SEQ ID NO: 1621009 - RNA, 19 nt, Artificial Sequence
  Description of Artificial Sequence: Synthetic oligonucleotide
  Sense strand starting at position 906 of SEQ ID NO: 1560740
cgauguucaguguggcaca

SEQ ID NO: 1621010 - RNA, 19 nt, Artificial Sequence
  Description of Artificial Sequence: Synthetic oligonucleotide
  Antisense strand to SEQ ID NO: 1621009
ugugccacacugaacaucg

SEQ ID NO: 1621011 - RNA, 19 nt, Artificial Sequence
  Description of Artificial Sequence: Synthetic oligonucleotide
  Sense strand starting at position 925 of SEQ ID NO: 1560740
cuggguauggagugaauga

SEQ ID NO: 1621012 - RNA, 19 nt, Artificial Sequence
  Description of Artificial Sequence: Synthetic oligonucleotide
  Antisense strand to SEQ ID NO: 1621011
ucauucacuccauacccag

SEQ ID NO: 1621013 - RNA, 19 nt, Artificial Sequence
  Description of Artificial Sequence: Synthetic oligonucleotide
  Sense strand starting at position 954 of SEQ ID NO: 1560740
gcgaaugauggauggauga

SEQ ID NO: 1621014 - RNA, 19 nt, Artificial Sequence
  Description of Artificial Sequence: Synthetic oligonucleotide
  Antisense strand to SEQ ID NO: 1621013
ucauccauccaucauucgc

SEQ ID NO: 1621015 - RNA, 19 nt, Artificial Sequence
  Description of Artificial Sequence: Synthetic oligonucleotide
  Sense strand starting at position 1655 of SEQ ID NO: 1560740
cgaggaucucggcaggaca

SEQ ID NO: 1621016 - RNA, 19 nt, Artificial Sequence
  Description of Artificial Sequence: Synthetic oligonucleotide
  Antisense strand to SEQ ID NO: 1621015
uguccugccgagauccucg

SEQ ID NO: 1621017 - RNA, 19 nt, Artificial Sequence
  Description of Artificial Sequence: Synthetic oligonucleotide
  Sense strand starting at position 1702 of SEQ ID NO: 1560740
gcuaaagucucccgggauc

SEQ ID NO: 1621018 - RNA, 19 nt, Artificial Sequence
  Description of Artificial Sequence: Synthetic oligonucleotide
  Antisense strand to SEQ ID NO: 1621017
gaucccgggagacuuuagc

SEQ ID NO: 1621019 - RNA, 19 nt, Artificial Sequence
  Description of Artificial Sequence: Synthetic oligonucleotide
  Sense strand starting at position 2407 of SEQ ID NO: 1560740
gcagaacccuuccgcauaa

SEQ ID NO: 1621020 - RNA, 19 nt, Artificial Sequence
  Description of Artificial Sequence: Synthetic oligonucleotide
  Antisense strand to SEQ ID NO: 1621019
uuaugcggaaggguucugc

SEQ ID NO: 1621021 - RNA, 19 nt, Artificial Sequence
  Description of Artificial Sequence: Synthetic oligonucleotide
  Sense strand starting at position 2651 of SEQ ID NO: 1560740
gggcuaggaccaugacuuu

SEQ ID NO: 1621022 - RNA, 19 nt, Artificial Sequence
  Description of Artificial Sequence: Synthetic oligonucleotide
  Antisense strand to SEQ ID NO: 1621021
aaagucaugguccuagccc

SEQ ID NO: 1621023 - RNA, 19 nt, Artificial Sequence
  Description of Artificial Sequence: Synthetic oligonucleotide
  Sense strand starting at position 57 of SEQ ID NO: 1560741
guguguuucugaccugaga

SEQ ID NO: 1621024 - RNA, 19 nt, Artificial Sequence
  Description of Artificial Sequence: Synthetic oligonucleotide
  Antisense strand to SEQ ID NO: 1621023
ucucaggucagaaacacac

SEQ ID NO: 1621025 - RNA, 19 nt, Artificial Sequence
  Description of Artificial Sequence: Synthetic oligonucleotide
  Sense strand starting at position 59 of SEQ ID NO: 1560741
guguuucugaccugagagu

SEQ ID NO: 1621026 - RNA, 19 nt, Artificial Sequence
  Description of Artificial Sequence: Synthetic oligonucleotide
  Antisense strand to SEQ ID NO: 1621025
acucucaggucagaaacac

SEQ ID NO: 1621027 - RNA, 19 nt, Artificial Sequence
  Description of Artificial Sequence: Synthetic oligonucleotide
  Sense strand starting at position 68 of SEQ ID NO: 1560741
accugagagucagggugua

SEQ ID NO: 1621028 - RNA, 19 nt, Artificial Sequence
  Description of Artificial Sequence: Synthetic oligonucleotide
  Antisense strand to SEQ ID NO: 1621027
uacacccugacucucaggu

SEQ ID NO: 1621029 - RNA, 19 nt, Artificial Sequence
  Description of Artificial Sequence: Synthetic oligonucleotide
  Sense strand starting at position 73 of SEQ ID NO: 1560741
agagucaggguguauuagu

SEQ ID NO: 1621030 - RNA, 19 nt, Artificial Sequence
  Description of Artificial Sequence: Synthetic oligonucleotide
  Antisense strand to SEQ ID NO: 1621029
acuaauacacccugacucu

SEQ ID NO: 1621031 - RNA, 19 nt, Artificial Sequence
  Description of Artificial Sequence: Synthetic oligonucleotide
  Sense strand starting at position 130 of SEQ ID NO: 1560741
gggagaugggcucagucau

SEQ ID NO: 1621032 - RNA, 19 nt, Artificial Sequence
  Description of Artificial Sequence: Synthetic oligonucleotide
  Antisense strand to SEQ ID NO: 1621031
augacugagcccaucuccc

SEQ ID NO: 1621033 - RNA, 19 nt, Artificial Sequence
  Description of Artificial Sequence: Synthetic oligonucleotide
  Sense strand starting at position 416 of SEQ ID NO: 1560741
gcgugucuucugcacaaag

SEQ ID NO: 1621034 - RNA, 19 nt, Artificial Sequence
  Description of Artificial Sequence: Synthetic oligonucleotide
  Antisense strand to SEQ ID NO: 1621033
cuuugugcagaagacacgc

SEQ ID NO: 1621035 - RNA, 19 nt, Artificial Sequence
  Description of Artificial Sequence: Synthetic oligonucleotide
  Sense strand starting at position 418 of SEQ ID NO: 1560741
gugucuucugcacaaagac

SEQ ID NO: 1621036 - RNA, 19 nt, Artificial Sequence
  Description of Artificial Sequence: Synthetic oligonucleotide
  Antisense strand to SEQ ID NO: 1621035
gucuuugugcagaagacac

SEQ ID NO: 1621037 - RNA, 19 nt, Artificial Sequence
  Description of Artificial Sequence: Synthetic oligonucleotide
  Sense strand starting at position 550 of SEQ ID NO: 1560741
gauggauaauuguggccuu

SEQ ID NO: 1621038 - RNA, 19 nt, Artificial Sequence
  Description of Artificial Sequence: Synthetic oligonucleotide
  Antisense strand to SEQ ID NO: 1621037
aaggccacaauuauccauc

SEQ ID NO: 1621039 - RNA, 19 nt, Artificial Sequence
  Description of Artificial Sequence: Synthetic oligonucleotide
  Sense strand starting at position 553 of SEQ ID NO: 1560741
ggauaauuguggccuuggu

SEQ ID NO: 1621040 - RNA, 19 nt, Artificial Sequence
  Description of Artificial Sequence: Synthetic oligonucleotide
  Antisense strand to SEQ ID NO: 1621039
accaaggccacaauuaucc

SEQ ID NO: 1621041 - RNA, 19 nt, Artificial Sequence
  Description of Artificial Sequence: Synthetic oligonucleotide
  Sense strand starting at position 881 of SEQ ID NO: 1560741
ccuggcuguuucucauuga

SEQ ID NO: 1621042 - RNA, 19 nt, Artificial Sequence
  Description of Artificial Sequence: Synthetic oligonucleotide
  Antisense strand to SEQ ID NO: 1621041
ucaaugagaaacagccagg

SEQ ID NO: 1621043 - RNA, 19 nt, Artificial Sequence
  Description of Artificial Sequence: Synthetic oligonucleotide
  Sense strand starting at position 885 of SEQ ID NO: 1560741
gcuguuucucauugaugcu

SEQ ID NO: 1621044 - RNA, 19 nt, Artificial Sequence
  Description of Artificial Sequence: Synthetic oligonucleotide
  Antisense strand to SEQ ID NO: 1621043
agcaucaaugagaaacagc

SEQ ID NO: 1621045 - RNA, 19 nt, Artificial Sequence
  Description of Artificial Sequence: Synthetic oligonucleotide
  Sense strand starting at position 1134 of SEQ ID NO: 1560741
gcugguaucccucacaggu

SEQ ID NO: 1621046 - RNA, 19 nt, Artificial Sequence
  Description of Artificial Sequence: Synthetic oligonucleotide
  Antisense strand to SEQ ID NO: 1621045
accugugagggauaccagc

SEQ ID NO: 1621047 - RNA, 19 nt, Artificial Sequence
  Description of Artificial Sequence: Synthetic oligonucleotide
  Sense strand starting at position 1213 of SEQ ID NO: 1560741
caguguguucccugggaua

SEQ ID NO: 1621048 - RNA, 19 nt, Artificial Sequence
  Description of Artificial Sequence: Synthetic oligonucleotide
  Antisense strand to SEQ ID NO: 1621047
uaucccagggaacacacug

SEQ ID NO: 1621049 - RNA, 19 nt, Artificial Sequence
  Description of Artificial Sequence: Synthetic oligonucleotide
  Sense strand starting at position 1215 of SEQ ID NO: 1560741
guguguucccugggauaag

SEQ ID NO: 1621050 - RNA, 19 nt, Artificial Sequence
  Description of Artificial Sequence: Synthetic oligonucleotide
  Antisense strand to SEQ ID NO: 1621049
cuuaucccagggaacacac

SEQ ID NO: 1621051 - RNA, 19 nt, Artificial Sequence
  Description of Artificial Sequence: Synthetic oligonucleotide
  Sense strand starting at position 1298 of SEQ ID NO: 1560741
ggaccuccucccugaguca

SEQ ID NO: 1621052 - RNA, 19 nt, Artificial Sequence
  Description of Artificial Sequence: Synthetic oligonucleotide
  Antisense strand to SEQ ID NO: 1621051
ugacucagggaggaggucc

SEQ ID NO: 1621053 - RNA, 19 nt, Artificial Sequence
  Description of Artificial Sequence: Synthetic oligonucleotide
  Sense strand starting at position 1383 of SEQ ID NO: 1560741
uucgcucucagcgcagaua

SEQ ID NO: 1621054 - RNA, 19 nt, Artificial Sequence
  Description of Artificial Sequence: Synthetic oligonucleotide
  Antisense strand to SEQ ID NO: 1621053
uaucugcgcugagagcgaa

SEQ ID NO: 1621055 - RNA, 19 nt, Artificial Sequence
  Description of Artificial Sequence: Synthetic oligonucleotide
  Sense strand starting at position 1506 of SEQ ID NO: 1560741
gggugucucggcugagaua

SEQ ID NO: 1621056 - RNA, 19 nt, Artificial Sequence
  Description of Artificial Sequence: Synthetic oligonucleotide
  Antisense strand to SEQ ID NO: 1621055
uaucucagccgagacaccc

SEQ ID NO: 1621057 - RNA, 19 nt, Artificial Sequence
  Description of Artificial Sequence: Synthetic oligonucleotide
  Sense strand starting at position 1812 of SEQ ID NO: 1560741
ggacuucucccuggucuca

SEQ ID NO: 1621058 - RNA, 19 nt, Artificial Sequence
  Description of Artificial Sequence: Synthetic oligonucleotide
  Antisense strand to SEQ ID NO: 1621057
ugagaccagggagaagucc

SEQ ID NO: 1621059 - RNA, 19 nt, Artificial Sequence
  Description of Artificial Sequence: Synthetic oligonucleotide
  Sense strand starting at position 1856 of SEQ ID NO: 1560741
gucucuaaucccgaagucu

SEQ ID NO: 1621060 - RNA, 19 nt, Artificial Sequence
  Description of Artificial Sequence: Synthetic oligonucleotide
  Antisense strand to SEQ ID NO: 1621059
agacuucgggauuagagac

SEQ ID NO: 1621061 - RNA, 19 nt, Artificial Sequence
  Description of Artificial Sequence: Synthetic oligonucleotide
  Sense strand starting at position 2028 of SEQ ID NO: 1560741
cgccgccucagugcuuaua

SEQ ID NO: 1621062 - RNA, 19 nt, Artificial Sequence
  Description of Artificial Sequence: Synthetic oligonucleotide
  Antisense strand to SEQ ID NO: 1621061
uauaagcacugaggcggcg

SEQ ID NO: 1621063 - RNA, 19 nt, Artificial Sequence
  Description of Artificial Sequence: Synthetic oligonucleotide
  Sense strand starting at position 2029 of SEQ ID NO: 1560741
gccgccucagugcuuauaa

SEQ ID NO: 1621064 - RNA, 19 nt, Artificial Sequence
  Description of Artificial Sequence: Synthetic oligonucleotide
  Antisense strand to SEQ ID NO: 1621063
uuauaagcacugaggcggc

SEQ ID NO: 1621065 - RNA, 19 nt, Artificial Sequence
  Description of Artificial Sequence: Synthetic oligonucleotide
  Sense strand starting at position 2030 of SEQ ID NO: 1560741
ccgccucagugcuuauaaa

SEQ ID NO: 1621066 - RNA, 19 nt, Artificial Sequence
  Description of Artificial Sequence: Synthetic oligonucleotide
  Antisense strand to SEQ ID NO: 1621065
uuuauaagcacugaggcgg

SEQ ID NO: 1621067 - RNA, 19 nt, Artificial Sequence
  Description of Artificial Sequence: Synthetic oligonucleotide
  Sense strand starting at position 2031 of SEQ ID NO: 1560741
cgccucagugcuuauaaag

SEQ ID NO: 1621068 - RNA, 19 nt, Artificial Sequence
  Description of Artificial Sequence: Synthetic oligonucleotide
  Antisense strand to SEQ ID NO: 1621067
cuuuauaagcacugaggcg

SEQ ID NO: 1621069 - RNA, 19 nt, Artificial Sequence
  Description of Artificial Sequence: Synthetic oligonucleotide
  Sense strand starting at position 2174 of SEQ ID NO: 1560741
agaagauggcaucgauucu

SEQ ID NO: 1621070 - RNA, 19 nt, Artificial Sequence
  Description of Artificial Sequence: Synthetic oligonucleotide
  Antisense strand to SEQ ID NO: 1621069
agaaucgaugccaucuucu

SEQ ID NO: 1621071 - RNA, 19 nt, Artificial Sequence
  Description of Artificial Sequence: Synthetic oligonucleotide
  Sense strand starting at position 2353 of SEQ ID NO: 1560741
ccugauucuccaggacuca

SEQ ID NO: 1621072 - RNA, 19 nt, Artificial Sequence
  Description of Artificial Sequence: Synthetic oligonucleotide
  Antisense strand to SEQ ID NO: 1621071
ugaguccuggagaaucagg

SEQ ID NO: 1621073 - RNA, 19 nt, Artificial Sequence
  Description of Artificial Sequence: Synthetic oligonucleotide
  Sense strand starting at position 2532 of SEQ ID NO: 1560741
acagccagauuguaucauu

SEQ ID NO: 1621074 - RNA, 19 nt, Artificial Sequence
  Description of Artificial Sequence: Synthetic oligonucleotide
  Antisense strand to SEQ ID NO: 1621073
aaugauacaaucuggcugu

SEQ ID NO: 1621075 - RNA, 19 nt, Artificial Sequence
  Description of Artificial Sequence: Synthetic oligonucleotide
  Sense strand starting at position 2560 of SEQ ID NO: 1560741
accuuugucugaucagcau

SEQ ID NO: 1621076 - RNA, 19 nt, Artificial Sequence
  Description of Artificial Sequence: Synthetic oligonucleotide
  Antisense strand to SEQ ID NO: 1621075
augcugaucagacaaaggu

SEQ ID NO: 1621077 - RNA, 19 nt, Artificial Sequence
  Description of Artificial Sequence: Synthetic oligonucleotide
  Sense strand starting at position 2563 of SEQ ID NO: 1560741
uuugucugaucagcauuua

SEQ ID NO: 1621078 - RNA, 19 nt, Artificial Sequence
  Description of Artificial Sequence: Synthetic oligonucleotide
  Antisense strand to SEQ ID NO: 1621077
uaaaugcugaucagacaaa

SEQ ID NO: 1621079 - RNA, 19 nt, Artificial Sequence
  Description of Artificial Sequence: Synthetic oligonucleotide
  Sense strand starting at position 2630 of SEQ ID NO: 1560741
uugcuuuaugcagaggcau

SEQ ID NO: 1621080 - RNA, 19 nt, Artificial Sequence
  Description of Artificial Sequence: Synthetic oligonucleotide
  Antisense strand to SEQ ID NO: 1621079
augccucugcauaaagcaa

SEQ ID NO: 1621081 - RNA, 19 nt, Artificial Sequence
  Description of Artificial Sequence: Synthetic oligonucleotide
  Sense strand starting at position 2632 of SEQ ID NO: 1560741
gcuuuaugcagaggcauag

SEQ ID NO: 1621082 - RNA, 19 nt, Artificial Sequence
  Description of Artificial Sequence: Synthetic oligonucleotide
  Antisense strand to SEQ ID NO: 1621081
cuaugccucugcauaaagc

SEQ ID NO: 1621083 - RNA, 19 nt, Artificial Sequence
  Description of Artificial Sequence: Synthetic oligonucleotide
  Sense strand starting at position 2970 of SEQ ID NO: 1560741
ccgcgcauggccuugaauu

SEQ ID NO: 1621084 - RNA, 19 nt, Artificial Sequence
  Description of Artificial Sequence: Synthetic oligonucleotide
  Antisense strand to SEQ ID NO: 1621083
aauucaaggccaugcgcgg

SEQ ID NO: 1621085 - RNA, 19 nt, Artificial Sequence
  Description of Artificial Sequence: Synthetic oligonucleotide
  Sense strand starting at position 2971 of SEQ ID NO: 1560741
cgcgcauggccuugaauua

SEQ ID NO: 1621086 - RNA, 19 nt, Artificial Sequence
  Description of Artificial Sequence: Synthetic oligonucleotide
  Antisense strand to SEQ ID NO: 1621085
uaauucaaggccaugcgcg

SEQ ID NO: 1621087 - RNA, 19 nt, Artificial Sequence
  Description of Artificial Sequence: Synthetic oligonucleotide
  Sense strand starting at position 2978 of SEQ ID NO: 1560741
ggccuugaauuacacauuu

SEQ ID NO: 1621088 - RNA, 19 nt, Artificial Sequence
  Description of Artificial Sequence: Synthetic oligonucleotide
  Antisense strand to SEQ ID NO: 1621087
aaauguguaauucaaggcc

SEQ ID NO: 1621089 - RNA, 19 nt, Artificial Sequence
  Description of Artificial Sequence: Synthetic oligonucleotide
  Sense strand starting at position 3370 of SEQ ID NO: 1560741
agggaaaugugcccagaga

SEQ ID NO: 1621090 - RNA, 19 nt, Artificial Sequence
  Description of Artificial Sequence: Synthetic oligonucleotide
  Antisense strand to SEQ ID NO: 1621089
ucucugggcacauuucccu

SEQ ID NO: 1621091 - RNA, 19 nt, Artificial Sequence
  Description of Artificial Sequence: Synthetic oligonucleotide
  Sense strand starting at position 3423 of SEQ ID NO: 1560741
cgugguguuucugugcuga

SEQ ID NO: 1621092 - RNA, 19 nt, Artificial Sequence
  Description of Artificial Sequence: Synthetic oligonucleotide
  Antisense strand to SEQ ID NO: 1621091
ucagcacagaaacaccacg

SEQ ID NO: 1621093 - RNA, 19 nt, Artificial Sequence
  Description of Artificial Sequence: Synthetic oligonucleotide
  Sense strand starting at position 3428 of SEQ ID NO: 1560741
uguuucugugcugagaaug

SEQ ID NO: 1621094 - RNA, 19 nt, Artificial Sequence
  Description of Artificial Sequence: Synthetic oligonucleotide
  Antisense strand to SEQ ID NO: 1621093
cauucucagcacagaaaca

SEQ ID NO: 1621095 - RNA, 19 nt, Artificial Sequence
  Description of Artificial Sequence: Synthetic oligonucleotide
  Sense strand starting at position 3467 of SEQ ID NO: 1560741
ggguccuauaucugugagu

SEQ ID NO: 1621096 - RNA, 19 nt, Artificial Sequence
  Description of Artificial Sequence: Synthetic oligonucleotide
  Antisense strand to SEQ ID NO: 1621095
acucacagauauaggaccc

SEQ ID NO: 1621097 - RNA, 19 nt, Artificial Sequence
  Description of Artificial Sequence: Synthetic oligonucleotide
  Sense strand starting at position 3468 of SEQ ID NO: 1560741
gguccuauaucugugagug

SEQ ID NO: 1621098 - RNA, 19 nt, Artificial Sequence
  Description of Artificial Sequence: Synthetic oligonucleotide
  Antisense strand to SEQ ID NO: 1621097
cacucacagauauaggacc

SEQ ID NO: 1621099 - RNA, 19 nt, Artificial Sequence
  Description of Artificial Sequence: Synthetic oligonucleotide
  Sense strand starting at position 3469 of SEQ ID NO: 1560741
guccuauaucugugagugu

SEQ ID NO: 1621100 - RNA, 19 nt, Artificial Sequence
  Description of Artificial Sequence: Synthetic oligonucleotide
  Antisense strand to SEQ ID NO: 1621099
acacucacagauauaggac

SEQ ID NO: 1621101 - RNA, 19 nt, Artificial Sequence
  Description of Artificial Sequence: Synthetic oligonucleotide
  Sense strand starting at position 3557 of SEQ ID NO: 1560741
ccacaagguuaucaaagaa

SEQ ID NO: 1621102 - RNA, 19 nt, Artificial Sequence
  Description of Artificial Sequence: Synthetic oligonucleotide
  Antisense strand to SEQ ID NO: 1621101
uucuuugauaaccuugugg

SEQ ID NO: 1621103 - RNA, 19 nt, Artificial Sequence
  Description of Artificial Sequence: Synthetic oligonucleotide
  Sense strand starting at position 6 of SEQ ID NO: 1560742
ggagacguguccaagguca

SEQ ID NO: 1621104 - RNA, 19 nt, Artificial Sequence
  Description of Artificial Sequence: Synthetic oligonucleotide
  Antisense strand to SEQ ID NO: 1621103
ugaccuuggacacgucucc

SEQ ID NO: 1621105 - RNA, 19 nt, Artificial Sequence
  Description of Artificial Sequence: Synthetic oligonucleotide
  Sense strand starting at position 112 of SEQ ID NO: 1560742
ggagcaaggcucuguuuca

SEQ ID NO: 1621106 - RNA, 19 nt, Artificial Sequence
  Description of Artificial Sequence: Synthetic oligonucleotide
  Antisense strand to SEQ ID NO: 1621105
ugaaacagagccuugcucc

SEQ ID NO: 1621107 - RNA, 19 nt, Artificial Sequence
  Description of Artificial Sequence: Synthetic oligonucleotide
  Sense strand starting at position 119 of SEQ ID NO: 1560742
ggcucuguuucauggagga

SEQ ID NO: 1621108 - RNA, 19 nt, Artificial Sequence
  Description of Artificial Sequence: Synthetic oligonucleotide
  Antisense strand to SEQ ID NO: 1621107
uccuccaugaaacagagcc

SEQ ID NO: 1621109 - RNA, 19 nt, Artificial Sequence
  Description of Artificial Sequence: Synthetic oligonucleotide
  Sense strand starting at position 516 of SEQ ID NO: 1560742
cugcuauugacuggugcua

SEQ ID NO: 1621110 - RNA, 19 nt, Artificial Sequence
  Description of Artificial Sequence: Synthetic oligonucleotide
  Antisense strand to SEQ ID NO: 1621109
uagcaccagucaauagcag

SEQ ID NO: 1621111 - RNA, 19 nt, Artificial Sequence
  Description of Artificial Sequence: Synthetic oligonucleotide
  Sense strand starting at position 549 of SEQ ID NO: 1560742
ggcccuaugcuguguguuu

SEQ ID NO: 1621112 - RNA, 19 nt, Artificial Sequence
  Description of Artificial Sequence: Synthetic oligonucleotide
  Antisense strand to SEQ ID NO: 1621111
aaacacacagcauagggcc

SEQ ID NO: 1621113 - RNA, 19 nt, Artificial Sequence
  Description of Artificial Sequence: Synthetic oligonucleotide
  Sense strand starting at position 586 of SEQ ID NO: 1560742
ugcuaacccuguuuacaga

SEQ ID NO: 1621114 - RNA, 19 nt, Artificial Sequence
  Description of Artificial Sequence: Synthetic oligonucleotide
  Antisense strand to SEQ ID NO: 1621113
ucuguaaacaggguuagca

SEQ ID NO: 1621115 - RNA, 19 nt, Artificial Sequence
  Description of Artificial Sequence: Synthetic oligonucleotide
  Sense strand starting at position 634 of SEQ ID NO: 1560742
ucaguuucuccaggucuca

SEQ ID NO: 1621116 - RNA, 19 nt, Artificial Sequence
  Description of Artificial Sequence: Synthetic oligonucleotide
  Antisense strand to SEQ ID NO: 1621115
ugagaccuggagaaacuga

SEQ ID NO: 1621117 - RNA, 19 nt, Artificial Sequence
  Description of Artificial Sequence: Synthetic oligonucleotide
  Sense strand starting at position 898 of SEQ ID NO: 1560742
cauaaauguugaugccuga

SEQ ID NO: 1621118 - RNA, 19 nt, Artificial Sequence
  Description of Artificial Sequence: Synthetic oligonucleotide
  Antisense strand to SEQ ID NO: 1621117
ucaggcaucaacauuuaug

SEQ ID NO: 1621119 - RNA, 19 nt, Artificial Sequence
  Description of Artificial Sequence: Synthetic oligonucleotide
  Sense strand starting at position 901 of SEQ ID NO: 1560742
aaauguugaugccugaaau

SEQ ID NO: 1621120 - RNA, 19 nt, Artificial Sequence
  Description of Artificial Sequence: Synthetic oligonucleotide
  Antisense strand to SEQ ID NO: 1621119
auuucaggcaucaacauuu

SEQ ID NO: 1621121 - RNA, 19 nt, Artificial Sequence
  Description of Artificial Sequence: Synthetic oligonucleotide
  Sense strand starting at position 902 of SEQ ID NO: 1560742
aauguugaugccugaaaug

SEQ ID NO: 1621122 - RNA, 19 nt, Artificial Sequence
  Description of Artificial Sequence: Synthetic oligonucleotide
  Antisense strand to SEQ ID NO: 1621121
cauuucaggcaucaacauu

SEQ ID NO: 1621123 - RNA, 19 nt, Artificial Sequence
  Description of Artificial Sequence: Synthetic oligonucleotide
  Sense strand starting at position 913 of SEQ ID NO: 1560742
cugaaauggacaggugagu

SEQ ID NO: 1621124 - RNA, 19 nt, Artificial Sequence
  Description of Artificial Sequence: Synthetic oligonucleotide
  Antisense strand to SEQ ID NO: 1621123
acucaccuguccauuucag

SEQ ID NO: 1621125 - RNA, 19 nt, Artificial Sequence
  Description of Artificial Sequence: Synthetic oligonucleotide
  Sense strand starting at position 1445 of SEQ ID NO: 1560742
gugugagagagguagguaa

SEQ ID NO: 1621126 - RNA, 19 nt, Artificial Sequence
  Description of Artificial Sequence: Synthetic oligonucleotide
  Antisense strand to SEQ ID NO: 1621125
uuaccuaccucucucacac

SEQ ID NO: 1621127 - RNA, 19 nt, Artificial Sequence
  Description of Artificial Sequence: Synthetic oligonucleotide
  Sense strand starting at position 2469 of SEQ ID NO: 1560742
gacagagcgugugacuaau

SEQ ID NO: 1621128 - RNA, 19 nt, Artificial Sequence
  Description of Artificial Sequence: Synthetic oligonucleotide
  Antisense strand to SEQ ID NO: 1621127
auuagucacacgcucuguc

SEQ ID NO: 1621129 - RNA, 19 nt, Artificial Sequence
  Description of Artificial Sequence: Synthetic oligonucleotide
  Sense strand starting at position 2475 of SEQ ID NO: 1560742
gcgugugacuaaugugcua

SEQ ID NO: 1621130 - RNA, 19 nt, Artificial Sequence
  Description of Artificial Sequence: Synthetic oligonucleotide
  Antisense strand to SEQ ID NO: 1621129
uagcacauuagucacacgc

SEQ ID NO: 1621131 - RNA, 19 nt, Artificial Sequence
  Description of Artificial Sequence: Synthetic oligonucleotide
  Sense strand starting at position 2477 of SEQ ID NO: 1560742
gugugacuaaugugcuaau

SEQ ID NO: 1621132 - RNA, 19 nt, Artificial Sequence
  Description of Artificial Sequence: Synthetic oligonucleotide
  Antisense strand to SEQ ID NO: 1621131
auuagcacauuagucacac

SEQ ID NO: 1621133 - RNA, 19 nt, Artificial Sequence
  Description of Artificial Sequence: Synthetic oligonucleotide
  Sense strand starting at position 2524 of SEQ ID NO: 1560742
ccgugcaccucauuaagau

SEQ ID NO: 1621134 - RNA, 19 nt, Artificial Sequence
  Description of Artificial Sequence: Synthetic oligonucleotide
  Antisense strand to SEQ ID NO: 1621133
aucuuaaugaggugcacgg

SEQ ID NO: 1621135 - RNA, 19 nt, Artificial Sequence
  Description of Artificial Sequence: Synthetic oligonucleotide
  Sense strand starting at position 2525 of SEQ ID NO: 1560742
cgugcaccucauuaagauc

SEQ ID NO: 1621136 - RNA, 19 nt, Artificial Sequence
  Description of Artificial Sequence: Synthetic oligonucleotide
  Antisense strand to SEQ ID NO: 1621135
gaucuuaaugaggugcacg

SEQ ID NO: 1621137 - RNA, 19 nt, Artificial Sequence
  Description of Artificial Sequence: Synthetic oligonucleotide
  Sense strand starting at position 2551 of SEQ ID NO: 1560742
gcaggauuaagaggcuaau

SEQ ID NO: 1621138 - RNA, 19 nt, Artificial Sequence
  Description of Artificial Sequence: Synthetic oligonucleotide
  Antisense strand to SEQ ID NO: 1621137
auuagccucuuaauccugc

SEQ ID NO: 1621139 - RNA, 19 nt, Artificial Sequence
  Description of Artificial Sequence: Synthetic oligonucleotide
  Sense strand starting at position 3352 of SEQ ID NO: 1560742
gcgugagugcuuucuacug

SEQ ID NO: 1621140 - RNA, 19 nt, Artificial Sequence
  Description of Artificial Sequence: Synthetic oligonucleotide
  Antisense strand to SEQ ID NO: 1621139
caguagaaagcacucacgc

SEQ ID NO: 1621141 - RNA, 19 nt, Artificial Sequence
  Description of Artificial Sequence: Synthetic oligonucleotide
  Sense strand starting at position 3354 of SEQ ID NO: 1560742
gugagugcuuucuacugag

SEQ ID NO: 1621142 - RNA, 19 nt, Artificial Sequence
  Description of Artificial Sequence: Synthetic oligonucleotide
  Antisense strand to SEQ ID NO: 1621141
cucaguagaaagcacucac

SEQ ID NO: 1621143 - RNA, 19 nt, Artificial Sequence
  Description of Artificial Sequence: Synthetic oligonucleotide
  Sense strand starting at position 3497 of SEQ ID NO: 1560742
ugggacgggucuuuccaau

SEQ ID NO: 1621144 - RNA, 19 nt, Artificial Sequence
  Description of Artificial Sequence: Synthetic oligonucleotide
  Antisense strand to SEQ ID NO: 1621143
auuggaaagacccguccca

SEQ ID NO: 1621145 - RNA, 19 nt, Artificial Sequence
  Description of Artificial Sequence: Synthetic oligonucleotide
  Sense strand starting at position 3674 of SEQ ID NO: 1560742
cagugauaaugaucaugua

SEQ ID NO: 1621146 - RNA, 19 nt, Artificial Sequence
  Description of Artificial Sequence: Synthetic oligonucleotide
  Antisense strand to SEQ ID NO: 1621145
uacaugaucauuaucacug

SEQ ID NO: 1621147 - RNA, 19 nt, Artificial Sequence
  Description of Artificial Sequence: Synthetic oligonucleotide
  Sense strand starting at position 3683 of SEQ ID NO: 1560742
ugaucauguaauugaggcu

SEQ ID NO: 1621148 - RNA, 19 nt, Artificial Sequence
  Description of Artificial Sequence: Synthetic oligonucleotide
  Antisense strand to SEQ ID NO: 1621147
agccucaauuacaugauca

SEQ ID NO: 1621149 - RNA, 19 nt, Artificial Sequence
  Description of Artificial Sequence: Synthetic oligonucleotide
  Sense strand starting at position 3727 of SEQ ID NO: 1560742
guccauuaguugcaaugga

SEQ ID NO: 1621150 - RNA, 19 nt, Artificial Sequence
  Description of Artificial Sequence: Synthetic oligonucleotide
  Antisense strand to SEQ ID NO: 1621149
uccauugcaacuaauggac

SEQ ID NO: 1621151 - RNA, 19 nt, Artificial Sequence
  Description of Artificial Sequence: Synthetic oligonucleotide
  Sense strand starting at position 3736 of SEQ ID NO: 1560742
uugcaauggacuuagguaa

SEQ ID NO: 1621152 - RNA, 19 nt, Artificial Sequence
  Description of Artificial Sequence: Synthetic oligonucleotide
  Antisense strand to SEQ ID NO: 1621151
uuaccuaaguccauugcaa

SEQ ID NO: 1621153 - RNA, 19 nt, Artificial Sequence
  Description of Artificial Sequence: Synthetic oligonucleotide
  Sense strand starting at position 3743 of SEQ ID NO: 1560742
ggacuuagguaauuaauua

SEQ ID NO: 1621154 - RNA, 19 nt, Artificial Sequence
  Description of Artificial Sequence: Synthetic oligonucleotide
  Antisense strand to SEQ ID NO: 1621153
uaauuaauuaccuaagucc

SEQ ID NO: 1621155 - RNA, 19 nt, Artificial Sequence
  Description of Artificial Sequence: Synthetic oligonucleotide
  Sense strand starting at position 3750 of SEQ ID NO: 1560742
gguaauuaauuaggcaauu

SEQ ID NO: 1621156 - RNA, 19 nt, Artificial Sequence
  Description of Artificial Sequence: Synthetic oligonucleotide
  Antisense strand to SEQ ID NO: 1621155
aauugccuaauuaauuacc

SEQ ID NO: 1621157 - RNA, 19 nt, Artificial Sequence
  Description of Artificial Sequence: Synthetic oligonucleotide
  Sense strand starting at position 3881 of SEQ ID NO: 1560742
gcugguacacaacgaguua

SEQ ID NO: 1621158 - RNA, 19 nt, Artificial Sequence
  Description of Artificial Sequence: Synthetic oligonucleotide
  Antisense strand to SEQ ID NO: 1621157
uaacucguuguguaccagc

SEQ ID NO: 1621159 - RNA, 19 nt, Artificial Sequence
  Description of Artificial Sequence: Synthetic oligonucleotide
  Sense strand starting at position 3977 of SEQ ID NO: 1560742
ggcucacaccgguaaucua

SEQ ID NO: 1621160 - RNA, 19 nt, Artificial Sequence
  Description of Artificial Sequence: Synthetic oligonucleotide
  Antisense strand to SEQ ID NO: 1621159
uagauuaccggugugagcc

SEQ ID NO: 1621161 - RNA, 19 nt, Artificial Sequence
  Description of Artificial Sequence: Synthetic oligonucleotide
  Sense strand starting at position 236 of SEQ ID NO: 1560743
ggucgugacaaccacagau

SEQ ID NO: 1621162 - RNA, 19 nt, Artificial Sequence
  Description of Artificial Sequence: Synthetic oligonucleotide
  Antisense strand to SEQ ID NO: 1621161
aucugugguugucacgacc

SEQ ID NO: 1621163 - RNA, 19 nt, Artificial Sequence
  Description of Artificial Sequence: Synthetic oligonucleotide
  Sense strand starting at position 343 of SEQ ID NO: 1560743
gccaaagucugguuccauc

SEQ ID NO: 1621164 - RNA, 19 nt, Artificial Sequence
  Description of Artificial Sequence: Synthetic oligonucleotide
  Antisense strand to SEQ ID NO: 1621163
gauggaaccagacuuuggc

SEQ ID NO: 1621165 - RNA, 19 nt, Artificial Sequence
  Description of Artificial Sequence: Synthetic oligonucleotide
  Sense strand starting at position 351 of SEQ ID NO: 1560743
cugguuccaucuccagaga

SEQ ID NO: 1621166 - RNA, 19 nt, Artificial Sequence
  Description of Artificial Sequence: Synthetic oligonucleotide
  Antisense strand to SEQ ID NO: 1621165
ucucuggagauggaaccag

SEQ ID NO: 1621167 - RNA, 19 nt, Artificial Sequence
  Description of Artificial Sequence: Synthetic oligonucleotide
  Sense strand starting at position 352 of SEQ ID NO: 1560743
ugguuccaucuccagagau

SEQ ID NO: 1621168 - RNA, 19 nt, Artificial Sequence
  Description of Artificial Sequence: Synthetic oligonucleotide
  Antisense strand to SEQ ID NO: 1621167
aucucuggagauggaacca

SEQ ID NO: 1621169 - RNA, 19 nt, Artificial Sequence
  Description of Artificial Sequence: Synthetic oligonucleotide
  Sense strand starting at position 626 of SEQ ID NO: 1560743
uguggaauggucuagacac

SEQ ID NO: 1621170 - RNA, 19 nt, Artificial Sequence
  Description of Artificial Sequence: Synthetic oligonucleotide
  Antisense strand to SEQ ID NO: 1621169
gugucuagaccauuccaca

SEQ ID NO: 1621171 - RNA, 19 nt, Artificial Sequence
  Description of Artificial Sequence: Synthetic oligonucleotide
  Sense strand starting at position 684 of SEQ ID NO: 1560743
gugggagacuugcagaaug

SEQ ID NO: 1621172 - RNA, 19 nt, Artificial Sequence
  Description of Artificial Sequence: Synthetic oligonucleotide
  Antisense strand to SEQ ID NO: 1621171
cauucugcaagucucccac

SEQ ID NO: 1621173 - RNA, 19 nt, Artificial Sequence
  Description of Artificial Sequence: Synthetic oligonucleotide
  Sense strand starting at position 686 of SEQ ID NO: 1560743
gggagacuugcagaaugca

SEQ ID NO: 1621174 - RNA, 19 nt, Artificial Sequence
  Description of Artificial Sequence: Synthetic oligonucleotide
  Antisense strand to SEQ ID NO: 1621173
ugcauucugcaagucuccc

SEQ ID NO: 1621175 - RNA, 19 nt, Artificial Sequence
  Description of Artificial Sequence: Synthetic oligonucleotide
  Sense strand starting at position 902 of SEQ ID NO: 1560743
cuagcagauucugaaacau

SEQ ID NO: 1621176 - RNA, 19 nt, Artificial Sequence
  Description of Artificial Sequence: Synthetic oligonucleotide
  Antisense strand to SEQ ID NO: 1621175
auguuucagaaucugcuag

SEQ ID NO: 1621177 - RNA, 19 nt, Artificial Sequence
  Description of Artificial Sequence: Synthetic oligonucleotide
  Sense strand starting at position 959 of SEQ ID NO: 1560743
ggacaaaugugcccuugac

SEQ ID NO: 1621178 - RNA, 19 nt, Artificial Sequence
  Description of Artificial Sequence: Synthetic oligonucleotide
  Antisense strand to SEQ ID NO: 1621177
gucaagggcacauuugucc

SEQ ID NO: 1621179 - RNA, 19 nt, Artificial Sequence
  Description of Artificial Sequence: Synthetic oligonucleotide
  Sense strand starting at position 1204 of SEQ ID NO: 1560743
accagauggucuccagaac

SEQ ID NO: 1621180 - RNA, 19 nt, Artificial Sequence
  Description of Artificial Sequence: Synthetic oligonucleotide
  Antisense strand to SEQ ID NO: 1621179
guucuggagaccaucuggu

SEQ ID NO: 1621181 - RNA, 19 nt, Artificial Sequence
  Description of Artificial Sequence: Synthetic oligonucleotide
  Sense strand starting at position 2024 of SEQ ID NO: 1560743
gcugccugucgggaauugu

SEQ ID NO: 1621182 - RNA, 19 nt, Artificial Sequence
  Description of Artificial Sequence: Synthetic oligonucleotide
  Antisense strand to SEQ ID NO: 1621181
acaauucccgacaggcagc

SEQ ID NO: 1621183 - RNA, 19 nt, Artificial Sequence
  Description of Artificial Sequence: Synthetic oligonucleotide
  Sense strand starting at position 2114 of SEQ ID NO: 1560743
gcaggcuguucggcuaaua

SEQ ID NO: 1621184 - RNA, 19 nt, Artificial Sequence
  Description of Artificial Sequence: Synthetic oligonucleotide
  Antisense strand to SEQ ID NO: 1621183
uauuagccgaacagccugc

SEQ ID NO: 1621185 - RNA, 19 nt, Artificial Sequence
  Description of Artificial Sequence: Synthetic oligonucleotide
  Sense strand starting at position 2125 of SEQ ID NO: 1560743
ggcuaauaccguugagguu

SEQ ID NO: 1621186 - RNA, 19 nt, Artificial Sequence
  Description of Artificial Sequence: Synthetic oligonucleotide
  Antisense strand to SEQ ID NO: 1621185
aaccucaacgguauuagcc

SEQ ID NO: 1621187 - RNA, 19 nt, Artificial Sequence
  Description of Artificial Sequence: Synthetic oligonucleotide
  Sense strand starting at position 2126 of SEQ ID NO: 1560743
gcuaauaccguugagguuu

SEQ ID NO: 1621188 - RNA, 19 nt, Artificial Sequence
  Description of Artificial Sequence: Synthetic oligonucleotide
  Antisense strand to SEQ ID NO: 1621187
aaaccucaacgguauuagc

SEQ ID NO: 1621189 - RNA, 19 nt, Artificial Sequence
  Description of Artificial Sequence: Synthetic oligonucleotide
  Sense strand starting at position 2385 of SEQ ID NO: 1560743
uguagucguccuggcagaa

SEQ ID NO: 1621190 - RNA, 19 nt, Artificial Sequence
  Description of Artificial Sequence: Synthetic oligonucleotide
  Antisense strand to SEQ ID NO: 1621189
uucugccaggacgacuaca

SEQ ID NO: 1621191 - RNA, 19 nt, Artificial Sequence
  Description of Artificial Sequence: Synthetic oligonucleotide
  Sense strand starting at position 2397 of SEQ ID NO: 1560743
ggcagaaauugcugagaaa

SEQ ID NO: 1621192 - RNA, 19 nt, Artificial Sequence
  Description of Artificial Sequence: Synthetic oligonucleotide
  Antisense strand to SEQ ID NO: 1621191
uuucucagcaauuucugcc

SEQ ID NO: 1621193 - RNA, 19 nt, Artificial Sequence
  Description of Artificial Sequence: Synthetic oligonucleotide
  Sense strand starting at position 2438 of SEQ ID NO: 1560743
cgaggauguagaugucaaa

SEQ ID NO: 1621194 - RNA, 19 nt, Artificial Sequence
  Description of Artificial Sequence: Synthetic oligonucleotide
  Antisense strand to SEQ ID NO: 1621193
uuugacaucuacauccucg

SEQ ID NO: 1621195 - RNA, 19 nt, Artificial Sequence
  Description of Artificial Sequence: Synthetic oligonucleotide
  Sense strand starting at position 2441 of SEQ ID NO: 1560743
ggauguagaugucaaacuc

SEQ ID NO: 1621196 - RNA, 19 nt, Artificial Sequence
  Description of Artificial Sequence: Synthetic oligonucleotide
  Antisense strand to SEQ ID NO: 1621195
gaguuugacaucuacaucc

SEQ ID NO: 1621197 - RNA, 19 nt, Artificial Sequence
  Description of Artificial Sequence: Synthetic oligonucleotide
  Sense strand starting at position 2534 of SEQ ID NO: 1560743
gcggguggccuauaccauu

SEQ ID NO: 1621198 - RNA, 19 nt, Artificial Sequence
  Description of Artificial Sequence: Synthetic oligonucleotide
  Antisense strand to SEQ ID NO: 1621197
aaugguauaggccacccgc

SEQ ID NO: 1621199 - RNA, 19 nt, Artificial Sequence
  Description of Artificial Sequence: Synthetic oligonucleotide
  Sense strand starting at position 2572 of SEQ ID NO: 1560743
aauagaaagucaugauagu

SEQ ID NO: 1621200 - RNA, 19 nt, Artificial Sequence
  Description of Artificial Sequence: Synthetic oligonucleotide
  Antisense strand to SEQ ID NO: 1621199
acuaucaugacuuucuauu

SEQ ID NO: 1621201 - RNA, 19 nt, Artificial Sequence
  Description of Artificial Sequence: Synthetic oligonucleotide
  Sense strand starting at position 2581 of SEQ ID NO: 1560743
ucaugauagucaguuccua

SEQ ID NO: 1621202 - RNA, 19 nt, Artificial Sequence
  Description of Artificial Sequence: Synthetic oligonucleotide
  Antisense strand to SEQ ID NO: 1621201
uaggaacugacuaucauga

SEQ ID NO: 1621203 - RNA, 19 nt, Artificial Sequence
  Description of Artificial Sequence: Synthetic oligonucleotide
  Sense strand starting at position 2586 of SEQ ID NO: 1560743
auagucaguuccuaaggga

SEQ ID NO: 1621204 - RNA, 19 nt, Artificial Sequence
  Description of Artificial Sequence: Synthetic oligonucleotide
  Antisense strand to SEQ ID NO: 1621203
ucccuuaggaacugacuau

SEQ ID NO: 1621205 - RNA, 19 nt, Artificial Sequence
  Description of Artificial Sequence: Synthetic oligonucleotide
  Sense strand starting at position 2620 of SEQ ID NO: 1560743
ugggacuuguagucuggaa

SEQ ID NO: 1621206 - RNA, 19 nt, Artificial Sequence
  Description of Artificial Sequence: Synthetic oligonucleotide
  Antisense strand to SEQ ID NO: 1621205
uuccagacuacaaguccca

SEQ ID NO: 1621207 - RNA, 19 nt, Artificial Sequence
  Description of Artificial Sequence: Synthetic oligonucleotide
  Sense strand starting at position 2657 of SEQ ID NO: 1560743
gucgguggcagguauuuau

SEQ ID NO: 1621208 - RNA, 19 nt, Artificial Sequence
  Description of Artificial Sequence: Synthetic oligonucleotide
  Antisense strand to SEQ ID NO: 1621207
auaaauaccugccaccgac

SEQ ID NO: 1621209 - RNA, 19 nt, Artificial Sequence
  Description of Artificial Sequence: Synthetic oligonucleotide
  Sense strand starting at position 2778 of SEQ ID NO: 1560743
uaaggaacgucccuuugua

SEQ ID NO: 1621210 - RNA, 19 nt, Artificial Sequence
  Description of Artificial Sequence: Synthetic oligonucleotide
  Antisense strand to SEQ ID NO: 1621209
uacaaagggacguuccuua

SEQ ID NO: 1621211 - RNA, 19 nt, Artificial Sequence
  Description of Artificial Sequence: Synthetic oligonucleotide
  Sense strand starting at position 2782 of SEQ ID NO: 1560743
gaacgucccuuuguacaga

SEQ ID NO: 1621212 - RNA, 19 nt, Artificial Sequence
  Description of Artificial Sequence: Synthetic oligonucleotide
  Antisense strand to SEQ ID NO: 1621211
ucuguacaaagggacguuc

SEQ ID NO: 1621213 - RNA, 19 nt, Artificial Sequence
  Description of Artificial Sequence: Synthetic oligonucleotide
  Sense strand starting at position 2908 of SEQ ID NO: 1560743
ccaagugagaaguggcauu

SEQ ID NO: 1621214 - RNA, 19 nt, Artificial Sequence
  Description of Artificial Sequence: Synthetic oligonucleotide
  Antisense strand to SEQ ID NO: 1621213
aaugccacuucucacuugg

SEQ ID NO: 1621215 - RNA, 19 nt, Artificial Sequence
  Description of Artificial Sequence: Synthetic oligonucleotide
  Sense strand starting at position 2921 of SEQ ID NO: 1560743
ggcauuggugccgauuaag

SEQ ID NO: 1621216 - RNA, 19 nt, Artificial Sequence
  Description of Artificial Sequence: Synthetic oligonucleotide
  Antisense strand to SEQ ID NO: 1621215
cuuaaucggcaccaaugcc

SEQ ID NO: 1621217 - RNA, 19 nt, Artificial Sequence
  Description of Artificial Sequence: Synthetic oligonucleotide
  Sense strand starting at position 3011 of SEQ ID NO: 1560743
agucucaguuuccucagau

SEQ ID NO: 1621218 - RNA, 19 nt, Artificial Sequence
  Description of Artificial Sequence: Synthetic oligonucleotide
  Antisense strand to SEQ ID NO: 1621217
aucugaggaaacugagacu

SEQ ID NO: 1621219 - RNA, 19 nt, Artificial Sequence
  Description of Artificial Sequence: Synthetic oligonucleotide
  Sense strand starting at position 3012 of SEQ ID NO: 1560743
gucucaguuuccucagaua

SEQ ID NO: 1621220 - RNA, 19 nt, Artificial Sequence
  Description of Artificial Sequence: Synthetic oligonucleotide
  Antisense strand to SEQ ID NO: 1621219
uaucugaggaaacugagac

SEQ ID NO: 1621221 - RNA, 19 nt, Artificial Sequence
  Description of Artificial Sequence: Synthetic oligonucleotide
  Sense strand starting at position 3059 of SEQ ID NO: 1560743
gccagcagcaugugagaau

SEQ ID NO: 1621222 - RNA, 19 nt, Artificial Sequence
  Description of Artificial Sequence: Synthetic oligonucleotide
  Antisense strand to SEQ ID NO: 1621221
auucucacaugcugcuggc

SEQ ID NO: 1621223 - RNA, 19 nt, Artificial Sequence
  Description of Artificial Sequence: Synthetic oligonucleotide
  Sense strand starting at position 3071 of SEQ ID NO: 1560743
ugagaauucuguuuguuug

SEQ ID NO: 1621224 - RNA, 19 nt, Artificial Sequence
  Description of Artificial Sequence: Synthetic oligonucleotide
  Antisense strand to SEQ ID NO: 1621223
caaacaaacagaauucuca

SEQ ID NO: 1621225 - RNA, 19 nt, Artificial Sequence
  Description of Artificial Sequence: Synthetic oligonucleotide
  Sense strand starting at position 3208 of SEQ ID NO: 1560743
ccuccugaguagcuguaaa

SEQ ID NO: 1621226 - RNA, 19 nt, Artificial Sequence
  Description of Artificial Sequence: Synthetic oligonucleotide
  Antisense strand to SEQ ID NO: 1621225
uuuacagcuacucaggagg

SEQ ID NO: 1621227 - RNA, 19 nt, Artificial Sequence
  Description of Artificial Sequence: Synthetic oligonucleotide
  Sense strand starting at position 3220 of SEQ ID NO: 1560743
cuguaaauuacaggcguga

SEQ ID NO: 1621228 - RNA, 19 nt, Artificial Sequence
  Description of Artificial Sequence: Synthetic oligonucleotide
  Antisense strand to SEQ ID NO: 1621227
ucacgccuguaauuuacag

SEQ ID NO: 1621229 - RNA, 19 nt, Artificial Sequence
  Description of Artificial Sequence: Synthetic oligonucleotide
  Sense strand starting at position 3260 of SEQ ID NO: 1560743
gggaguuucugagugugcu

SEQ ID NO: 1621230 - RNA, 19 nt, Artificial Sequence
  Description of Artificial Sequence: Synthetic oligonucleotide
  Antisense strand to SEQ ID NO: 1621229
agcacacucagaaacuccc

SEQ ID NO: 1621231 - RNA, 19 nt, Artificial Sequence
  Description of Artificial Sequence: Synthetic oligonucleotide
  Sense strand starting at position 3568 of SEQ ID NO: 1560743
gaaaguugugcccaguaua

SEQ ID NO: 1621232 - RNA, 19 nt, Artificial Sequence
  Description of Artificial Sequence: Synthetic oligonucleotide
  Antisense strand to SEQ ID NO: 1621231
uauacugggcacaacuuuc

SEQ ID NO: 1621233 - RNA, 19 nt, Artificial Sequence
  Description of Artificial Sequence: Synthetic oligonucleotide
  Sense strand starting at position 3571 of SEQ ID NO: 1560743
aguugugcccaguauaaag

SEQ ID NO: 1621234 - RNA, 19 nt, Artificial Sequence
  Description of Artificial Sequence: Synthetic oligonucleotide
  Antisense strand to SEQ ID NO: 1621233
cuuuauacugggcacaacu

SEQ ID NO: 1621235 - RNA, 19 nt, Artificial Sequence
  Description of Artificial Sequence: Synthetic oligonucleotide
  Sense strand starting at position 3591 of SEQ ID NO: 1560743
agagcugucaugcagggaa

SEQ ID NO: 1621236 - RNA, 19 nt, Artificial Sequence
  Description of Artificial Sequence: Synthetic oligonucleotide
  Antisense strand to SEQ ID NO: 1621235
uucccugcaugacagcucu

SEQ ID NO: 1621237 - RNA, 19 nt, Artificial Sequence
  Description of Artificial Sequence: Synthetic oligonucleotide
  Sense strand starting at position 3593 of SEQ ID NO: 1560743
agcugucaugcagggaaca

SEQ ID NO: 1621238 - RNA, 19 nt, Artificial Sequence
  Description of Artificial Sequence: Synthetic oligonucleotide
  Antisense strand to SEQ ID NO: 1621237
uguucccugcaugacagcu

SEQ ID NO: 1621239 - RNA, 19 nt, Artificial Sequence
  Description of Artificial Sequence: Synthetic oligonucleotide
  Sense strand starting at position 3714 of SEQ ID NO: 1560743
gcagaagucaagugacgaa

SEQ ID NO: 1621240 - RNA, 19 nt, Artificial Sequence
  Description of Artificial Sequence: Synthetic oligonucleotide
  Antisense strand to SEQ ID NO: 1621239
uucgucacuugacuucugc

SEQ ID NO: 1621241 - RNA, 19 nt, Artificial Sequence
  Description of Artificial Sequence: Synthetic oligonucleotide
  Sense strand starting at position 169 of SEQ ID NO: 1560744
agaauaaaugaguagcugu

SEQ ID NO: 1621242 - RNA, 19 nt, Artificial Sequence
  Description of Artificial Sequence: Synthetic oligonucleotide
  Antisense strand to SEQ ID NO: 1621241
acagcuacucauuuauucu

SEQ ID NO: 1621243 - RNA, 19 nt, Artificial Sequence
  Description of Artificial Sequence: Synthetic oligonucleotide
  Sense strand starting at position 271 of SEQ ID NO: 1560744
acaaguauaugacacagaa

SEQ ID NO: 1621244 - RNA, 19 nt, Artificial Sequence
  Description of Artificial Sequence: Synthetic oligonucleotide
  Antisense strand to SEQ ID NO: 1621243
uucugugucauauacuugu

SEQ ID NO: 1621245 - RNA, 19 nt, Artificial Sequence
  Description of Artificial Sequence: Synthetic oligonucleotide
  Sense strand starting at position 403 of SEQ ID NO: 1560744
uguugugagcugcauaaug

SEQ ID NO: 1621246 - RNA, 19 nt, Artificial Sequence
  Description of Artificial Sequence: Synthetic oligonucleotide
  Antisense strand to SEQ ID NO: 1621245
cauuaugcagcucacaaca

SEQ ID NO: 1621247 - RNA, 19 nt, Artificial Sequence
  Description of Artificial Sequence: Synthetic oligonucleotide
  Sense strand starting at position 488 of SEQ ID NO: 1560744
auuccuauugccugaugac

SEQ ID NO: 1621248 - RNA, 19 nt, Artificial Sequence
  Description of Artificial Sequence: Synthetic oligonucleotide
  Antisense strand to SEQ ID NO: 1621247
gucaucaggcaauaggaau

SEQ ID NO: 1621249 - RNA, 19 nt, Artificial Sequence
  Description of Artificial Sequence: Synthetic oligonucleotide
  Sense strand starting at position 489 of SEQ ID NO: 1560744
uuccuauugccugaugaca

SEQ ID NO: 1621250 - RNA, 19 nt, Artificial Sequence
  Description of Artificial Sequence: Synthetic oligonucleotide
  Antisense strand to SEQ ID NO: 1621249
ugucaucaggcaauaggaa

SEQ ID NO: 1621251 - RNA, 19 nt, Artificial Sequence
  Description of Artificial Sequence: Synthetic oligonucleotide
  Sense strand starting at position 525 of SEQ ID NO: 1560744
caaaguauugcucaugugu

SEQ ID NO: 1621252 - RNA, 19 nt, Artificial Sequence
  Description of Artificial Sequence: Synthetic oligonucleotide
  Antisense strand to SEQ ID NO: 1621251
acacaugagcaauacuuug

SEQ ID NO: 1621253 - RNA, 19 nt, Artificial Sequence
  Description of Artificial Sequence: Synthetic oligonucleotide
  Sense strand starting at position 1070 of SEQ ID NO: 1560744
ugaggacauuccucaguca

SEQ ID NO: 1621254 - RNA, 19 nt, Artificial Sequence
  Description of Artificial Sequence: Synthetic oligonucleotide
  Antisense strand to SEQ ID NO: 1621253
ugacugaggaauguccuca

SEQ ID NO: 1621255 - RNA, 19 nt, Artificial Sequence
  Description of Artificial Sequence: Synthetic oligonucleotide
  Sense strand starting at position 1073 of SEQ ID NO: 1560744
ggacauuccucagucauac

SEQ ID NO: 1621256 - RNA, 19 nt, Artificial Sequence
  Description of Artificial Sequence: Synthetic oligonucleotide
  Antisense strand to SEQ ID NO: 1621255
guaugacugaggaaugucc

SEQ ID NO: 1621257 - RNA, 19 nt, Artificial Sequence
  Description of Artificial Sequence: Synthetic oligonucleotide
  Sense strand starting at position 1110 of SEQ ID NO: 1560744
aucucagaaucugugucau

SEQ ID NO: 1621258 - RNA, 19 nt, Artificial Sequence
  Description of Artificial Sequence: Synthetic oligonucleotide
  Antisense strand to SEQ ID NO: 1621257
augacacagauucugagau

SEQ ID NO: 1621259 - RNA, 19 nt, Artificial Sequence
  Description of Artificial Sequence: Synthetic oligonucleotide
  Sense strand starting at position 1308 of SEQ ID NO: 1560744
ugagaucacucuccaguua

SEQ ID NO: 1621260 - RNA, 19 nt, Artificial Sequence
  Description of Artificial Sequence: Synthetic oligonucleotide
  Antisense strand to SEQ ID NO: 1621259
uaacuggagagugaucuca

SEQ ID NO: 1621261 - RNA, 19 nt, Artificial Sequence
  Description of Artificial Sequence: Synthetic oligonucleotide
  Sense strand starting at position 1323 of SEQ ID NO: 1560744
guuagagaaccggacaguu

SEQ ID NO: 1621262 - RNA, 19 nt, Artificial Sequence
  Description of Artificial Sequence: Synthetic oligonucleotide
  Antisense strand to SEQ ID NO: 1621261
aacuguccgguucucuaac

SEQ ID NO: 1621263 - RNA, 19 nt, Artificial Sequence
  Description of Artificial Sequence: Synthetic oligonucleotide
  Sense strand starting at position 1760 of SEQ ID NO: 1560744
gaaggagcuuggccugaau

SEQ ID NO: 1621264 - RNA, 19 nt, Artificial Sequence
  Description of Artificial Sequence: Synthetic oligonucleotide
  Antisense strand to SEQ ID NO: 1621263
auucaggccaagcuccuuc

SEQ ID NO: 1621265 - RNA, 19 nt, Artificial Sequence
  Description of Artificial Sequence: Synthetic oligonucleotide
  Sense strand starting at position 2065 of SEQ ID NO: 1560744
accagagcgcuuucacguu

SEQ ID NO: 1621266 - RNA, 19 nt, Artificial Sequence
  Description of Artificial Sequence: Synthetic oligonucleotide
  Antisense strand to SEQ ID NO: 1621265
aacgugaaagcgcucuggu

SEQ ID NO: 1621267 - RNA, 19 nt, Artificial Sequence
  Description of Artificial Sequence: Synthetic oligonucleotide
  Sense strand starting at position 2119 of SEQ ID NO: 1560744
gccucugaccaugagcuua

SEQ ID NO: 1621268 - RNA, 19 nt, Artificial Sequence
  Description of Artificial Sequence: Synthetic oligonucleotide
  Antisense strand to SEQ ID NO: 1621267
uaagcucauggucagaggc

SEQ ID NO: 1621269 - RNA, 19 nt, Artificial Sequence
  Description of Artificial Sequence: Synthetic oligonucleotide
  Sense strand starting at position 2157 of SEQ ID NO: 1560744
cugacacaucuguggucua

SEQ ID NO: 1621270 - RNA, 19 nt, Artificial Sequence
  Description of Artificial Sequence: Synthetic oligonucleotide
  Antisense strand to SEQ ID NO: 1621269
uagaccacagaugugucag

SEQ ID NO: 1621271 - RNA, 19 nt, Artificial Sequence
  Description of Artificial Sequence: Synthetic oligonucleotide
  Sense strand starting at position 2270 of SEQ ID NO: 1560744
gugggaaguugugcccaau

SEQ ID NO: 1621272 - RNA, 19 nt, Artificial Sequence
  Description of Artificial Sequence: Synthetic oligonucleotide
  Antisense strand to SEQ ID NO: 1621271
auugggcacaacuucccac

SEQ ID NO: 1621273 - RNA, 19 nt, Artificial Sequence
  Description of Artificial Sequence: Synthetic oligonucleotide
  Sense strand starting at position 2273 of SEQ ID NO: 1560744
ggaaguugugcccaaucau

SEQ ID NO: 1621274 - RNA, 19 nt, Artificial Sequence
  Description of Artificial Sequence: Synthetic oligonucleotide
  Antisense strand to SEQ ID NO: 1621273
augauugggcacaacuucc

SEQ ID NO: 1621275 - RNA, 19 nt, Artificial Sequence
  Description of Artificial Sequence: Synthetic oligonucleotide
  Sense strand starting at position 2331 of SEQ ID NO: 1560744
ggaguuucacagugagaua

SEQ ID NO: 1621276 - RNA, 19 nt, Artificial Sequence
  Description of Artificial Sequence: Synthetic oligonucleotide
  Antisense strand to SEQ ID NO: 1621275
uaucucacugugaaacucc

SEQ ID NO: 1621277 - RNA, 19 nt, Artificial Sequence
  Description of Artificial Sequence: Synthetic oligonucleotide
  Sense strand starting at position 2368 of SEQ ID NO: 1560744
gaaauuacagaauguguaa

SEQ ID NO: 1621278 - RNA, 19 nt, Artificial Sequence
  Description of Artificial Sequence: Synthetic oligonucleotide
  Antisense strand to SEQ ID NO: 1621277
uuacacauucuguaauuuc

SEQ ID NO: 1621279 - RNA, 19 nt, Artificial Sequence
  Description of Artificial Sequence: Synthetic oligonucleotide
  Sense strand starting at position 2371 of SEQ ID NO: 1560744
auuacagaauguguaaaca

SEQ ID NO: 1621280 - RNA, 19 nt, Artificial Sequence
  Description of Artificial Sequence: Synthetic oligonucleotide
  Antisense strand to SEQ ID NO: 1621279
uguuuacacauucuguaau

SEQ ID NO: 1621281 - RNA, 19 nt, Artificial Sequence
  Description of Artificial Sequence: Synthetic oligonucleotide
  Sense strand starting at position 2441 of SEQ ID NO: 1560744
gguggaguccuuuaaacau

SEQ ID NO: 1621282 - RNA, 19 nt, Artificial Sequence
  Description of Artificial Sequence: Synthetic oligonucleotide
  Antisense strand to SEQ ID NO: 1621281
auguuuaaaggacuccacc

SEQ ID NO: 1621283 - RNA, 19 nt, Artificial Sequence
  Description of Artificial Sequence: Synthetic oligonucleotide
  Sense strand starting at position 2612 of SEQ ID NO: 1560744
uaaugugaugcaugucuca

SEQ ID NO: 1621284 - RNA, 19 nt, Artificial Sequence
  Description of Artificial Sequence: Synthetic oligonucleotide
  Antisense strand to SEQ ID NO: 1621283
ugagacaugcaucacauua

SEQ ID NO: 1621285 - RNA, 19 nt, Artificial Sequence
  Description of Artificial Sequence: Synthetic oligonucleotide
  Sense strand starting at position 2615 of SEQ ID NO: 1560744
ugugaugcaugucucaauu

SEQ ID NO: 1621286 - RNA, 19 nt, Artificial Sequence
  Description of Artificial Sequence: Synthetic oligonucleotide
  Antisense strand to SEQ ID NO: 1621285
aauugagacaugcaucaca

SEQ ID NO: 1621287 - RNA, 19 nt, Artificial Sequence
  Description of Artificial Sequence: Synthetic oligonucleotide
  Sense strand starting at position 2898 of SEQ ID NO: 1560744
uuaacagaugcuggugaga

SEQ ID NO: 1621288 - RNA, 19 nt, Artificial Sequence
  Description of Artificial Sequence: Synthetic oligonucleotide
  Antisense strand to SEQ ID NO: 1621287
ucucaccagcaucuguuaa

SEQ ID NO: 1621289 - RNA, 19 nt, Artificial Sequence
  Description of Artificial Sequence: Synthetic oligonucleotide
  Sense strand starting at position 2911 of SEQ ID NO: 1560744
gugagauuguggagcaaag

SEQ ID NO: 1621290 - RNA, 19 nt, Artificial Sequence
  Description of Artificial Sequence: Synthetic oligonucleotide
  Antisense strand to SEQ ID NO: 1621289
cuuugcuccacaaucucac

SEQ ID NO: 1621291 - RNA, 19 nt, Artificial Sequence
  Description of Artificial Sequence: Synthetic oligonucleotide
  Sense strand starting at position 2981 of SEQ ID NO: 1560744
agcaguuugguuuggagau

SEQ ID NO: 1621292 - RNA, 19 nt, Artificial Sequence
  Description of Artificial Sequence: Synthetic oligonucleotide
  Antisense strand to SEQ ID NO: 1621291
aucuccaaaccaaacugcu

SEQ ID NO: 1621293 - RNA, 19 nt, Artificial Sequence
  Description of Artificial Sequence: Synthetic oligonucleotide
  Sense strand starting at position 3040 of SEQ ID NO: 1560744
aaucccaucgcuggguaua

SEQ ID NO: 1621294 - RNA, 19 nt, Artificial Sequence
  Description of Artificial Sequence: Synthetic oligonucleotide
  Antisense strand to SEQ ID NO: 1621293
uauacccagcgaugggauu

SEQ ID NO: 1621295 - RNA, 19 nt, Artificial Sequence
  Description of Artificial Sequence: Synthetic oligonucleotide
  Sense strand starting at position 3310 of SEQ ID NO: 1560744
accaaauacuggccagaca

SEQ ID NO: 1621296 - RNA, 19 nt, Artificial Sequence
  Description of Artificial Sequence: Synthetic oligonucleotide
  Antisense strand to SEQ ID NO: 1621295
ugucuggccaguauuuggu

SEQ ID NO: 1621297 - RNA, 19 nt, Artificial Sequence
  Description of Artificial Sequence: Synthetic oligonucleotide
  Sense strand starting at position 3655 of SEQ ID NO: 1560744
aagugagagcgcuaaacau

SEQ ID NO: 1621298 - RNA, 19 nt, Artificial Sequence
  Description of Artificial Sequence: Synthetic oligonucleotide
  Antisense strand to SEQ ID NO: 1621297
auguuuagcgcucucacuu

SEQ ID NO: 1621299 - RNA, 19 nt, Artificial Sequence
  Description of Artificial Sequence: Synthetic oligonucleotide
  Sense strand starting at position 3662 of SEQ ID NO: 1560744
agcgcuaaacauuggguaa

SEQ ID NO: 1621300 - RNA, 19 nt, Artificial Sequence
  Description of Artificial Sequence: Synthetic oligonucleotide
  Antisense strand to SEQ ID NO: 1621299
uuacccaauguuuagcgcu

SEQ ID NO: 1621301 - RNA, 19 nt, Artificial Sequence
  Description of Artificial Sequence: Synthetic oligonucleotide
  Sense strand starting at position 3771 of SEQ ID NO: 1560744
gcacauguaucugcugaau

SEQ ID NO: 1621302 - RNA, 19 nt, Artificial Sequence
  Description of Artificial Sequence: Synthetic oligonucleotide
  Antisense strand to SEQ ID NO: 1621301
auucagcagauacaugugc

SEQ ID NO: 1621303 - RNA, 19 nt, Artificial Sequence
  Description of Artificial Sequence: Synthetic oligonucleotide
  Sense strand starting at position 3821 of SEQ ID NO: 1560744
ggcuucucuguguacagua

SEQ ID NO: 1621304 - RNA, 19 nt, Artificial Sequence
  Description of Artificial Sequence: Synthetic oligonucleotide
  Antisense strand to SEQ ID NO: 1621303
uacuguacacagagaagcc

SEQ ID NO: 1621305 - RNA, 19 nt, Artificial Sequence
  Description of Artificial Sequence: Synthetic oligonucleotide
  Sense strand starting at position 3823 of SEQ ID NO: 1560744
cuucucuguguacaguaua

SEQ ID NO: 1621306 - RNA, 19 nt, Artificial Sequence
  Description of Artificial Sequence: Synthetic oligonucleotide
  Antisense strand to SEQ ID NO: 1621305
uauacuguacacagagaag

SEQ ID NO: 1621307 - RNA, 19 nt, Artificial Sequence
  Description of Artificial Sequence: Synthetic oligonucleotide
  Sense strand starting at position 3826 of SEQ ID NO: 1560744
cucuguguacaguauacau

SEQ ID NO: 1621308 - RNA, 19 nt, Artificial Sequence
  Description of Artificial Sequence: Synthetic oligonucleotide
  Antisense strand to SEQ ID NO: 1621307
auguauacuguacacagag

SEQ ID NO: 1621309 - RNA, 19 nt, Artificial Sequence
  Description of Artificial Sequence: Synthetic oligonucleotide
  Sense strand starting at position 3828 of SEQ ID NO: 1560744
cuguguacaguauacauau

SEQ ID NO: 1621310 - RNA, 19 nt, Artificial Sequence
  Description of Artificial Sequence: Synthetic oligonucleotide
  Antisense strand to SEQ ID NO: 1621309
auauguauacuguacacag

SEQ ID NO: 1621311 - RNA, 19 nt, Artificial Sequence
  Description of Artificial Sequence: Synthetic oligonucleotide
  Sense strand starting at position 3837 of SEQ ID NO: 1560744
guauacauaugcuuggaua

SEQ ID NO: 1621312 - RNA, 19 nt, Artificial Sequence
  Description of Artificial Sequence: Synthetic oligonucleotide
  Antisense strand to SEQ ID NO: 1621311
uauccaagcauauguauac

SEQ ID NO: 1621313 - RNA, 19 nt, Artificial Sequence
  Description of Artificial Sequence: Synthetic oligonucleotide
  Sense strand starting at position 3839 of SEQ ID NO: 1560744
auacauaugcuuggauaag

SEQ ID NO: 1621314 - RNA, 19 nt, Artificial Sequence
  Description of Artificial Sequence: Synthetic oligonucleotide
  Antisense strand to SEQ ID NO: 1621313
cuuauccaagcauauguau

SEQ ID NO: 1621315 - RNA, 19 nt, Artificial Sequence
  Description of Artificial Sequence: Synthetic oligonucleotide
  Sense strand starting at position 3845 of SEQ ID NO: 1560744
augcuuggauaaguuaauu

SEQ ID NO: 1621316 - RNA, 19 nt, Artificial Sequence
  Description of Artificial Sequence: Synthetic oligonucleotide
  Antisense strand to SEQ ID NO: 1621315
aauuaacuuauccaagcau

SEQ ID NO: 1621317 - RNA, 19 nt, Artificial Sequence
  Description of Artificial Sequence: Synthetic oligonucleotide
  Sense strand starting at position 3850 of SEQ ID NO: 1560744
uggauaaguuaauugguuu

SEQ ID NO: 1621318 - RNA, 19 nt, Artificial Sequence
  Description of Artificial Sequence: Synthetic oligonucleotide
  Antisense strand to SEQ ID NO: 1621317
aaaccaauuaacuuaucca

SEQ ID NO: 1621319 - RNA, 19 nt, Artificial Sequence
  Description of Artificial Sequence: Synthetic oligonucleotide
  Sense strand starting at position 3851 of SEQ ID NO: 1560744
ggauaaguuaauugguuuc

SEQ ID NO: 1621320 - RNA, 19 nt, Artificial Sequence
  Description of Artificial Sequence: Synthetic oligonucleotide
  Antisense strand to SEQ ID NO: 1621319
gaaaccaauuaacuuaucc

SEQ ID NO: 1621321 - RNA, 19 nt, Artificial Sequence
  Description of Artificial Sequence: Synthetic oligonucleotide
  Sense strand starting at position 312 of SEQ ID NO: 1560745
gcaaacauagcucacuaga

SEQ ID NO: 1621322 - RNA, 19 nt, Artificial Sequence
  Description of Artificial Sequence: Synthetic oligonucleotide
  Antisense strand to SEQ ID NO: 1621321
ucuagugagcuauguuugc

SEQ ID NO: 1621323 - RNA, 19 nt, Artificial Sequence
  Description of Artificial Sequence: Synthetic oligonucleotide
  Sense strand starting at position 546 of SEQ ID NO: 1560745
uggcccaguuuguaaagau

SEQ ID NO: 1621324 - RNA, 19 nt, Artificial Sequence
  Description of Artificial Sequence: Synthetic oligonucleotide
  Antisense strand to SEQ ID NO: 1621323
aucuuuacaaacugggcca

SEQ ID NO: 1621325 - RNA, 19 nt, Artificial Sequence
  Description of Artificial Sequence: Synthetic oligonucleotide
  Sense strand starting at position 616 of SEQ ID NO: 1560745
ccaaccuguggcugagaau

SEQ ID NO: 1621326 - RNA, 19 nt, Artificial Sequence
  Description of Artificial Sequence: Synthetic oligonucleotide
  Antisense strand to SEQ ID NO: 1621325
auucucagccacagguugg

SEQ ID NO: 1621327 - RNA, 19 nt, Artificial Sequence
  Description of Artificial Sequence: Synthetic oligonucleotide
  Sense strand starting at position 617 of SEQ ID NO: 1560745
caaccuguggcugagaauu

SEQ ID NO: 1621328 - RNA, 19 nt, Artificial Sequence
  Description of Artificial Sequence: Synthetic oligonucleotide
  Antisense strand to SEQ ID NO: 1621327
aauucucagccacagguug

SEQ ID NO: 1621329 - RNA, 19 nt, Artificial Sequence
  Description of Artificial Sequence: Synthetic oligonucleotide
  Sense strand starting at position 619 of SEQ ID NO: 1560745
accuguggcugagaauuaa

SEQ ID NO: 1621330 - RNA, 19 nt, Artificial Sequence
  Description of Artificial Sequence: Synthetic oligonucleotide
  Antisense strand to SEQ ID NO: 1621329
uuaauucucagccacaggu

SEQ ID NO: 1621331 - RNA, 19 nt, Artificial Sequence
  Description of Artificial Sequence: Synthetic oligonucleotide
  Sense strand starting at position 639 of SEQ ID NO: 1560745
gggcaugaugcccaugaaa

SEQ ID NO: 1621332 - RNA, 19 nt, Artificial Sequence
  Description of Artificial Sequence: Synthetic oligonucleotide
  Antisense strand to SEQ ID NO: 1621331
uuucaugggcaucaugccc

SEQ ID NO: 1621333 - RNA, 19 nt, Artificial Sequence
  Description of Artificial Sequence: Synthetic oligonucleotide
  Sense strand starting at position 673 of SEQ ID NO: 1560745
gggcaagacucagauuuac

SEQ ID NO: 1621334 - RNA, 19 nt, Artificial Sequence
  Description of Artificial Sequence: Synthetic oligonucleotide
  Antisense strand to SEQ ID NO: 1621333
guaaaucugagucuugccc

SEQ ID NO: 1621335 - RNA, 19 nt, Artificial Sequence
  Description of Artificial Sequence: Synthetic oligonucleotide
  Sense strand starting at position 904 of SEQ ID NO: 1560745
aagggaauugcucgaacca

SEQ ID NO: 1621336 - RNA, 19 nt, Artificial Sequence
  Description of Artificial Sequence: Synthetic oligonucleotide
  Antisense strand to SEQ ID NO: 1621335
ugguucgagcaauucccuu

SEQ ID NO: 1621337 - RNA, 19 nt, Artificial Sequence
  Description of Artificial Sequence: Synthetic oligonucleotide
  Sense strand starting at position 1294 of SEQ ID NO: 1560745
ugauaauagcccugucuca

SEQ ID NO: 1621338 - RNA, 19 nt, Artificial Sequence
  Description of Artificial Sequence: Synthetic oligonucleotide
  Antisense strand to SEQ ID NO: 1621337
ugagacagggcuauuauca

SEQ ID NO: 1621339 - RNA, 19 nt, Artificial Sequence
  Description of Artificial Sequence: Synthetic oligonucleotide
  Sense strand starting at position 1628 of SEQ ID NO: 1560745
uaggcuuugcgguggcaau

SEQ ID NO: 1621340 - RNA, 19 nt, Artificial Sequence
  Description of Artificial Sequence: Synthetic oligonucleotide
  Antisense strand to SEQ ID NO: 1621339
auugccaccgcaaagccua

SEQ ID NO: 1621341 - RNA, 19 nt, Artificial Sequence
  Description of Artificial Sequence: Synthetic oligonucleotide
  Sense strand starting at position 1759 of SEQ ID NO: 1560745
gcuggcuaucgcgagacuu

SEQ ID NO: 1621342 - RNA, 19 nt, Artificial Sequence
  Description of Artificial Sequence: Synthetic oligonucleotide
  Antisense strand to SEQ ID NO: 1621341
aagucucgcgauagccagc

SEQ ID NO: 1621343 - RNA, 19 nt, Artificial Sequence
  Description of Artificial Sequence: Synthetic oligonucleotide
  Sense strand starting at position 1761 of SEQ ID NO: 1560745
uggcuaucgcgagacuucu

SEQ ID NO: 1621344 - RNA, 19 nt, Artificial Sequence
  Description of Artificial Sequence: Synthetic oligonucleotide
  Antisense strand to SEQ ID NO: 1621343
agaagucucgcgauagcca

SEQ ID NO: 1621345 - RNA, 19 nt, Artificial Sequence
  Description of Artificial Sequence: Synthetic oligonucleotide
  Sense strand starting at position 1816 of SEQ ID NO: 1560745
gcaacaagugagcaacuuu

SEQ ID NO: 1621346 - RNA, 19 nt, Artificial Sequence
  Description of Artificial Sequence: Synthetic oligonucleotide
  Antisense strand to SEQ ID NO: 1621345
aaaguugcucacuuguugc

SEQ ID NO: 1621347 - RNA, 19 nt, Artificial Sequence
  Description of Artificial Sequence: Synthetic oligonucleotide
  Sense strand starting at position 1824 of SEQ ID NO: 1560745
ugagcaacuuuauugauag

SEQ ID NO: 1621348 - RNA, 19 nt, Artificial Sequence
  Description of Artificial Sequence: Synthetic oligonucleotide
  Antisense strand to SEQ ID NO: 1621347
cuaucaauaaaguugcuca

SEQ ID NO: 1621349 - RNA, 19 nt, Artificial Sequence
  Description of Artificial Sequence: Synthetic oligonucleotide
  Sense strand starting at position 1834 of SEQ ID NO: 1560745
uauugauaggcgcggacau

SEQ ID NO: 1621350 - RNA, 19 nt, Artificial Sequence
  Description of Artificial Sequence: Synthetic oligonucleotide
  Antisense strand to SEQ ID NO: 1621349
auguccgcgccuaucaaua

SEQ ID NO: 1621351 - RNA, 19 nt, Artificial Sequence
  Description of Artificial Sequence: Synthetic oligonucleotide
  Sense strand starting at position 1918 of SEQ ID NO: 1560745
ggccgauuccuagagggug

SEQ ID NO: 1621352 - RNA, 19 nt, Artificial Sequence
  Description of Artificial Sequence: Synthetic oligonucleotide
  Antisense strand to SEQ ID NO: 1621351
cacccucuaggaaucggcc

SEQ ID NO: 1621353 - RNA, 19 nt, Artificial Sequence
  Description of Artificial Sequence: Synthetic oligonucleotide
  Sense strand starting at position 1919 of SEQ ID NO: 1560745
gccgauuccuagaggguga

SEQ ID NO: 1621354 - RNA, 19 nt, Artificial Sequence
  Description of Artificial Sequence: Synthetic oligonucleotide
  Antisense strand to SEQ ID NO: 1621353
ucacccucuaggaaucggc

SEQ ID NO: 1621355 - RNA, 19 nt, Artificial Sequence
  Description of Artificial Sequence: Synthetic oligonucleotide
  Sense strand starting at position 1920 of SEQ ID NO: 1560745
ccgauuccuagagggugaa

SEQ ID NO: 1621356 - RNA, 19 nt, Artificial Sequence
  Description of Artificial Sequence: Synthetic oligonucleotide
  Antisense strand to SEQ ID NO: 1621355
uucacccucuaggaaucgg

SEQ ID NO: 1621357 - RNA, 19 nt, Artificial Sequence
  Description of Artificial Sequence: Synthetic oligonucleotide
  Sense strand starting at position 1921 of SEQ ID NO: 1560745
cgauuccuagagggugaaa

SEQ ID NO: 1621358 - RNA, 19 nt, Artificial Sequence
  Description of Artificial Sequence: Synthetic oligonucleotide
  Antisense strand to SEQ ID NO: 1621357
uuucacccucuaggaaucg

SEQ ID NO: 1621359 - RNA, 19 nt, Artificial Sequence
  Description of Artificial Sequence: Synthetic oligonucleotide
  Sense strand starting at position 1952 of SEQ ID NO: 1560745
gcgaucagugcagacagau

SEQ ID NO: 1621360 - RNA, 19 nt, Artificial Sequence
  Description of Artificial Sequence: Synthetic oligonucleotide
  Antisense strand to SEQ ID NO: 1621359
aucugucugcacugaucgc

SEQ ID NO: 1621361 - RNA, 19 nt, Artificial Sequence
  Description of Artificial Sequence: Synthetic oligonucleotide
  Sense strand starting at position 1961 of SEQ ID NO: 1560745
gcagacagauuucgcuagu

SEQ ID NO: 1621362 - RNA, 19 nt, Artificial Sequence
  Description of Artificial Sequence: Synthetic oligonucleotide
  Antisense strand to SEQ ID NO: 1621361
acuagcgaaaucugucugc

SEQ ID NO: 1621363 - RNA, 19 nt, Artificial Sequence
  Description of Artificial Sequence: Synthetic oligonucleotide
  Sense strand starting at position 2154 of SEQ ID NO: 1560745
cugcauagcgaguggucau

SEQ ID NO: 1621364 - RNA, 19 nt, Artificial Sequence
  Description of Artificial Sequence: Synthetic oligonucleotide
  Antisense strand to SEQ ID NO: 1621363
augaccacucgcuaugcag

SEQ ID NO: 1621365 - RNA, 19 nt, Artificial Sequence
  Description of Artificial Sequence: Synthetic oligonucleotide
  Sense strand starting at position 2372 of SEQ ID NO: 1560745
gcuagaauuggaggcauaa

SEQ ID NO: 1621366 - RNA, 19 nt, Artificial Sequence
  Description of Artificial Sequence: Synthetic oligonucleotide
  Antisense strand to SEQ ID NO: 1621365
uuaugccuccaauucuagc

SEQ ID NO: 1621367 - RNA, 19 nt, Artificial Sequence
  Description of Artificial Sequence: Synthetic oligonucleotide
  Sense strand starting at position 2404 of SEQ ID NO: 1560745
ugaccaaucugagacugua

SEQ ID NO: 1621368 - RNA, 19 nt, Artificial Sequence
  Description of Artificial Sequence: Synthetic oligonucleotide
  Antisense strand to SEQ ID NO: 1621367
uacagucucagauugguca

SEQ ID NO: 1621369 - RNA, 19 nt, Artificial Sequence
  Description of Artificial Sequence: Synthetic oligonucleotide
  Sense strand starting at position 2407 of SEQ ID NO: 1560745
ccaaucugagacuguauaa

SEQ ID NO: 1621370 - RNA, 19 nt, Artificial Sequence
  Description of Artificial Sequence: Synthetic oligonucleotide
  Antisense strand to SEQ ID NO: 1621369
uuauacagucucagauugg

SEQ ID NO: 1621371 - RNA, 19 nt, Artificial Sequence
  Description of Artificial Sequence: Synthetic oligonucleotide
  Sense strand starting at position 2514 of SEQ ID NO: 1560745
cgggccaauccugguguua

SEQ ID NO: 1621372 - RNA, 19 nt, Artificial Sequence
  Description of Artificial Sequence: Synthetic oligonucleotide
  Antisense strand to SEQ ID NO: 1621371
uaacaccaggauuggcccg

SEQ ID NO: 1621373 - RNA, 19 nt, Artificial Sequence
  Description of Artificial Sequence: Synthetic oligonucleotide
  Sense strand starting at position 2551 of SEQ ID NO: 1560745
gacaguaucgaagguguga

SEQ ID NO: 1621374 - RNA, 19 nt, Artificial Sequence
  Description of Artificial Sequence: Synthetic oligonucleotide
  Antisense strand to SEQ ID NO: 1621373
ucacaccuucgauacuguc

SEQ ID NO: 1621375 - RNA, 19 nt, Artificial Sequence
  Description of Artificial Sequence: Synthetic oligonucleotide
  Sense strand starting at position 2556 of SEQ ID NO: 1560745
uaucgaaggugugaccaau

SEQ ID NO: 1621376 - RNA, 19 nt, Artificial Sequence
  Description of Artificial Sequence: Synthetic oligonucleotide
  Antisense strand to SEQ ID NO: 1621375
auuggucacaccuucgaua

SEQ ID NO: 1621377 - RNA, 19 nt, Artificial Sequence
  Description of Artificial Sequence: Synthetic oligonucleotide
  Sense strand starting at position 2567 of SEQ ID NO: 1560745
ugaccaaucuuguuuccag

SEQ ID NO: 1621378 - RNA, 19 nt, Artificial Sequence
  Description of Artificial Sequence: Synthetic oligonucleotide
  Antisense strand to SEQ ID NO: 1621377
cuggaaacaagauugguca

SEQ ID NO: 1621379 - RNA, 19 nt, Artificial Sequence
  Description of Artificial Sequence: Synthetic oligonucleotide
  Sense strand starting at position 2648 of SEQ ID NO: 1560745
uguccaauccuagagugag

SEQ ID NO: 1621380 - RNA, 19 nt, Artificial Sequence
  Description of Artificial Sequence: Synthetic oligonucleotide
  Antisense strand to SEQ ID NO: 1621379
cucacucuaggauuggaca

SEQ ID NO: 1621381 - RNA, 19 nt, Artificial Sequence
  Description of Artificial Sequence: Synthetic oligonucleotide
  Sense strand starting at position 2682 of SEQ ID NO: 1560745
ggaguuucaugaucccgga

SEQ ID NO: 1621382 - RNA, 19 nt, Artificial Sequence
  Description of Artificial Sequence: Synthetic oligonucleotide
  Antisense strand to SEQ ID NO: 1621381
uccgggaucaugaaacucc

SEQ ID NO: 1621383 - RNA, 19 nt, Artificial Sequence
  Description of Artificial Sequence: Synthetic oligonucleotide
  Sense strand starting at position 2704 of SEQ ID NO: 1560745
ggugguaguguuuggguuu

SEQ ID NO: 1621384 - RNA, 19 nt, Artificial Sequence
  Description of Artificial Sequence: Synthetic oligonucleotide
  Antisense strand to SEQ ID NO: 1621383
aaacccaaacacuaccacc

SEQ ID NO: 1621385 - RNA, 19 nt, Artificial Sequence
  Description of Artificial Sequence: Synthetic oligonucleotide
  Sense strand starting at position 2711 of SEQ ID NO: 1560745
guguuuggguuugaggaga

SEQ ID NO: 1621386 - RNA, 19 nt, Artificial Sequence
  Description of Artificial Sequence: Synthetic oligonucleotide
  Antisense strand to SEQ ID NO: 1621385
ucuccucaaacccaaacac

SEQ ID NO: 1621387 - RNA, 19 nt, Artificial Sequence
  Description of Artificial Sequence: Synthetic oligonucleotide
  Sense strand starting at position 3181 of SEQ ID NO: 1560745
gacugaguaucggauugau

SEQ ID NO: 1621388 - RNA, 19 nt, Artificial Sequence
  Description of Artificial Sequence: Synthetic oligonucleotide
  Antisense strand to SEQ ID NO: 1621387
aucaauccgauacucaguc

SEQ ID NO: 1621389 - RNA, 19 nt, Artificial Sequence
  Description of Artificial Sequence: Synthetic oligonucleotide
  Sense strand starting at position 3184 of SEQ ID NO: 1560745
ugaguaucggauugauaaa

SEQ ID NO: 1621390 - RNA, 19 nt, Artificial Sequence
  Description of Artificial Sequence: Synthetic oligonucleotide
  Antisense strand to SEQ ID NO: 1621389
uuuaucaauccgauacuca

SEQ ID NO: 1621391 - RNA, 19 nt, Artificial Sequence
  Description of Artificial Sequence: Synthetic oligonucleotide
  Sense strand starting at position 3216 of SEQ ID NO: 1560745
ucgaauuaguaaucaguau

SEQ ID NO: 1621392 - RNA, 19 nt, Artificial Sequence
  Description of Artificial Sequence: Synthetic oligonucleotide
  Antisense strand to SEQ ID NO: 1621391
auacugauuacuaauucga

SEQ ID NO: 1621393 - RNA, 19 nt, Artificial Sequence
  Description of Artificial Sequence: Synthetic oligonucleotide
  Sense strand starting at position 3217 of SEQ ID NO: 1560745
cgaauuaguaaucaguaug

SEQ ID NO: 1621394 - RNA, 19 nt, Artificial Sequence
  Description of Artificial Sequence: Synthetic oligonucleotide
  Antisense strand to SEQ ID NO: 1621393
cauacugauuacuaauucg

SEQ ID NO: 1621395 - RNA, 19 nt, Artificial Sequence
  Description of Artificial Sequence: Synthetic oligonucleotide
  Sense strand starting at position 3222 of SEQ ID NO: 1560745
uaguaaucaguauguaaag

SEQ ID NO: 1621396 - RNA, 19 nt, Artificial Sequence
  Description of Artificial Sequence: Synthetic oligonucleotide
  Antisense strand to SEQ ID NO: 1621395
cuuuacauacugauuacua

SEQ ID NO: 1621397 - RNA, 19 nt, Artificial Sequence
  Description of Artificial Sequence: Synthetic oligonucleotide
  Sense strand starting at position 3224 of SEQ ID NO: 1560745
guaaucaguauguaaaguu

SEQ ID NO: 1621398 - RNA, 19 nt, Artificial Sequence
  Description of Artificial Sequence: Synthetic oligonucleotide
  Antisense strand to SEQ ID NO: 1621397
aacuuuacauacugauuac

SEQ ID NO: 1621399 - RNA, 19 nt, Artificial Sequence
  Description of Artificial Sequence: Synthetic oligonucleotide
  Sense strand starting at position 3233 of SEQ ID NO: 1560745
auguaaaguugcgagaagu

SEQ ID NO: 1621400 - RNA, 19 nt, Artificial Sequence
  Description of Artificial Sequence: Synthetic oligonucleotide
  Antisense strand to SEQ ID NO: 1621399
acuucucgcaacuuuacau

SEQ ID NO: 1621401 - RNA, 19 nt, Artificial Sequence
  Description of Artificial Sequence: Synthetic oligonucleotide
  Sense strand starting at position 22 of SEQ ID NO: 1560746
ccuccaauguguucuggga

SEQ ID NO: 1621402 - RNA, 19 nt, Artificial Sequence
  Description of Artificial Sequence: Synthetic oligonucleotide
  Antisense strand to SEQ ID NO: 1621401
ucccagaacacauuggagg

SEQ ID NO: 1621403 - RNA, 19 nt, Artificial Sequence
  Description of Artificial Sequence: Synthetic oligonucleotide
  Sense strand starting at position 262 of SEQ ID NO: 1560746
uguaaaugguugucucagu

SEQ ID NO: 1621404 - RNA, 19 nt, Artificial Sequence
  Description of Artificial Sequence: Synthetic oligonucleotide
  Antisense strand to SEQ ID NO: 1621403
acugagacaaccauuuaca

SEQ ID NO: 1621405 - RNA, 19 nt, Artificial Sequence
  Description of Artificial Sequence: Synthetic oligonucleotide
  Sense strand starting at position 263 of SEQ ID NO: 1560746
guaaaugguugucucagua

SEQ ID NO: 1621406 - RNA, 19 nt, Artificial Sequence
  Description of Artificial Sequence: Synthetic oligonucleotide
  Antisense strand to SEQ ID NO: 1621405
uacugagacaaccauuuac

SEQ ID NO: 1621407 - RNA, 19 nt, Artificial Sequence
  Description of Artificial Sequence: Synthetic oligonucleotide
  Sense strand starting at position 267 of SEQ ID NO: 1560746
augguugucucaguaacug

SEQ ID NO: 1621408 - RNA, 19 nt, Artificial Sequence
  Description of Artificial Sequence: Synthetic oligonucleotide
  Antisense strand to SEQ ID NO: 1621407
caguuacugagacaaccau

SEQ ID NO: 1621409 - RNA, 19 nt, Artificial Sequence
  Description of Artificial Sequence: Synthetic oligonucleotide
  Sense strand starting at position 578 of SEQ ID NO: 1560746
cugucugaauuauuacguu

SEQ ID NO: 1621410 - RNA, 19 nt, Artificial Sequence
  Description of Artificial Sequence: Synthetic oligonucleotide
  Antisense strand to SEQ ID NO: 1621409
aacguaauaauucagacag

SEQ ID NO: 1621411 - RNA, 19 nt, Artificial Sequence
  Description of Artificial Sequence: Synthetic oligonucleotide
  Sense strand starting at position 635 of SEQ ID NO: 1560746
ugaggaauaaugugcauaa

SEQ ID NO: 1621412 - RNA, 19 nt, Artificial Sequence
  Description of Artificial Sequence: Synthetic oligonucleotide
  Antisense strand to SEQ ID NO: 1621411
uuaugcacauuauuccuca

SEQ ID NO: 1621413 - RNA, 19 nt, Artificial Sequence
  Description of Artificial Sequence: Synthetic oligonucleotide
  Sense strand starting at position 636 of SEQ ID NO: 1560746
gaggaauaaugugcauaac

SEQ ID NO: 1621414 - RNA, 19 nt, Artificial Sequence
  Description of Artificial Sequence: Synthetic oligonucleotide
  Antisense strand to SEQ ID NO: 1621413
guuaugcacauuauuccuc

SEQ ID NO: 1621415 - RNA, 19 nt, Artificial Sequence
  Description of Artificial Sequence: Synthetic oligonucleotide
  Sense strand starting at position 675 of SEQ ID NO: 1560746
uugauuuguuaagagacau

SEQ ID NO: 1621416 - RNA, 19 nt, Artificial Sequence
  Description of Artificial Sequence: Synthetic oligonucleotide
  Antisense strand to SEQ ID NO: 1621415
augucucuuaacaaaucaa

SEQ ID NO: 1621417 - RNA, 19 nt, Artificial Sequence
  Description of Artificial Sequence: Synthetic oligonucleotide
  Sense strand starting at position 980 of SEQ ID NO: 1560746
ucacucuuagauuacguuu

SEQ ID NO: 1621418 - RNA, 19 nt, Artificial Sequence
  Description of Artificial Sequence: Synthetic oligonucleotide
  Antisense strand to SEQ ID NO: 1621417
aaacguaaucuaagaguga

SEQ ID NO: 1621419 - RNA, 19 nt, Artificial Sequence
  Description of Artificial Sequence: Synthetic oligonucleotide
  Sense strand starting at position 983 of SEQ ID NO: 1560746
cucuuagauuacguuuaaa

SEQ ID NO: 1621420 - RNA, 19 nt, Artificial Sequence
  Description of Artificial Sequence: Synthetic oligonucleotide
  Antisense strand to SEQ ID NO: 1621419
uuuaaacguaaucuaagag

SEQ ID NO: 1621421 - RNA, 19 nt, Artificial Sequence
  Description of Artificial Sequence: Synthetic oligonucleotide
  Sense strand starting at position 1002 of SEQ ID NO: 1560746
aguuucuauuugucuguua

SEQ ID NO: 1621422 - RNA, 19 nt, Artificial Sequence
  Description of Artificial Sequence: Synthetic oligonucleotide
  Antisense strand to SEQ ID NO: 1621421
uaacagacaaauagaaacu

SEQ ID NO: 1621423 - RNA, 19 nt, Artificial Sequence
  Description of Artificial Sequence: Synthetic oligonucleotide
  Sense strand starting at position 1003 of SEQ ID NO: 1560746
guuucuauuugucuguuaa

SEQ ID NO: 1621424 - RNA, 19 nt, Artificial Sequence
  Description of Artificial Sequence: Synthetic oligonucleotide
  Antisense strand to SEQ ID NO: 1621423
uuaacagacaaauagaaac

SEQ ID NO: 1621425 - RNA, 19 nt, Artificial Sequence
  Description of Artificial Sequence: Synthetic oligonucleotide
  Sense strand starting at position 1004 of SEQ ID NO: 1560746
uuucuauuugucuguuaac

SEQ ID NO: 1621426 - RNA, 19 nt, Artificial Sequence
  Description of Artificial Sequence: Synthetic oligonucleotide
  Antisense strand to SEQ ID NO: 1621425
guuaacagacaaauagaaa

SEQ ID NO: 1621427 - RNA, 19 nt, Artificial Sequence
  Description of Artificial Sequence: Synthetic oligonucleotide
  Sense strand starting at position 1070 of SEQ ID NO: 1560746
ugugcugagcccgauaaca

SEQ ID NO: 1621428 - RNA, 19 nt, Artificial Sequence
  Description of Artificial Sequence: Synthetic oligonucleotide
  Antisense strand to SEQ ID NO: 1621427
uguuaucgggcucagcaca

SEQ ID NO: 1621429 - RNA, 19 nt, Artificial Sequence
  Description of Artificial Sequence: Synthetic oligonucleotide
  Sense strand starting at position 1072 of SEQ ID NO: 1560746
ugcugagcccgauaacaaa

SEQ ID NO: 1621430 - RNA, 19 nt, Artificial Sequence
  Description of Artificial Sequence: Synthetic oligonucleotide
  Antisense strand to SEQ ID NO: 1621429
uuuguuaucgggcucagca

SEQ ID NO: 1621431 - RNA, 19 nt, Artificial Sequence
  Description of Artificial Sequence: Synthetic oligonucleotide
  Sense strand starting at position 1435 of SEQ ID NO: 1560746
uauggauuccugugacacc

SEQ ID NO: 1621432 - RNA, 19 nt, Artificial Sequence
  Description of Artificial Sequence: Synthetic oligonucleotide
  Antisense strand to SEQ ID NO: 1621431
ggugucacaggaauccaua

SEQ ID NO: 1621433 - RNA, 19 nt, Artificial Sequence
  Description of Artificial Sequence: Synthetic oligonucleotide
  Sense strand starting at position 1618 of SEQ ID NO: 1560746
ggcuaugacucaguuuaac

SEQ ID NO: 1621434 - RNA, 19 nt, Artificial Sequence
  Description of Artificial Sequence: Synthetic oligonucleotide
  Antisense strand to SEQ ID NO: 1621433
guuaaacugagucauagcc

SEQ ID NO: 1621435 - RNA, 19 nt, Artificial Sequence
  Description of Artificial Sequence: Synthetic oligonucleotide
  Sense strand starting at position 1664 of SEQ ID NO: 1560746
gaccgauuuccugggcugu

SEQ ID NO: 1621436 - RNA, 19 nt, Artificial Sequence
  Description of Artificial Sequence: Synthetic oligonucleotide
  Antisense strand to SEQ ID NO: 1621435
acagcccaggaaaucgguc

SEQ ID NO: 1621437 - RNA, 19 nt, Artificial Sequence
  Description of Artificial Sequence: Synthetic oligonucleotide
  Sense strand starting at position 1666 of SEQ ID NO: 1560746
ccgauuuccugggcuguua

SEQ ID NO: 1621438 - RNA, 19 nt, Artificial Sequence
  Description of Artificial Sequence: Synthetic oligonucleotide
  Antisense strand to SEQ ID NO: 1621437
uaacagcccaggaaaucgg

SEQ ID NO: 1621439 - RNA, 19 nt, Artificial Sequence
  Description of Artificial Sequence: Synthetic oligonucleotide
  Sense strand starting at position 1723 of SEQ ID NO: 1560746
gcagcacuuagcguuauua

SEQ ID NO: 1621440 - RNA, 19 nt, Artificial Sequence
  Description of Artificial Sequence: Synthetic oligonucleotide
  Antisense strand to SEQ ID NO: 1621439
uaauaacgcuaagugcugc

SEQ ID NO: 1621441 - RNA, 19 nt, Artificial Sequence
  Description of Artificial Sequence: Synthetic oligonucleotide
  Sense strand starting at position 1725 of SEQ ID NO: 1560746
agcacuuagcguuauuaca

SEQ ID NO: 1621442 - RNA, 19 nt, Artificial Sequence
  Description of Artificial Sequence: Synthetic oligonucleotide
  Antisense strand to SEQ ID NO: 1621441
uguaauaacgcuaagugcu

SEQ ID NO: 1621443 - RNA, 19 nt, Artificial Sequence
  Description of Artificial Sequence: Synthetic oligonucleotide
  Sense strand starting at position 1727 of SEQ ID NO: 1560746
cacuuagcguuauuacaga

SEQ ID NO: 1621444 - RNA, 19 nt, Artificial Sequence
  Description of Artificial Sequence: Synthetic oligonucleotide
  Antisense strand to SEQ ID NO: 1621443
ucuguaauaacgcuaagug

SEQ ID NO: 1621445 - RNA, 19 nt, Artificial Sequence
  Description of Artificial Sequence: Synthetic oligonucleotide
  Sense strand starting at position 1732 of SEQ ID NO: 1560746
agcguuauuacagaagcua

SEQ ID NO: 1621446 - RNA, 19 nt, Artificial Sequence
  Description of Artificial Sequence: Synthetic oligonucleotide
  Antisense strand to SEQ ID NO: 1621445
uagcuucuguaauaacgcu

SEQ ID NO: 1621447 - RNA, 19 nt, Artificial Sequence
  Description of Artificial Sequence: Synthetic oligonucleotide
  Sense strand starting at position 1740 of SEQ ID NO: 1560746
uacagaagcuaugauggau

SEQ ID NO: 1621448 - RNA, 19 nt, Artificial Sequence
  Description of Artificial Sequence: Synthetic oligonucleotide
  Antisense strand to SEQ ID NO: 1621447
auccaucauagcuucugua

SEQ ID NO: 1621449 - RNA, 19 nt, Artificial Sequence
  Description of Artificial Sequence: Synthetic oligonucleotide
  Sense strand starting at position 1866 of SEQ ID NO: 1560746
gagugauacugacccgaca

SEQ ID NO: 1621450 - RNA, 19 nt, Artificial Sequence
  Description of Artificial Sequence: Synthetic oligonucleotide
  Antisense strand to SEQ ID NO: 1621449
ugucgggucaguaucacuc

SEQ ID NO: 1621451 - RNA, 19 nt, Artificial Sequence
  Description of Artificial Sequence: Synthetic oligonucleotide
  Sense strand starting at position 1868 of SEQ ID NO: 1560746
gugauacugacccgacagu

SEQ ID NO: 1621452 - RNA, 19 nt, Artificial Sequence
  Description of Artificial Sequence: Synthetic oligonucleotide
  Antisense strand to SEQ ID NO: 1621451
acugucgggucaguaucac

SEQ ID NO: 1621453 - RNA, 19 nt, Artificial Sequence
  Description of Artificial Sequence: Synthetic oligonucleotide
  Sense strand starting at position 2039 of SEQ ID NO: 1560746
ggcggaagcacuugagaug

SEQ ID NO: 1621454 - RNA, 19 nt, Artificial Sequence
  Description of Artificial Sequence: Synthetic oligonucleotide
  Antisense strand to SEQ ID NO: 1621453
caucucaagugcuuccgcc

SEQ ID NO: 1621455 - RNA, 19 nt, Artificial Sequence
  Description of Artificial Sequence: Synthetic oligonucleotide
  Sense strand starting at position 2072 of SEQ ID NO: 1560746
uaggaagucccggacagua

SEQ ID NO: 1621456 - RNA, 19 nt, Artificial Sequence
  Description of Artificial Sequence: Synthetic oligonucleotide
  Antisense strand to SEQ ID NO: 1621455
uacuguccgggacuuccua

SEQ ID NO: 1621457 - RNA, 19 nt, Artificial Sequence
  Description of Artificial Sequence: Synthetic oligonucleotide
  Sense strand starting at position 2082 of SEQ ID NO: 1560746
cggacaguaguguaacuau

SEQ ID NO: 1621458 - RNA, 19 nt, Artificial Sequence
  Description of Artificial Sequence: Synthetic oligonucleotide
  Antisense strand to SEQ ID NO: 1621457
auaguuacacuacuguccg

SEQ ID NO: 1621459 - RNA, 19 nt, Artificial Sequence
  Description of Artificial Sequence: Synthetic oligonucleotide
  Sense strand starting at position 2465 of SEQ ID NO: 1560746
auggguaucccuugcuagu

SEQ ID NO: 1621460 - RNA, 19 nt, Artificial Sequence
  Description of Artificial Sequence: Synthetic oligonucleotide
  Antisense strand to SEQ ID NO: 1621459
acuagcaagggauacccau

SEQ ID NO: 1621461 - RNA, 19 nt, Artificial Sequence
  Description of Artificial Sequence: Synthetic oligonucleotide
  Sense strand starting at position 2481 of SEQ ID NO: 1560746
aguggccucucaucggaaa

SEQ ID NO: 1621462 - RNA, 19 nt, Artificial Sequence
  Description of Artificial Sequence: Synthetic oligonucleotide
  Antisense strand to SEQ ID NO: 1621461
uuuccgaugagaggccacu

SEQ ID NO: 1621463 - RNA, 19 nt, Artificial Sequence
  Description of Artificial Sequence: Synthetic oligonucleotide
  Sense strand starting at position 2704 of SEQ ID NO: 1560746
auggcuuagacccgagauu

SEQ ID NO: 1621464 - RNA, 19 nt, Artificial Sequence
  Description of Artificial Sequence: Synthetic oligonucleotide
  Antisense strand to SEQ ID NO: 1621463
aaucucgggucuaagccau

SEQ ID NO: 1621465 - RNA, 19 nt, Artificial Sequence
  Description of Artificial Sequence: Synthetic oligonucleotide
  Sense strand starting at position 2794 of SEQ ID NO: 1560746
acaaacuucugagcgaacu

SEQ ID NO: 1621466 - RNA, 19 nt, Artificial Sequence
  Description of Artificial Sequence: Synthetic oligonucleotide
  Antisense strand to SEQ ID NO: 1621465
aguucgcucagaaguuugu

SEQ ID NO: 1621467 - RNA, 19 nt, Artificial Sequence
  Description of Artificial Sequence: Synthetic oligonucleotide
  Sense strand starting at position 2802 of SEQ ID NO: 1560746
cugagcgaacucgguuaua

SEQ ID NO: 1621468 - RNA, 19 nt, Artificial Sequence
  Description of Artificial Sequence: Synthetic oligonucleotide
  Antisense strand to SEQ ID NO: 1621467
uauaaccgaguucgcucag

SEQ ID NO: 1621469 - RNA, 19 nt, Artificial Sequence
  Description of Artificial Sequence: Synthetic oligonucleotide
  Sense strand starting at position 3002 of SEQ ID NO: 1560746
gcacgucuucgaguucauc

SEQ ID NO: 1621470 - RNA, 19 nt, Artificial Sequence
  Description of Artificial Sequence: Synthetic oligonucleotide
  Antisense strand to SEQ ID NO: 1621469
gaugaacucgaagacgugc

SEQ ID NO: 1621471 - RNA, 19 nt, Artificial Sequence
  Description of Artificial Sequence: Synthetic oligonucleotide
  Sense strand starting at position 3020 of SEQ ID NO: 1560746
cgaggugugcaacgggaaa

SEQ ID NO: 1621472 - RNA, 19 nt, Artificial Sequence
  Description of Artificial Sequence: Synthetic oligonucleotide
  Antisense strand to SEQ ID NO: 1621471
uuucccguugcacaccucg

SEQ ID NO: 1621473 - RNA, 19 nt, Artificial Sequence
  Description of Artificial Sequence: Synthetic oligonucleotide
  Sense strand starting at position 3035 of SEQ ID NO: 1560746
gaaacuguacaucgugaug

SEQ ID NO: 1621474 - RNA, 19 nt, Artificial Sequence
  Description of Artificial Sequence: Synthetic oligonucleotide
  Antisense strand to SEQ ID NO: 1621473
caucacgauguacaguuuc

SEQ ID NO: 1621475 - RNA, 19 nt, Artificial Sequence
  Description of Artificial Sequence: Synthetic oligonucleotide
  Sense strand starting at position 3038 of SEQ ID NO: 1560746
acuguacaucgugauggaa

SEQ ID NO: 1621476 - RNA, 19 nt, Artificial Sequence
  Description of Artificial Sequence: Synthetic oligonucleotide
  Antisense strand to SEQ ID NO: 1621475
uuccaucacgauguacagu

SEQ ID NO: 1621477 - RNA, 19 nt, Artificial Sequence
  Description of Artificial Sequence: Synthetic oligonucleotide
  Sense strand starting at position 3461 of SEQ ID NO: 1560746
cggcgugcucuaucccgaa

SEQ ID NO: 1621478 - RNA, 19 nt, Artificial Sequence
  Description of Artificial Sequence: Synthetic oligonucleotide
  Antisense strand to SEQ ID NO: 1621477
uucgggauagagcacgccg

SEQ ID NO: 1621479 - RNA, 19 nt, Artificial Sequence
  Description of Artificial Sequence: Synthetic oligonucleotide
  Sense strand starting at position 3956 of SEQ ID NO: 1560746
ccgguuggaaccugcaaua

SEQ ID NO: 1621480 - RNA, 19 nt, Artificial Sequence
  Description of Artificial Sequence: Synthetic oligonucleotide
  Antisense strand to SEQ ID NO: 1621479
uauugcagguuccaaccgg

SEQ ID NO: 1621481 - RNA, 19 nt, Artificial Sequence
  Description of Artificial Sequence: Synthetic oligonucleotide
  Sense strand starting at position 141 of SEQ ID NO: 1560747
acaucacuucgccauguaa

SEQ ID NO: 1621482 - RNA, 19 nt, Artificial Sequence
  Description of Artificial Sequence: Synthetic oligonucleotide
  Antisense strand to SEQ ID NO: 1621481
uuacauggcgaagugaugu

SEQ ID NO: 1621483 - RNA, 19 nt, Artificial Sequence
  Description of Artificial Sequence: Synthetic oligonucleotide
  Sense strand starting at position 143 of SEQ ID NO: 1560747
aucacuucgccauguaauc

SEQ ID NO: 1621484 - RNA, 19 nt, Artificial Sequence
  Description of Artificial Sequence: Synthetic oligonucleotide
  Antisense strand to SEQ ID NO: 1621483
gauuacauggcgaagugau

SEQ ID NO: 1621485 - RNA, 19 nt, Artificial Sequence
  Description of Artificial Sequence: Synthetic oligonucleotide
  Sense strand starting at position 148 of SEQ ID NO: 1560747
uucgccauguaaucaacaa

SEQ ID NO: 1621486 - RNA, 19 nt, Artificial Sequence
  Description of Artificial Sequence: Synthetic oligonucleotide
  Antisense strand to SEQ ID NO: 1621485
uuguugauuacauggcgaa

SEQ ID NO: 1621487 - RNA, 19 nt, Artificial Sequence
  Description of Artificial Sequence: Synthetic oligonucleotide
  Sense strand starting at position 169 of SEQ ID NO: 1560747
gauuauugguaguuuacac

SEQ ID NO: 1621488 - RNA, 19 nt, Artificial Sequence
  Description of Artificial Sequence: Synthetic oligonucleotide
  Antisense strand to SEQ ID NO: 1621487
guguaaacuaccaauaauc

SEQ ID NO: 1621489 - RNA, 19 nt, Artificial Sequence
  Description of Artificial Sequence: Synthetic oligonucleotide
  Sense strand starting at position 206 of SEQ ID NO: 1560747
uuugaaauccagugucuua

SEQ ID NO: 1621490 - RNA, 19 nt, Artificial Sequence
  Description of Artificial Sequence: Synthetic oligonucleotide
  Antisense strand to SEQ ID NO: 1621489
uaagacacuggauuucaaa

SEQ ID NO: 1621491 - RNA, 19 nt, Artificial Sequence
  Description of Artificial Sequence: Synthetic oligonucleotide
  Sense strand starting at position 1199 of SEQ ID NO: 1560747
caggaacuccggugcuaau

SEQ ID NO: 1621492 - RNA, 19 nt, Artificial Sequence
  Description of Artificial Sequence: Synthetic oligonucleotide
  Antisense strand to SEQ ID NO: 1621491
auuagcaccggaguuccug

SEQ ID NO: 1621493 - RNA, 19 nt, Artificial Sequence
  Description of Artificial Sequence: Synthetic oligonucleotide
  Sense strand starting at position 1202 of SEQ ID NO: 1560747
gaacuccggugcuaauuaa

SEQ ID NO: 1621494 - RNA, 19 nt, Artificial Sequence
  Description of Artificial Sequence: Synthetic oligonucleotide
  Antisense strand to SEQ ID NO: 1621493
uuaauuagcaccggaguuc

SEQ ID NO: 1621495 - RNA, 19 nt, Artificial Sequence
  Description of Artificial Sequence: Synthetic oligonucleotide
  Sense strand starting at position 1211 of SEQ ID NO: 1560747
ugcuaauuaaagugugagu

SEQ ID NO: 1621496 - RNA, 19 nt, Artificial Sequence
  Description of Artificial Sequence: Synthetic oligonucleotide
  Antisense strand to SEQ ID NO: 1621495
acucacacuuuaauuagca

SEQ ID NO: 1621497 - RNA, 19 nt, Artificial Sequence
  Description of Artificial Sequence: Synthetic oligonucleotide
  Sense strand starting at position 1213 of SEQ ID NO: 1560747
cuaauuaaagugugaguag

SEQ ID NO: 1621498 - RNA, 19 nt, Artificial Sequence
  Description of Artificial Sequence: Synthetic oligonucleotide
  Antisense strand to SEQ ID NO: 1621497
cuacucacacuuuaauuag

SEQ ID NO: 1621499 - RNA, 19 nt, Artificial Sequence
  Description of Artificial Sequence: Synthetic oligonucleotide
  Sense strand starting at position 1270 of SEQ ID NO: 1560747
aaggcacauugggaucaua

SEQ ID NO: 1621500 - RNA, 19 nt, Artificial Sequence
  Description of Artificial Sequence: Synthetic oligonucleotide
  Antisense strand to SEQ ID NO: 1621499
uaugaucccaaugugccuu

SEQ ID NO: 1621501 - RNA, 19 nt, Artificial Sequence
  Description of Artificial Sequence: Synthetic oligonucleotide
  Sense strand starting at position 1378 of SEQ ID NO: 1560747
ggaggaggaucuggacuuu

SEQ ID NO: 1621502 - RNA, 19 nt, Artificial Sequence
  Description of Artificial Sequence: Synthetic oligonucleotide
  Antisense strand to SEQ ID NO: 1621501
aaaguccagauccuccucc

SEQ ID NO: 1621503 - RNA, 19 nt, Artificial Sequence
  Description of Artificial Sequence: Synthetic oligonucleotide
  Sense strand starting at position 1431 of SEQ ID NO: 1560747
uugagaacgucucauuuag

SEQ ID NO: 1621504 - RNA, 19 nt, Artificial Sequence
  Description of Artificial Sequence: Synthetic oligonucleotide
  Antisense strand to SEQ ID NO: 1621503
cuaaaugagacguucucaa

SEQ ID NO: 1621505 - RNA, 19 nt, Artificial Sequence
  Description of Artificial Sequence: Synthetic oligonucleotide
  Sense strand starting at position 2250 of SEQ ID NO: 1560747
cguggaaucuccuuagucu

SEQ ID NO: 1621506 - RNA, 19 nt, Artificial Sequence
  Description of Artificial Sequence: Synthetic oligonucleotide
  Antisense strand to SEQ ID NO: 1621505
agacuaaggagauuccacg

SEQ ID NO: 1621507 - RNA, 19 nt, Artificial Sequence
  Description of Artificial Sequence: Synthetic oligonucleotide
  Sense strand starting at position 2251 of SEQ ID NO: 1560747
guggaaucuccuuagucuc

SEQ ID NO: 1621508 - RNA, 19 nt, Artificial Sequence
  Description of Artificial Sequence: Synthetic oligonucleotide
  Antisense strand to SEQ ID NO: 1621507
gagacuaaggagauuccac

SEQ ID NO: 1621509 - RNA, 19 nt, Artificial Sequence
  Description of Artificial Sequence: Synthetic oligonucleotide
  Sense strand starting at position 2259 of SEQ ID NO: 1560747
uccuuagucucagccuaga

SEQ ID NO: 1621510 - RNA, 19 nt, Artificial Sequence
  Description of Artificial Sequence: Synthetic oligonucleotide
  Antisense strand to SEQ ID NO: 1621509
ucuaggcugagacuaagga

SEQ ID NO: 1621511 - RNA, 19 nt, Artificial Sequence
  Description of Artificial Sequence: Synthetic oligonucleotide
  Sense strand starting at position 2262 of SEQ ID NO: 1560747
uuagucucagccuagaagu

SEQ ID NO: 1621512 - RNA, 19 nt, Artificial Sequence
  Description of Artificial Sequence: Synthetic oligonucleotide
  Antisense strand to SEQ ID NO: 1621511
acuucuaggcugagacuaa

SEQ ID NO: 1621513 - RNA, 19 nt, Artificial Sequence
  Description of Artificial Sequence: Synthetic oligonucleotide
  Sense strand starting at position 2346 of SEQ ID NO: 1560747
auaguuuauguaugaaagc

SEQ ID NO: 1621514 - RNA, 19 nt, Artificial Sequence
  Description of Artificial Sequence: Synthetic oligonucleotide
  Antisense strand to SEQ ID NO: 1621513
gcuuucauacauaaacuau

SEQ ID NO: 1621515 - RNA, 19 nt, Artificial Sequence
  Description of Artificial Sequence: Synthetic oligonucleotide
  Sense strand starting at position 2462 of SEQ ID NO: 1560747
ggucucaucccagaugggu

SEQ ID NO: 1621516 - RNA, 19 nt, Artificial Sequence
  Description of Artificial Sequence: Synthetic oligonucleotide
  Antisense strand to SEQ ID NO: 1621515
acccaucugggaugagacc

SEQ ID NO: 1621517 - RNA, 19 nt, Artificial Sequence
  Description of Artificial Sequence: Synthetic oligonucleotide
  Sense strand starting at position 2498 of SEQ ID NO: 1560747
cucucacagugcucuguua

SEQ ID NO: 1621518 - RNA, 19 nt, Artificial Sequence
  Description of Artificial Sequence: Synthetic oligonucleotide
  Antisense strand to SEQ ID NO: 1621517
uaacagagcacugugagag

SEQ ID NO: 1621519 - RNA, 19 nt, Artificial Sequence
  Description of Artificial Sequence: Synthetic oligonucleotide
  Sense strand starting at position 2509 of SEQ ID NO: 1560747
cucuguuaccgccauuaua

SEQ ID NO: 1621520 - RNA, 19 nt, Artificial Sequence
  Description of Artificial Sequence: Synthetic oligonucleotide
  Antisense strand to SEQ ID NO: 1621519
uauaauggcgguaacagag

SEQ ID NO: 1621521 - RNA, 19 nt, Artificial Sequence
  Description of Artificial Sequence: Synthetic oligonucleotide
  Sense strand starting at position 2517 of SEQ ID NO: 1560747
ccgccauuauagcucagau

SEQ ID NO: 1621522 - RNA, 19 nt, Artificial Sequence
  Description of Artificial Sequence: Synthetic oligonucleotide
  Antisense strand to SEQ ID NO: 1621521
aucugagcuauaauggcgg

SEQ ID NO: 1621523 - RNA, 19 nt, Artificial Sequence
  Description of Artificial Sequence: Synthetic oligonucleotide
  Sense strand starting at position 2519 of SEQ ID NO: 1560747
gccauuauagcucagauca

SEQ ID NO: 1621524 - RNA, 19 nt, Artificial Sequence
  Description of Artificial Sequence: Synthetic oligonucleotide
  Antisense strand to SEQ ID NO: 1621523
ugaucugagcuauaauggc

SEQ ID NO: 1621525 - RNA, 19 nt, Artificial Sequence
  Description of Artificial Sequence: Synthetic oligonucleotide
  Sense strand starting at position 2953 of SEQ ID NO: 1560747
gagggucuggcacguaaua

SEQ ID NO: 1621526 - RNA, 19 nt, Artificial Sequence
  Description of Artificial Sequence: Synthetic oligonucleotide
  Antisense strand to SEQ ID NO: 1621525
uauuacgugccagacccuc

SEQ ID NO: 1621527 - RNA, 19 nt, Artificial Sequence
  Description of Artificial Sequence: Synthetic oligonucleotide
  Sense strand starting at position 3410 of SEQ ID NO: 1560747
ggcacauaauugguguuaa

SEQ ID NO: 1621528 - RNA, 19 nt, Artificial Sequence
  Description of Artificial Sequence: Synthetic oligonucleotide
  Antisense strand to SEQ ID NO: 1621527
uuaacaccaauuaugugcc

SEQ ID NO: 1621529 - RNA, 19 nt, Artificial Sequence
  Description of Artificial Sequence: Synthetic oligonucleotide
  Sense strand starting at position 3411 of SEQ ID NO: 1560747
gcacauaauugguguuaau

SEQ ID NO: 1621530 - RNA, 19 nt, Artificial Sequence
  Description of Artificial Sequence: Synthetic oligonucleotide
  Antisense strand to SEQ ID NO: 1621529
auuaacaccaauuaugugc

SEQ ID NO: 1621531 - RNA, 19 nt, Artificial Sequence
  Description of Artificial Sequence: Synthetic oligonucleotide
  Sense strand starting at position 3610 of SEQ ID NO: 1560747
cagcaagagucuggcacau

SEQ ID NO: 1621532 - RNA, 19 nt, Artificial Sequence
  Description of Artificial Sequence: Synthetic oligonucleotide
  Antisense strand to SEQ ID NO: 1621531
augugccagacucuugcug

SEQ ID NO: 1621533 - RNA, 19 nt, Artificial Sequence
  Description of Artificial Sequence: Synthetic oligonucleotide
  Sense strand starting at position 3612 of SEQ ID NO: 1560747
gcaagagucuggcacauaa

SEQ ID NO: 1621534 - RNA, 19 nt, Artificial Sequence
  Description of Artificial Sequence: Synthetic oligonucleotide
  Antisense strand to SEQ ID NO: 1621533
uuaugugccagacucuugc

SEQ ID NO: 1621535 - RNA, 19 nt, Artificial Sequence
  Description of Artificial Sequence: Synthetic oligonucleotide
  Sense strand starting at position 3817 of SEQ ID NO: 1560747
ccaccuccugacuaguauu

SEQ ID NO: 1621536 - RNA, 19 nt, Artificial Sequence
  Description of Artificial Sequence: Synthetic oligonucleotide
  Antisense strand to SEQ ID NO: 1621535
aauacuagucaggaggugg

SEQ ID NO: 1621537 - RNA, 19 nt, Artificial Sequence
  Description of Artificial Sequence: Synthetic oligonucleotide
  Sense strand starting at position 3830 of SEQ ID NO: 1560747
aguauuuguuucuagaguu

SEQ ID NO: 1621538 - RNA, 19 nt, Artificial Sequence
  Description of Artificial Sequence: Synthetic oligonucleotide
  Antisense strand to SEQ ID NO: 1621537
aacucuagaaacaaauacu

SEQ ID NO: 1621539 - RNA, 19 nt, Artificial Sequence
  Description of Artificial Sequence: Synthetic oligonucleotide
  Sense strand starting at position 3901 of SEQ ID NO: 1560747
gugccauagggcuaugaca

SEQ ID NO: 1621540 - RNA, 19 nt, Artificial Sequence
  Description of Artificial Sequence: Synthetic oligonucleotide
  Antisense strand to SEQ ID NO: 1621539
ugucauagcccuauggcac

SEQ ID NO: 1621541 - RNA, 19 nt, Artificial Sequence
  Description of Artificial Sequence: Synthetic oligonucleotide
  Sense strand starting at position 3903 of SEQ ID NO: 1560747
gccauagggcuaugacaca

SEQ ID NO: 1621542 - RNA, 19 nt, Artificial Sequence
  Description of Artificial Sequence: Synthetic oligonucleotide
  Antisense strand to SEQ ID NO: 1621541
ugugucauagcccuauggc

SEQ ID NO: 1621543 - RNA, 19 nt, Artificial Sequence
  Description of Artificial Sequence: Synthetic oligonucleotide
  Sense strand starting at position 3942 of SEQ ID NO: 1560747
ucgauacucucuuccguaa

SEQ ID NO: 1621544 - RNA, 19 nt, Artificial Sequence
  Description of Artificial Sequence: Synthetic oligonucleotide
  Antisense strand to SEQ ID NO: 1621543
uuacggaagagaguaucga

SEQ ID NO: 1621545 - RNA, 19 nt, Artificial Sequence
  Description of Artificial Sequence: Synthetic oligonucleotide
  Sense strand starting at position 3945 of SEQ ID NO: 1560747
auacucucuuccguaaaug

SEQ ID NO: 1621546 - RNA, 19 nt, Artificial Sequence
  Description of Artificial Sequence: Synthetic oligonucleotide
  Antisense strand to SEQ ID NO: 1621545
cauuuacggaagagaguau

SEQ ID NO: 1621547 - RNA, 19 nt, Artificial Sequence
  Description of Artificial Sequence: Synthetic oligonucleotide
  Sense strand starting at position 3981 of SEQ ID NO: 1560747
uucugauguugccucauuu

SEQ ID NO: 1621548 - RNA, 19 nt, Artificial Sequence
  Description of Artificial Sequence: Synthetic oligonucleotide
  Antisense strand to SEQ ID NO: 1621547
aaaugaggcaacaucagaa

SEQ ID NO: 1621549 - RNA, 19 nt, Artificial Sequence
  Description of Artificial Sequence: Synthetic oligonucleotide
  Sense strand starting at position 810 of SEQ ID NO: 1560748
ggacucaacugucaauuuc

SEQ ID NO: 1621550 - RNA, 19 nt, Artificial Sequence
  Description of Artificial Sequence: Synthetic oligonucleotide
  Antisense strand to SEQ ID NO: 1621549
gaaauugacaguugagucc

SEQ ID NO: 1621551 - RNA, 19 nt, Artificial Sequence
  Description of Artificial Sequence: Synthetic oligonucleotide
  Sense strand starting at position 961 of SEQ ID NO: 1560748
gaauguggcguccaugaaa

SEQ ID NO: 1621552 - RNA, 19 nt, Artificial Sequence
  Description of Artificial Sequence: Synthetic oligonucleotide
  Antisense strand to SEQ ID NO: 1621551
uuucauggacgccacauuc

SEQ ID NO: 1621553 - RNA, 19 nt, Artificial Sequence
  Description of Artificial Sequence: Synthetic oligonucleotide
  Sense strand starting at position 964 of SEQ ID NO: 1560748
uguggcguccaugaaagaa

SEQ ID NO: 1621554 - RNA, 19 nt, Artificial Sequence
  Description of Artificial Sequence: Synthetic oligonucleotide
  Antisense strand to SEQ ID NO: 1621553
uucuuucauggacgccaca

SEQ ID NO: 1621555 - RNA, 19 nt, Artificial Sequence
  Description of Artificial Sequence: Synthetic oligonucleotide
  Sense strand starting at position 1020 of SEQ ID NO: 1560748
caaggcugaggucauacau

SEQ ID NO: 1621556 - RNA, 19 nt, Artificial Sequence
  Description of Artificial Sequence: Synthetic oligonucleotide
  Antisense strand to SEQ ID NO: 1621555
auguaugaccucagccuug

SEQ ID NO: 1621557 - RNA, 19 nt, Artificial Sequence
  Description of Artificial Sequence: Synthetic oligonucleotide
  Sense strand starting at position 1074 of SEQ ID NO: 1560748
auaaaugagucugaaauca

SEQ ID NO: 1621558 - RNA, 19 nt, Artificial Sequence
  Description of Artificial Sequence: Synthetic oligonucleotide
  Antisense strand to SEQ ID NO: 1621557
ugauuucagacucauuuau

SEQ ID NO: 1621559 - RNA, 19 nt, Artificial Sequence
  Description of Artificial Sequence: Synthetic oligonucleotide
  Sense strand starting at position 1093 of SEQ ID NO: 1560748
ggacacuucuggguucaag

SEQ ID NO: 1621560 - RNA, 19 nt, Artificial Sequence
  Description of Artificial Sequence: Synthetic oligonucleotide
  Antisense strand to SEQ ID NO: 1621559
cuugaacccagaagugucc

SEQ ID NO: 1621561 - RNA, 19 nt, Artificial Sequence
  Description of Artificial Sequence: Synthetic oligonucleotide
  Sense strand starting at position 1127 of SEQ ID NO: 1560748
uuuagcuucugagugacuu

SEQ ID NO: 1621562 - RNA, 19 nt, Artificial Sequence
  Description of Artificial Sequence: Synthetic oligonucleotide
  Antisense strand to SEQ ID NO: 1621561
aagucacucagaagcuaaa

SEQ ID NO: 1621563 - RNA, 19 nt, Artificial Sequence
  Description of Artificial Sequence: Synthetic oligonucleotide
  Sense strand starting at position 1229 of SEQ ID NO: 1560748
cugcaaaucuagccugauu

SEQ ID NO: 1621564 - RNA, 19 nt, Artificial Sequence
  Description of Artificial Sequence: Synthetic oligonucleotide
  Antisense strand to SEQ ID NO: 1621563
aaucaggcuagauuugcag

SEQ ID NO: 1621565 - RNA, 19 nt, Artificial Sequence
  Description of Artificial Sequence: Synthetic oligonucleotide
  Sense strand starting at position 1242 of SEQ ID NO: 1560748
cugauugccagucagaaug

SEQ ID NO: 1621566 - RNA, 19 nt, Artificial Sequence
  Description of Artificial Sequence: Synthetic oligonucleotide
  Antisense strand to SEQ ID NO: 1621565
cauucugacuggcaaucag

SEQ ID NO: 1621567 - RNA, 19 nt, Artificial Sequence
  Description of Artificial Sequence: Synthetic oligonucleotide
  Sense strand starting at position 1287 of SEQ ID NO: 1560748
ggcuguccuccggaguuca

SEQ ID NO: 1621568 - RNA, 19 nt, Artificial Sequence
  Description of Artificial Sequence: Synthetic oligonucleotide
  Antisense strand to SEQ ID NO: 1621567
ugaacuccggaggacagcc

SEQ ID NO: 1621569 - RNA, 19 nt, Artificial Sequence
  Description of Artificial Sequence: Synthetic oligonucleotide
  Sense strand starting at position 1295 of SEQ ID NO: 1560748
uccggaguucagcaagguu

SEQ ID NO: 1621570 - RNA, 19 nt, Artificial Sequence
  Description of Artificial Sequence: Synthetic oligonucleotide
  Antisense strand to SEQ ID NO: 1621569
aaccuugcugaacuccgga

SEQ ID NO: 1621571 - RNA, 19 nt, Artificial Sequence
  Description of Artificial Sequence: Synthetic oligonucleotide
  Sense strand starting at position 1298 of SEQ ID NO: 1560748
ggaguucagcaagguuaaa

SEQ ID NO: 1621572 - RNA, 19 nt, Artificial Sequence
  Description of Artificial Sequence: Synthetic oligonucleotide
  Antisense strand to SEQ ID NO: 1621571
uuuaaccuugcugaacucc

SEQ ID NO: 1621573 - RNA, 19 nt, Artificial Sequence
  Description of Artificial Sequence: Synthetic oligonucleotide
  Sense strand starting at position 2245 of SEQ ID NO: 1560748
gcuucuuuccuccagguca

SEQ ID NO: 1621574 - RNA, 19 nt, Artificial Sequence
  Description of Artificial Sequence: Synthetic oligonucleotide
  Antisense strand to SEQ ID NO: 1621573
ugaccuggaggaaagaagc

SEQ ID NO: 1621575 - RNA, 19 nt, Artificial Sequence
  Description of Artificial Sequence: Synthetic oligonucleotide
  Sense strand starting at position 2425 of SEQ ID NO: 1560748
uucugaugguucccuuuaa

SEQ ID NO: 1621576 - RNA, 19 nt, Artificial Sequence
  Description of Artificial Sequence: Synthetic oligonucleotide
  Antisense strand to SEQ ID NO: 1621575
uuaaagggaaccaucagaa

SEQ ID NO: 1621577 - RNA, 19 nt, Artificial Sequence
  Description of Artificial Sequence: Synthetic oligonucleotide
  Sense strand starting at position 2426 of SEQ ID NO: 1560748
ucugaugguucccuuuaac

SEQ ID NO: 1621578 - RNA, 19 nt, Artificial Sequence
  Description of Artificial Sequence: Synthetic oligonucleotide
  Antisense strand to SEQ ID NO: 1621577
guuaaagggaaccaucaga

SEQ ID NO: 1621579 - RNA, 19 nt, Artificial Sequence
  Description of Artificial Sequence: Synthetic oligonucleotide
  Sense strand starting at position 2429 of SEQ ID NO: 1560748
gaugguucccuuuaacgau

SEQ ID NO: 1621580 - RNA, 19 nt, Artificial Sequence
  Description of Artificial Sequence: Synthetic oligonucleotide
  Antisense strand to SEQ ID NO: 1621579
aucguuaaagggaaccauc

SEQ ID NO: 1621581 - RNA, 19 nt, Artificial Sequence
  Description of Artificial Sequence: Synthetic oligonucleotide
  Sense strand starting at position 2460 of SEQ ID NO: 1560748
cccgacacguucucugaau

SEQ ID NO: 1621582 - RNA, 19 nt, Artificial Sequence
  Description of Artificial Sequence: Synthetic oligonucleotide
  Antisense strand to SEQ ID NO: 1621581
auucagagaacgugucggg

SEQ ID NO: 1621583 - RNA, 19 nt, Artificial Sequence
  Description of Artificial Sequence: Synthetic oligonucleotide
  Sense strand starting at position 2461 of SEQ ID NO: 1560748
ccgacacguucucugaauu

SEQ ID NO: 1621584 - RNA, 19 nt, Artificial Sequence
  Description of Artificial Sequence: Synthetic oligonucleotide
  Antisense strand to SEQ ID NO: 1621583
aauucagagaacgugucgg

SEQ ID NO: 1621585 - RNA, 19 nt, Artificial Sequence
  Description of Artificial Sequence: Synthetic oligonucleotide
  Sense strand starting at position 2856 of SEQ ID NO: 1560748
auguuugggucuguuuaca

SEQ ID NO: 1621586 - RNA, 19 nt, Artificial Sequence
  Description of Artificial Sequence: Synthetic oligonucleotide
  Antisense strand to SEQ ID NO: 1621585
uguaaacagacccaaacau

SEQ ID NO: 1621587 - RNA, 19 nt, Artificial Sequence
  Description of Artificial Sequence: Synthetic oligonucleotide
  Sense strand starting at position 3003 of SEQ ID NO: 1560748
cagguucuugucuggguua

SEQ ID NO: 1621588 - RNA, 19 nt, Artificial Sequence
  Description of Artificial Sequence: Synthetic oligonucleotide
  Antisense strand to SEQ ID NO: 1621587
uaacccagacaagaaccug

SEQ ID NO: 1621589 - RNA, 19 nt, Artificial Sequence
  Description of Artificial Sequence: Synthetic oligonucleotide
  Sense strand starting at position 3005 of SEQ ID NO: 1560748
gguucuugucuggguuaua

SEQ ID NO: 1621590 - RNA, 19 nt, Artificial Sequence
  Description of Artificial Sequence: Synthetic oligonucleotide
  Antisense strand to SEQ ID NO: 1621589
uauaacccagacaagaacc

SEQ ID NO: 1621591 - RNA, 19 nt, Artificial Sequence
  Description of Artificial Sequence: Synthetic oligonucleotide
  Sense strand starting at position 3008 of SEQ ID NO: 1560748
ucuugucuggguuauacga

SEQ ID NO: 1621592 - RNA, 19 nt, Artificial Sequence
  Description of Artificial Sequence: Synthetic oligonucleotide
  Antisense strand to SEQ ID NO: 1621591
ucguauaacccagacaaga

SEQ ID NO: 1621593 - RNA, 19 nt, Artificial Sequence
  Description of Artificial Sequence: Synthetic oligonucleotide
  Sense strand starting at position 3016 of SEQ ID NO: 1560748
ggguuauacgacuaggguu

SEQ ID NO: 1621594 - RNA, 19 nt, Artificial Sequence
  Description of Artificial Sequence: Synthetic oligonucleotide
  Antisense strand to SEQ ID NO: 1621593
aacccuagucguauaaccc

SEQ ID NO: 1621595 - RNA, 19 nt, Artificial Sequence
  Description of Artificial Sequence: Synthetic oligonucleotide
  Sense strand starting at position 3143 of SEQ ID NO: 1560748
ucguguuugucgauugcac

SEQ ID NO: 1621596 - RNA, 19 nt, Artificial Sequence
  Description of Artificial Sequence: Synthetic oligonucleotide
  Antisense strand to SEQ ID NO: 1621595
gugcaaucgacaaacacga

SEQ ID NO: 1621597 - RNA, 19 nt, Artificial Sequence
  Description of Artificial Sequence: Synthetic oligonucleotide
  Sense strand starting at position 3231 of SEQ ID NO: 1560748
ggaucagggcucuaucacu

SEQ ID NO: 1621598 - RNA, 19 nt, Artificial Sequence
  Description of Artificial Sequence: Synthetic oligonucleotide
  Antisense strand to SEQ ID NO: 1621597
agugauagagcccugaucc

SEQ ID NO: 1621599 - RNA, 19 nt, Artificial Sequence
  Description of Artificial Sequence: Synthetic oligonucleotide
  Sense strand starting at position 3556 of SEQ ID NO: 1560748
cugcaaucuccuugaggca

SEQ ID NO: 1621600 - RNA, 19 nt, Artificial Sequence
  Description of Artificial Sequence: Synthetic oligonucleotide
  Antisense strand to SEQ ID NO: 1621599
ugccucaaggagauugcag

SEQ ID NO: 1621601 - RNA, 19 nt, Artificial Sequence
  Description of Artificial Sequence: Synthetic oligonucleotide
  Sense strand starting at position 3572 of SEQ ID NO: 1560748
gcaggaaacgugggauuca

SEQ ID NO: 1621602 - RNA, 19 nt, Artificial Sequence
  Description of Artificial Sequence: Synthetic oligonucleotide
  Antisense strand to SEQ ID NO: 1621601
ugaaucccacguuuccugc

SEQ ID NO: 1621603 - RNA, 19 nt, Artificial Sequence
  Description of Artificial Sequence: Synthetic oligonucleotide
  Sense strand starting at position 3721 of SEQ ID NO: 1560748
acagguguuccucaguuua

SEQ ID NO: 1621604 - RNA, 19 nt, Artificial Sequence
  Description of Artificial Sequence: Synthetic oligonucleotide
  Antisense strand to SEQ ID NO: 1621603
uaaacugaggaacaccugu

SEQ ID NO: 1621605 - RNA, 19 nt, Artificial Sequence
  Description of Artificial Sequence: Synthetic oligonucleotide
  Sense strand starting at position 3723 of SEQ ID NO: 1560748
agguguuccucaguuuaca

SEQ ID NO: 1621606 - RNA, 19 nt, Artificial Sequence
  Description of Artificial Sequence: Synthetic oligonucleotide
  Antisense strand to SEQ ID NO: 1621605
uguaaacugaggaacaccu

SEQ ID NO: 1621607 - RNA, 19 nt, Artificial Sequence
  Description of Artificial Sequence: Synthetic oligonucleotide
  Sense strand starting at position 3734 of SEQ ID NO: 1560748
aguuuacaauggguuacau

SEQ ID NO: 1621608 - RNA, 19 nt, Artificial Sequence
  Description of Artificial Sequence: Synthetic oligonucleotide
  Antisense strand to SEQ ID NO: 1621607
auguaacccauuguaaacu

SEQ ID NO: 1621609 - RNA, 19 nt, Artificial Sequence
  Description of Artificial Sequence: Synthetic oligonucleotide
  Sense strand starting at position 3747 of SEQ ID NO: 1560748
uuacauuccggugaguaca

SEQ ID NO: 1621610 - RNA, 19 nt, Artificial Sequence
  Description of Artificial Sequence: Synthetic oligonucleotide
  Antisense strand to SEQ ID NO: 1621609
uguacucaccggaauguaa

SEQ ID NO: 1621611 - RNA, 19 nt, Artificial Sequence
  Description of Artificial Sequence: Synthetic oligonucleotide
  Sense strand starting at position 3755 of SEQ ID NO: 1560748
cggugaguacaucauaggu

SEQ ID NO: 1621612 - RNA, 19 nt, Artificial Sequence
  Description of Artificial Sequence: Synthetic oligonucleotide
  Antisense strand to SEQ ID NO: 1621611
accuaugauguacucaccg

SEQ ID NO: 1621613 - RNA, 19 nt, Artificial Sequence
  Description of Artificial Sequence: Synthetic oligonucleotide
  Sense strand starting at position 3760 of SEQ ID NO: 1560748
aguacaucauagguugaaa

SEQ ID NO: 1621614 - RNA, 19 nt, Artificial Sequence
  Description of Artificial Sequence: Synthetic oligonucleotide
  Antisense strand to SEQ ID NO: 1621613
uuucaaccuaugauguacu

SEQ ID NO: 1621615 - RNA, 19 nt, Artificial Sequence
  Description of Artificial Sequence: Synthetic oligonucleotide
  Sense strand starting at position 3762 of SEQ ID NO: 1560748
uacaucauagguugaaagu

SEQ ID NO: 1621616 - RNA, 19 nt, Artificial Sequence
  Description of Artificial Sequence: Synthetic oligonucleotide
  Antisense strand to SEQ ID NO: 1621615
acuuucaaccuaugaugua

SEQ ID NO: 1621617 - RNA, 19 nt, Artificial Sequence
  Description of Artificial Sequence: Synthetic oligonucleotide
  Sense strand starting at position 3778 of SEQ ID NO: 1560748
aguauugcaaguugaaaug

SEQ ID NO: 1621618 - RNA, 19 nt, Artificial Sequence
  Description of Artificial Sequence: Synthetic oligonucleotide
  Antisense strand to SEQ ID NO: 1621617
cauuucaacuugcaauacu

SEQ ID NO: 1621619 - RNA, 19 nt, Artificial Sequence
  Description of Artificial Sequence: Synthetic oligonucleotide
  Sense strand starting at position 3788 of SEQ ID NO: 1560748
guugaaauguguuuaauac

SEQ ID NO: 1621620 - RNA, 19 nt, Artificial Sequence
  Description of Artificial Sequence: Synthetic oligonucleotide
  Antisense strand to SEQ ID NO: 1621619
guauuaaacacauuucaac

SEQ ID NO: 1621621 - RNA, 19 nt, Artificial Sequence
  Description of Artificial Sequence: Synthetic oligonucleotide
  Sense strand starting at position 3830 of SEQ ID NO: 1560748
cuuagcaugguccaucuua

SEQ ID NO: 1621622 - RNA, 19 nt, Artificial Sequence
  Description of Artificial Sequence: Synthetic oligonucleotide
  Antisense strand to SEQ ID NO: 1621621
uaagauggaccaugcuaag

SEQ ID NO: 1621623 - RNA, 19 nt, Artificial Sequence
  Description of Artificial Sequence: Synthetic oligonucleotide
  Sense strand starting at position 3915 of SEQ ID NO: 1560748
aguauugaaugucuuaugu

SEQ ID NO: 1621624 - RNA, 19 nt, Artificial Sequence
  Description of Artificial Sequence: Synthetic oligonucleotide
  Antisense strand to SEQ ID NO: 1621623
acauaagacauucaauacu

SEQ ID NO: 1621625 - RNA, 19 nt, Artificial Sequence
  Description of Artificial Sequence: Synthetic oligonucleotide
  Sense strand starting at position 3939 of SEQ ID NO: 1560748
auugaauacucugcugaag

SEQ ID NO: 1621626 - RNA, 19 nt, Artificial Sequence
  Description of Artificial Sequence: Synthetic oligonucleotide
  Antisense strand to SEQ ID NO: 1621625
cuucagcagaguauucaau

SEQ ID NO: 1621627 - RNA, 19 nt, Artificial Sequence
  Description of Artificial Sequence: Synthetic oligonucleotide
  Sense strand starting at position 3942 of SEQ ID NO: 1560748
gaauacucugcugaagugu

SEQ ID NO: 1621628 - RNA, 19 nt, Artificial Sequence
  Description of Artificial Sequence: Synthetic oligonucleotide
  Antisense strand to SEQ ID NO: 1621627
acacuucagcagaguauuc

SEQ ID NO: 1621629 - RNA, 19 nt, Artificial Sequence
  Description of Artificial Sequence: Synthetic oligonucleotide
  Sense strand starting at position 593 of SEQ ID NO: 1560749
uuggaagccugcuuugaca

SEQ ID NO: 1621630 - RNA, 19 nt, Artificial Sequence
  Description of Artificial Sequence: Synthetic oligonucleotide
  Antisense strand to SEQ ID NO: 1621629
ugucaaagcaggcuuccaa

SEQ ID NO: 1621631 - RNA, 19 nt, Artificial Sequence
  Description of Artificial Sequence: Synthetic oligonucleotide
  Sense strand starting at position 649 of SEQ ID NO: 1560749
ugcugaguucucuggagac

SEQ ID NO: 1621632 - RNA, 19 nt, Artificial Sequence
  Description of Artificial Sequence: Synthetic oligonucleotide
  Antisense strand to SEQ ID NO: 1621631
gucuccagagaacucagca

SEQ ID NO: 1621633 - RNA, 19 nt, Artificial Sequence
  Description of Artificial Sequence: Synthetic oligonucleotide
  Sense strand starting at position 739 of SEQ ID NO: 1560749
ucgguaugccugugauauu

SEQ ID NO: 1621634 - RNA, 19 nt, Artificial Sequence
  Description of Artificial Sequence: Synthetic oligonucleotide
  Antisense strand to SEQ ID NO: 1621633
aauaucacaggcauaccga

SEQ ID NO: 1621635 - RNA, 19 nt, Artificial Sequence
  Description of Artificial Sequence: Synthetic oligonucleotide
  Sense strand starting at position 740 of SEQ ID NO: 1560749
cgguaugccugugauauua

SEQ ID NO: 1621636 - RNA, 19 nt, Artificial Sequence
  Description of Artificial Sequence: Synthetic oligonucleotide
  Antisense strand to SEQ ID NO: 1621635
uaauaucacaggcauaccg

SEQ ID NO: 1621637 - RNA, 19 nt, Artificial Sequence
  Description of Artificial Sequence: Synthetic oligonucleotide
  Sense strand starting at position 742 of SEQ ID NO: 1560749
guaugccugugauauuacu

SEQ ID NO: 1621638 - RNA, 19 nt, Artificial Sequence
  Description of Artificial Sequence: Synthetic oligonucleotide
  Antisense strand to SEQ ID NO: 1621637
aguaauaucacaggcauac

SEQ ID NO: 1621639 - RNA, 19 nt, Artificial Sequence
  Description of Artificial Sequence: Synthetic oligonucleotide
  Sense strand starting at position 748 of SEQ ID NO: 1560749
cugugauauuacuacauua

SEQ ID NO: 1621640 - RNA, 19 nt, Artificial Sequence
  Description of Artificial Sequence: Synthetic oligonucleotide
  Antisense strand to SEQ ID NO: 1621639
uaauguaguaauaucacag

SEQ ID NO: 1621641 - RNA, 19 nt, Artificial Sequence
  Description of Artificial Sequence: Synthetic oligonucleotide
  Sense strand starting at position 1108 of SEQ ID NO: 1560749
guauuugcagcucgaaucu

SEQ ID NO: 1621642 - RNA, 19 nt, Artificial Sequence
  Description of Artificial Sequence: Synthetic oligonucleotide
  Antisense strand to SEQ ID NO: 1621641
agauucgagcugcaaauac

SEQ ID NO: 1621643 - RNA, 19 nt, Artificial Sequence
  Description of Artificial Sequence: Synthetic oligonucleotide
  Sense strand starting at position 1117 of SEQ ID NO: 1560749
gcucgaaucuuccuuauuu

SEQ ID NO: 1621644 - RNA, 19 nt, Artificial Sequence
  Description of Artificial Sequence: Synthetic oligonucleotide
  Antisense strand to SEQ ID NO: 1621643
aaauaaggaagauucgagc

SEQ ID NO: 1621645 - RNA, 19 nt, Artificial Sequence
  Description of Artificial Sequence: Synthetic oligonucleotide
  Sense strand starting at position 1126 of SEQ ID NO: 1560749
uuccuuauuuccuugugca

SEQ ID NO: 1621646 - RNA, 19 nt, Artificial Sequence
  Description of Artificial Sequence: Synthetic oligonucleotide
  Antisense strand to SEQ ID NO: 1621645
ugcacaaggaaauaaggaa

SEQ ID NO: 1621647 - RNA, 19 nt, Artificial Sequence
  Description of Artificial Sequence: Synthetic oligonucleotide
  Sense strand starting at position 1127 of SEQ ID NO: 1560749
uccuuauuuccuugugcau

SEQ ID NO: 1621648 - RNA, 19 nt, Artificial Sequence
  Description of Artificial Sequence: Synthetic oligonucleotide
  Antisense strand to SEQ ID NO: 1621647
augcacaaggaaauaagga

SEQ ID NO: 1621649 - RNA, 19 nt, Artificial Sequence
  Description of Artificial Sequence: Synthetic oligonucleotide
  Sense strand starting at position 1149 of SEQ ID NO: 1560749
ccacaauugcagugacauc

SEQ ID NO: 1621650 - RNA, 19 nt, Artificial Sequence
  Description of Artificial Sequence: Synthetic oligonucleotide
  Antisense strand to SEQ ID NO: 1621649
gaugucacugcaauugugg

SEQ ID NO: 1621651 - RNA, 19 nt, Artificial Sequence
  Description of Artificial Sequence: Synthetic oligonucleotide
  Sense strand starting at position 1248 of SEQ ID NO: 1560749
gugacugacuucugcgauc

SEQ ID NO: 1621652 - RNA, 19 nt, Artificial Sequence
  Description of Artificial Sequence: Synthetic oligonucleotide
  Antisense strand to SEQ ID NO: 1621651
gaucgcagaagucagucac

SEQ ID NO: 1621653 - RNA, 19 nt, Artificial Sequence
  Description of Artificial Sequence: Synthetic oligonucleotide
  Sense strand starting at position 1385 of SEQ ID NO: 1560749
ugguacacaucuguaauca

SEQ ID NO: 1621654 - RNA, 19 nt, Artificial Sequence
  Description of Artificial Sequence: Synthetic oligonucleotide
  Antisense strand to SEQ ID NO: 1621653
ugauuacagauguguacca

SEQ ID NO: 1621655 - RNA, 19 nt, Artificial Sequence
  Description of Artificial Sequence: Synthetic oligonucleotide
  Sense strand starting at position 1386 of SEQ ID NO: 1560749
gguacacaucuguaaucac

SEQ ID NO: 1621656 - RNA, 19 nt, Artificial Sequence
  Description of Artificial Sequence: Synthetic oligonucleotide
  Antisense strand to SEQ ID NO: 1621655
gugauuacagauguguacc

SEQ ID NO: 1621657 - RNA, 19 nt, Artificial Sequence
  Description of Artificial Sequence: Synthetic oligonucleotide
  Sense strand starting at position 2115 of SEQ ID NO: 1560749
cugugucucuucgcaggau

SEQ ID NO: 1621658 - RNA, 19 nt, Artificial Sequence
  Description of Artificial Sequence: Synthetic oligonucleotide
  Antisense strand to SEQ ID NO: 1621657
auccugcgaagagacacag

SEQ ID NO: 1621659 - RNA, 19 nt, Artificial Sequence
  Description of Artificial Sequence: Synthetic oligonucleotide
  Sense strand starting at position 2116 of SEQ ID NO: 1560749
ugugucucuucgcaggaua

SEQ ID NO: 1621660 - RNA, 19 nt, Artificial Sequence
  Description of Artificial Sequence: Synthetic oligonucleotide
  Antisense strand to SEQ ID NO: 1621659
uauccugcgaagagacaca

SEQ ID NO: 1621661 - RNA, 19 nt, Artificial Sequence
  Description of Artificial Sequence: Synthetic oligonucleotide
  Sense strand starting at position 2118 of SEQ ID NO: 1560749
ugucucuucgcaggauaug

SEQ ID NO: 1621662 - RNA, 19 nt, Artificial Sequence
  Description of Artificial Sequence: Synthetic oligonucleotide
  Antisense strand to SEQ ID NO: 1621661
cauauccugcgaagagaca

SEQ ID NO: 1621663 - RNA, 19 nt, Artificial Sequence
  Description of Artificial Sequence: Synthetic oligonucleotide
  Sense strand starting at position 2341 of SEQ ID NO: 1560749
cgauaucuauuauaucguu

SEQ ID NO: 1621664 - RNA, 19 nt, Artificial Sequence
  Description of Artificial Sequence: Synthetic oligonucleotide
  Antisense strand to SEQ ID NO: 1621663
aacgauauaauagauaucg

SEQ ID NO: 1621665 - RNA, 19 nt, Artificial Sequence
  Description of Artificial Sequence: Synthetic oligonucleotide
  Sense strand starting at position 2374 of SEQ ID NO: 1560749
ugcauaaagucacuuuaag

SEQ ID NO: 1621666 - RNA, 19 nt, Artificial Sequence
  Description of Artificial Sequence: Synthetic oligonucleotide
  Antisense strand to SEQ ID NO: 1621665
cuuaaagugacuuuaugca

SEQ ID NO: 1621667 - RNA, 19 nt, Artificial Sequence
  Description of Artificial Sequence: Synthetic oligonucleotide
  Sense strand starting at position 2668 of SEQ ID NO: 1560749
cacagugccuguccaagaa

SEQ ID NO: 1621668 - RNA, 19 nt, Artificial Sequence
  Description of Artificial Sequence: Synthetic oligonucleotide
  Antisense strand to SEQ ID NO: 1621667
uucuuggacaggcacugug

SEQ ID NO: 1621669 - RNA, 19 nt, Artificial Sequence
  Description of Artificial Sequence: Synthetic oligonucleotide
  Sense strand starting at position 2672 of SEQ ID NO: 1560749
gugccuguccaagaaagau

SEQ ID NO: 1621670 - RNA, 19 nt, Artificial Sequence
  Description of Artificial Sequence: Synthetic oligonucleotide
  Antisense strand to SEQ ID NO: 1621669
aucuuucuuggacaggcac

SEQ ID NO: 1621671 - RNA, 19 nt, Artificial Sequence
  Description of Artificial Sequence: Synthetic oligonucleotide
  Sense strand starting at position 3020 of SEQ ID NO: 1560749
ucugacaaagcauguauua

SEQ ID NO: 1621672 - RNA, 19 nt, Artificial Sequence
  Description of Artificial Sequence: Synthetic oligonucleotide
  Antisense strand to SEQ ID NO: 1621671
uaauacaugcuuugucaga

SEQ ID NO: 1621673 - RNA, 19 nt, Artificial Sequence
  Description of Artificial Sequence: Synthetic oligonucleotide
  Sense strand starting at position 3038 of SEQ ID NO: 1560749
aggcaucuacuguauggua

SEQ ID NO: 1621674 - RNA, 19 nt, Artificial Sequence
  Description of Artificial Sequence: Synthetic oligonucleotide
  Antisense strand to SEQ ID NO: 1621673
uaccauacaguagaugccu

SEQ ID NO: 1621675 - RNA, 19 nt, Artificial Sequence
  Description of Artificial Sequence: Synthetic oligonucleotide
  Sense strand starting at position 3109 of SEQ ID NO: 1560749
cuuacagucuaauggaaca

SEQ ID NO: 1621676 - RNA, 19 nt, Artificial Sequence
  Description of Artificial Sequence: Synthetic oligonucleotide
  Antisense strand to SEQ ID NO: 1621675
uguuccauuagacuguaag

SEQ ID NO: 1621677 - RNA, 19 nt, Artificial Sequence
  Description of Artificial Sequence: Synthetic oligonucleotide
  Sense strand starting at position 3462 of SEQ ID NO: 1560749
augugauguugcuggucua

SEQ ID NO: 1621678 - RNA, 19 nt, Artificial Sequence
  Description of Artificial Sequence: Synthetic oligonucleotide
  Antisense strand to SEQ ID NO: 1621677
uagaccagcaacaucacau

SEQ ID NO: 1621679 - RNA, 19 nt, Artificial Sequence
  Description of Artificial Sequence: Synthetic oligonucleotide
  Sense strand starting at position 3482 of SEQ ID NO: 1560749
ugaccagcuuugggagaau

SEQ ID NO: 1621680 - RNA, 19 nt, Artificial Sequence
  Description of Artificial Sequence: Synthetic oligonucleotide
  Antisense strand to SEQ ID NO: 1621679
auucucccaaagcugguca

SEQ ID NO: 1621681 - RNA, 19 nt, Artificial Sequence
  Description of Artificial Sequence: Synthetic oligonucleotide
  Sense strand starting at position 3507 of SEQ ID NO: 1560749
acuagaucuuuauguguug

SEQ ID NO: 1621682 - RNA, 19 nt, Artificial Sequence
  Description of Artificial Sequence: Synthetic oligonucleotide
  Antisense strand to SEQ ID NO: 1621681
caacacauaaagaucuagu

SEQ ID NO: 1621683 - RNA, 19 nt, Artificial Sequence
  Description of Artificial Sequence: Synthetic oligonucleotide
  Sense strand starting at position 3508 of SEQ ID NO: 1560749
cuagaucuuuauguguuga

SEQ ID NO: 1621684 - RNA, 19 nt, Artificial Sequence
  Description of Artificial Sequence: Synthetic oligonucleotide
  Antisense strand to SEQ ID NO: 1621683
ucaacacauaaagaucuag

SEQ ID NO: 1621685 - RNA, 19 nt, Artificial Sequence
  Description of Artificial Sequence: Synthetic oligonucleotide
  Sense strand starting at position 3510 of SEQ ID NO: 1560749
agaucuuuauguguugaca

SEQ ID NO: 1621686 - RNA, 19 nt, Artificial Sequence
  Description of Artificial Sequence: Synthetic oligonucleotide
  Antisense strand to SEQ ID NO: 1621685
ugucaacacauaaagaucu

SEQ ID NO: 1621687 - RNA, 19 nt, Artificial Sequence
  Description of Artificial Sequence: Synthetic oligonucleotide
  Sense strand starting at position 3512 of SEQ ID NO: 1560749
aucuuuauguguugacaug

SEQ ID NO: 1621688 - RNA, 19 nt, Artificial Sequence
  Description of Artificial Sequence: Synthetic oligonucleotide
  Antisense strand to SEQ ID NO: 1621687
caugucaacacauaaagau

SEQ ID NO: 1621689 - RNA, 19 nt, Artificial Sequence
  Description of Artificial Sequence: Synthetic oligonucleotide
  Sense strand starting at position 3532 of SEQ ID NO: 1560749
ggaaguggcugcugauaua

SEQ ID NO: 1621690 - RNA, 19 nt, Artificial Sequence
  Description of Artificial Sequence: Synthetic oligonucleotide
  Antisense strand to SEQ ID NO: 1621689
uauaucagcagccacuucc

SEQ ID NO: 1621691 - RNA, 19 nt, Artificial Sequence
  Description of Artificial Sequence: Synthetic oligonucleotide
  Sense strand starting at position 3535 of SEQ ID NO: 1560749
aguggcugcugauauauua

SEQ ID NO: 1621692 - RNA, 19 nt, Artificial Sequence
  Description of Artificial Sequence: Synthetic oligonucleotide
  Antisense strand to SEQ ID NO: 1621691
uaauauaucagcagccacu

SEQ ID NO: 1621693 - RNA, 19 nt, Artificial Sequence
  Description of Artificial Sequence: Synthetic oligonucleotide
  Sense strand starting at position 3564 of SEQ ID NO: 1560749
gcaagcuauugagaauaga

SEQ ID NO: 1621694 - RNA, 19 nt, Artificial Sequence
  Description of Artificial Sequence: Synthetic oligonucleotide
  Antisense strand to SEQ ID NO: 1621693
ucuauucucaauagcuugc

SEQ ID NO: 1621695 - RNA, 19 nt, Artificial Sequence
  Description of Artificial Sequence: Synthetic oligonucleotide
  Sense strand starting at position 694 of SEQ ID NO: 1560750
ugaauuugcuuggaauaaa

SEQ ID NO: 1621696 - RNA, 19 nt, Artificial Sequence
  Description of Artificial Sequence: Synthetic oligonucleotide
  Antisense strand to SEQ ID NO: 1621695
uuuauuccaagcaaauuca

SEQ ID NO: 1621697 - RNA, 19 nt, Artificial Sequence
  Description of Artificial Sequence: Synthetic oligonucleotide
  Sense strand starting at position 718 of SEQ ID NO: 1560750
auauaugucuuuguuguca

SEQ ID NO: 1621698 - RNA, 19 nt, Artificial Sequence
  Description of Artificial Sequence: Synthetic oligonucleotide
  Antisense strand to SEQ ID NO: 1621697
ugacaacaaagacauauau

SEQ ID NO: 1621699 - RNA, 19 nt, Artificial Sequence
  Description of Artificial Sequence: Synthetic oligonucleotide
  Sense strand starting at position 729 of SEQ ID NO: 1560750
uguugucaccagcaucuua

SEQ ID NO: 1621700 - RNA, 19 nt, Artificial Sequence
  Description of Artificial Sequence: Synthetic oligonucleotide
  Antisense strand to SEQ ID NO: 1621699
uaagaugcuggugacaaca

SEQ ID NO: 1621701 - RNA, 19 nt, Artificial Sequence
  Description of Artificial Sequence: Synthetic oligonucleotide
  Sense strand starting at position 734 of SEQ ID NO: 1560750
ucaccagcaucuuauggaa

SEQ ID NO: 1621702 - RNA, 19 nt, Artificial Sequence
  Description of Artificial Sequence: Synthetic oligonucleotide
  Antisense strand to SEQ ID NO: 1621701
uuccauaagaugcugguga

SEQ ID NO: 1621703 - RNA, 19 nt, Artificial Sequence
  Description of Artificial Sequence: Synthetic oligonucleotide
  Sense strand starting at position 959 of SEQ ID NO: 1560750
gccagaaucgcuugagccu

SEQ ID NO: 1621704 - RNA, 19 nt, Artificial Sequence
  Description of Artificial Sequence: Synthetic oligonucleotide
  Antisense strand to SEQ ID NO: 1621703
aggcucaagcgauucuggc

SEQ ID NO: 1621705 - RNA, 19 nt, Artificial Sequence
  Description of Artificial Sequence: Synthetic oligonucleotide
  Sense strand starting at position 1041 of SEQ ID NO: 1560750
ggcagacccugucuuaaua

SEQ ID NO: 1621706 - RNA, 19 nt, Artificial Sequence
  Description of Artificial Sequence: Synthetic oligonucleotide
  Antisense strand to SEQ ID NO: 1621705
uauuaagacagggucugcc

SEQ ID NO: 1621707 - RNA, 19 nt, Artificial Sequence
  Description of Artificial Sequence: Synthetic oligonucleotide
  Sense strand starting at position 1130 of SEQ ID NO: 1560750
agcggaaucacagauguuu

SEQ ID NO: 1621708 - RNA, 19 nt, Artificial Sequence
  Description of Artificial Sequence: Synthetic oligonucleotide
  Antisense strand to SEQ ID NO: 1621707
aaacaucugugauuccgcu

SEQ ID NO: 1621709 - RNA, 19 nt, Artificial Sequence
  Description of Artificial Sequence: Synthetic oligonucleotide
  Sense strand starting at position 1139 of SEQ ID NO: 1560750
acagauguuuccuagcuau

SEQ ID NO: 1621710 - RNA, 19 nt, Artificial Sequence
  Description of Artificial Sequence: Synthetic oligonucleotide
  Antisense strand to SEQ ID NO: 1621709
auagcuaggaaacaucugu

SEQ ID NO: 1621711 - RNA, 19 nt, Artificial Sequence
  Description of Artificial Sequence: Synthetic oligonucleotide
  Sense strand starting at position 1142 of SEQ ID NO: 1560750
gauguuuccuagcuauggu

SEQ ID NO: 1621712 - RNA, 19 nt, Artificial Sequence
  Description of Artificial Sequence: Synthetic oligonucleotide
  Antisense strand to SEQ ID NO: 1621711
accauagcuaggaaacauc

SEQ ID NO: 1621713 - RNA, 19 nt, Artificial Sequence
  Description of Artificial Sequence: Synthetic oligonucleotide
  Sense strand starting at position 1167 of SEQ ID NO: 1560750
gcugcagacguuuccguau

SEQ ID NO: 1621714 - RNA, 19 nt, Artificial Sequence
  Description of Artificial Sequence: Synthetic oligonucleotide
  Antisense strand to SEQ ID NO: 1621713
auacggaaacgucugcagc

SEQ ID NO: 1621715 - RNA, 19 nt, Artificial Sequence
  Description of Artificial Sequence: Synthetic oligonucleotide
  Sense strand starting at position 1169 of SEQ ID NO: 1560750
ugcagacguuuccguauca

SEQ ID NO: 1621716 - RNA, 19 nt, Artificial Sequence
  Description of Artificial Sequence: Synthetic oligonucleotide
  Antisense strand to SEQ ID NO: 1621715
ugauacggaaacgucugca

SEQ ID NO: 1621717 - RNA, 19 nt, Artificial Sequence
  Description of Artificial Sequence: Synthetic oligonucleotide
  Sense strand starting at position 1170 of SEQ ID NO: 1560750
gcagacguuuccguaucau

SEQ ID NO: 1621718 - RNA, 19 nt, Artificial Sequence
  Description of Artificial Sequence: Synthetic oligonucleotide
  Antisense strand to SEQ ID NO: 1621717
augauacggaaacgucugc

SEQ ID NO: 1621719 - RNA, 19 nt, Artificial Sequence
  Description of Artificial Sequence: Synthetic oligonucleotide
  Sense strand starting at position 1243 of SEQ ID NO: 1560750
gccgcuagaucgcguucau

SEQ ID NO: 1621720 - RNA, 19 nt, Artificial Sequence
  Description of Artificial Sequence: Synthetic oligonucleotide
  Antisense strand to SEQ ID NO: 1621719
augaacgcgaucuagcggc

SEQ ID NO: 1621721 - RNA, 19 nt, Artificial Sequence
  Description of Artificial Sequence: Synthetic oligonucleotide
  Sense strand starting at position 1244 of SEQ ID NO: 1560750
ccgcuagaucgcguucaua

SEQ ID NO: 1621722 - RNA, 19 nt, Artificial Sequence
  Description of Artificial Sequence: Synthetic oligonucleotide
  Antisense strand to SEQ ID NO: 1621721
uaugaacgcgaucuagcgg

SEQ ID NO: 1621723 - RNA, 19 nt, Artificial Sequence
  Description of Artificial Sequence: Synthetic oligonucleotide
  Sense strand starting at position 1277 of SEQ ID NO: 1560750
auuacuaagucgccaauca

SEQ ID NO: 1621724 - RNA, 19 nt, Artificial Sequence
  Description of Artificial Sequence: Synthetic oligonucleotide
  Antisense strand to SEQ ID NO: 1621723
ugauuggcgacuuaguaau

SEQ ID NO: 1621725 - RNA, 19 nt, Artificial Sequence
  Description of Artificial Sequence: Synthetic oligonucleotide
  Sense strand starting at position 1328 of SEQ ID NO: 1560750
ccguguaacugauuuccuu

SEQ ID NO: 1621726 - RNA, 19 nt, Artificial Sequence
  Description of Artificial Sequence: Synthetic oligonucleotide
  Antisense strand to SEQ ID NO: 1621725
aaggaaaucaguuacacgg

SEQ ID NO: 1621727 - RNA, 19 nt, Artificial Sequence
  Description of Artificial Sequence: Synthetic oligonucleotide
  Sense strand starting at position 1378 of SEQ ID NO: 1560750
auaacuuuaucugagcaga

SEQ ID NO: 1621728 - RNA, 19 nt, Artificial Sequence
  Description of Artificial Sequence: Synthetic oligonucleotide
  Antisense strand to SEQ ID NO: 1621727
ucugcucagauaaaguuau

SEQ ID NO: 1621729 - RNA, 19 nt, Artificial Sequence
  Description of Artificial Sequence: Synthetic oligonucleotide
  Sense strand starting at position 1381 of SEQ ID NO: 1560750
acuuuaucugagcagaggu

SEQ ID NO: 1621730 - RNA, 19 nt, Artificial Sequence
  Description of Artificial Sequence: Synthetic oligonucleotide
  Antisense strand to SEQ ID NO: 1621729
accucugcucagauaaagu

SEQ ID NO: 1621731 - RNA, 19 nt, Artificial Sequence
  Description of Artificial Sequence: Synthetic oligonucleotide
  Sense strand starting at position 1709 of SEQ ID NO: 1560750
aggcuugcgucaugaccua

SEQ ID NO: 1621732 - RNA, 19 nt, Artificial Sequence
  Description of Artificial Sequence: Synthetic oligonucleotide
  Antisense strand to SEQ ID NO: 1621731
uaggucaugacgcaagccu

SEQ ID NO: 1621733 - RNA, 19 nt, Artificial Sequence
  Description of Artificial Sequence: Synthetic oligonucleotide
  Sense strand starting at position 1746 of SEQ ID NO: 1560750
gacuguacucuggacgcaa

SEQ ID NO: 1621734 - RNA, 19 nt, Artificial Sequence
  Description of Artificial Sequence: Synthetic oligonucleotide
  Antisense strand to SEQ ID NO: 1621733
uugcguccagaguacaguc

SEQ ID NO: 1621735 - RNA, 19 nt, Artificial Sequence
  Description of Artificial Sequence: Synthetic oligonucleotide
  Sense strand starting at position 1748 of SEQ ID NO: 1560750
cuguacucuggacgcaaua

SEQ ID NO: 1621736 - RNA, 19 nt, Artificial Sequence
  Description of Artificial Sequence: Synthetic oligonucleotide
  Antisense strand to SEQ ID NO: 1621735
uauugcguccagaguacag

SEQ ID NO: 1621737 - RNA, 19 nt, Artificial Sequence
  Description of Artificial Sequence: Synthetic oligonucleotide
  Sense strand starting at position 2138 of SEQ ID NO: 1560750
gcggaaaggucaucggagu

SEQ ID NO: 1621738 - RNA, 19 nt, Artificial Sequence
  Description of Artificial Sequence: Synthetic oligonucleotide
  Antisense strand to SEQ ID NO: 1621737
acuccgaugaccuuuccgc

SEQ ID NO: 1621739 - RNA, 19 nt, Artificial Sequence
  Description of Artificial Sequence: Synthetic oligonucleotide
  Sense strand starting at position 2218 of SEQ ID NO: 1560750
uuguuauuccaggagggca

SEQ ID NO: 1621740 - RNA, 19 nt, Artificial Sequence
  Description of Artificial Sequence: Synthetic oligonucleotide
  Antisense strand to SEQ ID NO: 1621739
ugcccuccuggaauaacaa

SEQ ID NO: 1621741 - RNA, 19 nt, Artificial Sequence
  Description of Artificial Sequence: Synthetic oligonucleotide
  Sense strand starting at position 2510 of SEQ ID NO: 1560750
cccggguuucggcagaagu

SEQ ID NO: 1621742 - RNA, 19 nt, Artificial Sequence
  Description of Artificial Sequence: Synthetic oligonucleotide
  Antisense strand to SEQ ID NO: 1621741
acuucugccgaaacccggg

SEQ ID NO: 1621743 - RNA, 19 nt, Artificial Sequence
  Description of Artificial Sequence: Synthetic oligonucleotide
  Sense strand starting at position 2511 of SEQ ID NO: 1560750
ccggguuucggcagaaguu

SEQ ID NO: 1621744 - RNA, 19 nt, Artificial Sequence
  Description of Artificial Sequence: Synthetic oligonucleotide
  Antisense strand to SEQ ID NO: 1621743
aacuucugccgaaacccgg

SEQ ID NO: 1621745 - RNA, 19 nt, Artificial Sequence
  Description of Artificial Sequence: Synthetic oligonucleotide
  Sense strand starting at position 2512 of SEQ ID NO: 1560750
cggguuucggcagaaguuu

SEQ ID NO: 1621746 - RNA, 19 nt, Artificial Sequence
  Description of Artificial Sequence: Synthetic oligonucleotide
  Antisense strand to SEQ ID NO: 1621745
aaacuucugccgaaacccg

SEQ ID NO: 1621747 - RNA, 19 nt, Artificial Sequence
  Description of Artificial Sequence: Synthetic oligonucleotide
  Sense strand starting at position 2534 of SEQ ID NO: 1560750
cgccucuugcgaucacuga

SEQ ID NO: 1621748 - RNA, 19 nt, Artificial Sequence
  Description of Artificial Sequence: Synthetic oligonucleotide
  Antisense strand to SEQ ID NO: 1621747
ucagugaucgcaagaggcg

SEQ ID NO: 1621749 - RNA, 19 nt, Artificial Sequence
  Description of Artificial Sequence: Synthetic oligonucleotide
  Sense strand starting at position 2535 of SEQ ID NO: 1560750
gccucuugcgaucacugau

SEQ ID NO: 1621750 - RNA, 19 nt, Artificial Sequence
  Description of Artificial Sequence: Synthetic oligonucleotide
  Antisense strand to SEQ ID NO: 1621749
aucagugaucgcaagaggc

SEQ ID NO: 1621751 - RNA, 19 nt, Artificial Sequence
  Description of Artificial Sequence: Synthetic oligonucleotide
  Sense strand starting at position 2541 of SEQ ID NO: 1560750
ugcgaucacugaugucuuu

SEQ ID NO: 1621752 - RNA, 19 nt, Artificial Sequence
  Description of Artificial Sequence: Synthetic oligonucleotide
  Antisense strand to SEQ ID NO: 1621751
aaagacaucagugaucgca

SEQ ID NO: 1621753 - RNA, 19 nt, Artificial Sequence
  Description of Artificial Sequence: Synthetic oligonucleotide
  Sense strand starting at position 2550 of SEQ ID NO: 1560750
ugaugucuuucguucagga

SEQ ID NO: 1621754 - RNA, 19 nt, Artificial Sequence
  Description of Artificial Sequence: Synthetic oligonucleotide
  Antisense strand to SEQ ID NO: 1621753
uccugaacgaaagacauca

SEQ ID NO: 1621755 - RNA, 19 nt, Artificial Sequence
  Description of Artificial Sequence: Synthetic oligonucleotide
  Sense strand starting at position 2617 of SEQ ID NO: 1560750
ccgcauucugcagaggagu

SEQ ID NO: 1621756 - RNA, 19 nt, Artificial Sequence
  Description of Artificial Sequence: Synthetic oligonucleotide
  Antisense strand to SEQ ID NO: 1621755
acuccucugcagaaugcgg

SEQ ID NO: 1621757 - RNA, 19 nt, Artificial Sequence
  Description of Artificial Sequence: Synthetic oligonucleotide
  Sense strand starting at position 2645 of SEQ ID NO: 1560750
guggacucaucccaaagua

SEQ ID NO: 1621758 - RNA, 19 nt, Artificial Sequence
  Description of Artificial Sequence: Synthetic oligonucleotide
  Antisense strand to SEQ ID NO: 1621757
uacuuugggaugaguccac

SEQ ID NO: 1621759 - RNA, 19 nt, Artificial Sequence
  Description of Artificial Sequence: Synthetic oligonucleotide
  Sense strand starting at position 2786 of SEQ ID NO: 1560750
guuuacaaccaguacuaau

SEQ ID NO: 1621760 - RNA, 19 nt, Artificial Sequence
  Description of Artificial Sequence: Synthetic oligonucleotide
  Antisense strand to SEQ ID NO: 1621759
auuaguacugguuguaaac

SEQ ID NO: 1621761 - RNA, 19 nt, Artificial Sequence
  Description of Artificial Sequence: Synthetic oligonucleotide
  Sense strand starting at position 2854 of SEQ ID NO: 1560750
gaacgcuuucugcaugcau

SEQ ID NO: 1621762 - RNA, 19 nt, Artificial Sequence
  Description of Artificial Sequence: Synthetic oligonucleotide
  Antisense strand to SEQ ID NO: 1621761
augcaugcagaaagcguuc

SEQ ID NO: 1621763 - RNA, 19 nt, Artificial Sequence
  Description of Artificial Sequence: Synthetic oligonucleotide
  Sense strand starting at position 2856 of SEQ ID NO: 1560750
acgcuuucugcaugcauau

SEQ ID NO: 1621764 - RNA, 19 nt, Artificial Sequence
  Description of Artificial Sequence: Synthetic oligonucleotide
  Antisense strand to SEQ ID NO: 1621763
auaugcaugcagaaagcgu

SEQ ID NO: 1621765 - RNA, 19 nt, Artificial Sequence
  Description of Artificial Sequence: Synthetic oligonucleotide
  Sense strand starting at position 2885 of SEQ ID NO: 1560750
ucacaauuccacuggaggu

SEQ ID NO: 1621766 - RNA, 19 nt, Artificial Sequence
  Description of Artificial Sequence: Synthetic oligonucleotide
  Antisense strand to SEQ ID NO: 1621765
accuccaguggaauuguga

SEQ ID NO: 1621767 - RNA, 19 nt, Artificial Sequence
  Description of Artificial Sequence: Synthetic oligonucleotide
  Sense strand starting at position 3230 of SEQ ID NO: 1560750
ggcucaaauuaggugaaca

SEQ ID NO: 1621768 - RNA, 19 nt, Artificial Sequence
  Description of Artificial Sequence: Synthetic oligonucleotide
  Antisense strand to SEQ ID NO: 1621767
uguucaccuaauuugagcc

SEQ ID NO: 1621769 - RNA, 19 nt, Artificial Sequence
  Description of Artificial Sequence: Synthetic oligonucleotide
  Sense strand starting at position 3288 of SEQ ID NO: 1560750
acaaguguuuacugaauuc

SEQ ID NO: 1621770 - RNA, 19 nt, Artificial Sequence
  Description of Artificial Sequence: Synthetic oligonucleotide
  Antisense strand to SEQ ID NO: 1621769
gaauucaguaaacacuugu

SEQ ID NO: 1621771 - RNA, 19 nt, Artificial Sequence
  Description of Artificial Sequence: Synthetic oligonucleotide
  Sense strand starting at position 3962 of SEQ ID NO: 1560750
aauuuagaguugugaguac

SEQ ID NO: 1621772 - RNA, 19 nt, Artificial Sequence
  Description of Artificial Sequence: Synthetic oligonucleotide
  Antisense strand to SEQ ID NO: 1621771
guacucacaacucuaaauu

SEQ ID NO: 1621773 - RNA, 19 nt, Artificial Sequence
  Description of Artificial Sequence: Synthetic oligonucleotide
  Sense strand starting at position 142 of SEQ ID NO: 1560751
uugcccuguuccuggagaa

SEQ ID NO: 1621774 - RNA, 19 nt, Artificial Sequence
  Description of Artificial Sequence: Synthetic oligonucleotide
  Antisense strand to SEQ ID NO: 1621773
uucuccaggaacagggcaa

SEQ ID NO: 1621775 - RNA, 19 nt, Artificial Sequence
  Description of Artificial Sequence: Synthetic oligonucleotide
  Sense strand starting at position 173 of SEQ ID NO: 1560751
uuagcaauucucugaggca

SEQ ID NO: 1621776 - RNA, 19 nt, Artificial Sequence
  Description of Artificial Sequence: Synthetic oligonucleotide
  Antisense strand to SEQ ID NO: 1621775
ugccucagagaauugcuaa

SEQ ID NO: 1621777 - RNA, 19 nt, Artificial Sequence
  Description of Artificial Sequence: Synthetic oligonucleotide
  Sense strand starting at position 176 of SEQ ID NO: 1560751
gcaauucucugaggcaaag

SEQ ID NO: 1621778 - RNA, 19 nt, Artificial Sequence
  Description of Artificial Sequence: Synthetic oligonucleotide
  Antisense strand to SEQ ID NO: 1621777
cuuugccucagagaauugc

SEQ ID NO: 1621779 - RNA, 19 nt, Artificial Sequence
  Description of Artificial Sequence: Synthetic oligonucleotide
  Sense strand starting at position 447 of SEQ ID NO: 1560751
ccuaguuguucuuggagaa

SEQ ID NO: 1621780 - RNA, 19 nt, Artificial Sequence
  Description of Artificial Sequence: Synthetic oligonucleotide
  Antisense strand to SEQ ID NO: 1621779
uucuccaagaacaacuagg

SEQ ID NO: 1621781 - RNA, 19 nt, Artificial Sequence
  Description of Artificial Sequence: Synthetic oligonucleotide
  Sense strand starting at position 448 of SEQ ID NO: 1560751
cuaguuguucuuggagaac

SEQ ID NO: 1621782 - RNA, 19 nt, Artificial Sequence
  Description of Artificial Sequence: Synthetic oligonucleotide
  Antisense strand to SEQ ID NO: 1621781
guucuccaagaacaacuag

SEQ ID NO: 1621783 - RNA, 19 nt, Artificial Sequence
  Description of Artificial Sequence: Synthetic oligonucleotide
  Sense strand starting at position 451 of SEQ ID NO: 1560751
guuguucuuggagaacuuc

SEQ ID NO: 1621784 - RNA, 19 nt, Artificial Sequence
  Description of Artificial Sequence: Synthetic oligonucleotide
  Antisense strand to SEQ ID NO: 1621783
gaaguucuccaagaacaac

SEQ ID NO: 1621785 - RNA, 19 nt, Artificial Sequence
  Description of Artificial Sequence: Synthetic oligonucleotide
  Sense strand starting at position 472 of SEQ ID NO: 1560751
agagaugccuucuucggga

SEQ ID NO: 1621786 - RNA, 19 nt, Artificial Sequence
  Description of Artificial Sequence: Synthetic oligonucleotide
  Antisense strand to SEQ ID NO: 1621785
ucccgaagaaggcaucucu

SEQ ID NO: 1621787 - RNA, 19 nt, Artificial Sequence
  Description of Artificial Sequence: Synthetic oligonucleotide
  Sense strand starting at position 2416 of SEQ ID NO: 1560751
caggguuguuucuggacau

SEQ ID NO: 1621788 - RNA, 19 nt, Artificial Sequence
  Description of Artificial Sequence: Synthetic oligonucleotide
  Antisense strand to SEQ ID NO: 1621787
auguccagaaacaacccug

SEQ ID NO: 1621789 - RNA, 19 nt, Artificial Sequence
  Description of Artificial Sequence: Synthetic oligonucleotide
  Sense strand starting at position 2417 of SEQ ID NO: 1560751
aggguuguuucuggacauu

SEQ ID NO: 1621790 - RNA, 19 nt, Artificial Sequence
  Description of Artificial Sequence: Synthetic oligonucleotide
  Antisense strand to SEQ ID NO: 1621789
aauguccagaaacaacccu

SEQ ID NO: 1621791 - RNA, 19 nt, Artificial Sequence
  Description of Artificial Sequence: Synthetic oligonucleotide
  Sense strand starting at position 2998 of SEQ ID NO: 1560751
guucuccuucuagacguaa

SEQ ID NO: 1621792 - RNA, 19 nt, Artificial Sequence
  Description of Artificial Sequence: Synthetic oligonucleotide
  Antisense strand to SEQ ID NO: 1621791
uuacgucuagaaggagaac

SEQ ID NO: 1621793 - RNA, 19 nt, Artificial Sequence
  Description of Artificial Sequence: Synthetic oligonucleotide
  Sense strand starting at position 3123 of SEQ ID NO: 1560751
ggcugcugugucucucauu

SEQ ID NO: 1621794 - RNA, 19 nt, Artificial Sequence
  Description of Artificial Sequence: Synthetic oligonucleotide
  Antisense strand to SEQ ID NO: 1621793
aaugagagacacagcagcc

SEQ ID NO: 1621795 - RNA, 19 nt, Artificial Sequence
  Description of Artificial Sequence: Synthetic oligonucleotide
  Sense strand starting at position 3180 of SEQ ID NO: 1560751
augcccauccugugggauu

SEQ ID NO: 1621796 - RNA, 19 nt, Artificial Sequence
  Description of Artificial Sequence: Synthetic oligonucleotide
  Antisense strand to SEQ ID NO: 1621795
aaucccacaggaugggcau

SEQ ID NO: 1621797 - RNA, 19 nt, Artificial Sequence
  Description of Artificial Sequence: Synthetic oligonucleotide
  Sense strand starting at position 3230 of SEQ ID NO: 1560751
ccuugaccuugggucaaau

SEQ ID NO: 1621798 - RNA, 19 nt, Artificial Sequence
  Description of Artificial Sequence: Synthetic oligonucleotide
  Antisense strand to SEQ ID NO: 1621797
auuugacccaaggucaagg

SEQ ID NO: 1621799 - RNA, 19 nt, Artificial Sequence
  Description of Artificial Sequence: Synthetic oligonucleotide
  Sense strand starting at position 3267 of SEQ ID NO: 1560751
cuuagaaagcuuggccauu

SEQ ID NO: 1621800 - RNA, 19 nt, Artificial Sequence
  Description of Artificial Sequence: Synthetic oligonucleotide
  Antisense strand to SEQ ID NO: 1621799
aauggccaagcuuucuaag

SEQ ID NO: 1621801 - RNA, 19 nt, Artificial Sequence
  Description of Artificial Sequence: Synthetic oligonucleotide
  Sense strand starting at position 3470 of SEQ ID NO: 1560751
agcagaauuccugcagcgu

SEQ ID NO: 1621802 - RNA, 19 nt, Artificial Sequence
  Description of Artificial Sequence: Synthetic oligonucleotide
  Antisense strand to SEQ ID NO: 1621801
acgcugcaggaauucugcu

SEQ ID NO: 1621803 - RNA, 19 nt, Artificial Sequence
  Description of Artificial Sequence: Synthetic oligonucleotide
  Sense strand starting at position 3471 of SEQ ID NO: 1560751
gcagaauuccugcagcgua

SEQ ID NO: 1621804 - RNA, 19 nt, Artificial Sequence
  Description of Artificial Sequence: Synthetic oligonucleotide
  Antisense strand to SEQ ID NO: 1621803
uacgcugcaggaauucugc

SEQ ID NO: 1621805 - RNA, 19 nt, Artificial Sequence
  Description of Artificial Sequence: Synthetic oligonucleotide
  Sense strand starting at position 3518 of SEQ ID NO: 1560751
ucugcaugacggugacauu

SEQ ID NO: 1621806 - RNA, 19 nt, Artificial Sequence
  Description of Artificial Sequence: Synthetic oligonucleotide
  Antisense strand to SEQ ID NO: 1621805
aaugucaccgucaugcaga

SEQ ID NO: 1621807 - RNA, 19 nt, Artificial Sequence
  Description of Artificial Sequence: Synthetic oligonucleotide
  Sense strand starting at position 3519 of SEQ ID NO: 1560751
cugcaugacggugacauua

SEQ ID NO: 1621808 - RNA, 19 nt, Artificial Sequence
  Description of Artificial Sequence: Synthetic oligonucleotide
  Antisense strand to SEQ ID NO: 1621807
uaaugucaccgucaugcag

SEQ ID NO: 1621809 - RNA, 19 nt, Artificial Sequence
  Description of Artificial Sequence: Synthetic oligonucleotide
  Sense strand starting at position 3521 of SEQ ID NO: 1560751
gcaugacggugacauuauu

SEQ ID NO: 1621810 - RNA, 19 nt, Artificial Sequence
  Description of Artificial Sequence: Synthetic oligonucleotide
  Antisense strand to SEQ ID NO: 1621809
aauaaugucaccgucaugc

SEQ ID NO: 1621811 - RNA, 19 nt, Artificial Sequence
  Description of Artificial Sequence: Synthetic oligonucleotide
  Sense strand starting at position 3539 of SEQ ID NO: 1560751
ucaaacagugcuuaguaca

SEQ ID NO: 1621812 - RNA, 19 nt, Artificial Sequence
  Description of Artificial Sequence: Synthetic oligonucleotide
  Antisense strand to SEQ ID NO: 1621811
uguacuaagcacuguuuga

SEQ ID NO: 1621813 - RNA, 19 nt, Artificial Sequence
  Description of Artificial Sequence: Synthetic oligonucleotide
  Sense strand starting at position 3558 of SEQ ID NO: 1560751
ucacgaacgguccauaaau

SEQ ID NO: 1621814 - RNA, 19 nt, Artificial Sequence
  Description of Artificial Sequence: Synthetic oligonucleotide
  Antisense strand to SEQ ID NO: 1621813
auuuauggaccguucguga

SEQ ID NO: 1621815 - RNA, 19 nt, Artificial Sequence
  Description of Artificial Sequence: Synthetic oligonucleotide
  Sense strand starting at position 3560 of SEQ ID NO: 1560751
acgaacgguccauaaaugu

SEQ ID NO: 1621816 - RNA, 19 nt, Artificial Sequence
  Description of Artificial Sequence: Synthetic oligonucleotide
  Antisense strand to SEQ ID NO: 1621815
acauuuauggaccguucgu

SEQ ID NO: 1621817 - RNA, 19 nt, Artificial Sequence
  Description of Artificial Sequence: Synthetic oligonucleotide
  Sense strand starting at position 3625 of SEQ ID NO: 1560751
ugaauuaaauggugagaag

SEQ ID NO: 1621818 - RNA, 19 nt, Artificial Sequence
  Description of Artificial Sequence: Synthetic oligonucleotide
  Antisense strand to SEQ ID NO: 1621817
cuucucaccauuuaauuca

SEQ ID NO: 1621819 - RNA, 19 nt, Artificial Sequence
  Description of Artificial Sequence: Synthetic oligonucleotide
  Sense strand starting at position 3628 of SEQ ID NO: 1560751
auuaaauggugagaagugu

SEQ ID NO: 1621820 - RNA, 19 nt, Artificial Sequence
  Description of Artificial Sequence: Synthetic oligonucleotide
  Antisense strand to SEQ ID NO: 1621819
acacuucucaccauuuaau

SEQ ID NO: 1621821 - RNA, 19 nt, Artificial Sequence
  Description of Artificial Sequence: Synthetic oligonucleotide
  Sense strand starting at position 3632 of SEQ ID NO: 1560751
aauggugagaaguguaucu

SEQ ID NO: 1621822 - RNA, 19 nt, Artificial Sequence
  Description of Artificial Sequence: Synthetic oligonucleotide
  Antisense strand to SEQ ID NO: 1621821
agauacacuucucaccauu

SEQ ID NO: 1621823 - RNA, 19 nt, Artificial Sequence
  Description of Artificial Sequence: Synthetic oligonucleotide
  Sense strand starting at position 3637 of SEQ ID NO: 1560751
ugagaaguguaucuggaaa

SEQ ID NO: 1621824 - RNA, 19 nt, Artificial Sequence
  Description of Artificial Sequence: Synthetic oligonucleotide
  Antisense strand to SEQ ID NO: 1621823
uuuccagauacacuucuca

SEQ ID NO: 1621825 - RNA, 19 nt, Artificial Sequence
  Description of Artificial Sequence: Synthetic oligonucleotide
  Sense strand starting at position 3639 of SEQ ID NO: 1560751
agaaguguaucuggaaauc

SEQ ID NO: 1621826 - RNA, 19 nt, Artificial Sequence
  Description of Artificial Sequence: Synthetic oligonucleotide
  Antisense strand to SEQ ID NO: 1621825
gauuuccagauacacuucu

SEQ ID NO: 1621827 - RNA, 19 nt, Artificial Sequence
  Description of Artificial Sequence: Synthetic oligonucleotide
  Sense strand starting at position 3664 of SEQ ID NO: 1560751
ccaauauaacgugaagcaa

SEQ ID NO: 1621828 - RNA, 19 nt, Artificial Sequence
  Description of Artificial Sequence: Synthetic oligonucleotide
  Antisense strand to SEQ ID NO: 1621827
uugcuucacguuauauugg

SEQ ID NO: 1621829 - RNA, 19 nt, Artificial Sequence
  Description of Artificial Sequence: Synthetic oligonucleotide
  Sense strand starting at position 3849 of SEQ ID NO: 1560751
agcuuagaauccuuuggaa

SEQ ID NO: 1621830 - RNA, 19 nt, Artificial Sequence
  Description of Artificial Sequence: Synthetic oligonucleotide
  Antisense strand to SEQ ID NO: 1621829
uuccaaaggauucuaagcu

SEQ ID NO: 1621831 - RNA, 19 nt, Artificial Sequence
  Description of Artificial Sequence: Synthetic oligonucleotide
  Sense strand starting at position 3852 of SEQ ID NO: 1560751
uuagaauccuuuggaaggu

SEQ ID NO: 1621832 - RNA, 19 nt, Artificial Sequence
  Description of Artificial Sequence: Synthetic oligonucleotide
  Antisense strand to SEQ ID NO: 1621831
accuuccaaaggauucuaa

SEQ ID NO: 1621833 - RNA, 19 nt, Artificial Sequence
  Description of Artificial Sequence: Synthetic oligonucleotide
  Sense strand starting at position 3867 of SEQ ID NO: 1560751
aggugaaguuuagagagca

SEQ ID NO: 1621834 - RNA, 19 nt, Artificial Sequence
  Description of Artificial Sequence: Synthetic oligonucleotide
  Antisense strand to SEQ ID NO: 1621833
ugcucucuaaacuucaccu

SEQ ID NO: 1621835 - RNA, 19 nt, Artificial Sequence
  Description of Artificial Sequence: Synthetic oligonucleotide
  Sense strand starting at position 3868 of SEQ ID NO: 1560751
ggugaaguuuagagagcag

SEQ ID NO: 1621836 - RNA, 19 nt, Artificial Sequence
  Description of Artificial Sequence: Synthetic oligonucleotide
  Antisense strand to SEQ ID NO: 1621835
cugcucucuaaacuucacc

SEQ ID NO: 1621837 - RNA, 19 nt, Artificial Sequence
  Description of Artificial Sequence: Synthetic oligonucleotide
  Sense strand starting at position 3970 of SEQ ID NO: 1560751
ggagucuuuacauagcaug

SEQ ID NO: 1621838 - RNA, 19 nt, Artificial Sequence
  Description of Artificial Sequence: Synthetic oligonucleotide
  Antisense strand to SEQ ID NO: 1621837
caugcuauguaaagacucc

SEQ ID NO: 1621839 - RNA, 19 nt, Artificial Sequence
  Description of Artificial Sequence: Synthetic oligonucleotide
  Sense strand starting at position 829 of SEQ ID NO: 1560752
cgcacagucgcccaguuau

SEQ ID NO: 1621840 - RNA, 19 nt, Artificial Sequence
  Description of Artificial Sequence: Synthetic oligonucleotide
  Antisense strand to SEQ ID NO: 1621839
auaacugggcgacugugcg

SEQ ID NO: 1621841 - RNA, 19 nt, Artificial Sequence
  Description of Artificial Sequence: Synthetic oligonucleotide
  Sense strand starting at position 836 of SEQ ID NO: 1560752
ucgcccaguuauccaaaga

SEQ ID NO: 1621842 - RNA, 19 nt, Artificial Sequence
  Description of Artificial Sequence: Synthetic oligonucleotide
  Antisense strand to SEQ ID NO: 1621841
ucuuuggauaacugggcga

SEQ ID NO: 1621843 - RNA, 19 nt, Artificial Sequence
  Description of Artificial Sequence: Synthetic oligonucleotide
  Sense strand starting at position 3098 of SEQ ID NO: 1560752
gaguguugcuccgaccuga

SEQ ID NO: 1621844 - RNA, 19 nt, Artificial Sequence
  Description of Artificial Sequence: Synthetic oligonucleotide
  Antisense strand to SEQ ID NO: 1621843
ucaggucggagcaacacuc

SEQ ID NO: 1621845 - RNA, 19 nt, Artificial Sequence
  Description of Artificial Sequence: Synthetic oligonucleotide
  Sense strand starting at position 3335 of SEQ ID NO: 1560752
ggaaguugagucuggcacu

SEQ ID NO: 1621846 - RNA, 19 nt, Artificial Sequence
  Description of Artificial Sequence: Synthetic oligonucleotide
  Antisense strand to SEQ ID NO: 1621845
agugccagacucaacuucc

SEQ ID NO: 1621847 - RNA, 19 nt, Artificial Sequence
  Description of Artificial Sequence: Synthetic oligonucleotide
  Sense strand starting at position 3414 of SEQ ID NO: 1560752
cucaguaaguguugucuac

SEQ ID NO: 1621848 - RNA, 19 nt, Artificial Sequence
  Description of Artificial Sequence: Synthetic oligonucleotide
  Antisense strand to SEQ ID NO: 1621847
guagacaacacuuacugag

SEQ ID NO: 1621849 - RNA, 19 nt, Artificial Sequence
  Description of Artificial Sequence: Synthetic oligonucleotide
  Sense strand starting at position 3418 of SEQ ID NO: 1560752
guaaguguugucuacgcga

SEQ ID NO: 1621850 - RNA, 19 nt, Artificial Sequence
  Description of Artificial Sequence: Synthetic oligonucleotide
  Antisense strand to SEQ ID NO: 1621849
ucgcguagacaacacuuac

SEQ ID NO: 1621851 - RNA, 19 nt, Artificial Sequence
  Description of Artificial Sequence: Synthetic oligonucleotide
  Sense strand starting at position 3420 of SEQ ID NO: 1560752
aaguguugucuacgcgaag

SEQ ID NO: 1621852 - RNA, 19 nt, Artificial Sequence
  Description of Artificial Sequence: Synthetic oligonucleotide
  Antisense strand to SEQ ID NO: 1621851
cuucgcguagacaacacuu

SEQ ID NO: 1621853 - RNA, 19 nt, Artificial Sequence
  Description of Artificial Sequence: Synthetic oligonucleotide
  Sense strand starting at position 3423 of SEQ ID NO: 1560752
uguugucuacgcgaaggau

SEQ ID NO: 1621854 - RNA, 19 nt, Artificial Sequence
  Description of Artificial Sequence: Synthetic oligonucleotide
  Antisense strand to SEQ ID NO: 1621853
auccuucgcguagacaaca

SEQ ID NO: 1621855 - RNA, 19 nt, Artificial Sequence
  Description of Artificial Sequence: Synthetic oligonucleotide
  Sense strand starting at position 3425 of SEQ ID NO: 1560752
uugucuacgcgaaggaugu

SEQ ID NO: 1621856 - RNA, 19 nt, Artificial Sequence
  Description of Artificial Sequence: Synthetic oligonucleotide
  Antisense strand to SEQ ID NO: 1621855
acauccuucgcguagacaa

SEQ ID NO: 1621857 - RNA, 19 nt, Artificial Sequence
  Description of Artificial Sequence: Synthetic oligonucleotide
  Sense strand starting at position 3488 of SEQ ID NO: 1560752
cgcugaggcuuucccauuu

SEQ ID NO: 1621858 - RNA, 19 nt, Artificial Sequence
  Description of Artificial Sequence: Synthetic oligonucleotide
  Antisense strand to SEQ ID NO: 1621857
aaaugggaaagccucagcg

SEQ ID NO: 1621859 - RNA, 19 nt, Artificial Sequence
  Description of Artificial Sequence: Synthetic oligonucleotide
  Sense strand starting at position 3592 of SEQ ID NO: 1560752
uaaugcuuucuccaagggu

SEQ ID NO: 1621860 - RNA, 19 nt, Artificial Sequence
  Description of Artificial Sequence: Synthetic oligonucleotide
  Antisense strand to SEQ ID NO: 1621859
acccuuggagaaagcauua

SEQ ID NO: 1621861 - RNA, 19 nt, Artificial Sequence
  Description of Artificial Sequence: Synthetic oligonucleotide
  Sense strand starting at position 3729 of SEQ ID NO: 1560752
cuaaucggccucugcuaau

SEQ ID NO: 1621862 - RNA, 19 nt, Artificial Sequence
  Description of Artificial Sequence: Synthetic oligonucleotide
  Antisense strand to SEQ ID NO: 1621861
auuagcagaggccgauuag

SEQ ID NO: 1621863 - RNA, 19 nt, Artificial Sequence
  Description of Artificial Sequence: Synthetic oligonucleotide
  Sense strand starting at position 3925 of SEQ ID NO: 1560752
ggcauugcgugaagugcuu

SEQ ID NO: 1621864 - RNA, 19 nt, Artificial Sequence
  Description of Artificial Sequence: Synthetic oligonucleotide
  Antisense strand to SEQ ID NO: 1621863
aagcacuucacgcaaugcc

SEQ ID NO: 1621865 - RNA, 19 nt, Artificial Sequence
  Description of Artificial Sequence: Synthetic oligonucleotide
  Sense strand starting at position 3931 of SEQ ID NO: 1560752
gcgugaagugcuugacaug

SEQ ID NO: 1621866 - RNA, 19 nt, Artificial Sequence
  Description of Artificial Sequence: Synthetic oligonucleotide
  Antisense strand to SEQ ID NO: 1621865
caugucaagcacuucacgc

SEQ ID NO: 1621867 - RNA, 19 nt, Artificial Sequence
  Description of Artificial Sequence: Synthetic oligonucleotide
  Sense strand starting at position 3932 of SEQ ID NO: 1560752
cgugaagugcuugacauga

SEQ ID NO: 1621868 - RNA, 19 nt, Artificial Sequence
  Description of Artificial Sequence: Synthetic oligonucleotide
  Antisense strand to SEQ ID NO: 1621867
ucaugucaagcacuucacg

SEQ ID NO: 1621869 - RNA, 19 nt, Artificial Sequence
  Description of Artificial Sequence: Synthetic oligonucleotide
  Sense strand starting at position 3934 of SEQ ID NO: 1560752
ugaagugcuugacaugaag

SEQ ID NO: 1621870 - RNA, 19 nt, Artificial Sequence
  Description of Artificial Sequence: Synthetic oligonucleotide
  Antisense strand to SEQ ID NO: 1621869
cuucaugucaagcacuuca

SEQ ID NO: 1621871 - RNA, 19 nt, Artificial Sequence
  Description of Artificial Sequence: Synthetic oligonucleotide
  Sense strand starting at position 3937 of SEQ ID NO: 1560752
agugcuugacaugaagcua

SEQ ID NO: 1621872 - RNA, 19 nt, Artificial Sequence
  Description of Artificial Sequence: Synthetic oligonucleotide
  Antisense strand to SEQ ID NO: 1621871
uagcuucaugucaagcacu

SEQ ID NO: 1621873 - RNA, 19 nt, Artificial Sequence
  Description of Artificial Sequence: Synthetic oligonucleotide
  Sense strand starting at position 3975 of SEQ ID NO: 1560752
cucugaaguggcugcuauu

SEQ ID NO: 1621874 - RNA, 19 nt, Artificial Sequence
  Description of Artificial Sequence: Synthetic oligonucleotide
  Antisense strand to SEQ ID NO: 1621873
aauagcagccacuucagag

SEQ ID NO: 1621875 - RNA, 19 nt, Artificial Sequence
  Description of Artificial Sequence: Synthetic oligonucleotide
  Sense strand starting at position 323 of SEQ ID NO: 1560753
uugccacuuuagcugaaau

SEQ ID NO: 1621876 - RNA, 19 nt, Artificial Sequence
  Description of Artificial Sequence: Synthetic oligonucleotide
  Antisense strand to SEQ ID NO: 1621875
auuucagcuaaaguggcaa

SEQ ID NO: 1621877 - RNA, 19 nt, Artificial Sequence
  Description of Artificial Sequence: Synthetic oligonucleotide
  Sense strand starting at position 325 of SEQ ID NO: 1560753
gccacuuuagcugaaauaa

SEQ ID NO: 1621878 - RNA, 19 nt, Artificial Sequence
  Description of Artificial Sequence: Synthetic oligonucleotide
  Antisense strand to SEQ ID NO: 1621877
uuauuucagcuaaaguggc

SEQ ID NO: 1621879 - RNA, 19 nt, Artificial Sequence
  Description of Artificial Sequence: Synthetic oligonucleotide
  Sense strand starting at position 361 of SEQ ID NO: 1560753
caaggaaucucguccuugu

SEQ ID NO: 1621880 - RNA, 19 nt, Artificial Sequence
  Description of Artificial Sequence: Synthetic oligonucleotide
  Antisense strand to SEQ ID NO: 1621879
acaaggacgagauuccuug

SEQ ID NO: 1621881 - RNA, 19 nt, Artificial Sequence
  Description of Artificial Sequence: Synthetic oligonucleotide
  Sense strand starting at position 748 of SEQ ID NO: 1560753
ccugcagcaucuuucugau

SEQ ID NO: 1621882 - RNA, 19 nt, Artificial Sequence
  Description of Artificial Sequence: Synthetic oligonucleotide
  Antisense strand to SEQ ID NO: 1621881
aucagaaagaugcugcagg

SEQ ID NO: 1621883 - RNA, 19 nt, Artificial Sequence
  Description of Artificial Sequence: Synthetic oligonucleotide
  Sense strand starting at position 750 of SEQ ID NO: 1560753
ugcagcaucuuucugauca

SEQ ID NO: 1621884 - RNA, 19 nt, Artificial Sequence
  Description of Artificial Sequence: Synthetic oligonucleotide
  Antisense strand to SEQ ID NO: 1621883
ugaucagaaagaugcugca

SEQ ID NO: 1621885 - RNA, 19 nt, Artificial Sequence
  Description of Artificial Sequence: Synthetic oligonucleotide
  Sense strand starting at position 751 of SEQ ID NO: 1560753
gcagcaucuuucugaucag

SEQ ID NO: 1621886 - RNA, 19 nt, Artificial Sequence
  Description of Artificial Sequence: Synthetic oligonucleotide
  Antisense strand to SEQ ID NO: 1621885
cugaucagaaagaugcugc

SEQ ID NO: 1621887 - RNA, 19 nt, Artificial Sequence
  Description of Artificial Sequence: Synthetic oligonucleotide
  Sense strand starting at position 754 of SEQ ID NO: 1560753
gcaucuuucugaucagaua

SEQ ID NO: 1621888 - RNA, 19 nt, Artificial Sequence
  Description of Artificial Sequence: Synthetic oligonucleotide
  Antisense strand to SEQ ID NO: 1621887
uaucugaucagaaagaugc

SEQ ID NO: 1621889 - RNA, 19 nt, Artificial Sequence
  Description of Artificial Sequence: Synthetic oligonucleotide
  Sense strand starting at position 757 of SEQ ID NO: 1560753
ucuuucugaucagauaagu

SEQ ID NO: 1621890 - RNA, 19 nt, Artificial Sequence
  Description of Artificial Sequence: Synthetic oligonucleotide
  Antisense strand to SEQ ID NO: 1621889
acuuaucugaucagaaaga

SEQ ID NO: 1621891 - RNA, 19 nt, Artificial Sequence
  Description of Artificial Sequence: Synthetic oligonucleotide
  Sense strand starting at position 766 of SEQ ID NO: 1560753
ucagauaaguccuccaaag

SEQ ID NO: 1621892 - RNA, 19 nt, Artificial Sequence
  Description of Artificial Sequence: Synthetic oligonucleotide
  Antisense strand to SEQ ID NO: 1621891
cuuuggaggacuuaucuga

SEQ ID NO: 1621893 - RNA, 19 nt, Artificial Sequence
  Description of Artificial Sequence: Synthetic oligonucleotide
  Sense strand starting at position 879 of SEQ ID NO: 1560753
cccauagaaccguguugca

SEQ ID NO: 1621894 - RNA, 19 nt, Artificial Sequence
  Description of Artificial Sequence: Synthetic oligonucleotide
  Antisense strand to SEQ ID NO: 1621893
ugcaacacgguucuauggg

SEQ ID NO: 1621895 - RNA, 19 nt, Artificial Sequence
  Description of Artificial Sequence: Synthetic oligonucleotide
  Sense strand starting at position 936 of SEQ ID NO: 1560753
cgaguuaucgcuuggaaau

SEQ ID NO: 1621896 - RNA, 19 nt, Artificial Sequence
  Description of Artificial Sequence: Synthetic oligonucleotide
  Antisense strand to SEQ ID NO: 1621895
auuuccaagcgauaacucg

SEQ ID NO: 1621897 - RNA, 19 nt, Artificial Sequence
  Description of Artificial Sequence: Synthetic oligonucleotide
  Sense strand starting at position 937 of SEQ ID NO: 1560753
gaguuaucgcuuggaaauu

SEQ ID NO: 1621898 - RNA, 19 nt, Artificial Sequence
  Description of Artificial Sequence: Synthetic oligonucleotide
  Antisense strand to SEQ ID NO: 1621897
aauuuccaagcgauaacuc

SEQ ID NO: 1621899 - RNA, 19 nt, Artificial Sequence
  Description of Artificial Sequence: Synthetic oligonucleotide
  Sense strand starting at position 938 of SEQ ID NO: 1560753
aguuaucgcuuggaaauua

SEQ ID NO: 1621900 - RNA, 19 nt, Artificial Sequence
  Description of Artificial Sequence: Synthetic oligonucleotide
  Antisense strand to SEQ ID NO: 1621899
uaauuuccaagcgauaacu

SEQ ID NO: 1621901 - RNA, 19 nt, Artificial Sequence
  Description of Artificial Sequence: Synthetic oligonucleotide
  Sense strand starting at position 1714 of SEQ ID NO: 1560753
uucucuugcgauuguucua

SEQ ID NO: 1621902 - RNA, 19 nt, Artificial Sequence
  Description of Artificial Sequence: Synthetic oligonucleotide
  Antisense strand to SEQ ID NO: 1621901
uagaacaaucgcaagagaa

SEQ ID NO: 1621903 - RNA, 19 nt, Artificial Sequence
  Description of Artificial Sequence: Synthetic oligonucleotide
  Sense strand starting at position 1717 of SEQ ID NO: 1560753
ucuugcgauuguucuacga

SEQ ID NO: 1621904 - RNA, 19 nt, Artificial Sequence
  Description of Artificial Sequence: Synthetic oligonucleotide
  Antisense strand to SEQ ID NO: 1621903
ucguagaacaaucgcaaga

SEQ ID NO: 1621905 - RNA, 19 nt, Artificial Sequence
  Description of Artificial Sequence: Synthetic oligonucleotide
  Sense strand starting at position 1719 of SEQ ID NO: 1560753
uugcgauuguucuacgaaa

SEQ ID NO: 1621906 - RNA, 19 nt, Artificial Sequence
  Description of Artificial Sequence: Synthetic oligonucleotide
  Antisense strand to SEQ ID NO: 1621905
uuucguagaacaaucgcaa

SEQ ID NO: 1621907 - RNA, 19 nt, Artificial Sequence
  Description of Artificial Sequence: Synthetic oligonucleotide
  Sense strand starting at position 1721 of SEQ ID NO: 1560753
gcgauuguucuacgaaagu

SEQ ID NO: 1621908 - RNA, 19 nt, Artificial Sequence
  Description of Artificial Sequence: Synthetic oligonucleotide
  Antisense strand to SEQ ID NO: 1621907
acuuucguagaacaaucgc

SEQ ID NO: 1621909 - RNA, 19 nt, Artificial Sequence
  Description of Artificial Sequence: Synthetic oligonucleotide
  Sense strand starting at position 1727 of SEQ ID NO: 1560753
guucuacgaaagugugguu

SEQ ID NO: 1621910 - RNA, 19 nt, Artificial Sequence
  Description of Artificial Sequence: Synthetic oligonucleotide
  Antisense strand to SEQ ID NO: 1621909
aaccacacuuucguagaac

SEQ ID NO: 1621911 - RNA, 19 nt, Artificial Sequence
  Description of Artificial Sequence: Synthetic oligonucleotide
  Sense strand starting at position 1730 of SEQ ID NO: 1560753
cuacgaaagugugguuuga

SEQ ID NO: 1621912 - RNA, 19 nt, Artificial Sequence
  Description of Artificial Sequence: Synthetic oligonucleotide
  Antisense strand to SEQ ID NO: 1621911
ucaaaccacacuuucguag

SEQ ID NO: 1621913 - RNA, 19 nt, Artificial Sequence
  Description of Artificial Sequence: Synthetic oligonucleotide
  Sense strand starting at position 1732 of SEQ ID NO: 1560753
acgaaagugugguuugaag

SEQ ID NO: 1621914 - RNA, 19 nt, Artificial Sequence
  Description of Artificial Sequence: Synthetic oligonucleotide
  Antisense strand to SEQ ID NO: 1621913
cuucaaaccacacuuucgu

SEQ ID NO: 1621915 - RNA, 19 nt, Artificial Sequence
  Description of Artificial Sequence: Synthetic oligonucleotide
  Sense strand starting at position 2241 of SEQ ID NO: 1560753
cuuuguuaucgacaccaau

SEQ ID NO: 1621916 - RNA, 19 nt, Artificial Sequence
  Description of Artificial Sequence: Synthetic oligonucleotide
  Antisense strand to SEQ ID NO: 1621915
auuggugucgauaacaaag

SEQ ID NO: 1621917 - RNA, 19 nt, Artificial Sequence
  Description of Artificial Sequence: Synthetic oligonucleotide
  Sense strand starting at position 2244 of SEQ ID NO: 1560753
uguuaucgacaccaauacu

SEQ ID NO: 1621918 - RNA, 19 nt, Artificial Sequence
  Description of Artificial Sequence: Synthetic oligonucleotide
  Antisense strand to SEQ ID NO: 1621917
aguauuggugucgauaaca

SEQ ID NO: 1621919 - RNA, 19 nt, Artificial Sequence
  Description of Artificial Sequence: Synthetic oligonucleotide
  Sense strand starting at position 2315 of SEQ ID NO: 1560753
gugcuugucucggccacau

SEQ ID NO: 1621920 - RNA, 19 nt, Artificial Sequence
  Description of Artificial Sequence: Synthetic oligonucleotide
  Antisense strand to SEQ ID NO: 1621919
auguggccgagacaagcac

SEQ ID NO: 1621921 - RNA, 19 nt, Artificial Sequence
  Description of Artificial Sequence: Synthetic oligonucleotide
  Sense strand starting at position 2317 of SEQ ID NO: 1560753
gcuugucucggccacauua

SEQ ID NO: 1621922 - RNA, 19 nt, Artificial Sequence
  Description of Artificial Sequence: Synthetic oligonucleotide
  Antisense strand to SEQ ID NO: 1621921
uaauguggccgagacaagc

SEQ ID NO: 1621923 - RNA, 19 nt, Artificial Sequence
  Description of Artificial Sequence: Synthetic oligonucleotide
  Sense strand starting at position 2325 of SEQ ID NO: 1560753
cggccacauuaggguuaaa

SEQ ID NO: 1621924 - RNA, 19 nt, Artificial Sequence
  Description of Artificial Sequence: Synthetic oligonucleotide
  Antisense strand to SEQ ID NO: 1621923
uuuaacccuaauguggccg

SEQ ID NO: 1621925 - RNA, 19 nt, Artificial Sequence
  Description of Artificial Sequence: Synthetic oligonucleotide
  Sense strand starting at position 2470 of SEQ ID NO: 1560753
guuguuugcuuguuugaag

SEQ ID NO: 1621926 - RNA, 19 nt, Artificial Sequence
  Description of Artificial Sequence: Synthetic oligonucleotide
  Antisense strand to SEQ ID NO: 1621925
cuucaaacaagcaaacaac

SEQ ID NO: 1621927 - RNA, 19 nt, Artificial Sequence
  Description of Artificial Sequence: Synthetic oligonucleotide
  Sense strand starting at position 2471 of SEQ ID NO: 1560753
uuguuugcuuguuugaagu

SEQ ID NO: 1621928 - RNA, 19 nt, Artificial Sequence
  Description of Artificial Sequence: Synthetic oligonucleotide
  Antisense strand to SEQ ID NO: 1621927
acuucaaacaagcaaacaa

SEQ ID NO: 1621929 - RNA, 19 nt, Artificial Sequence
  Description of Artificial Sequence: Synthetic oligonucleotide
  Sense strand starting at position 2473 of SEQ ID NO: 1560753
guuugcuuguuugaaguuu

SEQ ID NO: 1621930 - RNA, 19 nt, Artificial Sequence
  Description of Artificial Sequence: Synthetic oligonucleotide
  Antisense strand to SEQ ID NO: 1621929
aaacuucaaacaagcaaac

SEQ ID NO: 1621931 - RNA, 19 nt, Artificial Sequence
  Description of Artificial Sequence: Synthetic oligonucleotide
  Sense strand starting at position 2682 of SEQ ID NO: 1560753
gguuauuauugguguucug

SEQ ID NO: 1621932 - RNA, 19 nt, Artificial Sequence
  Description of Artificial Sequence: Synthetic oligonucleotide
  Antisense strand to SEQ ID NO: 1621931
cagaacaccaauaauaacc

SEQ ID NO: 1621933 - RNA, 19 nt, Artificial Sequence
  Description of Artificial Sequence: Synthetic oligonucleotide
  Sense strand starting at position 3131 of SEQ ID NO: 1560753
gcugccugaucggaggaaa

SEQ ID NO: 1621934 - RNA, 19 nt, Artificial Sequence
  Description of Artificial Sequence: Synthetic oligonucleotide
  Antisense strand to SEQ ID NO: 1621933
uuuccuccgaucaggcagc

SEQ ID NO: 1621935 - RNA, 19 nt, Artificial Sequence
  Description of Artificial Sequence: Synthetic oligonucleotide
  Sense strand starting at position 3678 of SEQ ID NO: 1560753
agcaaaguccagcaguuau

SEQ ID NO: 1621936 - RNA, 19 nt, Artificial Sequence
  Description of Artificial Sequence: Synthetic oligonucleotide
  Antisense strand to SEQ ID NO: 1621935
auaacugcuggacuuugcu

SEQ ID NO: 1621937 - RNA, 19 nt, Artificial Sequence
  Description of Artificial Sequence: Synthetic oligonucleotide
  Sense strand starting at position 3897 of SEQ ID NO: 1560753
gcgccuucucucuguguuu

SEQ ID NO: 1621938 - RNA, 19 nt, Artificial Sequence
  Description of Artificial Sequence: Synthetic oligonucleotide
  Antisense strand to SEQ ID NO: 1621937
aaacacagagagaaggcgc

SEQ ID NO: 1621939 - RNA, 19 nt, Artificial Sequence
  Description of Artificial Sequence: Synthetic oligonucleotide
  Sense strand starting at position 138 of SEQ ID NO: 1560754
ccugcagcaucuuucugau

SEQ ID NO: 1621940 - RNA, 19 nt, Artificial Sequence
  Description of Artificial Sequence: Synthetic oligonucleotide
  Antisense strand to SEQ ID NO: 1621939
aucagaaagaugcugcagg

SEQ ID NO: 1621941 - RNA, 19 nt, Artificial Sequence
  Description of Artificial Sequence: Synthetic oligonucleotide
  Sense strand starting at position 140 of SEQ ID NO: 1560754
ugcagcaucuuucugauca

SEQ ID NO: 1621942 - RNA, 19 nt, Artificial Sequence
  Description of Artificial Sequence: Synthetic oligonucleotide
  Antisense strand to SEQ ID NO: 1621941
ugaucagaaagaugcugca

SEQ ID NO: 1621943 - RNA, 19 nt, Artificial Sequence
  Description of Artificial Sequence: Synthetic oligonucleotide
  Sense strand starting at position 141 of SEQ ID NO: 1560754
gcagcaucuuucugaucag

SEQ ID NO: 1621944 - RNA, 19 nt, Artificial Sequence
  Description of Artificial Sequence: Synthetic oligonucleotide
  Antisense strand to SEQ ID NO: 1621943
cugaucagaaagaugcugc

SEQ ID NO: 1621945 - RNA, 19 nt, Artificial Sequence
  Description of Artificial Sequence: Synthetic oligonucleotide
  Sense strand starting at position 144 of SEQ ID NO: 1560754
gcaucuuucugaucagaua

SEQ ID NO: 1621946 - RNA, 19 nt, Artificial Sequence
  Description of Artificial Sequence: Synthetic oligonucleotide
  Antisense strand to SEQ ID NO: 1621945
uaucugaucagaaagaugc

SEQ ID NO: 1621947 - RNA, 19 nt, Artificial Sequence
  Description of Artificial Sequence: Synthetic oligonucleotide
  Sense strand starting at position 147 of SEQ ID NO: 1560754
ucuuucugaucagauaagu

SEQ ID NO: 1621948 - RNA, 19 nt, Artificial Sequence
  Description of Artificial Sequence: Synthetic oligonucleotide
  Antisense strand to SEQ ID NO: 1621947
acuuaucugaucagaaaga

SEQ ID NO: 1621949 - RNA, 19 nt, Artificial Sequence
  Description of Artificial Sequence: Synthetic oligonucleotide
  Sense strand starting at position 156 of SEQ ID NO: 1560754
ucagauaaguccuccaaag

SEQ ID NO: 1621950 - RNA, 19 nt, Artificial Sequence
  Description of Artificial Sequence: Synthetic oligonucleotide
  Antisense strand to SEQ ID NO: 1621949
cuuuggaggacuuaucuga

SEQ ID NO: 1621951 - RNA, 19 nt, Artificial Sequence
  Description of Artificial Sequence: Synthetic oligonucleotide
  Sense strand starting at position 269 of SEQ ID NO: 1560754
cccauagaaccguguugca

SEQ ID NO: 1621952 - RNA, 19 nt, Artificial Sequence
  Description of Artificial Sequence: Synthetic oligonucleotide
  Antisense strand to SEQ ID NO: 1621951
ugcaacacgguucuauggg

SEQ ID NO: 1621953 - RNA, 19 nt, Artificial Sequence
  Description of Artificial Sequence: Synthetic oligonucleotide
  Sense strand starting at position 326 of SEQ ID NO: 1560754
cgaguuaucgcuuggaaau

SEQ ID NO: 1621954 - RNA, 19 nt, Artificial Sequence
  Description of Artificial Sequence: Synthetic oligonucleotide
  Antisense strand to SEQ ID NO: 1621953
auuuccaagcgauaacucg

SEQ ID NO: 1621955 - RNA, 19 nt, Artificial Sequence
  Description of Artificial Sequence: Synthetic oligonucleotide
  Sense strand starting at position 327 of SEQ ID NO: 1560754
gaguuaucgcuuggaaauu

SEQ ID NO: 1621956 - RNA, 19 nt, Artificial Sequence
  Description of Artificial Sequence: Synthetic oligonucleotide
  Antisense strand to SEQ ID NO: 1621955
aauuuccaagcgauaacuc

SEQ ID NO: 1621957 - RNA, 19 nt, Artificial Sequence
  Description of Artificial Sequence: Synthetic oligonucleotide
  Sense strand starting at position 328 of SEQ ID NO: 1560754
aguuaucgcuuggaaauua

SEQ ID NO: 1621958 - RNA, 19 nt, Artificial Sequence
  Description of Artificial Sequence: Synthetic oligonucleotide
  Antisense strand to SEQ ID NO: 1621957
uaauuuccaagcgauaacu

SEQ ID NO: 1621959 - RNA, 19 nt, Artificial Sequence
  Description of Artificial Sequence: Synthetic oligonucleotide
  Sense strand starting at position 1104 of SEQ ID NO: 1560754
uucucuugcgauuguucua

SEQ ID NO: 1621960 - RNA, 19 nt, Artificial Sequence
  Description of Artificial Sequence: Synthetic oligonucleotide
  Antisense strand to SEQ ID NO: 1621959
uagaacaaucgcaagagaa

SEQ ID NO: 1621961 - RNA, 19 nt, Artificial Sequence
  Description of Artificial Sequence: Synthetic oligonucleotide
  Sense strand starting at position 1107 of SEQ ID NO: 1560754
ucuugcgauuguucuacga

SEQ ID NO: 1621962 - RNA, 19 nt, Artificial Sequence
  Description of Artificial Sequence: Synthetic oligonucleotide
  Antisense strand to SEQ ID NO: 1621961
ucguagaacaaucgcaaga

SEQ ID NO: 1621963 - RNA, 19 nt, Artificial Sequence
  Description of Artificial Sequence: Synthetic oligonucleotide
  Sense strand starting at position 1109 of SEQ ID NO: 1560754
uugcgauuguucuacgaaa

SEQ ID NO: 1621964 - RNA, 19 nt, Artificial Sequence
  Description of Artificial Sequence: Synthetic oligonucleotide
  Antisense strand to SEQ ID NO: 1621963
uuucguagaacaaucgcaa

SEQ ID NO: 1621965 - RNA, 19 nt, Artificial Sequence
  Description of Artificial Sequence: Synthetic oligonucleotide
  Sense strand starting at position 1111 of SEQ ID NO: 1560754
gcgauuguucuacgaaagu

SEQ ID NO: 1621966 - RNA, 19 nt, Artificial Sequence
  Description of Artificial Sequence: Synthetic oligonucleotide
  Antisense strand to SEQ ID NO: 1621965
acuuucguagaacaaucgc

SEQ ID NO: 1621967 - RNA, 19 nt, Artificial Sequence
  Description of Artificial Sequence: Synthetic oligonucleotide
  Sense strand starting at position 1117 of SEQ ID NO: 1560754
guucuacgaaagugugguu

SEQ ID NO: 1621968 - RNA, 19 nt, Artificial Sequence
  Description of Artificial Sequence: Synthetic oligonucleotide
  Antisense strand to SEQ ID NO: 1621967
aaccacacuuucguagaac

SEQ ID NO: 1621969 - RNA, 19 nt, Artificial Sequence
  Description of Artificial Sequence: Synthetic oligonucleotide
  Sense strand starting at position 1120 of SEQ ID NO: 1560754
cuacgaaagugugguuuga

SEQ ID NO: 1621970 - RNA, 19 nt, Artificial Sequence
  Description of Artificial Sequence: Synthetic oligonucleotide
  Antisense strand to SEQ ID NO: 1621969
ucaaaccacacuuucguag

SEQ ID NO: 1621971 - RNA, 19 nt, Artificial Sequence
  Description of Artificial Sequence: Synthetic oligonucleotide
  Sense strand starting at position 1122 of SEQ ID NO: 1560754
acgaaagugugguuugaag

SEQ ID NO: 1621972 - RNA, 19 nt, Artificial Sequence
  Description of Artificial Sequence: Synthetic oligonucleotide
  Antisense strand to SEQ ID NO: 1621971
cuucaaaccacacuuucgu

SEQ ID NO: 1621973 - RNA, 19 nt, Artificial Sequence
  Description of Artificial Sequence: Synthetic oligonucleotide
  Sense strand starting at position 1631 of SEQ ID NO: 1560754
cuuuguuaucgacaccaau

SEQ ID NO: 1621974 - RNA, 19 nt, Artificial Sequence
  Description of Artificial Sequence: Synthetic oligonucleotide
  Antisense strand to SEQ ID NO: 1621973
auuggugucgauaacaaag

SEQ ID NO: 1621975 - RNA, 19 nt, Artificial Sequence
  Description of Artificial Sequence: Synthetic oligonucleotide
  Sense strand starting at position 1634 of SEQ ID NO: 1560754
uguuaucgacaccaauacu

SEQ ID NO: 1621976 - RNA, 19 nt, Artificial Sequence
  Description of Artificial Sequence: Synthetic oligonucleotide
  Antisense strand to SEQ ID NO: 1621975
aguauuggugucgauaaca

SEQ ID NO: 1621977 - RNA, 19 nt, Artificial Sequence
  Description of Artificial Sequence: Synthetic oligonucleotide
  Sense strand starting at position 1705 of SEQ ID NO: 1560754
gugcuugucucggccacau

SEQ ID NO: 1621978 - RNA, 19 nt, Artificial Sequence
  Description of Artificial Sequence: Synthetic oligonucleotide
  Antisense strand to SEQ ID NO: 1621977
auguggccgagacaagcac

SEQ ID NO: 1621979 - RNA, 19 nt, Artificial Sequence
  Description of Artificial Sequence: Synthetic oligonucleotide
  Sense strand starting at position 1707 of SEQ ID NO: 1560754
gcuugucucggccacauua

SEQ ID NO: 1621980 - RNA, 19 nt, Artificial Sequence
  Description of Artificial Sequence: Synthetic oligonucleotide
  Antisense strand to SEQ ID NO: 1621979
uaauguggccgagacaagc

SEQ ID NO: 1621981 - RNA, 19 nt, Artificial Sequence
  Description of Artificial Sequence: Synthetic oligonucleotide
  Sense strand starting at position 1715 of SEQ ID NO: 1560754
cggccacauuaggguuaaa

SEQ ID NO: 1621982 - RNA, 19 nt, Artificial Sequence
  Description of Artificial Sequence: Synthetic oligonucleotide
  Antisense strand to SEQ ID NO: 1621981
uuuaacccuaauguggccg

SEQ ID NO: 1621983 - RNA, 19 nt, Artificial Sequence
  Description of Artificial Sequence: Synthetic oligonucleotide
  Sense strand starting at position 1860 of SEQ ID NO: 1560754
guuguuugcuuguuugaag

SEQ ID NO: 1621984 - RNA, 19 nt, Artificial Sequence
  Description of Artificial Sequence: Synthetic oligonucleotide
  Antisense strand to SEQ ID NO: 1621983
cuucaaacaagcaaacaac

SEQ ID NO: 1621985 - RNA, 19 nt, Artificial Sequence
  Description of Artificial Sequence: Synthetic oligonucleotide
  Sense strand starting at position 1861 of SEQ ID NO: 1560754
uuguuugcuuguuugaagu

SEQ ID NO: 1621986 - RNA, 19 nt, Artificial Sequence
  Description of Artificial Sequence: Synthetic oligonucleotide
  Antisense strand to SEQ ID NO: 1621985
acuucaaacaagcaaacaa

SEQ ID NO: 1621987 - RNA, 19 nt, Artificial Sequence
  Description of Artificial Sequence: Synthetic oligonucleotide
  Sense strand starting at position 1863 of SEQ ID NO: 1560754
guuugcuuguuugaaguuu

SEQ ID NO: 1621988 - RNA, 19 nt, Artificial Sequence
  Description of Artificial Sequence: Synthetic oligonucleotide
  Antisense strand to SEQ ID NO: 1621987
aaacuucaaacaagcaaac

SEQ ID NO: 1621989 - RNA, 19 nt, Artificial Sequence
  Description of Artificial Sequence: Synthetic oligonucleotide
  Sense strand starting at position 2072 of SEQ ID NO: 1560754
gguuauuauugguguucug

SEQ ID NO: 1621990 - RNA, 19 nt, Artificial Sequence
  Description of Artificial Sequence: Synthetic oligonucleotide
  Antisense strand to SEQ ID NO: 1621989
cagaacaccaauaauaacc

SEQ ID NO: 1621991 - RNA, 19 nt, Artificial Sequence
  Description of Artificial Sequence: Synthetic oligonucleotide
  Sense strand starting at position 2521 of SEQ ID NO: 1560754
gcugccugaucggaggaaa

SEQ ID NO: 1621992 - RNA, 19 nt, Artificial Sequence
  Description of Artificial Sequence: Synthetic oligonucleotide
  Antisense strand to SEQ ID NO: 1621991
uuuccuccgaucaggcagc

SEQ ID NO: 1621993 - RNA, 19 nt, Artificial Sequence
  Description of Artificial Sequence: Synthetic oligonucleotide
  Sense strand starting at position 3068 of SEQ ID NO: 1560754
agcaaaguccagcaguuau

SEQ ID NO: 1621994 - RNA, 19 nt, Artificial Sequence
  Description of Artificial Sequence: Synthetic oligonucleotide
  Antisense strand to SEQ ID NO: 1621993
auaacugcuggacuuugcu

SEQ ID NO: 1621995 - RNA, 19 nt, Artificial Sequence
  Description of Artificial Sequence: Synthetic oligonucleotide
  Sense strand starting at position 3287 of SEQ ID NO: 1560754
gcgccuucucucuguguuu

SEQ ID NO: 1621996 - RNA, 19 nt, Artificial Sequence
  Description of Artificial Sequence: Synthetic oligonucleotide
  Antisense strand to SEQ ID NO: 1621995
aaacacagagagaaggcgc

SEQ ID NO: 1621997 - RNA, 19 nt, Artificial Sequence
  Description of Artificial Sequence: Synthetic oligonucleotide
  Sense strand starting at position 3442 of SEQ ID NO: 1560754
cggugcuaugaauagaaau

SEQ ID NO: 1621998 - RNA, 19 nt, Artificial Sequence
  Description of Artificial Sequence: Synthetic oligonucleotide
  Antisense strand to SEQ ID NO: 1621997
auuucuauucauagcaccg

SEQ ID NO: 1621999 - RNA, 19 nt, Artificial Sequence
  Description of Artificial Sequence: Synthetic oligonucleotide
  Sense strand starting at position 3710 of SEQ ID NO: 1560754
cacagcucggcucgagaaa

SEQ ID NO: 1622000 - RNA, 19 nt, Artificial Sequence
  Description of Artificial Sequence: Synthetic oligonucleotide
  Antisense strand to SEQ ID NO: 1621999
uuucucgagccgagcugug

SEQ ID NO: 1622001 - RNA, 19 nt, Artificial Sequence
  Description of Artificial Sequence: Synthetic oligonucleotide
  Sense strand starting at position 3841 of SEQ ID NO: 1560754
gacacuaccucugagcaga

SEQ ID NO: 1622002 - RNA, 19 nt, Artificial Sequence
  Description of Artificial Sequence: Synthetic oligonucleotide
  Antisense strand to SEQ ID NO: 1622001
ucugcucagagguaguguc

SEQ ID NO: 1622003 - RNA, 19 nt, Artificial Sequence
  Description of Artificial Sequence: Synthetic oligonucleotide
  Sense strand starting at position 54 of SEQ ID NO: 1560755
ucagaugucuggcgugcuu

SEQ ID NO: 1622004 - RNA, 19 nt, Artificial Sequence
  Description of Artificial Sequence: Synthetic oligonucleotide
  Antisense strand to SEQ ID NO: 1622003
aagcacgccagacaucuga

SEQ ID NO: 1622005 - RNA, 19 nt, Artificial Sequence
  Description of Artificial Sequence: Synthetic oligonucleotide
  Sense strand starting at position 376 of SEQ ID NO: 1560755
gccugcuuucuacaggaaa

SEQ ID NO: 1622006 - RNA, 19 nt, Artificial Sequence
  Description of Artificial Sequence: Synthetic oligonucleotide
  Antisense strand to SEQ ID NO: 1622005
uuuccuguagaaagcaggc

SEQ ID NO: 1622007 - RNA, 19 nt, Artificial Sequence
  Description of Artificial Sequence: Synthetic oligonucleotide
  Sense strand starting at position 655 of SEQ ID NO: 1560755
gcacauggcugacaaggau

SEQ ID NO: 1622008 - RNA, 19 nt, Artificial Sequence
  Description of Artificial Sequence: Synthetic oligonucleotide
  Antisense strand to SEQ ID NO: 1622007
auccuugucagccaugugc

SEQ ID NO: 1622009 - RNA, 19 nt, Artificial Sequence
  Description of Artificial Sequence: Synthetic oligonucleotide
  Sense strand starting at position 899 of SEQ ID NO: 1560755
acaggcauccucgaagcuu

SEQ ID NO: 1622010 - RNA, 19 nt, Artificial Sequence
  Description of Artificial Sequence: Synthetic oligonucleotide
  Antisense strand to SEQ ID NO: 1622009
aagcuucgaggaugccugu

SEQ ID NO: 1622011 - RNA, 19 nt, Artificial Sequence
  Description of Artificial Sequence: Synthetic oligonucleotide
  Sense strand starting at position 1142 of SEQ ID NO: 1560755
gaaaguuugcgccgaggaa

SEQ ID NO: 1622012 - RNA, 19 nt, Artificial Sequence
  Description of Artificial Sequence: Synthetic oligonucleotide
  Antisense strand to SEQ ID NO: 1622011
uuccucggcgcaaacuuuc

SEQ ID NO: 1622013 - RNA, 19 nt, Artificial Sequence
  Description of Artificial Sequence: Synthetic oligonucleotide
  Sense strand starting at position 1143 of SEQ ID NO: 1560755
aaaguuugcgccgaggaaa

SEQ ID NO: 1622014 - RNA, 19 nt, Artificial Sequence
  Description of Artificial Sequence: Synthetic oligonucleotide
  Antisense strand to SEQ ID NO: 1622013
uuuccucggcgcaaacuuu

SEQ ID NO: 1622015 - RNA, 19 nt, Artificial Sequence
  Description of Artificial Sequence: Synthetic oligonucleotide
  Sense strand starting at position 1299 of SEQ ID NO: 1560755
ccaugugaggccuaaacaa

SEQ ID NO: 1622016 - RNA, 19 nt, Artificial Sequence
  Description of Artificial Sequence: Synthetic oligonucleotide
  Antisense strand to SEQ ID NO: 1622015
uuguuuaggccucacaugg

SEQ ID NO: 1622017 - RNA, 19 nt, Artificial Sequence
  Description of Artificial Sequence: Synthetic oligonucleotide
  Sense strand starting at position 2273 of SEQ ID NO: 1560755
cgcugugaaagugaaaguu

SEQ ID NO: 1622018 - RNA, 19 nt, Artificial Sequence
  Description of Artificial Sequence: Synthetic oligonucleotide
  Antisense strand to SEQ ID NO: 1622017
aacuuucacuuucacagcg

SEQ ID NO: 1622019 - RNA, 19 nt, Artificial Sequence
  Description of Artificial Sequence: Synthetic oligonucleotide
  Sense strand starting at position 2282 of SEQ ID NO: 1560755
agugaaaguuuagacaaag

SEQ ID NO: 1622020 - RNA, 19 nt, Artificial Sequence
  Description of Artificial Sequence: Synthetic oligonucleotide
  Antisense strand to SEQ ID NO: 1622019
cuuugucuaaacuuucacu

SEQ ID NO: 1622021 - RNA, 19 nt, Artificial Sequence
  Description of Artificial Sequence: Synthetic oligonucleotide
  Sense strand starting at position 2853 of SEQ ID NO: 1560755
ugacgcauguuccugcaga

SEQ ID NO: 1622022 - RNA, 19 nt, Artificial Sequence
  Description of Artificial Sequence: Synthetic oligonucleotide
  Antisense strand to SEQ ID NO: 1622021
ucugcaggaacaugcguca

SEQ ID NO: 1622023 - RNA, 19 nt, Artificial Sequence
  Description of Artificial Sequence: Synthetic oligonucleotide
  Sense strand starting at position 2854 of SEQ ID NO: 1560755
gacgcauguuccugcagaa

SEQ ID NO: 1622024 - RNA, 19 nt, Artificial Sequence
  Description of Artificial Sequence: Synthetic oligonucleotide
  Antisense strand to SEQ ID NO: 1622023
uucugcaggaacaugcguc

SEQ ID NO: 1622025 - RNA, 19 nt, Artificial Sequence
  Description of Artificial Sequence: Synthetic oligonucleotide
  Sense strand starting at position 3012 of SEQ ID NO: 1560755
gaaugacacugaugauuga

SEQ ID NO: 1622026 - RNA, 19 nt, Artificial Sequence
  Description of Artificial Sequence: Synthetic oligonucleotide
  Antisense strand to SEQ ID NO: 1622025
ucaaucaucagugucauuc

SEQ ID NO: 1622027 - RNA, 19 nt, Artificial Sequence
  Description of Artificial Sequence: Synthetic oligonucleotide
  Sense strand starting at position 3382 of SEQ ID NO: 1560755
gauacacagcgucacagau

SEQ ID NO: 1622028 - RNA, 19 nt, Artificial Sequence
  Description of Artificial Sequence: Synthetic oligonucleotide
  Antisense strand to SEQ ID NO: 1622027
aucugugacgcuguguauc

SEQ ID NO: 1622029 - RNA, 19 nt, Artificial Sequence
  Description of Artificial Sequence: Synthetic oligonucleotide
  Sense strand starting at position 3535 of SEQ ID NO: 1560755
agaaucaucuagccaugca

SEQ ID NO: 1622030 - RNA, 19 nt, Artificial Sequence
  Description of Artificial Sequence: Synthetic oligonucleotide
  Antisense strand to SEQ ID NO: 1622029
ugcauggcuagaugauucu

SEQ ID NO: 1622031 - RNA, 19 nt, Artificial Sequence
  Description of Artificial Sequence: Synthetic oligonucleotide
  Sense strand starting at position 3608 of SEQ ID NO: 1560755
cuuguaauguggcccugau

SEQ ID NO: 1622032 - RNA, 19 nt, Artificial Sequence
  Description of Artificial Sequence: Synthetic oligonucleotide
  Antisense strand to SEQ ID NO: 1622031
aucagggccacauuacaag

SEQ ID NO: 1622033 - RNA, 19 nt, Artificial Sequence
  Description of Artificial Sequence: Synthetic oligonucleotide
  Sense strand starting at position 3618 of SEQ ID NO: 1560755
ggcccugaucaucgacaua

SEQ ID NO: 1622034 - RNA, 19 nt, Artificial Sequence
  Description of Artificial Sequence: Synthetic oligonucleotide
  Antisense strand to SEQ ID NO: 1622033
uaugucgaugaucagggcc

SEQ ID NO: 1622035 - RNA, 19 nt, Artificial Sequence
  Description of Artificial Sequence: Synthetic oligonucleotide
  Sense strand starting at position 3623 of SEQ ID NO: 1560755
ugaucaucgacauaggcaa

SEQ ID NO: 1622036 - RNA, 19 nt, Artificial Sequence
  Description of Artificial Sequence: Synthetic oligonucleotide
  Antisense strand to SEQ ID NO: 1622035
uugccuaugucgaugauca

SEQ ID NO: 1622037 - RNA, 19 nt, Artificial Sequence
  Description of Artificial Sequence: Synthetic oligonucleotide
  Sense strand starting at position 3827 of SEQ ID NO: 1560755
gaggaagcccucugguaac

SEQ ID NO: 1622038 - RNA, 19 nt, Artificial Sequence
  Description of Artificial Sequence: Synthetic oligonucleotide
  Antisense strand to SEQ ID NO: 1622037
guuaccagagggcuuccuc

SEQ ID NO: 1622039 - RNA, 19 nt, Artificial Sequence
  Description of Artificial Sequence: Synthetic oligonucleotide
  Sense strand starting at position 3884 of SEQ ID NO: 1560755
ggcagcuccugcugagaca

SEQ ID NO: 1622040 - RNA, 19 nt, Artificial Sequence
  Description of Artificial Sequence: Synthetic oligonucleotide
  Antisense strand to SEQ ID NO: 1622039
ugucucagcaggagcugcc

SEQ ID NO: 1622041 - RNA, 19 nt, Artificial Sequence
  Description of Artificial Sequence: Synthetic oligonucleotide
  Sense strand starting at position 3939 of SEQ ID NO: 1560755
cuugcucucuugggccaaa

SEQ ID NO: 1622042 - RNA, 19 nt, Artificial Sequence
  Description of Artificial Sequence: Synthetic oligonucleotide
  Antisense strand to SEQ ID NO: 1622041
uuuggcccaagagagcaag

SEQ ID NO: 1622043 - RNA, 19 nt, Artificial Sequence
  Description of Artificial Sequence: Synthetic oligonucleotide
  Sense strand starting at position 3962 of SEQ ID NO: 1560755
uguggcaauucucagcuau

SEQ ID NO: 1622044 - RNA, 19 nt, Artificial Sequence
  Description of Artificial Sequence: Synthetic oligonucleotide
  Antisense strand to SEQ ID NO: 1622043
auagcugagaauugccaca

SEQ ID NO: 1622045 - RNA, 19 nt, Artificial Sequence
  Description of Artificial Sequence: Synthetic oligonucleotide
  Sense strand starting at position 3975 of SEQ ID NO: 1560755
agcuaugcauugucuguua

SEQ ID NO: 1622046 - RNA, 19 nt, Artificial Sequence
  Description of Artificial Sequence: Synthetic oligonucleotide
  Antisense strand to SEQ ID NO: 1622045
uaacagacaaugcauagcu

SEQ ID NO: 1622047 - RNA, 19 nt, Artificial Sequence
  Description of Artificial Sequence: Synthetic oligonucleotide
  Sense strand starting at position 3977 of SEQ ID NO: 1560755
cuaugcauugucuguuaaa

SEQ ID NO: 1622048 - RNA, 19 nt, Artificial Sequence
  Description of Artificial Sequence: Synthetic oligonucleotide
  Antisense strand to SEQ ID NO: 1622047
uuuaacagacaaugcauag

SEQ ID NO: 1622049 - RNA, 19 nt, Artificial Sequence
  Description of Artificial Sequence: Synthetic oligonucleotide
  Sense strand starting at position 3978 of SEQ ID NO: 1560755
uaugcauugucuguuaaag

SEQ ID NO: 1622050 - RNA, 19 nt, Artificial Sequence
  Description of Artificial Sequence: Synthetic oligonucleotide
  Antisense strand to SEQ ID NO: 1622049
cuuuaacagacaaugcaua

SEQ ID NO: 1622051 - RNA, 19 nt, Artificial Sequence
  Description of Artificial Sequence: Synthetic oligonucleotide
  Sense strand starting at position 314 of SEQ ID NO: 1560756
ggagguuguggcuauagua

SEQ ID NO: 1622052 - RNA, 19 nt, Artificial Sequence
  Description of Artificial Sequence: Synthetic oligonucleotide
  Antisense strand to SEQ ID NO: 1622051
uacuauagccacaaccucc

SEQ ID NO: 1622053 - RNA, 19 nt, Artificial Sequence
  Description of Artificial Sequence: Synthetic oligonucleotide
  Sense strand starting at position 482 of SEQ ID NO: 1560756
agacuauaaagcugguuga

SEQ ID NO: 1622054 - RNA, 19 nt, Artificial Sequence
  Description of Artificial Sequence: Synthetic oligonucleotide
  Antisense strand to SEQ ID NO: 1622053
ucaaccagcuuuauagucu

SEQ ID NO: 1622055 - RNA, 19 nt, Artificial Sequence
  Description of Artificial Sequence: Synthetic oligonucleotide
  Sense strand starting at position 485 of SEQ ID NO: 1560756
cuauaaagcugguugagau

SEQ ID NO: 1622056 - RNA, 19 nt, Artificial Sequence
  Description of Artificial Sequence: Synthetic oligonucleotide
  Antisense strand to SEQ ID NO: 1622055
aucucaaccagcuuuauag

SEQ ID NO: 1622057 - RNA, 19 nt, Artificial Sequence
  Description of Artificial Sequence: Synthetic oligonucleotide
  Sense strand starting at position 486 of SEQ ID NO: 1560756
uauaaagcugguugagauc

SEQ ID NO: 1622058 - RNA, 19 nt, Artificial Sequence
  Description of Artificial Sequence: Synthetic oligonucleotide
  Antisense strand to SEQ ID NO: 1622057
gaucucaaccagcuuuaua

SEQ ID NO: 1622059 - RNA, 19 nt, Artificial Sequence
  Description of Artificial Sequence: Synthetic oligonucleotide
  Sense strand starting at position 492 of SEQ ID NO: 1560756
gcugguugagaucaauauu

SEQ ID NO: 1622060 - RNA, 19 nt, Artificial Sequence
  Description of Artificial Sequence: Synthetic oligonucleotide
  Antisense strand to SEQ ID NO: 1622059
aauauugaucucaaccagc

SEQ ID NO: 1622061 - RNA, 19 nt, Artificial Sequence
  Description of Artificial Sequence: Synthetic oligonucleotide
  Sense strand starting at position 613 of SEQ ID NO: 1560756
gcaguuccuucuccuugaa

SEQ ID NO: 1622062 - RNA, 19 nt, Artificial Sequence
  Description of Artificial Sequence: Synthetic oligonucleotide
  Antisense strand to SEQ ID NO: 1622061
uucaaggagaaggaacugc

SEQ ID NO: 1622063 - RNA, 19 nt, Artificial Sequence
  Description of Artificial Sequence: Synthetic oligonucleotide
  Sense strand starting at position 616 of SEQ ID NO: 1560756
guuccuucuccuugaaaug

SEQ ID NO: 1622064 - RNA, 19 nt, Artificial Sequence
  Description of Artificial Sequence: Synthetic oligonucleotide
  Antisense strand to SEQ ID NO: 1622063
cauuucaaggagaaggaac

SEQ ID NO: 1622065 - RNA, 19 nt, Artificial Sequence
  Description of Artificial Sequence: Synthetic oligonucleotide
  Sense strand starting at position 898 of SEQ ID NO: 1560756
gagccuggaacgugguaau

SEQ ID NO: 1622066 - RNA, 19 nt, Artificial Sequence
  Description of Artificial Sequence: Synthetic oligonucleotide
  Antisense strand to SEQ ID NO: 1622065
auuaccacguuccaggcuc

SEQ ID NO: 1622067 - RNA, 19 nt, Artificial Sequence
  Description of Artificial Sequence: Synthetic oligonucleotide
  Sense strand starting at position 908 of SEQ ID NO: 1560756
cgugguaauguguaaagaa

SEQ ID NO: 1622068 - RNA, 19 nt, Artificial Sequence
  Description of Artificial Sequence: Synthetic oligonucleotide
  Antisense strand to SEQ ID NO: 1622067
uucuuuacacauuaccacg

SEQ ID NO: 1622069 - RNA, 19 nt, Artificial Sequence
  Description of Artificial Sequence: Synthetic oligonucleotide
  Sense strand starting at position 937 of SEQ ID NO: 1560756
acagaugaauccuuggucu

SEQ ID NO: 1622070 - RNA, 19 nt, Artificial Sequence
  Description of Artificial Sequence: Synthetic oligonucleotide
  Antisense strand to SEQ ID NO: 1622069
agaccaaggauucaucugu

SEQ ID NO: 1622071 - RNA, 19 nt, Artificial Sequence
  Description of Artificial Sequence: Synthetic oligonucleotide
  Sense strand starting at position 939 of SEQ ID NO: 1560756
agaugaauccuuggucuca

SEQ ID NO: 1622072 - RNA, 19 nt, Artificial Sequence
  Description of Artificial Sequence: Synthetic oligonucleotide
  Antisense strand to SEQ ID NO: 1622071
ugagaccaaggauucaucu

SEQ ID NO: 1622073 - RNA, 19 nt, Artificial Sequence
  Description of Artificial Sequence: Synthetic oligonucleotide
  Sense strand starting at position 940 of SEQ ID NO: 1560756
gaugaauccuuggucucau

SEQ ID NO: 1622074 - RNA, 19 nt, Artificial Sequence
  Description of Artificial Sequence: Synthetic oligonucleotide
  Antisense strand to SEQ ID NO: 1622073
augagaccaaggauucauc

SEQ ID NO: 1622075 - RNA, 19 nt, Artificial Sequence
  Description of Artificial Sequence: Synthetic oligonucleotide
  Sense strand starting at position 948 of SEQ ID NO: 1560756
cuuggucucauggagcuaa

SEQ ID NO: 1622076 - RNA, 19 nt, Artificial Sequence
  Description of Artificial Sequence: Synthetic oligonucleotide
  Antisense strand to SEQ ID NO: 1622075
uuagcuccaugagaccaag

SEQ ID NO: 1622077 - RNA, 19 nt, Artificial Sequence
  Description of Artificial Sequence: Synthetic oligonucleotide
  Sense strand starting at position 1100 of SEQ ID NO: 1560756
aguauuaauuucggaaauc

SEQ ID NO: 1622078 - RNA, 19 nt, Artificial Sequence
  Description of Artificial Sequence: Synthetic oligonucleotide
  Antisense strand to SEQ ID NO: 1622077
gauuuccgaaauuaauacu

SEQ ID NO: 1622079 - RNA, 19 nt, Artificial Sequence
  Description of Artificial Sequence: Synthetic oligonucleotide
  Sense strand starting at position 1101 of SEQ ID NO: 1560756
guauuaauuucggaaauca

SEQ ID NO: 1622080 - RNA, 19 nt, Artificial Sequence
  Description of Artificial Sequence: Synthetic oligonucleotide
  Antisense strand to SEQ ID NO: 1622079
ugauuuccgaaauuaauac

SEQ ID NO: 1622081 - RNA, 19 nt, Artificial Sequence
  Description of Artificial Sequence: Synthetic oligonucleotide
  Sense strand starting at position 1154 of SEQ ID NO: 1560756
agaucauauuuggagguua

SEQ ID NO: 1622082 - RNA, 19 nt, Artificial Sequence
  Description of Artificial Sequence: Synthetic oligonucleotide
  Antisense strand to SEQ ID NO: 1622081
uaaccuccaaauaugaucu

SEQ ID NO: 1622083 - RNA, 19 nt, Artificial Sequence
  Description of Artificial Sequence: Synthetic oligonucleotide
  Sense strand starting at position 1214 of SEQ ID NO: 1560756
uggagucagguuuggguau

SEQ ID NO: 1622084 - RNA, 19 nt, Artificial Sequence
  Description of Artificial Sequence: Synthetic oligonucleotide
  Antisense strand to SEQ ID NO: 1622083
auacccaaaccugacucca

SEQ ID NO: 1622085 - RNA, 19 nt, Artificial Sequence
  Description of Artificial Sequence: Synthetic oligonucleotide
  Sense strand starting at position 1225 of SEQ ID NO: 1560756
uuggguaucaguggauaca

SEQ ID NO: 1622086 - RNA, 19 nt, Artificial Sequence
  Description of Artificial Sequence: Synthetic oligonucleotide
  Antisense strand to SEQ ID NO: 1622085
uguauccacugauacccaa

SEQ ID NO: 1622087 - RNA, 19 nt, Artificial Sequence
  Description of Artificial Sequence: Synthetic oligonucleotide
  Sense strand starting at position 1245 of SEQ ID NO: 1560756
uguggauuccaggagcuga

SEQ ID NO: 1622088 - RNA, 19 nt, Artificial Sequence
  Description of Artificial Sequence: Synthetic oligonucleotide
  Antisense strand to SEQ ID NO: 1622087
ucagcuccuggaauccaca

SEQ ID NO: 1622089 - RNA, 19 nt, Artificial Sequence
  Description of Artificial Sequence: Synthetic oligonucleotide
  Sense strand starting at position 1287 of SEQ ID NO: 1560756
guaagaaaugauuggguua

SEQ ID NO: 1622090 - RNA, 19 nt, Artificial Sequence
  Description of Artificial Sequence: Synthetic oligonucleotide
  Antisense strand to SEQ ID NO: 1622089
uaacccaaucauuucuuac

SEQ ID NO: 1622091 - RNA, 19 nt, Artificial Sequence
  Description of Artificial Sequence: Synthetic oligonucleotide
  Sense strand starting at position 1303 of SEQ ID NO: 1560756
uuaggaucauagcuagaua

SEQ ID NO: 1622092 - RNA, 19 nt, Artificial Sequence
  Description of Artificial Sequence: Synthetic oligonucleotide
  Antisense strand to SEQ ID NO: 1622091
uaucuagcuaugauccuaa

SEQ ID NO: 1622093 - RNA, 19 nt, Artificial Sequence
  Description of Artificial Sequence: Synthetic oligonucleotide
  Sense strand starting at position 1383 of SEQ ID NO: 1560756
aagucagauuuaggaguau

SEQ ID NO: 1622094 - RNA, 19 nt, Artificial Sequence
  Description of Artificial Sequence: Synthetic oligonucleotide
  Antisense strand to SEQ ID NO: 1622093
auacuccuaaaucugacuu

SEQ ID NO: 1622095 - RNA, 19 nt, Artificial Sequence
  Description of Artificial Sequence: Synthetic oligonucleotide
  Sense strand starting at position 1422 of SEQ ID NO: 1560756
aucagagauuaaugaggaa

SEQ ID NO: 1622096 - RNA, 19 nt, Artificial Sequence
  Description of Artificial Sequence: Synthetic oligonucleotide
  Antisense strand to SEQ ID NO: 1622095
uuccucauuaaucucugau

SEQ ID NO: 1622097 - RNA, 19 nt, Artificial Sequence
  Description of Artificial Sequence: Synthetic oligonucleotide
  Sense strand starting at position 1840 of SEQ ID NO: 1560756
gaguauucgggaggacuac

SEQ ID NO: 1622098 - RNA, 19 nt, Artificial Sequence
  Description of Artificial Sequence: Synthetic oligonucleotide
  Antisense strand to SEQ ID NO: 1622097
guaguccucccgaauacuc

SEQ ID NO: 1622099 - RNA, 19 nt, Artificial Sequence
  Description of Artificial Sequence: Synthetic oligonucleotide
  Sense strand starting at position 2329 of SEQ ID NO: 1560756
guugcuuagcgaucuguau

SEQ ID NO: 1622100 - RNA, 19 nt, Artificial Sequence
  Description of Artificial Sequence: Synthetic oligonucleotide
  Antisense strand to SEQ ID NO: 1622099
auacagaucgcuaagcaac

SEQ ID NO: 1622101 - RNA, 19 nt, Artificial Sequence
  Description of Artificial Sequence: Synthetic oligonucleotide
  Sense strand starting at position 2330 of SEQ ID NO: 1560756
uugcuuagcgaucuguauc

SEQ ID NO: 1622102 - RNA, 19 nt, Artificial Sequence
  Description of Artificial Sequence: Synthetic oligonucleotide
  Antisense strand to SEQ ID NO: 1622101
gauacagaucgcuaagcaa

SEQ ID NO: 1622103 - RNA, 19 nt, Artificial Sequence
  Description of Artificial Sequence: Synthetic oligonucleotide
  Sense strand starting at position 2376 of SEQ ID NO: 1560756
guguguucaggguucguuu

SEQ ID NO: 1622104 - RNA, 19 nt, Artificial Sequence
  Description of Artificial Sequence: Synthetic oligonucleotide
  Antisense strand to SEQ ID NO: 1622103
aaacgaacccugaacacac

SEQ ID NO: 1622105 - RNA, 19 nt, Artificial Sequence
  Description of Artificial Sequence: Synthetic oligonucleotide
  Sense strand starting at position 2377 of SEQ ID NO: 1560756
uguguucaggguucguuua

SEQ ID NO: 1622106 - RNA, 19 nt, Artificial Sequence
  Description of Artificial Sequence: Synthetic oligonucleotide
  Antisense strand to SEQ ID NO: 1622105
uaaacgaacccugaacaca

SEQ ID NO: 1622107 - RNA, 19 nt, Artificial Sequence
  Description of Artificial Sequence: Synthetic oligonucleotide
  Sense strand starting at position 2418 of SEQ ID NO: 1560756
caaugaucgcguguuucuc

SEQ ID NO: 1622108 - RNA, 19 nt, Artificial Sequence
  Description of Artificial Sequence: Synthetic oligonucleotide
  Antisense strand to SEQ ID NO: 1622107
gagaaacacgcgaucauug

SEQ ID NO: 1622109 - RNA, 19 nt, Artificial Sequence
  Description of Artificial Sequence: Synthetic oligonucleotide
  Sense strand starting at position 2499 of SEQ ID NO: 1560756
uggguaccugauuguuaga

SEQ ID NO: 1622110 - RNA, 19 nt, Artificial Sequence
  Description of Artificial Sequence: Synthetic oligonucleotide
  Antisense strand to SEQ ID NO: 1622109
ucuaacaaucagguaccca

SEQ ID NO: 1622111 - RNA, 19 nt, Artificial Sequence
  Description of Artificial Sequence: Synthetic oligonucleotide
  Sense strand starting at position 2728 of SEQ ID NO: 1560756
ugucguguccuuccuaacu

SEQ ID NO: 1622112 - RNA, 19 nt, Artificial Sequence
  Description of Artificial Sequence: Synthetic oligonucleotide
  Antisense strand to SEQ ID NO: 1622111
aguuaggaaggacacgaca

SEQ ID NO: 1622113 - RNA, 19 nt, Artificial Sequence
  Description of Artificial Sequence: Synthetic oligonucleotide
  Sense strand starting at position 2741 of SEQ ID NO: 1560756
cuaacuccuccugaguguu

SEQ ID NO: 1622114 - RNA, 19 nt, Artificial Sequence
  Description of Artificial Sequence: Synthetic oligonucleotide
  Antisense strand to SEQ ID NO: 1622113
aacacucaggaggaguuag

SEQ ID NO: 1622115 - RNA, 19 nt, Artificial Sequence
  Description of Artificial Sequence: Synthetic oligonucleotide
  Sense strand starting at position 3156 of SEQ ID NO: 1560756
aucccaucccaguguaacu

SEQ ID NO: 1622116 - RNA, 19 nt, Artificial Sequence
  Description of Artificial Sequence: Synthetic oligonucleotide
  Antisense strand to SEQ ID NO: 1622115
aguuacacugggaugggau

SEQ ID NO: 1622117 - RNA, 19 nt, Artificial Sequence
  Description of Artificial Sequence: Synthetic oligonucleotide
  Sense strand starting at position 3353 of SEQ ID NO: 1560756
gagagacggacuuguucca

SEQ ID NO: 1622118 - RNA, 19 nt, Artificial Sequence
  Description of Artificial Sequence: Synthetic oligonucleotide
  Antisense strand to SEQ ID NO: 1622117
uggaacaaguccgucucuc

SEQ ID NO: 1622119 - RNA, 19 nt, Artificial Sequence
  Description of Artificial Sequence: Synthetic oligonucleotide
  Sense strand starting at position 3360 of SEQ ID NO: 1560756
ggacuuguuccacauccca

SEQ ID NO: 1622120 - RNA, 19 nt, Artificial Sequence
  Description of Artificial Sequence: Synthetic oligonucleotide
  Antisense strand to SEQ ID NO: 1622119
ugggauguggaacaagucc

SEQ ID NO: 1622121 - RNA, 19 nt, Artificial Sequence
  Description of Artificial Sequence: Synthetic oligonucleotide
  Sense strand starting at position 3619 of SEQ ID NO: 1560756
ggucuuggaacgcacagau

SEQ ID NO: 1622122 - RNA, 19 nt, Artificial Sequence
  Description of Artificial Sequence: Synthetic oligonucleotide
  Antisense strand to SEQ ID NO: 1622121
aucugugcguuccaagacc

SEQ ID NO: 1622123 - RNA, 19 nt, Artificial Sequence
  Description of Artificial Sequence: Synthetic oligonucleotide
  Sense strand starting at position 3631 of SEQ ID NO: 1560756
cacagaucucguggacaag

SEQ ID NO: 1622124 - RNA, 19 nt, Artificial Sequence
  Description of Artificial Sequence: Synthetic oligonucleotide
  Antisense strand to SEQ ID NO: 1622123
cuuguccacgagaucugug

SEQ ID NO: 1622125 - RNA, 19 nt, Artificial Sequence
  Description of Artificial Sequence: Synthetic oligonucleotide
  Sense strand starting at position 3632 of SEQ ID NO: 1560756
acagaucucguggacaagu

SEQ ID NO: 1622126 - RNA, 19 nt, Artificial Sequence
  Description of Artificial Sequence: Synthetic oligonucleotide
  Antisense strand to SEQ ID NO: 1622125
acuuguccacgagaucugu

SEQ ID NO: 1622127 - RNA, 19 nt, Artificial Sequence
  Description of Artificial Sequence: Synthetic oligonucleotide
  Sense strand starting at position 3634 of SEQ ID NO: 1560756
agaucucguggacaaguga

SEQ ID NO: 1622128 - RNA, 19 nt, Artificial Sequence
  Description of Artificial Sequence: Synthetic oligonucleotide
  Antisense strand to SEQ ID NO: 1622127
ucacuuguccacgagaucu

SEQ ID NO: 1622129 - RNA, 19 nt, Artificial Sequence
  Description of Artificial Sequence: Synthetic oligonucleotide
  Sense strand starting at position 3671 of SEQ ID NO: 1560756
cagcgugaugacgaaagua

SEQ ID NO: 1622130 - RNA, 19 nt, Artificial Sequence
  Description of Artificial Sequence: Synthetic oligonucleotide
  Antisense strand to SEQ ID NO: 1622129
uacuuucgucaucacgcug

SEQ ID NO: 1622131 - RNA, 19 nt, Artificial Sequence
  Description of Artificial Sequence: Synthetic oligonucleotide
  Sense strand starting at position 107 of SEQ ID NO: 1560757
aagaaugcuugagcucaag

SEQ ID NO: 1622132 - RNA, 19 nt, Artificial Sequence
  Description of Artificial Sequence: Synthetic oligonucleotide
  Antisense strand to SEQ ID NO: 1622131
cuugagcucaagcauucuu

SEQ ID NO: 1622133 - RNA, 19 nt, Artificial Sequence
  Description of Artificial Sequence: Synthetic oligonucleotide
  Sense strand starting at position 544 of SEQ ID NO: 1560757
ggagguuguggcuauagua

SEQ ID NO: 1622134 - RNA, 19 nt, Artificial Sequence
  Description of Artificial Sequence: Synthetic oligonucleotide
  Antisense strand to SEQ ID NO: 1622133
uacuauagccacaaccucc

SEQ ID NO: 1622135 - RNA, 19 nt, Artificial Sequence
  Description of Artificial Sequence: Synthetic oligonucleotide
  Sense strand starting at position 712 of SEQ ID NO: 1560757
agacuauaaagcugguuga

SEQ ID NO: 1622136 - RNA, 19 nt, Artificial Sequence
  Description of Artificial Sequence: Synthetic oligonucleotide
  Antisense strand to SEQ ID NO: 1622135
ucaaccagcuuuauagucu

SEQ ID NO: 1622137 - RNA, 19 nt, Artificial Sequence
  Description of Artificial Sequence: Synthetic oligonucleotide
  Sense strand starting at position 715 of SEQ ID NO: 1560757
cuauaaagcugguugagau

SEQ ID NO: 1622138 - RNA, 19 nt, Artificial Sequence
  Description of Artificial Sequence: Synthetic oligonucleotide
  Antisense strand to SEQ ID NO: 1622137
aucucaaccagcuuuauag

SEQ ID NO: 1622139 - RNA, 19 nt, Artificial Sequence
  Description of Artificial Sequence: Synthetic oligonucleotide
  Sense strand starting at position 716 of SEQ ID NO: 1560757
uauaaagcugguugagauc

SEQ ID NO: 1622140 - RNA, 19 nt, Artificial Sequence
  Description of Artificial Sequence: Synthetic oligonucleotide
  Antisense strand to SEQ ID NO: 1622139
gaucucaaccagcuuuaua

SEQ ID NO: 1622141 - RNA, 19 nt, Artificial Sequence
  Description of Artificial Sequence: Synthetic oligonucleotide
  Sense strand starting at position 722 of SEQ ID NO: 1560757
gcugguugagaucaauauu

SEQ ID NO: 1622142 - RNA, 19 nt, Artificial Sequence
  Description of Artificial Sequence: Synthetic oligonucleotide
  Antisense strand to SEQ ID NO: 1622141
aauauugaucucaaccagc

SEQ ID NO: 1622143 - RNA, 19 nt, Artificial Sequence
  Description of Artificial Sequence: Synthetic oligonucleotide
  Sense strand starting at position 843 of SEQ ID NO: 1560757
gcaguuccuucuccuugaa

SEQ ID NO: 1622144 - RNA, 19 nt, Artificial Sequence
  Description of Artificial Sequence: Synthetic oligonucleotide
  Antisense strand to SEQ ID NO: 1622143
uucaaggagaaggaacugc

SEQ ID NO: 1622145 - RNA, 19 nt, Artificial Sequence
  Description of Artificial Sequence: Synthetic oligonucleotide
  Sense strand starting at position 846 of SEQ ID NO: 1560757
guuccuucuccuugaaaug

SEQ ID NO: 1622146 - RNA, 19 nt, Artificial Sequence
  Description of Artificial Sequence: Synthetic oligonucleotide
  Antisense strand to SEQ ID NO: 1622145
cauuucaaggagaaggaac

SEQ ID NO: 1622147 - RNA, 19 nt, Artificial Sequence
  Description of Artificial Sequence: Synthetic oligonucleotide
  Sense strand starting at position 1128 of SEQ ID NO: 1560757
gagccuggaacgugguaau

SEQ ID NO: 1622148 - RNA, 19 nt, Artificial Sequence
  Description of Artificial Sequence: Synthetic oligonucleotide
  Antisense strand to SEQ ID NO: 1622147
auuaccacguuccaggcuc

SEQ ID NO: 1622149 - RNA, 19 nt, Artificial Sequence
  Description of Artificial Sequence: Synthetic oligonucleotide
  Sense strand starting at position 1138 of SEQ ID NO: 1560757
cgugguaauguguaaagaa

SEQ ID NO: 1622150 - RNA, 19 nt, Artificial Sequence
  Description of Artificial Sequence: Synthetic oligonucleotide
  Antisense strand to SEQ ID NO: 1622149
uucuuuacacauuaccacg

SEQ ID NO: 1622151 - RNA, 19 nt, Artificial Sequence
  Description of Artificial Sequence: Synthetic oligonucleotide
  Sense strand starting at position 1167 of SEQ ID NO: 1560757
acagaugaauccuuggucu

SEQ ID NO: 1622152 - RNA, 19 nt, Artificial Sequence
  Description of Artificial Sequence: Synthetic oligonucleotide
  Antisense strand to SEQ ID NO: 1622151
agaccaaggauucaucugu

SEQ ID NO: 1622153 - RNA, 19 nt, Artificial Sequence
  Description of Artificial Sequence: Synthetic oligonucleotide
  Sense strand starting at position 1169 of SEQ ID NO: 1560757
agaugaauccuuggucuca

SEQ ID NO: 1622154 - RNA, 19 nt, Artificial Sequence
  Description of Artificial Sequence: Synthetic oligonucleotide
  Antisense strand to SEQ ID NO: 1622153
ugagaccaaggauucaucu

SEQ ID NO: 1622155 - RNA, 19 nt, Artificial Sequence
  Description of Artificial Sequence: Synthetic oligonucleotide
  Sense strand starting at position 1170 of SEQ ID NO: 1560757
gaugaauccuuggucucau

SEQ ID NO: 1622156 - RNA, 19 nt, Artificial Sequence
  Description of Artificial Sequence: Synthetic oligonucleotide
  Antisense strand to SEQ ID NO: 1622155
augagaccaaggauucauc

SEQ ID NO: 1622157 - RNA, 19 nt, Artificial Sequence
  Description of Artificial Sequence: Synthetic oligonucleotide
  Sense strand starting at position 1178 of SEQ ID NO: 1560757
cuuggucucauggagcuaa

SEQ ID NO: 1622158 - RNA, 19 nt, Artificial Sequence
  Description of Artificial Sequence: Synthetic oligonucleotide
  Antisense strand to SEQ ID NO: 1622157
uuagcuccaugagaccaag

SEQ ID NO: 1622159 - RNA, 19 nt, Artificial Sequence
  Description of Artificial Sequence: Synthetic oligonucleotide
  Sense strand starting at position 1331 of SEQ ID NO: 1560757
guauuaauuucggaaauca

SEQ ID NO: 1622160 - RNA, 19 nt, Artificial Sequence
  Description of Artificial Sequence: Synthetic oligonucleotide
  Antisense strand to SEQ ID NO: 1622159
ugauuuccgaaauuaauac

SEQ ID NO: 1622161 - RNA, 19 nt, Artificial Sequence
  Description of Artificial Sequence: Synthetic oligonucleotide
  Sense strand starting at position 1384 of SEQ ID NO: 1560757
agaucauauuuggagguua

SEQ ID NO: 1622162 - RNA, 19 nt, Artificial Sequence
  Description of Artificial Sequence: Synthetic oligonucleotide
  Antisense strand to SEQ ID NO: 1622161
uaaccuccaaauaugaucu

SEQ ID NO: 1622163 - RNA, 19 nt, Artificial Sequence
  Description of Artificial Sequence: Synthetic oligonucleotide
  Sense strand starting at position 1444 of SEQ ID NO: 1560757
uggagucagguuuggguau

SEQ ID NO: 1622164 - RNA, 19 nt, Artificial Sequence
  Description of Artificial Sequence: Synthetic oligonucleotide
  Antisense strand to SEQ ID NO: 1622163
auacccaaaccugacucca

SEQ ID NO: 1622165 - RNA, 19 nt, Artificial Sequence
  Description of Artificial Sequence: Synthetic oligonucleotide
  Sense strand starting at position 1455 of SEQ ID NO: 1560757
uuggguaucaguggauaca

SEQ ID NO: 1622166 - RNA, 19 nt, Artificial Sequence
  Description of Artificial Sequence: Synthetic oligonucleotide
  Antisense strand to SEQ ID NO: 1622165
uguauccacugauacccaa

SEQ ID NO: 1622167 - RNA, 19 nt, Artificial Sequence
  Description of Artificial Sequence: Synthetic oligonucleotide
  Sense strand starting at position 1475 of SEQ ID NO: 1560757
uguggauuccaggagcuga

SEQ ID NO: 1622168 - RNA, 19 nt, Artificial Sequence
  Description of Artificial Sequence: Synthetic oligonucleotide
  Antisense strand to SEQ ID NO: 1622167
ucagcuccuggaauccaca

SEQ ID NO: 1622169 - RNA, 19 nt, Artificial Sequence
  Description of Artificial Sequence: Synthetic oligonucleotide
  Sense strand starting at position 1517 of SEQ ID NO: 1560757
guaagaaaugauuggguua

SEQ ID NO: 1622170 - RNA, 19 nt, Artificial Sequence
  Description of Artificial Sequence: Synthetic oligonucleotide
  Antisense strand to SEQ ID NO: 1622169
uaacccaaucauuucuuac

SEQ ID NO: 1622171 - RNA, 19 nt, Artificial Sequence
  Description of Artificial Sequence: Synthetic oligonucleotide
  Sense strand starting at position 1533 of SEQ ID NO: 1560757
uuaggaucauagcuagaua

SEQ ID NO: 1622172 - RNA, 19 nt, Artificial Sequence
  Description of Artificial Sequence: Synthetic oligonucleotide
  Antisense strand to SEQ ID NO: 1622171
uaucuagcuaugauccuaa

SEQ ID NO: 1622173 - RNA, 19 nt, Artificial Sequence
  Description of Artificial Sequence: Synthetic oligonucleotide
  Sense strand starting at position 1613 of SEQ ID NO: 1560757
aagucagauuuaggaguau

SEQ ID NO: 1622174 - RNA, 19 nt, Artificial Sequence
  Description of Artificial Sequence: Synthetic oligonucleotide
  Antisense strand to SEQ ID NO: 1622173
auacuccuaaaucugacuu

SEQ ID NO: 1622175 - RNA, 19 nt, Artificial Sequence
  Description of Artificial Sequence: Synthetic oligonucleotide
  Sense strand starting at position 1652 of SEQ ID NO: 1560757
aucagagauuaaugaggaa

SEQ ID NO: 1622176 - RNA, 19 nt, Artificial Sequence
  Description of Artificial Sequence: Synthetic oligonucleotide
  Antisense strand to SEQ ID NO: 1622175
uuccucauuaaucucugau

SEQ ID NO: 1622177 - RNA, 19 nt, Artificial Sequence
  Description of Artificial Sequence: Synthetic oligonucleotide
  Sense strand starting at position 2070 of SEQ ID NO: 1560757
gaguauucgggaggacuac

SEQ ID NO: 1622178 - RNA, 19 nt, Artificial Sequence
  Description of Artificial Sequence: Synthetic oligonucleotide
  Antisense strand to SEQ ID NO: 1622177
guaguccucccgaauacuc

SEQ ID NO: 1622179 - RNA, 19 nt, Artificial Sequence
  Description of Artificial Sequence: Synthetic oligonucleotide
  Sense strand starting at position 2559 of SEQ ID NO: 1560757
guugcuuagcgaucuguau

SEQ ID NO: 1622180 - RNA, 19 nt, Artificial Sequence
  Description of Artificial Sequence: Synthetic oligonucleotide
  Antisense strand to SEQ ID NO: 1622179
auacagaucgcuaagcaac

SEQ ID NO: 1622181 - RNA, 19 nt, Artificial Sequence
  Description of Artificial Sequence: Synthetic oligonucleotide
  Sense strand starting at position 2560 of SEQ ID NO: 1560757
uugcuuagcgaucuguauc

SEQ ID NO: 1622182 - RNA, 19 nt, Artificial Sequence
  Description of Artificial Sequence: Synthetic oligonucleotide
  Antisense strand to SEQ ID NO: 1622181
gauacagaucgcuaagcaa

SEQ ID NO: 1622183 - RNA, 19 nt, Artificial Sequence
  Description of Artificial Sequence: Synthetic oligonucleotide
  Sense strand starting at position 2606 of SEQ ID NO: 1560757
guguguucaggguucguuu

SEQ ID NO: 1622184 - RNA, 19 nt, Artificial Sequence
  Description of Artificial Sequence: Synthetic oligonucleotide
  Antisense strand to SEQ ID NO: 1622183
aaacgaacccugaacacac

SEQ ID NO: 1622185 - RNA, 19 nt, Artificial Sequence
  Description of Artificial Sequence: Synthetic oligonucleotide
  Sense strand starting at position 2607 of SEQ ID NO: 1560757
uguguucaggguucguuua

SEQ ID NO: 1622186 - RNA, 19 nt, Artificial Sequence
  Description of Artificial Sequence: Synthetic oligonucleotide
  Antisense strand to SEQ ID NO: 1622185
uaaacgaacccugaacaca

SEQ ID NO: 1622187 - RNA, 19 nt, Artificial Sequence
  Description of Artificial Sequence: Synthetic oligonucleotide
  Sense strand starting at position 2648 of SEQ ID NO: 1560757
caaugaucgcguguuucuc

SEQ ID NO: 1622188 - RNA, 19 nt, Artificial Sequence
  Description of Artificial Sequence: Synthetic oligonucleotide
  Antisense strand to SEQ ID NO: 1622187
gagaaacacgcgaucauug

SEQ ID NO: 1622189 - RNA, 19 nt, Artificial Sequence
  Description of Artificial Sequence: Synthetic oligonucleotide
  Sense strand starting at position 2729 of SEQ ID NO: 1560757
uggguaccugauuguuaga

SEQ ID NO: 1622190 - RNA, 19 nt, Artificial Sequence
  Description of Artificial Sequence: Synthetic oligonucleotide
  Antisense strand to SEQ ID NO: 1622189
ucuaacaaucagguaccca

SEQ ID NO: 1622191 - RNA, 19 nt, Artificial Sequence
  Description of Artificial Sequence: Synthetic oligonucleotide
  Sense strand starting at position 2958 of SEQ ID NO: 1560757
ugucguguccuuccuaacu

SEQ ID NO: 1622192 - RNA, 19 nt, Artificial Sequence
  Description of Artificial Sequence: Synthetic oligonucleotide
  Antisense strand to SEQ ID NO: 1622191
aguuaggaaggacacgaca

SEQ ID NO: 1622193 - RNA, 19 nt, Artificial Sequence
  Description of Artificial Sequence: Synthetic oligonucleotide
  Sense strand starting at position 2971 of SEQ ID NO: 1560757
cuaacuccuccugaguguu

SEQ ID NO: 1622194 - RNA, 19 nt, Artificial Sequence
  Description of Artificial Sequence: Synthetic oligonucleotide
  Antisense strand to SEQ ID NO: 1622193
aacacucaggaggaguuag

SEQ ID NO: 1622195 - RNA, 19 nt, Artificial Sequence
  Description of Artificial Sequence: Synthetic oligonucleotide
  Sense strand starting at position 3386 of SEQ ID NO: 1560757
aucccaucccaguguaacu

SEQ ID NO: 1622196 - RNA, 19 nt, Artificial Sequence
  Description of Artificial Sequence: Synthetic oligonucleotide
  Antisense strand to SEQ ID NO: 1622195
aguuacacugggaugggau

SEQ ID NO: 1622197 - RNA, 19 nt, Artificial Sequence
  Description of Artificial Sequence: Synthetic oligonucleotide
  Sense strand starting at position 3583 of SEQ ID NO: 1560757
gagagacggacuuguucca

SEQ ID NO: 1622198 - RNA, 19 nt, Artificial Sequence
  Description of Artificial Sequence: Synthetic oligonucleotide
  Antisense strand to SEQ ID NO: 1622197
uggaacaaguccgucucuc

SEQ ID NO: 1622199 - RNA, 19 nt, Artificial Sequence
  Description of Artificial Sequence: Synthetic oligonucleotide
  Sense strand starting at position 3590 of SEQ ID NO: 1560757
ggacuuguuccacauccca

SEQ ID NO: 1622200 - RNA, 19 nt, Artificial Sequence
  Description of Artificial Sequence: Synthetic oligonucleotide
  Antisense strand to SEQ ID NO: 1622199
ugggauguggaacaagucc

SEQ ID NO: 1622201 - RNA, 19 nt, Artificial Sequence
  Description of Artificial Sequence: Synthetic oligonucleotide
  Sense strand starting at position 3849 of SEQ ID NO: 1560757
ggucuuggaacgcacagau

SEQ ID NO: 1622202 - RNA, 19 nt, Artificial Sequence
  Description of Artificial Sequence: Synthetic oligonucleotide
  Antisense strand to SEQ ID NO: 1622201
aucugugcguuccaagacc

SEQ ID NO: 1622203 - RNA, 19 nt, Artificial Sequence
  Description of Artificial Sequence: Synthetic oligonucleotide
  Sense strand starting at position 3861 of SEQ ID NO: 1560757
cacagaucucguggacaag

SEQ ID NO: 1622204 - RNA, 19 nt, Artificial Sequence
  Description of Artificial Sequence: Synthetic oligonucleotide
  Antisense strand to SEQ ID NO: 1622203
cuuguccacgagaucugug

SEQ ID NO: 1622205 - RNA, 19 nt, Artificial Sequence
  Description of Artificial Sequence: Synthetic oligonucleotide
  Sense strand starting at position 3862 of SEQ ID NO: 1560757
acagaucucguggacaagu

SEQ ID NO: 1622206 - RNA, 19 nt, Artificial Sequence
  Description of Artificial Sequence: Synthetic oligonucleotide
  Antisense strand to SEQ ID NO: 1622205
acuuguccacgagaucugu

SEQ ID NO: 1622207 - RNA, 19 nt, Artificial Sequence
  Description of Artificial Sequence: Synthetic oligonucleotide
  Sense strand starting at position 3864 of SEQ ID NO: 1560757
agaucucguggacaaguga

SEQ ID NO: 1622208 - RNA, 19 nt, Artificial Sequence
  Description of Artificial Sequence: Synthetic oligonucleotide
  Antisense strand to SEQ ID NO: 1622207
ucacuuguccacgagaucu

SEQ ID NO: 1622209 - RNA, 19 nt, Artificial Sequence
  Description of Artificial Sequence: Synthetic oligonucleotide
  Sense strand starting at position 3901 of SEQ ID NO: 1560757
cagcgugaugacgaaagua

SEQ ID NO: 1622210 - RNA, 19 nt, Artificial Sequence
  Description of Artificial Sequence: Synthetic oligonucleotide
  Antisense strand to SEQ ID NO: 1622209
uacuuucgucaucacgcug

SEQ ID NO: 1622211 - RNA, 19 nt, Artificial Sequence
  Description of Artificial Sequence: Synthetic oligonucleotide
  Sense strand starting at position 106 of SEQ ID NO: 1560758
cgccucugcucuuccagaa

SEQ ID NO: 1622212 - RNA, 19 nt, Artificial Sequence
  Description of Artificial Sequence: Synthetic oligonucleotide
  Antisense strand to SEQ ID NO: 1622211
uucuggaagagcagaggcg

SEQ ID NO: 1622213 - RNA, 19 nt, Artificial Sequence
  Description of Artificial Sequence: Synthetic oligonucleotide
  Sense strand starting at position 110 of SEQ ID NO: 1560758
ucugcucuuccagaagcuu

SEQ ID NO: 1622214 - RNA, 19 nt, Artificial Sequence
  Description of Artificial Sequence: Synthetic oligonucleotide
  Antisense strand to SEQ ID NO: 1622213
aagcuucuggaagagcaga

SEQ ID NO: 1622215 - RNA, 19 nt, Artificial Sequence
  Description of Artificial Sequence: Synthetic oligonucleotide
  Sense strand starting at position 207 of SEQ ID NO: 1560758
guccuuaagucaccuaaau

SEQ ID NO: 1622216 - RNA, 19 nt, Artificial Sequence
  Description of Artificial Sequence: Synthetic oligonucleotide
  Antisense strand to SEQ ID NO: 1622215
auuuaggugacuuaaggac

SEQ ID NO: 1622217 - RNA, 19 nt, Artificial Sequence
  Description of Artificial Sequence: Synthetic oligonucleotide
  Sense strand starting at position 788 of SEQ ID NO: 1560758
ggcuguauaucccagguga

SEQ ID NO: 1622218 - RNA, 19 nt, Artificial Sequence
  Description of Artificial Sequence: Synthetic oligonucleotide
  Antisense strand to SEQ ID NO: 1622217
ucaccugggauauacagcc

SEQ ID NO: 1622219 - RNA, 19 nt, Artificial Sequence
  Description of Artificial Sequence: Synthetic oligonucleotide
  Sense strand starting at position 1471 of SEQ ID NO: 1560758
guaggagucucgguugcca

SEQ ID NO: 1622220 - RNA, 19 nt, Artificial Sequence
  Description of Artificial Sequence: Synthetic oligonucleotide
  Antisense strand to SEQ ID NO: 1622219
uggcaaccgagacuccuac

SEQ ID NO: 1622221 - RNA, 19 nt, Artificial Sequence
  Description of Artificial Sequence: Synthetic oligonucleotide
  Sense strand starting at position 1669 of SEQ ID NO: 1560758
ggcccucacucucgggaua

SEQ ID NO: 1622222 - RNA, 19 nt, Artificial Sequence
  Description of Artificial Sequence: Synthetic oligonucleotide
  Antisense strand to SEQ ID NO: 1622221
uaucccgagagugagggcc

SEQ ID NO: 1622223 - RNA, 19 nt, Artificial Sequence
  Description of Artificial Sequence: Synthetic oligonucleotide
  Sense strand starting at position 1670 of SEQ ID NO: 1560758
gcccucacucucgggauaa

SEQ ID NO: 1622224 - RNA, 19 nt, Artificial Sequence
  Description of Artificial Sequence: Synthetic oligonucleotide
  Antisense strand to SEQ ID NO: 1622223
uuaucccgagagugagggc

SEQ ID NO: 1622225 - RNA, 19 nt, Artificial Sequence
  Description of Artificial Sequence: Synthetic oligonucleotide
  Sense strand starting at position 1671 of SEQ ID NO: 1560758
cccucacucucgggauaaa

SEQ ID NO: 1622226 - RNA, 19 nt, Artificial Sequence
  Description of Artificial Sequence: Synthetic oligonucleotide
  Antisense strand to SEQ ID NO: 1622225
uuuaucccgagagugaggg

SEQ ID NO: 1622227 - RNA, 19 nt, Artificial Sequence
  Description of Artificial Sequence: Synthetic oligonucleotide
  Sense strand starting at position 1722 of SEQ ID NO: 1560758
ucgggagucuuucgauccu

SEQ ID NO: 1622228 - RNA, 19 nt, Artificial Sequence
  Description of Artificial Sequence: Synthetic oligonucleotide
  Antisense strand to SEQ ID NO: 1622227
aggaucgaaagacucccga

SEQ ID NO: 1622229 - RNA, 19 nt, Artificial Sequence
  Description of Artificial Sequence: Synthetic oligonucleotide
  Sense strand starting at position 2074 of SEQ ID NO: 1560758
uccagaucuuugcucugaa

SEQ ID NO: 1622230 - RNA, 19 nt, Artificial Sequence
  Description of Artificial Sequence: Synthetic oligonucleotide
  Antisense strand to SEQ ID NO: 1622229
uucagagcaaagaucugga

SEQ ID NO: 1622231 - RNA, 19 nt, Artificial Sequence
  Description of Artificial Sequence: Synthetic oligonucleotide
  Sense strand starting at position 2075 of SEQ ID NO: 1560758
ccagaucuuugcucugaag

SEQ ID NO: 1622232 - RNA, 19 nt, Artificial Sequence
  Description of Artificial Sequence: Synthetic oligonucleotide
  Antisense strand to SEQ ID NO: 1622231
cuucagagcaaagaucugg

SEQ ID NO: 1622233 - RNA, 19 nt, Artificial Sequence
  Description of Artificial Sequence: Synthetic oligonucleotide
  Sense strand starting at position 2077 of SEQ ID NO: 1560758
agaucuuugcucugaagga

SEQ ID NO: 1622234 - RNA, 19 nt, Artificial Sequence
  Description of Artificial Sequence: Synthetic oligonucleotide
  Antisense strand to SEQ ID NO: 1622233
uccuucagagcaaagaucu

SEQ ID NO: 1622235 - RNA, 19 nt, Artificial Sequence
  Description of Artificial Sequence: Synthetic oligonucleotide
  Sense strand starting at position 2078 of SEQ ID NO: 1560758
gaucuuugcucugaaggag

SEQ ID NO: 1622236 - RNA, 19 nt, Artificial Sequence
  Description of Artificial Sequence: Synthetic oligonucleotide
  Antisense strand to SEQ ID NO: 1622235
cuccuucagagcaaagauc

SEQ ID NO: 1622237 - RNA, 19 nt, Artificial Sequence
  Description of Artificial Sequence: Synthetic oligonucleotide
  Sense strand starting at position 2249 of SEQ ID NO: 1560758
gugcgaucucugcaaacuc

SEQ ID NO: 1622238 - RNA, 19 nt, Artificial Sequence
  Description of Artificial Sequence: Synthetic oligonucleotide
  Antisense strand to SEQ ID NO: 1622237
gaguuugcagagaucgcac

SEQ ID NO: 1622239 - RNA, 19 nt, Artificial Sequence
  Description of Artificial Sequence: Synthetic oligonucleotide
  Sense strand starting at position 2596 of SEQ ID NO: 1560758
gaauauuacuggguccaga

SEQ ID NO: 1622240 - RNA, 19 nt, Artificial Sequence
  Description of Artificial Sequence: Synthetic oligonucleotide
  Antisense strand to SEQ ID NO: 1622239
ucuggacccaguaauauuc

SEQ ID NO: 1622241 - RNA, 19 nt, Artificial Sequence
  Description of Artificial Sequence: Synthetic oligonucleotide
  Sense strand starting at position 2645 of SEQ ID NO: 1560758
gaggaagggucugugggua

SEQ ID NO: 1622242 - RNA, 19 nt, Artificial Sequence
  Description of Artificial Sequence: Synthetic oligonucleotide
  Antisense strand to SEQ ID NO: 1622241
uacccacagacccuuccuc

SEQ ID NO: 1622243 - RNA, 19 nt, Artificial Sequence
  Description of Artificial Sequence: Synthetic oligonucleotide
  Sense strand starting at position 2779 of SEQ ID NO: 1560758
ugcuguguauugugaacua

SEQ ID NO: 1622244 - RNA, 19 nt, Artificial Sequence
  Description of Artificial Sequence: Synthetic oligonucleotide
  Antisense strand to SEQ ID NO: 1622243
uaguucacaauacacagca

SEQ ID NO: 1622245 - RNA, 19 nt, Artificial Sequence
  Description of Artificial Sequence: Synthetic oligonucleotide
  Sense strand starting at position 3118 of SEQ ID NO: 1560758
accauauuggcuugaacuc

SEQ ID NO: 1622246 - RNA, 19 nt, Artificial Sequence
  Description of Artificial Sequence: Synthetic oligonucleotide
  Antisense strand to SEQ ID NO: 1622245
gaguucaagccaauauggu

SEQ ID NO: 1622247 - RNA, 19 nt, Artificial Sequence
  Description of Artificial Sequence: Synthetic oligonucleotide
  Sense strand starting at position 3261 of SEQ ID NO: 1560758
ccauuucccuggcaaaguu

SEQ ID NO: 1622248 - RNA, 19 nt, Artificial Sequence
  Description of Artificial Sequence: Synthetic oligonucleotide
  Antisense strand to SEQ ID NO: 1622247
aacuuugccagggaaaugg

SEQ ID NO: 1622249 - RNA, 19 nt, Artificial Sequence
  Description of Artificial Sequence: Synthetic oligonucleotide
  Sense strand starting at position 3270 of SEQ ID NO: 1560758
uggcaaaguuccuccucuu

SEQ ID NO: 1622250 - RNA, 19 nt, Artificial Sequence
  Description of Artificial Sequence: Synthetic oligonucleotide
  Antisense strand to SEQ ID NO: 1622249
aagaggaggaacuuugcca

SEQ ID NO: 1622251 - RNA, 19 nt, Artificial Sequence
  Description of Artificial Sequence: Synthetic oligonucleotide
  Sense strand starting at position 3317 of SEQ ID NO: 1560758
gcagaauccugucugcacu

SEQ ID NO: 1622252 - RNA, 19 nt, Artificial Sequence
  Description of Artificial Sequence: Synthetic oligonucleotide
  Antisense strand to SEQ ID NO: 1622251
agugcagacaggauucugc

SEQ ID NO: 1622253 - RNA, 19 nt, Artificial Sequence
  Description of Artificial Sequence: Synthetic oligonucleotide
  Sense strand starting at position 3331 of SEQ ID NO: 1560758
gcacucacuuccuugguga

SEQ ID NO: 1622254 - RNA, 19 nt, Artificial Sequence
  Description of Artificial Sequence: Synthetic oligonucleotide
  Antisense strand to SEQ ID NO: 1622253
ucaccaaggaagugagugc

SEQ ID NO: 1622255 - RNA, 19 nt, Artificial Sequence
  Description of Artificial Sequence: Synthetic oligonucleotide
  Sense strand starting at position 3366 of SEQ ID NO: 1560758
ggcuuuaaguaccauccau

SEQ ID NO: 1622256 - RNA, 19 nt, Artificial Sequence
  Description of Artificial Sequence: Synthetic oligonucleotide
  Antisense strand to SEQ ID NO: 1622255
auggaugguacuuaaagcc

SEQ ID NO: 1622257 - RNA, 19 nt, Artificial Sequence
  Description of Artificial Sequence: Synthetic oligonucleotide
  Sense strand starting at position 3436 of SEQ ID NO: 1560758
uccuaaaugcagugagguu

SEQ ID NO: 1622258 - RNA, 19 nt, Artificial Sequence
  Description of Artificial Sequence: Synthetic oligonucleotide
  Antisense strand to SEQ ID NO: 1622257
aaccucacugcauuuagga

SEQ ID NO: 1622259 - RNA, 19 nt, Artificial Sequence
  Description of Artificial Sequence: Synthetic oligonucleotide
  Sense strand starting at position 3437 of SEQ ID NO: 1560758
ccuaaaugcagugagguua

SEQ ID NO: 1622260 - RNA, 19 nt, Artificial Sequence
  Description of Artificial Sequence: Synthetic oligonucleotide
  Antisense strand to SEQ ID NO: 1622259
uaaccucacugcauuuagg

SEQ ID NO: 1622261 - RNA, 19 nt, Artificial Sequence
  Description of Artificial Sequence: Synthetic oligonucleotide
  Sense strand starting at position 3460 of SEQ ID NO: 1560758
gcaucuccacagggagauu

SEQ ID NO: 1622262 - RNA, 19 nt, Artificial Sequence
  Description of Artificial Sequence: Synthetic oligonucleotide
  Antisense strand to SEQ ID NO: 1622261
aaucucccuguggagaugc

SEQ ID NO: 1622263 - RNA, 19 nt, Artificial Sequence
  Description of Artificial Sequence: Synthetic oligonucleotide
  Sense strand starting at position 3469 of SEQ ID NO: 1560758
cagggagauugucaggcau

SEQ ID NO: 1622264 - RNA, 19 nt, Artificial Sequence
  Description of Artificial Sequence: Synthetic oligonucleotide
  Antisense strand to SEQ ID NO: 1622263
augccugacaaucucccug

SEQ ID NO: 1622265 - RNA, 19 nt, Artificial Sequence
  Description of Artificial Sequence: Synthetic oligonucleotide
  Sense strand starting at position 3471 of SEQ ID NO: 1560758
gggagauugucaggcauuu

SEQ ID NO: 1622266 - RNA, 19 nt, Artificial Sequence
  Description of Artificial Sequence: Synthetic oligonucleotide
  Antisense strand to SEQ ID NO: 1622265
aaaugccugacaaucuccc

SEQ ID NO: 1622267 - RNA, 19 nt, Artificial Sequence
  Description of Artificial Sequence: Synthetic oligonucleotide
  Sense strand starting at position 3502 of SEQ ID NO: 1560758
gcccaaaccucgucacuuu

SEQ ID NO: 1622268 - RNA, 19 nt, Artificial Sequence
  Description of Artificial Sequence: Synthetic oligonucleotide
  Antisense strand to SEQ ID NO: 1622267
aaagugacgagguuugggc

SEQ ID NO: 1622269 - RNA, 19 nt, Artificial Sequence
  Description of Artificial Sequence: Synthetic oligonucleotide
  Sense strand starting at position 3580 of SEQ ID NO: 1560758
cguuucaugccagaaggcu

SEQ ID NO: 1622270 - RNA, 19 nt, Artificial Sequence
  Description of Artificial Sequence: Synthetic oligonucleotide
  Antisense strand to SEQ ID NO: 1622269
agccuucuggcaugaaacg

SEQ ID NO: 1622271 - RNA, 19 nt, Artificial Sequence
  Description of Artificial Sequence: Synthetic oligonucleotide
  Sense strand starting at position 3594 of SEQ ID NO: 1560758
aggcuuggcugucuaggau

SEQ ID NO: 1622272 - RNA, 19 nt, Artificial Sequence
  Description of Artificial Sequence: Synthetic oligonucleotide
  Antisense strand to SEQ ID NO: 1622271
auccuagacagccaagccu

SEQ ID NO: 1622273 - RNA, 19 nt, Artificial Sequence
  Description of Artificial Sequence: Synthetic oligonucleotide
  Sense strand starting at position 3603 of SEQ ID NO: 1560758
ugucuaggaucccucucaa

SEQ ID NO: 1622274 - RNA, 19 nt, Artificial Sequence
  Description of Artificial Sequence: Synthetic oligonucleotide
  Antisense strand to SEQ ID NO: 1622273
uugagagggauccuagaca

SEQ ID NO: 1622275 - RNA, 19 nt, Artificial Sequence
  Description of Artificial Sequence: Synthetic oligonucleotide
  Sense strand starting at position 193 of SEQ ID NO: 1560759
gaaaguccagcaugacauu

SEQ ID NO: 1622276 - RNA, 19 nt, Artificial Sequence
  Description of Artificial Sequence: Synthetic oligonucleotide
  Antisense strand to SEQ ID NO: 1622275
aaugucaugcuggacuuuc

SEQ ID NO: 1622277 - RNA, 19 nt, Artificial Sequence
  Description of Artificial Sequence: Synthetic oligonucleotide
  Sense strand starting at position 378 of SEQ ID NO: 1560759
uuaagaagcuccuaaaugu

SEQ ID NO: 1622278 - RNA, 19 nt, Artificial Sequence
  Description of Artificial Sequence: Synthetic oligonucleotide
  Antisense strand to SEQ ID NO: 1622277
acauuuaggagcuucuuaa

SEQ ID NO: 1622279 - RNA, 19 nt, Artificial Sequence
  Description of Artificial Sequence: Synthetic oligonucleotide
  Sense strand starting at position 427 of SEQ ID NO: 1560759
ccacaauauggucagucuu

SEQ ID NO: 1622280 - RNA, 19 nt, Artificial Sequence
  Description of Artificial Sequence: Synthetic oligonucleotide
  Antisense strand to SEQ ID NO: 1622279
aagacugaccauauugugg

SEQ ID NO: 1622281 - RNA, 19 nt, Artificial Sequence
  Description of Artificial Sequence: Synthetic oligonucleotide
  Sense strand starting at position 473 of SEQ ID NO: 1560759
ugcugucuggccuguauua

SEQ ID NO: 1622282 - RNA, 19 nt, Artificial Sequence
  Description of Artificial Sequence: Synthetic oligonucleotide
  Antisense strand to SEQ ID NO: 1622281
uaauacaggccagacagca

SEQ ID NO: 1622283 - RNA, 19 nt, Artificial Sequence
  Description of Artificial Sequence: Synthetic oligonucleotide
  Sense strand starting at position 475 of SEQ ID NO: 1560759
cugucuggccuguauuaac

SEQ ID NO: 1622284 - RNA, 19 nt, Artificial Sequence
  Description of Artificial Sequence: Synthetic oligonucleotide
  Antisense strand to SEQ ID NO: 1622283
guuaauacaggccagacag

SEQ ID NO: 1622285 - RNA, 19 nt, Artificial Sequence
  Description of Artificial Sequence: Synthetic oligonucleotide
  Sense strand starting at position 491 of SEQ ID NO: 1560759
aacugcuucuggucuguaa

SEQ ID NO: 1622286 - RNA, 19 nt, Artificial Sequence
  Description of Artificial Sequence: Synthetic oligonucleotide
  Antisense strand to SEQ ID NO: 1622285
uuacagaccagaagcaguu

SEQ ID NO: 1622287 - RNA, 19 nt, Artificial Sequence
  Description of Artificial Sequence: Synthetic oligonucleotide
  Sense strand starting at position 493 of SEQ ID NO: 1560759
cugcuucuggucuguaagu

SEQ ID NO: 1622288 - RNA, 19 nt, Artificial Sequence
  Description of Artificial Sequence: Synthetic oligonucleotide
  Antisense strand to SEQ ID NO: 1622287
acuuacagaccagaagcag

SEQ ID NO: 1622289 - RNA, 19 nt, Artificial Sequence
  Description of Artificial Sequence: Synthetic oligonucleotide
  Sense strand starting at position 875 of SEQ ID NO: 1560759
ggcuuaugucuuggcagaa

SEQ ID NO: 1622290 - RNA, 19 nt, Artificial Sequence
  Description of Artificial Sequence: Synthetic oligonucleotide
  Antisense strand to SEQ ID NO: 1622289
uucugccaagacauaagcc

SEQ ID NO: 1622291 - RNA, 19 nt, Artificial Sequence
  Description of Artificial Sequence: Synthetic oligonucleotide
  Sense strand starting at position 876 of SEQ ID NO: 1560759
gcuuaugucuuggcagaau

SEQ ID NO: 1622292 - RNA, 19 nt, Artificial Sequence
  Description of Artificial Sequence: Synthetic oligonucleotide
  Antisense strand to SEQ ID NO: 1622291
auucugccaagacauaagc

SEQ ID NO: 1622293 - RNA, 19 nt, Artificial Sequence
  Description of Artificial Sequence: Synthetic oligonucleotide
  Sense strand starting at position 879 of SEQ ID NO: 1560759
uaugucuuggcagaauuaa

SEQ ID NO: 1622294 - RNA, 19 nt, Artificial Sequence
  Description of Artificial Sequence: Synthetic oligonucleotide
  Antisense strand to SEQ ID NO: 1622293
uuaauucugccaagacaua

SEQ ID NO: 1622295 - RNA, 19 nt, Artificial Sequence
  Description of Artificial Sequence: Synthetic oligonucleotide
  Sense strand starting at position 1014 of SEQ ID NO: 1560759
agaugaggccuuuggaaua

SEQ ID NO: 1622296 - RNA, 19 nt, Artificial Sequence
  Description of Artificial Sequence: Synthetic oligonucleotide
  Antisense strand to SEQ ID NO: 1622295
uauuccaaaggccucaucu

SEQ ID NO: 1622297 - RNA, 19 nt, Artificial Sequence
  Description of Artificial Sequence: Synthetic oligonucleotide
  Sense strand starting at position 1221 of SEQ ID NO: 1560759
gcaggauagucaccuguac

SEQ ID NO: 1622298 - RNA, 19 nt, Artificial Sequence
  Description of Artificial Sequence: Synthetic oligonucleotide
  Antisense strand to SEQ ID NO: 1622297
guacaggugacuauccugc

SEQ ID NO: 1622299 - RNA, 19 nt, Artificial Sequence
  Description of Artificial Sequence: Synthetic oligonucleotide
  Sense strand starting at position 1223 of SEQ ID NO: 1560759
aggauagucaccuguacag

SEQ ID NO: 1622300 - RNA, 19 nt, Artificial Sequence
  Description of Artificial Sequence: Synthetic oligonucleotide
  Antisense strand to SEQ ID NO: 1622299
cuguacaggugacuauccu

SEQ ID NO: 1622301 - RNA, 19 nt, Artificial Sequence
  Description of Artificial Sequence: Synthetic oligonucleotide
  Sense strand starting at position 1446 of SEQ ID NO: 1560759
aguccuuaccugcagcaaa

SEQ ID NO: 1622302 - RNA, 19 nt, Artificial Sequence
  Description of Artificial Sequence: Synthetic oligonucleotide
  Antisense strand to SEQ ID NO: 1622301
uuugcugcagguaaggacu

SEQ ID NO: 1622303 - RNA, 19 nt, Artificial Sequence
  Description of Artificial Sequence: Synthetic oligonucleotide
  Sense strand starting at position 1745 of SEQ ID NO: 1560759
accagaaaucggugcucaa

SEQ ID NO: 1622304 - RNA, 19 nt, Artificial Sequence
  Description of Artificial Sequence: Synthetic oligonucleotide
  Antisense strand to SEQ ID NO: 1622303
uugagcaccgauuucuggu

SEQ ID NO: 1622305 - RNA, 19 nt, Artificial Sequence
  Description of Artificial Sequence: Synthetic oligonucleotide
  Sense strand starting at position 1876 of SEQ ID NO: 1560759
ugaucagacucuugaaucu

SEQ ID NO: 1622306 - RNA, 19 nt, Artificial Sequence
  Description of Artificial Sequence: Synthetic oligonucleotide
  Antisense strand to SEQ ID NO: 1622305
agauucaagagucugauca

SEQ ID NO: 1622307 - RNA, 19 nt, Artificial Sequence
  Description of Artificial Sequence: Synthetic oligonucleotide
  Sense strand starting at position 1883 of SEQ ID NO: 1560759
acucuugaaucucagagag

SEQ ID NO: 1622308 - RNA, 19 nt, Artificial Sequence
  Description of Artificial Sequence: Synthetic oligonucleotide
  Antisense strand to SEQ ID NO: 1622307
cucucugagauucaagagu

SEQ ID NO: 1622309 - RNA, 19 nt, Artificial Sequence
  Description of Artificial Sequence: Synthetic oligonucleotide
  Sense strand starting at position 1885 of SEQ ID NO: 1560759
ucuugaaucucagagagaa

SEQ ID NO: 1622310 - RNA, 19 nt, Artificial Sequence
  Description of Artificial Sequence: Synthetic oligonucleotide
  Antisense strand to SEQ ID NO: 1622309
uucucucugagauucaaga

SEQ ID NO: 1622311 - RNA, 19 nt, Artificial Sequence
  Description of Artificial Sequence: Synthetic oligonucleotide
  Sense strand starting at position 1929 of SEQ ID NO: 1560759
guccuuagagcccaagaaa

SEQ ID NO: 1622312 - RNA, 19 nt, Artificial Sequence
  Description of Artificial Sequence: Synthetic oligonucleotide
  Antisense strand to SEQ ID NO: 1622311
uuucuugggcucuaaggac

SEQ ID NO: 1622313 - RNA, 19 nt, Artificial Sequence
  Description of Artificial Sequence: Synthetic oligonucleotide
  Sense strand starting at position 1979 of SEQ ID NO: 1560759
gguccugcgcuuugucaca

SEQ ID NO: 1622314 - RNA, 19 nt, Artificial Sequence
  Description of Artificial Sequence: Synthetic oligonucleotide
  Antisense strand to SEQ ID NO: 1622313
ugugacaaagcgcaggacc

SEQ ID NO: 1622315 - RNA, 19 nt, Artificial Sequence
  Description of Artificial Sequence: Synthetic oligonucleotide
  Sense strand starting at position 2135 of SEQ ID NO: 1560759
gugucagaucaucaguggu

SEQ ID NO: 1622316 - RNA, 19 nt, Artificial Sequence
  Description of Artificial Sequence: Synthetic oligonucleotide
  Antisense strand to SEQ ID NO: 1622315
accacugaugaucugacac

SEQ ID NO: 1622317 - RNA, 19 nt, Artificial Sequence
  Description of Artificial Sequence: Synthetic oligonucleotide
  Sense strand starting at position 2168 of SEQ ID NO: 1560759
aguacuugccucugucaca

SEQ ID NO: 1622318 - RNA, 19 nt, Artificial Sequence
  Description of Artificial Sequence: Synthetic oligonucleotide
  Antisense strand to SEQ ID NO: 1622317
ugugacagaggcaaguacu

SEQ ID NO: 1622319 - RNA, 19 nt, Artificial Sequence
  Description of Artificial Sequence: Synthetic oligonucleotide
  Sense strand starting at position 2353 of SEQ ID NO: 1560759
caugcuuuccuguggguua

SEQ ID NO: 1622320 - RNA, 19 nt, Artificial Sequence
  Description of Artificial Sequence: Synthetic oligonucleotide
  Antisense strand to SEQ ID NO: 1622319
uaacccacaggaaagcaug

SEQ ID NO: 1622321 - RNA, 19 nt, Artificial Sequence
  Description of Artificial Sequence: Synthetic oligonucleotide
  Sense strand starting at position 2375 of SEQ ID NO: 1560759
agucuuccauucugggaga

SEQ ID NO: 1622322 - RNA, 19 nt, Artificial Sequence
  Description of Artificial Sequence: Synthetic oligonucleotide
  Antisense strand to SEQ ID NO: 1622321
ucucccagaauggaagacu

SEQ ID NO: 1622323 - RNA, 19 nt, Artificial Sequence
  Description of Artificial Sequence: Synthetic oligonucleotide
  Sense strand starting at position 2378 of SEQ ID NO: 1560759
cuuccauucugggagagga

SEQ ID NO: 1622324 - RNA, 19 nt, Artificial Sequence
  Description of Artificial Sequence: Synthetic oligonucleotide
  Antisense strand to SEQ ID NO: 1622323
uccucucccagaauggaag

SEQ ID NO: 1622325 - RNA, 19 nt, Artificial Sequence
  Description of Artificial Sequence: Synthetic oligonucleotide
  Sense strand starting at position 2409 of SEQ ID NO: 1560759
uagggucucuacugaagga

SEQ ID NO: 1622326 - RNA, 19 nt, Artificial Sequence
  Description of Artificial Sequence: Synthetic oligonucleotide
  Antisense strand to SEQ ID NO: 1622325
uccuucaguagagacccua

SEQ ID NO: 1622327 - RNA, 19 nt, Artificial Sequence
  Description of Artificial Sequence: Synthetic oligonucleotide
  Sense strand starting at position 2569 of SEQ ID NO: 1560759
agcagagaaucacaauucu

SEQ ID NO: 1622328 - RNA, 19 nt, Artificial Sequence
  Description of Artificial Sequence: Synthetic oligonucleotide
  Antisense strand to SEQ ID NO: 1622327
agaauugugauucucugcu

SEQ ID NO: 1622329 - RNA, 19 nt, Artificial Sequence
  Description of Artificial Sequence: Synthetic oligonucleotide
  Sense strand starting at position 2679 of SEQ ID NO: 1560759
ggccuuuaucaccaggauc

SEQ ID NO: 1622330 - RNA, 19 nt, Artificial Sequence
  Description of Artificial Sequence: Synthetic oligonucleotide
  Antisense strand to SEQ ID NO: 1622329
gauccuggugauaaaggcc

SEQ ID NO: 1622331 - RNA, 19 nt, Artificial Sequence
  Description of Artificial Sequence: Synthetic oligonucleotide
  Sense strand starting at position 2804 of SEQ ID NO: 1560759
caucuacgagcagguauaa

SEQ ID NO: 1622332 - RNA, 19 nt, Artificial Sequence
  Description of Artificial Sequence: Synthetic oligonucleotide
  Antisense strand to SEQ ID NO: 1622331
uuauaccugcucguagaug

SEQ ID NO: 1622333 - RNA, 19 nt, Artificial Sequence
  Description of Artificial Sequence: Synthetic oligonucleotide
  Sense strand starting at position 2878 of SEQ ID NO: 1560759
cggugauaugguuaggguu

SEQ ID NO: 1622334 - RNA, 19 nt, Artificial Sequence
  Description of Artificial Sequence: Synthetic oligonucleotide
  Antisense strand to SEQ ID NO: 1622333
aacccuaaccauaucaccg

SEQ ID NO: 1622335 - RNA, 19 nt, Artificial Sequence
  Description of Artificial Sequence: Synthetic oligonucleotide
  Sense strand starting at position 2942 of SEQ ID NO: 1560759
ucacgugucuagguagaga

SEQ ID NO: 1622336 - RNA, 19 nt, Artificial Sequence
  Description of Artificial Sequence: Synthetic oligonucleotide
  Antisense strand to SEQ ID NO: 1622335
ucucuaccuagacacguga

SEQ ID NO: 1622337 - RNA, 19 nt, Artificial Sequence
  Description of Artificial Sequence: Synthetic oligonucleotide
  Sense strand starting at position 3543 of SEQ ID NO: 1560759
cggccaggcaguuauuuau

SEQ ID NO: 1622338 - RNA, 19 nt, Artificial Sequence
  Description of Artificial Sequence: Synthetic oligonucleotide
  Antisense strand to SEQ ID NO: 1622337
auaaauaacugccuggccg

SEQ ID NO: 1622339 - RNA, 19 nt, Artificial Sequence
  Description of Artificial Sequence: Synthetic oligonucleotide
  Sense strand starting at position 3587 of SEQ ID NO: 1560759
uagggaguagucuggaaga

SEQ ID NO: 1622340 - RNA, 19 nt, Artificial Sequence
  Description of Artificial Sequence: Synthetic oligonucleotide
  Antisense strand to SEQ ID NO: 1622339
ucuuccagacuacucccua

SEQ ID NO: 1622341 - RNA, 19 nt, Artificial Sequence
  Description of Artificial Sequence: Synthetic oligonucleotide
  Sense strand starting at position 3590 of SEQ ID NO: 1560759
ggaguagucuggaagagga

SEQ ID NO: 1622342 - RNA, 19 nt, Artificial Sequence
  Description of Artificial Sequence: Synthetic oligonucleotide
  Antisense strand to SEQ ID NO: 1622341
uccucuuccagacuacucc

SEQ ID NO: 1622343 - RNA, 19 nt, Artificial Sequence
  Description of Artificial Sequence: Synthetic oligonucleotide
  Sense strand starting at position 3607 of SEQ ID NO: 1560759
gaccucugucuuggagaug

SEQ ID NO: 1622344 - RNA, 19 nt, Artificial Sequence
  Description of Artificial Sequence: Synthetic oligonucleotide
  Antisense strand to SEQ ID NO: 1622343
caucuccaagacagagguc

SEQ ID NO: 1622345 - RNA, 19 nt, Artificial Sequence
  Description of Artificial Sequence: Synthetic oligonucleotide
  Sense strand starting at position 3608 of SEQ ID NO: 1560759
accucugucuuggagauga

SEQ ID NO: 1622346 - RNA, 19 nt, Artificial Sequence
  Description of Artificial Sequence: Synthetic oligonucleotide
  Antisense strand to SEQ ID NO: 1622345
ucaucuccaagacagaggu

SEQ ID NO: 1622347 - RNA, 19 nt, Artificial Sequence
  Description of Artificial Sequence: Synthetic oligonucleotide
  Sense strand starting at position 3686 of SEQ ID NO: 1560759
acugguuccucuccuuuau

SEQ ID NO: 1622348 - RNA, 19 nt, Artificial Sequence
  Description of Artificial Sequence: Synthetic oligonucleotide
  Antisense strand to SEQ ID NO: 1622347
auaaaggagaggaaccagu

SEQ ID NO: 1622349 - RNA, 19 nt, Artificial Sequence
  Description of Artificial Sequence: Synthetic oligonucleotide
  Sense strand starting at position 3690 of SEQ ID NO: 1560759
guuccucuccuuuauugga

SEQ ID NO: 1622350 - RNA, 19 nt, Artificial Sequence
  Description of Artificial Sequence: Synthetic oligonucleotide
  Antisense strand to SEQ ID NO: 1622349
uccaauaaaggagaggaac

SEQ ID NO: 1622351 - RNA, 19 nt, Artificial Sequence
  Description of Artificial Sequence: Synthetic oligonucleotide
  Sense strand starting at position 3692 of SEQ ID NO: 1560759
uccucuccuuuauuggaga

SEQ ID NO: 1622352 - RNA, 19 nt, Artificial Sequence
  Description of Artificial Sequence: Synthetic oligonucleotide
  Antisense strand to SEQ ID NO: 1622351
ucuccaauaaaggagagga

SEQ ID NO: 1622353 - RNA, 19 nt, Artificial Sequence
  Description of Artificial Sequence: Synthetic oligonucleotide
  Sense strand starting at position 3748 of SEQ ID NO: 1560759
gcaccacucugagaacaca

SEQ ID NO: 1622354 - RNA, 19 nt, Artificial Sequence
  Description of Artificial Sequence: Synthetic oligonucleotide
  Antisense strand to SEQ ID NO: 1622353
uguguucucagaguggugc

SEQ ID NO: 1622355 - RNA, 19 nt, Artificial Sequence
  Description of Artificial Sequence: Synthetic oligonucleotide
  Sense strand starting at position 14 of SEQ ID NO: 1560760
cuggauaccuagucaugga

SEQ ID NO: 1622356 - RNA, 19 nt, Artificial Sequence
  Description of Artificial Sequence: Synthetic oligonucleotide
  Antisense strand to SEQ ID NO: 1622355
uccaugacuagguauccag

SEQ ID NO: 1622357 - RNA, 19 nt, Artificial Sequence
  Description of Artificial Sequence: Synthetic oligonucleotide
  Sense strand starting at position 18 of SEQ ID NO: 1560760
auaccuagucauggaguga

SEQ ID NO: 1622358 - RNA, 19 nt, Artificial Sequence
  Description of Artificial Sequence: Synthetic oligonucleotide
  Antisense strand to SEQ ID NO: 1622357
ucacuccaugacuagguau

SEQ ID NO: 1622359 - RNA, 19 nt, Artificial Sequence
  Description of Artificial Sequence: Synthetic oligonucleotide
  Sense strand starting at position 22 of SEQ ID NO: 1560760
cuagucauggagugaauga

SEQ ID NO: 1622360 - RNA, 19 nt, Artificial Sequence
  Description of Artificial Sequence: Synthetic oligonucleotide
  Antisense strand to SEQ ID NO: 1622359
ucauucacuccaugacuag

SEQ ID NO: 1622361 - RNA, 19 nt, Artificial Sequence
  Description of Artificial Sequence: Synthetic oligonucleotide
  Sense strand starting at position 57 of SEQ ID NO: 1560760
gcaagugggucuucccauu

SEQ ID NO: 1622362 - RNA, 19 nt, Artificial Sequence
  Description of Artificial Sequence: Synthetic oligonucleotide
  Antisense strand to SEQ ID NO: 1622361
aaugggaagacccacuugc

SEQ ID NO: 1622363 - RNA, 19 nt, Artificial Sequence
  Description of Artificial Sequence: Synthetic oligonucleotide
  Sense strand starting at position 717 of SEQ ID NO: 1560760
ccuucugggcuucgugaau

SEQ ID NO: 1622364 - RNA, 19 nt, Artificial Sequence
  Description of Artificial Sequence: Synthetic oligonucleotide
  Antisense strand to SEQ ID NO: 1622363
auucacgaagcccagaagg

SEQ ID NO: 1622365 - RNA, 19 nt, Artificial Sequence
  Description of Artificial Sequence: Synthetic oligonucleotide
  Sense strand starting at position 863 of SEQ ID NO: 1560760
gccagcugccagugugauu

SEQ ID NO: 1622366 - RNA, 19 nt, Artificial Sequence
  Description of Artificial Sequence: Synthetic oligonucleotide
  Antisense strand to SEQ ID NO: 1622365
aaucacacuggcagcuggc

SEQ ID NO: 1622367 - RNA, 19 nt, Artificial Sequence
  Description of Artificial Sequence: Synthetic oligonucleotide
  Sense strand starting at position 1045 of SEQ ID NO: 1560760
gccagaguauucuugggag

SEQ ID NO: 1622368 - RNA, 19 nt, Artificial Sequence
  Description of Artificial Sequence: Synthetic oligonucleotide
  Antisense strand to SEQ ID NO: 1622367
cucccaagaauacucuggc

SEQ ID NO: 1622369 - RNA, 19 nt, Artificial Sequence
  Description of Artificial Sequence: Synthetic oligonucleotide
  Sense strand starting at position 1241 of SEQ ID NO: 1560760
agcagauuccuggaucccu

SEQ ID NO: 1622370 - RNA, 19 nt, Artificial Sequence
  Description of Artificial Sequence: Synthetic oligonucleotide
  Antisense strand to SEQ ID NO: 1622369
agggauccaggaaucugcu

SEQ ID NO: 1622371 - RNA, 19 nt, Artificial Sequence
  Description of Artificial Sequence: Synthetic oligonucleotide
  Sense strand starting at position 1973 of SEQ ID NO: 1560760
cgaaguggacuuuguaaug

SEQ ID NO: 1622372 - RNA, 19 nt, Artificial Sequence
  Description of Artificial Sequence: Synthetic oligonucleotide
  Antisense strand to SEQ ID NO: 1622371
cauuacaaaguccacuucg

SEQ ID NO: 1622373 - RNA, 19 nt, Artificial Sequence
  Description of Artificial Sequence: Synthetic oligonucleotide
  Sense strand starting at position 1978 of SEQ ID NO: 1560760
uggacuuuguaauguuugu

SEQ ID NO: 1622374 - RNA, 19 nt, Artificial Sequence
  Description of Artificial Sequence: Synthetic oligonucleotide
  Antisense strand to SEQ ID NO: 1622373
acaaacauuacaaagucca

SEQ ID NO: 1622375 - RNA, 19 nt, Artificial Sequence
  Description of Artificial Sequence: Synthetic oligonucleotide
  Sense strand starting at position 1982 of SEQ ID NO: 1560760
cuuuguaauguuugugcau

SEQ ID NO: 1622376 - RNA, 19 nt, Artificial Sequence
  Description of Artificial Sequence: Synthetic oligonucleotide
  Antisense strand to SEQ ID NO: 1622375
augcacaaacauuacaaag

SEQ ID NO: 1622377 - RNA, 19 nt, Artificial Sequence
  Description of Artificial Sequence: Synthetic oligonucleotide
  Sense strand starting at position 2294 of SEQ ID NO: 1560760
ugggaagcuccugggaguu

SEQ ID NO: 1622378 - RNA, 19 nt, Artificial Sequence
  Description of Artificial Sequence: Synthetic oligonucleotide
  Antisense strand to SEQ ID NO: 1622377
aacucccaggagcuuccca

SEQ ID NO: 1622379 - RNA, 19 nt, Artificial Sequence
  Description of Artificial Sequence: Synthetic oligonucleotide
  Sense strand starting at position 2306 of SEQ ID NO: 1560760
gggaguuuccaagaggcua

SEQ ID NO: 1622380 - RNA, 19 nt, Artificial Sequence
  Description of Artificial Sequence: Synthetic oligonucleotide
  Antisense strand to SEQ ID NO: 1622379
uagccucuuggaaacuccc

SEQ ID NO: 1622381 - RNA, 19 nt, Artificial Sequence
  Description of Artificial Sequence: Synthetic oligonucleotide
  Sense strand starting at position 2333 of SEQ ID NO: 1560760
gggagugcugagcagacau

SEQ ID NO: 1622382 - RNA, 19 nt, Artificial Sequence
  Description of Artificial Sequence: Synthetic oligonucleotide
  Antisense strand to SEQ ID NO: 1622381
augucugcucagcacuccc

SEQ ID NO: 1622383 - RNA, 19 nt, Artificial Sequence
  Description of Artificial Sequence: Synthetic oligonucleotide
  Sense strand starting at position 2512 of SEQ ID NO: 1560760
accugugggcauugaauga

SEQ ID NO: 1622384 - RNA, 19 nt, Artificial Sequence
  Description of Artificial Sequence: Synthetic oligonucleotide
  Antisense strand to SEQ ID NO: 1622383
ucauucaaugcccacaggu

SEQ ID NO: 1622385 - RNA, 19 nt, Artificial Sequence
  Description of Artificial Sequence: Synthetic oligonucleotide
  Sense strand starting at position 2542 of SEQ ID NO: 1560760
gggaauugugagggagcaa

SEQ ID NO: 1622386 - RNA, 19 nt, Artificial Sequence
  Description of Artificial Sequence: Synthetic oligonucleotide
  Antisense strand to SEQ ID NO: 1622385
uugcucccucacaauuccc

SEQ ID NO: 1622387 - RNA, 19 nt, Artificial Sequence
  Description of Artificial Sequence: Synthetic oligonucleotide
  Sense strand starting at position 2613 of SEQ ID NO: 1560760
ggguguaccgcguuuccaa

SEQ ID NO: 1622388 - RNA, 19 nt, Artificial Sequence
  Description of Artificial Sequence: Synthetic oligonucleotide
  Antisense strand to SEQ ID NO: 1622387
uuggaaacgcgguacaccc

SEQ ID NO: 1622389 - RNA, 19 nt, Artificial Sequence
  Description of Artificial Sequence: Synthetic oligonucleotide
  Sense strand starting at position 2614 of SEQ ID NO: 1560760
gguguaccgcguuuccaau

SEQ ID NO: 1622390 - RNA, 19 nt, Artificial Sequence
  Description of Artificial Sequence: Synthetic oligonucleotide
  Antisense strand to SEQ ID NO: 1622389
auuggaaacgcgguacacc

SEQ ID NO: 1622391 - RNA, 19 nt, Artificial Sequence
  Description of Artificial Sequence: Synthetic oligonucleotide
  Sense strand starting at position 2620 of SEQ ID NO: 1560760
ccgcguuuccaaugugaag

SEQ ID NO: 1622392 - RNA, 19 nt, Artificial Sequence
  Description of Artificial Sequence: Synthetic oligonucleotide
  Antisense strand to SEQ ID NO: 1622391
cuucacauuggaaacgcgg

SEQ ID NO: 1622393 - RNA, 19 nt, Artificial Sequence
  Description of Artificial Sequence: Synthetic oligonucleotide
  Sense strand starting at position 2622 of SEQ ID NO: 1560760
gcguuuccaaugugaagag

SEQ ID NO: 1622394 - RNA, 19 nt, Artificial Sequence
  Description of Artificial Sequence: Synthetic oligonucleotide
  Antisense strand to SEQ ID NO: 1622393
cucuucacauuggaaacgc

SEQ ID NO: 1622395 - RNA, 19 nt, Artificial Sequence
  Description of Artificial Sequence: Synthetic oligonucleotide
  Sense strand starting at position 3157 of SEQ ID NO: 1560760
auggcuuccucauugcuga

SEQ ID NO: 1622396 - RNA, 19 nt, Artificial Sequence
  Description of Artificial Sequence: Synthetic oligonucleotide
  Antisense strand to SEQ ID NO: 1622395
ucagcaaugaggaagccau

SEQ ID NO: 1622397 - RNA, 19 nt, Artificial Sequence
  Description of Artificial Sequence: Synthetic oligonucleotide
  Sense strand starting at position 3284 of SEQ ID NO: 1560760
cgcuguucuaaauggaugu

SEQ ID NO: 1622398 - RNA, 19 nt, Artificial Sequence
  Description of Artificial Sequence: Synthetic oligonucleotide
  Antisense strand to SEQ ID NO: 1622397
acauccauuuagaacagcg

SEQ ID NO: 1622399 - RNA, 19 nt, Artificial Sequence
  Description of Artificial Sequence: Synthetic oligonucleotide
  Sense strand starting at position 3288 of SEQ ID NO: 1560760
guucuaaauggauguccau

SEQ ID NO: 1622400 - RNA, 19 nt, Artificial Sequence
  Description of Artificial Sequence: Synthetic oligonucleotide
  Antisense strand to SEQ ID NO: 1622399
auggacauccauuuagaac

SEQ ID NO: 1622401 - RNA, 19 nt, Artificial Sequence
  Description of Artificial Sequence: Synthetic oligonucleotide
  Sense strand starting at position 3383 of SEQ ID NO: 1560760
aggugugaugcccgcuuca

SEQ ID NO: 1622402 - RNA, 19 nt, Artificial Sequence
  Description of Artificial Sequence: Synthetic oligonucleotide
  Antisense strand to SEQ ID NO: 1622401
ugaagcgggcaucacaccu

SEQ ID NO: 1622403 - RNA, 19 nt, Artificial Sequence
  Description of Artificial Sequence: Synthetic oligonucleotide
  Sense strand starting at position 3385 of SEQ ID NO: 1560760
gugugaugcccgcuucaca

SEQ ID NO: 1622404 - RNA, 19 nt, Artificial Sequence
  Description of Artificial Sequence: Synthetic oligonucleotide
  Antisense strand to SEQ ID NO: 1622403
ugugaagcgggcaucacac

SEQ ID NO: 1622405 - RNA, 19 nt, Artificial Sequence
  Description of Artificial Sequence: Synthetic oligonucleotide
  Sense strand starting at position 3767 of SEQ ID NO: 1560760
cugaguucugcccagguga

SEQ ID NO: 1622406 - RNA, 19 nt, Artificial Sequence
  Description of Artificial Sequence: Synthetic oligonucleotide
  Antisense strand to SEQ ID NO: 1622405
ucaccugggcagaacucag

SEQ ID NO: 1622407 - RNA, 19 nt, Artificial Sequence
  Description of Artificial Sequence: Synthetic oligonucleotide
  Sense strand starting at position 21 of SEQ ID NO: 1560761
cuguaaaucuguuuaacac

SEQ ID NO: 1622408 - RNA, 19 nt, Artificial Sequence
  Description of Artificial Sequence: Synthetic oligonucleotide
  Antisense strand to SEQ ID NO: 1622407
guguuaaacagauuuacag

SEQ ID NO: 1622409 - RNA, 19 nt, Artificial Sequence
  Description of Artificial Sequence: Synthetic oligonucleotide
  Sense strand starting at position 22 of SEQ ID NO: 1560761
uguaaaucuguuuaacaca

SEQ ID NO: 1622410 - RNA, 19 nt, Artificial Sequence
  Description of Artificial Sequence: Synthetic oligonucleotide
  Antisense strand to SEQ ID NO: 1622409
uguguuaaacagauuuaca

SEQ ID NO: 1622411 - RNA, 19 nt, Artificial Sequence
  Description of Artificial Sequence: Synthetic oligonucleotide
  Sense strand starting at position 108 of SEQ ID NO: 1560761
ggauuaguaaguuaagccu

SEQ ID NO: 1622412 - RNA, 19 nt, Artificial Sequence
  Description of Artificial Sequence: Synthetic oligonucleotide
  Antisense strand to SEQ ID NO: 1622411
aggcuuaacuuacuaaucc

SEQ ID NO: 1622413 - RNA, 19 nt, Artificial Sequence
  Description of Artificial Sequence: Synthetic oligonucleotide
  Sense strand starting at position 223 of SEQ ID NO: 1560761
uuccgaguucaggagucaa

SEQ ID NO: 1622414 - RNA, 19 nt, Artificial Sequence
  Description of Artificial Sequence: Synthetic oligonucleotide
  Antisense strand to SEQ ID NO: 1622413
uugacuccugaacucggaa

SEQ ID NO: 1622415 - RNA, 19 nt, Artificial Sequence
  Description of Artificial Sequence: Synthetic oligonucleotide
  Sense strand starting at position 242 of SEQ ID NO: 1560761
cuguauuucuuucuaguga

SEQ ID NO: 1622416 - RNA, 19 nt, Artificial Sequence
  Description of Artificial Sequence: Synthetic oligonucleotide
  Antisense strand to SEQ ID NO: 1622415
ucacuagaaagaaauacag

SEQ ID NO: 1622417 - RNA, 19 nt, Artificial Sequence
  Description of Artificial Sequence: Synthetic oligonucleotide
  Sense strand starting at position 257 of SEQ ID NO: 1560761
gugauauguuugucuaaua

SEQ ID NO: 1622418 - RNA, 19 nt, Artificial Sequence
  Description of Artificial Sequence: Synthetic oligonucleotide
  Antisense strand to SEQ ID NO: 1622417
uauuagacaaacauaucac

SEQ ID NO: 1622419 - RNA, 19 nt, Artificial Sequence
  Description of Artificial Sequence: Synthetic oligonucleotide
  Sense strand starting at position 270 of SEQ ID NO: 1560761
cuaauaaaguaguuaccuu

SEQ ID NO: 1622420 - RNA, 19 nt, Artificial Sequence
  Description of Artificial Sequence: Synthetic oligonucleotide
  Antisense strand to SEQ ID NO: 1622419
aagguaacuacuuuauuag

SEQ ID NO: 1622421 - RNA, 19 nt, Artificial Sequence
  Description of Artificial Sequence: Synthetic oligonucleotide
  Sense strand starting at position 277 of SEQ ID NO: 1560761
aguaguuaccuuuagacuc

SEQ ID NO: 1622422 - RNA, 19 nt, Artificial Sequence
  Description of Artificial Sequence: Synthetic oligonucleotide
  Antisense strand to SEQ ID NO: 1622421
gagucuaaagguaacuacu

SEQ ID NO: 1622423 - RNA, 19 nt, Artificial Sequence
  Description of Artificial Sequence: Synthetic oligonucleotide
  Sense strand starting at position 309 of SEQ ID NO: 1560761
uucccuaaacacuguugua

SEQ ID NO: 1622424 - RNA, 19 nt, Artificial Sequence
  Description of Artificial Sequence: Synthetic oligonucleotide
  Antisense strand to SEQ ID NO: 1622423
uacaacaguguuuagggaa

SEQ ID NO: 1622425 - RNA, 19 nt, Artificial Sequence
  Description of Artificial Sequence: Synthetic oligonucleotide
  Sense strand starting at position 321 of SEQ ID NO: 1560761
uguuguaugagcuuugcuu

SEQ ID NO: 1622426 - RNA, 19 nt, Artificial Sequence
  Description of Artificial Sequence: Synthetic oligonucleotide
  Antisense strand to SEQ ID NO: 1622425
aagcaaagcucauacaaca

SEQ ID NO: 1622427 - RNA, 19 nt, Artificial Sequence
  Description of Artificial Sequence: Synthetic oligonucleotide
  Sense strand starting at position 361 of SEQ ID NO: 1560761
uuaagugguuugguaauaa

SEQ ID NO: 1622428 - RNA, 19 nt, Artificial Sequence
  Description of Artificial Sequence: Synthetic oligonucleotide
  Antisense strand to SEQ ID NO: 1622427
uuauuaccaaaccacuuaa

SEQ ID NO: 1622429 - RNA, 19 nt, Artificial Sequence
  Description of Artificial Sequence: Synthetic oligonucleotide
  Sense strand starting at position 741 of SEQ ID NO: 1560761
gucggcguugcaucagauu

SEQ ID NO: 1622430 - RNA, 19 nt, Artificial Sequence
  Description of Artificial Sequence: Synthetic oligonucleotide
  Antisense strand to SEQ ID NO: 1622429
aaucugaugcaacgccgac

SEQ ID NO: 1622431 - RNA, 19 nt, Artificial Sequence
  Description of Artificial Sequence: Synthetic oligonucleotide
  Sense strand starting at position 750 of SEQ ID NO: 1560761
gcaucagauuagcugauca

SEQ ID NO: 1622432 - RNA, 19 nt, Artificial Sequence
  Description of Artificial Sequence: Synthetic oligonucleotide
  Antisense strand to SEQ ID NO: 1622431
ugaucagcuaaucugaugc

SEQ ID NO: 1622433 - RNA, 19 nt, Artificial Sequence
  Description of Artificial Sequence: Synthetic oligonucleotide
  Sense strand starting at position 911 of SEQ ID NO: 1560761
accaguauauuguuccaau

SEQ ID NO: 1622434 - RNA, 19 nt, Artificial Sequence
  Description of Artificial Sequence: Synthetic oligonucleotide
  Antisense strand to SEQ ID NO: 1622433
auuggaacaauauacuggu

SEQ ID NO: 1622435 - RNA, 19 nt, Artificial Sequence
  Description of Artificial Sequence: Synthetic oligonucleotide
  Sense strand starting at position 912 of SEQ ID NO: 1560761
ccaguauauuguuccaauc

SEQ ID NO: 1622436 - RNA, 19 nt, Artificial Sequence
  Description of Artificial Sequence: Synthetic oligonucleotide
  Antisense strand to SEQ ID NO: 1622435
gauuggaacaauauacugg

SEQ ID NO: 1622437 - RNA, 19 nt, Artificial Sequence
  Description of Artificial Sequence: Synthetic oligonucleotide
  Sense strand starting at position 1552 of SEQ ID NO: 1560761
ugacgaguuaguuagguuu

SEQ ID NO: 1622438 - RNA, 19 nt, Artificial Sequence
  Description of Artificial Sequence: Synthetic oligonucleotide
  Antisense strand to SEQ ID NO: 1622437
aaaccuaacuaacucguca

SEQ ID NO: 1622439 - RNA, 19 nt, Artificial Sequence
  Description of Artificial Sequence: Synthetic oligonucleotide
  Sense strand starting at position 1558 of SEQ ID NO: 1560761
guuaguuagguuuaaacac

SEQ ID NO: 1622440 - RNA, 19 nt, Artificial Sequence
  Description of Artificial Sequence: Synthetic oligonucleotide
  Antisense strand to SEQ ID NO: 1622439
guguuuaaaccuaacuaac

SEQ ID NO: 1622441 - RNA, 19 nt, Artificial Sequence
  Description of Artificial Sequence: Synthetic oligonucleotide
  Sense strand starting at position 1936 of SEQ ID NO: 1560761
ggugccugcccggugauua

SEQ ID NO: 1622442 - RNA, 19 nt, Artificial Sequence
  Description of Artificial Sequence: Synthetic oligonucleotide
  Antisense strand to SEQ ID NO: 1622441
uaaucaccgggcaggcacc

SEQ ID NO: 1622443 - RNA, 19 nt, Artificial Sequence
  Description of Artificial Sequence: Synthetic oligonucleotide
  Sense strand starting at position 1981 of SEQ ID NO: 1560761
caagguggguucuugauga

SEQ ID NO: 1622444 - RNA, 19 nt, Artificial Sequence
  Description of Artificial Sequence: Synthetic oligonucleotide
  Antisense strand to SEQ ID NO: 1622443
ucaucaagaacccaccuug

SEQ ID NO: 1622445 - RNA, 19 nt, Artificial Sequence
  Description of Artificial Sequence: Synthetic oligonucleotide
  Sense strand starting at position 2085 of SEQ ID NO: 1560761
gggucugcugauuaggaga

SEQ ID NO: 1622446 - RNA, 19 nt, Artificial Sequence
  Description of Artificial Sequence: Synthetic oligonucleotide
  Antisense strand to SEQ ID NO: 1622445
ucuccuaaucagcagaccc

SEQ ID NO: 1622447 - RNA, 19 nt, Artificial Sequence
  Description of Artificial Sequence: Synthetic oligonucleotide
  Sense strand starting at position 2346 of SEQ ID NO: 1560761
gcauguuuaacaggugaua

SEQ ID NO: 1622448 - RNA, 19 nt, Artificial Sequence
  Description of Artificial Sequence: Synthetic oligonucleotide
  Antisense strand to SEQ ID NO: 1622447
uaucaccuguuaaacaugc

SEQ ID NO: 1622449 - RNA, 19 nt, Artificial Sequence
  Description of Artificial Sequence: Synthetic oligonucleotide
  Sense strand starting at position 2348 of SEQ ID NO: 1560761
auguuuaacaggugauaga

SEQ ID NO: 1622450 - RNA, 19 nt, Artificial Sequence
  Description of Artificial Sequence: Synthetic oligonucleotide
  Antisense strand to SEQ ID NO: 1622449
ucuaucaccuguuaaacau

SEQ ID NO: 1622451 - RNA, 19 nt, Artificial Sequence
  Description of Artificial Sequence: Synthetic oligonucleotide
  Sense strand starting at position 2451 of SEQ ID NO: 1560761
acugauagcucaguccuau

SEQ ID NO: 1622452 - RNA, 19 nt, Artificial Sequence
  Description of Artificial Sequence: Synthetic oligonucleotide
  Antisense strand to SEQ ID NO: 1622451
auaggacugagcuaucagu

SEQ ID NO: 1622453 - RNA, 19 nt, Artificial Sequence
  Description of Artificial Sequence: Synthetic oligonucleotide
  Sense strand starting at position 2499 of SEQ ID NO: 1560761
guaugcucuggguaugacu

SEQ ID NO: 1622454 - RNA, 19 nt, Artificial Sequence
  Description of Artificial Sequence: Synthetic oligonucleotide
  Antisense strand to SEQ ID NO: 1622453
agucauacccagagcauac

SEQ ID NO: 1622455 - RNA, 19 nt, Artificial Sequence
  Description of Artificial Sequence: Synthetic oligonucleotide
  Sense strand starting at position 2518 of SEQ ID NO: 1560761
gauagagcuccucauauug

SEQ ID NO: 1622456 - RNA, 19 nt, Artificial Sequence
  Description of Artificial Sequence: Synthetic oligonucleotide
  Antisense strand to SEQ ID NO: 1622455
caauaugaggagcucuauc

SEQ ID NO: 1622457 - RNA, 19 nt, Artificial Sequence
  Description of Artificial Sequence: Synthetic oligonucleotide
  Sense strand starting at position 2615 of SEQ ID NO: 1560761
uuagauguaucuuuguaag

SEQ ID NO: 1622458 - RNA, 19 nt, Artificial Sequence
  Description of Artificial Sequence: Synthetic oligonucleotide
  Antisense strand to SEQ ID NO: 1622457
cuuacaaagauacaucuaa

SEQ ID NO: 1622459 - RNA, 19 nt, Artificial Sequence
  Description of Artificial Sequence: Synthetic oligonucleotide
  Sense strand starting at position 2621 of SEQ ID NO: 1560761
guaucuuuguaaguuagga

SEQ ID NO: 1622460 - RNA, 19 nt, Artificial Sequence
  Description of Artificial Sequence: Synthetic oligonucleotide
  Antisense strand to SEQ ID NO: 1622459
uccuaacuuacaaagauac

SEQ ID NO: 1622461 - RNA, 19 nt, Artificial Sequence
  Description of Artificial Sequence: Synthetic oligonucleotide
  Sense strand starting at position 2700 of SEQ ID NO: 1560761
ucauaauggacgggaaagu

SEQ ID NO: 1622462 - RNA, 19 nt, Artificial Sequence
  Description of Artificial Sequence: Synthetic oligonucleotide
  Antisense strand to SEQ ID NO: 1622461
acuuucccguccauuauga

SEQ ID NO: 1622463 - RNA, 19 nt, Artificial Sequence
  Description of Artificial Sequence: Synthetic oligonucleotide
  Sense strand starting at position 2850 of SEQ ID NO: 1560761
uggagauaauuugaauauc

SEQ ID NO: 1622464 - RNA, 19 nt, Artificial Sequence
  Description of Artificial Sequence: Synthetic oligonucleotide
  Antisense strand to SEQ ID NO: 1622463
gauauucaaauuaucucca

SEQ ID NO: 1622465 - RNA, 19 nt, Artificial Sequence
  Description of Artificial Sequence: Synthetic oligonucleotide
  Sense strand starting at position 2916 of SEQ ID NO: 1560761
aaagcagcuuuggugaaua

SEQ ID NO: 1622466 - RNA, 19 nt, Artificial Sequence
  Description of Artificial Sequence: Synthetic oligonucleotide
  Antisense strand to SEQ ID NO: 1622465
uauucaccaaagcugcuuu

SEQ ID NO: 1622467 - RNA, 19 nt, Artificial Sequence
  Description of Artificial Sequence: Synthetic oligonucleotide
  Sense strand starting at position 2918 of SEQ ID NO: 1560761
agcagcuuuggugaauaua

SEQ ID NO: 1622468 - RNA, 19 nt, Artificial Sequence
  Description of Artificial Sequence: Synthetic oligonucleotide
  Antisense strand to SEQ ID NO: 1622467
uauauucaccaaagcugcu

SEQ ID NO: 1622469 - RNA, 19 nt, Artificial Sequence
  Description of Artificial Sequence: Synthetic oligonucleotide
  Sense strand starting at position 2921 of SEQ ID NO: 1560761
agcuuuggugaauauaaau

SEQ ID NO: 1622470 - RNA, 19 nt, Artificial Sequence
  Description of Artificial Sequence: Synthetic oligonucleotide
  Antisense strand to SEQ ID NO: 1622469
auuuauauucaccaaagcu

SEQ ID NO: 1622471 - RNA, 19 nt, Artificial Sequence
  Description of Artificial Sequence: Synthetic oligonucleotide
  Sense strand starting at position 2952 of SEQ ID NO: 1560761
cugauuguguuucucuaaa

SEQ ID NO: 1622472 - RNA, 19 nt, Artificial Sequence
  Description of Artificial Sequence: Synthetic oligonucleotide
  Antisense strand to SEQ ID NO: 1622471
uuuagagaaacacaaucag

SEQ ID NO: 1622473 - RNA, 19 nt, Artificial Sequence
  Description of Artificial Sequence: Synthetic oligonucleotide
  Sense strand starting at position 3240 of SEQ ID NO: 1560761
ucugaaauguauguggaaa

SEQ ID NO: 1622474 - RNA, 19 nt, Artificial Sequence
  Description of Artificial Sequence: Synthetic oligonucleotide
  Antisense strand to SEQ ID NO: 1622473
uuuccacauacauuucaga

SEQ ID NO: 1622475 - RNA, 19 nt, Artificial Sequence
  Description of Artificial Sequence: Synthetic oligonucleotide
  Sense strand starting at position 3321 of SEQ ID NO: 1560761
ugaugauugaguuggaccu

SEQ ID NO: 1622476 - RNA, 19 nt, Artificial Sequence
  Description of Artificial Sequence: Synthetic oligonucleotide
  Antisense strand to SEQ ID NO: 1622475
agguccaacucaaucauca

SEQ ID NO: 1622477 - RNA, 19 nt, Artificial Sequence
  Description of Artificial Sequence: Synthetic oligonucleotide
  Sense strand starting at position 3322 of SEQ ID NO: 1560761
gaugauugaguuggaccua

SEQ ID NO: 1622478 - RNA, 19 nt, Artificial Sequence
  Description of Artificial Sequence: Synthetic oligonucleotide
  Antisense strand to SEQ ID NO: 1622477
uagguccaacucaaucauc

SEQ ID NO: 1622479 - RNA, 19 nt, Artificial Sequence
  Description of Artificial Sequence: Synthetic oligonucleotide
  Sense strand starting at position 3698 of SEQ ID NO: 1560761
gacuuauuggcacacggau

SEQ ID NO: 1622480 - RNA, 19 nt, Artificial Sequence
  Description of Artificial Sequence: Synthetic oligonucleotide
  Antisense strand to SEQ ID NO: 1622479
auccgugugccaauaaguc

SEQ ID NO: 1622481 - RNA, 19 nt, Artificial Sequence
  Description of Artificial Sequence: Synthetic oligonucleotide
  Sense strand starting at position 3834 of SEQ ID NO: 1560761
uggugccauuuguauuuaa

SEQ ID NO: 1622482 - RNA, 19 nt, Artificial Sequence
  Description of Artificial Sequence: Synthetic oligonucleotide
  Antisense strand to SEQ ID NO: 1622481
uuaaauacaaauggcacca

SEQ ID NO: 1622483 - RNA, 19 nt, Artificial Sequence
  Description of Artificial Sequence: Synthetic oligonucleotide
  Sense strand starting at position 3911 of SEQ ID NO: 1560761
cuuaauacuucugugugaa

SEQ ID NO: 1622484 - RNA, 19 nt, Artificial Sequence
  Description of Artificial Sequence: Synthetic oligonucleotide
  Antisense strand to SEQ ID NO: 1622483
uucacacagaaguauuaag

SEQ ID NO: 1622485 - RNA, 19 nt, Artificial Sequence
  Description of Artificial Sequence: Synthetic oligonucleotide
  Sense strand starting at position 3912 of SEQ ID NO: 1560761
uuaauacuucugugugaaa

SEQ ID NO: 1622486 - RNA, 19 nt, Artificial Sequence
  Description of Artificial Sequence: Synthetic oligonucleotide
  Antisense strand to SEQ ID NO: 1622485
uuucacacagaaguauuaa

SEQ ID NO: 1622487 - RNA, 19 nt, Artificial Sequence
  Description of Artificial Sequence: Synthetic oligonucleotide
  Sense strand starting at position 18 of SEQ ID NO: 1560762
agaaaugaaccgcagcuau

SEQ ID NO: 1622488 - RNA, 19 nt, Artificial Sequence
  Description of Artificial Sequence: Synthetic oligonucleotide
  Antisense strand to SEQ ID NO: 1622487
auagcugcgguucauuucu

SEQ ID NO: 1622489 - RNA, 19 nt, Artificial Sequence
  Description of Artificial Sequence: Synthetic oligonucleotide
  Sense strand starting at position 38 of SEQ ID NO: 1560762
acaaacucgcauugauuaa

SEQ ID NO: 1622490 - RNA, 19 nt, Artificial Sequence
  Description of Artificial Sequence: Synthetic oligonucleotide
  Antisense strand to SEQ ID NO: 1622489
uuaaucaaugcgaguuugu

SEQ ID NO: 1622491 - RNA, 19 nt, Artificial Sequence
  Description of Artificial Sequence: Synthetic oligonucleotide
  Sense strand starting at position 45 of SEQ ID NO: 1560762
cgcauugauuaaucucaaa

SEQ ID NO: 1622492 - RNA, 19 nt, Artificial Sequence
  Description of Artificial Sequence: Synthetic oligonucleotide
  Antisense strand to SEQ ID NO: 1622491
uuugagauuaaucaaugcg

SEQ ID NO: 1622493 - RNA, 19 nt, Artificial Sequence
  Description of Artificial Sequence: Synthetic oligonucleotide
  Sense strand starting at position 252 of SEQ ID NO: 1560762
cucuuauggguacaugagu

SEQ ID NO: 1622494 - RNA, 19 nt, Artificial Sequence
  Description of Artificial Sequence: Synthetic oligonucleotide
  Antisense strand to SEQ ID NO: 1622493
acucauguacccauaagag

SEQ ID NO: 1622495 - RNA, 19 nt, Artificial Sequence
  Description of Artificial Sequence: Synthetic oligonucleotide
  Sense strand starting at position 260 of SEQ ID NO: 1560762
gguacaugagucugcaaag

SEQ ID NO: 1622496 - RNA, 19 nt, Artificial Sequence
  Description of Artificial Sequence: Synthetic oligonucleotide
  Antisense strand to SEQ ID NO: 1622495
cuuugcagacucauguacc

SEQ ID NO: 1622497 - RNA, 19 nt, Artificial Sequence
  Description of Artificial Sequence: Synthetic oligonucleotide
  Sense strand starting at position 326 of SEQ ID NO: 1560762
uuguguuaugguuacagua

SEQ ID NO: 1622498 - RNA, 19 nt, Artificial Sequence
  Description of Artificial Sequence: Synthetic oligonucleotide
  Antisense strand to SEQ ID NO: 1622497
uacuguaaccauaacacaa

SEQ ID NO: 1622499 - RNA, 19 nt, Artificial Sequence
  Description of Artificial Sequence: Synthetic oligonucleotide
  Sense strand starting at position 334 of SEQ ID NO: 1560762
ugguuacaguaauuccuua

SEQ ID NO: 1622500 - RNA, 19 nt, Artificial Sequence
  Description of Artificial Sequence: Synthetic oligonucleotide
  Antisense strand to SEQ ID NO: 1622499
uaaggaauuacuguaacca

SEQ ID NO: 1622501 - RNA, 19 nt, Artificial Sequence
  Description of Artificial Sequence: Synthetic oligonucleotide
  Sense strand starting at position 339 of SEQ ID NO: 1560762
acaguaauuccuuaaaguu

SEQ ID NO: 1622502 - RNA, 19 nt, Artificial Sequence
  Description of Artificial Sequence: Synthetic oligonucleotide
  Antisense strand to SEQ ID NO: 1622501
aacuuuaaggaauuacugu

SEQ ID NO: 1622503 - RNA, 19 nt, Artificial Sequence
  Description of Artificial Sequence: Synthetic oligonucleotide
  Sense strand starting at position 376 of SEQ ID NO: 1560762
acuccuugauguguauauu

SEQ ID NO: 1622504 - RNA, 19 nt, Artificial Sequence
  Description of Artificial Sequence: Synthetic oligonucleotide
  Antisense strand to SEQ ID NO: 1622503
aauauacacaucaaggagu

SEQ ID NO: 1622505 - RNA, 19 nt, Artificial Sequence
  Description of Artificial Sequence: Synthetic oligonucleotide
  Sense strand starting at position 491 of SEQ ID NO: 1560762
gagguuuggcgugaaccca

SEQ ID NO: 1622506 - RNA, 19 nt, Artificial Sequence
  Description of Artificial Sequence: Synthetic oligonucleotide
  Antisense strand to SEQ ID NO: 1622505
uggguucacgccaaaccuc

SEQ ID NO: 1622507 - RNA, 19 nt, Artificial Sequence
  Description of Artificial Sequence: Synthetic oligonucleotide
  Sense strand starting at position 513 of SEQ ID NO: 1560762
gaugacuguaacgauugua

SEQ ID NO: 1622508 - RNA, 19 nt, Artificial Sequence
  Description of Artificial Sequence: Synthetic oligonucleotide
  Antisense strand to SEQ ID NO: 1622507
uacaaucguuacagucauc

SEQ ID NO: 1622509 - RNA, 19 nt, Artificial Sequence
  Description of Artificial Sequence: Synthetic oligonucleotide
  Sense strand starting at position 623 of SEQ ID NO: 1560762
gacaguagccgauauccau

SEQ ID NO: 1622510 - RNA, 19 nt, Artificial Sequence
  Description of Artificial Sequence: Synthetic oligonucleotide
  Antisense strand to SEQ ID NO: 1622509
auggauaucggcuacuguc

SEQ ID NO: 1622511 - RNA, 19 nt, Artificial Sequence
  Description of Artificial Sequence: Synthetic oligonucleotide
  Sense strand starting at position 630 of SEQ ID NO: 1560762
gccgauauccauuaaguuc

SEQ ID NO: 1622512 - RNA, 19 nt, Artificial Sequence
  Description of Artificial Sequence: Synthetic oligonucleotide
  Antisense strand to SEQ ID NO: 1622511
gaacuuaauggauaucggc

SEQ ID NO: 1622513 - RNA, 19 nt, Artificial Sequence
  Description of Artificial Sequence: Synthetic oligonucleotide
  Sense strand starting at position 1347 of SEQ ID NO: 1560762
gugagaccguaucuaauaa

SEQ ID NO: 1622514 - RNA, 19 nt, Artificial Sequence
  Description of Artificial Sequence: Synthetic oligonucleotide
  Antisense strand to SEQ ID NO: 1622513
uuauuagauacggucucac

SEQ ID NO: 1622515 - RNA, 19 nt, Artificial Sequence
  Description of Artificial Sequence: Synthetic oligonucleotide
  Sense strand starting at position 1396 of SEQ ID NO: 1560762
uuaguuacggcagaaagau

SEQ ID NO: 1622516 - RNA, 19 nt, Artificial Sequence
  Description of Artificial Sequence: Synthetic oligonucleotide
  Antisense strand to SEQ ID NO: 1622515
aucuuucugccguaacuaa

SEQ ID NO: 1622517 - RNA, 19 nt, Artificial Sequence
  Description of Artificial Sequence: Synthetic oligonucleotide
  Sense strand starting at position 1441 of SEQ ID NO: 1560762
gaguuuagcauguaggaag

SEQ ID NO: 1622518 - RNA, 19 nt, Artificial Sequence
  Description of Artificial Sequence: Synthetic oligonucleotide
  Antisense strand to SEQ ID NO: 1622517
cuuccuacaugcuaaacuc

SEQ ID NO: 1622519 - RNA, 19 nt, Artificial Sequence
  Description of Artificial Sequence: Synthetic oligonucleotide
  Sense strand starting at position 1647 of SEQ ID NO: 1560762
gggcguuucgcuucacaua

SEQ ID NO: 1622520 - RNA, 19 nt, Artificial Sequence
  Description of Artificial Sequence: Synthetic oligonucleotide
  Antisense strand to SEQ ID NO: 1622519
uaugugaagcgaaacgccc

SEQ ID NO: 1622521 - RNA, 19 nt, Artificial Sequence
  Description of Artificial Sequence: Synthetic oligonucleotide
  Sense strand starting at position 2248 of SEQ ID NO: 1560762
gcagaaacgucuuugauac

SEQ ID NO: 1622522 - RNA, 19 nt, Artificial Sequence
  Description of Artificial Sequence: Synthetic oligonucleotide
  Antisense strand to SEQ ID NO: 1622521
guaucaaagacguuucugc

SEQ ID NO: 1622523 - RNA, 19 nt, Artificial Sequence
  Description of Artificial Sequence: Synthetic oligonucleotide
  Sense strand starting at position 2249 of SEQ ID NO: 1560762
cagaaacgucuuugauacu

SEQ ID NO: 1622524 - RNA, 19 nt, Artificial Sequence
  Description of Artificial Sequence: Synthetic oligonucleotide
  Antisense strand to SEQ ID NO: 1622523
aguaucaaagacguuucug

SEQ ID NO: 1622525 - RNA, 19 nt, Artificial Sequence
  Description of Artificial Sequence: Synthetic oligonucleotide
  Sense strand starting at position 2260 of SEQ ID NO: 1560762
uugauacuguaauuccaga

SEQ ID NO: 1622526 - RNA, 19 nt, Artificial Sequence
  Description of Artificial Sequence: Synthetic oligonucleotide
  Antisense strand to SEQ ID NO: 1622525
ucuggaauuacaguaucaa

SEQ ID NO: 1622527 - RNA, 19 nt, Artificial Sequence
  Description of Artificial Sequence: Synthetic oligonucleotide
  Sense strand starting at position 2265 of SEQ ID NO: 1560762
acuguaauuccagaaugug

SEQ ID NO: 1622528 - RNA, 19 nt, Artificial Sequence
  Description of Artificial Sequence: Synthetic oligonucleotide
  Antisense strand to SEQ ID NO: 1622527
cacauucuggaauuacagu

SEQ ID NO: 1622529 - RNA, 19 nt, Artificial Sequence
  Description of Artificial Sequence: Synthetic oligonucleotide
  Sense strand starting at position 2268 of SEQ ID NO: 1560762
guaauuccagaaugugauu

SEQ ID NO: 1622530 - RNA, 19 nt, Artificial Sequence
  Description of Artificial Sequence: Synthetic oligonucleotide
  Antisense strand to SEQ ID NO: 1622529
aaucacauucuggaauuac

SEQ ID NO: 1622531 - RNA, 19 nt, Artificial Sequence
  Description of Artificial Sequence: Synthetic oligonucleotide
  Sense strand starting at position 2271 of SEQ ID NO: 1560762
auuccagaaugugauuuaa

SEQ ID NO: 1622532 - RNA, 19 nt, Artificial Sequence
  Description of Artificial Sequence: Synthetic oligonucleotide
  Antisense strand to SEQ ID NO: 1622531
uuaaaucacauucuggaau

SEQ ID NO: 1622533 - RNA, 19 nt, Artificial Sequence
  Description of Artificial Sequence: Synthetic oligonucleotide
  Sense strand starting at position 2328 of SEQ ID NO: 1560762
guauauuagcugcagagag

SEQ ID NO: 1622534 - RNA, 19 nt, Artificial Sequence
  Description of Artificial Sequence: Synthetic oligonucleotide
  Antisense strand to SEQ ID NO: 1622533
cucucugcagcuaauauac

SEQ ID NO: 1622535 - RNA, 19 nt, Artificial Sequence
  Description of Artificial Sequence: Synthetic oligonucleotide
  Sense strand starting at position 2330 of SEQ ID NO: 1560762
auauuagcugcagagagau

SEQ ID NO: 1622536 - RNA, 19 nt, Artificial Sequence
  Description of Artificial Sequence: Synthetic oligonucleotide
  Antisense strand to SEQ ID NO: 1622535
aucucucugcagcuaauau

SEQ ID NO: 1622537 - RNA, 19 nt, Artificial Sequence
  Description of Artificial Sequence: Synthetic oligonucleotide
  Sense strand starting at position 2342 of SEQ ID NO: 1560762
gagagauguguugguacau

SEQ ID NO: 1622538 - RNA, 19 nt, Artificial Sequence
  Description of Artificial Sequence: Synthetic oligonucleotide
  Antisense strand to SEQ ID NO: 1622537
auguaccaacacaucucuc

SEQ ID NO: 1622539 - RNA, 19 nt, Artificial Sequence
  Description of Artificial Sequence: Synthetic oligonucleotide
  Sense strand starting at position 2343 of SEQ ID NO: 1560762
agagauguguugguacaug

SEQ ID NO: 1622540 - RNA, 19 nt, Artificial Sequence
  Description of Artificial Sequence: Synthetic oligonucleotide
  Antisense strand to SEQ ID NO: 1622539
cauguaccaacacaucucu

SEQ ID NO: 1622541 - RNA, 19 nt, Artificial Sequence
  Description of Artificial Sequence: Synthetic oligonucleotide
  Sense strand starting at position 2361 of SEQ ID NO: 1560762
guauacguaucauuaaauc

SEQ ID NO: 1622542 - RNA, 19 nt, Artificial Sequence
  Description of Artificial Sequence: Synthetic oligonucleotide
  Antisense strand to SEQ ID NO: 1622541
gauuuaaugauacguauac

SEQ ID NO: 1622543 - RNA, 19 nt, Artificial Sequence
  Description of Artificial Sequence: Synthetic oligonucleotide
  Sense strand starting at position 2501 of SEQ ID NO: 1560762
uucuuaauaccugggagau

SEQ ID NO: 1622544 - RNA, 19 nt, Artificial Sequence
  Description of Artificial Sequence: Synthetic oligonucleotide
  Antisense strand to SEQ ID NO: 1622543
aucucccagguauuaagaa

SEQ ID NO: 1622545 - RNA, 19 nt, Artificial Sequence
  Description of Artificial Sequence: Synthetic oligonucleotide
  Sense strand starting at position 2549 of SEQ ID NO: 1560762
cgaguuuaccuguauaacc

SEQ ID NO: 1622546 - RNA, 19 nt, Artificial Sequence
  Description of Artificial Sequence: Synthetic oligonucleotide
  Antisense strand to SEQ ID NO: 1622545
gguuauacagguaaacucg

SEQ ID NO: 1622547 - RNA, 19 nt, Artificial Sequence
  Description of Artificial Sequence: Synthetic oligonucleotide
  Sense strand starting at position 2558 of SEQ ID NO: 1560762
cuguauaaccaguguauau

SEQ ID NO: 1622548 - RNA, 19 nt, Artificial Sequence
  Description of Artificial Sequence: Synthetic oligonucleotide
  Antisense strand to SEQ ID NO: 1622547
auauacacugguuauacag

SEQ ID NO: 1622549 - RNA, 19 nt, Artificial Sequence
  Description of Artificial Sequence: Synthetic oligonucleotide
  Sense strand starting at position 2560 of SEQ ID NO: 1560762
guauaaccaguguauaugu

SEQ ID NO: 1622550 - RNA, 19 nt, Artificial Sequence
  Description of Artificial Sequence: Synthetic oligonucleotide
  Antisense strand to SEQ ID NO: 1622549
acauauacacugguuauac

SEQ ID NO: 1622551 - RNA, 19 nt, Artificial Sequence
  Description of Artificial Sequence: Synthetic oligonucleotide
  Sense strand starting at position 2684 of SEQ ID NO: 1560762
agguguaacuugguaucca

SEQ ID NO: 1622552 - RNA, 19 nt, Artificial Sequence
  Description of Artificial Sequence: Synthetic oligonucleotide
  Antisense strand to SEQ ID NO: 1622551
uggauaccaaguuacaccu

SEQ ID NO: 1622553 - RNA, 19 nt, Artificial Sequence
  Description of Artificial Sequence: Synthetic oligonucleotide
  Sense strand starting at position 2692 of SEQ ID NO: 1560762
cuugguauccauuagccaa

SEQ ID NO: 1622554 - RNA, 19 nt, Artificial Sequence
  Description of Artificial Sequence: Synthetic oligonucleotide
  Antisense strand to SEQ ID NO: 1622553
uuggcuaauggauaccaag

SEQ ID NO: 1622555 - RNA, 19 nt, Artificial Sequence
  Description of Artificial Sequence: Synthetic oligonucleotide
  Sense strand starting at position 2808 of SEQ ID NO: 1560762
uuuacuguuaaggguugaa

SEQ ID NO: 1622556 - RNA, 19 nt, Artificial Sequence
  Description of Artificial Sequence: Synthetic oligonucleotide
  Antisense strand to SEQ ID NO: 1622555
uucaacccuuaacaguaaa

SEQ ID NO: 1622557 - RNA, 19 nt, Artificial Sequence
  Description of Artificial Sequence: Synthetic oligonucleotide
  Sense strand starting at position 2873 of SEQ ID NO: 1560762
cccuuuauagggugacaaa

SEQ ID NO: 1622558 - RNA, 19 nt, Artificial Sequence
  Description of Artificial Sequence: Synthetic oligonucleotide
  Antisense strand to SEQ ID NO: 1622557
uuugucacccuauaaaggg

SEQ ID NO: 1622559 - RNA, 19 nt, Artificial Sequence
  Description of Artificial Sequence: Synthetic oligonucleotide
  Sense strand starting at position 2923 of SEQ ID NO: 1560762
cgaggucauacuggaguga

SEQ ID NO: 1622560 - RNA, 19 nt, Artificial Sequence
  Description of Artificial Sequence: Synthetic oligonucleotide
  Antisense strand to SEQ ID NO: 1622559
ucacuccaguaugaccucg

SEQ ID NO: 1622561 - RNA, 19 nt, Artificial Sequence
  Description of Artificial Sequence: Synthetic oligonucleotide
  Sense strand starting at position 3571 of SEQ ID NO: 1560762
agcagaauggcaugugaca

SEQ ID NO: 1622562 - RNA, 19 nt, Artificial Sequence
  Description of Artificial Sequence: Synthetic oligonucleotide
  Antisense strand to SEQ ID NO: 1622561
ugucacaugccauucugcu

SEQ ID NO: 1622563 - RNA, 19 nt, Artificial Sequence
  Description of Artificial Sequence: Synthetic oligonucleotide
  Sense strand starting at position 3779 of SEQ ID NO: 1560762
guuugugguacguugucau

SEQ ID NO: 1622564 - RNA, 19 nt, Artificial Sequence
  Description of Artificial Sequence: Synthetic oligonucleotide
  Antisense strand to SEQ ID NO: 1622563
augacaacguaccacaaac

SEQ ID NO: 1622565 - RNA, 19 nt, Artificial Sequence
  Description of Artificial Sequence: Synthetic oligonucleotide
  Sense strand starting at position 3810 of SEQ ID NO: 1560762
aagcuaguacgcuauuaaa

SEQ ID NO: 1622566 - RNA, 19 nt, Artificial Sequence
  Description of Artificial Sequence: Synthetic oligonucleotide
  Antisense strand to SEQ ID NO: 1622565
uuuaauagcguacuagcuu

SEQ ID NO: 1622567 - RNA, 19 nt, Artificial Sequence
  Description of Artificial Sequence: Synthetic oligonucleotide
  Sense strand starting at position 1516 of SEQ ID NO: 1560763
acagguccuuccuguuuau

SEQ ID NO: 1622568 - RNA, 19 nt, Artificial Sequence
  Description of Artificial Sequence: Synthetic oligonucleotide
  Antisense strand to SEQ ID NO: 1622567
auaaacaggaaggaccugu

SEQ ID NO: 1622569 - RNA, 19 nt, Artificial Sequence
  Description of Artificial Sequence: Synthetic oligonucleotide
  Sense strand starting at position 1525 of SEQ ID NO: 1560763
uccuguuuauccgcucaaa

SEQ ID NO: 1622570 - RNA, 19 nt, Artificial Sequence
  Description of Artificial Sequence: Synthetic oligonucleotide
  Antisense strand to SEQ ID NO: 1622569
uuugagcggauaaacagga

SEQ ID NO: 1622571 - RNA, 19 nt, Artificial Sequence
  Description of Artificial Sequence: Synthetic oligonucleotide
  Sense strand starting at position 1528 of SEQ ID NO: 1560763
uguuuauccgcucaaaggu

SEQ ID NO: 1622572 - RNA, 19 nt, Artificial Sequence
  Description of Artificial Sequence: Synthetic oligonucleotide
  Antisense strand to SEQ ID NO: 1622571
accuuugagcggauaaaca

SEQ ID NO: 1622573 - RNA, 19 nt, Artificial Sequence
  Description of Artificial Sequence: Synthetic oligonucleotide
  Sense strand starting at position 1809 of SEQ ID NO: 1560763
cugagaugcuccuaugcac

SEQ ID NO: 1622574 - RNA, 19 nt, Artificial Sequence
  Description of Artificial Sequence: Synthetic oligonucleotide
  Antisense strand to SEQ ID NO: 1622573
gugcauaggagcaucucag

SEQ ID NO: 1622575 - RNA, 19 nt, Artificial Sequence
  Description of Artificial Sequence: Synthetic oligonucleotide
  Sense strand starting at position 1991 of SEQ ID NO: 1560763
uggcuguucuggguggaga

SEQ ID NO: 1622576 - RNA, 19 nt, Artificial Sequence
  Description of Artificial Sequence: Synthetic oligonucleotide
  Antisense strand to SEQ ID NO: 1622575
ucuccacccagaacagcca

SEQ ID NO: 1622577 - RNA, 19 nt, Artificial Sequence
  Description of Artificial Sequence: Synthetic oligonucleotide
  Sense strand starting at position 1992 of SEQ ID NO: 1560763
ggcuguucuggguggagaa

SEQ ID NO: 1622578 - RNA, 19 nt, Artificial Sequence
  Description of Artificial Sequence: Synthetic oligonucleotide
  Antisense strand to SEQ ID NO: 1622577
uucuccacccagaacagcc

SEQ ID NO: 1622579 - RNA, 19 nt, Artificial Sequence
  Description of Artificial Sequence: Synthetic oligonucleotide
  Sense strand starting at position 2044 of SEQ ID NO: 1560763
gagccacuuggcugaugaa

SEQ ID NO: 1622580 - RNA, 19 nt, Artificial Sequence
  Description of Artificial Sequence: Synthetic oligonucleotide
  Antisense strand to SEQ ID NO: 1622579
uucaucagccaaguggcuc

SEQ ID NO: 1622581 - RNA, 19 nt, Artificial Sequence
  Description of Artificial Sequence: Synthetic oligonucleotide
  Sense strand starting at position 2045 of SEQ ID NO: 1560763
agccacuuggcugaugaaa

SEQ ID NO: 1622582 - RNA, 19 nt, Artificial Sequence
  Description of Artificial Sequence: Synthetic oligonucleotide
  Antisense strand to SEQ ID NO: 1622581
uuucaucagccaaguggcu

SEQ ID NO: 1622583 - RNA, 19 nt, Artificial Sequence
  Description of Artificial Sequence: Synthetic oligonucleotide
  Sense strand starting at position 2086 of SEQ ID NO: 1560763
cuuccuggaucucuugaca

SEQ ID NO: 1622584 - RNA, 19 nt, Artificial Sequence
  Description of Artificial Sequence: Synthetic oligonucleotide
  Antisense strand to SEQ ID NO: 1622583
ugucaagagauccaggaag

SEQ ID NO: 1622585 - RNA, 19 nt, Artificial Sequence
  Description of Artificial Sequence: Synthetic oligonucleotide
  Sense strand starting at position 2161 of SEQ ID NO: 1560763
gguagaguguauuaucaaa

SEQ ID NO: 1622586 - RNA, 19 nt, Artificial Sequence
  Description of Artificial Sequence: Synthetic oligonucleotide
  Antisense strand to SEQ ID NO: 1622585
uuugauaauacacucuacc

SEQ ID NO: 1622587 - RNA, 19 nt, Artificial Sequence
  Description of Artificial Sequence: Synthetic oligonucleotide
  Sense strand starting at position 2189 of SEQ ID NO: 1560763
gcgccucuuccagggagaa

SEQ ID NO: 1622588 - RNA, 19 nt, Artificial Sequence
  Description of Artificial Sequence: Synthetic oligonucleotide
  Antisense strand to SEQ ID NO: 1622587
uucucccuggaagaggcgc

SEQ ID NO: 1622589 - RNA, 19 nt, Artificial Sequence
  Description of Artificial Sequence: Synthetic oligonucleotide
  Sense strand starting at position 2190 of SEQ ID NO: 1560763
cgccucuuccagggagaau

SEQ ID NO: 1622590 - RNA, 19 nt, Artificial Sequence
  Description of Artificial Sequence: Synthetic oligonucleotide
  Antisense strand to SEQ ID NO: 1622589
auucucccuggaagaggcg

SEQ ID NO: 1622591 - RNA, 19 nt, Artificial Sequence
  Description of Artificial Sequence: Synthetic oligonucleotide
  Sense strand starting at position 2191 of SEQ ID NO: 1560763
gccucuuccagggagaauu

SEQ ID NO: 1622592 - RNA, 19 nt, Artificial Sequence
  Description of Artificial Sequence: Synthetic oligonucleotide
  Antisense strand to SEQ ID NO: 1622591
aauucucccuggaagaggc

SEQ ID NO: 1622593 - RNA, 19 nt, Artificial Sequence
  Description of Artificial Sequence: Synthetic oligonucleotide
  Sense strand starting at position 2545 of SEQ ID NO: 1560763
agaguucacuggcgugauc

SEQ ID NO: 1622594 - RNA, 19 nt, Artificial Sequence
  Description of Artificial Sequence: Synthetic oligonucleotide
  Antisense strand to SEQ ID NO: 1622593
gaucacgccagugaacucu

SEQ ID NO: 1622595 - RNA, 19 nt, Artificial Sequence
  Description of Artificial Sequence: Synthetic oligonucleotide
  Sense strand starting at position 2820 of SEQ ID NO: 1560763
ucacguaggucugcuauuu

SEQ ID NO: 1622596 - RNA, 19 nt, Artificial Sequence
  Description of Artificial Sequence: Synthetic oligonucleotide
  Antisense strand to SEQ ID NO: 1622595
aaauagcagaccuacguga

SEQ ID NO: 1622597 - RNA, 19 nt, Artificial Sequence
  Description of Artificial Sequence: Synthetic oligonucleotide
  Sense strand starting at position 2843 of SEQ ID NO: 1560763
ucuguucucucagucacaa

SEQ ID NO: 1622598 - RNA, 19 nt, Artificial Sequence
  Description of Artificial Sequence: Synthetic oligonucleotide
  Antisense strand to SEQ ID NO: 1622597
uugugacugagagaacaga

SEQ ID NO: 1622599 - RNA, 19 nt, Artificial Sequence
  Description of Artificial Sequence: Synthetic oligonucleotide
  Sense strand starting at position 2847 of SEQ ID NO: 1560763
uucucucagucacaagagu

SEQ ID NO: 1622600 - RNA, 19 nt, Artificial Sequence
  Description of Artificial Sequence: Synthetic oligonucleotide
  Antisense strand to SEQ ID NO: 1622599
acucuugugacugagagaa

SEQ ID NO: 1622601 - RNA, 19 nt, Artificial Sequence
  Description of Artificial Sequence: Synthetic oligonucleotide
  Sense strand starting at position 2928 of SEQ ID NO: 1560763
gccagaaccugugacauuu

SEQ ID NO: 1622602 - RNA, 19 nt, Artificial Sequence
  Description of Artificial Sequence: Synthetic oligonucleotide
  Antisense strand to SEQ ID NO: 1622601
aaaugucacagguucuggc

SEQ ID NO: 1622603 - RNA, 19 nt, Artificial Sequence
  Description of Artificial Sequence: Synthetic oligonucleotide
  Sense strand starting at position 2968 of SEQ ID NO: 1560763
cuuagcauaugugaccaaa

SEQ ID NO: 1622604 - RNA, 19 nt, Artificial Sequence
  Description of Artificial Sequence: Synthetic oligonucleotide
  Antisense strand to SEQ ID NO: 1622603
uuuggucacauaugcuaag

SEQ ID NO: 1622605 - RNA, 19 nt, Artificial Sequence
  Description of Artificial Sequence: Synthetic oligonucleotide
  Sense strand starting at position 2970 of SEQ ID NO: 1560763
uagcauaugugaccaaaug

SEQ ID NO: 1622606 - RNA, 19 nt, Artificial Sequence
  Description of Artificial Sequence: Synthetic oligonucleotide
  Antisense strand to SEQ ID NO: 1622605
cauuuggucacauaugcua

SEQ ID NO: 1622607 - RNA, 19 nt, Artificial Sequence
  Description of Artificial Sequence: Synthetic oligonucleotide
  Sense strand starting at position 3004 of SEQ ID NO: 1560763
gggacauuauccugguuau

SEQ ID NO: 1622608 - RNA, 19 nt, Artificial Sequence
  Description of Artificial Sequence: Synthetic oligonucleotide
  Antisense strand to SEQ ID NO: 1622607
auaaccaggauaauguccc

SEQ ID NO: 1622609 - RNA, 19 nt, Artificial Sequence
  Description of Artificial Sequence: Synthetic oligonucleotide
  Sense strand starting at position 3005 of SEQ ID NO: 1560763
ggacauuauccugguuauc

SEQ ID NO: 1622610 - RNA, 19 nt, Artificial Sequence
  Description of Artificial Sequence: Synthetic oligonucleotide
  Antisense strand to SEQ ID NO: 1622609
gauaaccaggauaaugucc

SEQ ID NO: 1622611 - RNA, 19 nt, Artificial Sequence
  Description of Artificial Sequence: Synthetic oligonucleotide
  Sense strand starting at position 3007 of SEQ ID NO: 1560763
acauuauccugguuaucug

SEQ ID NO: 1622612 - RNA, 19 nt, Artificial Sequence
  Description of Artificial Sequence: Synthetic oligonucleotide
  Antisense strand to SEQ ID NO: 1622611
cagauaaccaggauaaugu

SEQ ID NO: 1622613 - RNA, 19 nt, Artificial Sequence
  Description of Artificial Sequence: Synthetic oligonucleotide
  Sense strand starting at position 3014 of SEQ ID NO: 1560763
ccugguuaucugggcagga

SEQ ID NO: 1622614 - RNA, 19 nt, Artificial Sequence
  Description of Artificial Sequence: Synthetic oligonucleotide
  Antisense strand to SEQ ID NO: 1622613
uccugcccagauaaccagg

SEQ ID NO: 1622615 - RNA, 19 nt, Artificial Sequence
  Description of Artificial Sequence: Synthetic oligonucleotide
  Sense strand starting at position 3347 of SEQ ID NO: 1560763
ccacaagagucuuuauaag

SEQ ID NO: 1622616 - RNA, 19 nt, Artificial Sequence
  Description of Artificial Sequence: Synthetic oligonucleotide
  Antisense strand to SEQ ID NO: 1622615
cuuauaaagacucuugugg

SEQ ID NO: 1622617 - RNA, 19 nt, Artificial Sequence
  Description of Artificial Sequence: Synthetic oligonucleotide
  Sense strand starting at position 3376 of SEQ ID NO: 1560763
gaggguuaguguaagagga

SEQ ID NO: 1622618 - RNA, 19 nt, Artificial Sequence
  Description of Artificial Sequence: Synthetic oligonucleotide
  Antisense strand to SEQ ID NO: 1622617
uccucuuacacuaacccuc

SEQ ID NO: 1622619 - RNA, 19 nt, Artificial Sequence
  Description of Artificial Sequence: Synthetic oligonucleotide
  Sense strand starting at position 3380 of SEQ ID NO: 1560763
guuaguguaagaggaagau

SEQ ID NO: 1622620 - RNA, 19 nt, Artificial Sequence
  Description of Artificial Sequence: Synthetic oligonucleotide
  Antisense strand to SEQ ID NO: 1622619
aucuuccucuuacacuaac

SEQ ID NO: 1622621 - RNA, 19 nt, Artificial Sequence
  Description of Artificial Sequence: Synthetic oligonucleotide
  Sense strand starting at position 3395 of SEQ ID NO: 1560763
agaugugacugggugcaau

SEQ ID NO: 1622622 - RNA, 19 nt, Artificial Sequence
  Description of Artificial Sequence: Synthetic oligonucleotide
  Antisense strand to SEQ ID NO: 1622621
auugcacccagucacaucu

SEQ ID NO: 1622623 - RNA, 19 nt, Artificial Sequence
  Description of Artificial Sequence: Synthetic oligonucleotide
  Sense strand starting at position 3521 of SEQ ID NO: 1560763
aaauauguguuagcagaau

SEQ ID NO: 1622624 - RNA, 19 nt, Artificial Sequence
  Description of Artificial Sequence: Synthetic oligonucleotide
  Antisense strand to SEQ ID NO: 1622623
auucugcuaacacauauuu

SEQ ID NO: 1622625 - RNA, 19 nt, Artificial Sequence
  Description of Artificial Sequence: Synthetic oligonucleotide
  Sense strand starting at position 3532 of SEQ ID NO: 1560763
agcagaauuuaugaauucu

SEQ ID NO: 1622626 - RNA, 19 nt, Artificial Sequence
  Description of Artificial Sequence: Synthetic oligonucleotide
  Antisense strand to SEQ ID NO: 1622625
agaauucauaaauucugcu

SEQ ID NO: 1622627 - RNA, 19 nt, Artificial Sequence
  Description of Artificial Sequence: Synthetic oligonucleotide
  Sense strand starting at position 3538 of SEQ ID NO: 1560763
auuuaugaauucugaugga

SEQ ID NO: 1622628 - RNA, 19 nt, Artificial Sequence
  Description of Artificial Sequence: Synthetic oligonucleotide
  Antisense strand to SEQ ID NO: 1622627
uccaucagaauucauaaau

SEQ ID NO: 1622629 - RNA, 19 nt, Artificial Sequence
  Description of Artificial Sequence: Synthetic oligonucleotide
  Sense strand starting at position 3541 of SEQ ID NO: 1560763
uaugaauucugauggaaga

SEQ ID NO: 1622630 - RNA, 19 nt, Artificial Sequence
  Description of Artificial Sequence: Synthetic oligonucleotide
  Antisense strand to SEQ ID NO: 1622629
ucuuccaucagaauucaua

SEQ ID NO: 1622631 - RNA, 19 nt, Artificial Sequence
  Description of Artificial Sequence: Synthetic oligonucleotide
  Sense strand starting at position 14 of SEQ ID NO: 1560764
agugaagagucaguacaaa

SEQ ID NO: 1622632 - RNA, 19 nt, Artificial Sequence
  Description of Artificial Sequence: Synthetic oligonucleotide
  Antisense strand to SEQ ID NO: 1622631
uuuguacugacucuucacu

SEQ ID NO: 1622633 - RNA, 19 nt, Artificial Sequence
  Description of Artificial Sequence: Synthetic oligonucleotide
  Sense strand starting at position 47 of SEQ ID NO: 1560764
uaagauaaaugccugguuu

SEQ ID NO: 1622634 - RNA, 19 nt, Artificial Sequence
  Description of Artificial Sequence: Synthetic oligonucleotide
  Antisense strand to SEQ ID NO: 1622633
aaaccaggcauuuaucuua

SEQ ID NO: 1622635 - RNA, 19 nt, Artificial Sequence
  Description of Artificial Sequence: Synthetic oligonucleotide
  Sense strand starting at position 48 of SEQ ID NO: 1560764
aagauaaaugccugguuua

SEQ ID NO: 1622636 - RNA, 19 nt, Artificial Sequence
  Description of Artificial Sequence: Synthetic oligonucleotide
  Antisense strand to SEQ ID NO: 1622635
uaaaccaggcauuuaucuu

SEQ ID NO: 1622637 - RNA, 19 nt, Artificial Sequence
  Description of Artificial Sequence: Synthetic oligonucleotide
  Sense strand starting at position 49 of SEQ ID NO: 1560764
agauaaaugccugguuuau

SEQ ID NO: 1622638 - RNA, 19 nt, Artificial Sequence
  Description of Artificial Sequence: Synthetic oligonucleotide
  Antisense strand to SEQ ID NO: 1622637
auaaaccaggcauuuaucu

SEQ ID NO: 1622639 - RNA, 19 nt, Artificial Sequence
  Description of Artificial Sequence: Synthetic oligonucleotide
  Sense strand starting at position 51 of SEQ ID NO: 1560764
auaaaugccugguuuauag

SEQ ID NO: 1622640 - RNA, 19 nt, Artificial Sequence
  Description of Artificial Sequence: Synthetic oligonucleotide
  Antisense strand to SEQ ID NO: 1622639
cuauaaaccaggcauuuau

SEQ ID NO: 1622641 - RNA, 19 nt, Artificial Sequence
  Description of Artificial Sequence: Synthetic oligonucleotide
  Sense strand starting at position 59 of SEQ ID NO: 1560764
cugguuuauagccaggcau

SEQ ID NO: 1622642 - RNA, 19 nt, Artificial Sequence
  Description of Artificial Sequence: Synthetic oligonucleotide
  Antisense strand to SEQ ID NO: 1622641
augccuggcuauaaaccag

SEQ ID NO: 1622643 - RNA, 19 nt, Artificial Sequence
  Description of Artificial Sequence: Synthetic oligonucleotide
  Sense strand starting at position 370 of SEQ ID NO: 1560764
aagagucaaugucugguuu

SEQ ID NO: 1622644 - RNA, 19 nt, Artificial Sequence
  Description of Artificial Sequence: Synthetic oligonucleotide
  Antisense strand to SEQ ID NO: 1622643
aaaccagacauugacucuu

SEQ ID NO: 1622645 - RNA, 19 nt, Artificial Sequence
  Description of Artificial Sequence: Synthetic oligonucleotide
  Sense strand starting at position 371 of SEQ ID NO: 1560764
agagucaaugucugguuua

SEQ ID NO: 1622646 - RNA, 19 nt, Artificial Sequence
  Description of Artificial Sequence: Synthetic oligonucleotide
  Antisense strand to SEQ ID NO: 1622645
uaaaccagacauugacucu

SEQ ID NO: 1622647 - RNA, 19 nt, Artificial Sequence
  Description of Artificial Sequence: Synthetic oligonucleotide
  Sense strand starting at position 374 of SEQ ID NO: 1560764
gucaaugucugguuuauaa

SEQ ID NO: 1622648 - RNA, 19 nt, Artificial Sequence
  Description of Artificial Sequence: Synthetic oligonucleotide
  Antisense strand to SEQ ID NO: 1622647
uuauaaaccagacauugac

SEQ ID NO: 1622649 - RNA, 19 nt, Artificial Sequence
  Description of Artificial Sequence: Synthetic oligonucleotide
  Sense strand starting at position 716 of SEQ ID NO: 1560764
augaaacuuuacccugagu

SEQ ID NO: 1622650 - RNA, 19 nt, Artificial Sequence
  Description of Artificial Sequence: Synthetic oligonucleotide
  Antisense strand to SEQ ID NO: 1622649
acucaggguaaaguuucau

SEQ ID NO: 1622651 - RNA, 19 nt, Artificial Sequence
  Description of Artificial Sequence: Synthetic oligonucleotide
  Sense strand starting at position 738 of SEQ ID NO: 1560764
acaugaacuuugcuuguga

SEQ ID NO: 1622652 - RNA, 19 nt, Artificial Sequence
  Description of Artificial Sequence: Synthetic oligonucleotide
  Antisense strand to SEQ ID NO: 1622651
ucacaagcaaaguucaugu

SEQ ID NO: 1622653 - RNA, 19 nt, Artificial Sequence
  Description of Artificial Sequence: Synthetic oligonucleotide
  Sense strand starting at position 739 of SEQ ID NO: 1560764
caugaacuuugcuugugaa

SEQ ID NO: 1622654 - RNA, 19 nt, Artificial Sequence
  Description of Artificial Sequence: Synthetic oligonucleotide
  Antisense strand to SEQ ID NO: 1622653
uucacaagcaaaguucaug

SEQ ID NO: 1622655 - RNA, 19 nt, Artificial Sequence
  Description of Artificial Sequence: Synthetic oligonucleotide
  Sense strand starting at position 740 of SEQ ID NO: 1560764
augaacuuugcuugugaau

SEQ ID NO: 1622656 - RNA, 19 nt, Artificial Sequence
  Description of Artificial Sequence: Synthetic oligonucleotide
  Antisense strand to SEQ ID NO: 1622655
auucacaagcaaaguucau

SEQ ID NO: 1622657 - RNA, 19 nt, Artificial Sequence
  Description of Artificial Sequence: Synthetic oligonucleotide
  Sense strand starting at position 858 of SEQ ID NO: 1560764
cggguagauguuugaggua

SEQ ID NO: 1622658 - RNA, 19 nt, Artificial Sequence
  Description of Artificial Sequence: Synthetic oligonucleotide
  Antisense strand to SEQ ID NO: 1622657
uaccucaaacaucuacccg

SEQ ID NO: 1622659 - RNA, 19 nt, Artificial Sequence
  Description of Artificial Sequence: Synthetic oligonucleotide
  Sense strand starting at position 960 of SEQ ID NO: 1560764
guuguugugguuucuuagu

SEQ ID NO: 1622660 - RNA, 19 nt, Artificial Sequence
  Description of Artificial Sequence: Synthetic oligonucleotide
  Antisense strand to SEQ ID NO: 1622659
acuaagaaaccacaacaac

SEQ ID NO: 1622661 - RNA, 19 nt, Artificial Sequence
  Description of Artificial Sequence: Synthetic oligonucleotide
  Sense strand starting at position 976 of SEQ ID NO: 1560764
aguguuucucuugggcaaa

SEQ ID NO: 1622662 - RNA, 19 nt, Artificial Sequence
  Description of Artificial Sequence: Synthetic oligonucleotide
  Antisense strand to SEQ ID NO: 1622661
uuugcccaagagaaacacu

SEQ ID NO: 1622663 - RNA, 19 nt, Artificial Sequence
  Description of Artificial Sequence: Synthetic oligonucleotide
  Sense strand starting at position 1010 of SEQ ID NO: 1560764
acaugaaaucugugcugca

SEQ ID NO: 1622664 - RNA, 19 nt, Artificial Sequence
  Description of Artificial Sequence: Synthetic oligonucleotide
  Antisense strand to SEQ ID NO: 1622663
ugcagcacagauuucaugu

SEQ ID NO: 1622665 - RNA, 19 nt, Artificial Sequence
  Description of Artificial Sequence: Synthetic oligonucleotide
  Sense strand starting at position 1029 of SEQ ID NO: 1560764
cucaaauuguucccaguac

SEQ ID NO: 1622666 - RNA, 19 nt, Artificial Sequence
  Description of Artificial Sequence: Synthetic oligonucleotide
  Antisense strand to SEQ ID NO: 1622665
guacugggaacaauuugag

SEQ ID NO: 1622667 - RNA, 19 nt, Artificial Sequence
  Description of Artificial Sequence: Synthetic oligonucleotide
  Sense strand starting at position 1033 of SEQ ID NO: 1560764
aauuguucccaguacgaca

SEQ ID NO: 1622668 - RNA, 19 nt, Artificial Sequence
  Description of Artificial Sequence: Synthetic oligonucleotide
  Antisense strand to SEQ ID NO: 1622667
ugucguacugggaacaauu

SEQ ID NO: 1622669 - RNA, 19 nt, Artificial Sequence
  Description of Artificial Sequence: Synthetic oligonucleotide
  Sense strand starting at position 1047 of SEQ ID NO: 1560764
cgacaaucacacugggaca

SEQ ID NO: 1622670 - RNA, 19 nt, Artificial Sequence
  Description of Artificial Sequence: Synthetic oligonucleotide
  Antisense strand to SEQ ID NO: 1622669
ugucccagugugauugucg

SEQ ID NO: 1622671 - RNA, 19 nt, Artificial Sequence
  Description of Artificial Sequence: Synthetic oligonucleotide
  Sense strand starting at position 1060 of SEQ ID NO: 1560764
gggacaaauuugcauguuu

SEQ ID NO: 1622672 - RNA, 19 nt, Artificial Sequence
  Description of Artificial Sequence: Synthetic oligonucleotide
  Antisense strand to SEQ ID NO: 1622671
aaacaugcaaauuuguccc

SEQ ID NO: 1622673 - RNA, 19 nt, Artificial Sequence
  Description of Artificial Sequence: Synthetic oligonucleotide
  Sense strand starting at position 1475 of SEQ ID NO: 1560764
aggcuagagcacuaaaucu

SEQ ID NO: 1622674 - RNA, 19 nt, Artificial Sequence
  Description of Artificial Sequence: Synthetic oligonucleotide
  Antisense strand to SEQ ID NO: 1622673
agauuuagugcucuagccu

SEQ ID NO: 1622675 - RNA, 19 nt, Artificial Sequence
  Description of Artificial Sequence: Synthetic oligonucleotide
  Sense strand starting at position 1524 of SEQ ID NO: 1560764
ugucauagauuaucaagga

SEQ ID NO: 1622676 - RNA, 19 nt, Artificial Sequence
  Description of Artificial Sequence: Synthetic oligonucleotide
  Antisense strand to SEQ ID NO: 1622675
uccuugauaaucuaugaca

SEQ ID NO: 1622677 - RNA, 19 nt, Artificial Sequence
  Description of Artificial Sequence: Synthetic oligonucleotide
  Sense strand starting at position 1525 of SEQ ID NO: 1560764
gucauagauuaucaaggag

SEQ ID NO: 1622678 - RNA, 19 nt, Artificial Sequence
  Description of Artificial Sequence: Synthetic oligonucleotide
  Antisense strand to SEQ ID NO: 1622677
cuccuugauaaucuaugac

SEQ ID NO: 1622679 - RNA, 19 nt, Artificial Sequence
  Description of Artificial Sequence: Synthetic oligonucleotide
  Sense strand starting at position 1877 of SEQ ID NO: 1560764
cuugaauuccuccagcuga

SEQ ID NO: 1622680 - RNA, 19 nt, Artificial Sequence
  Description of Artificial Sequence: Synthetic oligonucleotide
  Antisense strand to SEQ ID NO: 1622679
ucagcuggaggaauucaag

SEQ ID NO: 1622681 - RNA, 19 nt, Artificial Sequence
  Description of Artificial Sequence: Synthetic oligonucleotide
  Sense strand starting at position 2101 of SEQ ID NO: 1560764
gccuacacauuugaguauu

SEQ ID NO: 1622682 - RNA, 19 nt, Artificial Sequence
  Description of Artificial Sequence: Synthetic oligonucleotide
  Antisense strand to SEQ ID NO: 1622681
aauacucaaauguguaggc

SEQ ID NO: 1622683 - RNA, 19 nt, Artificial Sequence
  Description of Artificial Sequence: Synthetic oligonucleotide
  Sense strand starting at position 2141 of SEQ ID NO: 1560764
cuacuuguguuaguacacu

SEQ ID NO: 1622684 - RNA, 19 nt, Artificial Sequence
  Description of Artificial Sequence: Synthetic oligonucleotide
  Antisense strand to SEQ ID NO: 1622683
aguguacuaacacaaguag

SEQ ID NO: 1622685 - RNA, 19 nt, Artificial Sequence
  Description of Artificial Sequence: Synthetic oligonucleotide
  Sense strand starting at position 2500 of SEQ ID NO: 1560764
acucgagaucacuggcuuu

SEQ ID NO: 1622686 - RNA, 19 nt, Artificial Sequence
  Description of Artificial Sequence: Synthetic oligonucleotide
  Antisense strand to SEQ ID NO: 1622685
aaagccagugaucucgagu

SEQ ID NO: 1622687 - RNA, 19 nt, Artificial Sequence
  Description of Artificial Sequence: Synthetic oligonucleotide
  Sense strand starting at position 2575 of SEQ ID NO: 1560764
agugacagcuguccuagaa

SEQ ID NO: 1622688 - RNA, 19 nt, Artificial Sequence
  Description of Artificial Sequence: Synthetic oligonucleotide
  Antisense strand to SEQ ID NO: 1622687
uucuaggacagcugucacu

SEQ ID NO: 1622689 - RNA, 19 nt, Artificial Sequence
  Description of Artificial Sequence: Synthetic oligonucleotide
  Sense strand starting at position 2605 of SEQ ID NO: 1560764
gcaugaugguacuuaccaa

SEQ ID NO: 1622690 - RNA, 19 nt, Artificial Sequence
  Description of Artificial Sequence: Synthetic oligonucleotide
  Antisense strand to SEQ ID NO: 1622689
uugguaaguaccaucaugc

SEQ ID NO: 1622691 - RNA, 19 nt, Artificial Sequence
  Description of Artificial Sequence: Synthetic oligonucleotide
  Sense strand starting at position 2669 of SEQ ID NO: 1560764
gaaguuaauuagucacagu

SEQ ID NO: 1622692 - RNA, 19 nt, Artificial Sequence
  Description of Artificial Sequence: Synthetic oligonucleotide
  Antisense strand to SEQ ID NO: 1622691
acugugacuaauuaacuuc

SEQ ID NO: 1622693 - RNA, 19 nt, Artificial Sequence
  Description of Artificial Sequence: Synthetic oligonucleotide
  Sense strand starting at position 2721 of SEQ ID NO: 1560764
ggaaacuaaucagggagaa

SEQ ID NO: 1622694 - RNA, 19 nt, Artificial Sequence
  Description of Artificial Sequence: Synthetic oligonucleotide
  Antisense strand to SEQ ID NO: 1622693
uucucccugauuaguuucc

SEQ ID NO: 1622695 - RNA, 19 nt, Artificial Sequence
  Description of Artificial Sequence: Synthetic oligonucleotide
  Sense strand starting at position 2797 of SEQ ID NO: 1560764
agcuaauggugauugagac

SEQ ID NO: 1622696 - RNA, 19 nt, Artificial Sequence
  Description of Artificial Sequence: Synthetic oligonucleotide
  Antisense strand to SEQ ID NO: 1622695
gucucaaucaccauuagcu

SEQ ID NO: 1622697 - RNA, 19 nt, Artificial Sequence
  Description of Artificial Sequence: Synthetic oligonucleotide
  Sense strand starting at position 2798 of SEQ ID NO: 1560764
gcuaauggugauugagaca

SEQ ID NO: 1622698 - RNA, 19 nt, Artificial Sequence
  Description of Artificial Sequence: Synthetic oligonucleotide
  Antisense strand to SEQ ID NO: 1622697
ugucucaaucaccauuagc

SEQ ID NO: 1622699 - RNA, 19 nt, Artificial Sequence
  Description of Artificial Sequence: Synthetic oligonucleotide
  Sense strand starting at position 2801 of SEQ ID NO: 1560764
aauggugauugagacagau

SEQ ID NO: 1622700 - RNA, 19 nt, Artificial Sequence
  Description of Artificial Sequence: Synthetic oligonucleotide
  Antisense strand to SEQ ID NO: 1622699
aucugucucaaucaccauu

SEQ ID NO: 1622701 - RNA, 19 nt, Artificial Sequence
  Description of Artificial Sequence: Synthetic oligonucleotide
  Sense strand starting at position 2881 of SEQ ID NO: 1560764
gguaguauugaaggcaaca

SEQ ID NO: 1622702 - RNA, 19 nt, Artificial Sequence
  Description of Artificial Sequence: Synthetic oligonucleotide
  Antisense strand to SEQ ID NO: 1622701
uguugccuucaauacuacc

SEQ ID NO: 1622703 - RNA, 19 nt, Artificial Sequence
  Description of Artificial Sequence: Synthetic oligonucleotide
  Sense strand starting at position 3729 of SEQ ID NO: 1560764
guaugucucuuguuuaaau

SEQ ID NO: 1622704 - RNA, 19 nt, Artificial Sequence
  Description of Artificial Sequence: Synthetic oligonucleotide
  Antisense strand to SEQ ID NO: 1622703
auuuaaacaagagacauac

SEQ ID NO: 1622705 - RNA, 19 nt, Artificial Sequence
  Description of Artificial Sequence: Synthetic oligonucleotide
  Sense strand starting at position 3873 of SEQ ID NO: 1560764
auaugugucucuguuuaag

SEQ ID NO: 1622706 - RNA, 19 nt, Artificial Sequence
  Description of Artificial Sequence: Synthetic oligonucleotide
  Antisense strand to SEQ ID NO: 1622705
cuuaaacagagacacauau

SEQ ID NO: 1622707 - RNA, 19 nt, Artificial Sequence
  Description of Artificial Sequence: Synthetic oligonucleotide
  Sense strand starting at position 3875 of SEQ ID NO: 1560764
augugucucuguuuaagga

SEQ ID NO: 1622708 - RNA, 19 nt, Artificial Sequence
  Description of Artificial Sequence: Synthetic oligonucleotide
  Antisense strand to SEQ ID NO: 1622707
uccuuaaacagagacacau

SEQ ID NO: 1622709 - RNA, 19 nt, Artificial Sequence
  Description of Artificial Sequence: Synthetic oligonucleotide
  Sense strand starting at position 3876 of SEQ ID NO: 1560764
ugugucucuguuuaaggaa

SEQ ID NO: 1622710 - RNA, 19 nt, Artificial Sequence
  Description of Artificial Sequence: Synthetic oligonucleotide
  Antisense strand to SEQ ID NO: 1622709
uuccuuaaacagagacaca

SEQ ID NO: 1622711 - RNA, 19 nt, Artificial Sequence
  Description of Artificial Sequence: Synthetic oligonucleotide
  Sense strand starting at position 233 of SEQ ID NO: 1560765
ucuagugagucucugcaaa

SEQ ID NO: 1622712 - RNA, 19 nt, Artificial Sequence
  Description of Artificial Sequence: Synthetic oligonucleotide
  Antisense strand to SEQ ID NO: 1622711
uuugcagagacucacuaga

SEQ ID NO: 1622713 - RNA, 19 nt, Artificial Sequence
  Description of Artificial Sequence: Synthetic oligonucleotide
  Sense strand starting at position 235 of SEQ ID NO: 1560765
uagugagucucugcaaaca

SEQ ID NO: 1622714 - RNA, 19 nt, Artificial Sequence
  Description of Artificial Sequence: Synthetic oligonucleotide
  Antisense strand to SEQ ID NO: 1622713
uguuugcagagacucacua

SEQ ID NO: 1622715 - RNA, 19 nt, Artificial Sequence
  Description of Artificial Sequence: Synthetic oligonucleotide
  Sense strand starting at position 246 of SEQ ID NO: 1560765
ugcaaacagugguaauaau

SEQ ID NO: 1622716 - RNA, 19 nt, Artificial Sequence
  Description of Artificial Sequence: Synthetic oligonucleotide
  Antisense strand to SEQ ID NO: 1622715
auuauuaccacuguuugca

SEQ ID NO: 1622717 - RNA, 19 nt, Artificial Sequence
  Description of Artificial Sequence: Synthetic oligonucleotide
  Sense strand starting at position 1152 of SEQ ID NO: 1560765
ucgagagucccagauaacu

SEQ ID NO: 1622718 - RNA, 19 nt, Artificial Sequence
  Description of Artificial Sequence: Synthetic oligonucleotide
  Antisense strand to SEQ ID NO: 1622717
aguuaucugggacucucga

SEQ ID NO: 1622719 - RNA, 19 nt, Artificial Sequence
  Description of Artificial Sequence: Synthetic oligonucleotide
  Sense strand starting at position 1633 of SEQ ID NO: 1560765
gcgugagccaccuacuaaa

SEQ ID NO: 1622720 - RNA, 19 nt, Artificial Sequence
  Description of Artificial Sequence: Synthetic oligonucleotide
  Antisense strand to SEQ ID NO: 1622719
uuuaguagguggcucacgc

SEQ ID NO: 1622721 - RNA, 19 nt, Artificial Sequence
  Description of Artificial Sequence: Synthetic oligonucleotide
  Sense strand starting at position 2033 of SEQ ID NO: 1560765
uccuguauccaccggaauu

SEQ ID NO: 1622722 - RNA, 19 nt, Artificial Sequence
  Description of Artificial Sequence: Synthetic oligonucleotide
  Antisense strand to SEQ ID NO: 1622721
aauuccgguggauacagga

SEQ ID NO: 1622723 - RNA, 19 nt, Artificial Sequence
  Description of Artificial Sequence: Synthetic oligonucleotide
  Sense strand starting at position 2045 of SEQ ID NO: 1560765
cggaauuacugagaggucu

SEQ ID NO: 1622724 - RNA, 19 nt, Artificial Sequence
  Description of Artificial Sequence: Synthetic oligonucleotide
  Antisense strand to SEQ ID NO: 1622723
agaccucucaguaauuccg

SEQ ID NO: 1622725 - RNA, 19 nt, Artificial Sequence
  Description of Artificial Sequence: Synthetic oligonucleotide
  Sense strand starting at position 2135 of SEQ ID NO: 1560765
uugacugccuguuaaacuu

SEQ ID NO: 1622726 - RNA, 19 nt, Artificial Sequence
  Description of Artificial Sequence: Synthetic oligonucleotide
  Antisense strand to SEQ ID NO: 1622725
aaguuuaacaggcagucaa

SEQ ID NO: 1622727 - RNA, 19 nt, Artificial Sequence
  Description of Artificial Sequence: Synthetic oligonucleotide
  Sense strand starting at position 2143 of SEQ ID NO: 1560765
cuguuaaacuuaccuaugu

SEQ ID NO: 1622728 - RNA, 19 nt, Artificial Sequence
  Description of Artificial Sequence: Synthetic oligonucleotide
  Antisense strand to SEQ ID NO: 1622727
acauagguaaguuuaacag

SEQ ID NO: 1622729 - RNA, 19 nt, Artificial Sequence
  Description of Artificial Sequence: Synthetic oligonucleotide
  Sense strand starting at position 2187 of SEQ ID NO: 1560765
ccuagagauucugcuugau

SEQ ID NO: 1622730 - RNA, 19 nt, Artificial Sequence
  Description of Artificial Sequence: Synthetic oligonucleotide
  Antisense strand to SEQ ID NO: 1622729
aucaagcagaaucucuagg

SEQ ID NO: 1622731 - RNA, 19 nt, Artificial Sequence
  Description of Artificial Sequence: Synthetic oligonucleotide
  Sense strand starting at position 2189 of SEQ ID NO: 1560765
uagagauucugcuugauug

SEQ ID NO: 1622732 - RNA, 19 nt, Artificial Sequence
  Description of Artificial Sequence: Synthetic oligonucleotide
  Antisense strand to SEQ ID NO: 1622731
caaucaagcagaaucucua

SEQ ID NO: 1622733 - RNA, 19 nt, Artificial Sequence
  Description of Artificial Sequence: Synthetic oligonucleotide
  Sense strand starting at position 2191 of SEQ ID NO: 1560765
gagauucugcuugauuggu

SEQ ID NO: 1622734 - RNA, 19 nt, Artificial Sequence
  Description of Artificial Sequence: Synthetic oligonucleotide
  Antisense strand to SEQ ID NO: 1622733
accaaucaagcagaaucuc

SEQ ID NO: 1622735 - RNA, 19 nt, Artificial Sequence
  Description of Artificial Sequence: Synthetic oligonucleotide
  Sense strand starting at position 2193 of SEQ ID NO: 1560765
gauucugcuugauugguua

SEQ ID NO: 1622736 - RNA, 19 nt, Artificial Sequence
  Description of Artificial Sequence: Synthetic oligonucleotide
  Antisense strand to SEQ ID NO: 1622735
uaaccaaucaagcagaauc

SEQ ID NO: 1622737 - RNA, 19 nt, Artificial Sequence
  Description of Artificial Sequence: Synthetic oligonucleotide
  Sense strand starting at position 2197 of SEQ ID NO: 1560765
cugcuugauugguuacacu

SEQ ID NO: 1622738 - RNA, 19 nt, Artificial Sequence
  Description of Artificial Sequence: Synthetic oligonucleotide
  Antisense strand to SEQ ID NO: 1622737
aguguaaccaaucaagcag

SEQ ID NO: 1622739 - RNA, 19 nt, Artificial Sequence
  Description of Artificial Sequence: Synthetic oligonucleotide
  Sense strand starting at position 2232 of SEQ ID NO: 1560765
uggaguucuuucgagaguc

SEQ ID NO: 1622740 - RNA, 19 nt, Artificial Sequence
  Description of Artificial Sequence: Synthetic oligonucleotide
  Antisense strand to SEQ ID NO: 1622739
gacucucgaaagaacucca

SEQ ID NO: 1622741 - RNA, 19 nt, Artificial Sequence
  Description of Artificial Sequence: Synthetic oligonucleotide
  Sense strand starting at position 2240 of SEQ ID NO: 1560765
uuucgagagucccagauaa

SEQ ID NO: 1622742 - RNA, 19 nt, Artificial Sequence
  Description of Artificial Sequence: Synthetic oligonucleotide
  Antisense strand to SEQ ID NO: 1622741
uuaucugggacucucgaaa

SEQ ID NO: 1622743 - RNA, 19 nt, Artificial Sequence
  Description of Artificial Sequence: Synthetic oligonucleotide
  Sense strand starting at position 2242 of SEQ ID NO: 1560765
ucgagagucccagauaauu

SEQ ID NO: 1622744 - RNA, 19 nt, Artificial Sequence
  Description of Artificial Sequence: Synthetic oligonucleotide
  Antisense strand to SEQ ID NO: 1622743
aauuaucugggacucucga

SEQ ID NO: 1622745 - RNA, 19 nt, Artificial Sequence
  Description of Artificial Sequence: Synthetic oligonucleotide
  Sense strand starting at position 2275 of SEQ ID NO: 1560765
ggcugagaaucaccgcuua

SEQ ID NO: 1622746 - RNA, 19 nt, Artificial Sequence
  Description of Artificial Sequence: Synthetic oligonucleotide
  Antisense strand to SEQ ID NO: 1622745
uaagcggugauucucagcc

SEQ ID NO: 1622747 - RNA, 19 nt, Artificial Sequence
  Description of Artificial Sequence: Synthetic oligonucleotide
  Sense strand starting at position 2293 of SEQ ID NO: 1560765
agaagccucagcugugauu

SEQ ID NO: 1622748 - RNA, 19 nt, Artificial Sequence
  Description of Artificial Sequence: Synthetic oligonucleotide
  Antisense strand to SEQ ID NO: 1622747
aaucacagcugaggcuucu

SEQ ID NO: 1622749 - RNA, 19 nt, Artificial Sequence
  Description of Artificial Sequence: Synthetic oligonucleotide
  Sense strand starting at position 2370 of SEQ ID NO: 1560765
gugaaauaucaaugacacg

SEQ ID NO: 1622750 - RNA, 19 nt, Artificial Sequence
  Description of Artificial Sequence: Synthetic oligonucleotide
  Antisense strand to SEQ ID NO: 1622749
cgugucauugauauuucac

SEQ ID NO: 1622751 - RNA, 19 nt, Artificial Sequence
  Description of Artificial Sequence: Synthetic oligonucleotide
  Sense strand starting at position 2389 of SEQ ID NO: 1560765
ucaacuaugagacgcauga

SEQ ID NO: 1622752 - RNA, 19 nt, Artificial Sequence
  Description of Artificial Sequence: Synthetic oligonucleotide
  Antisense strand to SEQ ID NO: 1622751
ucaugcgucucauaguuga

SEQ ID NO: 1622753 - RNA, 19 nt, Artificial Sequence
  Description of Artificial Sequence: Synthetic oligonucleotide
  Sense strand starting at position 2738 of SEQ ID NO: 1560765
ccuggcuggcaguauuaau

SEQ ID NO: 1622754 - RNA, 19 nt, Artificial Sequence
  Description of Artificial Sequence: Synthetic oligonucleotide
  Antisense strand to SEQ ID NO: 1622753
auuaauacugccagccagg

SEQ ID NO: 1622755 - RNA, 19 nt, Artificial Sequence
  Description of Artificial Sequence: Synthetic oligonucleotide
  Sense strand starting at position 3426 of SEQ ID NO: 1560765
ucauguuucuuuguuuguu

SEQ ID NO: 1622756 - RNA, 19 nt, Artificial Sequence
  Description of Artificial Sequence: Synthetic oligonucleotide
  Antisense strand to SEQ ID NO: 1622755
aacaaacaaagaaacauga

SEQ ID NO: 1622757 - RNA, 19 nt, Artificial Sequence
  Description of Artificial Sequence: Synthetic oligonucleotide
  Sense strand starting at position 52 of SEQ ID NO: 1560766
gggugaucacuccagucca

SEQ ID NO: 1622758 - RNA, 19 nt, Artificial Sequence
  Description of Artificial Sequence: Synthetic oligonucleotide
  Antisense strand to SEQ ID NO: 1622757
uggacuggagugaucaccc

SEQ ID NO: 1622759 - RNA, 19 nt, Artificial Sequence
  Description of Artificial Sequence: Synthetic oligonucleotide
  Sense strand starting at position 227 of SEQ ID NO: 1560766
agugaaacccuauaucgac

SEQ ID NO: 1622760 - RNA, 19 nt, Artificial Sequence
  Description of Artificial Sequence: Synthetic oligonucleotide
  Antisense strand to SEQ ID NO: 1622759
gucgauauaggguuucacu

SEQ ID NO: 1622761 - RNA, 19 nt, Artificial Sequence
  Description of Artificial Sequence: Synthetic oligonucleotide
  Sense strand starting at position 470 of SEQ ID NO: 1560766
uuuauaugauagcugugaa

SEQ ID NO: 1622762 - RNA, 19 nt, Artificial Sequence
  Description of Artificial Sequence: Synthetic oligonucleotide
  Antisense strand to SEQ ID NO: 1622761
uucacagcuaucauauaaa

SEQ ID NO: 1622763 - RNA, 19 nt, Artificial Sequence
  Description of Artificial Sequence: Synthetic oligonucleotide
  Sense strand starting at position 473 of SEQ ID NO: 1560766
auaugauagcugugaauag

SEQ ID NO: 1622764 - RNA, 19 nt, Artificial Sequence
  Description of Artificial Sequence: Synthetic oligonucleotide
  Antisense strand to SEQ ID NO: 1622763
cuauucacagcuaucauau

SEQ ID NO: 1622765 - RNA, 19 nt, Artificial Sequence
  Description of Artificial Sequence: Synthetic oligonucleotide
  Sense strand starting at position 482 of SEQ ID NO: 1560766
cugugaauagcgugagaau

SEQ ID NO: 1622766 - RNA, 19 nt, Artificial Sequence
  Description of Artificial Sequence: Synthetic oligonucleotide
  Antisense strand to SEQ ID NO: 1622765
auucucacgcuauucacag

SEQ ID NO: 1622767 - RNA, 19 nt, Artificial Sequence
  Description of Artificial Sequence: Synthetic oligonucleotide
  Sense strand starting at position 483 of SEQ ID NO: 1560766
ugugaauagcgugagaaug

SEQ ID NO: 1622768 - RNA, 19 nt, Artificial Sequence
  Description of Artificial Sequence: Synthetic oligonucleotide
  Antisense strand to SEQ ID NO: 1622767
cauucucacgcuauucaca

SEQ ID NO: 1622769 - RNA, 19 nt, Artificial Sequence
  Description of Artificial Sequence: Synthetic oligonucleotide
  Sense strand starting at position 507 of SEQ ID NO: 1560766
uggcauagguauuugcaua

SEQ ID NO: 1622770 - RNA, 19 nt, Artificial Sequence
  Description of Artificial Sequence: Synthetic oligonucleotide
  Antisense strand to SEQ ID NO: 1622769
uaugcaaauaccuaugcca

SEQ ID NO: 1622771 - RNA, 19 nt, Artificial Sequence
  Description of Artificial Sequence: Synthetic oligonucleotide
  Sense strand starting at position 545 of SEQ ID NO: 1560766
ggacuagaaugaugcuaag

SEQ ID NO: 1622772 - RNA, 19 nt, Artificial Sequence
  Description of Artificial Sequence: Synthetic oligonucleotide
  Antisense strand to SEQ ID NO: 1622771
cuuagcaucauucuagucc

SEQ ID NO: 1622773 - RNA, 19 nt, Artificial Sequence
  Description of Artificial Sequence: Synthetic oligonucleotide
  Sense strand starting at position 785 of SEQ ID NO: 1560766
acuagagucucucuagauc

SEQ ID NO: 1622774 - RNA, 19 nt, Artificial Sequence
  Description of Artificial Sequence: Synthetic oligonucleotide
  Antisense strand to SEQ ID NO: 1622773
gaucuagagagacucuagu

SEQ ID NO: 1622775 - RNA, 19 nt, Artificial Sequence
  Description of Artificial Sequence: Synthetic oligonucleotide
  Sense strand starting at position 895 of SEQ ID NO: 1560766
agagcaaugguaugaucua

SEQ ID NO: 1622776 - RNA, 19 nt, Artificial Sequence
  Description of Artificial Sequence: Synthetic oligonucleotide
  Antisense strand to SEQ ID NO: 1622775
uagaucauaccauugcucu

SEQ ID NO: 1622777 - RNA, 19 nt, Artificial Sequence
  Description of Artificial Sequence: Synthetic oligonucleotide
  Sense strand starting at position 896 of SEQ ID NO: 1560766
gagcaaugguaugaucuag

SEQ ID NO: 1622778 - RNA, 19 nt, Artificial Sequence
  Description of Artificial Sequence: Synthetic oligonucleotide
  Antisense strand to SEQ ID NO: 1622777
cuagaucauaccauugcuc

SEQ ID NO: 1622779 - RNA, 19 nt, Artificial Sequence
  Description of Artificial Sequence: Synthetic oligonucleotide
  Sense strand starting at position 1292 of SEQ ID NO: 1560766
ucuagugagucucugcaaa

SEQ ID NO: 1622780 - RNA, 19 nt, Artificial Sequence
  Description of Artificial Sequence: Synthetic oligonucleotide
  Antisense strand to SEQ ID NO: 1622779
uuugcagagacucacuaga

SEQ ID NO: 1622781 - RNA, 19 nt, Artificial Sequence
  Description of Artificial Sequence: Synthetic oligonucleotide
  Sense strand starting at position 1294 of SEQ ID NO: 1560766
uagugagucucugcaaaca

SEQ ID NO: 1622782 - RNA, 19 nt, Artificial Sequence
  Description of Artificial Sequence: Synthetic oligonucleotide
  Antisense strand to SEQ ID NO: 1622781
uguuugcagagacucacua

SEQ ID NO: 1622783 - RNA, 19 nt, Artificial Sequence
  Description of Artificial Sequence: Synthetic oligonucleotide
  Sense strand starting at position 1305 of SEQ ID NO: 1560766
ugcaaacagugguaauaau

SEQ ID NO: 1622784 - RNA, 19 nt, Artificial Sequence
  Description of Artificial Sequence: Synthetic oligonucleotide
  Antisense strand to SEQ ID NO: 1622783
auuauuaccacuguuugca

SEQ ID NO: 1622785 - RNA, 19 nt, Artificial Sequence
  Description of Artificial Sequence: Synthetic oligonucleotide
  Sense strand starting at position 2002 of SEQ ID NO: 1560766
uccuguauccaccggaauu

SEQ ID NO: 1622786 - RNA, 19 nt, Artificial Sequence
  Description of Artificial Sequence: Synthetic oligonucleotide
  Antisense strand to SEQ ID NO: 1622785
aauuccgguggauacagga

SEQ ID NO: 1622787 - RNA, 19 nt, Artificial Sequence
  Description of Artificial Sequence: Synthetic oligonucleotide
  Sense strand starting at position 2014 of SEQ ID NO: 1560766
cggaauuacugagaggucu

SEQ ID NO: 1622788 - RNA, 19 nt, Artificial Sequence
  Description of Artificial Sequence: Synthetic oligonucleotide
  Antisense strand to SEQ ID NO: 1622787
agaccucucaguaauuccg

SEQ ID NO: 1622789 - RNA, 19 nt, Artificial Sequence
  Description of Artificial Sequence: Synthetic oligonucleotide
  Sense strand starting at position 2104 of SEQ ID NO: 1560766
uugacugccuguuaaacuu

SEQ ID NO: 1622790 - RNA, 19 nt, Artificial Sequence
  Description of Artificial Sequence: Synthetic oligonucleotide
  Antisense strand to SEQ ID NO: 1622789
aaguuuaacaggcagucaa

SEQ ID NO: 1622791 - RNA, 19 nt, Artificial Sequence
  Description of Artificial Sequence: Synthetic oligonucleotide
  Sense strand starting at position 2112 of SEQ ID NO: 1560766
cuguuaaacuuaccuaugu

SEQ ID NO: 1622792 - RNA, 19 nt, Artificial Sequence
  Description of Artificial Sequence: Synthetic oligonucleotide
  Antisense strand to SEQ ID NO: 1622791
acauagguaaguuuaacag

SEQ ID NO: 1622793 - RNA, 19 nt, Artificial Sequence
  Description of Artificial Sequence: Synthetic oligonucleotide
  Sense strand starting at position 2156 of SEQ ID NO: 1560766
ccuagagauucugcuugau

SEQ ID NO: 1622794 - RNA, 19 nt, Artificial Sequence
  Description of Artificial Sequence: Synthetic oligonucleotide
  Antisense strand to SEQ ID NO: 1622793
aucaagcagaaucucuagg

SEQ ID NO: 1622795 - RNA, 19 nt, Artificial Sequence
  Description of Artificial Sequence: Synthetic oligonucleotide
  Sense strand starting at position 2158 of SEQ ID NO: 1560766
uagagauucugcuugauug

SEQ ID NO: 1622796 - RNA, 19 nt, Artificial Sequence
  Description of Artificial Sequence: Synthetic oligonucleotide
  Antisense strand to SEQ ID NO: 1622795
caaucaagcagaaucucua

SEQ ID NO: 1622797 - RNA, 19 nt, Artificial Sequence
  Description of Artificial Sequence: Synthetic oligonucleotide
  Sense strand starting at position 2160 of SEQ ID NO: 1560766
gagauucugcuugauuggu

SEQ ID NO: 1622798 - RNA, 19 nt, Artificial Sequence
  Description of Artificial Sequence: Synthetic oligonucleotide
  Antisense strand to SEQ ID NO: 1622797
accaaucaagcagaaucuc

SEQ ID NO: 1622799 - RNA, 19 nt, Artificial Sequence
  Description of Artificial Sequence: Synthetic oligonucleotide
  Sense strand starting at position 2162 of SEQ ID NO: 1560766
gauucugcuugauugguua

SEQ ID NO: 1622800 - RNA, 19 nt, Artificial Sequence
  Description of Artificial Sequence: Synthetic oligonucleotide
  Antisense strand to SEQ ID NO: 1622799
uaaccaaucaagcagaauc

SEQ ID NO: 1622801 - RNA, 19 nt, Artificial Sequence
  Description of Artificial Sequence: Synthetic oligonucleotide
  Sense strand starting at position 2166 of SEQ ID NO: 1560766
cugcuugauugguuacacu

SEQ ID NO: 1622802 - RNA, 19 nt, Artificial Sequence
  Description of Artificial Sequence: Synthetic oligonucleotide
  Antisense strand to SEQ ID NO: 1622801
aguguaaccaaucaagcag

SEQ ID NO: 1622803 - RNA, 19 nt, Artificial Sequence
  Description of Artificial Sequence: Synthetic oligonucleotide
  Sense strand starting at position 2201 of SEQ ID NO: 1560766
uggaguucuuucgagaguc

SEQ ID NO: 1622804 - RNA, 19 nt, Artificial Sequence
  Description of Artificial Sequence: Synthetic oligonucleotide
  Antisense strand to SEQ ID NO: 1622803
gacucucgaaagaacucca

SEQ ID NO: 1622805 - RNA, 19 nt, Artificial Sequence
  Description of Artificial Sequence: Synthetic oligonucleotide
  Sense strand starting at position 2209 of SEQ ID NO: 1560766
uuucgagagucccagauaa

SEQ ID NO: 1622806 - RNA, 19 nt, Artificial Sequence
  Description of Artificial Sequence: Synthetic oligonucleotide
  Antisense strand to SEQ ID NO: 1622805
uuaucugggacucucgaaa

SEQ ID NO: 1622807 - RNA, 19 nt, Artificial Sequence
  Description of Artificial Sequence: Synthetic oligonucleotide
  Sense strand starting at position 2211 of SEQ ID NO: 1560766
ucgagagucccagauaacu

SEQ ID NO: 1622808 - RNA, 19 nt, Artificial Sequence
  Description of Artificial Sequence: Synthetic oligonucleotide
  Antisense strand to SEQ ID NO: 1622807
aguuaucugggacucucga

SEQ ID NO: 1622809 - RNA, 19 nt, Artificial Sequence
  Description of Artificial Sequence: Synthetic oligonucleotide
  Sense strand starting at position 2244 of SEQ ID NO: 1560766
ggcugagaaucaccgcuua

SEQ ID NO: 1622810 - RNA, 19 nt, Artificial Sequence
  Description of Artificial Sequence: Synthetic oligonucleotide
  Antisense strand to SEQ ID NO: 1622809
uaagcggugauucucagcc

SEQ ID NO: 1622811 - RNA, 19 nt, Artificial Sequence
  Description of Artificial Sequence: Synthetic oligonucleotide
  Sense strand starting at position 2262 of SEQ ID NO: 1560766
agaagccucagcugugauu

SEQ ID NO: 1622812 - RNA, 19 nt, Artificial Sequence
  Description of Artificial Sequence: Synthetic oligonucleotide
  Antisense strand to SEQ ID NO: 1622811
aaucacagcugaggcuucu

SEQ ID NO: 1622813 - RNA, 19 nt, Artificial Sequence
  Description of Artificial Sequence: Synthetic oligonucleotide
  Sense strand starting at position 2339 of SEQ ID NO: 1560766
gugaaauaucaaugacacg

SEQ ID NO: 1622814 - RNA, 19 nt, Artificial Sequence
  Description of Artificial Sequence: Synthetic oligonucleotide
  Antisense strand to SEQ ID NO: 1622813
cgugucauugauauuucac

SEQ ID NO: 1622815 - RNA, 19 nt, Artificial Sequence
  Description of Artificial Sequence: Synthetic oligonucleotide
  Sense strand starting at position 2358 of SEQ ID NO: 1560766
ucaacuaugagacgcauga

SEQ ID NO: 1622816 - RNA, 19 nt, Artificial Sequence
  Description of Artificial Sequence: Synthetic oligonucleotide
  Antisense strand to SEQ ID NO: 1622815
ucaugcgucucauaguuga

SEQ ID NO: 1622817 - RNA, 19 nt, Artificial Sequence
  Description of Artificial Sequence: Synthetic oligonucleotide
  Sense strand starting at position 2692 of SEQ ID NO: 1560766
gcgugagccaccuacuaaa

SEQ ID NO: 1622818 - RNA, 19 nt, Artificial Sequence
  Description of Artificial Sequence: Synthetic oligonucleotide
  Antisense strand to SEQ ID NO: 1622817
uuuaguagguggcucacgc

SEQ ID NO: 1622819 - RNA, 19 nt, Artificial Sequence
  Description of Artificial Sequence: Synthetic oligonucleotide
  Sense strand starting at position 3301 of SEQ ID NO: 1560766
ucgagagucccagauaauu

SEQ ID NO: 1622820 - RNA, 19 nt, Artificial Sequence
  Description of Artificial Sequence: Synthetic oligonucleotide
  Antisense strand to SEQ ID NO: 1622819
aauuaucugggacucucga

SEQ ID NO: 1622821 - RNA, 19 nt, Artificial Sequence
  Description of Artificial Sequence: Synthetic oligonucleotide
  Sense strand starting at position 3797 of SEQ ID NO: 1560766
ccuggcuggcaguauuaau

SEQ ID NO: 1622822 - RNA, 19 nt, Artificial Sequence
  Description of Artificial Sequence: Synthetic oligonucleotide
  Antisense strand to SEQ ID NO: 1622821
auuaauacugccagccagg

SEQ ID NO: 1622823 - RNA, 19 nt, Artificial Sequence
  Description of Artificial Sequence: Synthetic oligonucleotide
  Sense strand starting at position 198 of SEQ ID NO: 1560767
guuugcagcuauguaauuu

SEQ ID NO: 1622824 - RNA, 19 nt, Artificial Sequence
  Description of Artificial Sequence: Synthetic oligonucleotide
  Antisense strand to SEQ ID NO: 1622823
aaauuacauagcugcaaac

SEQ ID NO: 1622825 - RNA, 19 nt, Artificial Sequence
  Description of Artificial Sequence: Synthetic oligonucleotide
  Sense strand starting at position 216 of SEQ ID NO: 1560767
ucacucugacuuugucaca

SEQ ID NO: 1622826 - RNA, 19 nt, Artificial Sequence
  Description of Artificial Sequence: Synthetic oligonucleotide
  Antisense strand to SEQ ID NO: 1622825
ugugacaaagucagaguga

SEQ ID NO: 1622827 - RNA, 19 nt, Artificial Sequence
  Description of Artificial Sequence: Synthetic oligonucleotide
  Sense strand starting at position 847 of SEQ ID NO: 1560767
gacacccgucauuaaguua

SEQ ID NO: 1622828 - RNA, 19 nt, Artificial Sequence
  Description of Artificial Sequence: Synthetic oligonucleotide
  Antisense strand to SEQ ID NO: 1622827
uaacuuaaugacggguguc

SEQ ID NO: 1622829 - RNA, 19 nt, Artificial Sequence
  Description of Artificial Sequence: Synthetic oligonucleotide
  Sense strand starting at position 886 of SEQ ID NO: 1560767
augaccucgccuuaacuaa

SEQ ID NO: 1622830 - RNA, 19 nt, Artificial Sequence
  Description of Artificial Sequence: Synthetic oligonucleotide
  Antisense strand to SEQ ID NO: 1622829
uuaguuaaggcgaggucau

SEQ ID NO: 1622831 - RNA, 19 nt, Artificial Sequence
  Description of Artificial Sequence: Synthetic oligonucleotide
  Sense strand starting at position 1161 of SEQ ID NO: 1560767
guagcacuauagguugaau

SEQ ID NO: 1622832 - RNA, 19 nt, Artificial Sequence
  Description of Artificial Sequence: Synthetic oligonucleotide
  Antisense strand to SEQ ID NO: 1622831
auucaaccuauagugcuac

SEQ ID NO: 1622833 - RNA, 19 nt, Artificial Sequence
  Description of Artificial Sequence: Synthetic oligonucleotide
  Sense strand starting at position 1163 of SEQ ID NO: 1560767
agcacuauagguugaauau

SEQ ID NO: 1622834 - RNA, 19 nt, Artificial Sequence
  Description of Artificial Sequence: Synthetic oligonucleotide
  Antisense strand to SEQ ID NO: 1622833
auauucaaccuauagugcu

SEQ ID NO: 1622835 - RNA, 19 nt, Artificial Sequence
  Description of Artificial Sequence: Synthetic oligonucleotide
  Sense strand starting at position 1164 of SEQ ID NO: 1560767
gcacuauagguugaauaua

SEQ ID NO: 1622836 - RNA, 19 nt, Artificial Sequence
  Description of Artificial Sequence: Synthetic oligonucleotide
  Antisense strand to SEQ ID NO: 1622835
uauauucaaccuauagugc

SEQ ID NO: 1622837 - RNA, 19 nt, Artificial Sequence
  Description of Artificial Sequence: Synthetic oligonucleotide
  Sense strand starting at position 1237 of SEQ ID NO: 1560767
guacauauacacugguuau

SEQ ID NO: 1622838 - RNA, 19 nt, Artificial Sequence
  Description of Artificial Sequence: Synthetic oligonucleotide
  Antisense strand to SEQ ID NO: 1622837
auaaccaguguauauguac

SEQ ID NO: 1622839 - RNA, 19 nt, Artificial Sequence
  Description of Artificial Sequence: Synthetic oligonucleotide
  Sense strand starting at position 1369 of SEQ ID NO: 1560767
gaggauucugaauguuccu

SEQ ID NO: 1622840 - RNA, 19 nt, Artificial Sequence
  Description of Artificial Sequence: Synthetic oligonucleotide
  Antisense strand to SEQ ID NO: 1622839
aggaacauucagaauccuc

SEQ ID NO: 1622841 - RNA, 19 nt, Artificial Sequence
  Description of Artificial Sequence: Synthetic oligonucleotide
  Sense strand starting at position 1413 of SEQ ID NO: 1560767
aggagauggauaugcucau

SEQ ID NO: 1622842 - RNA, 19 nt, Artificial Sequence
  Description of Artificial Sequence: Synthetic oligonucleotide
  Antisense strand to SEQ ID NO: 1622841
augagcauauccaucuccu

SEQ ID NO: 1622843 - RNA, 19 nt, Artificial Sequence
  Description of Artificial Sequence: Synthetic oligonucleotide
  Sense strand starting at position 1414 of SEQ ID NO: 1560767
ggagauggauaugcucauu

SEQ ID NO: 1622844 - RNA, 19 nt, Artificial Sequence
  Description of Artificial Sequence: Synthetic oligonucleotide
  Antisense strand to SEQ ID NO: 1622843
aaugagcauauccaucucc

SEQ ID NO: 1622845 - RNA, 19 nt, Artificial Sequence
  Description of Artificial Sequence: Synthetic oligonucleotide
  Sense strand starting at position 1442 of SEQ ID NO: 1560767
uaaugauacguauacaugu

SEQ ID NO: 1622846 - RNA, 19 nt, Artificial Sequence
  Description of Artificial Sequence: Synthetic oligonucleotide
  Antisense strand to SEQ ID NO: 1622845
acauguauacguaucauua

SEQ ID NO: 1622847 - RNA, 19 nt, Artificial Sequence
  Description of Artificial Sequence: Synthetic oligonucleotide
  Sense strand starting at position 1497 of SEQ ID NO: 1560767
guaugagucaacuagaagu

SEQ ID NO: 1622848 - RNA, 19 nt, Artificial Sequence
  Description of Artificial Sequence: Synthetic oligonucleotide
  Antisense strand to SEQ ID NO: 1622847
acuucuaguugacucauac

SEQ ID NO: 1622849 - RNA, 19 nt, Artificial Sequence
  Description of Artificial Sequence: Synthetic oligonucleotide
  Sense strand starting at position 1503 of SEQ ID NO: 1560767
gucaacuagaagugugauu

SEQ ID NO: 1622850 - RNA, 19 nt, Artificial Sequence
  Description of Artificial Sequence: Synthetic oligonucleotide
  Antisense strand to SEQ ID NO: 1622849
aaucacacuucuaguugac

SEQ ID NO: 1622851 - RNA, 19 nt, Artificial Sequence
  Description of Artificial Sequence: Synthetic oligonucleotide
  Sense strand starting at position 2026 of SEQ ID NO: 1560767
ccuuccugguccuuaauga

SEQ ID NO: 1622852 - RNA, 19 nt, Artificial Sequence
  Description of Artificial Sequence: Synthetic oligonucleotide
  Antisense strand to SEQ ID NO: 1622851
ucauuaaggaccaggaagg

SEQ ID NO: 1622853 - RNA, 19 nt, Artificial Sequence
  Description of Artificial Sequence: Synthetic oligonucleotide
  Sense strand starting at position 2027 of SEQ ID NO: 1560767
cuuccugguccuuaaugau

SEQ ID NO: 1622854 - RNA, 19 nt, Artificial Sequence
  Description of Artificial Sequence: Synthetic oligonucleotide
  Antisense strand to SEQ ID NO: 1622853
aucauuaaggaccaggaag

SEQ ID NO: 1622855 - RNA, 19 nt, Artificial Sequence
  Description of Artificial Sequence: Synthetic oligonucleotide
  Sense strand starting at position 2078 of SEQ ID NO: 1560767
gugccauuugauuggccaa

SEQ ID NO: 1622856 - RNA, 19 nt, Artificial Sequence
  Description of Artificial Sequence: Synthetic oligonucleotide
  Antisense strand to SEQ ID NO: 1622855
uuggccaaucaaauggcac

SEQ ID NO: 1622857 - RNA, 19 nt, Artificial Sequence
  Description of Artificial Sequence: Synthetic oligonucleotide
  Sense strand starting at position 2252 of SEQ ID NO: 1560767
ugagaauucccagggcuca

SEQ ID NO: 1622858 - RNA, 19 nt, Artificial Sequence
  Description of Artificial Sequence: Synthetic oligonucleotide
  Antisense strand to SEQ ID NO: 1622857
ugagcccugggaauucuca

SEQ ID NO: 1622859 - RNA, 19 nt, Artificial Sequence
  Description of Artificial Sequence: Synthetic oligonucleotide
  Sense strand starting at position 2324 of SEQ ID NO: 1560767
gggugacucuguuuauaau

SEQ ID NO: 1622860 - RNA, 19 nt, Artificial Sequence
  Description of Artificial Sequence: Synthetic oligonucleotide
  Antisense strand to SEQ ID NO: 1622859
auuauaaacagagucaccc

SEQ ID NO: 1622861 - RNA, 19 nt, Artificial Sequence
  Description of Artificial Sequence: Synthetic oligonucleotide
  Sense strand starting at position 2325 of SEQ ID NO: 1560767
ggugacucuguuuauaauu

SEQ ID NO: 1622862 - RNA, 19 nt, Artificial Sequence
  Description of Artificial Sequence: Synthetic oligonucleotide
  Antisense strand to SEQ ID NO: 1622861
aauuauaaacagagucacc

SEQ ID NO: 1622863 - RNA, 19 nt, Artificial Sequence
  Description of Artificial Sequence: Synthetic oligonucleotide
  Sense strand starting at position 2366 of SEQ ID NO: 1560767
augcuaaacuccuugaaga

SEQ ID NO: 1622864 - RNA, 19 nt, Artificial Sequence
  Description of Artificial Sequence: Synthetic oligonucleotide
  Antisense strand to SEQ ID NO: 1622863
ucuucaaggaguuuagcau

SEQ ID NO: 1622865 - RNA, 19 nt, Artificial Sequence
  Description of Artificial Sequence: Synthetic oligonucleotide
  Sense strand starting at position 2367 of SEQ ID NO: 1560767
ugcuaaacuccuugaagaa

SEQ ID NO: 1622866 - RNA, 19 nt, Artificial Sequence
  Description of Artificial Sequence: Synthetic oligonucleotide
  Antisense strand to SEQ ID NO: 1622865
uucuucaaggaguuuagca

SEQ ID NO: 1622867 - RNA, 19 nt, Artificial Sequence
  Description of Artificial Sequence: Synthetic oligonucleotide
  Sense strand starting at position 2403 of SEQ ID NO: 1560767
aucuuucugccguaacuaa

SEQ ID NO: 1622868 - RNA, 19 nt, Artificial Sequence
  Description of Artificial Sequence: Synthetic oligonucleotide
  Antisense strand to SEQ ID NO: 1622867
uuaguuacggcagaaagau

SEQ ID NO: 1622869 - RNA, 19 nt, Artificial Sequence
  Description of Artificial Sequence: Synthetic oligonucleotide
  Sense strand starting at position 2420 of SEQ ID NO: 1560767
aaaccugucgugcaagaag

SEQ ID NO: 1622870 - RNA, 19 nt, Artificial Sequence
  Description of Artificial Sequence: Synthetic oligonucleotide
  Antisense strand to SEQ ID NO: 1622869
cuucuugcacgacagguuu

SEQ ID NO: 1622871 - RNA, 19 nt, Artificial Sequence
  Description of Artificial Sequence: Synthetic oligonucleotide
  Sense strand starting at position 2423 of SEQ ID NO: 1560767
ccugucgugcaagaagaaa

SEQ ID NO: 1622872 - RNA, 19 nt, Artificial Sequence
  Description of Artificial Sequence: Synthetic oligonucleotide
  Antisense strand to SEQ ID NO: 1622871
uuucuucuugcacgacagg

SEQ ID NO: 1622873 - RNA, 19 nt, Artificial Sequence
  Description of Artificial Sequence: Synthetic oligonucleotide
  Sense strand starting at position 3444 of SEQ ID NO: 1560767
agagaaacauaaugagaac

SEQ ID NO: 1622874 - RNA, 19 nt, Artificial Sequence
  Description of Artificial Sequence: Synthetic oligonucleotide
  Antisense strand to SEQ ID NO: 1622873
guucucauuauguuucucu

SEQ ID NO: 1622875 - RNA, 19 nt, Artificial Sequence
  Description of Artificial Sequence: Synthetic oligonucleotide
  Sense strand starting at position 3490 of SEQ ID NO: 1560767
aagucucugugguccagaa

SEQ ID NO: 1622876 - RNA, 19 nt, Artificial Sequence
  Description of Artificial Sequence: Synthetic oligonucleotide
  Antisense strand to SEQ ID NO: 1622875
uucuggaccacagagacuu

SEQ ID NO: 1622877 - RNA, 19 nt, Artificial Sequence
  Description of Artificial Sequence: Synthetic oligonucleotide
  Sense strand starting at position 3494 of SEQ ID NO: 1560767
cucugugguccagaaccua

SEQ ID NO: 1622878 - RNA, 19 nt, Artificial Sequence
  Description of Artificial Sequence: Synthetic oligonucleotide
  Antisense strand to SEQ ID NO: 1622877
uagguucuggaccacagag

SEQ ID NO: 1622879 - RNA, 19 nt, Artificial Sequence
  Description of Artificial Sequence: Synthetic oligonucleotide
  Sense strand starting at position 3534 of SEQ ID NO: 1560767
gggaccuuugcagacucau

SEQ ID NO: 1622880 - RNA, 19 nt, Artificial Sequence
  Description of Artificial Sequence: Synthetic oligonucleotide
  Antisense strand to SEQ ID NO: 1622879
augagucugcaaagguccc

SEQ ID NO: 1622881 - RNA, 19 nt, Artificial Sequence
  Description of Artificial Sequence: Synthetic oligonucleotide
  Sense strand starting at position 3608 of SEQ ID NO: 1560767
ccaguugugaagugaacuu

SEQ ID NO: 1622882 - RNA, 19 nt, Artificial Sequence
  Description of Artificial Sequence: Synthetic oligonucleotide
  Antisense strand to SEQ ID NO: 1622881
aaguucacuucacaacugg

SEQ ID NO: 1622883 - RNA, 19 nt, Artificial Sequence
  Description of Artificial Sequence: Synthetic oligonucleotide
  Sense strand starting at position 3704 of SEQ ID NO: 1560767
cgaauuauaguguaucauu

SEQ ID NO: 1622884 - RNA, 19 nt, Artificial Sequence
  Description of Artificial Sequence: Synthetic oligonucleotide
  Antisense strand to SEQ ID NO: 1622883
aaugauacacuauaauucg

SEQ ID NO: 1622885 - RNA, 19 nt, Artificial Sequence
  Description of Artificial Sequence: Synthetic oligonucleotide
  Sense strand starting at position 3717 of SEQ ID NO: 1560767
aucauucugugacuugauu

SEQ ID NO: 1622886 - RNA, 19 nt, Artificial Sequence
  Description of Artificial Sequence: Synthetic oligonucleotide
  Antisense strand to SEQ ID NO: 1622885
aaucaagucacagaaugau

SEQ ID NO: 1622887 - RNA, 19 nt, Artificial Sequence
  Description of Artificial Sequence: Synthetic oligonucleotide
  Sense strand starting at position 3757 of SEQ ID NO: 1560767
gagauuaaucaaugcgagu

SEQ ID NO: 1622888 - RNA, 19 nt, Artificial Sequence
  Description of Artificial Sequence: Synthetic oligonucleotide
  Antisense strand to SEQ ID NO: 1622887
acucgcauugauuaaucuc

SEQ ID NO: 1622889 - RNA, 19 nt, Artificial Sequence
  Description of Artificial Sequence: Synthetic oligonucleotide
  Sense strand starting at position 3778 of SEQ ID NO: 1560767
guuauagcugcgguucauu

SEQ ID NO: 1622890 - RNA, 19 nt, Artificial Sequence
  Description of Artificial Sequence: Synthetic oligonucleotide
  Antisense strand to SEQ ID NO: 1622889
aaugaaccgcagcuauaac

SEQ ID NO: 1622891 - RNA, 19 nt, Artificial Sequence
  Description of Artificial Sequence: Synthetic oligonucleotide
  Sense strand starting at position 3807 of SEQ ID NO: 1560767
gccucacgguauuuaaaug

SEQ ID NO: 1622892 - RNA, 19 nt, Artificial Sequence
  Description of Artificial Sequence: Synthetic oligonucleotide
  Antisense strand to SEQ ID NO: 1622891
cauuuaaauaccgugaggc

SEQ ID NO: 1622893 - RNA, 19 nt, Artificial Sequence
  Description of Artificial Sequence: Synthetic oligonucleotide
  Sense strand starting at position 3825 of SEQ ID NO: 1560767
guaugacuaggucaccauu

SEQ ID NO: 1622894 - RNA, 19 nt, Artificial Sequence
  Description of Artificial Sequence: Synthetic oligonucleotide
  Antisense strand to SEQ ID NO: 1622893
aauggugaccuagucauac

SEQ ID NO: 1622895 - RNA, 19 nt, Artificial Sequence
  Description of Artificial Sequence: Synthetic oligonucleotide
  Sense strand starting at position 3850 of SEQ ID NO: 1560767
uccauucugucagugauag

SEQ ID NO: 1622896 - RNA, 19 nt, Artificial Sequence
  Description of Artificial Sequence: Synthetic oligonucleotide
  Antisense strand to SEQ ID NO: 1622895
cuaucacugacagaaugga

SEQ ID NO: 1622897 - RNA, 19 nt, Artificial Sequence
  Description of Artificial Sequence: Synthetic oligonucleotide
  Sense strand starting at position 3851 of SEQ ID NO: 1560767
ccauucugucagugauagg

SEQ ID NO: 1622898 - RNA, 19 nt, Artificial Sequence
  Description of Artificial Sequence: Synthetic oligonucleotide
  Antisense strand to SEQ ID NO: 1622897
ccuaucacugacagaaugg

SEQ ID NO: 1622899 - RNA, 19 nt, Artificial Sequence
  Description of Artificial Sequence: Synthetic oligonucleotide
  Sense strand starting at position 3955 of SEQ ID NO: 1560767
uggauuaccugaguggaau

SEQ ID NO: 1622900 - RNA, 19 nt, Artificial Sequence
  Description of Artificial Sequence: Synthetic oligonucleotide
  Antisense strand to SEQ ID NO: 1622899
auuccacucagguaaucca

SEQ ID NO: 1622901 - RNA, 19 nt, Artificial Sequence
  Description of Artificial Sequence: Synthetic oligonucleotide
  Sense strand starting at position 3956 of SEQ ID NO: 1560767
ggauuaccugaguggaaug

SEQ ID NO: 1622902 - RNA, 19 nt, Artificial Sequence
  Description of Artificial Sequence: Synthetic oligonucleotide
  Antisense strand to SEQ ID NO: 1622901
cauuccacucagguaaucc

SEQ ID NO: 1622903 - RNA, 19 nt, Artificial Sequence
  Description of Artificial Sequence: Synthetic oligonucleotide
  Sense strand starting at position 60 of SEQ ID NO: 1560768
ccuguaggguuucuguuaa

SEQ ID NO: 1622904 - RNA, 19 nt, Artificial Sequence
  Description of Artificial Sequence: Synthetic oligonucleotide
  Antisense strand to SEQ ID NO: 1622903
uuaacagaaacccuacagg

SEQ ID NO: 1622905 - RNA, 19 nt, Artificial Sequence
  Description of Artificial Sequence: Synthetic oligonucleotide
  Sense strand starting at position 90 of SEQ ID NO: 1560768
ggcucugcuugcuuagaca

SEQ ID NO: 1622906 - RNA, 19 nt, Artificial Sequence
  Description of Artificial Sequence: Synthetic oligonucleotide
  Antisense strand to SEQ ID NO: 1622905
ugucuaagcaagcagagcc

SEQ ID NO: 1622907 - RNA, 19 nt, Artificial Sequence
  Description of Artificial Sequence: Synthetic oligonucleotide
  Sense strand starting at position 188 of SEQ ID NO: 1560768
ccauucuuuccaugggaaa

SEQ ID NO: 1622908 - RNA, 19 nt, Artificial Sequence
  Description of Artificial Sequence: Synthetic oligonucleotide
  Antisense strand to SEQ ID NO: 1622907
uuucccauggaaagaaugg

SEQ ID NO: 1622909 - RNA, 19 nt, Artificial Sequence
  Description of Artificial Sequence: Synthetic oligonucleotide
  Sense strand starting at position 191 of SEQ ID NO: 1560768
uucuuuccaugggaaaguu

SEQ ID NO: 1622910 - RNA, 19 nt, Artificial Sequence
  Description of Artificial Sequence: Synthetic oligonucleotide
  Antisense strand to SEQ ID NO: 1622909
aacuuucccauggaaagaa

SEQ ID NO: 1622911 - RNA, 19 nt, Artificial Sequence
  Description of Artificial Sequence: Synthetic oligonucleotide
  Sense strand starting at position 243 of SEQ ID NO: 1560768
uuaggagagucagaagaua

SEQ ID NO: 1622912 - RNA, 19 nt, Artificial Sequence
  Description of Artificial Sequence: Synthetic oligonucleotide
  Antisense strand to SEQ ID NO: 1622911
uaucuucugacucuccuaa

SEQ ID NO: 1622913 - RNA, 19 nt, Artificial Sequence
  Description of Artificial Sequence: Synthetic oligonucleotide
  Sense strand starting at position 282 of SEQ ID NO: 1560768
uuaggagagucagaagaaa

SEQ ID NO: 1622914 - RNA, 19 nt, Artificial Sequence
  Description of Artificial Sequence: Synthetic oligonucleotide
  Antisense strand to SEQ ID NO: 1622913
uuucuucugacucuccuaa

SEQ ID NO: 1622915 - RNA, 19 nt, Artificial Sequence
  Description of Artificial Sequence: Synthetic oligonucleotide
  Sense strand starting at position 337 of SEQ ID NO: 1560768
uagaaaugucaugguagcu

SEQ ID NO: 1622916 - RNA, 19 nt, Artificial Sequence
  Description of Artificial Sequence: Synthetic oligonucleotide
  Antisense strand to SEQ ID NO: 1622915
agcuaccaugacauuucua

SEQ ID NO: 1622917 - RNA, 19 nt, Artificial Sequence
  Description of Artificial Sequence: Synthetic oligonucleotide
  Sense strand starting at position 996 of SEQ ID NO: 1560768
ccgaccaaguuugaauauu

SEQ ID NO: 1622918 - RNA, 19 nt, Artificial Sequence
  Description of Artificial Sequence: Synthetic oligonucleotide
  Antisense strand to SEQ ID NO: 1622917
aauauucaaacuuggucgg

SEQ ID NO: 1622919 - RNA, 19 nt, Artificial Sequence
  Description of Artificial Sequence: Synthetic oligonucleotide
  Sense strand starting at position 1370 of SEQ ID NO: 1560768
aggugauauauguggguac

SEQ ID NO: 1622920 - RNA, 19 nt, Artificial Sequence
  Description of Artificial Sequence: Synthetic oligonucleotide
  Antisense strand to SEQ ID NO: 1622919
guacccacauauaucaccu

SEQ ID NO: 1622921 - RNA, 19 nt, Artificial Sequence
  Description of Artificial Sequence: Synthetic oligonucleotide
  Sense strand starting at position 1372 of SEQ ID NO: 1560768
gugauauauguggguacac

SEQ ID NO: 1622922 - RNA, 19 nt, Artificial Sequence
  Description of Artificial Sequence: Synthetic oligonucleotide
  Antisense strand to SEQ ID NO: 1622921
guguacccacauauaucac

SEQ ID NO: 1622923 - RNA, 19 nt, Artificial Sequence
  Description of Artificial Sequence: Synthetic oligonucleotide
  Sense strand starting at position 1374 of SEQ ID NO: 1560768
gauauauguggguacacgu

SEQ ID NO: 1622924 - RNA, 19 nt, Artificial Sequence
  Description of Artificial Sequence: Synthetic oligonucleotide
  Antisense strand to SEQ ID NO: 1622923
acguguacccacauauauc

SEQ ID NO: 1622925 - RNA, 19 nt, Artificial Sequence
  Description of Artificial Sequence: Synthetic oligonucleotide
  Sense strand starting at position 1407 of SEQ ID NO: 1560768
caggaaacauguuaucaug

SEQ ID NO: 1622926 - RNA, 19 nt, Artificial Sequence
  Description of Artificial Sequence: Synthetic oligonucleotide
  Antisense strand to SEQ ID NO: 1622925
caugauaacauguuuccug

SEQ ID NO: 1622927 - RNA, 19 nt, Artificial Sequence
  Description of Artificial Sequence: Synthetic oligonucleotide
  Sense strand starting at position 1467 of SEQ ID NO: 1560768
gguagcagucccuggacaa

SEQ ID NO: 1622928 - RNA, 19 nt, Artificial Sequence
  Description of Artificial Sequence: Synthetic oligonucleotide
  Antisense strand to SEQ ID NO: 1622927
uuguccagggacugcuacc

SEQ ID NO: 1622929 - RNA, 19 nt, Artificial Sequence
  Description of Artificial Sequence: Synthetic oligonucleotide
  Sense strand starting at position 1468 of SEQ ID NO: 1560768
guagcagucccuggacaau

SEQ ID NO: 1622930 - RNA, 19 nt, Artificial Sequence
  Description of Artificial Sequence: Synthetic oligonucleotide
  Antisense strand to SEQ ID NO: 1622929
auuguccagggacugcuac

SEQ ID NO: 1622931 - RNA, 19 nt, Artificial Sequence
  Description of Artificial Sequence: Synthetic oligonucleotide
  Sense strand starting at position 1477 of SEQ ID NO: 1560768
ccuggacaauugucauuga

SEQ ID NO: 1622932 - RNA, 19 nt, Artificial Sequence
  Description of Artificial Sequence: Synthetic oligonucleotide
  Antisense strand to SEQ ID NO: 1622931
ucaaugacaauuguccagg

SEQ ID NO: 1622933 - RNA, 19 nt, Artificial Sequence
  Description of Artificial Sequence: Synthetic oligonucleotide
  Sense strand starting at position 1508 of SEQ ID NO: 1560768
gguggcaguccucggacaa

SEQ ID NO: 1622934 - RNA, 19 nt, Artificial Sequence
  Description of Artificial Sequence: Synthetic oligonucleotide
  Antisense strand to SEQ ID NO: 1622933
uuguccgaggacugccacc

SEQ ID NO: 1622935 - RNA, 19 nt, Artificial Sequence
  Description of Artificial Sequence: Synthetic oligonucleotide
  Sense strand starting at position 1509 of SEQ ID NO: 1560768
guggcaguccucggacaac

SEQ ID NO: 1622936 - RNA, 19 nt, Artificial Sequence
  Description of Artificial Sequence: Synthetic oligonucleotide
  Antisense strand to SEQ ID NO: 1622935
guuguccgaggacugccac

SEQ ID NO: 1622937 - RNA, 19 nt, Artificial Sequence
  Description of Artificial Sequence: Synthetic oligonucleotide
  Sense strand starting at position 1562 of SEQ ID NO: 1560768
gggcaacugucauugagaa

SEQ ID NO: 1622938 - RNA, 19 nt, Artificial Sequence
  Description of Artificial Sequence: Synthetic oligonucleotide
  Antisense strand to SEQ ID NO: 1622937
uucucaaugacaguugccc

SEQ ID NO: 1622939 - RNA, 19 nt, Artificial Sequence
  Description of Artificial Sequence: Synthetic oligonucleotide
  Sense strand starting at position 1563 of SEQ ID NO: 1560768
ggcaacugucauugagaag

SEQ ID NO: 1622940 - RNA, 19 nt, Artificial Sequence
  Description of Artificial Sequence: Synthetic oligonucleotide
  Antisense strand to SEQ ID NO: 1622939
cuucucaaugacaguugcc

SEQ ID NO: 1622941 - RNA, 19 nt, Artificial Sequence
  Description of Artificial Sequence: Synthetic oligonucleotide
  Sense strand starting at position 1566 of SEQ ID NO: 1560768
aacugucauugagaagagu

SEQ ID NO: 1622942 - RNA, 19 nt, Artificial Sequence
  Description of Artificial Sequence: Synthetic oligonucleotide
  Antisense strand to SEQ ID NO: 1622941
acucuucucaaugacaguu

SEQ ID NO: 1622943 - RNA, 19 nt, Artificial Sequence
  Description of Artificial Sequence: Synthetic oligonucleotide
  Sense strand starting at position 1713 of SEQ ID NO: 1560768
gguggcagucccuggacaa

SEQ ID NO: 1622944 - RNA, 19 nt, Artificial Sequence
  Description of Artificial Sequence: Synthetic oligonucleotide
  Antisense strand to SEQ ID NO: 1622943
uuguccagggacugccacc

SEQ ID NO: 1622945 - RNA, 19 nt, Artificial Sequence
  Description of Artificial Sequence: Synthetic oligonucleotide
  Sense strand starting at position 1727 of SEQ ID NO: 1560768
gacaacugucauggguuga

SEQ ID NO: 1622946 - RNA, 19 nt, Artificial Sequence
  Description of Artificial Sequence: Synthetic oligonucleotide
  Antisense strand to SEQ ID NO: 1622945
ucaacccaugacaguuguc

SEQ ID NO: 1622947 - RNA, 19 nt, Artificial Sequence
  Description of Artificial Sequence: Synthetic oligonucleotide
  Sense strand starting at position 1817 of SEQ ID NO: 1560768
gcugcaacggauugcuaau

SEQ ID NO: 1622948 - RNA, 19 nt, Artificial Sequence
  Description of Artificial Sequence: Synthetic oligonucleotide
  Antisense strand to SEQ ID NO: 1622947
auuagcaauccguugcagc

SEQ ID NO: 1622949 - RNA, 19 nt, Artificial Sequence
  Description of Artificial Sequence: Synthetic oligonucleotide
  Sense strand starting at position 1823 of SEQ ID NO: 1560768
acggauugcuaauaacauu

SEQ ID NO: 1622950 - RNA, 19 nt, Artificial Sequence
  Description of Artificial Sequence: Synthetic oligonucleotide
  Antisense strand to SEQ ID NO: 1622949
aauguuauuagcaauccgu

SEQ ID NO: 1622951 - RNA, 19 nt, Artificial Sequence
  Description of Artificial Sequence: Synthetic oligonucleotide
  Sense strand starting at position 1866 of SEQ ID NO: 1560768
ggauucgauccguguguca

SEQ ID NO: 1622952 - RNA, 19 nt, Artificial Sequence
  Description of Artificial Sequence: Synthetic oligonucleotide
  Antisense strand to SEQ ID NO: 1622951
ugacacacggaucgaaucc

SEQ ID NO: 1622953 - RNA, 19 nt, Artificial Sequence
  Description of Artificial Sequence: Synthetic oligonucleotide
  Sense strand starting at position 1868 of SEQ ID NO: 1560768
auucgauccgugugucaug

SEQ ID NO: 1622954 - RNA, 19 nt, Artificial Sequence
  Description of Artificial Sequence: Synthetic oligonucleotide
  Antisense strand to SEQ ID NO: 1622953
caugacacacggaucgaau

SEQ ID NO: 1622955 - RNA, 19 nt, Artificial Sequence
  Description of Artificial Sequence: Synthetic oligonucleotide
  Sense strand starting at position 1898 of SEQ ID NO: 1560768
gagggucgguuuccucaua

SEQ ID NO: 1622956 - RNA, 19 nt, Artificial Sequence
  Description of Artificial Sequence: Synthetic oligonucleotide
  Antisense strand to SEQ ID NO: 1622955
uaugaggaaaccgacccuc

SEQ ID NO: 1622957 - RNA, 19 nt, Artificial Sequence
  Description of Artificial Sequence: Synthetic oligonucleotide
  Sense strand starting at position 2000 of SEQ ID NO: 1560768
augauaacaucgccaugga

SEQ ID NO: 1622958 - RNA, 19 nt, Artificial Sequence
  Description of Artificial Sequence: Synthetic oligonucleotide
  Antisense strand to SEQ ID NO: 1622957
uccauggcgauguuaucau

SEQ ID NO: 1622959 - RNA, 19 nt, Artificial Sequence
  Description of Artificial Sequence: Synthetic oligonucleotide
  Sense strand starting at position 2001 of SEQ ID NO: 1560768
ugauaacaucgccauggaa

SEQ ID NO: 1622960 - RNA, 19 nt, Artificial Sequence
  Description of Artificial Sequence: Synthetic oligonucleotide
  Antisense strand to SEQ ID NO: 1622959
uuccauggcgauguuauca

SEQ ID NO: 1622961 - RNA, 19 nt, Artificial Sequence
  Description of Artificial Sequence: Synthetic oligonucleotide
  Sense strand starting at position 2003 of SEQ ID NO: 1560768
auaacaucgccauggaaag

SEQ ID NO: 1622962 - RNA, 19 nt, Artificial Sequence
  Description of Artificial Sequence: Synthetic oligonucleotide
  Antisense strand to SEQ ID NO: 1622961
cuuuccauggcgauguuau

SEQ ID NO: 1622963 - RNA, 19 nt, Artificial Sequence
  Description of Artificial Sequence: Synthetic oligonucleotide
  Sense strand starting at position 2004 of SEQ ID NO: 1560768
uaacaucgccauggaaagu

SEQ ID NO: 1622964 - RNA, 19 nt, Artificial Sequence
  Description of Artificial Sequence: Synthetic oligonucleotide
  Antisense strand to SEQ ID NO: 1622963
acuuuccauggcgauguua

SEQ ID NO: 1622965 - RNA, 19 nt, Artificial Sequence
  Description of Artificial Sequence: Synthetic oligonucleotide
  Sense strand starting at position 2194 of SEQ ID NO: 1560768
ccgagacguccugagcaga

SEQ ID NO: 1622966 - RNA, 19 nt, Artificial Sequence
  Description of Artificial Sequence: Synthetic oligonucleotide
  Antisense strand to SEQ ID NO: 1622965
ucugcucaggacgucucgg

SEQ ID NO: 1622967 - RNA, 19 nt, Artificial Sequence
  Description of Artificial Sequence: Synthetic oligonucleotide
  Sense strand starting at position 2529 of SEQ ID NO: 1560768
aagauuuaguaggaucuca

SEQ ID NO: 1622968 - RNA, 19 nt, Artificial Sequence
  Description of Artificial Sequence: Synthetic oligonucleotide
  Antisense strand to SEQ ID NO: 1622967
ugagauccuacuaaaucuu

SEQ ID NO: 1622969 - RNA, 19 nt, Artificial Sequence
  Description of Artificial Sequence: Synthetic oligonucleotide
  Sense strand starting at position 2544 of SEQ ID NO: 1560768
cucaauuguguggauucua

SEQ ID NO: 1622970 - RNA, 19 nt, Artificial Sequence
  Description of Artificial Sequence: Synthetic oligonucleotide
  Antisense strand to SEQ ID NO: 1622969
uagaauccacacaauugag

SEQ ID NO: 1622971 - RNA, 19 nt, Artificial Sequence
  Description of Artificial Sequence: Synthetic oligonucleotide
  Sense strand starting at position 2732 of SEQ ID NO: 1560768
uuuaaccugccauggaauu

SEQ ID NO: 1622972 - RNA, 19 nt, Artificial Sequence
  Description of Artificial Sequence: Synthetic oligonucleotide
  Antisense strand to SEQ ID NO: 1622971
aauuccauggcagguuaaa

SEQ ID NO: 1622973 - RNA, 19 nt, Artificial Sequence
  Description of Artificial Sequence: Synthetic oligonucleotide
  Sense strand starting at position 2879 of SEQ ID NO: 1560768
ucgcauuguaccucgcaaa

SEQ ID NO: 1622974 - RNA, 19 nt, Artificial Sequence
  Description of Artificial Sequence: Synthetic oligonucleotide
  Antisense strand to SEQ ID NO: 1622973
uuugcgagguacaaugcga

SEQ ID NO: 1622975 - RNA, 19 nt, Artificial Sequence
  Description of Artificial Sequence: Synthetic oligonucleotide
  Sense strand starting at position 2880 of SEQ ID NO: 1560768
cgcauuguaccucgcaaau

SEQ ID NO: 1622976 - RNA, 19 nt, Artificial Sequence
  Description of Artificial Sequence: Synthetic oligonucleotide
  Antisense strand to SEQ ID NO: 1622975
auuugcgagguacaaugcg

SEQ ID NO: 1622977 - RNA, 19 nt, Artificial Sequence
  Description of Artificial Sequence: Synthetic oligonucleotide
  Sense strand starting at position 3402 of SEQ ID NO: 1560768
gaguguggugacuaucaua

SEQ ID NO: 1622978 - RNA, 19 nt, Artificial Sequence
  Description of Artificial Sequence: Synthetic oligonucleotide
  Antisense strand to SEQ ID NO: 1622977
uaugauagucaccacacuc

SEQ ID NO: 1622979 - RNA, 19 nt, Artificial Sequence
  Description of Artificial Sequence: Synthetic oligonucleotide
  Sense strand starting at position 3508 of SEQ ID NO: 1560768
acaccugguuucuuauauu

SEQ ID NO: 1622980 - RNA, 19 nt, Artificial Sequence
  Description of Artificial Sequence: Synthetic oligonucleotide
  Antisense strand to SEQ ID NO: 1622979
aauauaagaaaccaggugu

SEQ ID NO: 1622981 - RNA, 19 nt, Artificial Sequence
  Description of Artificial Sequence: Synthetic oligonucleotide
  Sense strand starting at position 3535 of SEQ ID NO: 1560768
uuuagaaugucugaaauuc

SEQ ID NO: 1622982 - RNA, 19 nt, Artificial Sequence
  Description of Artificial Sequence: Synthetic oligonucleotide
  Antisense strand to SEQ ID NO: 1622981
gaauuucagacauucuaaa

SEQ ID NO: 1622983 - RNA, 19 nt, Artificial Sequence
  Description of Artificial Sequence: Synthetic oligonucleotide
  Sense strand starting at position 278 of SEQ ID NO: 1560769
gagacaggguuucuuguuu

SEQ ID NO: 1622984 - RNA, 19 nt, Artificial Sequence
  Description of Artificial Sequence: Synthetic oligonucleotide
  Antisense strand to SEQ ID NO: 1622983
aaacaagaaacccugucuc

SEQ ID NO: 1622985 - RNA, 19 nt, Artificial Sequence
  Description of Artificial Sequence: Synthetic oligonucleotide
  Sense strand starting at position 934 of SEQ ID NO: 1560769
ggccucaggugaucugaaa

SEQ ID NO: 1622986 - RNA, 19 nt, Artificial Sequence
  Description of Artificial Sequence: Synthetic oligonucleotide
  Antisense strand to SEQ ID NO: 1622985
uuucagaucaccugaggcc

SEQ ID NO: 1622987 - RNA, 19 nt, Artificial Sequence
  Description of Artificial Sequence: Synthetic oligonucleotide
  Sense strand starting at position 1519 of SEQ ID NO: 1560769
agaaguccuuaagacauua

SEQ ID NO: 1622988 - RNA, 19 nt, Artificial Sequence
  Description of Artificial Sequence: Synthetic oligonucleotide
  Antisense strand to SEQ ID NO: 1622987
uaaugucuuaaggacuucu

SEQ ID NO: 1622989 - RNA, 19 nt, Artificial Sequence
  Description of Artificial Sequence: Synthetic oligonucleotide
  Sense strand starting at position 1753 of SEQ ID NO: 1560769
cggaguuugcagcgaacca

SEQ ID NO: 1622990 - RNA, 19 nt, Artificial Sequence
  Description of Artificial Sequence: Synthetic oligonucleotide
  Antisense strand to SEQ ID NO: 1622989
ugguucgcugcaaacuccg

SEQ ID NO: 1622991 - RNA, 19 nt, Artificial Sequence
  Description of Artificial Sequence: Synthetic oligonucleotide
  Sense strand starting at position 1933 of SEQ ID NO: 1560769
caaagaaaucgaugcaaga

SEQ ID NO: 1622992 - RNA, 19 nt, Artificial Sequence
  Description of Artificial Sequence: Synthetic oligonucleotide
  Antisense strand to SEQ ID NO: 1622991
ucuugcaucgauuucuuug

SEQ ID NO: 1622993 - RNA, 19 nt, Artificial Sequence
  Description of Artificial Sequence: Synthetic oligonucleotide
  Sense strand starting at position 1988 of SEQ ID NO: 1560769
cagccuguguuuccugcaa

SEQ ID NO: 1622994 - RNA, 19 nt, Artificial Sequence
  Description of Artificial Sequence: Synthetic oligonucleotide
  Antisense strand to SEQ ID NO: 1622993
uugcaggaaacacaggcug

SEQ ID NO: 1622995 - RNA, 19 nt, Artificial Sequence
  Description of Artificial Sequence: Synthetic oligonucleotide
  Sense strand starting at position 1990 of SEQ ID NO: 1560769
gccuguguuuccugcaaag

SEQ ID NO: 1622996 - RNA, 19 nt, Artificial Sequence
  Description of Artificial Sequence: Synthetic oligonucleotide
  Antisense strand to SEQ ID NO: 1622995
cuuugcaggaaacacaggc

SEQ ID NO: 1622997 - RNA, 19 nt, Artificial Sequence
  Description of Artificial Sequence: Synthetic oligonucleotide
  Sense strand starting at position 1992 of SEQ ID NO: 1560769
cuguguuuccugcaaagga

SEQ ID NO: 1622998 - RNA, 19 nt, Artificial Sequence
  Description of Artificial Sequence: Synthetic oligonucleotide
  Antisense strand to SEQ ID NO: 1622997
uccuuugcaggaaacacag

SEQ ID NO: 1622999 - RNA, 19 nt, Artificial Sequence
  Description of Artificial Sequence: Synthetic oligonucleotide
  Sense strand starting at position 2201 of SEQ ID NO: 1560769
agaauuacggcuugcugaa

SEQ ID NO: 1623000 - RNA, 19 nt, Artificial Sequence
  Description of Artificial Sequence: Synthetic oligonucleotide
  Antisense strand to SEQ ID NO: 1622999
uucagcaagccguaauucu

SEQ ID NO: 1623001 - RNA, 19 nt, Artificial Sequence
  Description of Artificial Sequence: Synthetic oligonucleotide
  Sense strand starting at position 2227 of SEQ ID NO: 1560769
aggugagauuaaugugcaa

SEQ ID NO: 1623002 - RNA, 19 nt, Artificial Sequence
  Description of Artificial Sequence: Synthetic oligonucleotide
  Antisense strand to SEQ ID NO: 1623001
uugcacauuaaucucaccu

SEQ ID NO: 1623003 - RNA, 19 nt, Artificial Sequence
  Description of Artificial Sequence: Synthetic oligonucleotide
  Sense strand starting at position 2229 of SEQ ID NO: 1560769
gugagauuaaugugcaauu

SEQ ID NO: 1623004 - RNA, 19 nt, Artificial Sequence
  Description of Artificial Sequence: Synthetic oligonucleotide
  Antisense strand to SEQ ID NO: 1623003
aauugcacauuaaucucac

SEQ ID NO: 1623005 - RNA, 19 nt, Artificial Sequence
  Description of Artificial Sequence: Synthetic oligonucleotide
  Sense strand starting at position 2230 of SEQ ID NO: 1560769
ugagauuaaugugcaauuc

SEQ ID NO: 1623006 - RNA, 19 nt, Artificial Sequence
  Description of Artificial Sequence: Synthetic oligonucleotide
  Antisense strand to SEQ ID NO: 1623005
gaauugcacauuaaucuca

SEQ ID NO: 1623007 - RNA, 19 nt, Artificial Sequence
  Description of Artificial Sequence: Synthetic oligonucleotide
  Sense strand starting at position 2270 of SEQ ID NO: 1560769
aggugugauaggcgacaga

SEQ ID NO: 1623008 - RNA, 19 nt, Artificial Sequence
  Description of Artificial Sequence: Synthetic oligonucleotide
  Antisense strand to SEQ ID NO: 1623007
ucugucgccuaucacaccu

SEQ ID NO: 1623009 - RNA, 19 nt, Artificial Sequence
  Description of Artificial Sequence: Synthetic oligonucleotide
  Sense strand starting at position 2271 of SEQ ID NO: 1560769
ggugugauaggcgacagaa

SEQ ID NO: 1623010 - RNA, 19 nt, Artificial Sequence
  Description of Artificial Sequence: Synthetic oligonucleotide
  Antisense strand to SEQ ID NO: 1623009
uucugucgccuaucacacc

SEQ ID NO: 1623011 - RNA, 19 nt, Artificial Sequence
  Description of Artificial Sequence: Synthetic oligonucleotide
  Sense strand starting at position 2406 of SEQ ID NO: 1560769
ucccgugacuuccuaaguu

SEQ ID NO: 1623012 - RNA, 19 nt, Artificial Sequence
  Description of Artificial Sequence: Synthetic oligonucleotide
  Antisense strand to SEQ ID NO: 1623011
aacuuaggaagucacggga

SEQ ID NO: 1623013 - RNA, 19 nt, Artificial Sequence
  Description of Artificial Sequence: Synthetic oligonucleotide
  Sense strand starting at position 2410 of SEQ ID NO: 1560769
gugacuuccuaaguuacaa

SEQ ID NO: 1623014 - RNA, 19 nt, Artificial Sequence
  Description of Artificial Sequence: Synthetic oligonucleotide
  Antisense strand to SEQ ID NO: 1623013
uuguaacuuaggaagucac

SEQ ID NO: 1623015 - RNA, 19 nt, Artificial Sequence
  Description of Artificial Sequence: Synthetic oligonucleotide
  Sense strand starting at position 2459 of SEQ ID NO: 1560769
ggugccuccugccuauaaa

SEQ ID NO: 1623016 - RNA, 19 nt, Artificial Sequence
  Description of Artificial Sequence: Synthetic oligonucleotide
  Antisense strand to SEQ ID NO: 1623015
uuuauaggcaggaggcacc

SEQ ID NO: 1623017 - RNA, 19 nt, Artificial Sequence
  Description of Artificial Sequence: Synthetic oligonucleotide
  Sense strand starting at position 2460 of SEQ ID NO: 1560769
gugccuccugccuauaaau

SEQ ID NO: 1623018 - RNA, 19 nt, Artificial Sequence
  Description of Artificial Sequence: Synthetic oligonucleotide
  Antisense strand to SEQ ID NO: 1623017
auuuauaggcaggaggcac

SEQ ID NO: 1623019 - RNA, 19 nt, Artificial Sequence
  Description of Artificial Sequence: Synthetic oligonucleotide
  Sense strand starting at position 3123 of SEQ ID NO: 1560769
uggugcaaucuccauucuu

SEQ ID NO: 1623020 - RNA, 19 nt, Artificial Sequence
  Description of Artificial Sequence: Synthetic oligonucleotide
  Antisense strand to SEQ ID NO: 1623019
aagaauggagauugcacca

SEQ ID NO: 1623021 - RNA, 19 nt, Artificial Sequence
  Description of Artificial Sequence: Synthetic oligonucleotide
  Sense strand starting at position 3291 of SEQ ID NO: 1560769
ccugaugucaggugauuac

SEQ ID NO: 1623022 - RNA, 19 nt, Artificial Sequence
  Description of Artificial Sequence: Synthetic oligonucleotide
  Antisense strand to SEQ ID NO: 1623021
guaaucaccugacaucagg

SEQ ID NO: 1623023 - RNA, 19 nt, Artificial Sequence
  Description of Artificial Sequence: Synthetic oligonucleotide
  Sense strand starting at position 3353 of SEQ ID NO: 1560769
aacaguguauguuguggaa

SEQ ID NO: 1623024 - RNA, 19 nt, Artificial Sequence
  Description of Artificial Sequence: Synthetic oligonucleotide
  Antisense strand to SEQ ID NO: 1623023
uuccacaacauacacuguu

SEQ ID NO: 1623025 - RNA, 19 nt, Artificial Sequence
  Description of Artificial Sequence: Synthetic oligonucleotide
  Sense strand starting at position 3355 of SEQ ID NO: 1560769
caguguauguuguggaaag

SEQ ID NO: 1623026 - RNA, 19 nt, Artificial Sequence
  Description of Artificial Sequence: Synthetic oligonucleotide
  Antisense strand to SEQ ID NO: 1623025
cuuuccacaacauacacug

SEQ ID NO: 1623027 - RNA, 19 nt, Artificial Sequence
  Description of Artificial Sequence: Synthetic oligonucleotide
  Sense strand starting at position 3357 of SEQ ID NO: 1560769
guguauguuguggaaagca

SEQ ID NO: 1623028 - RNA, 19 nt, Artificial Sequence
  Description of Artificial Sequence: Synthetic oligonucleotide
  Antisense strand to SEQ ID NO: 1623027
ugcuuuccacaacauacac

SEQ ID NO: 1623029 - RNA, 19 nt, Artificial Sequence
  Description of Artificial Sequence: Synthetic oligonucleotide
  Sense strand starting at position 3460 of SEQ ID NO: 1560769
gcaugccaucuauagaaau

SEQ ID NO: 1623030 - RNA, 19 nt, Artificial Sequence
  Description of Artificial Sequence: Synthetic oligonucleotide
  Antisense strand to SEQ ID NO: 1623029
auuucuauagauggcaugc

SEQ ID NO: 1623031 - RNA, 19 nt, Artificial Sequence
  Description of Artificial Sequence: Synthetic oligonucleotide
  Sense strand starting at position 3675 of SEQ ID NO: 1560769
aggcguaagaauugauuga

SEQ ID NO: 1623032 - RNA, 19 nt, Artificial Sequence
  Description of Artificial Sequence: Synthetic oligonucleotide
  Antisense strand to SEQ ID NO: 1623031
ucaaucaauucuuacgccu

SEQ ID NO: 1623033 - RNA, 19 nt, Artificial Sequence
  Description of Artificial Sequence: Synthetic oligonucleotide
  Sense strand starting at position 3676 of SEQ ID NO: 1560769
ggcguaagaauugauugaa

SEQ ID NO: 1623034 - RNA, 19 nt, Artificial Sequence
  Description of Artificial Sequence: Synthetic oligonucleotide
  Antisense strand to SEQ ID NO: 1623033
uucaaucaauucuuacgcc

SEQ ID NO: 1623035 - RNA, 19 nt, Artificial Sequence
  Description of Artificial Sequence: Synthetic oligonucleotide
  Sense strand starting at position 3679 of SEQ ID NO: 1560769
guaagaauugauugaaccu

SEQ ID NO: 1623036 - RNA, 19 nt, Artificial Sequence
  Description of Artificial Sequence: Synthetic oligonucleotide
  Antisense strand to SEQ ID NO: 1623035
agguucaaucaauucuuac

SEQ ID NO: 1623037 - RNA, 19 nt, Artificial Sequence
  Description of Artificial Sequence: Synthetic oligonucleotide
  Sense strand starting at position 3794 of SEQ ID NO: 1560769
ggcgcagugguucaugaau

SEQ ID NO: 1623038 - RNA, 19 nt, Artificial Sequence
  Description of Artificial Sequence: Synthetic oligonucleotide
  Antisense strand to SEQ ID NO: 1623037
auucaugaaccacugcgcc

SEQ ID NO: 1623039 - RNA, 19 nt, Artificial Sequence
  Description of Artificial Sequence: Synthetic oligonucleotide
  Sense strand starting at position 3796 of SEQ ID NO: 1560769
cgcagugguucaugaaugu

SEQ ID NO: 1623040 - RNA, 19 nt, Artificial Sequence
  Description of Artificial Sequence: Synthetic oligonucleotide
  Antisense strand to SEQ ID NO: 1623039
acauucaugaaccacugcg

SEQ ID NO: 1623041 - RNA, 19 nt, Artificial Sequence
  Description of Artificial Sequence: Synthetic oligonucleotide
  Sense strand starting at position 3893 of SEQ ID NO: 1560769
agacucccucucugaagaa

SEQ ID NO: 1623042 - RNA, 19 nt, Artificial Sequence
  Description of Artificial Sequence: Synthetic oligonucleotide
  Antisense strand to SEQ ID NO: 1623041
uucuucagagagggagucu

SEQ ID NO: 1623043 - RNA, 19 nt, Artificial Sequence
  Description of Artificial Sequence: Synthetic oligonucleotide
  Sense strand starting at position 43 of SEQ ID NO: 1560770
uccuguguuuauguuuaaa

SEQ ID NO: 1623044 - RNA, 19 nt, Artificial Sequence
  Description of Artificial Sequence: Synthetic oligonucleotide
  Antisense strand to SEQ ID NO: 1623043
uuuaaacauaaacacagga

SEQ ID NO: 1623045 - RNA, 19 nt, Artificial Sequence
  Description of Artificial Sequence: Synthetic oligonucleotide
  Sense strand starting at position 97 of SEQ ID NO: 1560770
gagacugacuacuuguaau

SEQ ID NO: 1623046 - RNA, 19 nt, Artificial Sequence
  Description of Artificial Sequence: Synthetic oligonucleotide
  Antisense strand to SEQ ID NO: 1623045
auuacaaguagucagucuc

SEQ ID NO: 1623047 - RNA, 19 nt, Artificial Sequence
  Description of Artificial Sequence: Synthetic oligonucleotide
  Sense strand starting at position 108 of SEQ ID NO: 1560770
cuuguaauaucagcuauug

SEQ ID NO: 1623048 - RNA, 19 nt, Artificial Sequence
  Description of Artificial Sequence: Synthetic oligonucleotide
  Antisense strand to SEQ ID NO: 1623047
caauagcugauauuacaag

SEQ ID NO: 1623049 - RNA, 19 nt, Artificial Sequence
  Description of Artificial Sequence: Synthetic oligonucleotide
  Sense strand starting at position 147 of SEQ ID NO: 1560770
ccuaucauguuucuggauu

SEQ ID NO: 1623050 - RNA, 19 nt, Artificial Sequence
  Description of Artificial Sequence: Synthetic oligonucleotide
  Antisense strand to SEQ ID NO: 1623049
aauccagaaacaugauagg

SEQ ID NO: 1623051 - RNA, 19 nt, Artificial Sequence
  Description of Artificial Sequence: Synthetic oligonucleotide
  Sense strand starting at position 153 of SEQ ID NO: 1560770
auguuucuggauuggugua

SEQ ID NO: 1623052 - RNA, 19 nt, Artificial Sequence
  Description of Artificial Sequence: Synthetic oligonucleotide
  Antisense strand to SEQ ID NO: 1623051
uacaccaauccagaaacau

SEQ ID NO: 1623053 - RNA, 19 nt, Artificial Sequence
  Description of Artificial Sequence: Synthetic oligonucleotide
  Sense strand starting at position 155 of SEQ ID NO: 1560770
guuucuggauugguguauu

SEQ ID NO: 1623054 - RNA, 19 nt, Artificial Sequence
  Description of Artificial Sequence: Synthetic oligonucleotide
  Antisense strand to SEQ ID NO: 1623053
aauacaccaauccagaaac

SEQ ID NO: 1623055 - RNA, 19 nt, Artificial Sequence
  Description of Artificial Sequence: Synthetic oligonucleotide
  Sense strand starting at position 205 of SEQ ID NO: 1560770
cagggucuauguuccaaga

SEQ ID NO: 1623056 - RNA, 19 nt, Artificial Sequence
  Description of Artificial Sequence: Synthetic oligonucleotide
  Antisense strand to SEQ ID NO: 1623055
ucuuggaacauagacccug

SEQ ID NO: 1623057 - RNA, 19 nt, Artificial Sequence
  Description of Artificial Sequence: Synthetic oligonucleotide
  Sense strand starting at position 687 of SEQ ID NO: 1560770
uaucauaaacgguauguaa

SEQ ID NO: 1623058 - RNA, 19 nt, Artificial Sequence
  Description of Artificial Sequence: Synthetic oligonucleotide
  Antisense strand to SEQ ID NO: 1623057
uuacauaccguuuaugaua

SEQ ID NO: 1623059 - RNA, 19 nt, Artificial Sequence
  Description of Artificial Sequence: Synthetic oligonucleotide
  Sense strand starting at position 689 of SEQ ID NO: 1560770
ucauaaacgguauguaaau

SEQ ID NO: 1623060 - RNA, 19 nt, Artificial Sequence
  Description of Artificial Sequence: Synthetic oligonucleotide
  Antisense strand to SEQ ID NO: 1623059
auuuacauaccguuuauga

SEQ ID NO: 1623061 - RNA, 19 nt, Artificial Sequence
  Description of Artificial Sequence: Synthetic oligonucleotide
  Sense strand starting at position 726 of SEQ ID NO: 1560770
agaauaucucaguguacug

SEQ ID NO: 1623062 - RNA, 19 nt, Artificial Sequence
  Description of Artificial Sequence: Synthetic oligonucleotide
  Antisense strand to SEQ ID NO: 1623061
caguacacugagauauucu

SEQ ID NO: 1623063 - RNA, 19 nt, Artificial Sequence
  Description of Artificial Sequence: Synthetic oligonucleotide
  Sense strand starting at position 733 of SEQ ID NO: 1560770
cucaguguacuguacucau

SEQ ID NO: 1623064 - RNA, 19 nt, Artificial Sequence
  Description of Artificial Sequence: Synthetic oligonucleotide
  Antisense strand to SEQ ID NO: 1623063
augaguacaguacacugag

SEQ ID NO: 1623065 - RNA, 19 nt, Artificial Sequence
  Description of Artificial Sequence: Synthetic oligonucleotide
  Sense strand starting at position 736 of SEQ ID NO: 1560770
aguguacuguacucaucua

SEQ ID NO: 1623066 - RNA, 19 nt, Artificial Sequence
  Description of Artificial Sequence: Synthetic oligonucleotide
  Antisense strand to SEQ ID NO: 1623065
uagaugaguacaguacacu

SEQ ID NO: 1623067 - RNA, 19 nt, Artificial Sequence
  Description of Artificial Sequence: Synthetic oligonucleotide
  Sense strand starting at position 833 of SEQ ID NO: 1560770
ucauauugaagaugagguu

SEQ ID NO: 1623068 - RNA, 19 nt, Artificial Sequence
  Description of Artificial Sequence: Synthetic oligonucleotide
  Antisense strand to SEQ ID NO: 1623067
aaccucaucuucaauauga

SEQ ID NO: 1623069 - RNA, 19 nt, Artificial Sequence
  Description of Artificial Sequence: Synthetic oligonucleotide
  Sense strand starting at position 861 of SEQ ID NO: 1560770
aauauccuccagugggauu

SEQ ID NO: 1623070 - RNA, 19 nt, Artificial Sequence
  Description of Artificial Sequence: Synthetic oligonucleotide
  Antisense strand to SEQ ID NO: 1623069
aaucccacuggaggauauu

SEQ ID NO: 1623071 - RNA, 19 nt, Artificial Sequence
  Description of Artificial Sequence: Synthetic oligonucleotide
  Sense strand starting at position 882 of SEQ ID NO: 1560770
cccuuuguugcugcgaaau

SEQ ID NO: 1623072 - RNA, 19 nt, Artificial Sequence
  Description of Artificial Sequence: Synthetic oligonucleotide
  Antisense strand to SEQ ID NO: 1623071
auuucgcagcaacaaaggg

SEQ ID NO: 1623073 - RNA, 19 nt, Artificial Sequence
  Description of Artificial Sequence: Synthetic oligonucleotide
  Sense strand starting at position 1455 of SEQ ID NO: 1560770
uuugcuuucuugcucagaa

SEQ ID NO: 1623074 - RNA, 19 nt, Artificial Sequence
  Description of Artificial Sequence: Synthetic oligonucleotide
  Antisense strand to SEQ ID NO: 1623073
uucugagcaagaaagcaaa

SEQ ID NO: 1623075 - RNA, 19 nt, Artificial Sequence
  Description of Artificial Sequence: Synthetic oligonucleotide
  Sense strand starting at position 1456 of SEQ ID NO: 1560770
uugcuuucuugcucagaag

SEQ ID NO: 1623076 - RNA, 19 nt, Artificial Sequence
  Description of Artificial Sequence: Synthetic oligonucleotide
  Antisense strand to SEQ ID NO: 1623075
cuucugagcaagaaagcaa

SEQ ID NO: 1623077 - RNA, 19 nt, Artificial Sequence
  Description of Artificial Sequence: Synthetic oligonucleotide
  Sense strand starting at position 1490 of SEQ ID NO: 1560770
ggguggugacuagaguagu

SEQ ID NO: 1623078 - RNA, 19 nt, Artificial Sequence
  Description of Artificial Sequence: Synthetic oligonucleotide
  Antisense strand to SEQ ID NO: 1623077
acuacucuagucaccaccc

SEQ ID NO: 1623079 - RNA, 19 nt, Artificial Sequence
  Description of Artificial Sequence: Synthetic oligonucleotide
  Sense strand starting at position 1493 of SEQ ID NO: 1560770
uggugacuagaguaguuua

SEQ ID NO: 1623080 - RNA, 19 nt, Artificial Sequence
  Description of Artificial Sequence: Synthetic oligonucleotide
  Antisense strand to SEQ ID NO: 1623079
uaaacuacucuagucacca

SEQ ID NO: 1623081 - RNA, 19 nt, Artificial Sequence
  Description of Artificial Sequence: Synthetic oligonucleotide
  Sense strand starting at position 1496 of SEQ ID NO: 1560770
ugacuagaguaguuuagcu

SEQ ID NO: 1623082 - RNA, 19 nt, Artificial Sequence
  Description of Artificial Sequence: Synthetic oligonucleotide
  Antisense strand to SEQ ID NO: 1623081
agcuaaacuacucuaguca

SEQ ID NO: 1623083 - RNA, 19 nt, Artificial Sequence
  Description of Artificial Sequence: Synthetic oligonucleotide
  Sense strand starting at position 2053 of SEQ ID NO: 1560770
aacagauucguguaaugcu

SEQ ID NO: 1623084 - RNA, 19 nt, Artificial Sequence
  Description of Artificial Sequence: Synthetic oligonucleotide
  Antisense strand to SEQ ID NO: 1623083
agcauuacacgaaucuguu

SEQ ID NO: 1623085 - RNA, 19 nt, Artificial Sequence
  Description of Artificial Sequence: Synthetic oligonucleotide
  Sense strand starting at position 2066 of SEQ ID NO: 1560770
aaugcuuacuuggcaggua

SEQ ID NO: 1623086 - RNA, 19 nt, Artificial Sequence
  Description of Artificial Sequence: Synthetic oligonucleotide
  Antisense strand to SEQ ID NO: 1623085
uaccugccaaguaagcauu

SEQ ID NO: 1623087 - RNA, 19 nt, Artificial Sequence
  Description of Artificial Sequence: Synthetic oligonucleotide
  Sense strand starting at position 2182 of SEQ ID NO: 1560770
agacuaauggauuguuugu

SEQ ID NO: 1623088 - RNA, 19 nt, Artificial Sequence
  Description of Artificial Sequence: Synthetic oligonucleotide
  Antisense strand to SEQ ID NO: 1623087
acaaacaauccauuagucu

SEQ ID NO: 1623089 - RNA, 19 nt, Artificial Sequence
  Description of Artificial Sequence: Synthetic oligonucleotide
  Sense strand starting at position 2187 of SEQ ID NO: 1560770
aauggauuguuuguaguuu

SEQ ID NO: 1623090 - RNA, 19 nt, Artificial Sequence
  Description of Artificial Sequence: Synthetic oligonucleotide
  Antisense strand to SEQ ID NO: 1623089
aaacuacaaacaauccauu

SEQ ID NO: 1623091 - RNA, 19 nt, Artificial Sequence
  Description of Artificial Sequence: Synthetic oligonucleotide
  Sense strand starting at position 2191 of SEQ ID NO: 1560770
gauuguuuguaguuucuau

SEQ ID NO: 1623092 - RNA, 19 nt, Artificial Sequence
  Description of Artificial Sequence: Synthetic oligonucleotide
  Antisense strand to SEQ ID NO: 1623091
auagaaacuacaaacaauc

SEQ ID NO: 1623093 - RNA, 19 nt, Artificial Sequence
  Description of Artificial Sequence: Synthetic oligonucleotide
  Sense strand starting at position 2198 of SEQ ID NO: 1560770
uguaguuucuauucuccau

SEQ ID NO: 1623094 - RNA, 19 nt, Artificial Sequence
  Description of Artificial Sequence: Synthetic oligonucleotide
  Antisense strand to SEQ ID NO: 1623093
auggagaauagaaacuaca

SEQ ID NO: 1623095 - RNA, 19 nt, Artificial Sequence
  Description of Artificial Sequence: Synthetic oligonucleotide
  Sense strand starting at position 2202 of SEQ ID NO: 1560770
guuucuauucuccaugacu

SEQ ID NO: 1623096 - RNA, 19 nt, Artificial Sequence
  Description of Artificial Sequence: Synthetic oligonucleotide
  Antisense strand to SEQ ID NO: 1623095
agucauggagaauagaaac

SEQ ID NO: 1623097 - RNA, 19 nt, Artificial Sequence
  Description of Artificial Sequence: Synthetic oligonucleotide
  Sense strand starting at position 2325 of SEQ ID NO: 1560770
aaauauaugguugguuaga

SEQ ID NO: 1623098 - RNA, 19 nt, Artificial Sequence
  Description of Artificial Sequence: Synthetic oligonucleotide
  Antisense strand to SEQ ID NO: 1623097
ucuaaccaaccauauauuu

SEQ ID NO: 1623099 - RNA, 19 nt, Artificial Sequence
  Description of Artificial Sequence: Synthetic oligonucleotide
  Sense strand starting at position 2326 of SEQ ID NO: 1560770
aauauaugguugguuagaa

SEQ ID NO: 1623100 - RNA, 19 nt, Artificial Sequence
  Description of Artificial Sequence: Synthetic oligonucleotide
  Antisense strand to SEQ ID NO: 1623099
uucuaaccaaccauauauu

SEQ ID NO: 1623101 - RNA, 19 nt, Artificial Sequence
  Description of Artificial Sequence: Synthetic oligonucleotide
  Sense strand starting at position 2327 of SEQ ID NO: 1560770
auauaugguugguuagaag

SEQ ID NO: 1623102 - RNA, 19 nt, Artificial Sequence
  Description of Artificial Sequence: Synthetic oligonucleotide
  Antisense strand to SEQ ID NO: 1623101
cuucuaaccaaccauauau

SEQ ID NO: 1623103 - RNA, 19 nt, Artificial Sequence
  Description of Artificial Sequence: Synthetic oligonucleotide
  Sense strand starting at position 2338 of SEQ ID NO: 1560770
guuagaaggcuccauuaga

SEQ ID NO: 1623104 - RNA, 19 nt, Artificial Sequence
  Description of Artificial Sequence: Synthetic oligonucleotide
  Antisense strand to SEQ ID NO: 1623103
ucuaauggagccuucuaac

SEQ ID NO: 1623105 - RNA, 19 nt, Artificial Sequence
  Description of Artificial Sequence: Synthetic oligonucleotide
  Sense strand starting at position 2404 of SEQ ID NO: 1560770
gaucauguauuagagagau

SEQ ID NO: 1623106 - RNA, 19 nt, Artificial Sequence
  Description of Artificial Sequence: Synthetic oligonucleotide
  Antisense strand to SEQ ID NO: 1623105
aucucucuaauacaugauc

SEQ ID NO: 1623107 - RNA, 19 nt, Artificial Sequence
  Description of Artificial Sequence: Synthetic oligonucleotide
  Sense strand starting at position 2410 of SEQ ID NO: 1560770
guauuagagagaugcaaau

SEQ ID NO: 1623108 - RNA, 19 nt, Artificial Sequence
  Description of Artificial Sequence: Synthetic oligonucleotide
  Antisense strand to SEQ ID NO: 1623107
auuugcaucucucuaauac

SEQ ID NO: 1623109 - RNA, 19 nt, Artificial Sequence
  Description of Artificial Sequence: Synthetic oligonucleotide
  Sense strand starting at position 2797 of SEQ ID NO: 1560770
gacacauuccuguguaugu

SEQ ID NO: 1623110 - RNA, 19 nt, Artificial Sequence
  Description of Artificial Sequence: Synthetic oligonucleotide
  Antisense strand to SEQ ID NO: 1623109
acauacacaggaauguguc

SEQ ID NO: 1623111 - RNA, 19 nt, Artificial Sequence
  Description of Artificial Sequence: Synthetic oligonucleotide
  Sense strand starting at position 2798 of SEQ ID NO: 1560770
acacauuccuguguauguu

SEQ ID NO: 1623112 - RNA, 19 nt, Artificial Sequence
  Description of Artificial Sequence: Synthetic oligonucleotide
  Antisense strand to SEQ ID NO: 1623111
aacauacacaggaaugugu

SEQ ID NO: 1623113 - RNA, 19 nt, Artificial Sequence
  Description of Artificial Sequence: Synthetic oligonucleotide
  Sense strand starting at position 2972 of SEQ ID NO: 1560770
gccagagaccauuauuccu

SEQ ID NO: 1623114 - RNA, 19 nt, Artificial Sequence
  Description of Artificial Sequence: Synthetic oligonucleotide
  Antisense strand to SEQ ID NO: 1623113
aggaauaauggucucuggc

SEQ ID NO: 1623115 - RNA, 19 nt, Artificial Sequence
  Description of Artificial Sequence: Synthetic oligonucleotide
  Sense strand starting at position 3040 of SEQ ID NO: 1560770
auaagugguagcuaaacga

SEQ ID NO: 1623116 - RNA, 19 nt, Artificial Sequence
  Description of Artificial Sequence: Synthetic oligonucleotide
  Antisense strand to SEQ ID NO: 1623115
ucguuuagcuaccacuuau

SEQ ID NO: 1623117 - RNA, 19 nt, Artificial Sequence
  Description of Artificial Sequence: Synthetic oligonucleotide
  Sense strand starting at position 3288 of SEQ ID NO: 1560770
aaaggaucauggguguauu

SEQ ID NO: 1623118 - RNA, 19 nt, Artificial Sequence
  Description of Artificial Sequence: Synthetic oligonucleotide
  Antisense strand to SEQ ID NO: 1623117
aauacacccaugauccuuu

SEQ ID NO: 1623119 - RNA, 19 nt, Artificial Sequence
  Description of Artificial Sequence: Synthetic oligonucleotide
  Sense strand starting at position 3711 of SEQ ID NO: 1560770
ggauaaacuuguuuaauug

SEQ ID NO: 1623120 - RNA, 19 nt, Artificial Sequence
  Description of Artificial Sequence: Synthetic oligonucleotide
  Antisense strand to SEQ ID NO: 1623119
caauuaaacaaguuuaucc

SEQ ID NO: 1623121 - RNA, 19 nt, Artificial Sequence
  Description of Artificial Sequence: Synthetic oligonucleotide
  Sense strand starting at position 3933 of SEQ ID NO: 1560770
uuaagaaauuugcaggacu

SEQ ID NO: 1623122 - RNA, 19 nt, Artificial Sequence
  Description of Artificial Sequence: Synthetic oligonucleotide
  Antisense strand to SEQ ID NO: 1623121
aguccugcaaauuucuuaa

SEQ ID NO: 1623123 - RNA, 19 nt, Artificial Sequence
  Description of Artificial Sequence: Synthetic oligonucleotide
  Sense strand starting at position 620 of SEQ ID NO: 1560771
gggagaagauaacaaucau

SEQ ID NO: 1623124 - RNA, 19 nt, Artificial Sequence
  Description of Artificial Sequence: Synthetic oligonucleotide
  Antisense strand to SEQ ID NO: 1623123
augauuguuaucuucuccc

SEQ ID NO: 1623125 - RNA, 19 nt, Artificial Sequence
  Description of Artificial Sequence: Synthetic oligonucleotide
  Sense strand starting at position 658 of SEQ ID NO: 1560771
cuagauaccuaauagggaa

SEQ ID NO: 1623126 - RNA, 19 nt, Artificial Sequence
  Description of Artificial Sequence: Synthetic oligonucleotide
  Antisense strand to SEQ ID NO: 1623125
uucccuauuagguaucuag

SEQ ID NO: 1623127 - RNA, 19 nt, Artificial Sequence
  Description of Artificial Sequence: Synthetic oligonucleotide
  Sense strand starting at position 724 of SEQ ID NO: 1560771
caucaaugaguccagcaga

SEQ ID NO: 1623128 - RNA, 19 nt, Artificial Sequence
  Description of Artificial Sequence: Synthetic oligonucleotide
  Antisense strand to SEQ ID NO: 1623127
ucugcuggacucauugaug

SEQ ID NO: 1623129 - RNA, 19 nt, Artificial Sequence
  Description of Artificial Sequence: Synthetic oligonucleotide
  Sense strand starting at position 727 of SEQ ID NO: 1560771
caaugaguccagcagaacu

SEQ ID NO: 1623130 - RNA, 19 nt, Artificial Sequence
  Description of Artificial Sequence: Synthetic oligonucleotide
  Antisense strand to SEQ ID NO: 1623129
aguucugcuggacucauug

SEQ ID NO: 1623131 - RNA, 19 nt, Artificial Sequence
  Description of Artificial Sequence: Synthetic oligonucleotide
  Sense strand starting at position 750 of SEQ ID NO: 1560771
cggagucagaucugucacu

SEQ ID NO: 1623132 - RNA, 19 nt, Artificial Sequence
  Description of Artificial Sequence: Synthetic oligonucleotide
  Antisense strand to SEQ ID NO: 1623131
agugacagaucugacuccg

SEQ ID NO: 1623133 - RNA, 19 nt, Artificial Sequence
  Description of Artificial Sequence: Synthetic oligonucleotide
  Sense strand starting at position 751 of SEQ ID NO: 1560771
ggagucagaucugucacuu

SEQ ID NO: 1623134 - RNA, 19 nt, Artificial Sequence
  Description of Artificial Sequence: Synthetic oligonucleotide
  Antisense strand to SEQ ID NO: 1623133
aagugacagaucugacucc

SEQ ID NO: 1623135 - RNA, 19 nt, Artificial Sequence
  Description of Artificial Sequence: Synthetic oligonucleotide
  Sense strand starting at position 826 of SEQ ID NO: 1560771
aaccuuuccuggguuguga

SEQ ID NO: 1623136 - RNA, 19 nt, Artificial Sequence
  Description of Artificial Sequence: Synthetic oligonucleotide
  Antisense strand to SEQ ID NO: 1623135
ucacaacccaggaaagguu

SEQ ID NO: 1623137 - RNA, 19 nt, Artificial Sequence
  Description of Artificial Sequence: Synthetic oligonucleotide
  Sense strand starting at position 828 of SEQ ID NO: 1560771
ccuuuccuggguugugaua

SEQ ID NO: 1623138 - RNA, 19 nt, Artificial Sequence
  Description of Artificial Sequence: Synthetic oligonucleotide
  Antisense strand to SEQ ID NO: 1623137
uaucacaacccaggaaagg

SEQ ID NO: 1623139 - RNA, 19 nt, Artificial Sequence
  Description of Artificial Sequence: Synthetic oligonucleotide
  Sense strand starting at position 872 of SEQ ID NO: 1560771
gaaugcuuccaggacguga

SEQ ID NO: 1623140 - RNA, 19 nt, Artificial Sequence
  Description of Artificial Sequence: Synthetic oligonucleotide
  Antisense strand to SEQ ID NO: 1623139
ucacguccuggaagcauuc

SEQ ID NO: 1623141 - RNA, 19 nt, Artificial Sequence
  Description of Artificial Sequence: Synthetic oligonucleotide
  Sense strand starting at position 1121 of SEQ ID NO: 1560771
caagaaugcuuccuguagu

SEQ ID NO: 1623142 - RNA, 19 nt, Artificial Sequence
  Description of Artificial Sequence: Synthetic oligonucleotide
  Antisense strand to SEQ ID NO: 1623141
acuacaggaagcauucuug

SEQ ID NO: 1623143 - RNA, 19 nt, Artificial Sequence
  Description of Artificial Sequence: Synthetic oligonucleotide
  Sense strand starting at position 1132 of SEQ ID NO: 1560771
ccuguaguacccgggacau

SEQ ID NO: 1623144 - RNA, 19 nt, Artificial Sequence
  Description of Artificial Sequence: Synthetic oligonucleotide
  Antisense strand to SEQ ID NO: 1623143
augucccggguacuacagg

SEQ ID NO: 1623145 - RNA, 19 nt, Artificial Sequence
  Description of Artificial Sequence: Synthetic oligonucleotide
  Sense strand starting at position 1154 of SEQ ID NO: 1560771
cugucugauugucuuaaga

SEQ ID NO: 1623146 - RNA, 19 nt, Artificial Sequence
  Description of Artificial Sequence: Synthetic oligonucleotide
  Antisense strand to SEQ ID NO: 1623145
ucuuaagacaaucagacag

SEQ ID NO: 1623147 - RNA, 19 nt, Artificial Sequence
  Description of Artificial Sequence: Synthetic oligonucleotide
  Sense strand starting at position 1175 of SEQ ID NO: 1560771
cuaccuacuccuugguaca

SEQ ID NO: 1623148 - RNA, 19 nt, Artificial Sequence
  Description of Artificial Sequence: Synthetic oligonucleotide
  Antisense strand to SEQ ID NO: 1623147
uguaccaaggaguagguag

SEQ ID NO: 1623149 - RNA, 19 nt, Artificial Sequence
  Description of Artificial Sequence: Synthetic oligonucleotide
  Sense strand starting at position 1186 of SEQ ID NO: 1560771
uugguacaugucuggucaa

SEQ ID NO: 1623150 - RNA, 19 nt, Artificial Sequence
  Description of Artificial Sequence: Synthetic oligonucleotide
  Antisense strand to SEQ ID NO: 1623149
uugaccagacauguaccaa

SEQ ID NO: 1623151 - RNA, 19 nt, Artificial Sequence
  Description of Artificial Sequence: Synthetic oligonucleotide
  Sense strand starting at position 1480 of SEQ ID NO: 1560771
aggugaacaguugguauca

SEQ ID NO: 1623152 - RNA, 19 nt, Artificial Sequence
  Description of Artificial Sequence: Synthetic oligonucleotide
  Antisense strand to SEQ ID NO: 1623151
ugauaccaacuguucaccu

SEQ ID NO: 1623153 - RNA, 19 nt, Artificial Sequence
  Description of Artificial Sequence: Synthetic oligonucleotide
  Sense strand starting at position 1707 of SEQ ID NO: 1560771
ugagccuuuguccagagau

SEQ ID NO: 1623154 - RNA, 19 nt, Artificial Sequence
  Description of Artificial Sequence: Synthetic oligonucleotide
  Antisense strand to SEQ ID NO: 1623153
aucucuggacaaaggcuca

SEQ ID NO: 1623155 - RNA, 19 nt, Artificial Sequence
  Description of Artificial Sequence: Synthetic oligonucleotide
  Sense strand starting at position 1709 of SEQ ID NO: 1560771
agccuuuguccagagaucu

SEQ ID NO: 1623156 - RNA, 19 nt, Artificial Sequence
  Description of Artificial Sequence: Synthetic oligonucleotide
  Antisense strand to SEQ ID NO: 1623155
agaucucuggacaaaggcu

SEQ ID NO: 1623157 - RNA, 19 nt, Artificial Sequence
  Description of Artificial Sequence: Synthetic oligonucleotide
  Sense strand starting at position 1729 of SEQ ID NO: 1560771
uccuauugaucuguagaaa

SEQ ID NO: 1623158 - RNA, 19 nt, Artificial Sequence
  Description of Artificial Sequence: Synthetic oligonucleotide
  Antisense strand to SEQ ID NO: 1623157
uuucuacagaucaauagga

SEQ ID NO: 1623159 - RNA, 19 nt, Artificial Sequence
  Description of Artificial Sequence: Synthetic oligonucleotide
  Sense strand starting at position 1773 of SEQ ID NO: 1560771
ugcuuuccuggguaauguu

SEQ ID NO: 1623160 - RNA, 19 nt, Artificial Sequence
  Description of Artificial Sequence: Synthetic oligonucleotide
  Antisense strand to SEQ ID NO: 1623159
aacauuacccaggaaagca

SEQ ID NO: 1623161 - RNA, 19 nt, Artificial Sequence
  Description of Artificial Sequence: Synthetic oligonucleotide
  Sense strand starting at position 1869 of SEQ ID NO: 1560771
uccaaagguuguuugagga

SEQ ID NO: 1623162 - RNA, 19 nt, Artificial Sequence
  Description of Artificial Sequence: Synthetic oligonucleotide
  Antisense strand to SEQ ID NO: 1623161
uccucaaacaaccuuugga

SEQ ID NO: 1623163 - RNA, 19 nt, Artificial Sequence
  Description of Artificial Sequence: Synthetic oligonucleotide
  Sense strand starting at position 2050 of SEQ ID NO: 1560771
ggagaagaaugacaugauu

SEQ ID NO: 1623164 - RNA, 19 nt, Artificial Sequence
  Description of Artificial Sequence: Synthetic oligonucleotide
  Antisense strand to SEQ ID NO: 1623163
aaucaugucauucuucucc

SEQ ID NO: 1623165 - RNA, 19 nt, Artificial Sequence
  Description of Artificial Sequence: Synthetic oligonucleotide
  Sense strand starting at position 2107 of SEQ ID NO: 1560771
uauugauaucaucaugcgu

SEQ ID NO: 1623166 - RNA, 19 nt, Artificial Sequence
  Description of Artificial Sequence: Synthetic oligonucleotide
  Antisense strand to SEQ ID NO: 1623165
acgcaugaugauaucaaua

SEQ ID NO: 1623167 - RNA, 19 nt, Artificial Sequence
  Description of Artificial Sequence: Synthetic oligonucleotide
  Sense strand starting at position 2123 of SEQ ID NO: 1560771
cguagcuugcaccaaacau

SEQ ID NO: 1623168 - RNA, 19 nt, Artificial Sequence
  Description of Artificial Sequence: Synthetic oligonucleotide
  Antisense strand to SEQ ID NO: 1623167
auguuuggugcaagcuacg

SEQ ID NO: 1623169 - RNA, 19 nt, Artificial Sequence
  Description of Artificial Sequence: Synthetic oligonucleotide
  Sense strand starting at position 2176 of SEQ ID NO: 1560771
aaugcaugugaaugguaga

SEQ ID NO: 1623170 - RNA, 19 nt, Artificial Sequence
  Description of Artificial Sequence: Synthetic oligonucleotide
  Antisense strand to SEQ ID NO: 1623169
ucuaccauucacaugcauu

SEQ ID NO: 1623171 - RNA, 19 nt, Artificial Sequence
  Description of Artificial Sequence: Synthetic oligonucleotide
  Sense strand starting at position 2189 of SEQ ID NO: 1560771
gguagaguugacugccacu

SEQ ID NO: 1623172 - RNA, 19 nt, Artificial Sequence
  Description of Artificial Sequence: Synthetic oligonucleotide
  Antisense strand to SEQ ID NO: 1623171
aguggcagucaacucuacc

SEQ ID NO: 1623173 - RNA, 19 nt, Artificial Sequence
  Description of Artificial Sequence: Synthetic oligonucleotide
  Sense strand starting at position 2202 of SEQ ID NO: 1560771
gccacuuaugugucuuguu

SEQ ID NO: 1623174 - RNA, 19 nt, Artificial Sequence
  Description of Artificial Sequence: Synthetic oligonucleotide
  Antisense strand to SEQ ID NO: 1623173
aacaagacacauaaguggc

SEQ ID NO: 1623175 - RNA, 19 nt, Artificial Sequence
  Description of Artificial Sequence: Synthetic oligonucleotide
  Sense strand starting at position 2263 of SEQ ID NO: 1560771
uguaguuugguguauauaa

SEQ ID NO: 1623176 - RNA, 19 nt, Artificial Sequence
  Description of Artificial Sequence: Synthetic oligonucleotide
  Antisense strand to SEQ ID NO: 1623175
uuauauacaccaaacuaca

SEQ ID NO: 1623177 - RNA, 19 nt, Artificial Sequence
  Description of Artificial Sequence: Synthetic oligonucleotide
  Sense strand starting at position 2332 of SEQ ID NO: 1560771
ucaccauguuugcuacaua

SEQ ID NO: 1623178 - RNA, 19 nt, Artificial Sequence
  Description of Artificial Sequence: Synthetic oligonucleotide
  Antisense strand to SEQ ID NO: 1623177
uauguagcaaacaugguga

SEQ ID NO: 1623179 - RNA, 19 nt, Artificial Sequence
  Description of Artificial Sequence: Synthetic oligonucleotide
  Sense strand starting at position 2364 of SEQ ID NO: 1560771
uucccuuguguauauaauu

SEQ ID NO: 1623180 - RNA, 19 nt, Artificial Sequence
  Description of Artificial Sequence: Synthetic oligonucleotide
  Antisense strand to SEQ ID NO: 1623179
aauuauauacacaagggaa

SEQ ID NO: 1623181 - RNA, 19 nt, Artificial Sequence
  Description of Artificial Sequence: Synthetic oligonucleotide
  Sense strand starting at position 2395 of SEQ ID NO: 1560771
accagcauucuaugaguuu

SEQ ID NO: 1623182 - RNA, 19 nt, Artificial Sequence
  Description of Artificial Sequence: Synthetic oligonucleotide
  Antisense strand to SEQ ID NO: 1623181
aaacucauagaaugcuggu

SEQ ID NO: 1623183 - RNA, 19 nt, Artificial Sequence
  Description of Artificial Sequence: Synthetic oligonucleotide
  Sense strand starting at position 2430 of SEQ ID NO: 1560771
uucccauccuuaguauagu

SEQ ID NO: 1623184 - RNA, 19 nt, Artificial Sequence
  Description of Artificial Sequence: Synthetic oligonucleotide
  Antisense strand to SEQ ID NO: 1623183
acuauacuaaggaugggaa

SEQ ID NO: 1623185 - RNA, 19 nt, Artificial Sequence
  Description of Artificial Sequence: Synthetic oligonucleotide
  Sense strand starting at position 2436 of SEQ ID NO: 1560771
uccuuaguauagucuaauc

SEQ ID NO: 1623186 - RNA, 19 nt, Artificial Sequence
  Description of Artificial Sequence: Synthetic oligonucleotide
  Antisense strand to SEQ ID NO: 1623185
gauuagacuauacuaagga

SEQ ID NO: 1623187 - RNA, 19 nt, Artificial Sequence
  Description of Artificial Sequence: Synthetic oligonucleotide
  Sense strand starting at position 2438 of SEQ ID NO: 1560771
cuuaguauagucuaaucca

SEQ ID NO: 1623188 - RNA, 19 nt, Artificial Sequence
  Description of Artificial Sequence: Synthetic oligonucleotide
  Antisense strand to SEQ ID NO: 1623187
uggauuagacuauacuaag

SEQ ID NO: 1623189 - RNA, 19 nt, Artificial Sequence
  Description of Artificial Sequence: Synthetic oligonucleotide
  Sense strand starting at position 2441 of SEQ ID NO: 1560771
aguauagucuaauccaauu

SEQ ID NO: 1623190 - RNA, 19 nt, Artificial Sequence
  Description of Artificial Sequence: Synthetic oligonucleotide
  Antisense strand to SEQ ID NO: 1623189
aauuggauuagacuauacu

SEQ ID NO: 1623191 - RNA, 19 nt, Artificial Sequence
  Description of Artificial Sequence: Synthetic oligonucleotide
  Sense strand starting at position 2938 of SEQ ID NO: 1560771
uuagcaucugcagacaacu

SEQ ID NO: 1623192 - RNA, 19 nt, Artificial Sequence
  Description of Artificial Sequence: Synthetic oligonucleotide
  Antisense strand to SEQ ID NO: 1623191
aguugucugcagaugcuaa

SEQ ID NO: 1623193 - RNA, 19 nt, Artificial Sequence
  Description of Artificial Sequence: Synthetic oligonucleotide
  Sense strand starting at position 2976 of SEQ ID NO: 1560771
gaacguucccaguauuaua

SEQ ID NO: 1623194 - RNA, 19 nt, Artificial Sequence
  Description of Artificial Sequence: Synthetic oligonucleotide
  Antisense strand to SEQ ID NO: 1623193
uauaauacugggaacguuc

SEQ ID NO: 1623195 - RNA, 19 nt, Artificial Sequence
  Description of Artificial Sequence: Synthetic oligonucleotide
  Sense strand starting at position 3043 of SEQ ID NO: 1560771
agaaauauaugguagacaa

SEQ ID NO: 1623196 - RNA, 19 nt, Artificial Sequence
  Description of Artificial Sequence: Synthetic oligonucleotide
  Antisense strand to SEQ ID NO: 1623195
uugucuaccauauauuucu

SEQ ID NO: 1623197 - RNA, 19 nt, Artificial Sequence
  Description of Artificial Sequence: Synthetic oligonucleotide
  Sense strand starting at position 3140 of SEQ ID NO: 1560771
acuagaaugcaaugguaug

SEQ ID NO: 1623198 - RNA, 19 nt, Artificial Sequence
  Description of Artificial Sequence: Synthetic oligonucleotide
  Antisense strand to SEQ ID NO: 1623197
cauaccauugcauucuagu

SEQ ID NO: 1623199 - RNA, 19 nt, Artificial Sequence
  Description of Artificial Sequence: Synthetic oligonucleotide
  Sense strand starting at position 3684 of SEQ ID NO: 1560771
auaugugcaccugggaaua

SEQ ID NO: 1623200 - RNA, 19 nt, Artificial Sequence
  Description of Artificial Sequence: Synthetic oligonucleotide
  Antisense strand to SEQ ID NO: 1623199
uauucccaggugcacauau

SEQ ID NO: 1623201 - RNA, 19 nt, Artificial Sequence
  Description of Artificial Sequence: Synthetic oligonucleotide
  Sense strand starting at position 3726 of SEQ ID NO: 1560771
ugacaaacgcaauaucauu

SEQ ID NO: 1623202 - RNA, 19 nt, Artificial Sequence
  Description of Artificial Sequence: Synthetic oligonucleotide
  Antisense strand to SEQ ID NO: 1623201
aaugauauugcguuuguca

SEQ ID NO: 1623203 - RNA, 19 nt, Artificial Sequence
  Description of Artificial Sequence: Synthetic oligonucleotide
  Sense strand starting at position 24 of SEQ ID NO: 1560772
agacucccaucuguauuau

SEQ ID NO: 1623204 - RNA, 19 nt, Artificial Sequence
  Description of Artificial Sequence: Synthetic oligonucleotide
  Antisense strand to SEQ ID NO: 1623203
auaauacagaugggagucu

SEQ ID NO: 1623205 - RNA, 19 nt, Artificial Sequence
  Description of Artificial Sequence: Synthetic oligonucleotide
  Sense strand starting at position 109 of SEQ ID NO: 1560772
aaagaaagugccugacaug

SEQ ID NO: 1623206 - RNA, 19 nt, Artificial Sequence
  Description of Artificial Sequence: Synthetic oligonucleotide
  Antisense strand to SEQ ID NO: 1623205
caugucaggcacuuucuuu

SEQ ID NO: 1623207 - RNA, 19 nt, Artificial Sequence
  Description of Artificial Sequence: Synthetic oligonucleotide
  Sense strand starting at position 112 of SEQ ID NO: 1560772
gaaagugccugacaugaau

SEQ ID NO: 1623208 - RNA, 19 nt, Artificial Sequence
  Description of Artificial Sequence: Synthetic oligonucleotide
  Antisense strand to SEQ ID NO: 1623207
auucaugucaggcacuuuc

SEQ ID NO: 1623209 - RNA, 19 nt, Artificial Sequence
  Description of Artificial Sequence: Synthetic oligonucleotide
  Sense strand starting at position 148 of SEQ ID NO: 1560772
ccgggugggcugugacauu

SEQ ID NO: 1623210 - RNA, 19 nt, Artificial Sequence
  Description of Artificial Sequence: Synthetic oligonucleotide
  Antisense strand to SEQ ID NO: 1623209
aaugucacagcccacccgg

SEQ ID NO: 1623211 - RNA, 19 nt, Artificial Sequence
  Description of Artificial Sequence: Synthetic oligonucleotide
  Sense strand starting at position 194 of SEQ ID NO: 1560772
cgaggcuucuuacucgaaa

SEQ ID NO: 1623212 - RNA, 19 nt, Artificial Sequence
  Description of Artificial Sequence: Synthetic oligonucleotide
  Antisense strand to SEQ ID NO: 1623211
uuucgaguaagaagccucg

SEQ ID NO: 1623213 - RNA, 19 nt, Artificial Sequence
  Description of Artificial Sequence: Synthetic oligonucleotide
  Sense strand starting at position 581 of SEQ ID NO: 1560772
gggaguccggcuagcauua

SEQ ID NO: 1623214 - RNA, 19 nt, Artificial Sequence
  Description of Artificial Sequence: Synthetic oligonucleotide
  Antisense strand to SEQ ID NO: 1623213
uaaugcuagccggacuccc

SEQ ID NO: 1623215 - RNA, 19 nt, Artificial Sequence
  Description of Artificial Sequence: Synthetic oligonucleotide
  Sense strand starting at position 667 of SEQ ID NO: 1560772
gaguuugaaucucuucuag

SEQ ID NO: 1623216 - RNA, 19 nt, Artificial Sequence
  Description of Artificial Sequence: Synthetic oligonucleotide
  Antisense strand to SEQ ID NO: 1623215
cuagaagagauucaaacuc

SEQ ID NO: 1623217 - RNA, 19 nt, Artificial Sequence
  Description of Artificial Sequence: Synthetic oligonucleotide
  Sense strand starting at position 714 of SEQ ID NO: 1560772
ggcacagucauguggaaug

SEQ ID NO: 1623218 - RNA, 19 nt, Artificial Sequence
  Description of Artificial Sequence: Synthetic oligonucleotide
  Antisense strand to SEQ ID NO: 1623217
cauuccacaugacugugcc

SEQ ID NO: 1623219 - RNA, 19 nt, Artificial Sequence
  Description of Artificial Sequence: Synthetic oligonucleotide
  Sense strand starting at position 719 of SEQ ID NO: 1560772
agucauguggaaugacauu

SEQ ID NO: 1623220 - RNA, 19 nt, Artificial Sequence
  Description of Artificial Sequence: Synthetic oligonucleotide
  Antisense strand to SEQ ID NO: 1623219
aaugucauuccacaugacu

SEQ ID NO: 1623221 - RNA, 19 nt, Artificial Sequence
  Description of Artificial Sequence: Synthetic oligonucleotide
  Sense strand starting at position 814 of SEQ ID NO: 1560772
acuggagcuuuaguuaauu

SEQ ID NO: 1623222 - RNA, 19 nt, Artificial Sequence
  Description of Artificial Sequence: Synthetic oligonucleotide
  Antisense strand to SEQ ID NO: 1623221
aauuaacuaaagcuccagu

SEQ ID NO: 1623223 - RNA, 19 nt, Artificial Sequence
  Description of Artificial Sequence: Synthetic oligonucleotide
  Sense strand starting at position 1125 of SEQ ID NO: 1560772
caccgugucuggucuauuu

SEQ ID NO: 1623224 - RNA, 19 nt, Artificial Sequence
  Description of Artificial Sequence: Synthetic oligonucleotide
  Antisense strand to SEQ ID NO: 1623223
aaauagaccagacacggug

SEQ ID NO: 1623225 - RNA, 19 nt, Artificial Sequence
  Description of Artificial Sequence: Synthetic oligonucleotide
  Sense strand starting at position 1152 of SEQ ID NO: 1560772
ugcugaguauaauuggaag

SEQ ID NO: 1623226 - RNA, 19 nt, Artificial Sequence
  Description of Artificial Sequence: Synthetic oligonucleotide
  Antisense strand to SEQ ID NO: 1623225
cuuccaauuauacucagca

SEQ ID NO: 1623227 - RNA, 19 nt, Artificial Sequence
  Description of Artificial Sequence: Synthetic oligonucleotide
  Sense strand starting at position 1154 of SEQ ID NO: 1560772
cugaguauaauuggaaggu

SEQ ID NO: 1623228 - RNA, 19 nt, Artificial Sequence
  Description of Artificial Sequence: Synthetic oligonucleotide
  Antisense strand to SEQ ID NO: 1623227
accuuccaauuauacucag

SEQ ID NO: 1623229 - RNA, 19 nt, Artificial Sequence
  Description of Artificial Sequence: Synthetic oligonucleotide
  Sense strand starting at position 1166 of SEQ ID NO: 1560772
ggaagguggcgggaaucau

SEQ ID NO: 1623230 - RNA, 19 nt, Artificial Sequence
  Description of Artificial Sequence: Synthetic oligonucleotide
  Antisense strand to SEQ ID NO: 1623229
augauucccgccaccuucc

SEQ ID NO: 1623231 - RNA, 19 nt, Artificial Sequence
  Description of Artificial Sequence: Synthetic oligonucleotide
  Sense strand starting at position 1871 of SEQ ID NO: 1560772
uggccugacccugacauua

SEQ ID NO: 1623232 - RNA, 19 nt, Artificial Sequence
  Description of Artificial Sequence: Synthetic oligonucleotide
  Antisense strand to SEQ ID NO: 1623231
uaaugucagggucaggcca

SEQ ID NO: 1623233 - RNA, 19 nt, Artificial Sequence
  Description of Artificial Sequence: Synthetic oligonucleotide
  Sense strand starting at position 1873 of SEQ ID NO: 1560772
gccugacccugacauuaag

SEQ ID NO: 1623234 - RNA, 19 nt, Artificial Sequence
  Description of Artificial Sequence: Synthetic oligonucleotide
  Antisense strand to SEQ ID NO: 1623233
cuuaaugucagggucaggc

SEQ ID NO: 1623235 - RNA, 19 nt, Artificial Sequence
  Description of Artificial Sequence: Synthetic oligonucleotide
  Sense strand starting at position 2006 of SEQ ID NO: 1560772
ggcuuaagauccuuagcag

SEQ ID NO: 1623236 - RNA, 19 nt, Artificial Sequence
  Description of Artificial Sequence: Synthetic oligonucleotide
  Antisense strand to SEQ ID NO: 1623235
cugcuaaggaucuuaagcc

SEQ ID NO: 1623237 - RNA, 19 nt, Artificial Sequence
  Description of Artificial Sequence: Synthetic oligonucleotide
  Sense strand starting at position 2007 of SEQ ID NO: 1560772
gcuuaagauccuuagcagu

SEQ ID NO: 1623238 - RNA, 19 nt, Artificial Sequence
  Description of Artificial Sequence: Synthetic oligonucleotide
  Antisense strand to SEQ ID NO: 1623237
acugcuaaggaucuuaagc

SEQ ID NO: 1623239 - RNA, 19 nt, Artificial Sequence
  Description of Artificial Sequence: Synthetic oligonucleotide
  Sense strand starting at position 2009 of SEQ ID NO: 1560772
uuaagauccuuagcaguga

SEQ ID NO: 1623240 - RNA, 19 nt, Artificial Sequence
  Description of Artificial Sequence: Synthetic oligonucleotide
  Antisense strand to SEQ ID NO: 1623239
ucacugcuaaggaucuuaa

SEQ ID NO: 1623241 - RNA, 19 nt, Artificial Sequence
  Description of Artificial Sequence: Synthetic oligonucleotide
  Sense strand starting at position 2010 of SEQ ID NO: 1560772
uaagauccuuagcagugaa

SEQ ID NO: 1623242 - RNA, 19 nt, Artificial Sequence
  Description of Artificial Sequence: Synthetic oligonucleotide
  Antisense strand to SEQ ID NO: 1623241
uucacugcuaaggaucuua

SEQ ID NO: 1623243 - RNA, 19 nt, Artificial Sequence
  Description of Artificial Sequence: Synthetic oligonucleotide
  Sense strand starting at position 2013 of SEQ ID NO: 1560772
gauccuuagcagugaauca

SEQ ID NO: 1623244 - RNA, 19 nt, Artificial Sequence
  Description of Artificial Sequence: Synthetic oligonucleotide
  Antisense strand to SEQ ID NO: 1623243
ugauucacugcuaaggauc

SEQ ID NO: 1623245 - RNA, 19 nt, Artificial Sequence
  Description of Artificial Sequence: Synthetic oligonucleotide
  Sense strand starting at position 2020 of SEQ ID NO: 1560772
agcagugaaucacaagaua

SEQ ID NO: 1623246 - RNA, 19 nt, Artificial Sequence
  Description of Artificial Sequence: Synthetic oligonucleotide
  Antisense strand to SEQ ID NO: 1623245
uaucuugugauucacugcu

SEQ ID NO: 1623247 - RNA, 19 nt, Artificial Sequence
  Description of Artificial Sequence: Synthetic oligonucleotide
  Sense strand starting at position 2068 of SEQ ID NO: 1560772
acaggaucucagcgugaca

SEQ ID NO: 1623248 - RNA, 19 nt, Artificial Sequence
  Description of Artificial Sequence: Synthetic oligonucleotide
  Antisense strand to SEQ ID NO: 1623247
ugucacgcugagauccugu

SEQ ID NO: 1623249 - RNA, 19 nt, Artificial Sequence
  Description of Artificial Sequence: Synthetic oligonucleotide
  Sense strand starting at position 2669 of SEQ ID NO: 1560772
gcaauucuccuucgucaac

SEQ ID NO: 1623250 - RNA, 19 nt, Artificial Sequence
  Description of Artificial Sequence: Synthetic oligonucleotide
  Antisense strand to SEQ ID NO: 1623249
guugacgaaggagaauugc

SEQ ID NO: 1623251 - RNA, 19 nt, Artificial Sequence
  Description of Artificial Sequence: Synthetic oligonucleotide
  Sense strand starting at position 3090 of SEQ ID NO: 1560772
ccuggccucacgugaugau

SEQ ID NO: 1623252 - RNA, 19 nt, Artificial Sequence
  Description of Artificial Sequence: Synthetic oligonucleotide
  Antisense strand to SEQ ID NO: 1623251
aucaucacgugaggccagg

SEQ ID NO: 1623253 - RNA, 19 nt, Artificial Sequence
  Description of Artificial Sequence: Synthetic oligonucleotide
  Sense strand starting at position 3091 of SEQ ID NO: 1560772
cuggccucacgugaugauu

SEQ ID NO: 1623254 - RNA, 19 nt, Artificial Sequence
  Description of Artificial Sequence: Synthetic oligonucleotide
  Antisense strand to SEQ ID NO: 1623253
aaucaucacgugaggccag

SEQ ID NO: 1623255 - RNA, 19 nt, Artificial Sequence
  Description of Artificial Sequence: Synthetic oligonucleotide
  Sense strand starting at position 3099 of SEQ ID NO: 1560772
acgugaugauuccuccaac

SEQ ID NO: 1623256 - RNA, 19 nt, Artificial Sequence
  Description of Artificial Sequence: Synthetic oligonucleotide
  Antisense strand to SEQ ID NO: 1623255
guuggaggaaucaucacgu

SEQ ID NO: 1623257 - RNA, 19 nt, Artificial Sequence
  Description of Artificial Sequence: Synthetic oligonucleotide
  Sense strand starting at position 3100 of SEQ ID NO: 1560772
cgugaugauuccuccaacu

SEQ ID NO: 1623258 - RNA, 19 nt, Artificial Sequence
  Description of Artificial Sequence: Synthetic oligonucleotide
  Antisense strand to SEQ ID NO: 1623257
aguuggaggaaucaucacg

SEQ ID NO: 1623259 - RNA, 19 nt, Artificial Sequence
  Description of Artificial Sequence: Synthetic oligonucleotide
  Sense strand starting at position 3249 of SEQ ID NO: 1560772
uguaguaugggagggagau

SEQ ID NO: 1623260 - RNA, 19 nt, Artificial Sequence
  Description of Artificial Sequence: Synthetic oligonucleotide
  Antisense strand to SEQ ID NO: 1623259
aucucccucccauacuaca

SEQ ID NO: 1623261 - RNA, 19 nt, Artificial Sequence
  Description of Artificial Sequence: Synthetic oligonucleotide
  Sense strand starting at position 3250 of SEQ ID NO: 1560772
guaguaugggagggagauu

SEQ ID NO: 1623262 - RNA, 19 nt, Artificial Sequence
  Description of Artificial Sequence: Synthetic oligonucleotide
  Antisense strand to SEQ ID NO: 1623261
aaucucccucccauacuac

SEQ ID NO: 1623263 - RNA, 19 nt, Artificial Sequence
  Description of Artificial Sequence: Synthetic oligonucleotide
  Sense strand starting at position 3383 of SEQ ID NO: 1560772
ccaaguuuguaugucugua

SEQ ID NO: 1623264 - RNA, 19 nt, Artificial Sequence
  Description of Artificial Sequence: Synthetic oligonucleotide
  Antisense strand to SEQ ID NO: 1623263
uacagacauacaaacuugg

SEQ ID NO: 1623265 - RNA, 19 nt, Artificial Sequence
  Description of Artificial Sequence: Synthetic oligonucleotide
  Sense strand starting at position 3387 of SEQ ID NO: 1560772
guuuguaugucuguaugca

SEQ ID NO: 1623266 - RNA, 19 nt, Artificial Sequence
  Description of Artificial Sequence: Synthetic oligonucleotide
  Antisense strand to SEQ ID NO: 1623265
ugcauacagacauacaaac

SEQ ID NO: 1623267 - RNA, 19 nt, Artificial Sequence
  Description of Artificial Sequence: Synthetic oligonucleotide
  Sense strand starting at position 3391 of SEQ ID NO: 1560772
guaugucuguaugcaguaa

SEQ ID NO: 1623268 - RNA, 19 nt, Artificial Sequence
  Description of Artificial Sequence: Synthetic oligonucleotide
  Antisense strand to SEQ ID NO: 1623267
uuacugcauacagacauac

SEQ ID NO: 1623269 - RNA, 19 nt, Artificial Sequence
  Description of Artificial Sequence: Synthetic oligonucleotide
  Sense strand starting at position 3395 of SEQ ID NO: 1560772
gucuguaugcaguaagaga

SEQ ID NO: 1623270 - RNA, 19 nt, Artificial Sequence
  Description of Artificial Sequence: Synthetic oligonucleotide
  Antisense strand to SEQ ID NO: 1623269
ucucuuacugcauacagac

SEQ ID NO: 1623271 - RNA, 19 nt, Artificial Sequence
  Description of Artificial Sequence: Synthetic oligonucleotide
  Sense strand starting at position 3561 of SEQ ID NO: 1560772
aaugauguacuuuaugagu

SEQ ID NO: 1623272 - RNA, 19 nt, Artificial Sequence
  Description of Artificial Sequence: Synthetic oligonucleotide
  Antisense strand to SEQ ID NO: 1623271
acucauaaaguacaucauu

SEQ ID NO: 1623273 - RNA, 19 nt, Artificial Sequence
  Description of Artificial Sequence: Synthetic oligonucleotide
  Sense strand starting at position 3576 of SEQ ID NO: 1560772
gaguccuguuaacagaauu

SEQ ID NO: 1623274 - RNA, 19 nt, Artificial Sequence
  Description of Artificial Sequence: Synthetic oligonucleotide
  Antisense strand to SEQ ID NO: 1623273
aauucuguuaacaggacuc

SEQ ID NO: 1623275 - RNA, 19 nt, Artificial Sequence
  Description of Artificial Sequence: Synthetic oligonucleotide
  Sense strand starting at position 3587 of SEQ ID NO: 1560772
acagaauugugacccugga

SEQ ID NO: 1623276 - RNA, 19 nt, Artificial Sequence
  Description of Artificial Sequence: Synthetic oligonucleotide
  Antisense strand to SEQ ID NO: 1623275
uccagggucacaauucugu

SEQ ID NO: 1623277 - RNA, 19 nt, Artificial Sequence
  Description of Artificial Sequence: Synthetic oligonucleotide
  Sense strand starting at position 3786 of SEQ ID NO: 1560772
cccaguuucgguggcaaga

SEQ ID NO: 1623278 - RNA, 19 nt, Artificial Sequence
  Description of Artificial Sequence: Synthetic oligonucleotide
  Antisense strand to SEQ ID NO: 1623277
ucuugccaccgaaacuggg

SEQ ID NO: 1623279 - RNA, 19 nt, Artificial Sequence
  Description of Artificial Sequence: Synthetic oligonucleotide
  Sense strand starting at position 3799 of SEQ ID NO: 1560772
gcaagaauuuccuggcagc

SEQ ID NO: 1623280 - RNA, 19 nt, Artificial Sequence
  Description of Artificial Sequence: Synthetic oligonucleotide
  Antisense strand to SEQ ID NO: 1623279
gcugccaggaaauucuugc

SEQ ID NO: 1623281 - RNA, 19 nt, Artificial Sequence
  Description of Artificial Sequence: Synthetic oligonucleotide
  Sense strand starting at position 3854 of SEQ ID NO: 1560772
cagugacaugcccagauaa

SEQ ID NO: 1623282 - RNA, 19 nt, Artificial Sequence
  Description of Artificial Sequence: Synthetic oligonucleotide
  Antisense strand to SEQ ID NO: 1623281
uuaucugggcaugucacug

SEQ ID NO: 1623283 - RNA, 19 nt, Artificial Sequence
  Description of Artificial Sequence: Synthetic oligonucleotide
  Sense strand starting at position 618 of SEQ ID NO: 1560773
ccacguaauggauaguagu

SEQ ID NO: 1623284 - RNA, 19 nt, Artificial Sequence
  Description of Artificial Sequence: Synthetic oligonucleotide
  Antisense strand to SEQ ID NO: 1623283
acuacuauccauuacgugg

SEQ ID NO: 1623285 - RNA, 19 nt, Artificial Sequence
  Description of Artificial Sequence: Synthetic oligonucleotide
  Sense strand starting at position 624 of SEQ ID NO: 1560773
aauggauaguagucuagaa

SEQ ID NO: 1623286 - RNA, 19 nt, Artificial Sequence
  Description of Artificial Sequence: Synthetic oligonucleotide
  Antisense strand to SEQ ID NO: 1623285
uucuagacuacuauccauu

SEQ ID NO: 1623287 - RNA, 19 nt, Artificial Sequence
  Description of Artificial Sequence: Synthetic oligonucleotide
  Sense strand starting at position 632 of SEQ ID NO: 1560773
guagucuagaauuacgguu

SEQ ID NO: 1623288 - RNA, 19 nt, Artificial Sequence
  Description of Artificial Sequence: Synthetic oligonucleotide
  Antisense strand to SEQ ID NO: 1623287
aaccguaauucuagacuac

SEQ ID NO: 1623289 - RNA, 19 nt, Artificial Sequence
  Description of Artificial Sequence: Synthetic oligonucleotide
  Sense strand starting at position 670 of SEQ ID NO: 1560773
augguauuguggucauauc

SEQ ID NO: 1623290 - RNA, 19 nt, Artificial Sequence
  Description of Artificial Sequence: Synthetic oligonucleotide
  Antisense strand to SEQ ID NO: 1623289
gauaugaccacaauaccau

SEQ ID NO: 1623291 - RNA, 19 nt, Artificial Sequence
  Description of Artificial Sequence: Synthetic oligonucleotide
  Sense strand starting at position 671 of SEQ ID NO: 1560773
ugguauuguggucauauca

SEQ ID NO: 1623292 - RNA, 19 nt, Artificial Sequence
  Description of Artificial Sequence: Synthetic oligonucleotide
  Antisense strand to SEQ ID NO: 1623291
ugauaugaccacaauacca

SEQ ID NO: 1623293 - RNA, 19 nt, Artificial Sequence
  Description of Artificial Sequence: Synthetic oligonucleotide
  Sense strand starting at position 679 of SEQ ID NO: 1560773
uggucauaucagcaauguu

SEQ ID NO: 1623294 - RNA, 19 nt, Artificial Sequence
  Description of Artificial Sequence: Synthetic oligonucleotide
  Antisense strand to SEQ ID NO: 1623293
aacauugcugauaugacca

SEQ ID NO: 1623295 - RNA, 19 nt, Artificial Sequence
  Description of Artificial Sequence: Synthetic oligonucleotide
  Sense strand starting at position 734 of SEQ ID NO: 1560773
uauagaaggucauugguuu

SEQ ID NO: 1623296 - RNA, 19 nt, Artificial Sequence
  Description of Artificial Sequence: Synthetic oligonucleotide
  Antisense strand to SEQ ID NO: 1623295
aaaccaaugaccuucuaua

SEQ ID NO: 1623297 - RNA, 19 nt, Artificial Sequence
  Description of Artificial Sequence: Synthetic oligonucleotide
  Sense strand starting at position 738 of SEQ ID NO: 1560773
gaaggucauugguuuggau

SEQ ID NO: 1623298 - RNA, 19 nt, Artificial Sequence
  Description of Artificial Sequence: Synthetic oligonucleotide
  Antisense strand to SEQ ID NO: 1623297
auccaaaccaaugaccuuc

SEQ ID NO: 1623299 - RNA, 19 nt, Artificial Sequence
  Description of Artificial Sequence: Synthetic oligonucleotide
  Sense strand starting at position 835 of SEQ ID NO: 1560773
cuaaguugauaucugaucu

SEQ ID NO: 1623300 - RNA, 19 nt, Artificial Sequence
  Description of Artificial Sequence: Synthetic oligonucleotide
  Antisense strand to SEQ ID NO: 1623299
agaucagauaucaacuuag

SEQ ID NO: 1623301 - RNA, 19 nt, Artificial Sequence
  Description of Artificial Sequence: Synthetic oligonucleotide
  Sense strand starting at position 842 of SEQ ID NO: 1560773
gauaucugaucuucugaga

SEQ ID NO: 1623302 - RNA, 19 nt, Artificial Sequence
  Description of Artificial Sequence: Synthetic oligonucleotide
  Antisense strand to SEQ ID NO: 1623301
ucucagaagaucagauauc

SEQ ID NO: 1623303 - RNA, 19 nt, Artificial Sequence
  Description of Artificial Sequence: Synthetic oligonucleotide
  Sense strand starting at position 1078 of SEQ ID NO: 1560773
auuagauguuguuugauug

SEQ ID NO: 1623304 - RNA, 19 nt, Artificial Sequence
  Description of Artificial Sequence: Synthetic oligonucleotide
  Antisense strand to SEQ ID NO: 1623303
caaucaaacaacaucuaau

SEQ ID NO: 1623305 - RNA, 19 nt, Artificial Sequence
  Description of Artificial Sequence: Synthetic oligonucleotide
  Sense strand starting at position 1082 of SEQ ID NO: 1560773
gauguuguuugauuguaga

SEQ ID NO: 1623306 - RNA, 19 nt, Artificial Sequence
  Description of Artificial Sequence: Synthetic oligonucleotide
  Antisense strand to SEQ ID NO: 1623305
ucuacaaucaaacaacauc

SEQ ID NO: 1623307 - RNA, 19 nt, Artificial Sequence
  Description of Artificial Sequence: Synthetic oligonucleotide
  Sense strand starting at position 1156 of SEQ ID NO: 1560773
uuugacaauccuuaagugu

SEQ ID NO: 1623308 - RNA, 19 nt, Artificial Sequence
  Description of Artificial Sequence: Synthetic oligonucleotide
  Antisense strand to SEQ ID NO: 1623307
acacuuaaggauugucaaa

SEQ ID NO: 1623309 - RNA, 19 nt, Artificial Sequence
  Description of Artificial Sequence: Synthetic oligonucleotide
  Sense strand starting at position 1172 of SEQ ID NO: 1560773
ugucaugaugccuacgauu

SEQ ID NO: 1623310 - RNA, 19 nt, Artificial Sequence
  Description of Artificial Sequence: Synthetic oligonucleotide
  Antisense strand to SEQ ID NO: 1623309
aaucguaggcaucaugaca

SEQ ID NO: 1623311 - RNA, 19 nt, Artificial Sequence
  Description of Artificial Sequence: Synthetic oligonucleotide
  Sense strand starting at position 1237 of SEQ ID NO: 1560773
aauaaucauuggugauuug

SEQ ID NO: 1623312 - RNA, 19 nt, Artificial Sequence
  Description of Artificial Sequence: Synthetic oligonucleotide
  Antisense strand to SEQ ID NO: 1623311
caaaucaccaaugauuauu

SEQ ID NO: 1623313 - RNA, 19 nt, Artificial Sequence
  Description of Artificial Sequence: Synthetic oligonucleotide
  Sense strand starting at position 1249 of SEQ ID NO: 1560773
ugauuugggugacaggaau

SEQ ID NO: 1623314 - RNA, 19 nt, Artificial Sequence
  Description of Artificial Sequence: Synthetic oligonucleotide
  Antisense strand to SEQ ID NO: 1623313
auuccugucacccaaauca

SEQ ID NO: 1623315 - RNA, 19 nt, Artificial Sequence
  Description of Artificial Sequence: Synthetic oligonucleotide
  Sense strand starting at position 1529 of SEQ ID NO: 1560773
cccaccacagucugagaaa

SEQ ID NO: 1623316 - RNA, 19 nt, Artificial Sequence
  Description of Artificial Sequence: Synthetic oligonucleotide
  Antisense strand to SEQ ID NO: 1623315
uuucucagacugugguggg

SEQ ID NO: 1623317 - RNA, 19 nt, Artificial Sequence
  Description of Artificial Sequence: Synthetic oligonucleotide
  Sense strand starting at position 1674 of SEQ ID NO: 1560773
ggagaacuggccgaugcua

SEQ ID NO: 1623318 - RNA, 19 nt, Artificial Sequence
  Description of Artificial Sequence: Synthetic oligonucleotide
  Antisense strand to SEQ ID NO: 1623317
uagcaucggccaguucucc

SEQ ID NO: 1623319 - RNA, 19 nt, Artificial Sequence
  Description of Artificial Sequence: Synthetic oligonucleotide
  Sense strand starting at position 1694 of SEQ ID NO: 1560773
cuaccacuugacugaguuu

SEQ ID NO: 1623320 - RNA, 19 nt, Artificial Sequence
  Description of Artificial Sequence: Synthetic oligonucleotide
  Antisense strand to SEQ ID NO: 1623319
aaacucagucaagugguag

SEQ ID NO: 1623321 - RNA, 19 nt, Artificial Sequence
  Description of Artificial Sequence: Synthetic oligonucleotide
  Sense strand starting at position 1697 of SEQ ID NO: 1560773
ccacuugacugaguuuaua

SEQ ID NO: 1623322 - RNA, 19 nt, Artificial Sequence
  Description of Artificial Sequence: Synthetic oligonucleotide
  Antisense strand to SEQ ID NO: 1623321
uauaaacucagucaagugg

SEQ ID NO: 1623323 - RNA, 19 nt, Artificial Sequence
  Description of Artificial Sequence: Synthetic oligonucleotide
  Sense strand starting at position 1738 of SEQ ID NO: 1560773
gagagaacugcccgaugga

SEQ ID NO: 1623324 - RNA, 19 nt, Artificial Sequence
  Description of Artificial Sequence: Synthetic oligonucleotide
  Antisense strand to SEQ ID NO: 1623323
uccaucgggcaguucucuc

SEQ ID NO: 1623325 - RNA, 19 nt, Artificial Sequence
  Description of Artificial Sequence: Synthetic oligonucleotide
  Sense strand starting at position 1805 of SEQ ID NO: 1560773
cccggacagcuguauuaau

SEQ ID NO: 1623326 - RNA, 19 nt, Artificial Sequence
  Description of Artificial Sequence: Synthetic oligonucleotide
  Antisense strand to SEQ ID NO: 1623325
auuaauacagcuguccggg

SEQ ID NO: 1623327 - RNA, 19 nt, Artificial Sequence
  Description of Artificial Sequence: Synthetic oligonucleotide
  Sense strand starting at position 1821 of SEQ ID NO: 1560773
aauaaugauugacagggaa

SEQ ID NO: 1623328 - RNA, 19 nt, Artificial Sequence
  Description of Artificial Sequence: Synthetic oligonucleotide
  Antisense strand to SEQ ID NO: 1623327
uucccugucaaucauuauu

SEQ ID NO: 1623329 - RNA, 19 nt, Artificial Sequence
  Description of Artificial Sequence: Synthetic oligonucleotide
  Sense strand starting at position 2127 of SEQ ID NO: 1560773
cggaaacgugaguagcuaa

SEQ ID NO: 1623330 - RNA, 19 nt, Artificial Sequence
  Description of Artificial Sequence: Synthetic oligonucleotide
  Antisense strand to SEQ ID NO: 1623329
uuagcuacucacguuuccg

SEQ ID NO: 1623331 - RNA, 19 nt, Artificial Sequence
  Description of Artificial Sequence: Synthetic oligonucleotide
  Sense strand starting at position 2134 of SEQ ID NO: 1560773
gugaguagcuaaucgaaag

SEQ ID NO: 1623332 - RNA, 19 nt, Artificial Sequence
  Description of Artificial Sequence: Synthetic oligonucleotide
  Antisense strand to SEQ ID NO: 1623331
cuuucgauuagcuacucac

SEQ ID NO: 1623333 - RNA, 19 nt, Artificial Sequence
  Description of Artificial Sequence: Synthetic oligonucleotide
  Sense strand starting at position 2135 of SEQ ID NO: 1560773
ugaguagcuaaucgaaagu

SEQ ID NO: 1623334 - RNA, 19 nt, Artificial Sequence
  Description of Artificial Sequence: Synthetic oligonucleotide
  Antisense strand to SEQ ID NO: 1623333
acuuucgauuagcuacuca

SEQ ID NO: 1623335 - RNA, 19 nt, Artificial Sequence
  Description of Artificial Sequence: Synthetic oligonucleotide
  Sense strand starting at position 2146 of SEQ ID NO: 1560773
ucgaaaguuccggauauug

SEQ ID NO: 1623336 - RNA, 19 nt, Artificial Sequence
  Description of Artificial Sequence: Synthetic oligonucleotide
  Antisense strand to SEQ ID NO: 1623335
caauauccggaacuuucga

SEQ ID NO: 1623337 - RNA, 19 nt, Artificial Sequence
  Description of Artificial Sequence: Synthetic oligonucleotide
  Sense strand starting at position 2191 of SEQ ID NO: 1560773
uacuauguacgaggcauuu

SEQ ID NO: 1623338 - RNA, 19 nt, Artificial Sequence
  Description of Artificial Sequence: Synthetic oligonucleotide
  Antisense strand to SEQ ID NO: 1623337
aaaugccucguacauagua

SEQ ID NO: 1623339 - RNA, 19 nt, Artificial Sequence
  Description of Artificial Sequence: Synthetic oligonucleotide
  Sense strand starting at position 2262 of SEQ ID NO: 1560773
gcccaaauuuaaggacuaa

SEQ ID NO: 1623340 - RNA, 19 nt, Artificial Sequence
  Description of Artificial Sequence: Synthetic oligonucleotide
  Antisense strand to SEQ ID NO: 1623339
uuaguccuuaaauuugggc

SEQ ID NO: 1623341 - RNA, 19 nt, Artificial Sequence
  Description of Artificial Sequence: Synthetic oligonucleotide
  Sense strand starting at position 2475 of SEQ ID NO: 1560773
gggacuaaggcauaucguu

SEQ ID NO: 1623342 - RNA, 19 nt, Artificial Sequence
  Description of Artificial Sequence: Synthetic oligonucleotide
  Antisense strand to SEQ ID NO: 1623341
aacgauaugccuuaguccc

SEQ ID NO: 1623343 - RNA, 19 nt, Artificial Sequence
  Description of Artificial Sequence: Synthetic oligonucleotide
  Sense strand starting at position 2482 of SEQ ID NO: 1560773
aggcauaucguucccgcua

SEQ ID NO: 1623344 - RNA, 19 nt, Artificial Sequence
  Description of Artificial Sequence: Synthetic oligonucleotide
  Antisense strand to SEQ ID NO: 1623343
uagcgggaacgauaugccu

SEQ ID NO: 1623345 - RNA, 19 nt, Artificial Sequence
  Description of Artificial Sequence: Synthetic oligonucleotide
  Sense strand starting at position 2485 of SEQ ID NO: 1560773
cauaucguucccgcuaguu

SEQ ID NO: 1623346 - RNA, 19 nt, Artificial Sequence
  Description of Artificial Sequence: Synthetic oligonucleotide
  Antisense strand to SEQ ID NO: 1623345
aacuagcgggaacgauaug

SEQ ID NO: 1623347 - RNA, 19 nt, Artificial Sequence
  Description of Artificial Sequence: Synthetic oligonucleotide
  Sense strand starting at position 2501 of SEQ ID NO: 1560773
guuucuagauaccuagaga

SEQ ID NO: 1623348 - RNA, 19 nt, Artificial Sequence
  Description of Artificial Sequence: Synthetic oligonucleotide
  Antisense strand to SEQ ID NO: 1623347
ucucuagguaucuagaaac

SEQ ID NO: 1623349 - RNA, 19 nt, Artificial Sequence
  Description of Artificial Sequence: Synthetic oligonucleotide
  Sense strand starting at position 2595 of SEQ ID NO: 1560773
ggaggagggucgaaucuaa

SEQ ID NO: 1623350 - RNA, 19 nt, Artificial Sequence
  Description of Artificial Sequence: Synthetic oligonucleotide
  Antisense strand to SEQ ID NO: 1623349
uuagauucgacccuccucc

SEQ ID NO: 1623351 - RNA, 19 nt, Artificial Sequence
  Description of Artificial Sequence: Synthetic oligonucleotide
  Sense strand starting at position 2618 of SEQ ID NO: 1560773
ccagguaucccaugguauu

SEQ ID NO: 1623352 - RNA, 19 nt, Artificial Sequence
  Description of Artificial Sequence: Synthetic oligonucleotide
  Antisense strand to SEQ ID NO: 1623351
aauaccaugggauaccugg

SEQ ID NO: 1623353 - RNA, 19 nt, Artificial Sequence
  Description of Artificial Sequence: Synthetic oligonucleotide
  Sense strand starting at position 2619 of SEQ ID NO: 1560773
cagguaucccaugguauuc

SEQ ID NO: 1623354 - RNA, 19 nt, Artificial Sequence
  Description of Artificial Sequence: Synthetic oligonucleotide
  Antisense strand to SEQ ID NO: 1623353
gaauaccaugggauaccug

SEQ ID NO: 1623355 - RNA, 19 nt, Artificial Sequence
  Description of Artificial Sequence: Synthetic oligonucleotide
  Sense strand starting at position 2913 of SEQ ID NO: 1560773
agugaaugucccuggagga

SEQ ID NO: 1623356 - RNA, 19 nt, Artificial Sequence
  Description of Artificial Sequence: Synthetic oligonucleotide
  Antisense strand to SEQ ID NO: 1623355
uccuccagggacauucacu

SEQ ID NO: 1623357 - RNA, 19 nt, Artificial Sequence
  Description of Artificial Sequence: Synthetic oligonucleotide
  Sense strand starting at position 2914 of SEQ ID NO: 1560773
gugaaugucccuggaggaa

SEQ ID NO: 1623358 - RNA, 19 nt, Artificial Sequence
  Description of Artificial Sequence: Synthetic oligonucleotide
  Antisense strand to SEQ ID NO: 1623357
uuccuccagggacauucac

SEQ ID NO: 1623359 - RNA, 19 nt, Artificial Sequence
  Description of Artificial Sequence: Synthetic oligonucleotide
  Sense strand starting at position 2973 of SEQ ID NO: 1560773
cuccgagacccagaaguuu

SEQ ID NO: 1623360 - RNA, 19 nt, Artificial Sequence
  Description of Artificial Sequence: Synthetic oligonucleotide
  Antisense strand to SEQ ID NO: 1623359
aaacuucugggucucggag

SEQ ID NO: 1623361 - RNA, 19 nt, Artificial Sequence
  Description of Artificial Sequence: Synthetic oligonucleotide
  Sense strand starting at position 3161 of SEQ ID NO: 1560773
ccagaucaccaguggacau

SEQ ID NO: 1623362 - RNA, 19 nt, Artificial Sequence
  Description of Artificial Sequence: Synthetic oligonucleotide
  Antisense strand to SEQ ID NO: 1623361
auguccacuggugaucugg

SEQ ID NO: 1623363 - RNA, 19 nt, Artificial Sequence
  Description of Artificial Sequence: Synthetic oligonucleotide
  Sense strand starting at position 79 of SEQ ID NO: 1560774
accuguggguguucgugaa

SEQ ID NO: 1623364 - RNA, 19 nt, Artificial Sequence
  Description of Artificial Sequence: Synthetic oligonucleotide
  Antisense strand to SEQ ID NO: 1623363
uucacgaacacccacaggu

SEQ ID NO: 1623365 - RNA, 19 nt, Artificial Sequence
  Description of Artificial Sequence: Synthetic oligonucleotide
  Sense strand starting at position 83 of SEQ ID NO: 1560774
guggguguucgugaacuca

SEQ ID NO: 1623366 - RNA, 19 nt, Artificial Sequence
  Description of Artificial Sequence: Synthetic oligonucleotide
  Antisense strand to SEQ ID NO: 1623365
ugaguucacgaacacccac

SEQ ID NO: 1623367 - RNA, 19 nt, Artificial Sequence
  Description of Artificial Sequence: Synthetic oligonucleotide
  Sense strand starting at position 102 of SEQ ID NO: 1560774
cacugugggucccauaaca

SEQ ID NO: 1623368 - RNA, 19 nt, Artificial Sequence
  Description of Artificial Sequence: Synthetic oligonucleotide
  Antisense strand to SEQ ID NO: 1623367
uguuaugggacccacagug

SEQ ID NO: 1623369 - RNA, 19 nt, Artificial Sequence
  Description of Artificial Sequence: Synthetic oligonucleotide
  Sense strand starting at position 177 of SEQ ID NO: 1560774
cgggcuugugugucuguau

SEQ ID NO: 1623370 - RNA, 19 nt, Artificial Sequence
  Description of Artificial Sequence: Synthetic oligonucleotide
  Antisense strand to SEQ ID NO: 1623369
auacagacacacaagcccg

SEQ ID NO: 1623371 - RNA, 19 nt, Artificial Sequence
  Description of Artificial Sequence: Synthetic oligonucleotide
  Sense strand starting at position 184 of SEQ ID NO: 1560774
gugugucuguauguggauu

SEQ ID NO: 1623372 - RNA, 19 nt, Artificial Sequence
  Description of Artificial Sequence: Synthetic oligonucleotide
  Antisense strand to SEQ ID NO: 1623371
aauccacauacagacacac

SEQ ID NO: 1623373 - RNA, 19 nt, Artificial Sequence
  Description of Artificial Sequence: Synthetic oligonucleotide
  Sense strand starting at position 211 of SEQ ID NO: 1560774
caucuauugugucucaguu

SEQ ID NO: 1623374 - RNA, 19 nt, Artificial Sequence
  Description of Artificial Sequence: Synthetic oligonucleotide
  Antisense strand to SEQ ID NO: 1623373
aacugagacacaauagaug

SEQ ID NO: 1623375 - RNA, 19 nt, Artificial Sequence
  Description of Artificial Sequence: Synthetic oligonucleotide
  Sense strand starting at position 238 of SEQ ID NO: 1560774
augugagucuaucuguaca

SEQ ID NO: 1623376 - RNA, 19 nt, Artificial Sequence
  Description of Artificial Sequence: Synthetic oligonucleotide
  Antisense strand to SEQ ID NO: 1623375
uguacagauagacucacau

SEQ ID NO: 1623377 - RNA, 19 nt, Artificial Sequence
  Description of Artificial Sequence: Synthetic oligonucleotide
  Sense strand starting at position 240 of SEQ ID NO: 1560774
gugagucuaucuguacaug

SEQ ID NO: 1623378 - RNA, 19 nt, Artificial Sequence
  Description of Artificial Sequence: Synthetic oligonucleotide
  Antisense strand to SEQ ID NO: 1623377
cauguacagauagacucac

SEQ ID NO: 1623379 - RNA, 19 nt, Artificial Sequence
  Description of Artificial Sequence: Synthetic oligonucleotide
  Sense strand starting at position 243 of SEQ ID NO: 1560774
agucuaucuguacaugcau

SEQ ID NO: 1623380 - RNA, 19 nt, Artificial Sequence
  Description of Artificial Sequence: Synthetic oligonucleotide
  Antisense strand to SEQ ID NO: 1623379
augcauguacagauagacu

SEQ ID NO: 1623381 - RNA, 19 nt, Artificial Sequence
  Description of Artificial Sequence: Synthetic oligonucleotide
  Sense strand starting at position 348 of SEQ ID NO: 1560774
ucuguugugcgucugugua

SEQ ID NO: 1623382 - RNA, 19 nt, Artificial Sequence
  Description of Artificial Sequence: Synthetic oligonucleotide
  Antisense strand to SEQ ID NO: 1623381
uacacagacgcacaacaga

SEQ ID NO: 1623383 - RNA, 19 nt, Artificial Sequence
  Description of Artificial Sequence: Synthetic oligonucleotide
  Sense strand starting at position 354 of SEQ ID NO: 1560774
gugcgucuguguaugugaa

SEQ ID NO: 1623384 - RNA, 19 nt, Artificial Sequence
  Description of Artificial Sequence: Synthetic oligonucleotide
  Antisense strand to SEQ ID NO: 1623383
uucacauacacagacgcac

SEQ ID NO: 1623385 - RNA, 19 nt, Artificial Sequence
  Description of Artificial Sequence: Synthetic oligonucleotide
  Sense strand starting at position 362 of SEQ ID NO: 1560774
guguaugugaaccguguaa

SEQ ID NO: 1623386 - RNA, 19 nt, Artificial Sequence
  Description of Artificial Sequence: Synthetic oligonucleotide
  Antisense strand to SEQ ID NO: 1623385
uuacacgguucacauacac

SEQ ID NO: 1623387 - RNA, 19 nt, Artificial Sequence
  Description of Artificial Sequence: Synthetic oligonucleotide
  Sense strand starting at position 364 of SEQ ID NO: 1560774
guaugugaaccguguaaau

SEQ ID NO: 1623388 - RNA, 19 nt, Artificial Sequence
  Description of Artificial Sequence: Synthetic oligonucleotide
  Antisense strand to SEQ ID NO: 1623387
auuuacacgguucacauac

SEQ ID NO: 1623389 - RNA, 19 nt, Artificial Sequence
  Description of Artificial Sequence: Synthetic oligonucleotide
  Sense strand starting at position 373 of SEQ ID NO: 1560774
ccguguaaauggguguaca

SEQ ID NO: 1623390 - RNA, 19 nt, Artificial Sequence
  Description of Artificial Sequence: Synthetic oligonucleotide
  Antisense strand to SEQ ID NO: 1623389
uguacacccauuuacacgg

SEQ ID NO: 1623391 - RNA, 19 nt, Artificial Sequence
  Description of Artificial Sequence: Synthetic oligonucleotide
  Sense strand starting at position 452 of SEQ ID NO: 1560774
uguccaucugcauguguga

SEQ ID NO: 1623392 - RNA, 19 nt, Artificial Sequence
  Description of Artificial Sequence: Synthetic oligonucleotide
  Antisense strand to SEQ ID NO: 1623391
ucacacaugcagauggaca

SEQ ID NO: 1623393 - RNA, 19 nt, Artificial Sequence
  Description of Artificial Sequence: Synthetic oligonucleotide
  Sense strand starting at position 463 of SEQ ID NO: 1560774
augugugagcuggguguaa

SEQ ID NO: 1623394 - RNA, 19 nt, Artificial Sequence
  Description of Artificial Sequence: Synthetic oligonucleotide
  Antisense strand to SEQ ID NO: 1623393
uuacacccagcucacacau

SEQ ID NO: 1623395 - RNA, 19 nt, Artificial Sequence
  Description of Artificial Sequence: Synthetic oligonucleotide
  Sense strand starting at position 478 of SEQ ID NO: 1560774
guaagcauguccuugaguc

SEQ ID NO: 1623396 - RNA, 19 nt, Artificial Sequence
  Description of Artificial Sequence: Synthetic oligonucleotide
  Antisense strand to SEQ ID NO: 1623395
gacucaaggacaugcuuac

SEQ ID NO: 1623397 - RNA, 19 nt, Artificial Sequence
  Description of Artificial Sequence: Synthetic oligonucleotide
  Sense strand starting at position 479 of SEQ ID NO: 1560774
uaagcauguccuugagucu

SEQ ID NO: 1623398 - RNA, 19 nt, Artificial Sequence
  Description of Artificial Sequence: Synthetic oligonucleotide
  Antisense strand to SEQ ID NO: 1623397
agacucaaggacaugcuua

SEQ ID NO: 1623399 - RNA, 19 nt, Artificial Sequence
  Description of Artificial Sequence: Synthetic oligonucleotide
  Sense strand starting at position 480 of SEQ ID NO: 1560774
aagcauguccuugagucuu

SEQ ID NO: 1623400 - RNA, 19 nt, Artificial Sequence
  Description of Artificial Sequence: Synthetic oligonucleotide
  Antisense strand to SEQ ID NO: 1623399
aagacucaaggacaugcuu

SEQ ID NO: 1623401 - RNA, 19 nt, Artificial Sequence
  Description of Artificial Sequence: Synthetic oligonucleotide
  Sense strand starting at position 502 of SEQ ID NO: 1560774
cuaugugcugucugagugu

SEQ ID NO: 1623402 - RNA, 19 nt, Artificial Sequence
  Description of Artificial Sequence: Synthetic oligonucleotide
  Antisense strand to SEQ ID NO: 1623401
acacucagacagcacauag

SEQ ID NO: 1623403 - RNA, 19 nt, Artificial Sequence
  Description of Artificial Sequence: Synthetic oligonucleotide
  Sense strand starting at position 536 of SEQ ID NO: 1560774
gugccacaccugugugauc

SEQ ID NO: 1623404 - RNA, 19 nt, Artificial Sequence
  Description of Artificial Sequence: Synthetic oligonucleotide
  Antisense strand to SEQ ID NO: 1623403
gaucacacagguguggcac

SEQ ID NO: 1623405 - RNA, 19 nt, Artificial Sequence
  Description of Artificial Sequence: Synthetic oligonucleotide
  Sense strand starting at position 538 of SEQ ID NO: 1560774
gccacaccugugugaucau

SEQ ID NO: 1623406 - RNA, 19 nt, Artificial Sequence
  Description of Artificial Sequence: Synthetic oligonucleotide
  Antisense strand to SEQ ID NO: 1623405
augaucacacagguguggc

SEQ ID NO: 1623407 - RNA, 19 nt, Artificial Sequence
  Description of Artificial Sequence: Synthetic oligonucleotide
  Sense strand starting at position 541 of SEQ ID NO: 1560774
acaccugugugaucauauu

SEQ ID NO: 1623408 - RNA, 19 nt, Artificial Sequence
  Description of Artificial Sequence: Synthetic oligonucleotide
  Antisense strand to SEQ ID NO: 1623407
aauaugaucacacaggugu

SEQ ID NO: 1623409 - RNA, 19 nt, Artificial Sequence
  Description of Artificial Sequence: Synthetic oligonucleotide
  Sense strand starting at position 547 of SEQ ID NO: 1560774
gugugaucauauuugugug

SEQ ID NO: 1623410 - RNA, 19 nt, Artificial Sequence
  Description of Artificial Sequence: Synthetic oligonucleotide
  Antisense strand to SEQ ID NO: 1623409
cacacaaauaugaucacac

SEQ ID NO: 1623411 - RNA, 19 nt, Artificial Sequence
  Description of Artificial Sequence: Synthetic oligonucleotide
  Sense strand starting at position 548 of SEQ ID NO: 1560774
ugugaucauauuugugugu

SEQ ID NO: 1623412 - RNA, 19 nt, Artificial Sequence
  Description of Artificial Sequence: Synthetic oligonucleotide
  Antisense strand to SEQ ID NO: 1623411
acacacaaauaugaucaca

SEQ ID NO: 1623413 - RNA, 19 nt, Artificial Sequence
  Description of Artificial Sequence: Synthetic oligonucleotide
  Sense strand starting at position 563 of SEQ ID NO: 1560774
guguguauguaugucaaug

SEQ ID NO: 1623414 - RNA, 19 nt, Artificial Sequence
  Description of Artificial Sequence: Synthetic oligonucleotide
  Antisense strand to SEQ ID NO: 1623413
cauugacauacauacacac

SEQ ID NO: 1623415 - RNA, 19 nt, Artificial Sequence
  Description of Artificial Sequence: Synthetic oligonucleotide
  Sense strand starting at position 568 of SEQ ID NO: 1560774
uauguaugucaauguguga

SEQ ID NO: 1623416 - RNA, 19 nt, Artificial Sequence
  Description of Artificial Sequence: Synthetic oligonucleotide
  Antisense strand to SEQ ID NO: 1623415
ucacacauugacauacaua

SEQ ID NO: 1623417 - RNA, 19 nt, Artificial Sequence
  Description of Artificial Sequence: Synthetic oligonucleotide
  Sense strand starting at position 602 of SEQ ID NO: 1560774
cugggugugucuuuccuga

SEQ ID NO: 1623418 - RNA, 19 nt, Artificial Sequence
  Description of Artificial Sequence: Synthetic oligonucleotide
  Antisense strand to SEQ ID NO: 1623417
ucaggaaagacacacccag

SEQ ID NO: 1623419 - RNA, 19 nt, Artificial Sequence
  Description of Artificial Sequence: Synthetic oligonucleotide
  Sense strand starting at position 657 of SEQ ID NO: 1560774
gcagguuugcaucucuguu

SEQ ID NO: 1623420 - RNA, 19 nt, Artificial Sequence
  Description of Artificial Sequence: Synthetic oligonucleotide
  Antisense strand to SEQ ID NO: 1623419
aacagagaugcaaaccugc

SEQ ID NO: 1623421 - RNA, 19 nt, Artificial Sequence
  Description of Artificial Sequence: Synthetic oligonucleotide
  Sense strand starting at position 674 of SEQ ID NO: 1560774
uuacgugaccuagagcuau

SEQ ID NO: 1623422 - RNA, 19 nt, Artificial Sequence
  Description of Artificial Sequence: Synthetic oligonucleotide
  Antisense strand to SEQ ID NO: 1623421
auagcucuaggucacguaa

SEQ ID NO: 1623423 - RNA, 19 nt, Artificial Sequence
  Description of Artificial Sequence: Synthetic oligonucleotide
  Sense strand starting at position 686 of SEQ ID NO: 1560774
gagcuaugugugccagcga

SEQ ID NO: 1623424 - RNA, 19 nt, Artificial Sequence
  Description of Artificial Sequence: Synthetic oligonucleotide
  Antisense strand to SEQ ID NO: 1623423
ucgcuggcacacauagcuc

SEQ ID NO: 1623425 - RNA, 19 nt, Artificial Sequence
  Description of Artificial Sequence: Synthetic oligonucleotide
  Sense strand starting at position 965 of SEQ ID NO: 1560774
ucccgcuuugucuggcaaa

SEQ ID NO: 1623426 - RNA, 19 nt, Artificial Sequence
  Description of Artificial Sequence: Synthetic oligonucleotide
  Antisense strand to SEQ ID NO: 1623425
uuugccagacaaagcggga

SEQ ID NO: 1623427 - RNA, 19 nt, Artificial Sequence
  Description of Artificial Sequence: Synthetic oligonucleotide
  Sense strand starting at position 1589 of SEQ ID NO: 1560774
gcucuaaucgcucaagggu

SEQ ID NO: 1623428 - RNA, 19 nt, Artificial Sequence
  Description of Artificial Sequence: Synthetic oligonucleotide
  Antisense strand to SEQ ID NO: 1623427
acccuugagcgauuagagc

SEQ ID NO: 1623429 - RNA, 19 nt, Artificial Sequence
  Description of Artificial Sequence: Synthetic oligonucleotide
  Sense strand starting at position 2307 of SEQ ID NO: 1560774
cccagaaacucuggaaacu

SEQ ID NO: 1623430 - RNA, 19 nt, Artificial Sequence
  Description of Artificial Sequence: Synthetic oligonucleotide
  Antisense strand to SEQ ID NO: 1623429
aguuuccagaguuucuggg

SEQ ID NO: 1623431 - RNA, 19 nt, Artificial Sequence
  Description of Artificial Sequence: Synthetic oligonucleotide
  Sense strand starting at position 2817 of SEQ ID NO: 1560774
cuaggagucacaugcaugu

SEQ ID NO: 1623432 - RNA, 19 nt, Artificial Sequence
  Description of Artificial Sequence: Synthetic oligonucleotide
  Antisense strand to SEQ ID NO: 1623431
acaugcaugugacuccuag

SEQ ID NO: 1623433 - RNA, 19 nt, Artificial Sequence
  Description of Artificial Sequence: Synthetic oligonucleotide
  Sense strand starting at position 2980 of SEQ ID NO: 1560774
cuggcucaauuugauuaau

SEQ ID NO: 1623434 - RNA, 19 nt, Artificial Sequence
  Description of Artificial Sequence: Synthetic oligonucleotide
  Antisense strand to SEQ ID NO: 1623433
auuaaucaaauugagccag

SEQ ID NO: 1623435 - RNA, 19 nt, Artificial Sequence
  Description of Artificial Sequence: Synthetic oligonucleotide
  Sense strand starting at position 3057 of SEQ ID NO: 1560774
agugcagugucccuaucuu

SEQ ID NO: 1623436 - RNA, 19 nt, Artificial Sequence
  Description of Artificial Sequence: Synthetic oligonucleotide
  Antisense strand to SEQ ID NO: 1623435
aagauagggacacugcacu

SEQ ID NO: 1623437 - RNA, 19 nt, Artificial Sequence
  Description of Artificial Sequence: Synthetic oligonucleotide
  Sense strand starting at position 3633 of SEQ ID NO: 1560774
acgcccagccuugaucaau

SEQ ID NO: 1623438 - RNA, 19 nt, Artificial Sequence
  Description of Artificial Sequence: Synthetic oligonucleotide
  Antisense strand to SEQ ID NO: 1623437
auugaucaaggcugggcgu

SEQ ID NO: 1623439 - RNA, 19 nt, Artificial Sequence
  Description of Artificial Sequence: Synthetic oligonucleotide
  Sense strand starting at position 3699 of SEQ ID NO: 1560774
ucuguuccuguggaaagaa

SEQ ID NO: 1623440 - RNA, 19 nt, Artificial Sequence
  Description of Artificial Sequence: Synthetic oligonucleotide
  Antisense strand to SEQ ID NO: 1623439
uucuuuccacaggaacaga

SEQ ID NO: 1623441 - RNA, 19 nt, Artificial Sequence
  Description of Artificial Sequence: Synthetic oligonucleotide
  Sense strand starting at position 3946 of SEQ ID NO: 1560774
guaucacacucuguucuau

SEQ ID NO: 1623442 - RNA, 19 nt, Artificial Sequence
  Description of Artificial Sequence: Synthetic oligonucleotide
  Antisense strand to SEQ ID NO: 1623441
auagaacagagugugauac

SEQ ID NO: 1623443 - RNA, 19 nt, Artificial Sequence
  Description of Artificial Sequence: Synthetic oligonucleotide
  Sense strand starting at position 22 of SEQ ID NO: 1560775
gggacauauucaugugugu

SEQ ID NO: 1623444 - RNA, 19 nt, Artificial Sequence
  Description of Artificial Sequence: Synthetic oligonucleotide
  Antisense strand to SEQ ID NO: 1623443
acacacaugaauauguccc

SEQ ID NO: 1623445 - RNA, 19 nt, Artificial Sequence
  Description of Artificial Sequence: Synthetic oligonucleotide
  Sense strand starting at position 148 of SEQ ID NO: 1560775
gucccugauuccuguccca

SEQ ID NO: 1623446 - RNA, 19 nt, Artificial Sequence
  Description of Artificial Sequence: Synthetic oligonucleotide
  Antisense strand to SEQ ID NO: 1623445
ugggacaggaaucagggac

SEQ ID NO: 1623447 - RNA, 19 nt, Artificial Sequence
  Description of Artificial Sequence: Synthetic oligonucleotide
  Sense strand starting at position 200 of SEQ ID NO: 1560775
ggaagaaagucggcuugua

SEQ ID NO: 1623448 - RNA, 19 nt, Artificial Sequence
  Description of Artificial Sequence: Synthetic oligonucleotide
  Antisense strand to SEQ ID NO: 1623447
uacaagccgacuuucuucc

SEQ ID NO: 1623449 - RNA, 19 nt, Artificial Sequence
  Description of Artificial Sequence: Synthetic oligonucleotide
  Sense strand starting at position 215 of SEQ ID NO: 1560775
uguauucaucuguagggag

SEQ ID NO: 1623450 - RNA, 19 nt, Artificial Sequence
  Description of Artificial Sequence: Synthetic oligonucleotide
  Antisense strand to SEQ ID NO: 1623449
cucccuacagaugaauaca

SEQ ID NO: 1623451 - RNA, 19 nt, Artificial Sequence
  Description of Artificial Sequence: Synthetic oligonucleotide
  Sense strand starting at position 470 of SEQ ID NO: 1560775
agggcaugcaccuagaguu

SEQ ID NO: 1623452 - RNA, 19 nt, Artificial Sequence
  Description of Artificial Sequence: Synthetic oligonucleotide
  Antisense strand to SEQ ID NO: 1623451
aacucuaggugcaugcccu

SEQ ID NO: 1623453 - RNA, 19 nt, Artificial Sequence
  Description of Artificial Sequence: Synthetic oligonucleotide
  Sense strand starting at position 579 of SEQ ID NO: 1560775
gugucaaacauucggcaau

SEQ ID NO: 1623454 - RNA, 19 nt, Artificial Sequence
  Description of Artificial Sequence: Synthetic oligonucleotide
  Antisense strand to SEQ ID NO: 1623453
auugccgaauguuugacac

SEQ ID NO: 1623455 - RNA, 19 nt, Artificial Sequence
  Description of Artificial Sequence: Synthetic oligonucleotide
  Sense strand starting at position 656 of SEQ ID NO: 1560775
ccauaucucuggugucaca

SEQ ID NO: 1623456 - RNA, 19 nt, Artificial Sequence
  Description of Artificial Sequence: Synthetic oligonucleotide
  Antisense strand to SEQ ID NO: 1623455
ugugacaccagagauaugg

SEQ ID NO: 1623457 - RNA, 19 nt, Artificial Sequence
  Description of Artificial Sequence: Synthetic oligonucleotide
  Sense strand starting at position 719 of SEQ ID NO: 1560775
cacacagcugggugucaua

SEQ ID NO: 1623458 - RNA, 19 nt, Artificial Sequence
  Description of Artificial Sequence: Synthetic oligonucleotide
  Antisense strand to SEQ ID NO: 1623457
uaugacacccagcugugug

SEQ ID NO: 1623459 - RNA, 19 nt, Artificial Sequence
  Description of Artificial Sequence: Synthetic oligonucleotide
  Sense strand starting at position 819 of SEQ ID NO: 1560775
gccucucccucgucauaca

SEQ ID NO: 1623460 - RNA, 19 nt, Artificial Sequence
  Description of Artificial Sequence: Synthetic oligonucleotide
  Antisense strand to SEQ ID NO: 1623459
uguaugacgagggagaggc

SEQ ID NO: 1623461 - RNA, 19 nt, Artificial Sequence
  Description of Artificial Sequence: Synthetic oligonucleotide
  Sense strand starting at position 864 of SEQ ID NO: 1560775
cucugaugucacuguugca

SEQ ID NO: 1623462 - RNA, 19 nt, Artificial Sequence
  Description of Artificial Sequence: Synthetic oligonucleotide
  Antisense strand to SEQ ID NO: 1623461
ugcaacagugacaucagag

SEQ ID NO: 1623463 - RNA, 19 nt, Artificial Sequence
  Description of Artificial Sequence: Synthetic oligonucleotide
  Sense strand starting at position 1154 of SEQ ID NO: 1560775
gcuggagggucucaaacau

SEQ ID NO: 1623464 - RNA, 19 nt, Artificial Sequence
  Description of Artificial Sequence: Synthetic oligonucleotide
  Antisense strand to SEQ ID NO: 1623463
auguuugagacccuccagc

SEQ ID NO: 1623465 - RNA, 19 nt, Artificial Sequence
  Description of Artificial Sequence: Synthetic oligonucleotide
  Sense strand starting at position 1219 of SEQ ID NO: 1560775
ugucauauuccugaucccu

SEQ ID NO: 1623466 - RNA, 19 nt, Artificial Sequence
  Description of Artificial Sequence: Synthetic oligonucleotide
  Antisense strand to SEQ ID NO: 1623465
agggaucaggaauaugaca

SEQ ID NO: 1623467 - RNA, 19 nt, Artificial Sequence
  Description of Artificial Sequence: Synthetic oligonucleotide
  Sense strand starting at position 1539 of SEQ ID NO: 1560775
ccgaaagggucacaucaca

SEQ ID NO: 1623468 - RNA, 19 nt, Artificial Sequence
  Description of Artificial Sequence: Synthetic oligonucleotide
  Antisense strand to SEQ ID NO: 1623467
ugugaugugacccuuucgg

SEQ ID NO: 1623469 - RNA, 19 nt, Artificial Sequence
  Description of Artificial Sequence: Synthetic oligonucleotide
  Sense strand starting at position 2886 of SEQ ID NO: 1560775
gcacgucacagacguuauc

SEQ ID NO: 1623470 - RNA, 19 nt, Artificial Sequence
  Description of Artificial Sequence: Synthetic oligonucleotide
  Antisense strand to SEQ ID NO: 1623469
gauaacgucugugacgugc

SEQ ID NO: 1623471 - RNA, 19 nt, Artificial Sequence
  Description of Artificial Sequence: Synthetic oligonucleotide
  Sense strand starting at position 2892 of SEQ ID NO: 1560775
cacagacguuaucgcauuu

SEQ ID NO: 1623472 - RNA, 19 nt, Artificial Sequence
  Description of Artificial Sequence: Synthetic oligonucleotide
  Antisense strand to SEQ ID NO: 1623471
aaaugcgauaacgucugug

SEQ ID NO: 1623473 - RNA, 19 nt, Artificial Sequence
  Description of Artificial Sequence: Synthetic oligonucleotide
  Sense strand starting at position 2921 of SEQ ID NO: 1560775
gcgaccagcucugugaguu

SEQ ID NO: 1623474 - RNA, 19 nt, Artificial Sequence
  Description of Artificial Sequence: Synthetic oligonucleotide
  Antisense strand to SEQ ID NO: 1623473
aacucacagagcuggucgc

SEQ ID NO: 1623475 - RNA, 19 nt, Artificial Sequence
  Description of Artificial Sequence: Synthetic oligonucleotide
  Sense strand starting at position 2922 of SEQ ID NO: 1560775
cgaccagcucugugaguua

SEQ ID NO: 1623476 - RNA, 19 nt, Artificial Sequence
  Description of Artificial Sequence: Synthetic oligonucleotide
  Antisense strand to SEQ ID NO: 1623475
uaacucacagagcuggucg

SEQ ID NO: 1623477 - RNA, 19 nt, Artificial Sequence
  Description of Artificial Sequence: Synthetic oligonucleotide
  Sense strand starting at position 2929 of SEQ ID NO: 1560775
cucugugaguuacgcuuau

SEQ ID NO: 1623478 - RNA, 19 nt, Artificial Sequence
  Description of Artificial Sequence: Synthetic oligonucleotide
  Antisense strand to SEQ ID NO: 1623477
auaagcguaacucacagag

SEQ ID NO: 1623479 - RNA, 19 nt, Artificial Sequence
  Description of Artificial Sequence: Synthetic oligonucleotide
  Sense strand starting at position 2933 of SEQ ID NO: 1560775
gugaguuacgcuuauuauc

SEQ ID NO: 1623480 - RNA, 19 nt, Artificial Sequence
  Description of Artificial Sequence: Synthetic oligonucleotide
  Antisense strand to SEQ ID NO: 1623479
gauaauaagcguaacucac

SEQ ID NO: 1623481 - RNA, 19 nt, Artificial Sequence
  Description of Artificial Sequence: Synthetic oligonucleotide
  Sense strand starting at position 3112 of SEQ ID NO: 1560775
gggcaacaauauugugaga

SEQ ID NO: 1623482 - RNA, 19 nt, Artificial Sequence
  Description of Artificial Sequence: Synthetic oligonucleotide
  Antisense strand to SEQ ID NO: 1623481
ucucacaauauuguugccc

SEQ ID NO: 1623483 - RNA, 19 nt, Artificial Sequence
  Description of Artificial Sequence: Synthetic oligonucleotide
  Sense strand starting at position 3276 of SEQ ID NO: 1560775
uagauucgagccugggaga

SEQ ID NO: 1623484 - RNA, 19 nt, Artificial Sequence
  Description of Artificial Sequence: Synthetic oligonucleotide
  Antisense strand to SEQ ID NO: 1623483
ucucccaggcucgaaucua

SEQ ID NO: 1623485 - RNA, 19 nt, Artificial Sequence
  Description of Artificial Sequence: Synthetic oligonucleotide
  Sense strand starting at position 3424 of SEQ ID NO: 1560775
gaaucaacaccgugaugcu

SEQ ID NO: 1623486 - RNA, 19 nt, Artificial Sequence
  Description of Artificial Sequence: Synthetic oligonucleotide
  Antisense strand to SEQ ID NO: 1623485
agcaucacgguguugauuc

SEQ ID NO: 1623487 - RNA, 19 nt, Artificial Sequence
  Description of Artificial Sequence: Synthetic oligonucleotide
  Sense strand starting at position 3448 of SEQ ID NO: 1560775
ggcucagaggauugaauuc

SEQ ID NO: 1623488 - RNA, 19 nt, Artificial Sequence
  Description of Artificial Sequence: Synthetic oligonucleotide
  Antisense strand to SEQ ID NO: 1623487
gaauucaauccucugagcc

SEQ ID NO: 1623489 - RNA, 19 nt, Artificial Sequence
  Description of Artificial Sequence: Synthetic oligonucleotide
  Sense strand starting at position 3569 of SEQ ID NO: 1560775
cccugaugcugcgauacaa

SEQ ID NO: 1623490 - RNA, 19 nt, Artificial Sequence
  Description of Artificial Sequence: Synthetic oligonucleotide
  Antisense strand to SEQ ID NO: 1623489
uuguaucgcagcaucaggg

SEQ ID NO: 1623491 - RNA, 19 nt, Artificial Sequence
  Description of Artificial Sequence: Synthetic oligonucleotide
  Sense strand starting at position 3608 of SEQ ID NO: 1560775
gcccuuguacaguauuacu

SEQ ID NO: 1623492 - RNA, 19 nt, Artificial Sequence
  Description of Artificial Sequence: Synthetic oligonucleotide
  Antisense strand to SEQ ID NO: 1623491
aguaauacuguacaagggc

SEQ ID NO: 1623493 - RNA, 19 nt, Artificial Sequence
  Description of Artificial Sequence: Synthetic oligonucleotide
  Sense strand starting at position 3719 of SEQ ID NO: 1560775
gagagaaacugggaugaga

SEQ ID NO: 1623494 - RNA, 19 nt, Artificial Sequence
  Description of Artificial Sequence: Synthetic oligonucleotide
  Antisense strand to SEQ ID NO: 1623493
ucucaucccaguuucucuc

SEQ ID NO: 1623495 - RNA, 19 nt, Artificial Sequence
  Description of Artificial Sequence: Synthetic oligonucleotide
  Sense strand starting at position 3762 of SEQ ID NO: 1560775
gcccaaagucauuggaacu

SEQ ID NO: 1623496 - RNA, 19 nt, Artificial Sequence
  Description of Artificial Sequence: Synthetic oligonucleotide
  Antisense strand to SEQ ID NO: 1623495
aguuccaaugacuuugggc

SEQ ID NO: 1623497 - RNA, 19 nt, Artificial Sequence
  Description of Artificial Sequence: Synthetic oligonucleotide
  Sense strand starting at position 3785 of SEQ ID NO: 1560775
ugccuuucuuuggaaugga

SEQ ID NO: 1623498 - RNA, 19 nt, Artificial Sequence
  Description of Artificial Sequence: Synthetic oligonucleotide
  Antisense strand to SEQ ID NO: 1623497
uccauuccaaagaaaggca

SEQ ID NO: 1623499 - RNA, 19 nt, Artificial Sequence
  Description of Artificial Sequence: Synthetic oligonucleotide
  Sense strand starting at position 3788 of SEQ ID NO: 1560775
cuuucuuuggaauggauca

SEQ ID NO: 1623500 - RNA, 19 nt, Artificial Sequence
  Description of Artificial Sequence: Synthetic oligonucleotide
  Antisense strand to SEQ ID NO: 1623499
ugauccauuccaaagaaag

SEQ ID NO: 1623501 - RNA, 19 nt, Artificial Sequence
  Description of Artificial Sequence: Synthetic oligonucleotide
  Sense strand starting at position 3795 of SEQ ID NO: 1560775
uggaauggaucauugcuau

SEQ ID NO: 1623502 - RNA, 19 nt, Artificial Sequence
  Description of Artificial Sequence: Synthetic oligonucleotide
  Antisense strand to SEQ ID NO: 1623501
auagcaaugauccauucca

SEQ ID NO: 1623503 - RNA, 19 nt, Artificial Sequence
  Description of Artificial Sequence: Synthetic oligonucleotide
  Sense strand starting at position 3799 of SEQ ID NO: 1560775
auggaucauugcuauuauu

SEQ ID NO: 1623504 - RNA, 19 nt, Artificial Sequence
  Description of Artificial Sequence: Synthetic oligonucleotide
  Antisense strand to SEQ ID NO: 1623503
aauaauagcaaugauccau

SEQ ID NO: 1623505 - RNA, 19 nt, Artificial Sequence
  Description of Artificial Sequence: Synthetic oligonucleotide
  Sense strand starting at position 3807 of SEQ ID NO: 1560775
uugcuauuauucuguguuc

SEQ ID NO: 1623506 - RNA, 19 nt, Artificial Sequence
  Description of Artificial Sequence: Synthetic oligonucleotide
  Antisense strand to SEQ ID NO: 1623505
gaacacagaauaauagcaa

SEQ ID NO: 1623507 - RNA, 19 nt, Artificial Sequence
  Description of Artificial Sequence: Synthetic oligonucleotide
  Sense strand starting at position 3809 of SEQ ID NO: 1560775
gcuauuauucuguguuccu

SEQ ID NO: 1623508 - RNA, 19 nt, Artificial Sequence
  Description of Artificial Sequence: Synthetic oligonucleotide
  Antisense strand to SEQ ID NO: 1623507
aggaacacagaauaauagc

SEQ ID NO: 1623509 - RNA, 19 nt, Artificial Sequence
  Description of Artificial Sequence: Synthetic oligonucleotide
  Sense strand starting at position 3810 of SEQ ID NO: 1560775
cuauuauucuguguuccuu

SEQ ID NO: 1623510 - RNA, 19 nt, Artificial Sequence
  Description of Artificial Sequence: Synthetic oligonucleotide
  Antisense strand to SEQ ID NO: 1623509
aaggaacacagaauaauag

SEQ ID NO: 1623511 - RNA, 19 nt, Artificial Sequence
  Description of Artificial Sequence: Synthetic oligonucleotide
  Sense strand starting at position 3812 of SEQ ID NO: 1560775
auuauucuguguuccuuga

SEQ ID NO: 1623512 - RNA, 19 nt, Artificial Sequence
  Description of Artificial Sequence: Synthetic oligonucleotide
  Antisense strand to SEQ ID NO: 1623511
ucaaggaacacagaauaau

SEQ ID NO: 1623513 - RNA, 19 nt, Artificial Sequence
  Description of Artificial Sequence: Synthetic oligonucleotide
  Sense strand starting at position 3816 of SEQ ID NO: 1560775
uucuguguuccuugaugca

SEQ ID NO: 1623514 - RNA, 19 nt, Artificial Sequence
  Description of Artificial Sequence: Synthetic oligonucleotide
  Antisense strand to SEQ ID NO: 1623513
ugcaucaaggaacacagaa

SEQ ID NO: 1623515 - RNA, 19 nt, Artificial Sequence
  Description of Artificial Sequence: Synthetic oligonucleotide
  Sense strand starting at position 3819 of SEQ ID NO: 1560775
uguguuccuugaugcaaga

SEQ ID NO: 1623516 - RNA, 19 nt, Artificial Sequence
  Description of Artificial Sequence: Synthetic oligonucleotide
  Antisense strand to SEQ ID NO: 1623515
ucuugcaucaaggaacaca

SEQ ID NO: 1623517 - RNA, 19 nt, Artificial Sequence
  Description of Artificial Sequence: Synthetic oligonucleotide
  Sense strand starting at position 3883 of SEQ ID NO: 1560775
cuggguuggucagaggcaa

SEQ ID NO: 1623518 - RNA, 19 nt, Artificial Sequence
  Description of Artificial Sequence: Synthetic oligonucleotide
  Antisense strand to SEQ ID NO: 1623517
uugccucugaccaacccag

SEQ ID NO: 1623519 - RNA, 19 nt, Artificial Sequence
  Description of Artificial Sequence: Synthetic oligonucleotide
  Sense strand starting at position 3887 of SEQ ID NO: 1560775
guuggucagaggcaagauu

SEQ ID NO: 1623520 - RNA, 19 nt, Artificial Sequence
  Description of Artificial Sequence: Synthetic oligonucleotide
  Antisense strand to SEQ ID NO: 1623519
aaucuugccucugaccaac

SEQ ID NO: 1623521 - RNA, 19 nt, Artificial Sequence
  Description of Artificial Sequence: Synthetic oligonucleotide
  Sense strand starting at position 3896 of SEQ ID NO: 1560775
aggcaagauuaggcucaga

SEQ ID NO: 1623522 - RNA, 19 nt, Artificial Sequence
  Description of Artificial Sequence: Synthetic oligonucleotide
  Antisense strand to SEQ ID NO: 1623521
ucugagccuaaucuugccu

SEQ ID NO: 1623523 - RNA, 19 nt, Artificial Sequence
  Description of Artificial Sequence: Synthetic oligonucleotide
  Sense strand starting at position 73 of SEQ ID NO: 1560776
uuaucuguaucuuacagag

SEQ ID NO: 1623524 - RNA, 19 nt, Artificial Sequence
  Description of Artificial Sequence: Synthetic oligonucleotide
  Antisense strand to SEQ ID NO: 1623523
cucuguaagauacagauaa

SEQ ID NO: 1623525 - RNA, 19 nt, Artificial Sequence
  Description of Artificial Sequence: Synthetic oligonucleotide
  Sense strand starting at position 75 of SEQ ID NO: 1560776
aucuguaucuuacagaguu

SEQ ID NO: 1623526 - RNA, 19 nt, Artificial Sequence
  Description of Artificial Sequence: Synthetic oligonucleotide
  Antisense strand to SEQ ID NO: 1623525
aacucuguaagauacagau

SEQ ID NO: 1623527 - RNA, 19 nt, Artificial Sequence
  Description of Artificial Sequence: Synthetic oligonucleotide
  Sense strand starting at position 311 of SEQ ID NO: 1560776
caagguuacugcugauaac

SEQ ID NO: 1623528 - RNA, 19 nt, Artificial Sequence
  Description of Artificial Sequence: Synthetic oligonucleotide
  Antisense strand to SEQ ID NO: 1623527
guuaucagcaguaaccuug

SEQ ID NO: 1623529 - RNA, 19 nt, Artificial Sequence
  Description of Artificial Sequence: Synthetic oligonucleotide
  Sense strand starting at position 312 of SEQ ID NO: 1560776
aagguuacugcugauaaca

SEQ ID NO: 1623530 - RNA, 19 nt, Artificial Sequence
  Description of Artificial Sequence: Synthetic oligonucleotide
  Antisense strand to SEQ ID NO: 1623529
uguuaucagcaguaaccuu

SEQ ID NO: 1623531 - RNA, 19 nt, Artificial Sequence
  Description of Artificial Sequence: Synthetic oligonucleotide
  Sense strand starting at position 347 of SEQ ID NO: 1560776
gguggcuugcucugagcua

SEQ ID NO: 1623532 - RNA, 19 nt, Artificial Sequence
  Description of Artificial Sequence: Synthetic oligonucleotide
  Antisense strand to SEQ ID NO: 1623531
uagcucagagcaagccacc

SEQ ID NO: 1623533 - RNA, 19 nt, Artificial Sequence
  Description of Artificial Sequence: Synthetic oligonucleotide
  Sense strand starting at position 384 of SEQ ID NO: 1560776
gcaaauaugaccugguuga

SEQ ID NO: 1623534 - RNA, 19 nt, Artificial Sequence
  Description of Artificial Sequence: Synthetic oligonucleotide
  Antisense strand to SEQ ID NO: 1623533
ucaaccaggucauauuugc

SEQ ID NO: 1623535 - RNA, 19 nt, Artificial Sequence
  Description of Artificial Sequence: Synthetic oligonucleotide
  Sense strand starting at position 385 of SEQ ID NO: 1560776
caaauaugaccugguugau

SEQ ID NO: 1623536 - RNA, 19 nt, Artificial Sequence
  Description of Artificial Sequence: Synthetic oligonucleotide
  Antisense strand to SEQ ID NO: 1623535
aucaaccaggucauauuug

SEQ ID NO: 1623537 - RNA, 19 nt, Artificial Sequence
  Description of Artificial Sequence: Synthetic oligonucleotide
  Sense strand starting at position 530 of SEQ ID NO: 1560776
gggcaucuuccugaaguuc

SEQ ID NO: 1623538 - RNA, 19 nt, Artificial Sequence
  Description of Artificial Sequence: Synthetic oligonucleotide
  Antisense strand to SEQ ID NO: 1623537
gaacuucaggaagaugccc

SEQ ID NO: 1623539 - RNA, 19 nt, Artificial Sequence
  Description of Artificial Sequence: Synthetic oligonucleotide
  Sense strand starting at position 653 of SEQ ID NO: 1560776
caggguaucucgcccauua

SEQ ID NO: 1623540 - RNA, 19 nt, Artificial Sequence
  Description of Artificial Sequence: Synthetic oligonucleotide
  Antisense strand to SEQ ID NO: 1623539
uaaugggcgagauacccug

SEQ ID NO: 1623541 - RNA, 19 nt, Artificial Sequence
  Description of Artificial Sequence: Synthetic oligonucleotide
  Sense strand starting at position 725 of SEQ ID NO: 1560776
gggaguuucuuugguugua

SEQ ID NO: 1623542 - RNA, 19 nt, Artificial Sequence
  Description of Artificial Sequence: Synthetic oligonucleotide
  Antisense strand to SEQ ID NO: 1623541
uacaaccaaagaaacuccc

SEQ ID NO: 1623543 - RNA, 19 nt, Artificial Sequence
  Description of Artificial Sequence: Synthetic oligonucleotide
  Sense strand starting at position 726 of SEQ ID NO: 1560776
ggaguuucuuugguuguaa

SEQ ID NO: 1623544 - RNA, 19 nt, Artificial Sequence
  Description of Artificial Sequence: Synthetic oligonucleotide
  Antisense strand to SEQ ID NO: 1623543
uuacaaccaaagaaacucc

SEQ ID NO: 1623545 - RNA, 19 nt, Artificial Sequence
  Description of Artificial Sequence: Synthetic oligonucleotide
  Sense strand starting at position 727 of SEQ ID NO: 1560776
gaguuucuuugguuguaau

SEQ ID NO: 1623546 - RNA, 19 nt, Artificial Sequence
  Description of Artificial Sequence: Synthetic oligonucleotide
  Antisense strand to SEQ ID NO: 1623545
auuacaaccaaagaaacuc

SEQ ID NO: 1623547 - RNA, 19 nt, Artificial Sequence
  Description of Artificial Sequence: Synthetic oligonucleotide
  Sense strand starting at position 728 of SEQ ID NO: 1560776
aguuucuuugguuguaaua

SEQ ID NO: 1623548 - RNA, 19 nt, Artificial Sequence
  Description of Artificial Sequence: Synthetic oligonucleotide
  Antisense strand to SEQ ID NO: 1623547
uauuacaaccaaagaaacu

SEQ ID NO: 1623549 - RNA, 19 nt, Artificial Sequence
  Description of Artificial Sequence: Synthetic oligonucleotide
  Sense strand starting at position 810 of SEQ ID NO: 1560776
gggccuuguuuagggcaga

SEQ ID NO: 1623550 - RNA, 19 nt, Artificial Sequence
  Description of Artificial Sequence: Synthetic oligonucleotide
  Antisense strand to SEQ ID NO: 1623549
ucugcccuaaacaaggccc

SEQ ID NO: 1623551 - RNA, 19 nt, Artificial Sequence
  Description of Artificial Sequence: Synthetic oligonucleotide
  Sense strand starting at position 811 of SEQ ID NO: 1560776
ggccuuguuuagggcagaa

SEQ ID NO: 1623552 - RNA, 19 nt, Artificial Sequence
  Description of Artificial Sequence: Synthetic oligonucleotide
  Antisense strand to SEQ ID NO: 1623551
uucugcccuaaacaaggcc

SEQ ID NO: 1623553 - RNA, 19 nt, Artificial Sequence
  Description of Artificial Sequence: Synthetic oligonucleotide
  Sense strand starting at position 813 of SEQ ID NO: 1560776
ccuuguuuagggcagaauu

SEQ ID NO: 1623554 - RNA, 19 nt, Artificial Sequence
  Description of Artificial Sequence: Synthetic oligonucleotide
  Antisense strand to SEQ ID NO: 1623553
aauucugcccuaaacaagg

SEQ ID NO: 1623555 - RNA, 19 nt, Artificial Sequence
  Description of Artificial Sequence: Synthetic oligonucleotide
  Sense strand starting at position 854 of SEQ ID NO: 1560776
gcgcccauuugacaguuua

SEQ ID NO: 1623556 - RNA, 19 nt, Artificial Sequence
  Description of Artificial Sequence: Synthetic oligonucleotide
  Antisense strand to SEQ ID NO: 1623555
uaaacugucaaaugggcgc

SEQ ID NO: 1623557 - RNA, 19 nt, Artificial Sequence
  Description of Artificial Sequence: Synthetic oligonucleotide
  Sense strand starting at position 1452 of SEQ ID NO: 1560776
cagaaccucgagugucaau

SEQ ID NO: 1623558 - RNA, 19 nt, Artificial Sequence
  Description of Artificial Sequence: Synthetic oligonucleotide
  Antisense strand to SEQ ID NO: 1623557
auugacacucgagguucug

SEQ ID NO: 1623559 - RNA, 19 nt, Artificial Sequence
  Description of Artificial Sequence: Synthetic oligonucleotide
  Sense strand starting at position 1462 of SEQ ID NO: 1560776
agugucaauucugguggga

SEQ ID NO: 1623560 - RNA, 19 nt, Artificial Sequence
  Description of Artificial Sequence: Synthetic oligonucleotide
  Antisense strand to SEQ ID NO: 1623559
ucccaccagaauugacacu

SEQ ID NO: 1623561 - RNA, 19 nt, Artificial Sequence
  Description of Artificial Sequence: Synthetic oligonucleotide
  Sense strand starting at position 1464 of SEQ ID NO: 1560776
ugucaauucuggugggaag

SEQ ID NO: 1623562 - RNA, 19 nt, Artificial Sequence
  Description of Artificial Sequence: Synthetic oligonucleotide
  Antisense strand to SEQ ID NO: 1623561
cuucccaccagaauugaca

SEQ ID NO: 1623563 - RNA, 19 nt, Artificial Sequence
  Description of Artificial Sequence: Synthetic oligonucleotide
  Sense strand starting at position 1466 of SEQ ID NO: 1560776
ucaauucuggugggaagga

SEQ ID NO: 1623564 - RNA, 19 nt, Artificial Sequence
  Description of Artificial Sequence: Synthetic oligonucleotide
  Antisense strand to SEQ ID NO: 1623563
uccuucccaccagaauuga

SEQ ID NO: 1623565 - RNA, 19 nt, Artificial Sequence
  Description of Artificial Sequence: Synthetic oligonucleotide
  Sense strand starting at position 1503 of SEQ ID NO: 1560776
uaaagauguugggcgugaa

SEQ ID NO: 1623566 - RNA, 19 nt, Artificial Sequence
  Description of Artificial Sequence: Synthetic oligonucleotide
  Antisense strand to SEQ ID NO: 1623565
uucacgcccaacaucuuua

SEQ ID NO: 1623567 - RNA, 19 nt, Artificial Sequence
  Description of Artificial Sequence: Synthetic oligonucleotide
  Sense strand starting at position 1504 of SEQ ID NO: 1560776
aaagauguugggcgugaau

SEQ ID NO: 1623568 - RNA, 19 nt, Artificial Sequence
  Description of Artificial Sequence: Synthetic oligonucleotide
  Antisense strand to SEQ ID NO: 1623567
auucacgcccaacaucuuu

SEQ ID NO: 1623569 - RNA, 19 nt, Artificial Sequence
  Description of Artificial Sequence: Synthetic oligonucleotide
  Sense strand starting at position 1506 of SEQ ID NO: 1560776
agauguugggcgugaauuc

SEQ ID NO: 1623570 - RNA, 19 nt, Artificial Sequence
  Description of Artificial Sequence: Synthetic oligonucleotide
  Antisense strand to SEQ ID NO: 1623569
gaauucacgcccaacaucu

SEQ ID NO: 1623571 - RNA, 19 nt, Artificial Sequence
  Description of Artificial Sequence: Synthetic oligonucleotide
  Sense strand starting at position 1561 of SEQ ID NO: 1560776
ggcucaggacgguaguuaa

SEQ ID NO: 1623572 - RNA, 19 nt, Artificial Sequence
  Description of Artificial Sequence: Synthetic oligonucleotide
  Antisense strand to SEQ ID NO: 1623571
uuaacuaccguccugagcc

SEQ ID NO: 1623573 - RNA, 19 nt, Artificial Sequence
  Description of Artificial Sequence: Synthetic oligonucleotide
  Sense strand starting at position 1573 of SEQ ID NO: 1560776
uaguuaacucaagguaaga

SEQ ID NO: 1623574 - RNA, 19 nt, Artificial Sequence
  Description of Artificial Sequence: Synthetic oligonucleotide
  Antisense strand to SEQ ID NO: 1623573
ucuuaccuugaguuaacua

SEQ ID NO: 1623575 - RNA, 19 nt, Artificial Sequence
  Description of Artificial Sequence: Synthetic oligonucleotide
  Sense strand starting at position 1652 of SEQ ID NO: 1560776
cagaacaucgggugugaau

SEQ ID NO: 1623576 - RNA, 19 nt, Artificial Sequence
  Description of Artificial Sequence: Synthetic oligonucleotide
  Antisense strand to SEQ ID NO: 1623575
auucacacccgauguucug

SEQ ID NO: 1623577 - RNA, 19 nt, Artificial Sequence
  Description of Artificial Sequence: Synthetic oligonucleotide
  Sense strand starting at position 2546 of SEQ ID NO: 1560776
ccaggauugacccgacacu

SEQ ID NO: 1623578 - RNA, 19 nt, Artificial Sequence
  Description of Artificial Sequence: Synthetic oligonucleotide
  Antisense strand to SEQ ID NO: 1623577
agugucgggucaauccugg

SEQ ID NO: 1623579 - RNA, 19 nt, Artificial Sequence
  Description of Artificial Sequence: Synthetic oligonucleotide
  Sense strand starting at position 2906 of SEQ ID NO: 1560776
ccgauuacuuggccgcaga

SEQ ID NO: 1623580 - RNA, 19 nt, Artificial Sequence
  Description of Artificial Sequence: Synthetic oligonucleotide
  Antisense strand to SEQ ID NO: 1623579
ucugcggccaaguaaucgg

SEQ ID NO: 1623581 - RNA, 19 nt, Artificial Sequence
  Description of Artificial Sequence: Synthetic oligonucleotide
  Sense strand starting at position 3357 of SEQ ID NO: 1560776
ccauguacgagugaagacu

SEQ ID NO: 1623582 - RNA, 19 nt, Artificial Sequence
  Description of Artificial Sequence: Synthetic oligonucleotide
  Antisense strand to SEQ ID NO: 1623581
agucuucacucguacaugg

SEQ ID NO: 1623583 - RNA, 19 nt, Artificial Sequence
  Description of Artificial Sequence: Synthetic oligonucleotide
  Sense strand starting at position 3366 of SEQ ID NO: 1560776
agugaagacucacgucagu

SEQ ID NO: 1623584 - RNA, 19 nt, Artificial Sequence
  Description of Artificial Sequence: Synthetic oligonucleotide
  Antisense strand to SEQ ID NO: 1623583
acugacgugagucuucacu

SEQ ID NO: 1623585 - RNA, 19 nt, Artificial Sequence
  Description of Artificial Sequence: Synthetic oligonucleotide
  Sense strand starting at position 3420 of SEQ ID NO: 1560776
ccucccuuuccgggagaga

SEQ ID NO: 1623586 - RNA, 19 nt, Artificial Sequence
  Description of Artificial Sequence: Synthetic oligonucleotide
  Antisense strand to SEQ ID NO: 1623585
ucucucccggaaagggagg

SEQ ID NO: 1623587 - RNA, 19 nt, Artificial Sequence
  Description of Artificial Sequence: Synthetic oligonucleotide
  Sense strand starting at position 3433 of SEQ ID NO: 1560776
gagagaacuccugaguguc

SEQ ID NO: 1623588 - RNA, 19 nt, Artificial Sequence
  Description of Artificial Sequence: Synthetic oligonucleotide
  Antisense strand to SEQ ID NO: 1623587
gacacucaggaguucucuc

SEQ ID NO: 1623589 - RNA, 19 nt, Artificial Sequence
  Description of Artificial Sequence: Synthetic oligonucleotide
  Sense strand starting at position 3541 of SEQ ID NO: 1560776
ggauccagcucucuaagga

SEQ ID NO: 1623590 - RNA, 19 nt, Artificial Sequence
  Description of Artificial Sequence: Synthetic oligonucleotide
  Antisense strand to SEQ ID NO: 1623589
uccuuagagagcuggaucc

SEQ ID NO: 1623591 - RNA, 19 nt, Artificial Sequence
  Description of Artificial Sequence: Synthetic oligonucleotide
  Sense strand starting at position 3570 of SEQ ID NO: 1560776
ccaggauccuggcgucuua

SEQ ID NO: 1623592 - RNA, 19 nt, Artificial Sequence
  Description of Artificial Sequence: Synthetic oligonucleotide
  Antisense strand to SEQ ID NO: 1623591
uaagacgccaggauccugg

SEQ ID NO: 1623593 - RNA, 19 nt, Artificial Sequence
  Description of Artificial Sequence: Synthetic oligonucleotide
  Sense strand starting at position 411 of SEQ ID NO: 1560777
ccucguucacguuugcaga

SEQ ID NO: 1623594 - RNA, 19 nt, Artificial Sequence
  Description of Artificial Sequence: Synthetic oligonucleotide
  Antisense strand to SEQ ID NO: 1623593
ucugcaaacgugaacgagg

SEQ ID NO: 1623595 - RNA, 19 nt, Artificial Sequence
  Description of Artificial Sequence: Synthetic oligonucleotide
  Sense strand starting at position 414 of SEQ ID NO: 1560777
cguucacguuugcagagau

SEQ ID NO: 1623596 - RNA, 19 nt, Artificial Sequence
  Description of Artificial Sequence: Synthetic oligonucleotide
  Antisense strand to SEQ ID NO: 1623595
aucucugcaaacgugaacg

SEQ ID NO: 1623597 - RNA, 19 nt, Artificial Sequence
  Description of Artificial Sequence: Synthetic oligonucleotide
  Sense strand starting at position 418 of SEQ ID NO: 1560777
cacguuugcagagauguca

SEQ ID NO: 1623598 - RNA, 19 nt, Artificial Sequence
  Description of Artificial Sequence: Synthetic oligonucleotide
  Antisense strand to SEQ ID NO: 1623597
ugacaucucugcaaacgug

SEQ ID NO: 1623599 - RNA, 19 nt, Artificial Sequence
  Description of Artificial Sequence: Synthetic oligonucleotide
  Sense strand starting at position 430 of SEQ ID NO: 1560777
gaugucagauauugucugu

SEQ ID NO: 1623600 - RNA, 19 nt, Artificial Sequence
  Description of Artificial Sequence: Synthetic oligonucleotide
  Antisense strand to SEQ ID NO: 1623599
acagacaauaucugacauc

SEQ ID NO: 1623601 - RNA, 19 nt, Artificial Sequence
  Description of Artificial Sequence: Synthetic oligonucleotide
  Sense strand starting at position 433 of SEQ ID NO: 1560777
gucagauauugucugucca

SEQ ID NO: 1623602 - RNA, 19 nt, Artificial Sequence
  Description of Artificial Sequence: Synthetic oligonucleotide
  Antisense strand to SEQ ID NO: 1623601
uggacagacaauaucugac

SEQ ID NO: 1623603 - RNA, 19 nt, Artificial Sequence
  Description of Artificial Sequence: Synthetic oligonucleotide
  Sense strand starting at position 434 of SEQ ID NO: 1560777
ucagauauugucuguccac

SEQ ID NO: 1623604 - RNA, 19 nt, Artificial Sequence
  Description of Artificial Sequence: Synthetic oligonucleotide
  Antisense strand to SEQ ID NO: 1623603
guggacagacaauaucuga

SEQ ID NO: 1623605 - RNA, 19 nt, Artificial Sequence
  Description of Artificial Sequence: Synthetic oligonucleotide
  Sense strand starting at position 554 of SEQ ID NO: 1560777
cuccucguucuagaggaaa

SEQ ID NO: 1623606 - RNA, 19 nt, Artificial Sequence
  Description of Artificial Sequence: Synthetic oligonucleotide
  Antisense strand to SEQ ID NO: 1623605
uuuccucuagaacgaggag

SEQ ID NO: 1623607 - RNA, 19 nt, Artificial Sequence
  Description of Artificial Sequence: Synthetic oligonucleotide
  Sense strand starting at position 616 of SEQ ID NO: 1560777
gccugaaugccgcagucuu

SEQ ID NO: 1623608 - RNA, 19 nt, Artificial Sequence
  Description of Artificial Sequence: Synthetic oligonucleotide
  Antisense strand to SEQ ID NO: 1623607
aagacugcggcauucaggc

SEQ ID NO: 1623609 - RNA, 19 nt, Artificial Sequence
  Description of Artificial Sequence: Synthetic oligonucleotide
  Sense strand starting at position 971 of SEQ ID NO: 1560777
ggagaauggugaugucagg

SEQ ID NO: 1623610 - RNA, 19 nt, Artificial Sequence
  Description of Artificial Sequence: Synthetic oligonucleotide
  Antisense strand to SEQ ID NO: 1623609
ccugacaucaccauucucc

SEQ ID NO: 1623611 - RNA, 19 nt, Artificial Sequence
  Description of Artificial Sequence: Synthetic oligonucleotide
  Sense strand starting at position 1139 of SEQ ID NO: 1560777
ggacuugaagauuggaguu

SEQ ID NO: 1623612 - RNA, 19 nt, Artificial Sequence
  Description of Artificial Sequence: Synthetic oligonucleotide
  Antisense strand to SEQ ID NO: 1623611
aacuccaaucuucaagucc

SEQ ID NO: 1623613 - RNA, 19 nt, Artificial Sequence
  Description of Artificial Sequence: Synthetic oligonucleotide
  Sense strand starting at position 1224 of SEQ ID NO: 1560777
gcuugaagcccagacucau

SEQ ID NO: 1623614 - RNA, 19 nt, Artificial Sequence
  Description of Artificial Sequence: Synthetic oligonucleotide
  Antisense strand to SEQ ID NO: 1623613
augagucugggcuucaagc

SEQ ID NO: 1623615 - RNA, 19 nt, Artificial Sequence
  Description of Artificial Sequence: Synthetic oligonucleotide
  Sense strand starting at position 1714 of SEQ ID NO: 1560777
ggguuugucuagggaaggu

SEQ ID NO: 1623616 - RNA, 19 nt, Artificial Sequence
  Description of Artificial Sequence: Synthetic oligonucleotide
  Antisense strand to SEQ ID NO: 1623615
accuucccuagacaaaccc

SEQ ID NO: 1623617 - RNA, 19 nt, Artificial Sequence
  Description of Artificial Sequence: Synthetic oligonucleotide
  Sense strand starting at position 2140 of SEQ ID NO: 1560777
uggccagguugaucucaga

SEQ ID NO: 1623618 - RNA, 19 nt, Artificial Sequence
  Description of Artificial Sequence: Synthetic oligonucleotide
  Antisense strand to SEQ ID NO: 1623617
ucugagaucaaccuggcca

SEQ ID NO: 1623619 - RNA, 19 nt, Artificial Sequence
  Description of Artificial Sequence: Synthetic oligonucleotide
  Sense strand starting at position 2227 of SEQ ID NO: 1560777
cgcccagucucuuuaucuu

SEQ ID NO: 1623620 - RNA, 19 nt, Artificial Sequence
  Description of Artificial Sequence: Synthetic oligonucleotide
  Antisense strand to SEQ ID NO: 1623619
aagauaaagagacugggcg

SEQ ID NO: 1623621 - RNA, 19 nt, Artificial Sequence
  Description of Artificial Sequence: Synthetic oligonucleotide
  Sense strand starting at position 2668 of SEQ ID NO: 1560777
uggcuuaggcugggaagau

SEQ ID NO: 1623622 - RNA, 19 nt, Artificial Sequence
  Description of Artificial Sequence: Synthetic oligonucleotide
  Antisense strand to SEQ ID NO: 1623621
aucuucccagccuaagcca

SEQ ID NO: 1623623 - RNA, 19 nt, Artificial Sequence
  Description of Artificial Sequence: Synthetic oligonucleotide
  Sense strand starting at position 2748 of SEQ ID NO: 1560777
gcucuuccuugcccugaua

SEQ ID NO: 1623624 - RNA, 19 nt, Artificial Sequence
  Description of Artificial Sequence: Synthetic oligonucleotide
  Antisense strand to SEQ ID NO: 1623623
uaucagggcaaggaagagc

SEQ ID NO: 1623625 - RNA, 19 nt, Artificial Sequence
  Description of Artificial Sequence: Synthetic oligonucleotide
  Sense strand starting at position 2763 of SEQ ID NO: 1560777
gauacaugaccuuggcaag

SEQ ID NO: 1623626 - RNA, 19 nt, Artificial Sequence
  Description of Artificial Sequence: Synthetic oligonucleotide
  Antisense strand to SEQ ID NO: 1623625
cuugccaaggucauguauc

SEQ ID NO: 1623627 - RNA, 19 nt, Artificial Sequence
  Description of Artificial Sequence: Synthetic oligonucleotide
  Sense strand starting at position 2932 of SEQ ID NO: 1560777
gcuggugcuacagguauau

SEQ ID NO: 1623628 - RNA, 19 nt, Artificial Sequence
  Description of Artificial Sequence: Synthetic oligonucleotide
  Antisense strand to SEQ ID NO: 1623627
auauaccuguagcaccagc

SEQ ID NO: 1623629 - RNA, 19 nt, Artificial Sequence
  Description of Artificial Sequence: Synthetic oligonucleotide
  Sense strand starting at position 3116 of SEQ ID NO: 1560777
aguagacaucagugccuaa

SEQ ID NO: 1623630 - RNA, 19 nt, Artificial Sequence
  Description of Artificial Sequence: Synthetic oligonucleotide
  Antisense strand to SEQ ID NO: 1623629
uuaggcacugaugucuacu

SEQ ID NO: 1623631 - RNA, 19 nt, Artificial Sequence
  Description of Artificial Sequence: Synthetic oligonucleotide
  Sense strand starting at position 3119 of SEQ ID NO: 1560777
agacaucagugccuaaaug

SEQ ID NO: 1623632 - RNA, 19 nt, Artificial Sequence
  Description of Artificial Sequence: Synthetic oligonucleotide
  Antisense strand to SEQ ID NO: 1623631
cauuuaggcacugaugucu

SEQ ID NO: 1623633 - RNA, 19 nt, Artificial Sequence
  Description of Artificial Sequence: Synthetic oligonucleotide
  Sense strand starting at position 3120 of SEQ ID NO: 1560777
gacaucagugccuaaauga

SEQ ID NO: 1623634 - RNA, 19 nt, Artificial Sequence
  Description of Artificial Sequence: Synthetic oligonucleotide
  Antisense strand to SEQ ID NO: 1623633
ucauuuaggcacugauguc

SEQ ID NO: 1623635 - RNA, 19 nt, Artificial Sequence
  Description of Artificial Sequence: Synthetic oligonucleotide
  Sense strand starting at position 3130 of SEQ ID NO: 1560777
ccuaaaugaugucagggau

SEQ ID NO: 1623636 - RNA, 19 nt, Artificial Sequence
  Description of Artificial Sequence: Synthetic oligonucleotide
  Antisense strand to SEQ ID NO: 1623635
aucccugacaucauuuagg

SEQ ID NO: 1623637 - RNA, 19 nt, Artificial Sequence
  Description of Artificial Sequence: Synthetic oligonucleotide
  Sense strand starting at position 3133 of SEQ ID NO: 1560777
aaaugaugucagggaucuc

SEQ ID NO: 1623638 - RNA, 19 nt, Artificial Sequence
  Description of Artificial Sequence: Synthetic oligonucleotide
  Antisense strand to SEQ ID NO: 1623637
gagaucccugacaucauuu

SEQ ID NO: 1623639 - RNA, 19 nt, Artificial Sequence
  Description of Artificial Sequence: Synthetic oligonucleotide
  Sense strand starting at position 3255 of SEQ ID NO: 1560777
ugaacugcgaucuguaaua

SEQ ID NO: 1623640 - RNA, 19 nt, Artificial Sequence
  Description of Artificial Sequence: Synthetic oligonucleotide
  Antisense strand to SEQ ID NO: 1623639
uauuacagaucgcaguuca

SEQ ID NO: 1623641 - RNA, 19 nt, Artificial Sequence
  Description of Artificial Sequence: Synthetic oligonucleotide
  Sense strand starting at position 3257 of SEQ ID NO: 1560777
aacugcgaucuguaauaag

SEQ ID NO: 1623642 - RNA, 19 nt, Artificial Sequence
  Description of Artificial Sequence: Synthetic oligonucleotide
  Antisense strand to SEQ ID NO: 1623641
cuuauuacagaucgcaguu

SEQ ID NO: 1623643 - RNA, 19 nt, Artificial Sequence
  Description of Artificial Sequence: Synthetic oligonucleotide
  Sense strand starting at position 3260 of SEQ ID NO: 1560777
ugcgaucuguaauaagcau

SEQ ID NO: 1623644 - RNA, 19 nt, Artificial Sequence
  Description of Artificial Sequence: Synthetic oligonucleotide
  Antisense strand to SEQ ID NO: 1623643
augcuuauuacagaucgca

SEQ ID NO: 1623645 - RNA, 19 nt, Artificial Sequence
  Description of Artificial Sequence: Synthetic oligonucleotide
  Sense strand starting at position 3268 of SEQ ID NO: 1560777
guaauaagcauguggagag

SEQ ID NO: 1623646 - RNA, 19 nt, Artificial Sequence
  Description of Artificial Sequence: Synthetic oligonucleotide
  Antisense strand to SEQ ID NO: 1623645
cucuccacaugcuuauuac

SEQ ID NO: 1623647 - RNA, 19 nt, Artificial Sequence
  Description of Artificial Sequence: Synthetic oligonucleotide
  Sense strand starting at position 3296 of SEQ ID NO: 1560777
gacagugucuuacguggga

SEQ ID NO: 1623648 - RNA, 19 nt, Artificial Sequence
  Description of Artificial Sequence: Synthetic oligonucleotide
  Antisense strand to SEQ ID NO: 1623647
ucccacguaagacacuguc

SEQ ID NO: 1623649 - RNA, 19 nt, Artificial Sequence
  Description of Artificial Sequence: Synthetic oligonucleotide
  Sense strand starting at position 3298 of SEQ ID NO: 1560777
cagugucuuacgugggagu

SEQ ID NO: 1623650 - RNA, 19 nt, Artificial Sequence
  Description of Artificial Sequence: Synthetic oligonucleotide
  Antisense strand to SEQ ID NO: 1623649
acucccacguaagacacug

SEQ ID NO: 1623651 - RNA, 19 nt, Artificial Sequence
  Description of Artificial Sequence: Synthetic oligonucleotide
  Sense strand starting at position 384 of SEQ ID NO: 1560778
aggaguugcugcucacauu

SEQ ID NO: 1623652 - RNA, 19 nt, Artificial Sequence
  Description of Artificial Sequence: Synthetic oligonucleotide
  Antisense strand to SEQ ID NO: 1623651
aaugugagcagcaacuccu

SEQ ID NO: 1623653 - RNA, 19 nt, Artificial Sequence
  Description of Artificial Sequence: Synthetic oligonucleotide
  Sense strand starting at position 424 of SEQ ID NO: 1560778
agauguauauguuaaggag

SEQ ID NO: 1623654 - RNA, 19 nt, Artificial Sequence
  Description of Artificial Sequence: Synthetic oligonucleotide
  Antisense strand to SEQ ID NO: 1623653
cuccuuaacauauacaucu

SEQ ID NO: 1623655 - RNA, 19 nt, Artificial Sequence
  Description of Artificial Sequence: Synthetic oligonucleotide
  Sense strand starting at position 427 of SEQ ID NO: 1560778
uguauauguuaaggagaaa

SEQ ID NO: 1623656 - RNA, 19 nt, Artificial Sequence
  Description of Artificial Sequence: Synthetic oligonucleotide
  Antisense strand to SEQ ID NO: 1623655
uuucuccuuaacauauaca

SEQ ID NO: 1623657 - RNA, 19 nt, Artificial Sequence
  Description of Artificial Sequence: Synthetic oligonucleotide
  Sense strand starting at position 701 of SEQ ID NO: 1560778
gguggaauccgggagaggu

SEQ ID NO: 1623658 - RNA, 19 nt, Artificial Sequence
  Description of Artificial Sequence: Synthetic oligonucleotide
  Antisense strand to SEQ ID NO: 1623657
accucucccggauuccacc

SEQ ID NO: 1623659 - RNA, 19 nt, Artificial Sequence
  Description of Artificial Sequence: Synthetic oligonucleotide
  Sense strand starting at position 726 of SEQ ID NO: 1560778
agcuucugcucguguguga

SEQ ID NO: 1623660 - RNA, 19 nt, Artificial Sequence
  Description of Artificial Sequence: Synthetic oligonucleotide
  Antisense strand to SEQ ID NO: 1623659
ucacacacgagcagaagcu

SEQ ID NO: 1623661 - RNA, 19 nt, Artificial Sequence
  Description of Artificial Sequence: Synthetic oligonucleotide
  Sense strand starting at position 727 of SEQ ID NO: 1560778
gcuucugcucgugugugau

SEQ ID NO: 1623662 - RNA, 19 nt, Artificial Sequence
  Description of Artificial Sequence: Synthetic oligonucleotide
  Antisense strand to SEQ ID NO: 1623661
aucacacacgagcagaagc

SEQ ID NO: 1623663 - RNA, 19 nt, Artificial Sequence
  Description of Artificial Sequence: Synthetic oligonucleotide
  Sense strand starting at position 729 of SEQ ID NO: 1560778
uucugcucgugugugauaa

SEQ ID NO: 1623664 - RNA, 19 nt, Artificial Sequence
  Description of Artificial Sequence: Synthetic oligonucleotide
  Antisense strand to SEQ ID NO: 1623663
uuaucacacacgagcagaa

SEQ ID NO: 1623665 - RNA, 19 nt, Artificial Sequence
  Description of Artificial Sequence: Synthetic oligonucleotide
  Sense strand starting at position 730 of SEQ ID NO: 1560778
ucugcucgugugugauaag

SEQ ID NO: 1623666 - RNA, 19 nt, Artificial Sequence
  Description of Artificial Sequence: Synthetic oligonucleotide
  Antisense strand to SEQ ID NO: 1623665
cuuaucacacacgagcaga

SEQ ID NO: 1623667 - RNA, 19 nt, Artificial Sequence
  Description of Artificial Sequence: Synthetic oligonucleotide
  Sense strand starting at position 829 of SEQ ID NO: 1560778
cggagcagccuguagaaua

SEQ ID NO: 1623668 - RNA, 19 nt, Artificial Sequence
  Description of Artificial Sequence: Synthetic oligonucleotide
  Antisense strand to SEQ ID NO: 1623667
uauucuacaggcugcuccg

SEQ ID NO: 1623669 - RNA, 19 nt, Artificial Sequence
  Description of Artificial Sequence: Synthetic oligonucleotide
  Sense strand starting at position 1984 of SEQ ID NO: 1560778
gagcgugaaacuugacgaa

SEQ ID NO: 1623670 - RNA, 19 nt, Artificial Sequence
  Description of Artificial Sequence: Synthetic oligonucleotide
  Antisense strand to SEQ ID NO: 1623669
uucgucaaguuucacgcuc

SEQ ID NO: 1623671 - RNA, 19 nt, Artificial Sequence
  Description of Artificial Sequence: Synthetic oligonucleotide
  Sense strand starting at position 1987 of SEQ ID NO: 1560778
cgugaaacuugacgaacuu

SEQ ID NO: 1623672 - RNA, 19 nt, Artificial Sequence
  Description of Artificial Sequence: Synthetic oligonucleotide
  Antisense strand to SEQ ID NO: 1623671
aaguucgucaaguuucacg

SEQ ID NO: 1623673 - RNA, 19 nt, Artificial Sequence
  Description of Artificial Sequence: Synthetic oligonucleotide
  Sense strand starting at position 2051 of SEQ ID NO: 1560778
uggaaacucaccggaaguu

SEQ ID NO: 1623674 - RNA, 19 nt, Artificial Sequence
  Description of Artificial Sequence: Synthetic oligonucleotide
  Antisense strand to SEQ ID NO: 1623673
aacuuccggugaguuucca

SEQ ID NO: 1623675 - RNA, 19 nt, Artificial Sequence
  Description of Artificial Sequence: Synthetic oligonucleotide
  Sense strand starting at position 2063 of SEQ ID NO: 1560778
ggaaguuuaccggguagau

SEQ ID NO: 1623676 - RNA, 19 nt, Artificial Sequence
  Description of Artificial Sequence: Synthetic oligonucleotide
  Antisense strand to SEQ ID NO: 1623675
aucuacccgguaaacuucc

SEQ ID NO: 1623677 - RNA, 19 nt, Artificial Sequence
  Description of Artificial Sequence: Synthetic oligonucleotide
  Sense strand starting at position 2065 of SEQ ID NO: 1560778
aaguuuaccggguagaucu

SEQ ID NO: 1623678 - RNA, 19 nt, Artificial Sequence
  Description of Artificial Sequence: Synthetic oligonucleotide
  Antisense strand to SEQ ID NO: 1623677
agaucuacccgguaaacuu

SEQ ID NO: 1623679 - RNA, 19 nt, Artificial Sequence
  Description of Artificial Sequence: Synthetic oligonucleotide
  Sense strand starting at position 2075 of SEQ ID NO: 1560778
gguagaucuacugggacuu

SEQ ID NO: 1623680 - RNA, 19 nt, Artificial Sequence
  Description of Artificial Sequence: Synthetic oligonucleotide
  Antisense strand to SEQ ID NO: 1623679
aagucccaguagaucuacc

SEQ ID NO: 1623681 - RNA, 19 nt, Artificial Sequence
  Description of Artificial Sequence: Synthetic oligonucleotide
  Sense strand starting at position 2219 of SEQ ID NO: 1560778
gucgcacaugacugauuua

SEQ ID NO: 1623682 - RNA, 19 nt, Artificial Sequence
  Description of Artificial Sequence: Synthetic oligonucleotide
  Antisense strand to SEQ ID NO: 1623681
uaaaucagucaugugcgac

SEQ ID NO: 1623683 - RNA, 19 nt, Artificial Sequence
  Description of Artificial Sequence: Synthetic oligonucleotide
  Sense strand starting at position 2282 of SEQ ID NO: 1560778
ggagucgugcugcuuguua

SEQ ID NO: 1623684 - RNA, 19 nt, Artificial Sequence
  Description of Artificial Sequence: Synthetic oligonucleotide
  Antisense strand to SEQ ID NO: 1623683
uaacaagcagcacgacucc

SEQ ID NO: 1623685 - RNA, 19 nt, Artificial Sequence
  Description of Artificial Sequence: Synthetic oligonucleotide
  Sense strand starting at position 2284 of SEQ ID NO: 1560778
agucgugcugcuuguuagu

SEQ ID NO: 1623686 - RNA, 19 nt, Artificial Sequence
  Description of Artificial Sequence: Synthetic oligonucleotide
  Antisense strand to SEQ ID NO: 1623685
acuaacaagcagcacgacu

SEQ ID NO: 1623687 - RNA, 19 nt, Artificial Sequence
  Description of Artificial Sequence: Synthetic oligonucleotide
  Sense strand starting at position 2900 of SEQ ID NO: 1560778
cgcugugccuggccagauu

SEQ ID NO: 1623688 - RNA, 19 nt, Artificial Sequence
  Description of Artificial Sequence: Synthetic oligonucleotide
  Antisense strand to SEQ ID NO: 1623687
aaucuggccaggcacagcg

SEQ ID NO: 1623689 - RNA, 19 nt, Artificial Sequence
  Description of Artificial Sequence: Synthetic oligonucleotide
  Sense strand starting at position 3371 of SEQ ID NO: 1560778
ugggcuguucacugugauu

SEQ ID NO: 1623690 - RNA, 19 nt, Artificial Sequence
  Description of Artificial Sequence: Synthetic oligonucleotide
  Antisense strand to SEQ ID NO: 1623689
aaucacagugaacagccca

SEQ ID NO: 1623691 - RNA, 19 nt, Artificial Sequence
  Description of Artificial Sequence: Synthetic oligonucleotide
  Sense strand starting at position 3460 of SEQ ID NO: 1560778
guaggcaauucucagaauu

SEQ ID NO: 1623692 - RNA, 19 nt, Artificial Sequence
  Description of Artificial Sequence: Synthetic oligonucleotide
  Antisense strand to SEQ ID NO: 1623691
aauucugagaauugccuac

SEQ ID NO: 1623693 - RNA, 19 nt, Artificial Sequence
  Description of Artificial Sequence: Synthetic oligonucleotide
  Sense strand starting at position 3462 of SEQ ID NO: 1560778
aggcaauucucagaauuga

SEQ ID NO: 1623694 - RNA, 19 nt, Artificial Sequence
  Description of Artificial Sequence: Synthetic oligonucleotide
  Antisense strand to SEQ ID NO: 1623693
ucaauucugagaauugccu

SEQ ID NO: 1623695 - RNA, 19 nt, Artificial Sequence
  Description of Artificial Sequence: Synthetic oligonucleotide
  Sense strand starting at position 3594 of SEQ ID NO: 1560778
aguguauaaugagccauga

SEQ ID NO: 1623696 - RNA, 19 nt, Artificial Sequence
  Description of Artificial Sequence: Synthetic oligonucleotide
  Antisense strand to SEQ ID NO: 1623695
ucauggcucauuauacacu

SEQ ID NO: 1623697 - RNA, 19 nt, Artificial Sequence
  Description of Artificial Sequence: Synthetic oligonucleotide
  Sense strand starting at position 3698 of SEQ ID NO: 1560778
agcucuuugugacccguau

SEQ ID NO: 1623698 - RNA, 19 nt, Artificial Sequence
  Description of Artificial Sequence: Synthetic oligonucleotide
  Antisense strand to SEQ ID NO: 1623697
auacgggucacaaagagcu

SEQ ID NO: 1623699 - RNA, 19 nt, Artificial Sequence
  Description of Artificial Sequence: Synthetic oligonucleotide
  Sense strand starting at position 3840 of SEQ ID NO: 1560778
uuggaaugccucugacaua

SEQ ID NO: 1623700 - RNA, 19 nt, Artificial Sequence
  Description of Artificial Sequence: Synthetic oligonucleotide
  Antisense strand to SEQ ID NO: 1623699
uaugucagaggcauuccaa

SEQ ID NO: 1623701 - RNA, 19 nt, Artificial Sequence
  Description of Artificial Sequence: Synthetic oligonucleotide
  Sense strand starting at position 3841 of SEQ ID NO: 1560778
uggaaugccucugacauau

SEQ ID NO: 1623702 - RNA, 19 nt, Artificial Sequence
  Description of Artificial Sequence: Synthetic oligonucleotide
  Antisense strand to SEQ ID NO: 1623701
auaugucagaggcauucca

SEQ ID NO: 1623703 - RNA, 19 nt, Artificial Sequence
  Description of Artificial Sequence: Synthetic oligonucleotide
  Sense strand starting at position 3843 of SEQ ID NO: 1560778
gaaugccucugacauaugu

SEQ ID NO: 1623704 - RNA, 19 nt, Artificial Sequence
  Description of Artificial Sequence: Synthetic oligonucleotide
  Antisense strand to SEQ ID NO: 1623703
acauaugucagaggcauuc

SEQ ID NO: 1623705 - RNA, 19 nt, Artificial Sequence
  Description of Artificial Sequence: Synthetic oligonucleotide
  Sense strand starting at position 3853 of SEQ ID NO: 1560778
gacauauguguaugccuuu

SEQ ID NO: 1623706 - RNA, 19 nt, Artificial Sequence
  Description of Artificial Sequence: Synthetic oligonucleotide
  Antisense strand to SEQ ID NO: 1623705
aaaggcauacacauauguc

SEQ ID NO: 1623707 - RNA, 19 nt, Artificial Sequence
  Description of Artificial Sequence: Synthetic oligonucleotide
  Sense strand starting at position 3854 of SEQ ID NO: 1560778
acauauguguaugccuuua

SEQ ID NO: 1623708 - RNA, 19 nt, Artificial Sequence
  Description of Artificial Sequence: Synthetic oligonucleotide
  Antisense strand to SEQ ID NO: 1623707
uaaaggcauacacauaugu

SEQ ID NO: 1623709 - RNA, 19 nt, Artificial Sequence
  Description of Artificial Sequence: Synthetic oligonucleotide
  Sense strand starting at position 3856 of SEQ ID NO: 1560778
auauguguaugccuuuaua

SEQ ID NO: 1623710 - RNA, 19 nt, Artificial Sequence
  Description of Artificial Sequence: Synthetic oligonucleotide
  Antisense strand to SEQ ID NO: 1623709
uauaaaggcauacacauau

SEQ ID NO: 1623711 - RNA, 19 nt, Artificial Sequence
  Description of Artificial Sequence: Synthetic oligonucleotide
  Sense strand starting at position 3883 of SEQ ID NO: 1560778
augggacuaugugauccau

SEQ ID NO: 1623712 - RNA, 19 nt, Artificial Sequence
  Description of Artificial Sequence: Synthetic oligonucleotide
  Antisense strand to SEQ ID NO: 1623711
auggaucacauagucccau

SEQ ID NO: 1623713 - RNA, 19 nt, Artificial Sequence
  Description of Artificial Sequence: Synthetic oligonucleotide
  Sense strand starting at position 3889 of SEQ ID NO: 1560778
cuaugugauccaugcucuu

SEQ ID NO: 1623714 - RNA, 19 nt, Artificial Sequence
  Description of Artificial Sequence: Synthetic oligonucleotide
  Antisense strand to SEQ ID NO: 1623713
aagagcauggaucacauag

SEQ ID NO: 1623715 - RNA, 19 nt, Artificial Sequence
  Description of Artificial Sequence: Synthetic oligonucleotide
  Sense strand starting at position 3910 of SEQ ID NO: 1560778
guaacuuauuaugucuacu

SEQ ID NO: 1623716 - RNA, 19 nt, Artificial Sequence
  Description of Artificial Sequence: Synthetic oligonucleotide
  Antisense strand to SEQ ID NO: 1623715
aguagacauaauaaguuac

SEQ ID NO: 1623717 - RNA, 19 nt, Artificial Sequence
  Description of Artificial Sequence: Synthetic oligonucleotide
  Sense strand starting at position 3930 of SEQ ID NO: 1560778
aggcccaucguuugagauu

SEQ ID NO: 1623718 - RNA, 19 nt, Artificial Sequence
  Description of Artificial Sequence: Synthetic oligonucleotide
  Antisense strand to SEQ ID NO: 1623717
aaucucaaacgaugggccu

SEQ ID NO: 1623719 - RNA, 19 nt, Artificial Sequence
  Description of Artificial Sequence: Synthetic oligonucleotide
  Sense strand starting at position 3931 of SEQ ID NO: 1560778
ggcccaucguuugagauug

SEQ ID NO: 1623720 - RNA, 19 nt, Artificial Sequence
  Description of Artificial Sequence: Synthetic oligonucleotide
  Antisense strand to SEQ ID NO: 1623719
caaucucaaacgaugggcc

SEQ ID NO: 1623721 - RNA, 19 nt, Artificial Sequence
  Description of Artificial Sequence: Synthetic oligonucleotide
  Sense strand starting at position 3936 of SEQ ID NO: 1560778
aucguuugagauuguggaa

SEQ ID NO: 1623722 - RNA, 19 nt, Artificial Sequence
  Description of Artificial Sequence: Synthetic oligonucleotide
  Antisense strand to SEQ ID NO: 1623721
uuccacaaucucaaacgau

SEQ ID NO: 1623723 - RNA, 19 nt, Artificial Sequence
  Description of Artificial Sequence: Synthetic oligonucleotide
  Sense strand starting at position 3939 of SEQ ID NO: 1560778
guuugagauuguggaauuu

SEQ ID NO: 1623724 - RNA, 19 nt, Artificial Sequence
  Description of Artificial Sequence: Synthetic oligonucleotide
  Antisense strand to SEQ ID NO: 1623723
aaauuccacaaucucaaac

SEQ ID NO: 1623725 - RNA, 19 nt, Artificial Sequence
  Description of Artificial Sequence: Synthetic oligonucleotide
  Sense strand starting at position 3958 of SEQ ID NO: 1560778
uccaccuagggauguuaga

SEQ ID NO: 1623726 - RNA, 19 nt, Artificial Sequence
  Description of Artificial Sequence: Synthetic oligonucleotide
  Antisense strand to SEQ ID NO: 1623725
ucuaacaucccuaggugga

SEQ ID NO: 1623727 - RNA, 19 nt, Artificial Sequence
  Description of Artificial Sequence: Synthetic oligonucleotide
  Sense strand starting at position 3967 of SEQ ID NO: 1560778
ggauguuagaagcgaaaca

SEQ ID NO: 1623728 - RNA, 19 nt, Artificial Sequence
  Description of Artificial Sequence: Synthetic oligonucleotide
  Antisense strand to SEQ ID NO: 1623727
uguuucgcuucuaacaucc

SEQ ID NO: 1623729 - RNA, 19 nt, Artificial Sequence
  Description of Artificial Sequence: Synthetic oligonucleotide
  Sense strand starting at position 3979 of SEQ ID NO: 1560778
cgaaacaagugauuaacau

SEQ ID NO: 1623730 - RNA, 19 nt, Artificial Sequence
  Description of Artificial Sequence: Synthetic oligonucleotide
  Antisense strand to SEQ ID NO: 1623729
auguuaaucacuuguuucg

SEQ ID NO: 1623731 - RNA, 19 nt, Artificial Sequence
  Description of Artificial Sequence: Synthetic oligonucleotide
  Sense strand starting at position 67 of SEQ ID NO: 1560779
gggugaguccucgguucuc

SEQ ID NO: 1623732 - RNA, 19 nt, Artificial Sequence
  Description of Artificial Sequence: Synthetic oligonucleotide
  Antisense strand to SEQ ID NO: 1623731
gagaaccgaggacucaccc

SEQ ID NO: 1623733 - RNA, 19 nt, Artificial Sequence
  Description of Artificial Sequence: Synthetic oligonucleotide
  Sense strand starting at position 86 of SEQ ID NO: 1560779
ccagcuuugcucuguaaug

SEQ ID NO: 1623734 - RNA, 19 nt, Artificial Sequence
  Description of Artificial Sequence: Synthetic oligonucleotide
  Antisense strand to SEQ ID NO: 1623733
cauuacagagcaaagcugg

SEQ ID NO: 1623735 - RNA, 19 nt, Artificial Sequence
  Description of Artificial Sequence: Synthetic oligonucleotide
  Sense strand starting at position 88 of SEQ ID NO: 1560779
agcuuugcucuguaaugca

SEQ ID NO: 1623736 - RNA, 19 nt, Artificial Sequence
  Description of Artificial Sequence: Synthetic oligonucleotide
  Antisense strand to SEQ ID NO: 1623735
ugcauuacagagcaaagcu

SEQ ID NO: 1623737 - RNA, 19 nt, Artificial Sequence
  Description of Artificial Sequence: Synthetic oligonucleotide
  Sense strand starting at position 629 of SEQ ID NO: 1560779
aagggaaacuggugauuuc

SEQ ID NO: 1623738 - RNA, 19 nt, Artificial Sequence
  Description of Artificial Sequence: Synthetic oligonucleotide
  Antisense strand to SEQ ID NO: 1623737
gaaaucaccaguuucccuu

SEQ ID NO: 1623739 - RNA, 19 nt, Artificial Sequence
  Description of Artificial Sequence: Synthetic oligonucleotide
  Sense strand starting at position 784 of SEQ ID NO: 1560779
aguggaguccuagagguca

SEQ ID NO: 1623740 - RNA, 19 nt, Artificial Sequence
  Description of Artificial Sequence: Synthetic oligonucleotide
  Antisense strand to SEQ ID NO: 1623739
ugaccucuaggacuccacu

SEQ ID NO: 1623741 - RNA, 19 nt, Artificial Sequence
  Description of Artificial Sequence: Synthetic oligonucleotide
  Sense strand starting at position 836 of SEQ ID NO: 1560779
ggguuugggugaguccaaa

SEQ ID NO: 1623742 - RNA, 19 nt, Artificial Sequence
  Description of Artificial Sequence: Synthetic oligonucleotide
  Antisense strand to SEQ ID NO: 1623741
uuuggacucacccaaaccc

SEQ ID NO: 1623743 - RNA, 19 nt, Artificial Sequence
  Description of Artificial Sequence: Synthetic oligonucleotide
  Sense strand starting at position 896 of SEQ ID NO: 1560779
ggauaucugaagcgaguug

SEQ ID NO: 1623744 - RNA, 19 nt, Artificial Sequence
  Description of Artificial Sequence: Synthetic oligonucleotide
  Antisense strand to SEQ ID NO: 1623743
caacucgcuucagauaucc

SEQ ID NO: 1623745 - RNA, 19 nt, Artificial Sequence
  Description of Artificial Sequence: Synthetic oligonucleotide
  Sense strand starting at position 910 of SEQ ID NO: 1560779
aguuguuguccucagggua

SEQ ID NO: 1623746 - RNA, 19 nt, Artificial Sequence
  Description of Artificial Sequence: Synthetic oligonucleotide
  Antisense strand to SEQ ID NO: 1623745
uacccugaggacaacaacu

SEQ ID NO: 1623747 - RNA, 19 nt, Artificial Sequence
  Description of Artificial Sequence: Synthetic oligonucleotide
  Sense strand starting at position 913 of SEQ ID NO: 1560779
uguuguccucaggguagaa

SEQ ID NO: 1623748 - RNA, 19 nt, Artificial Sequence
  Description of Artificial Sequence: Synthetic oligonucleotide
  Antisense strand to SEQ ID NO: 1623747
uucuacccugaggacaaca

SEQ ID NO: 1623749 - RNA, 19 nt, Artificial Sequence
  Description of Artificial Sequence: Synthetic oligonucleotide
  Sense strand starting at position 915 of SEQ ID NO: 1560779
uuguccucaggguagaaau

SEQ ID NO: 1623750 - RNA, 19 nt, Artificial Sequence
  Description of Artificial Sequence: Synthetic oligonucleotide
  Antisense strand to SEQ ID NO: 1623749
auuucuacccugaggacaa

SEQ ID NO: 1623751 - RNA, 19 nt, Artificial Sequence
  Description of Artificial Sequence: Synthetic oligonucleotide
  Sense strand starting at position 933 of SEQ ID NO: 1560779
ucuacaaucuuguggagag

SEQ ID NO: 1623752 - RNA, 19 nt, Artificial Sequence
  Description of Artificial Sequence: Synthetic oligonucleotide
  Antisense strand to SEQ ID NO: 1623751
cucuccacaagauuguaga

SEQ ID NO: 1623753 - RNA, 19 nt, Artificial Sequence
  Description of Artificial Sequence: Synthetic oligonucleotide
  Sense strand starting at position 951 of SEQ ID NO: 1560779
gccugagugcccugugaac

SEQ ID NO: 1623754 - RNA, 19 nt, Artificial Sequence
  Description of Artificial Sequence: Synthetic oligonucleotide
  Antisense strand to SEQ ID NO: 1623753
guucacagggcacucaggc

SEQ ID NO: 1623755 - RNA, 19 nt, Artificial Sequence
  Description of Artificial Sequence: Synthetic oligonucleotide
  Sense strand starting at position 1216 of SEQ ID NO: 1560779
ucacauaguucuuggaaug

SEQ ID NO: 1623756 - RNA, 19 nt, Artificial Sequence
  Description of Artificial Sequence: Synthetic oligonucleotide
  Antisense strand to SEQ ID NO: 1623755
cauuccaagaacuauguga

SEQ ID NO: 1623757 - RNA, 19 nt, Artificial Sequence
  Description of Artificial Sequence: Synthetic oligonucleotide
  Sense strand starting at position 1243 of SEQ ID NO: 1560779
gaaggaaauucggcacaug

SEQ ID NO: 1623758 - RNA, 19 nt, Artificial Sequence
  Description of Artificial Sequence: Synthetic oligonucleotide
  Antisense strand to SEQ ID NO: 1623757
caugugccgaauuuccuuc

SEQ ID NO: 1623759 - RNA, 19 nt, Artificial Sequence
  Description of Artificial Sequence: Synthetic oligonucleotide
  Sense strand starting at position 1244 of SEQ ID NO: 1560779
aaggaaauucggcacaugu

SEQ ID NO: 1623760 - RNA, 19 nt, Artificial Sequence
  Description of Artificial Sequence: Synthetic oligonucleotide
  Antisense strand to SEQ ID NO: 1623759
acaugugccgaauuuccuu

SEQ ID NO: 1623761 - RNA, 19 nt, Artificial Sequence
  Description of Artificial Sequence: Synthetic oligonucleotide
  Sense strand starting at position 1292 of SEQ ID NO: 1560779
ugacguucucaaggcauga

SEQ ID NO: 1623762 - RNA, 19 nt, Artificial Sequence
  Description of Artificial Sequence: Synthetic oligonucleotide
  Antisense strand to SEQ ID NO: 1623761
ucaugccuugagaacguca

SEQ ID NO: 1623763 - RNA, 19 nt, Artificial Sequence
  Description of Artificial Sequence: Synthetic oligonucleotide
  Sense strand starting at position 1294 of SEQ ID NO: 1560779
acguucucaaggcaugaga

SEQ ID NO: 1623764 - RNA, 19 nt, Artificial Sequence
  Description of Artificial Sequence: Synthetic oligonucleotide
  Antisense strand to SEQ ID NO: 1623763
ucucaugccuugagaacgu

SEQ ID NO: 1623765 - RNA, 19 nt, Artificial Sequence
  Description of Artificial Sequence: Synthetic oligonucleotide
  Sense strand starting at position 1296 of SEQ ID NO: 1560779
guucucaaggcaugagauc

SEQ ID NO: 1623766 - RNA, 19 nt, Artificial Sequence
  Description of Artificial Sequence: Synthetic oligonucleotide
  Antisense strand to SEQ ID NO: 1623765
gaucucaugccuugagaac

SEQ ID NO: 1623767 - RNA, 19 nt, Artificial Sequence
  Description of Artificial Sequence: Synthetic oligonucleotide
  Sense strand starting at position 1303 of SEQ ID NO: 1560779
aggcaugagaucugaaucu

SEQ ID NO: 1623768 - RNA, 19 nt, Artificial Sequence
  Description of Artificial Sequence: Synthetic oligonucleotide
  Antisense strand to SEQ ID NO: 1623767
agauucagaucucaugccu

SEQ ID NO: 1623769 - RNA, 19 nt, Artificial Sequence
  Description of Artificial Sequence: Synthetic oligonucleotide
  Sense strand starting at position 1596 of SEQ ID NO: 1560779
gcucacugucucuggacaa

SEQ ID NO: 1623770 - RNA, 19 nt, Artificial Sequence
  Description of Artificial Sequence: Synthetic oligonucleotide
  Antisense strand to SEQ ID NO: 1623769
uuguccagagacagugagc

SEQ ID NO: 1623771 - RNA, 19 nt, Artificial Sequence
  Description of Artificial Sequence: Synthetic oligonucleotide
  Sense strand starting at position 1597 of SEQ ID NO: 1560779
cucacugucucuggacaaa

SEQ ID NO: 1623772 - RNA, 19 nt, Artificial Sequence
  Description of Artificial Sequence: Synthetic oligonucleotide
  Antisense strand to SEQ ID NO: 1623771
uuuguccagagacagugag

SEQ ID NO: 1623773 - RNA, 19 nt, Artificial Sequence
  Description of Artificial Sequence: Synthetic oligonucleotide
  Sense strand starting at position 1795 of SEQ ID NO: 1560779
uccuaaaugucgccucgau

SEQ ID NO: 1623774 - RNA, 19 nt, Artificial Sequence
  Description of Artificial Sequence: Synthetic oligonucleotide
  Antisense strand to SEQ ID NO: 1623773
aucgaggcgacauuuagga

SEQ ID NO: 1623775 - RNA, 19 nt, Artificial Sequence
  Description of Artificial Sequence: Synthetic oligonucleotide
  Sense strand starting at position 1799 of SEQ ID NO: 1560779
aaaugucgccucgaucaau

SEQ ID NO: 1623776 - RNA, 19 nt, Artificial Sequence
  Description of Artificial Sequence: Synthetic oligonucleotide
  Antisense strand to SEQ ID NO: 1623775
auugaucgaggcgacauuu

SEQ ID NO: 1623777 - RNA, 19 nt, Artificial Sequence
  Description of Artificial Sequence: Synthetic oligonucleotide
  Sense strand starting at position 1890 of SEQ ID NO: 1560779
acagauuucccgcggguuu

SEQ ID NO: 1623778 - RNA, 19 nt, Artificial Sequence
  Description of Artificial Sequence: Synthetic oligonucleotide
  Antisense strand to SEQ ID NO: 1623777
aaacccgcgggaaaucugu

SEQ ID NO: 1623779 - RNA, 19 nt, Artificial Sequence
  Description of Artificial Sequence: Synthetic oligonucleotide
  Sense strand starting at position 1931 of SEQ ID NO: 1560779
gaggcuguuucucugcgaa

SEQ ID NO: 1623780 - RNA, 19 nt, Artificial Sequence
  Description of Artificial Sequence: Synthetic oligonucleotide
  Antisense strand to SEQ ID NO: 1623779
uucgcagagaaacagccuc

SEQ ID NO: 1623781 - RNA, 19 nt, Artificial Sequence
  Description of Artificial Sequence: Synthetic oligonucleotide
  Sense strand starting at position 1933 of SEQ ID NO: 1560779
ggcuguuucucugcgaaua

SEQ ID NO: 1623782 - RNA, 19 nt, Artificial Sequence
  Description of Artificial Sequence: Synthetic oligonucleotide
  Antisense strand to SEQ ID NO: 1623781
uauucgcagagaaacagcc

SEQ ID NO: 1623783 - RNA, 19 nt, Artificial Sequence
  Description of Artificial Sequence: Synthetic oligonucleotide
  Sense strand starting at position 1934 of SEQ ID NO: 1560779
gcuguuucucugcgaauag

SEQ ID NO: 1623784 - RNA, 19 nt, Artificial Sequence
  Description of Artificial Sequence: Synthetic oligonucleotide
  Antisense strand to SEQ ID NO: 1623783
cuauucgcagagaaacagc

SEQ ID NO: 1623785 - RNA, 19 nt, Artificial Sequence
  Description of Artificial Sequence: Synthetic oligonucleotide
  Sense strand starting at position 1993 of SEQ ID NO: 1560779
uggcgcaugcguguuguaa

SEQ ID NO: 1623786 - RNA, 19 nt, Artificial Sequence
  Description of Artificial Sequence: Synthetic oligonucleotide
  Antisense strand to SEQ ID NO: 1623785
uuacaacacgcaugcgcca

SEQ ID NO: 1623787 - RNA, 19 nt, Artificial Sequence
  Description of Artificial Sequence: Synthetic oligonucleotide
  Sense strand starting at position 1994 of SEQ ID NO: 1560779
ggcgcaugcguguuguaau

SEQ ID NO: 1623788 - RNA, 19 nt, Artificial Sequence
  Description of Artificial Sequence: Synthetic oligonucleotide
  Antisense strand to SEQ ID NO: 1623787
auuacaacacgcaugcgcc

SEQ ID NO: 1623789 - RNA, 19 nt, Artificial Sequence
  Description of Artificial Sequence: Synthetic oligonucleotide
  Sense strand starting at position 2090 of SEQ ID NO: 1560779
cggguucgaugauugaauu

SEQ ID NO: 1623790 - RNA, 19 nt, Artificial Sequence
  Description of Artificial Sequence: Synthetic oligonucleotide
  Antisense strand to SEQ ID NO: 1623789
aauucaaucaucgaacccg

SEQ ID NO: 1623791 - RNA, 19 nt, Artificial Sequence
  Description of Artificial Sequence: Synthetic oligonucleotide
  Sense strand starting at position 2936 of SEQ ID NO: 1560779
cuaaaugcagccugggaau

SEQ ID NO: 1623792 - RNA, 19 nt, Artificial Sequence
  Description of Artificial Sequence: Synthetic oligonucleotide
  Antisense strand to SEQ ID NO: 1623791
auucccaggcugcauuuag

SEQ ID NO: 1623793 - RNA, 19 nt, Artificial Sequence
  Description of Artificial Sequence: Synthetic oligonucleotide
  Sense strand starting at position 3008 of SEQ ID NO: 1560779
cgauguugggaguaucuga

SEQ ID NO: 1623794 - RNA, 19 nt, Artificial Sequence
  Description of Artificial Sequence: Synthetic oligonucleotide
  Antisense strand to SEQ ID NO: 1623793
ucagauacucccaacaucg

SEQ ID NO: 1623795 - RNA, 19 nt, Artificial Sequence
  Description of Artificial Sequence: Synthetic oligonucleotide
  Sense strand starting at position 3487 of SEQ ID NO: 1560779
ugaacaggaguuugccaaa

SEQ ID NO: 1623796 - RNA, 19 nt, Artificial Sequence
  Description of Artificial Sequence: Synthetic oligonucleotide
  Antisense strand to SEQ ID NO: 1623795
uuuggcaaacuccuguuca

SEQ ID NO: 1623797 - RNA, 19 nt, Artificial Sequence
  Description of Artificial Sequence: Synthetic oligonucleotide
  Sense strand starting at position 3490 of SEQ ID NO: 1560779
acaggaguuugccaaacaa

SEQ ID NO: 1623798 - RNA, 19 nt, Artificial Sequence
  Description of Artificial Sequence: Synthetic oligonucleotide
  Antisense strand to SEQ ID NO: 1623797
uuguuuggcaaacuccugu

SEQ ID NO: 1623799 - RNA, 19 nt, Artificial Sequence
  Description of Artificial Sequence: Synthetic oligonucleotide
  Sense strand starting at position 3590 of SEQ ID NO: 1560779
cagccuucugcuggaugau

SEQ ID NO: 1623800 - RNA, 19 nt, Artificial Sequence
  Description of Artificial Sequence: Synthetic oligonucleotide
  Antisense strand to SEQ ID NO: 1623799
aucauccagcagaaggcug

SEQ ID NO: 1623801 - RNA, 19 nt, Artificial Sequence
  Description of Artificial Sequence: Synthetic oligonucleotide
  Sense strand starting at position 3766 of SEQ ID NO: 1560779
auguuagaacugcaccuua

SEQ ID NO: 1623802 - RNA, 19 nt, Artificial Sequence
  Description of Artificial Sequence: Synthetic oligonucleotide
  Antisense strand to SEQ ID NO: 1623801
uaaggugcaguucuaacau

SEQ ID NO: 1623803 - RNA, 19 nt, Artificial Sequence
  Description of Artificial Sequence: Synthetic oligonucleotide
  Sense strand starting at position 3790 of SEQ ID NO: 1560779
gggucaggcgccaggaauu

SEQ ID NO: 1623804 - RNA, 19 nt, Artificial Sequence
  Description of Artificial Sequence: Synthetic oligonucleotide
  Antisense strand to SEQ ID NO: 1623803
aauuccuggcgccugaccc

SEQ ID NO: 1623805 - RNA, 19 nt, Artificial Sequence
  Description of Artificial Sequence: Synthetic oligonucleotide
  Sense strand starting at position 3872 of SEQ ID NO: 1560779
ggccuaguugggugaaaga

SEQ ID NO: 1623806 - RNA, 19 nt, Artificial Sequence
  Description of Artificial Sequence: Synthetic oligonucleotide
  Antisense strand to SEQ ID NO: 1623805
ucuuucacccaacuaggcc

SEQ ID NO: 1623807 - RNA, 19 nt, Artificial Sequence
  Description of Artificial Sequence: Synthetic oligonucleotide
  Sense strand starting at position 3944 of SEQ ID NO: 1560779
cauggaagguguuggagaa

SEQ ID NO: 1623808 - RNA, 19 nt, Artificial Sequence
  Description of Artificial Sequence: Synthetic oligonucleotide
  Antisense strand to SEQ ID NO: 1623807
uucuccaacaccuuccaug

SEQ ID NO: 1623809 - RNA, 19 nt, Artificial Sequence
  Description of Artificial Sequence: Synthetic oligonucleotide
  Sense strand starting at position 3974 of SEQ ID NO: 1560779
ccauccguucugcaugaau

SEQ ID NO: 1623810 - RNA, 19 nt, Artificial Sequence
  Description of Artificial Sequence: Synthetic oligonucleotide
  Antisense strand to SEQ ID NO: 1623809
auucaugcagaacggaugg

SEQ ID NO: 1623811 - RNA, 19 nt, Artificial Sequence
  Description of Artificial Sequence: Synthetic oligonucleotide
  Sense strand starting at position 41 of SEQ ID NO: 1560780
auuugaagcucagaaugga

SEQ ID NO: 1623812 - RNA, 19 nt, Artificial Sequence
  Description of Artificial Sequence: Synthetic oligonucleotide
  Antisense strand to SEQ ID NO: 1623811
uccauucugagcuucaaau

SEQ ID NO: 1623813 - RNA, 19 nt, Artificial Sequence
  Description of Artificial Sequence: Synthetic oligonucleotide
  Sense strand starting at position 644 of SEQ ID NO: 1560780
gggcuuauaaacggacaga

SEQ ID NO: 1623814 - RNA, 19 nt, Artificial Sequence
  Description of Artificial Sequence: Synthetic oligonucleotide
  Antisense strand to SEQ ID NO: 1623813
ucuguccguuuauaagccc

SEQ ID NO: 1623815 - RNA, 19 nt, Artificial Sequence
  Description of Artificial Sequence: Synthetic oligonucleotide
  Sense strand starting at position 730 of SEQ ID NO: 1560780
gggaccuuccgccagaaca

SEQ ID NO: 1623816 - RNA, 19 nt, Artificial Sequence
  Description of Artificial Sequence: Synthetic oligonucleotide
  Antisense strand to SEQ ID NO: 1623815
uguucuggcggaagguccc

SEQ ID NO: 1623817 - RNA, 19 nt, Artificial Sequence
  Description of Artificial Sequence: Synthetic oligonucleotide
  Sense strand starting at position 797 of SEQ ID NO: 1560780
caaggcuccugcucggaaa

SEQ ID NO: 1623818 - RNA, 19 nt, Artificial Sequence
  Description of Artificial Sequence: Synthetic oligonucleotide
  Antisense strand to SEQ ID NO: 1623817
uuuccgagcaggagccuug

SEQ ID NO: 1623819 - RNA, 19 nt, Artificial Sequence
  Description of Artificial Sequence: Synthetic oligonucleotide
  Sense strand starting at position 843 of SEQ ID NO: 1560780
cacccaaaguuugagggau

SEQ ID NO: 1623820 - RNA, 19 nt, Artificial Sequence
  Description of Artificial Sequence: Synthetic oligonucleotide
  Antisense strand to SEQ ID NO: 1623819
aucccucaaacuuugggug

SEQ ID NO: 1623821 - RNA, 19 nt, Artificial Sequence
  Description of Artificial Sequence: Synthetic oligonucleotide
  Sense strand starting at position 845 of SEQ ID NO: 1560780
cccaaaguuugagggauuu

SEQ ID NO: 1623822 - RNA, 19 nt, Artificial Sequence
  Description of Artificial Sequence: Synthetic oligonucleotide
  Antisense strand to SEQ ID NO: 1623821
aaaucccucaaacuuuggg

SEQ ID NO: 1623823 - RNA, 19 nt, Artificial Sequence
  Description of Artificial Sequence: Synthetic oligonucleotide
  Sense strand starting at position 902 of SEQ ID NO: 1560780
agggacguuucagucaauu

SEQ ID NO: 1623824 - RNA, 19 nt, Artificial Sequence
  Description of Artificial Sequence: Synthetic oligonucleotide
  Antisense strand to SEQ ID NO: 1623823
aauugacugaaacgucccu

SEQ ID NO: 1623825 - RNA, 19 nt, Artificial Sequence
  Description of Artificial Sequence: Synthetic oligonucleotide
  Sense strand starting at position 946 of SEQ ID NO: 1560780
ggcgauuuccggugaccca

SEQ ID NO: 1623826 - RNA, 19 nt, Artificial Sequence
  Description of Artificial Sequence: Synthetic oligonucleotide
  Antisense strand to SEQ ID NO: 1623825
ugggucaccggaaaucgcc

SEQ ID NO: 1623827 - RNA, 19 nt, Artificial Sequence
  Description of Artificial Sequence: Synthetic oligonucleotide
  Sense strand starting at position 947 of SEQ ID NO: 1560780
gcgauuuccggugacccaa

SEQ ID NO: 1623828 - RNA, 19 nt, Artificial Sequence
  Description of Artificial Sequence: Synthetic oligonucleotide
  Antisense strand to SEQ ID NO: 1623827
uugggucaccggaaaucgc

SEQ ID NO: 1623829 - RNA, 19 nt, Artificial Sequence
  Description of Artificial Sequence: Synthetic oligonucleotide
  Sense strand starting at position 1107 of SEQ ID NO: 1560780
cgacuuuggaagugauauu

SEQ ID NO: 1623830 - RNA, 19 nt, Artificial Sequence
  Description of Artificial Sequence: Synthetic oligonucleotide
  Antisense strand to SEQ ID NO: 1623829
aauaucacuuccaaagucg

SEQ ID NO: 1623831 - RNA, 19 nt, Artificial Sequence
  Description of Artificial Sequence: Synthetic oligonucleotide
  Sense strand starting at position 1623 of SEQ ID NO: 1560780
ggcggaugcuucgcuugaa

SEQ ID NO: 1623832 - RNA, 19 nt, Artificial Sequence
  Description of Artificial Sequence: Synthetic oligonucleotide
  Antisense strand to SEQ ID NO: 1623831
uucaagcgaagcauccgcc

SEQ ID NO: 1623833 - RNA, 19 nt, Artificial Sequence
  Description of Artificial Sequence: Synthetic oligonucleotide
  Sense strand starting at position 1624 of SEQ ID NO: 1560780
gcggaugcuucgcuugaaa

SEQ ID NO: 1623834 - RNA, 19 nt, Artificial Sequence
  Description of Artificial Sequence: Synthetic oligonucleotide
  Antisense strand to SEQ ID NO: 1623833
uuucaagcgaagcauccgc

SEQ ID NO: 1623835 - RNA, 19 nt, Artificial Sequence
  Description of Artificial Sequence: Synthetic oligonucleotide
  Sense strand starting at position 2889 of SEQ ID NO: 1560780
ccuugagccucgccaagau

SEQ ID NO: 1623836 - RNA, 19 nt, Artificial Sequence
  Description of Artificial Sequence: Synthetic oligonucleotide
  Antisense strand to SEQ ID NO: 1623835
aucuuggcgaggcucaagg

SEQ ID NO: 1623837 - RNA, 19 nt, Artificial Sequence
  Description of Artificial Sequence: Synthetic oligonucleotide
  Sense strand starting at position 2998 of SEQ ID NO: 1560780
cacaguuccuggcaaagca

SEQ ID NO: 1623838 - RNA, 19 nt, Artificial Sequence
  Description of Artificial Sequence: Synthetic oligonucleotide
  Antisense strand to SEQ ID NO: 1623837
ugcuuugccaggaacugug

SEQ ID NO: 1623839 - RNA, 19 nt, Artificial Sequence
  Description of Artificial Sequence: Synthetic oligonucleotide
  Sense strand starting at position 3189 of SEQ ID NO: 1560780
cuuucucugcucggguuaa

SEQ ID NO: 1623840 - RNA, 19 nt, Artificial Sequence
  Description of Artificial Sequence: Synthetic oligonucleotide
  Antisense strand to SEQ ID NO: 1623839
uuaacccgagcagagaaag

SEQ ID NO: 1623841 - RNA, 19 nt, Artificial Sequence
  Description of Artificial Sequence: Synthetic oligonucleotide
  Sense strand starting at position 3235 of SEQ ID NO: 1560780
aagggauguuguggucuga

SEQ ID NO: 1623842 - RNA, 19 nt, Artificial Sequence
  Description of Artificial Sequence: Synthetic oligonucleotide
  Antisense strand to SEQ ID NO: 1623841
ucagaccacaacaucccuu

SEQ ID NO: 1623843 - RNA, 19 nt, Artificial Sequence
  Description of Artificial Sequence: Synthetic oligonucleotide
  Sense strand starting at position 3237 of SEQ ID NO: 1560780
gggauguuguggucugaga

SEQ ID NO: 1623844 - RNA, 19 nt, Artificial Sequence
  Description of Artificial Sequence: Synthetic oligonucleotide
  Antisense strand to SEQ ID NO: 1623843
ucucagaccacaacauccc

SEQ ID NO: 1623845 - RNA, 19 nt, Artificial Sequence
  Description of Artificial Sequence: Synthetic oligonucleotide
  Sense strand starting at position 3403 of SEQ ID NO: 1560780
cuuucugugcuuugcagaa

SEQ ID NO: 1623846 - RNA, 19 nt, Artificial Sequence
  Description of Artificial Sequence: Synthetic oligonucleotide
  Antisense strand to SEQ ID NO: 1623845
uucugcaaagcacagaaag

SEQ ID NO: 1623847 - RNA, 19 nt, Artificial Sequence
  Description of Artificial Sequence: Synthetic oligonucleotide
  Sense strand starting at position 3838 of SEQ ID NO: 1560780
gggaaagauucuuagagau

SEQ ID NO: 1623848 - RNA, 19 nt, Artificial Sequence
  Description of Artificial Sequence: Synthetic oligonucleotide
  Antisense strand to SEQ ID NO: 1623847
aucucuaagaaucuuuccc

SEQ ID NO: 1623849 - RNA, 19 nt, Artificial Sequence
  Description of Artificial Sequence: Synthetic oligonucleotide
  Sense strand starting at position 3960 of SEQ ID NO: 1560780
aggaggaggcguuaguaaa

SEQ ID NO: 1623850 - RNA, 19 nt, Artificial Sequence
  Description of Artificial Sequence: Synthetic oligonucleotide
  Antisense strand to SEQ ID NO: 1623849
uuuacuaacgccuccuccu

SEQ ID NO: 1623851 - RNA, 19 nt, Artificial Sequence
  Description of Artificial Sequence: Synthetic oligonucleotide
  Sense strand starting at position 3967 of SEQ ID NO: 1560780
ggcguuaguaaacacgaaa

SEQ ID NO: 1623852 - RNA, 19 nt, Artificial Sequence
  Description of Artificial Sequence: Synthetic oligonucleotide
  Antisense strand to SEQ ID NO: 1623851
uuucguguuuacuaacgcc

SEQ ID NO: 1623853 - RNA, 19 nt, Artificial Sequence
  Description of Artificial Sequence: Synthetic oligonucleotide
  Sense strand starting at position 146 of SEQ ID NO: 1560781
cuccgcagugccugaaauu

SEQ ID NO: 1623854 - RNA, 19 nt, Artificial Sequence
  Description of Artificial Sequence: Synthetic oligonucleotide
  Antisense strand to SEQ ID NO: 1623853
aauuucaggcacugcggag

SEQ ID NO: 1623855 - RNA, 19 nt, Artificial Sequence
  Description of Artificial Sequence: Synthetic oligonucleotide
  Sense strand starting at position 157 of SEQ ID NO: 1560781
cugaaauuccuccauucgu

SEQ ID NO: 1623856 - RNA, 19 nt, Artificial Sequence
  Description of Artificial Sequence: Synthetic oligonucleotide
  Antisense strand to SEQ ID NO: 1623855
acgaauggaggaauuucag

SEQ ID NO: 1623857 - RNA, 19 nt, Artificial Sequence
  Description of Artificial Sequence: Synthetic oligonucleotide
  Sense strand starting at position 238 of SEQ ID NO: 1560781
gucccagaguccuaggaag

SEQ ID NO: 1623858 - RNA, 19 nt, Artificial Sequence
  Description of Artificial Sequence: Synthetic oligonucleotide
  Antisense strand to SEQ ID NO: 1623857
cuuccuaggacucugggac

SEQ ID NO: 1623859 - RNA, 19 nt, Artificial Sequence
  Description of Artificial Sequence: Synthetic oligonucleotide
  Sense strand starting at position 328 of SEQ ID NO: 1560781
gugcauuguaaggacaaga

SEQ ID NO: 1623860 - RNA, 19 nt, Artificial Sequence
  Description of Artificial Sequence: Synthetic oligonucleotide
  Antisense strand to SEQ ID NO: 1623859
ucuuguccuuacaaugcac

SEQ ID NO: 1623861 - RNA, 19 nt, Artificial Sequence
  Description of Artificial Sequence: Synthetic oligonucleotide
  Sense strand starting at position 597 of SEQ ID NO: 1560781
gggcauuucugugucccua

SEQ ID NO: 1623862 - RNA, 19 nt, Artificial Sequence
  Description of Artificial Sequence: Synthetic oligonucleotide
  Antisense strand to SEQ ID NO: 1623861
uagggacacagaaaugccc

SEQ ID NO: 1623863 - RNA, 19 nt, Artificial Sequence
  Description of Artificial Sequence: Synthetic oligonucleotide
  Sense strand starting at position 599 of SEQ ID NO: 1560781
gcauuucugugucccuaua

SEQ ID NO: 1623864 - RNA, 19 nt, Artificial Sequence
  Description of Artificial Sequence: Synthetic oligonucleotide
  Antisense strand to SEQ ID NO: 1623863
uauagggacacagaaaugc

SEQ ID NO: 1623865 - RNA, 19 nt, Artificial Sequence
  Description of Artificial Sequence: Synthetic oligonucleotide
  Sense strand starting at position 835 of SEQ ID NO: 1560781
ggcgaaugcccaggucuaa

SEQ ID NO: 1623866 - RNA, 19 nt, Artificial Sequence
  Description of Artificial Sequence: Synthetic oligonucleotide
  Antisense strand to SEQ ID NO: 1623865
uuagaccugggcauucgcc

SEQ ID NO: 1623867 - RNA, 19 nt, Artificial Sequence
  Description of Artificial Sequence: Synthetic oligonucleotide
  Sense strand starting at position 887 of SEQ ID NO: 1560781
agccuaauuccuugugaca

SEQ ID NO: 1623868 - RNA, 19 nt, Artificial Sequence
  Description of Artificial Sequence: Synthetic oligonucleotide
  Antisense strand to SEQ ID NO: 1623867
ugucacaaggaauuaggcu

SEQ ID NO: 1623869 - RNA, 19 nt, Artificial Sequence
  Description of Artificial Sequence: Synthetic oligonucleotide
  Sense strand starting at position 1169 of SEQ ID NO: 1560781
uggcuaauuucugaaguuu

SEQ ID NO: 1623870 - RNA, 19 nt, Artificial Sequence
  Description of Artificial Sequence: Synthetic oligonucleotide
  Antisense strand to SEQ ID NO: 1623869
aaacuucagaaauuagcca

SEQ ID NO: 1623871 - RNA, 19 nt, Artificial Sequence
  Description of Artificial Sequence: Synthetic oligonucleotide
  Sense strand starting at position 1301 of SEQ ID NO: 1560781
augccuugcccugaauaau

SEQ ID NO: 1623872 - RNA, 19 nt, Artificial Sequence
  Description of Artificial Sequence: Synthetic oligonucleotide
  Antisense strand to SEQ ID NO: 1623871
auuauucagggcaaggcau

SEQ ID NO: 1623873 - RNA, 19 nt, Artificial Sequence
  Description of Artificial Sequence: Synthetic oligonucleotide
  Sense strand starting at position 2116 of SEQ ID NO: 1560781
gagggugguguuuaggaca

SEQ ID NO: 1623874 - RNA, 19 nt, Artificial Sequence
  Description of Artificial Sequence: Synthetic oligonucleotide
  Antisense strand to SEQ ID NO: 1623873
uguccuaaacaccacccuc

SEQ ID NO: 1623875 - RNA, 19 nt, Artificial Sequence
  Description of Artificial Sequence: Synthetic oligonucleotide
  Sense strand starting at position 2157 of SEQ ID NO: 1560781
cugacacuguucccuacau

SEQ ID NO: 1623876 - RNA, 19 nt, Artificial Sequence
  Description of Artificial Sequence: Synthetic oligonucleotide
  Antisense strand to SEQ ID NO: 1623875
auguagggaacagugucag

SEQ ID NO: 1623877 - RNA, 19 nt, Artificial Sequence
  Description of Artificial Sequence: Synthetic oligonucleotide
  Sense strand starting at position 2305 of SEQ ID NO: 1560781
acagauagguccuugcaug

SEQ ID NO: 1623878 - RNA, 19 nt, Artificial Sequence
  Description of Artificial Sequence: Synthetic oligonucleotide
  Antisense strand to SEQ ID NO: 1623877
caugcaaggaccuaucugu

SEQ ID NO: 1623879 - RNA, 19 nt, Artificial Sequence
  Description of Artificial Sequence: Synthetic oligonucleotide
  Sense strand starting at position 2310 of SEQ ID NO: 1560781
uagguccuugcauggagaa

SEQ ID NO: 1623880 - RNA, 19 nt, Artificial Sequence
  Description of Artificial Sequence: Synthetic oligonucleotide
  Antisense strand to SEQ ID NO: 1623879
uucuccaugcaaggaccua

SEQ ID NO: 1623881 - RNA, 19 nt, Artificial Sequence
  Description of Artificial Sequence: Synthetic oligonucleotide
  Sense strand starting at position 2312 of SEQ ID NO: 1560781
gguccuugcauggagaaca

SEQ ID NO: 1623882 - RNA, 19 nt, Artificial Sequence
  Description of Artificial Sequence: Synthetic oligonucleotide
  Antisense strand to SEQ ID NO: 1623881
uguucuccaugcaaggacc

SEQ ID NO: 1623883 - RNA, 19 nt, Artificial Sequence
  Description of Artificial Sequence: Synthetic oligonucleotide
  Sense strand starting at position 2566 of SEQ ID NO: 1560781
guuucucccuguuagcuau

SEQ ID NO: 1623884 - RNA, 19 nt, Artificial Sequence
  Description of Artificial Sequence: Synthetic oligonucleotide
  Antisense strand to SEQ ID NO: 1623883
auagcuaacagggagaaac

SEQ ID NO: 1623885 - RNA, 19 nt, Artificial Sequence
  Description of Artificial Sequence: Synthetic oligonucleotide
  Sense strand starting at position 2576 of SEQ ID NO: 1560781
guuagcuaugcuggucuca

SEQ ID NO: 1623886 - RNA, 19 nt, Artificial Sequence
  Description of Artificial Sequence: Synthetic oligonucleotide
  Antisense strand to SEQ ID NO: 1623885
ugagaccagcauagcuaac

SEQ ID NO: 1623887 - RNA, 19 nt, Artificial Sequence
  Description of Artificial Sequence: Synthetic oligonucleotide
  Sense strand starting at position 2578 of SEQ ID NO: 1560781
uagcuaugcuggucucaag

SEQ ID NO: 1623888 - RNA, 19 nt, Artificial Sequence
  Description of Artificial Sequence: Synthetic oligonucleotide
  Antisense strand to SEQ ID NO: 1623887
cuugagaccagcauagcua

SEQ ID NO: 1623889 - RNA, 19 nt, Artificial Sequence
  Description of Artificial Sequence: Synthetic oligonucleotide
  Sense strand starting at position 3201 of SEQ ID NO: 1560781
ccaggaaugcccugagcuu

SEQ ID NO: 1623890 - RNA, 19 nt, Artificial Sequence
  Description of Artificial Sequence: Synthetic oligonucleotide
  Antisense strand to SEQ ID NO: 1623889
aagcucagggcauuccugg

SEQ ID NO: 1623891 - RNA, 19 nt, Artificial Sequence
  Description of Artificial Sequence: Synthetic oligonucleotide
  Sense strand starting at position 3237 of SEQ ID NO: 1560781
guuacuuggugcugugagu

SEQ ID NO: 1623892 - RNA, 19 nt, Artificial Sequence
  Description of Artificial Sequence: Synthetic oligonucleotide
  Antisense strand to SEQ ID NO: 1623891
acucacagcaccaaguaac

SEQ ID NO: 1623893 - RNA, 19 nt, Artificial Sequence
  Description of Artificial Sequence: Synthetic oligonucleotide
  Sense strand starting at position 3277 of SEQ ID NO: 1560781
ugcauacagucgguguuua

SEQ ID NO: 1623894 - RNA, 19 nt, Artificial Sequence
  Description of Artificial Sequence: Synthetic oligonucleotide
  Antisense strand to SEQ ID NO: 1623893
uaaacaccgacuguaugca

SEQ ID NO: 1623895 - RNA, 19 nt, Artificial Sequence
  Description of Artificial Sequence: Synthetic oligonucleotide
  Sense strand starting at position 3278 of SEQ ID NO: 1560781
gcauacagucgguguuuaa

SEQ ID NO: 1623896 - RNA, 19 nt, Artificial Sequence
  Description of Artificial Sequence: Synthetic oligonucleotide
  Antisense strand to SEQ ID NO: 1623895
uuaaacaccgacuguaugc

SEQ ID NO: 1623897 - RNA, 19 nt, Artificial Sequence
  Description of Artificial Sequence: Synthetic oligonucleotide
  Sense strand starting at position 3281 of SEQ ID NO: 1560781
uacagucgguguuuaauaa

SEQ ID NO: 1623898 - RNA, 19 nt, Artificial Sequence
  Description of Artificial Sequence: Synthetic oligonucleotide
  Antisense strand to SEQ ID NO: 1623897
uuauuaaacaccgacugua

SEQ ID NO: 1623899 - RNA, 19 nt, Artificial Sequence
  Description of Artificial Sequence: Synthetic oligonucleotide
  Sense strand starting at position 3285 of SEQ ID NO: 1560781
gucgguguuuaauaacuca

SEQ ID NO: 1623900 - RNA, 19 nt, Artificial Sequence
  Description of Artificial Sequence: Synthetic oligonucleotide
  Antisense strand to SEQ ID NO: 1623899
ugaguuauuaaacaccgac

SEQ ID NO: 1623901 - RNA, 19 nt, Artificial Sequence
  Description of Artificial Sequence: Synthetic oligonucleotide
  Sense strand starting at position 3627 of SEQ ID NO: 1560781
cguguccugaugugcagaa

SEQ ID NO: 1623902 - RNA, 19 nt, Artificial Sequence
  Description of Artificial Sequence: Synthetic oligonucleotide
  Antisense strand to SEQ ID NO: 1623901
uucugcacaucaggacacg

SEQ ID NO: 1623903 - RNA, 19 nt, Artificial Sequence
  Description of Artificial Sequence: Synthetic oligonucleotide
  Sense strand starting at position 3628 of SEQ ID NO: 1560781
guguccugaugugcagaaa

SEQ ID NO: 1623904 - RNA, 19 nt, Artificial Sequence
  Description of Artificial Sequence: Synthetic oligonucleotide
  Antisense strand to SEQ ID NO: 1623903
uuucugcacaucaggacac

SEQ ID NO: 1623905 - RNA, 19 nt, Artificial Sequence
  Description of Artificial Sequence: Synthetic oligonucleotide
  Sense strand starting at position 3935 of SEQ ID NO: 1560781
uguagucacccugagaacu

SEQ ID NO: 1623906 - RNA, 19 nt, Artificial Sequence
  Description of Artificial Sequence: Synthetic oligonucleotide
  Antisense strand to SEQ ID NO: 1623905
aguucucagggugacuaca

SEQ ID NO: 1623907 - RNA, 19 nt, Artificial Sequence
  Description of Artificial Sequence: Synthetic oligonucleotide
  Sense strand starting at position 3945 of SEQ ID NO: 1560781
cugagaacucagcacuauu

SEQ ID NO: 1623908 - RNA, 19 nt, Artificial Sequence
  Description of Artificial Sequence: Synthetic oligonucleotide
  Antisense strand to SEQ ID NO: 1623907
aauagugcugaguucucag

SEQ ID NO: 1623909 - RNA, 19 nt, Artificial Sequence
  Description of Artificial Sequence: Synthetic oligonucleotide
  Sense strand starting at position 3957 of SEQ ID NO: 1560781
cacuauuggugguacuuga

SEQ ID NO: 1623910 - RNA, 19 nt, Artificial Sequence
  Description of Artificial Sequence: Synthetic oligonucleotide
  Antisense strand to SEQ ID NO: 1623909
ucaaguaccaccaauagug

SEQ ID NO: 1623911 - RNA, 19 nt, Artificial Sequence
  Description of Artificial Sequence: Synthetic oligonucleotide
  Sense strand starting at position 3961 of SEQ ID NO: 1560781
auuggugguacuugagacu

SEQ ID NO: 1623912 - RNA, 19 nt, Artificial Sequence
  Description of Artificial Sequence: Synthetic oligonucleotide
  Antisense strand to SEQ ID NO: 1623911
agucucaaguaccaccaau

SEQ ID NO: 1623913 - RNA, 19 nt, Artificial Sequence
  Description of Artificial Sequence: Synthetic oligonucleotide
  Sense strand starting at position 3964 of SEQ ID NO: 1560781
ggugguacuugagacuguu

SEQ ID NO: 1623914 - RNA, 19 nt, Artificial Sequence
  Description of Artificial Sequence: Synthetic oligonucleotide
  Antisense strand to SEQ ID NO: 1623913
aacagucucaaguaccacc

SEQ ID NO: 1623915 - RNA, 19 nt, Artificial Sequence
  Description of Artificial Sequence: Synthetic oligonucleotide
  Sense strand starting at position 3970 of SEQ ID NO: 1560781
acuugagacuguuugguau

SEQ ID NO: 1623916 - RNA, 19 nt, Artificial Sequence
  Description of Artificial Sequence: Synthetic oligonucleotide
  Antisense strand to SEQ ID NO: 1623915
auaccaaacagucucaagu

SEQ ID NO: 1623917 - RNA, 19 nt, Artificial Sequence
  Description of Artificial Sequence: Synthetic oligonucleotide
  Sense strand starting at position 3974 of SEQ ID NO: 1560781
gagacuguuugguauuggu

SEQ ID NO: 1623918 - RNA, 19 nt, Artificial Sequence
  Description of Artificial Sequence: Synthetic oligonucleotide
  Antisense strand to SEQ ID NO: 1623917
accaauaccaaacagucuc

SEQ ID NO: 1623919 - RNA, 19 nt, Artificial Sequence
  Description of Artificial Sequence: Synthetic oligonucleotide
  Sense strand starting at position 246 of SEQ ID NO: 1560782
ggaagcccuuguucuagaa

SEQ ID NO: 1623920 - RNA, 19 nt, Artificial Sequence
  Description of Artificial Sequence: Synthetic oligonucleotide
  Antisense strand to SEQ ID NO: 1623919
uucuagaacaagggcuucc

SEQ ID NO: 1623921 - RNA, 19 nt, Artificial Sequence
  Description of Artificial Sequence: Synthetic oligonucleotide
  Sense strand starting at position 248 of SEQ ID NO: 1560782
aagcccuuguucuagaagu

SEQ ID NO: 1623922 - RNA, 19 nt, Artificial Sequence
  Description of Artificial Sequence: Synthetic oligonucleotide
  Antisense strand to SEQ ID NO: 1623921
acuucuagaacaagggcuu

SEQ ID NO: 1623923 - RNA, 19 nt, Artificial Sequence
  Description of Artificial Sequence: Synthetic oligonucleotide
  Sense strand starting at position 250 of SEQ ID NO: 1560782
gcccuuguucuagaaguuu

SEQ ID NO: 1623924 - RNA, 19 nt, Artificial Sequence
  Description of Artificial Sequence: Synthetic oligonucleotide
  Antisense strand to SEQ ID NO: 1623923
aaacuucuagaacaagggc

SEQ ID NO: 1623925 - RNA, 19 nt, Artificial Sequence
  Description of Artificial Sequence: Synthetic oligonucleotide
  Sense strand starting at position 279 of SEQ ID NO: 1560782
auaucuagggcuugcguaa

SEQ ID NO: 1623926 - RNA, 19 nt, Artificial Sequence
  Description of Artificial Sequence: Synthetic oligonucleotide
  Antisense strand to SEQ ID NO: 1623925
uuacgcaagcccuagauau

SEQ ID NO: 1623927 - RNA, 19 nt, Artificial Sequence
  Description of Artificial Sequence: Synthetic oligonucleotide
  Sense strand starting at position 297 of SEQ ID NO: 1560782
augcgcaacuuguagauua

SEQ ID NO: 1623928 - RNA, 19 nt, Artificial Sequence
  Description of Artificial Sequence: Synthetic oligonucleotide
  Antisense strand to SEQ ID NO: 1623927
uaaucuacaaguugcgcau

SEQ ID NO: 1623929 - RNA, 19 nt, Artificial Sequence
  Description of Artificial Sequence: Synthetic oligonucleotide
  Sense strand starting at position 299 of SEQ ID NO: 1560782
gcgcaacuuguagauuaau

SEQ ID NO: 1623930 - RNA, 19 nt, Artificial Sequence
  Description of Artificial Sequence: Synthetic oligonucleotide
  Antisense strand to SEQ ID NO: 1623929
auuaaucuacaaguugcgc

SEQ ID NO: 1623931 - RNA, 19 nt, Artificial Sequence
  Description of Artificial Sequence: Synthetic oligonucleotide
  Sense strand starting at position 761 of SEQ ID NO: 1560782
uacagaauuacccgggugu

SEQ ID NO: 1623932 - RNA, 19 nt, Artificial Sequence
  Description of Artificial Sequence: Synthetic oligonucleotide
  Antisense strand to SEQ ID NO: 1623931
acacccggguaauucugua

SEQ ID NO: 1623933 - RNA, 19 nt, Artificial Sequence
  Description of Artificial Sequence: Synthetic oligonucleotide
  Sense strand starting at position 976 of SEQ ID NO: 1560782
aguaacagauguugaaaua

SEQ ID NO: 1623934 - RNA, 19 nt, Artificial Sequence
  Description of Artificial Sequence: Synthetic oligonucleotide
  Antisense strand to SEQ ID NO: 1623933
uauuucaacaucuguuacu

SEQ ID NO: 1623935 - RNA, 19 nt, Artificial Sequence
  Description of Artificial Sequence: Synthetic oligonucleotide
  Sense strand starting at position 1011 of SEQ ID NO: 1560782
aaugauuugugcccgguca

SEQ ID NO: 1623936 - RNA, 19 nt, Artificial Sequence
  Description of Artificial Sequence: Synthetic oligonucleotide
  Antisense strand to SEQ ID NO: 1623935
ugaccgggcacaaaucauu

SEQ ID NO: 1623937 - RNA, 19 nt, Artificial Sequence
  Description of Artificial Sequence: Synthetic oligonucleotide
  Sense strand starting at position 1013 of SEQ ID NO: 1560782
ugauuugugcccggucaca

SEQ ID NO: 1623938 - RNA, 19 nt, Artificial Sequence
  Description of Artificial Sequence: Synthetic oligonucleotide
  Antisense strand to SEQ ID NO: 1623937
ugugaccgggcacaaauca

SEQ ID NO: 1623939 - RNA, 19 nt, Artificial Sequence
  Description of Artificial Sequence: Synthetic oligonucleotide
  Sense strand starting at position 1845 of SEQ ID NO: 1560782
cugggaaacagucaguagu

SEQ ID NO: 1623940 - RNA, 19 nt, Artificial Sequence
  Description of Artificial Sequence: Synthetic oligonucleotide
  Antisense strand to SEQ ID NO: 1623939
acuacugacuguuucccag

SEQ ID NO: 1623941 - RNA, 19 nt, Artificial Sequence
  Description of Artificial Sequence: Synthetic oligonucleotide
  Sense strand starting at position 1847 of SEQ ID NO: 1560782
gggaaacagucaguaguua

SEQ ID NO: 1623942 - RNA, 19 nt, Artificial Sequence
  Description of Artificial Sequence: Synthetic oligonucleotide
  Antisense strand to SEQ ID NO: 1623941
uaacuacugacuguuuccc

SEQ ID NO: 1623943 - RNA, 19 nt, Artificial Sequence
  Description of Artificial Sequence: Synthetic oligonucleotide
  Sense strand starting at position 2334 of SEQ ID NO: 1560782
ccaagcugcuuccuggaau

SEQ ID NO: 1623944 - RNA, 19 nt, Artificial Sequence
  Description of Artificial Sequence: Synthetic oligonucleotide
  Antisense strand to SEQ ID NO: 1623943
auuccaggaagcagcuugg

SEQ ID NO: 1623945 - RNA, 19 nt, Artificial Sequence
  Description of Artificial Sequence: Synthetic oligonucleotide
  Sense strand starting at position 2337 of SEQ ID NO: 1560782
agcugcuuccuggaauguu

SEQ ID NO: 1623946 - RNA, 19 nt, Artificial Sequence
  Description of Artificial Sequence: Synthetic oligonucleotide
  Antisense strand to SEQ ID NO: 1623945
aacauuccaggaagcagcu

SEQ ID NO: 1623947 - RNA, 19 nt, Artificial Sequence
  Description of Artificial Sequence: Synthetic oligonucleotide
  Sense strand starting at position 2346 of SEQ ID NO: 1560782
cuggaauguucccuccuca

SEQ ID NO: 1623948 - RNA, 19 nt, Artificial Sequence
  Description of Artificial Sequence: Synthetic oligonucleotide
  Antisense strand to SEQ ID NO: 1623947
ugaggagggaacauuccag

SEQ ID NO: 1623949 - RNA, 19 nt, Artificial Sequence
  Description of Artificial Sequence: Synthetic oligonucleotide
  Sense strand starting at position 2383 of SEQ ID NO: 1560782
gcccaagacuucugcacau

SEQ ID NO: 1623950 - RNA, 19 nt, Artificial Sequence
  Description of Artificial Sequence: Synthetic oligonucleotide
  Antisense strand to SEQ ID NO: 1623949
augugcagaagucuugggc

SEQ ID NO: 1623951 - RNA, 19 nt, Artificial Sequence
  Description of Artificial Sequence: Synthetic oligonucleotide
  Sense strand starting at position 2843 of SEQ ID NO: 1560782
cccuccuucucggauacua

SEQ ID NO: 1623952 - RNA, 19 nt, Artificial Sequence
  Description of Artificial Sequence: Synthetic oligonucleotide
  Antisense strand to SEQ ID NO: 1623951
uaguauccgagaaggaggg

SEQ ID NO: 1623953 - RNA, 19 nt, Artificial Sequence
  Description of Artificial Sequence: Synthetic oligonucleotide
  Sense strand starting at position 2848 of SEQ ID NO: 1560782
cuucucggauacuaagaaa

SEQ ID NO: 1623954 - RNA, 19 nt, Artificial Sequence
  Description of Artificial Sequence: Synthetic oligonucleotide
  Antisense strand to SEQ ID NO: 1623953
uuucuuaguauccgagaag

SEQ ID NO: 1623955 - RNA, 19 nt, Artificial Sequence
  Description of Artificial Sequence: Synthetic oligonucleotide
  Sense strand starting at position 2878 of SEQ ID NO: 1560782
gguuccucauccuccagau

SEQ ID NO: 1623956 - RNA, 19 nt, Artificial Sequence
  Description of Artificial Sequence: Synthetic oligonucleotide
  Antisense strand to SEQ ID NO: 1623955
aucuggaggaugaggaacc

SEQ ID NO: 1623957 - RNA, 19 nt, Artificial Sequence
  Description of Artificial Sequence: Synthetic oligonucleotide
  Sense strand starting at position 2941 of SEQ ID NO: 1560782
gcugcauaucugggacacu

SEQ ID NO: 1623958 - RNA, 19 nt, Artificial Sequence
  Description of Artificial Sequence: Synthetic oligonucleotide
  Antisense strand to SEQ ID NO: 1623957
agugucccagauaugcagc

SEQ ID NO: 1623959 - RNA, 19 nt, Artificial Sequence
  Description of Artificial Sequence: Synthetic oligonucleotide
  Sense strand starting at position 2942 of SEQ ID NO: 1560782
cugcauaucugggacacuu

SEQ ID NO: 1623960 - RNA, 19 nt, Artificial Sequence
  Description of Artificial Sequence: Synthetic oligonucleotide
  Antisense strand to SEQ ID NO: 1623959
aagugucccagauaugcag

SEQ ID NO: 1623961 - RNA, 19 nt, Artificial Sequence
  Description of Artificial Sequence: Synthetic oligonucleotide
  Sense strand starting at position 3586 of SEQ ID NO: 1560782
ggagucugggccugagauu

SEQ ID NO: 1623962 - RNA, 19 nt, Artificial Sequence
  Description of Artificial Sequence: Synthetic oligonucleotide
  Antisense strand to SEQ ID NO: 1623961
aaucucaggcccagacucc

SEQ ID NO: 1623963 - RNA, 19 nt, Artificial Sequence
  Description of Artificial Sequence: Synthetic oligonucleotide
  Sense strand starting at position 3597 of SEQ ID NO: 1560782
cugagauuccuuugccguc

SEQ ID NO: 1623964 - RNA, 19 nt, Artificial Sequence
  Description of Artificial Sequence: Synthetic oligonucleotide
  Antisense strand to SEQ ID NO: 1623963
gacggcaaaggaaucucag

SEQ ID NO: 1623965 - RNA, 19 nt, Artificial Sequence
  Description of Artificial Sequence: Synthetic oligonucleotide
  Sense strand starting at position 3618 of SEQ ID NO: 1560782
uugccaauugcgugucaau

SEQ ID NO: 1623966 - RNA, 19 nt, Artificial Sequence
  Description of Artificial Sequence: Synthetic oligonucleotide
  Antisense strand to SEQ ID NO: 1623965
auugacacgcaauuggcaa

SEQ ID NO: 1623967 - RNA, 19 nt, Artificial Sequence
  Description of Artificial Sequence: Synthetic oligonucleotide
  Sense strand starting at position 3619 of SEQ ID NO: 1560782
ugccaauugcgugucaauc

SEQ ID NO: 1623968 - RNA, 19 nt, Artificial Sequence
  Description of Artificial Sequence: Synthetic oligonucleotide
  Antisense strand to SEQ ID NO: 1623967
gauugacacgcaauuggca

SEQ ID NO: 1623969 - RNA, 19 nt, Artificial Sequence
  Description of Artificial Sequence: Synthetic oligonucleotide
  Sense strand starting at position 3708 of SEQ ID NO: 1560782
gggcuugggcagugauaag

SEQ ID NO: 1623970 - RNA, 19 nt, Artificial Sequence
  Description of Artificial Sequence: Synthetic oligonucleotide
  Antisense strand to SEQ ID NO: 1623969
cuuaucacugcccaagccc

SEQ ID NO: 1623971 - RNA, 19 nt, Artificial Sequence
  Description of Artificial Sequence: Synthetic oligonucleotide
  Sense strand starting at position 3810 of SEQ ID NO: 1560782
aggucuuguccugagcuca

SEQ ID NO: 1623972 - RNA, 19 nt, Artificial Sequence
  Description of Artificial Sequence: Synthetic oligonucleotide
  Antisense strand to SEQ ID NO: 1623971
ugagcucaggacaagaccu

SEQ ID NO: 1623973 - RNA, 19 nt, Artificial Sequence
  Description of Artificial Sequence: Synthetic oligonucleotide
  Sense strand starting at position 3815 of SEQ ID NO: 1560782
uuguccugagcucagauaa

SEQ ID NO: 1623974 - RNA, 19 nt, Artificial Sequence
  Description of Artificial Sequence: Synthetic oligonucleotide
  Antisense strand to SEQ ID NO: 1623973
uuaucugagcucaggacaa

SEQ ID NO: 1623975 - RNA, 19 nt, Artificial Sequence
  Description of Artificial Sequence: Synthetic oligonucleotide
  Sense strand starting at position 3835 of SEQ ID NO: 1560782
agacgugcaagguaucaua

SEQ ID NO: 1623976 - RNA, 19 nt, Artificial Sequence
  Description of Artificial Sequence: Synthetic oligonucleotide
  Antisense strand to SEQ ID NO: 1623975
uaugauaccuugcacgucu

SEQ ID NO: 1623977 - RNA, 19 nt, Artificial Sequence
  Description of Artificial Sequence: Synthetic oligonucleotide
  Sense strand starting at position 3838 of SEQ ID NO: 1560782
cgugcaagguaucauagga

SEQ ID NO: 1623978 - RNA, 19 nt, Artificial Sequence
  Description of Artificial Sequence: Synthetic oligonucleotide
  Antisense strand to SEQ ID NO: 1623977
uccuaugauaccuugcacg

SEQ ID NO: 1623979 - RNA, 19 nt, Artificial Sequence
  Description of Artificial Sequence: Synthetic oligonucleotide
  Sense strand starting at position 3843 of SEQ ID NO: 1560782
aagguaucauaggaccaga

SEQ ID NO: 1623980 - RNA, 19 nt, Artificial Sequence
  Description of Artificial Sequence: Synthetic oligonucleotide
  Antisense strand to SEQ ID NO: 1623979
ucugguccuaugauaccuu

SEQ ID NO: 1623981 - RNA, 19 nt, Artificial Sequence
  Description of Artificial Sequence: Synthetic oligonucleotide
  Sense strand starting at position 3860 of SEQ ID NO: 1560782
gagauagacagaugugucu

SEQ ID NO: 1623982 - RNA, 19 nt, Artificial Sequence
  Description of Artificial Sequence: Synthetic oligonucleotide
  Antisense strand to SEQ ID NO: 1623981
agacacaucugucuaucuc

SEQ ID NO: 1623983 - RNA, 19 nt, Artificial Sequence
  Description of Artificial Sequence: Synthetic oligonucleotide
  Sense strand starting at position 3863 of SEQ ID NO: 1560782
auagacagaugugucuuaa

SEQ ID NO: 1623984 - RNA, 19 nt, Artificial Sequence
  Description of Artificial Sequence: Synthetic oligonucleotide
  Antisense strand to SEQ ID NO: 1623983
uuaagacacaucugucuau

SEQ ID NO: 1623985 - RNA, 19 nt, Artificial Sequence
  Description of Artificial Sequence: Synthetic oligonucleotide
  Sense strand starting at position 3867 of SEQ ID NO: 1560782
acagaugugucuuaagaac

SEQ ID NO: 1623986 - RNA, 19 nt, Artificial Sequence
  Description of Artificial Sequence: Synthetic oligonucleotide
  Antisense strand to SEQ ID NO: 1623985
guucuuaagacacaucugu

SEQ ID NO: 1623987 - RNA, 19 nt, Artificial Sequence
  Description of Artificial Sequence: Synthetic oligonucleotide
  Sense strand starting at position 3884 of SEQ ID NO: 1560782
acaaucagcuaccuugaga

SEQ ID NO: 1623988 - RNA, 19 nt, Artificial Sequence
  Description of Artificial Sequence: Synthetic oligonucleotide
  Antisense strand to SEQ ID NO: 1623987
ucucaagguagcugauugu

SEQ ID NO: 1623989 - RNA, 19 nt, Artificial Sequence
  Description of Artificial Sequence: Synthetic oligonucleotide
  Sense strand starting at position 57 of SEQ ID NO: 1560783
ggagguguccuguggaacu

SEQ ID NO: 1623990 - RNA, 19 nt, Artificial Sequence
  Description of Artificial Sequence: Synthetic oligonucleotide
  Antisense strand to SEQ ID NO: 1623989
aguuccacaggacaccucc

SEQ ID NO: 1623991 - RNA, 19 nt, Artificial Sequence
  Description of Artificial Sequence: Synthetic oligonucleotide
  Sense strand starting at position 211 of SEQ ID NO: 1560783
ugaacuaauccguagcuua

SEQ ID NO: 1623992 - RNA, 19 nt, Artificial Sequence
  Description of Artificial Sequence: Synthetic oligonucleotide
  Antisense strand to SEQ ID NO: 1623991
uaagcuacggauuaguuca

SEQ ID NO: 1623993 - RNA, 19 nt, Artificial Sequence
  Description of Artificial Sequence: Synthetic oligonucleotide
  Sense strand starting at position 234 of SEQ ID NO: 1560783
cccagaguuauccgucagu

SEQ ID NO: 1623994 - RNA, 19 nt, Artificial Sequence
  Description of Artificial Sequence: Synthetic oligonucleotide
  Antisense strand to SEQ ID NO: 1623993
acugacggauaacucuggg

SEQ ID NO: 1623995 - RNA, 19 nt, Artificial Sequence
  Description of Artificial Sequence: Synthetic oligonucleotide
  Sense strand starting at position 237 of SEQ ID NO: 1560783
agaguuauccgucaguguc

SEQ ID NO: 1623996 - RNA, 19 nt, Artificial Sequence
  Description of Artificial Sequence: Synthetic oligonucleotide
  Antisense strand to SEQ ID NO: 1623995
gacacugacggauaacucu

SEQ ID NO: 1623997 - RNA, 19 nt, Artificial Sequence
  Description of Artificial Sequence: Synthetic oligonucleotide
  Sense strand starting at position 465 of SEQ ID NO: 1560783
cagagaaguugcugcaaag

SEQ ID NO: 1623998 - RNA, 19 nt, Artificial Sequence
  Description of Artificial Sequence: Synthetic oligonucleotide
  Antisense strand to SEQ ID NO: 1623997
cuuugcagcaacuucucug

SEQ ID NO: 1623999 - RNA, 19 nt, Artificial Sequence
  Description of Artificial Sequence: Synthetic oligonucleotide
  Sense strand starting at position 1008 of SEQ ID NO: 1560783
aaguuagcguucugggacu

SEQ ID NO: 1624000 - RNA, 19 nt, Artificial Sequence
  Description of Artificial Sequence: Synthetic oligonucleotide
  Antisense strand to SEQ ID NO: 1623999
agucccagaacgcuaacuu

SEQ ID NO: 1624001 - RNA, 19 nt, Artificial Sequence
  Description of Artificial Sequence: Synthetic oligonucleotide
  Sense strand starting at position 1010 of SEQ ID NO: 1560783
guuagcguucugggacuuu

SEQ ID NO: 1624002 - RNA, 19 nt, Artificial Sequence
  Description of Artificial Sequence: Synthetic oligonucleotide
  Antisense strand to SEQ ID NO: 1624001
aaagucccagaacgcuaac

SEQ ID NO: 1624003 - RNA, 19 nt, Artificial Sequence
  Description of Artificial Sequence: Synthetic oligonucleotide
  Sense strand starting at position 1022 of SEQ ID NO: 1560783
ggacuuucugcucaccuca

SEQ ID NO: 1624004 - RNA, 19 nt, Artificial Sequence
  Description of Artificial Sequence: Synthetic oligonucleotide
  Antisense strand to SEQ ID NO: 1624003
ugaggugagcagaaagucc

SEQ ID NO: 1624005 - RNA, 19 nt, Artificial Sequence
  Description of Artificial Sequence: Synthetic oligonucleotide
  Sense strand starting at position 1370 of SEQ ID NO: 1560783
ugaaucugcgcccaggaau

SEQ ID NO: 1624006 - RNA, 19 nt, Artificial Sequence
  Description of Artificial Sequence: Synthetic oligonucleotide
  Antisense strand to SEQ ID NO: 1624005
auuccugggcgcagauuca

SEQ ID NO: 1624007 - RNA, 19 nt, Artificial Sequence
  Description of Artificial Sequence: Synthetic oligonucleotide
  Sense strand starting at position 1642 of SEQ ID NO: 1560783
ucuggauaguugcuggaua

SEQ ID NO: 1624008 - RNA, 19 nt, Artificial Sequence
  Description of Artificial Sequence: Synthetic oligonucleotide
  Antisense strand to SEQ ID NO: 1624007
uauccagcaacuauccaga

SEQ ID NO: 1624009 - RNA, 19 nt, Artificial Sequence
  Description of Artificial Sequence: Synthetic oligonucleotide
  Sense strand starting at position 1644 of SEQ ID NO: 1560783
uggauaguugcuggauagu

SEQ ID NO: 1624010 - RNA, 19 nt, Artificial Sequence
  Description of Artificial Sequence: Synthetic oligonucleotide
  Antisense strand to SEQ ID NO: 1624009
acuauccagcaacuaucca

SEQ ID NO: 1624011 - RNA, 19 nt, Artificial Sequence
  Description of Artificial Sequence: Synthetic oligonucleotide
  Sense strand starting at position 1684 of SEQ ID NO: 1560783
cccuuagcaccuugaggaa

SEQ ID NO: 1624012 - RNA, 19 nt, Artificial Sequence
  Description of Artificial Sequence: Synthetic oligonucleotide
  Antisense strand to SEQ ID NO: 1624011
uuccucaaggugcuaaggg

SEQ ID NO: 1624013 - RNA, 19 nt, Artificial Sequence
  Description of Artificial Sequence: Synthetic oligonucleotide
  Sense strand starting at position 1708 of SEQ ID NO: 1560783
cugugaguucccuaguguu

SEQ ID NO: 1624014 - RNA, 19 nt, Artificial Sequence
  Description of Artificial Sequence: Synthetic oligonucleotide
  Antisense strand to SEQ ID NO: 1624013
aacacuagggaacucacag

SEQ ID NO: 1624015 - RNA, 19 nt, Artificial Sequence
  Description of Artificial Sequence: Synthetic oligonucleotide
  Sense strand starting at position 2364 of SEQ ID NO: 1560783
ggcugaccuuugggagaca

SEQ ID NO: 1624016 - RNA, 19 nt, Artificial Sequence
  Description of Artificial Sequence: Synthetic oligonucleotide
  Antisense strand to SEQ ID NO: 1624015
ugucucccaaaggucagcc

SEQ ID NO: 1624017 - RNA, 19 nt, Artificial Sequence
  Description of Artificial Sequence: Synthetic oligonucleotide
  Sense strand starting at position 2376 of SEQ ID NO: 1560783
ggagacaaucgcuguugga

SEQ ID NO: 1624018 - RNA, 19 nt, Artificial Sequence
  Description of Artificial Sequence: Synthetic oligonucleotide
  Antisense strand to SEQ ID NO: 1624017
uccaacagcgauugucucc

SEQ ID NO: 1624019 - RNA, 19 nt, Artificial Sequence
  Description of Artificial Sequence: Synthetic oligonucleotide
  Sense strand starting at position 2379 of SEQ ID NO: 1560783
gacaaucgcuguuggaaac

SEQ ID NO: 1624020 - RNA, 19 nt, Artificial Sequence
  Description of Artificial Sequence: Synthetic oligonucleotide
  Antisense strand to SEQ ID NO: 1624019
guuuccaacagcgauuguc

SEQ ID NO: 1624021 - RNA, 19 nt, Artificial Sequence
  Description of Artificial Sequence: Synthetic oligonucleotide
  Sense strand starting at position 2485 of SEQ ID NO: 1560783
gagccuuaaggucaguaaa

SEQ ID NO: 1624022 - RNA, 19 nt, Artificial Sequence
  Description of Artificial Sequence: Synthetic oligonucleotide
  Antisense strand to SEQ ID NO: 1624021
uuuacugaccuuaaggcuc

SEQ ID NO: 1624023 - RNA, 19 nt, Artificial Sequence
  Description of Artificial Sequence: Synthetic oligonucleotide
  Sense strand starting at position 2551 of SEQ ID NO: 1560783
cucagucgcuuucuaagau

SEQ ID NO: 1624024 - RNA, 19 nt, Artificial Sequence
  Description of Artificial Sequence: Synthetic oligonucleotide
  Antisense strand to SEQ ID NO: 1624023
aucuuagaaagcgacugag

SEQ ID NO: 1624025 - RNA, 19 nt, Artificial Sequence
  Description of Artificial Sequence: Synthetic oligonucleotide
  Sense strand starting at position 2581 of SEQ ID NO: 1560783
cgacaaaugagcugagaac

SEQ ID NO: 1624026 - RNA, 19 nt, Artificial Sequence
  Description of Artificial Sequence: Synthetic oligonucleotide
  Antisense strand to SEQ ID NO: 1624025
guucucagcucauuugucg

SEQ ID NO: 1624027 - RNA, 19 nt, Artificial Sequence
  Description of Artificial Sequence: Synthetic oligonucleotide
  Sense strand starting at position 2610 of SEQ ID NO: 1560783
caguguuucucaugcggca

SEQ ID NO: 1624028 - RNA, 19 nt, Artificial Sequence
  Description of Artificial Sequence: Synthetic oligonucleotide
  Antisense strand to SEQ ID NO: 1624027
ugccgcaugagaaacacug

SEQ ID NO: 1624029 - RNA, 19 nt, Artificial Sequence
  Description of Artificial Sequence: Synthetic oligonucleotide
  Sense strand starting at position 2612 of SEQ ID NO: 1560783
guguuucucaugcggcaga

SEQ ID NO: 1624030 - RNA, 19 nt, Artificial Sequence
  Description of Artificial Sequence: Synthetic oligonucleotide
  Antisense strand to SEQ ID NO: 1624029
ucugccgcaugagaaacac

SEQ ID NO: 1624031 - RNA, 19 nt, Artificial Sequence
  Description of Artificial Sequence: Synthetic oligonucleotide
  Sense strand starting at position 2737 of SEQ ID NO: 1560783
ugcgaauguugcugucugu

SEQ ID NO: 1624032 - RNA, 19 nt, Artificial Sequence
  Description of Artificial Sequence: Synthetic oligonucleotide
  Antisense strand to SEQ ID NO: 1624031
acagacagcaacauucgca

SEQ ID NO: 1624033 - RNA, 19 nt, Artificial Sequence
  Description of Artificial Sequence: Synthetic oligonucleotide
  Sense strand starting at position 2738 of SEQ ID NO: 1560783
gcgaauguugcugucuguu

SEQ ID NO: 1624034 - RNA, 19 nt, Artificial Sequence
  Description of Artificial Sequence: Synthetic oligonucleotide
  Antisense strand to SEQ ID NO: 1624033
aacagacagcaacauucgc

SEQ ID NO: 1624035 - RNA, 19 nt, Artificial Sequence
  Description of Artificial Sequence: Synthetic oligonucleotide
  Sense strand starting at position 2741 of SEQ ID NO: 1560783
aauguugcugucuguucua

SEQ ID NO: 1624036 - RNA, 19 nt, Artificial Sequence
  Description of Artificial Sequence: Synthetic oligonucleotide
  Antisense strand to SEQ ID NO: 1624035
uagaacagacagcaacauu

SEQ ID NO: 1624037 - RNA, 19 nt, Artificial Sequence
  Description of Artificial Sequence: Synthetic oligonucleotide
  Sense strand starting at position 2767 of SEQ ID NO: 1560783
uccgaauggguugacuaga

SEQ ID NO: 1624038 - RNA, 19 nt, Artificial Sequence
  Description of Artificial Sequence: Synthetic oligonucleotide
  Antisense strand to SEQ ID NO: 1624037
ucuagucaacccauucgga

SEQ ID NO: 1624039 - RNA, 19 nt, Artificial Sequence
  Description of Artificial Sequence: Synthetic oligonucleotide
  Sense strand starting at position 2801 of SEQ ID NO: 1560783
gucacuucccgcugagaaa

SEQ ID NO: 1624040 - RNA, 19 nt, Artificial Sequence
  Description of Artificial Sequence: Synthetic oligonucleotide
  Antisense strand to SEQ ID NO: 1624039
uuucucagcgggaagugac

SEQ ID NO: 1624041 - RNA, 19 nt, Artificial Sequence
  Description of Artificial Sequence: Synthetic oligonucleotide
  Sense strand starting at position 2871 of SEQ ID NO: 1560783
cagcguuuaucguggugua

SEQ ID NO: 1624042 - RNA, 19 nt, Artificial Sequence
  Description of Artificial Sequence: Synthetic oligonucleotide
  Antisense strand to SEQ ID NO: 1624041
uacaccacgauaaacgcug

SEQ ID NO: 1624043 - RNA, 19 nt, Artificial Sequence
  Description of Artificial Sequence: Synthetic oligonucleotide
  Sense strand starting at position 2872 of SEQ ID NO: 1560783
agcguuuaucgugguguag

SEQ ID NO: 1624044 - RNA, 19 nt, Artificial Sequence
  Description of Artificial Sequence: Synthetic oligonucleotide
  Antisense strand to SEQ ID NO: 1624043
cuacaccacgauaaacgcu

SEQ ID NO: 1624045 - RNA, 19 nt, Artificial Sequence
  Description of Artificial Sequence: Synthetic oligonucleotide
  Sense strand starting at position 2896 of SEQ ID NO: 1560783
gcccaauccugacaggcuu

SEQ ID NO: 1624046 - RNA, 19 nt, Artificial Sequence
  Description of Artificial Sequence: Synthetic oligonucleotide
  Antisense strand to SEQ ID NO: 1624045
aagccugucaggauugggc

SEQ ID NO: 1624047 - RNA, 19 nt, Artificial Sequence
  Description of Artificial Sequence: Synthetic oligonucleotide
  Sense strand starting at position 3034 of SEQ ID NO: 1560783
gacaucggauuugaaagaa

SEQ ID NO: 1624048 - RNA, 19 nt, Artificial Sequence
  Description of Artificial Sequence: Synthetic oligonucleotide
  Antisense strand to SEQ ID NO: 1624047
uucuuucaaauccgauguc

SEQ ID NO: 1624049 - RNA, 19 nt, Artificial Sequence
  Description of Artificial Sequence: Synthetic oligonucleotide
  Sense strand starting at position 3053 of SEQ ID NO: 1560783
gggagucacuccgaaagcu

SEQ ID NO: 1624050 - RNA, 19 nt, Artificial Sequence
  Description of Artificial Sequence: Synthetic oligonucleotide
  Antisense strand to SEQ ID NO: 1624049
agcuuucggagugacuccc

SEQ ID NO: 1624051 - RNA, 19 nt, Artificial Sequence
  Description of Artificial Sequence: Synthetic oligonucleotide
  Sense strand starting at position 3159 of SEQ ID NO: 1560783
gugagucagaguggaacuu

SEQ ID NO: 1624052 - RNA, 19 nt, Artificial Sequence
  Description of Artificial Sequence: Synthetic oligonucleotide
  Antisense strand to SEQ ID NO: 1624051
aaguuccacucugacucac

SEQ ID NO: 1624053 - RNA, 19 nt, Artificial Sequence
  Description of Artificial Sequence: Synthetic oligonucleotide
  Sense strand starting at position 3168 of SEQ ID NO: 1560783
aguggaacuucgggauuca

SEQ ID NO: 1624054 - RNA, 19 nt, Artificial Sequence
  Description of Artificial Sequence: Synthetic oligonucleotide
  Antisense strand to SEQ ID NO: 1624053
ugaaucccgaaguuccacu

SEQ ID NO: 1624055 - RNA, 19 nt, Artificial Sequence
  Description of Artificial Sequence: Synthetic oligonucleotide
  Sense strand starting at position 3353 of SEQ ID NO: 1560783
ccaagugccuuggagcaaa

SEQ ID NO: 1624056 - RNA, 19 nt, Artificial Sequence
  Description of Artificial Sequence: Synthetic oligonucleotide
  Antisense strand to SEQ ID NO: 1624055
uuugcuccaaggcacuugg

SEQ ID NO: 1624057 - RNA, 19 nt, Artificial Sequence
  Description of Artificial Sequence: Synthetic oligonucleotide
  Sense strand starting at position 3711 of SEQ ID NO: 1560783
gggagaguucuuuaagggc

SEQ ID NO: 1624058 - RNA, 19 nt, Artificial Sequence
  Description of Artificial Sequence: Synthetic oligonucleotide
  Antisense strand to SEQ ID NO: 1624057
gcccuuaaagaacucuccc

SEQ ID NO: 1624059 - RNA, 19 nt, Artificial Sequence
  Description of Artificial Sequence: Synthetic oligonucleotide
  Sense strand starting at position 3850 of SEQ ID NO: 1560783
cuugguggcccagauauaa

SEQ ID NO: 1624060 - RNA, 19 nt, Artificial Sequence
  Description of Artificial Sequence: Synthetic oligonucleotide
  Antisense strand to SEQ ID NO: 1624059
uuauaucugggccaccaag

SEQ ID NO: 1624061 - RNA, 19 nt, Artificial Sequence
  Description of Artificial Sequence: Synthetic oligonucleotide
  Sense strand starting at position 3900 of SEQ ID NO: 1560783
gcaggaguuacugggcauu

SEQ ID NO: 1624062 - RNA, 19 nt, Artificial Sequence
  Description of Artificial Sequence: Synthetic oligonucleotide
  Antisense strand to SEQ ID NO: 1624061
aaugcccaguaacuccugc

SEQ ID NO: 1624063 - RNA, 19 nt, Artificial Sequence
  Description of Artificial Sequence: Synthetic oligonucleotide
  Sense strand starting at position 3902 of SEQ ID NO: 1560783
aggaguuacugggcauugu

SEQ ID NO: 1624064 - RNA, 19 nt, Artificial Sequence
  Description of Artificial Sequence: Synthetic oligonucleotide
  Antisense strand to SEQ ID NO: 1624063
acaaugcccaguaacuccu

SEQ ID NO: 1624065 - RNA, 19 nt, Artificial Sequence
  Description of Artificial Sequence: Synthetic oligonucleotide
  Sense strand starting at position 16 of SEQ ID NO: 1560784
agggauaguccaugggcau

SEQ ID NO: 1624066 - RNA, 19 nt, Artificial Sequence
  Description of Artificial Sequence: Synthetic oligonucleotide
  Antisense strand to SEQ ID NO: 1624065
augcccauggacuaucccu

SEQ ID NO: 1624067 - RNA, 19 nt, Artificial Sequence
  Description of Artificial Sequence: Synthetic oligonucleotide
  Sense strand starting at position 358 of SEQ ID NO: 1560784
uugguuccagcacgagaau

SEQ ID NO: 1624068 - RNA, 19 nt, Artificial Sequence
  Description of Artificial Sequence: Synthetic oligonucleotide
  Antisense strand to SEQ ID NO: 1624067
auucucgugcuggaaccaa

SEQ ID NO: 1624069 - RNA, 19 nt, Artificial Sequence
  Description of Artificial Sequence: Synthetic oligonucleotide
  Sense strand starting at position 359 of SEQ ID NO: 1560784
ugguuccagcacgagaauu

SEQ ID NO: 1624070 - RNA, 19 nt, Artificial Sequence
  Description of Artificial Sequence: Synthetic oligonucleotide
  Antisense strand to SEQ ID NO: 1624069
aauucucgugcuggaacca

SEQ ID NO: 1624071 - RNA, 19 nt, Artificial Sequence
  Description of Artificial Sequence: Synthetic oligonucleotide
  Sense strand starting at position 370 of SEQ ID NO: 1560784
cgagaauucgugccucagc

SEQ ID NO: 1624072 - RNA, 19 nt, Artificial Sequence
  Description of Artificial Sequence: Synthetic oligonucleotide
  Antisense strand to SEQ ID NO: 1624071
gcugaggcacgaauucucg

SEQ ID NO: 1624073 - RNA, 19 nt, Artificial Sequence
  Description of Artificial Sequence: Synthetic oligonucleotide
  Sense strand starting at position 597 of SEQ ID NO: 1560784
uaggaagauucggaccaca

SEQ ID NO: 1624074 - RNA, 19 nt, Artificial Sequence
  Description of Artificial Sequence: Synthetic oligonucleotide
  Antisense strand to SEQ ID NO: 1624073
ugugguccgaaucuuccua

SEQ ID NO: 1624075 - RNA, 19 nt, Artificial Sequence
  Description of Artificial Sequence: Synthetic oligonucleotide
  Sense strand starting at position 672 of SEQ ID NO: 1560784
uuuauuggguuugauaaac

SEQ ID NO: 1624076 - RNA, 19 nt, Artificial Sequence
  Description of Artificial Sequence: Synthetic oligonucleotide
  Antisense strand to SEQ ID NO: 1624075
guuuaucaaacccaauaaa

SEQ ID NO: 1624077 - RNA, 19 nt, Artificial Sequence
  Description of Artificial Sequence: Synthetic oligonucleotide
  Sense strand starting at position 721 of SEQ ID NO: 1560784
cccgcccuucuguaauuua

SEQ ID NO: 1624078 - RNA, 19 nt, Artificial Sequence
  Description of Artificial Sequence: Synthetic oligonucleotide
  Antisense strand to SEQ ID NO: 1624077
uaaauuacagaagggcggg

SEQ ID NO: 1624079 - RNA, 19 nt, Artificial Sequence
  Description of Artificial Sequence: Synthetic oligonucleotide
  Sense strand starting at position 818 of SEQ ID NO: 1560784
uggugcuacugggaaaugu

SEQ ID NO: 1624080 - RNA, 19 nt, Artificial Sequence
  Description of Artificial Sequence: Synthetic oligonucleotide
  Antisense strand to SEQ ID NO: 1624079
acauuucccaguagcacca

SEQ ID NO: 1624081 - RNA, 19 nt, Artificial Sequence
  Description of Artificial Sequence: Synthetic oligonucleotide
  Sense strand starting at position 859 of SEQ ID NO: 1560784
auuccuucuuggguggaga

SEQ ID NO: 1624082 - RNA, 19 nt, Artificial Sequence
  Description of Artificial Sequence: Synthetic oligonucleotide
  Antisense strand to SEQ ID NO: 1624081
ucuccacccaagaaggaau

SEQ ID NO: 1624083 - RNA, 19 nt, Artificial Sequence
  Description of Artificial Sequence: Synthetic oligonucleotide
  Sense strand starting at position 1290 of SEQ ID NO: 1560784
augcauaaugucuguccca

SEQ ID NO: 1624084 - RNA, 19 nt, Artificial Sequence
  Description of Artificial Sequence: Synthetic oligonucleotide
  Antisense strand to SEQ ID NO: 1624083
ugggacagacauuaugcau

SEQ ID NO: 1624085 - RNA, 19 nt, Artificial Sequence
  Description of Artificial Sequence: Synthetic oligonucleotide
  Sense strand starting at position 1291 of SEQ ID NO: 1560784
ugcauaaugucugucccaa

SEQ ID NO: 1624086 - RNA, 19 nt, Artificial Sequence
  Description of Artificial Sequence: Synthetic oligonucleotide
  Antisense strand to SEQ ID NO: 1624085
uugggacagacauuaugca

SEQ ID NO: 1624087 - RNA, 19 nt, Artificial Sequence
  Description of Artificial Sequence: Synthetic oligonucleotide
  Sense strand starting at position 2073 of SEQ ID NO: 1560784
aaguuauagcgcgguagca

SEQ ID NO: 1624088 - RNA, 19 nt, Artificial Sequence
  Description of Artificial Sequence: Synthetic oligonucleotide
  Antisense strand to SEQ ID NO: 1624087
ugcuaccgcgcuauaacuu

SEQ ID NO: 1624089 - RNA, 19 nt, Artificial Sequence
  Description of Artificial Sequence: Synthetic oligonucleotide
  Sense strand starting at position 2074 of SEQ ID NO: 1560784
aguuauagcgcgguagcaa

SEQ ID NO: 1624090 - RNA, 19 nt, Artificial Sequence
  Description of Artificial Sequence: Synthetic oligonucleotide
  Antisense strand to SEQ ID NO: 1624089
uugcuaccgcgcuauaacu

SEQ ID NO: 1624091 - RNA, 19 nt, Artificial Sequence
  Description of Artificial Sequence: Synthetic oligonucleotide
  Sense strand starting at position 2075 of SEQ ID NO: 1560784
guuauagcgcgguagcaau

SEQ ID NO: 1624092 - RNA, 19 nt, Artificial Sequence
  Description of Artificial Sequence: Synthetic oligonucleotide
  Antisense strand to SEQ ID NO: 1624091
auugcuaccgcgcuauaac

SEQ ID NO: 1624093 - RNA, 19 nt, Artificial Sequence
  Description of Artificial Sequence: Synthetic oligonucleotide
  Sense strand starting at position 2094 of SEQ ID NO: 1560784
ugcauagccuuucuuauga

SEQ ID NO: 1624094 - RNA, 19 nt, Artificial Sequence
  Description of Artificial Sequence: Synthetic oligonucleotide
  Antisense strand to SEQ ID NO: 1624093
ucauaagaaaggcuaugca

SEQ ID NO: 1624095 - RNA, 19 nt, Artificial Sequence
  Description of Artificial Sequence: Synthetic oligonucleotide
  Sense strand starting at position 2105 of SEQ ID NO: 1560784
ucuuaugaguuucuuucuu

SEQ ID NO: 1624096 - RNA, 19 nt, Artificial Sequence
  Description of Artificial Sequence: Synthetic oligonucleotide
  Antisense strand to SEQ ID NO: 1624095
aagaaagaaacucauaaga

SEQ ID NO: 1624097 - RNA, 19 nt, Artificial Sequence
  Description of Artificial Sequence: Synthetic oligonucleotide
  Sense strand starting at position 2125 of SEQ ID NO: 1560784
uucuucuuauuauucgaga

SEQ ID NO: 1624098 - RNA, 19 nt, Artificial Sequence
  Description of Artificial Sequence: Synthetic oligonucleotide
  Antisense strand to SEQ ID NO: 1624097
ucucgaauaauaagaagaa

SEQ ID NO: 1624099 - RNA, 19 nt, Artificial Sequence
  Description of Artificial Sequence: Synthetic oligonucleotide
  Sense strand starting at position 2128 of SEQ ID NO: 1560784
uucuuauuauucgagacag

SEQ ID NO: 1624100 - RNA, 19 nt, Artificial Sequence
  Description of Artificial Sequence: Synthetic oligonucleotide
  Antisense strand to SEQ ID NO: 1624099
cugucucgaauaauaagaa

SEQ ID NO: 1624101 - RNA, 19 nt, Artificial Sequence
  Description of Artificial Sequence: Synthetic oligonucleotide
  Sense strand starting at position 2717 of SEQ ID NO: 1560784
cuguguugcuggucuggau

SEQ ID NO: 1624102 - RNA, 19 nt, Artificial Sequence
  Description of Artificial Sequence: Synthetic oligonucleotide
  Antisense strand to SEQ ID NO: 1624101
auccagaccagcaacacag

SEQ ID NO: 1624103 - RNA, 19 nt, Artificial Sequence
  Description of Artificial Sequence: Synthetic oligonucleotide
  Sense strand starting at position 2735 of SEQ ID NO: 1560784
ucuggaucuccuggacuca

SEQ ID NO: 1624104 - RNA, 19 nt, Artificial Sequence
  Description of Artificial Sequence: Synthetic oligonucleotide
  Antisense strand to SEQ ID NO: 1624103
ugaguccaggagauccaga

SEQ ID NO: 1624105 - RNA, 19 nt, Artificial Sequence
  Description of Artificial Sequence: Synthetic oligonucleotide
  Sense strand starting at position 2828 of SEQ ID NO: 1560784
uuaaguuucuuguaagcga

SEQ ID NO: 1624106 - RNA, 19 nt, Artificial Sequence
  Description of Artificial Sequence: Synthetic oligonucleotide
  Antisense strand to SEQ ID NO: 1624105
ucgcuuacaagaaacuuaa

SEQ ID NO: 1624107 - RNA, 19 nt, Artificial Sequence
  Description of Artificial Sequence: Synthetic oligonucleotide
  Sense strand starting at position 2831 of SEQ ID NO: 1560784
aguuucuuguaagcgagau

SEQ ID NO: 1624108 - RNA, 19 nt, Artificial Sequence
  Description of Artificial Sequence: Synthetic oligonucleotide
  Antisense strand to SEQ ID NO: 1624107
aucucgcuuacaagaaacu

SEQ ID NO: 1624109 - RNA, 19 nt, Artificial Sequence
  Description of Artificial Sequence: Synthetic oligonucleotide
  Sense strand starting at position 2832 of SEQ ID NO: 1560784
guuucuuguaagcgagaug

SEQ ID NO: 1624110 - RNA, 19 nt, Artificial Sequence
  Description of Artificial Sequence: Synthetic oligonucleotide
  Antisense strand to SEQ ID NO: 1624109
caucucgcuuacaagaaac

SEQ ID NO: 1624111 - RNA, 19 nt, Artificial Sequence
  Description of Artificial Sequence: Synthetic oligonucleotide
  Sense strand starting at position 2833 of SEQ ID NO: 1560784
uuucuuguaagcgagaugu

SEQ ID NO: 1624112 - RNA, 19 nt, Artificial Sequence
  Description of Artificial Sequence: Synthetic oligonucleotide
  Antisense strand to SEQ ID NO: 1624111
acaucucgcuuacaagaaa

SEQ ID NO: 1624113 - RNA, 19 nt, Artificial Sequence
  Description of Artificial Sequence: Synthetic oligonucleotide
  Sense strand starting at position 2835 of SEQ ID NO: 1560784
ucuuguaagcgagaugugu

SEQ ID NO: 1624114 - RNA, 19 nt, Artificial Sequence
  Description of Artificial Sequence: Synthetic oligonucleotide
  Antisense strand to SEQ ID NO: 1624113
acacaucucgcuuacaaga

SEQ ID NO: 1624115 - RNA, 19 nt, Artificial Sequence
  Description of Artificial Sequence: Synthetic oligonucleotide
  Sense strand starting at position 2920 of SEQ ID NO: 1560784
ggugucuaccucugucaca

SEQ ID NO: 1624116 - RNA, 19 nt, Artificial Sequence
  Description of Artificial Sequence: Synthetic oligonucleotide
  Antisense strand to SEQ ID NO: 1624115
ugugacagagguagacacc

SEQ ID NO: 1624117 - RNA, 19 nt, Artificial Sequence
  Description of Artificial Sequence: Synthetic oligonucleotide
  Sense strand starting at position 3247 of SEQ ID NO: 1560784
cggcauucguguucagaac

SEQ ID NO: 1624118 - RNA, 19 nt, Artificial Sequence
  Description of Artificial Sequence: Synthetic oligonucleotide
  Antisense strand to SEQ ID NO: 1624117
guucugaacacgaaugccg

SEQ ID NO: 1624119 - RNA, 19 nt, Artificial Sequence
  Description of Artificial Sequence: Synthetic oligonucleotide
  Sense strand starting at position 3297 of SEQ ID NO: 1560784
gaccgaguucguuacuuug

SEQ ID NO: 1624120 - RNA, 19 nt, Artificial Sequence
  Description of Artificial Sequence: Synthetic oligonucleotide
  Antisense strand to SEQ ID NO: 1624119
caaaguaacgaacucgguc

SEQ ID NO: 1624121 - RNA, 19 nt, Artificial Sequence
  Description of Artificial Sequence: Synthetic oligonucleotide
  Sense strand starting at position 3299 of SEQ ID NO: 1560784
ccgaguucguuacuuuguu

SEQ ID NO: 1624122 - RNA, 19 nt, Artificial Sequence
  Description of Artificial Sequence: Synthetic oligonucleotide
  Antisense strand to SEQ ID NO: 1624121
aacaaaguaacgaacucgg

SEQ ID NO: 1624123 - RNA, 19 nt, Artificial Sequence
  Description of Artificial Sequence: Synthetic oligonucleotide
  Sense strand starting at position 3303 of SEQ ID NO: 1560784
guucguuacuuuguuggaa

SEQ ID NO: 1624124 - RNA, 19 nt, Artificial Sequence
  Description of Artificial Sequence: Synthetic oligonucleotide
  Antisense strand to SEQ ID NO: 1624123
uuccaacaaaguaacgaac

SEQ ID NO: 1624125 - RNA, 19 nt, Artificial Sequence
  Description of Artificial Sequence: Synthetic oligonucleotide
  Sense strand starting at position 3404 of SEQ ID NO: 1560784
ccucccuauuucgcagaua

SEQ ID NO: 1624126 - RNA, 19 nt, Artificial Sequence
  Description of Artificial Sequence: Synthetic oligonucleotide
  Antisense strand to SEQ ID NO: 1624125
uaucugcgaaauagggagg

SEQ ID NO: 1624127 - RNA, 19 nt, Artificial Sequence
  Description of Artificial Sequence: Synthetic oligonucleotide
  Sense strand starting at position 3405 of SEQ ID NO: 1560784
cucccuauuucgcagauau

SEQ ID NO: 1624128 - RNA, 19 nt, Artificial Sequence
  Description of Artificial Sequence: Synthetic oligonucleotide
  Antisense strand to SEQ ID NO: 1624127
auaucugcgaaauagggag

SEQ ID NO: 1624129 - RNA, 19 nt, Artificial Sequence
  Description of Artificial Sequence: Synthetic oligonucleotide
  Sense strand starting at position 3415 of SEQ ID NO: 1560784
cgcagauaucccgagauua

SEQ ID NO: 1624130 - RNA, 19 nt, Artificial Sequence
  Description of Artificial Sequence: Synthetic oligonucleotide
  Antisense strand to SEQ ID NO: 1624129
uaaucucgggauaucugcg

SEQ ID NO: 1624131 - RNA, 19 nt, Artificial Sequence
  Description of Artificial Sequence: Synthetic oligonucleotide
  Sense strand starting at position 3453 of SEQ ID NO: 1560784
gaggaucagguauguuuag

SEQ ID NO: 1624132 - RNA, 19 nt, Artificial Sequence
  Description of Artificial Sequence: Synthetic oligonucleotide
  Antisense strand to SEQ ID NO: 1624131
cuaaacauaccugauccuc

SEQ ID NO: 1624133 - RNA, 19 nt, Artificial Sequence
  Description of Artificial Sequence: Synthetic oligonucleotide
  Sense strand starting at position 3454 of SEQ ID NO: 1560784
aggaucagguauguuuaga

SEQ ID NO: 1624134 - RNA, 19 nt, Artificial Sequence
  Description of Artificial Sequence: Synthetic oligonucleotide
  Antisense strand to SEQ ID NO: 1624133
ucuaaacauaccugauccu

SEQ ID NO: 1624135 - RNA, 19 nt, Artificial Sequence
  Description of Artificial Sequence: Synthetic oligonucleotide
  Sense strand starting at position 3459 of SEQ ID NO: 1560784
cagguauguuuagagauug

SEQ ID NO: 1624136 - RNA, 19 nt, Artificial Sequence
  Description of Artificial Sequence: Synthetic oligonucleotide
  Antisense strand to SEQ ID NO: 1624135
caaucucuaaacauaccug

SEQ ID NO: 1624137 - RNA, 19 nt, Artificial Sequence
  Description of Artificial Sequence: Synthetic oligonucleotide
  Sense strand starting at position 3465 of SEQ ID NO: 1560784
uguuuagagauuggccaga

SEQ ID NO: 1624138 - RNA, 19 nt, Artificial Sequence
  Description of Artificial Sequence: Synthetic oligonucleotide
  Antisense strand to SEQ ID NO: 1624137
ucuggccaaucucuaaaca

SEQ ID NO: 1624139 - RNA, 19 nt, Artificial Sequence
  Description of Artificial Sequence: Synthetic oligonucleotide
  Sense strand starting at position 3467 of SEQ ID NO: 1560784
uuuagagauuggccagaga

SEQ ID NO: 1624140 - RNA, 19 nt, Artificial Sequence
  Description of Artificial Sequence: Synthetic oligonucleotide
  Antisense strand to SEQ ID NO: 1624139
ucucuggccaaucucuaaa

SEQ ID NO: 1624141 - RNA, 19 nt, Artificial Sequence
  Description of Artificial Sequence: Synthetic oligonucleotide
  Sense strand starting at position 3537 of SEQ ID NO: 1560784
gagaacaagucucccggau

SEQ ID NO: 1624142 - RNA, 19 nt, Artificial Sequence
  Description of Artificial Sequence: Synthetic oligonucleotide
  Antisense strand to SEQ ID NO: 1624141
auccgggagacuuguucuc

SEQ ID NO: 1624143 - RNA, 19 nt, Artificial Sequence
  Description of Artificial Sequence: Synthetic oligonucleotide
  Sense strand starting at position 3638 of SEQ ID NO: 1560784
gcuggagaauuagauauuu

SEQ ID NO: 1624144 - RNA, 19 nt, Artificial Sequence
  Description of Artificial Sequence: Synthetic oligonucleotide
  Antisense strand to SEQ ID NO: 1624143
aaauaucuaauucuccagc

SEQ ID NO: 1624145 - RNA, 19 nt, Artificial Sequence
  Description of Artificial Sequence: Synthetic oligonucleotide
  Sense strand starting at position 90 of SEQ ID NO: 1560785
ccuguuuagaggcgggauu

SEQ ID NO: 1624146 - RNA, 19 nt, Artificial Sequence
  Description of Artificial Sequence: Synthetic oligonucleotide
  Antisense strand to SEQ ID NO: 1624145
aaucccgccucuaaacagg

SEQ ID NO: 1624147 - RNA, 19 nt, Artificial Sequence
  Description of Artificial Sequence: Synthetic oligonucleotide
  Sense strand starting at position 101 of SEQ ID NO: 1560785
gcgggauugagaggugaag

SEQ ID NO: 1624148 - RNA, 19 nt, Artificial Sequence
  Description of Artificial Sequence: Synthetic oligonucleotide
  Antisense strand to SEQ ID NO: 1624147
cuucaccucucaaucccgc

SEQ ID NO: 1624149 - RNA, 19 nt, Artificial Sequence
  Description of Artificial Sequence: Synthetic oligonucleotide
  Sense strand starting at position 281 of SEQ ID NO: 1560785
caaucagugcucugucuag

SEQ ID NO: 1624150 - RNA, 19 nt, Artificial Sequence
  Description of Artificial Sequence: Synthetic oligonucleotide
  Antisense strand to SEQ ID NO: 1624149
cuagacagagcacugauug

SEQ ID NO: 1624151 - RNA, 19 nt, Artificial Sequence
  Description of Artificial Sequence: Synthetic oligonucleotide
  Sense strand starting at position 288 of SEQ ID NO: 1560785
ugcucugucuagcuaaaga

SEQ ID NO: 1624152 - RNA, 19 nt, Artificial Sequence
  Description of Artificial Sequence: Synthetic oligonucleotide
  Antisense strand to SEQ ID NO: 1624151
ucuuuagcuagacagagca

SEQ ID NO: 1624153 - RNA, 19 nt, Artificial Sequence
  Description of Artificial Sequence: Synthetic oligonucleotide
  Sense strand starting at position 942 of SEQ ID NO: 1560785
ggaucauauuaagucuguu

SEQ ID NO: 1624154 - RNA, 19 nt, Artificial Sequence
  Description of Artificial Sequence: Synthetic oligonucleotide
  Antisense strand to SEQ ID NO: 1624153
aacagacuuaauaugaucc

SEQ ID NO: 1624155 - RNA, 19 nt, Artificial Sequence
  Description of Artificial Sequence: Synthetic oligonucleotide
  Sense strand starting at position 950 of SEQ ID NO: 1560785
uuaagucuguucuccaaga

SEQ ID NO: 1624156 - RNA, 19 nt, Artificial Sequence
  Description of Artificial Sequence: Synthetic oligonucleotide
  Antisense strand to SEQ ID NO: 1624155
ucuuggagaacagacuuaa

SEQ ID NO: 1624157 - RNA, 19 nt, Artificial Sequence
  Description of Artificial Sequence: Synthetic oligonucleotide
  Sense strand starting at position 989 of SEQ ID NO: 1560785
ggagauguacuaugucuac

SEQ ID NO: 1624158 - RNA, 19 nt, Artificial Sequence
  Description of Artificial Sequence: Synthetic oligonucleotide
  Antisense strand to SEQ ID NO: 1624157
guagacauaguacaucucc

SEQ ID NO: 1624159 - RNA, 19 nt, Artificial Sequence
  Description of Artificial Sequence: Synthetic oligonucleotide
  Sense strand starting at position 993 of SEQ ID NO: 1560785
auguacuaugucuacacau

SEQ ID NO: 1624160 - RNA, 19 nt, Artificial Sequence
  Description of Artificial Sequence: Synthetic oligonucleotide
  Antisense strand to SEQ ID NO: 1624159
auguguagacauaguacau

SEQ ID NO: 1624161 - RNA, 19 nt, Artificial Sequence
  Description of Artificial Sequence: Synthetic oligonucleotide
  Sense strand starting at position 995 of SEQ ID NO: 1560785
guacuaugucuacacaugu

SEQ ID NO: 1624162 - RNA, 19 nt, Artificial Sequence
  Description of Artificial Sequence: Synthetic oligonucleotide
  Antisense strand to SEQ ID NO: 1624161
acauguguagacauaguac

SEQ ID NO: 1624163 - RNA, 19 nt, Artificial Sequence
  Description of Artificial Sequence: Synthetic oligonucleotide
  Sense strand starting at position 1114 of SEQ ID NO: 1560785
agagcauggcuuuggucua

SEQ ID NO: 1624164 - RNA, 19 nt, Artificial Sequence
  Description of Artificial Sequence: Synthetic oligonucleotide
  Antisense strand to SEQ ID NO: 1624163
uagaccaaagccaugcucu

SEQ ID NO: 1624165 - RNA, 19 nt, Artificial Sequence
  Description of Artificial Sequence: Synthetic oligonucleotide
  Sense strand starting at position 2280 of SEQ ID NO: 1560785
aaaggaggaccgcaguauu

SEQ ID NO: 1624166 - RNA, 19 nt, Artificial Sequence
  Description of Artificial Sequence: Synthetic oligonucleotide
  Antisense strand to SEQ ID NO: 1624165
aauacugcgguccuccuuu

SEQ ID NO: 1624167 - RNA, 19 nt, Artificial Sequence
  Description of Artificial Sequence: Synthetic oligonucleotide
  Sense strand starting at position 2342 of SEQ ID NO: 1560785
gcauaugacuugccauggu

SEQ ID NO: 1624168 - RNA, 19 nt, Artificial Sequence
  Description of Artificial Sequence: Synthetic oligonucleotide
  Antisense strand to SEQ ID NO: 1624167
accauggcaagucauaugc

SEQ ID NO: 1624169 - RNA, 19 nt, Artificial Sequence
  Description of Artificial Sequence: Synthetic oligonucleotide
  Sense strand starting at position 2345 of SEQ ID NO: 1560785
uaugacuugccaugguaaa

SEQ ID NO: 1624170 - RNA, 19 nt, Artificial Sequence
  Description of Artificial Sequence: Synthetic oligonucleotide
  Antisense strand to SEQ ID NO: 1624169
uuuaccauggcaagucaua

SEQ ID NO: 1624171 - RNA, 19 nt, Artificial Sequence
  Description of Artificial Sequence: Synthetic oligonucleotide
  Sense strand starting at position 2417 of SEQ ID NO: 1560785
cuaggacuuucugcuuuaa

SEQ ID NO: 1624172 - RNA, 19 nt, Artificial Sequence
  Description of Artificial Sequence: Synthetic oligonucleotide
  Antisense strand to SEQ ID NO: 1624171
uuaaagcagaaaguccuag

SEQ ID NO: 1624173 - RNA, 19 nt, Artificial Sequence
  Description of Artificial Sequence: Synthetic oligonucleotide
  Sense strand starting at position 2419 of SEQ ID NO: 1560785
aggacuuucugcuuuaaac

SEQ ID NO: 1624174 - RNA, 19 nt, Artificial Sequence
  Description of Artificial Sequence: Synthetic oligonucleotide
  Antisense strand to SEQ ID NO: 1624173
guuuaaagcagaaaguccu

SEQ ID NO: 1624175 - RNA, 19 nt, Artificial Sequence
  Description of Artificial Sequence: Synthetic oligonucleotide
  Sense strand starting at position 2580 of SEQ ID NO: 1560785
gcacaccuugaaugugaaa

SEQ ID NO: 1624176 - RNA, 19 nt, Artificial Sequence
  Description of Artificial Sequence: Synthetic oligonucleotide
  Antisense strand to SEQ ID NO: 1624175
uuucacauucaaggugugc

SEQ ID NO: 1624177 - RNA, 19 nt, Artificial Sequence
  Description of Artificial Sequence: Synthetic oligonucleotide
  Sense strand starting at position 2592 of SEQ ID NO: 1560785
ugugaaagguacucccaga

SEQ ID NO: 1624178 - RNA, 19 nt, Artificial Sequence
  Description of Artificial Sequence: Synthetic oligonucleotide
  Antisense strand to SEQ ID NO: 1624177
ucugggaguaccuuucaca

SEQ ID NO: 1624179 - RNA, 19 nt, Artificial Sequence
  Description of Artificial Sequence: Synthetic oligonucleotide
  Sense strand starting at position 2607 of SEQ ID NO: 1560785
cagaguaauuucucucgug

SEQ ID NO: 1624180 - RNA, 19 nt, Artificial Sequence
  Description of Artificial Sequence: Synthetic oligonucleotide
  Antisense strand to SEQ ID NO: 1624179
cacgagagaaauuacucug

SEQ ID NO: 1624181 - RNA, 19 nt, Artificial Sequence
  Description of Artificial Sequence: Synthetic oligonucleotide
  Sense strand starting at position 2608 of SEQ ID NO: 1560785
agaguaauuucucucgugu

SEQ ID NO: 1624182 - RNA, 19 nt, Artificial Sequence
  Description of Artificial Sequence: Synthetic oligonucleotide
  Antisense strand to SEQ ID NO: 1624181
acacgagagaaauuacucu

SEQ ID NO: 1624183 - RNA, 19 nt, Artificial Sequence
  Description of Artificial Sequence: Synthetic oligonucleotide
  Sense strand starting at position 2662 of SEQ ID NO: 1560785
ggccuuaggugucuuagga

SEQ ID NO: 1624184 - RNA, 19 nt, Artificial Sequence
  Description of Artificial Sequence: Synthetic oligonucleotide
  Antisense strand to SEQ ID NO: 1624183
uccuaagacaccuaaggcc

SEQ ID NO: 1624185 - RNA, 19 nt, Artificial Sequence
  Description of Artificial Sequence: Synthetic oligonucleotide
  Sense strand starting at position 2698 of SEQ ID NO: 1560785
uuugaugggagauguuuaa

SEQ ID NO: 1624186 - RNA, 19 nt, Artificial Sequence
  Description of Artificial Sequence: Synthetic oligonucleotide
  Antisense strand to SEQ ID NO: 1624185
uuaaacaucucccaucaaa

SEQ ID NO: 1624187 - RNA, 19 nt, Artificial Sequence
  Description of Artificial Sequence: Synthetic oligonucleotide
  Sense strand starting at position 2710 of SEQ ID NO: 1560785
uguuuaaucugggccucca

SEQ ID NO: 1624188 - RNA, 19 nt, Artificial Sequence
  Description of Artificial Sequence: Synthetic oligonucleotide
  Antisense strand to SEQ ID NO: 1624187
uggaggcccagauuaaaca

SEQ ID NO: 1624189 - RNA, 19 nt, Artificial Sequence
  Description of Artificial Sequence: Synthetic oligonucleotide
  Sense strand starting at position 2747 of SEQ ID NO: 1560785
ccuuguuagugucuagaag

SEQ ID NO: 1624190 - RNA, 19 nt, Artificial Sequence
  Description of Artificial Sequence: Synthetic oligonucleotide
  Antisense strand to SEQ ID NO: 1624189
cuucuagacacuaacaagg

SEQ ID NO: 1624191 - RNA, 19 nt, Artificial Sequence
  Description of Artificial Sequence: Synthetic oligonucleotide
  Sense strand starting at position 2748 of SEQ ID NO: 1560785
cuuguuagugucuagaaga

SEQ ID NO: 1624192 - RNA, 19 nt, Artificial Sequence
  Description of Artificial Sequence: Synthetic oligonucleotide
  Antisense strand to SEQ ID NO: 1624191
ucuucuagacacuaacaag

SEQ ID NO: 1624193 - RNA, 19 nt, Artificial Sequence
  Description of Artificial Sequence: Synthetic oligonucleotide
  Sense strand starting at position 2773 of SEQ ID NO: 1560785
ccuccaauagcaggauuau

SEQ ID NO: 1624194 - RNA, 19 nt, Artificial Sequence
  Description of Artificial Sequence: Synthetic oligonucleotide
  Antisense strand to SEQ ID NO: 1624193
auaauccugcuauuggagg

SEQ ID NO: 1624195 - RNA, 19 nt, Artificial Sequence
  Description of Artificial Sequence: Synthetic oligonucleotide
  Sense strand starting at position 2958 of SEQ ID NO: 1560785
guggguuauuuccugggua

SEQ ID NO: 1624196 - RNA, 19 nt, Artificial Sequence
  Description of Artificial Sequence: Synthetic oligonucleotide
  Antisense strand to SEQ ID NO: 1624195
uacccaggaaauaacccac

SEQ ID NO: 1624197 - RNA, 19 nt, Artificial Sequence
  Description of Artificial Sequence: Synthetic oligonucleotide
  Sense strand starting at position 3377 of SEQ ID NO: 1560785
gcacucaggugauuaaagu

SEQ ID NO: 1624198 - RNA, 19 nt, Artificial Sequence
  Description of Artificial Sequence: Synthetic oligonucleotide
  Antisense strand to SEQ ID NO: 1624197
acuuuaaucaccugagugc

SEQ ID NO: 1624199 - RNA, 19 nt, Artificial Sequence
  Description of Artificial Sequence: Synthetic oligonucleotide
  Sense strand starting at position 3445 of SEQ ID NO: 1560785
uuaguaguuacuggguaca

SEQ ID NO: 1624200 - RNA, 19 nt, Artificial Sequence
  Description of Artificial Sequence: Synthetic oligonucleotide
  Antisense strand to SEQ ID NO: 1624199
uguacccaguaacuacuaa

SEQ ID NO: 1624201 - RNA, 19 nt, Artificial Sequence
  Description of Artificial Sequence: Synthetic oligonucleotide
  Sense strand starting at position 3447 of SEQ ID NO: 1560785
aguaguuacuggguacagu

SEQ ID NO: 1624202 - RNA, 19 nt, Artificial Sequence
  Description of Artificial Sequence: Synthetic oligonucleotide
  Antisense strand to SEQ ID NO: 1624201
acuguacccaguaacuacu

SEQ ID NO: 1624203 - RNA, 19 nt, Artificial Sequence
  Description of Artificial Sequence: Synthetic oligonucleotide
  Sense strand starting at position 3476 of SEQ ID NO: 1560785
cuaggaacuuuauuaguau

SEQ ID NO: 1624204 - RNA, 19 nt, Artificial Sequence
  Description of Artificial Sequence: Synthetic oligonucleotide
  Antisense strand to SEQ ID NO: 1624203
auacuaauaaaguuccuag

SEQ ID NO: 1624205 - RNA, 19 nt, Artificial Sequence
  Description of Artificial Sequence: Synthetic oligonucleotide
  Sense strand starting at position 3490 of SEQ ID NO: 1560785
aguauuaguuguguaauuc

SEQ ID NO: 1624206 - RNA, 19 nt, Artificial Sequence
  Description of Artificial Sequence: Synthetic oligonucleotide
  Antisense strand to SEQ ID NO: 1624205
gaauuacacaacuaauacu

SEQ ID NO: 1624207 - RNA, 19 nt, Artificial Sequence
  Description of Artificial Sequence: Synthetic oligonucleotide
  Sense strand starting at position 3491 of SEQ ID NO: 1560785
guauuaguuguguaauucu

SEQ ID NO: 1624208 - RNA, 19 nt, Artificial Sequence
  Description of Artificial Sequence: Synthetic oligonucleotide
  Antisense strand to SEQ ID NO: 1624207
agaauuacacaacuaauac

SEQ ID NO: 1624209 - RNA, 19 nt, Artificial Sequence
  Description of Artificial Sequence: Synthetic oligonucleotide
  Sense strand starting at position 3494 of SEQ ID NO: 1560785
uuaguuguguaauucuuac

SEQ ID NO: 1624210 - RNA, 19 nt, Artificial Sequence
  Description of Artificial Sequence: Synthetic oligonucleotide
  Antisense strand to SEQ ID NO: 1624209
guaagaauuacacaacuaa

SEQ ID NO: 1624211 - RNA, 19 nt, Artificial Sequence
  Description of Artificial Sequence: Synthetic oligonucleotide
  Sense strand starting at position 3574 of SEQ ID NO: 1560785
gauuaagggucuuaagaac

SEQ ID NO: 1624212 - RNA, 19 nt, Artificial Sequence
  Description of Artificial Sequence: Synthetic oligonucleotide
  Antisense strand to SEQ ID NO: 1624211
guucuuaagacccuuaauc

SEQ ID NO: 1624213 - RNA, 19 nt, Artificial Sequence
  Description of Artificial Sequence: Synthetic oligonucleotide
  Sense strand starting at position 3669 of SEQ ID NO: 1560785
acagaagcugguuacucau

SEQ ID NO: 1624214 - RNA, 19 nt, Artificial Sequence
  Description of Artificial Sequence: Synthetic oligonucleotide
  Antisense strand to SEQ ID NO: 1624213
augaguaaccagcuucugu

SEQ ID NO: 1624215 - RNA, 19 nt, Artificial Sequence
  Description of Artificial Sequence: Synthetic oligonucleotide
  Sense strand starting at position 3676 of SEQ ID NO: 1560785
cugguuacucaugagugag

SEQ ID NO: 1624216 - RNA, 19 nt, Artificial Sequence
  Description of Artificial Sequence: Synthetic oligonucleotide
  Antisense strand to SEQ ID NO: 1624215
cucacucaugaguaaccag

SEQ ID NO: 1624217 - RNA, 19 nt, Artificial Sequence
  Description of Artificial Sequence: Synthetic oligonucleotide
  Sense strand starting at position 3678 of SEQ ID NO: 1560785
gguuacucaugagugagau

SEQ ID NO: 1624218 - RNA, 19 nt, Artificial Sequence
  Description of Artificial Sequence: Synthetic oligonucleotide
  Antisense strand to SEQ ID NO: 1624217
aucucacucaugaguaacc

SEQ ID NO: 1624219 - RNA, 19 nt, Artificial Sequence
  Description of Artificial Sequence: Synthetic oligonucleotide
  Sense strand starting at position 3679 of SEQ ID NO: 1560785
guuacucaugagugagaug

SEQ ID NO: 1624220 - RNA, 19 nt, Artificial Sequence
  Description of Artificial Sequence: Synthetic oligonucleotide
  Antisense strand to SEQ ID NO: 1624219
caucucacucaugaguaac

SEQ ID NO: 1624221 - RNA, 19 nt, Artificial Sequence
  Description of Artificial Sequence: Synthetic oligonucleotide
  Sense strand starting at position 3886 of SEQ ID NO: 1560785
ugcuacuacgccugacuaa

SEQ ID NO: 1624222 - RNA, 19 nt, Artificial Sequence
  Description of Artificial Sequence: Synthetic oligonucleotide
  Antisense strand to SEQ ID NO: 1624221
uuagucaggcguaguagca

SEQ ID NO: 1624223 - RNA, 19 nt, Artificial Sequence
  Description of Artificial Sequence: Synthetic oligonucleotide
  Sense strand starting at position 3887 of SEQ ID NO: 1560785
gcuacuacgccugacuaau

SEQ ID NO: 1624224 - RNA, 19 nt, Artificial Sequence
  Description of Artificial Sequence: Synthetic oligonucleotide
  Antisense strand to SEQ ID NO: 1624223
auuagucaggcguaguagc

SEQ ID NO: 1624225 - RNA, 19 nt, Artificial Sequence
  Description of Artificial Sequence: Synthetic oligonucleotide
  Sense strand starting at position 253 of SEQ ID NO: 1560786
cagacaugguucugcauac

SEQ ID NO: 1624226 - RNA, 19 nt, Artificial Sequence
  Description of Artificial Sequence: Synthetic oligonucleotide
  Antisense strand to SEQ ID NO: 1624225
guaugcagaaccaugucug

SEQ ID NO: 1624227 - RNA, 19 nt, Artificial Sequence
  Description of Artificial Sequence: Synthetic oligonucleotide
  Sense strand starting at position 257 of SEQ ID NO: 1560786
caugguucugcauacgcaa

SEQ ID NO: 1624228 - RNA, 19 nt, Artificial Sequence
  Description of Artificial Sequence: Synthetic oligonucleotide
  Antisense strand to SEQ ID NO: 1624227
uugcguaugcagaaccaug

SEQ ID NO: 1624229 - RNA, 19 nt, Artificial Sequence
  Description of Artificial Sequence: Synthetic oligonucleotide
  Sense strand starting at position 268 of SEQ ID NO: 1560786
auacgcaaccacugucaua

SEQ ID NO: 1624230 - RNA, 19 nt, Artificial Sequence
  Description of Artificial Sequence: Synthetic oligonucleotide
  Antisense strand to SEQ ID NO: 1624229
uaugacagugguugcguau

SEQ ID NO: 1624231 - RNA, 19 nt, Artificial Sequence
  Description of Artificial Sequence: Synthetic oligonucleotide
  Sense strand starting at position 376 of SEQ ID NO: 1560786
gugugucacucacguauau

SEQ ID NO: 1624232 - RNA, 19 nt, Artificial Sequence
  Description of Artificial Sequence: Synthetic oligonucleotide
  Antisense strand to SEQ ID NO: 1624231
auauacgugagugacacac

SEQ ID NO: 1624233 - RNA, 19 nt, Artificial Sequence
  Description of Artificial Sequence: Synthetic oligonucleotide
  Sense strand starting at position 378 of SEQ ID NO: 1560786
gugucacucacguauauaa

SEQ ID NO: 1624234 - RNA, 19 nt, Artificial Sequence
  Description of Artificial Sequence: Synthetic oligonucleotide
  Antisense strand to SEQ ID NO: 1624233
uuauauacgugagugacac

SEQ ID NO: 1624235 - RNA, 19 nt, Artificial Sequence
  Description of Artificial Sequence: Synthetic oligonucleotide
  Sense strand starting at position 415 of SEQ ID NO: 1560786
cuauaaacauugucaguca

SEQ ID NO: 1624236 - RNA, 19 nt, Artificial Sequence
  Description of Artificial Sequence: Synthetic oligonucleotide
  Antisense strand to SEQ ID NO: 1624235
ugacugacaauguuuauag

SEQ ID NO: 1624237 - RNA, 19 nt, Artificial Sequence
  Description of Artificial Sequence: Synthetic oligonucleotide
  Sense strand starting at position 560 of SEQ ID NO: 1560786
aguuauaguuaccgaggca

SEQ ID NO: 1624238 - RNA, 19 nt, Artificial Sequence
  Description of Artificial Sequence: Synthetic oligonucleotide
  Antisense strand to SEQ ID NO: 1624237
ugccucgguaacuauaacu

SEQ ID NO: 1624239 - RNA, 19 nt, Artificial Sequence
  Description of Artificial Sequence: Synthetic oligonucleotide
  Sense strand starting at position 561 of SEQ ID NO: 1560786
guuauaguuaccgaggcau

SEQ ID NO: 1624240 - RNA, 19 nt, Artificial Sequence
  Description of Artificial Sequence: Synthetic oligonucleotide
  Antisense strand to SEQ ID NO: 1624239
augccucgguaacuauaac

SEQ ID NO: 1624241 - RNA, 19 nt, Artificial Sequence
  Description of Artificial Sequence: Synthetic oligonucleotide
  Sense strand starting at position 563 of SEQ ID NO: 1560786
uauaguuaccgaggcauac

SEQ ID NO: 1624242 - RNA, 19 nt, Artificial Sequence
  Description of Artificial Sequence: Synthetic oligonucleotide
  Antisense strand to SEQ ID NO: 1624241
guaugccucgguaacuaua

SEQ ID NO: 1624243 - RNA, 19 nt, Artificial Sequence
  Description of Artificial Sequence: Synthetic oligonucleotide
  Sense strand starting at position 712 of SEQ ID NO: 1560786
cacagauacuagggucaca

SEQ ID NO: 1624244 - RNA, 19 nt, Artificial Sequence
  Description of Artificial Sequence: Synthetic oligonucleotide
  Antisense strand to SEQ ID NO: 1624243
ugugacccuaguaucugug

SEQ ID NO: 1624245 - RNA, 19 nt, Artificial Sequence
  Description of Artificial Sequence: Synthetic oligonucleotide
  Sense strand starting at position 1160 of SEQ ID NO: 1560786
gccugaaauuguccuuauu

SEQ ID NO: 1624246 - RNA, 19 nt, Artificial Sequence
  Description of Artificial Sequence: Synthetic oligonucleotide
  Antisense strand to SEQ ID NO: 1624245
aauaaggacaauuucaggc

SEQ ID NO: 1624247 - RNA, 19 nt, Artificial Sequence
  Description of Artificial Sequence: Synthetic oligonucleotide
  Sense strand starting at position 1385 of SEQ ID NO: 1560786
ggcaguuguugugcugaga

SEQ ID NO: 1624248 - RNA, 19 nt, Artificial Sequence
  Description of Artificial Sequence: Synthetic oligonucleotide
  Antisense strand to SEQ ID NO: 1624247
ucucagcacaacaacugcc

SEQ ID NO: 1624249 - RNA, 19 nt, Artificial Sequence
  Description of Artificial Sequence: Synthetic oligonucleotide
  Sense strand starting at position 1424 of SEQ ID NO: 1560786
uagggauugugucuggaau

SEQ ID NO: 1624250 - RNA, 19 nt, Artificial Sequence
  Description of Artificial Sequence: Synthetic oligonucleotide
  Antisense strand to SEQ ID NO: 1624249
auuccagacacaaucccua

SEQ ID NO: 1624251 - RNA, 19 nt, Artificial Sequence
  Description of Artificial Sequence: Synthetic oligonucleotide
  Sense strand starting at position 1425 of SEQ ID NO: 1560786
agggauugugucuggaauc

SEQ ID NO: 1624252 - RNA, 19 nt, Artificial Sequence
  Description of Artificial Sequence: Synthetic oligonucleotide
  Antisense strand to SEQ ID NO: 1624251
gauuccagacacaaucccu

SEQ ID NO: 1624253 - RNA, 19 nt, Artificial Sequence
  Description of Artificial Sequence: Synthetic oligonucleotide
  Sense strand starting at position 1500 of SEQ ID NO: 1560786
cccaucuaguucuaggagu

SEQ ID NO: 1624254 - RNA, 19 nt, Artificial Sequence
  Description of Artificial Sequence: Synthetic oligonucleotide
  Antisense strand to SEQ ID NO: 1624253
acuccuagaacuagauggg

SEQ ID NO: 1624255 - RNA, 19 nt, Artificial Sequence
  Description of Artificial Sequence: Synthetic oligonucleotide
  Sense strand starting at position 1502 of SEQ ID NO: 1560786
caucuaguucuaggaguug

SEQ ID NO: 1624256 - RNA, 19 nt, Artificial Sequence
  Description of Artificial Sequence: Synthetic oligonucleotide
  Antisense strand to SEQ ID NO: 1624255
caacuccuagaacuagaug

SEQ ID NO: 1624257 - RNA, 19 nt, Artificial Sequence
  Description of Artificial Sequence: Synthetic oligonucleotide
  Sense strand starting at position 2066 of SEQ ID NO: 1560786
gccguauaugcagaaaggu

SEQ ID NO: 1624258 - RNA, 19 nt, Artificial Sequence
  Description of Artificial Sequence: Synthetic oligonucleotide
  Antisense strand to SEQ ID NO: 1624257
accuuucugcauauacggc

SEQ ID NO: 1624259 - RNA, 19 nt, Artificial Sequence
  Description of Artificial Sequence: Synthetic oligonucleotide
  Sense strand starting at position 2193 of SEQ ID NO: 1560786
ugagcaugccuaugaacau

SEQ ID NO: 1624260 - RNA, 19 nt, Artificial Sequence
  Description of Artificial Sequence: Synthetic oligonucleotide
  Antisense strand to SEQ ID NO: 1624259
auguucauaggcaugcuca

SEQ ID NO: 1624261 - RNA, 19 nt, Artificial Sequence
  Description of Artificial Sequence: Synthetic oligonucleotide
  Sense strand starting at position 2249 of SEQ ID NO: 1560786
ucccuuucccuccgugaca

SEQ ID NO: 1624262 - RNA, 19 nt, Artificial Sequence
  Description of Artificial Sequence: Synthetic oligonucleotide
  Antisense strand to SEQ ID NO: 1624261
ugucacggagggaaaggga

SEQ ID NO: 1624263 - RNA, 19 nt, Artificial Sequence
  Description of Artificial Sequence: Synthetic oligonucleotide
  Sense strand starting at position 2290 of SEQ ID NO: 1560786
cuccgcguccgaaagaguu

SEQ ID NO: 1624264 - RNA, 19 nt, Artificial Sequence
  Description of Artificial Sequence: Synthetic oligonucleotide
  Antisense strand to SEQ ID NO: 1624263
aacucuuucggacgcggag

SEQ ID NO: 1624265 - RNA, 19 nt, Artificial Sequence
  Description of Artificial Sequence: Synthetic oligonucleotide
  Sense strand starting at position 2296 of SEQ ID NO: 1560786
guccgaaagaguugcuucu

SEQ ID NO: 1624266 - RNA, 19 nt, Artificial Sequence
  Description of Artificial Sequence: Synthetic oligonucleotide
  Antisense strand to SEQ ID NO: 1624265
agaagcaacucuuucggac

SEQ ID NO: 1624267 - RNA, 19 nt, Artificial Sequence
  Description of Artificial Sequence: Synthetic oligonucleotide
  Sense strand starting at position 2456 of SEQ ID NO: 1560786
gcgcgaucgguucggcuuu

SEQ ID NO: 1624268 - RNA, 19 nt, Artificial Sequence
  Description of Artificial Sequence: Synthetic oligonucleotide
  Antisense strand to SEQ ID NO: 1624267
aaagccgaaccgaucgcgc

SEQ ID NO: 1624269 - RNA, 19 nt, Artificial Sequence
  Description of Artificial Sequence: Synthetic oligonucleotide
  Sense strand starting at position 2542 of SEQ ID NO: 1560786
acgccaauccuguggguuu

SEQ ID NO: 1624270 - RNA, 19 nt, Artificial Sequence
  Description of Artificial Sequence: Synthetic oligonucleotide
  Antisense strand to SEQ ID NO: 1624269
aaacccacaggauuggcgu

SEQ ID NO: 1624271 - RNA, 19 nt, Artificial Sequence
  Description of Artificial Sequence: Synthetic oligonucleotide
  Sense strand starting at position 2579 of SEQ ID NO: 1560786
gacauuagagcccauuagu

SEQ ID NO: 1624272 - RNA, 19 nt, Artificial Sequence
  Description of Artificial Sequence: Synthetic oligonucleotide
  Antisense strand to SEQ ID NO: 1624271
acuaaugggcucuaauguc

SEQ ID NO: 1624273 - RNA, 19 nt, Artificial Sequence
  Description of Artificial Sequence: Synthetic oligonucleotide
  Sense strand starting at position 2582 of SEQ ID NO: 1560786
auuagagcccauuaguaaa

SEQ ID NO: 1624274 - RNA, 19 nt, Artificial Sequence
  Description of Artificial Sequence: Synthetic oligonucleotide
  Antisense strand to SEQ ID NO: 1624273
uuuacuaaugggcucuaau

SEQ ID NO: 1624275 - RNA, 19 nt, Artificial Sequence
  Description of Artificial Sequence: Synthetic oligonucleotide
  Sense strand starting at position 2602 of SEQ ID NO: 1560786
gcgagguugccaggaguga

SEQ ID NO: 1624276 - RNA, 19 nt, Artificial Sequence
  Description of Artificial Sequence: Synthetic oligonucleotide
  Antisense strand to SEQ ID NO: 1624275
ucacuccuggcaaccucgc

SEQ ID NO: 1624277 - RNA, 19 nt, Artificial Sequence
  Description of Artificial Sequence: Synthetic oligonucleotide
  Sense strand starting at position 2728 of SEQ ID NO: 1560786
ggagguucccggcaacaga

SEQ ID NO: 1624278 - RNA, 19 nt, Artificial Sequence
  Description of Artificial Sequence: Synthetic oligonucleotide
  Antisense strand to SEQ ID NO: 1624277
ucuguugccgggaaccucc

SEQ ID NO: 1624279 - RNA, 19 nt, Artificial Sequence
  Description of Artificial Sequence: Synthetic oligonucleotide
  Sense strand starting at position 3065 of SEQ ID NO: 1560786
cccugaugagucugaucug

SEQ ID NO: 1624280 - RNA, 19 nt, Artificial Sequence
  Description of Artificial Sequence: Synthetic oligonucleotide
  Antisense strand to SEQ ID NO: 1624279
cagaucagacucaucaggg

SEQ ID NO: 1624281 - RNA, 19 nt, Artificial Sequence
  Description of Artificial Sequence: Synthetic oligonucleotide
  Sense strand starting at position 3068 of SEQ ID NO: 1560786
ugaugagucugaucugcau

SEQ ID NO: 1624282 - RNA, 19 nt, Artificial Sequence
  Description of Artificial Sequence: Synthetic oligonucleotide
  Antisense strand to SEQ ID NO: 1624281
augcagaucagacucauca

SEQ ID NO: 1624283 - RNA, 19 nt, Artificial Sequence
  Description of Artificial Sequence: Synthetic oligonucleotide
  Sense strand starting at position 3071 of SEQ ID NO: 1560786
ugagucugaucugcauaac

SEQ ID NO: 1624284 - RNA, 19 nt, Artificial Sequence
  Description of Artificial Sequence: Synthetic oligonucleotide
  Antisense strand to SEQ ID NO: 1624283
guuaugcagaucagacuca

SEQ ID NO: 1624285 - RNA, 19 nt, Artificial Sequence
  Description of Artificial Sequence: Synthetic oligonucleotide
  Sense strand starting at position 3074 of SEQ ID NO: 1560786
gucugaucugcauaacgac

SEQ ID NO: 1624286 - RNA, 19 nt, Artificial Sequence
  Description of Artificial Sequence: Synthetic oligonucleotide
  Antisense strand to SEQ ID NO: 1624285
gucguuaugcagaucagac

SEQ ID NO: 1624287 - RNA, 19 nt, Artificial Sequence
  Description of Artificial Sequence: Synthetic oligonucleotide
  Sense strand starting at position 3101 of SEQ ID NO: 1560786
gcccaaggcucccucaaau

SEQ ID NO: 1624288 - RNA, 19 nt, Artificial Sequence
  Description of Artificial Sequence: Synthetic oligonucleotide
  Antisense strand to SEQ ID NO: 1624287
auuugagggagccuugggc

SEQ ID NO: 1624289 - RNA, 19 nt, Artificial Sequence
  Description of Artificial Sequence: Synthetic oligonucleotide
  Sense strand starting at position 3110 of SEQ ID NO: 1560786
ucccucaaauguuggcaaa

SEQ ID NO: 1624290 - RNA, 19 nt, Artificial Sequence
  Description of Artificial Sequence: Synthetic oligonucleotide
  Antisense strand to SEQ ID NO: 1624289
uuugccaacauuugaggga

SEQ ID NO: 1624291 - RNA, 19 nt, Artificial Sequence
  Description of Artificial Sequence: Synthetic oligonucleotide
  Sense strand starting at position 3112 of SEQ ID NO: 1560786
ccucaaauguuggcaaaga

SEQ ID NO: 1624292 - RNA, 19 nt, Artificial Sequence
  Description of Artificial Sequence: Synthetic oligonucleotide
  Antisense strand to SEQ ID NO: 1624291
ucuuugccaacauuugagg

SEQ ID NO: 1624293 - RNA, 19 nt, Artificial Sequence
  Description of Artificial Sequence: Synthetic oligonucleotide
  Sense strand starting at position 3113 of SEQ ID NO: 1560786
cucaaauguuggcaaagau

SEQ ID NO: 1624294 - RNA, 19 nt, Artificial Sequence
  Description of Artificial Sequence: Synthetic oligonucleotide
  Antisense strand to SEQ ID NO: 1624293
aucuuugccaacauuugag

SEQ ID NO: 1624295 - RNA, 19 nt, Artificial Sequence
  Description of Artificial Sequence: Synthetic oligonucleotide
  Sense strand starting at position 3460 of SEQ ID NO: 1560786
ggugguagguguccuggaa

SEQ ID NO: 1624296 - RNA, 19 nt, Artificial Sequence
  Description of Artificial Sequence: Synthetic oligonucleotide
  Antisense strand to SEQ ID NO: 1624295
uuccaggacaccuaccacc

SEQ ID NO: 1624297 - RNA, 19 nt, Artificial Sequence
  Description of Artificial Sequence: Synthetic oligonucleotide
  Sense strand starting at position 3463 of SEQ ID NO: 1560786
gguagguguccuggaagag

SEQ ID NO: 1624298 - RNA, 19 nt, Artificial Sequence
  Description of Artificial Sequence: Synthetic oligonucleotide
  Antisense strand to SEQ ID NO: 1624297
cucuuccaggacaccuacc

SEQ ID NO: 1624299 - RNA, 19 nt, Artificial Sequence
  Description of Artificial Sequence: Synthetic oligonucleotide
  Sense strand starting at position 38 of SEQ ID NO: 1560787
gccaccuaucauggucaua

SEQ ID NO: 1624300 - RNA, 19 nt, Artificial Sequence
  Description of Artificial Sequence: Synthetic oligonucleotide
  Antisense strand to SEQ ID NO: 1624299
uaugaccaugauagguggc

SEQ ID NO: 1624301 - RNA, 19 nt, Artificial Sequence
  Description of Artificial Sequence: Synthetic oligonucleotide
  Sense strand starting at position 150 of SEQ ID NO: 1560787
agacaaguauguggccaua

SEQ ID NO: 1624302 - RNA, 19 nt, Artificial Sequence
  Description of Artificial Sequence: Synthetic oligonucleotide
  Antisense strand to SEQ ID NO: 1624301
uauggccacauacuugucu

SEQ ID NO: 1624303 - RNA, 19 nt, Artificial Sequence
  Description of Artificial Sequence: Synthetic oligonucleotide
  Sense strand starting at position 152 of SEQ ID NO: 1560787
acaaguauguggccauaua

SEQ ID NO: 1624304 - RNA, 19 nt, Artificial Sequence
  Description of Artificial Sequence: Synthetic oligonucleotide
  Antisense strand to SEQ ID NO: 1624303
uauauggccacauacuugu

SEQ ID NO: 1624305 - RNA, 19 nt, Artificial Sequence
  Description of Artificial Sequence: Synthetic oligonucleotide
  Sense strand starting at position 153 of SEQ ID NO: 1560787
caaguauguggccauauag

SEQ ID NO: 1624306 - RNA, 19 nt, Artificial Sequence
  Description of Artificial Sequence: Synthetic oligonucleotide
  Antisense strand to SEQ ID NO: 1624305
cuauauggccacauacuug

SEQ ID NO: 1624307 - RNA, 19 nt, Artificial Sequence
  Description of Artificial Sequence: Synthetic oligonucleotide
  Sense strand starting at position 257 of SEQ ID NO: 1560787
uuuaguuucccaugucaca

SEQ ID NO: 1624308 - RNA, 19 nt, Artificial Sequence
  Description of Artificial Sequence: Synthetic oligonucleotide
  Antisense strand to SEQ ID NO: 1624307
ugugacaugggaaacuaaa

SEQ ID NO: 1624309 - RNA, 19 nt, Artificial Sequence
  Description of Artificial Sequence: Synthetic oligonucleotide
  Sense strand starting at position 321 of SEQ ID NO: 1560787
ggcauuuauagcuggguuu

SEQ ID NO: 1624310 - RNA, 19 nt, Artificial Sequence
  Description of Artificial Sequence: Synthetic oligonucleotide
  Antisense strand to SEQ ID NO: 1624309
aaacccagcuauaaaugcc

SEQ ID NO: 1624311 - RNA, 19 nt, Artificial Sequence
  Description of Artificial Sequence: Synthetic oligonucleotide
  Sense strand starting at position 322 of SEQ ID NO: 1560787
gcauuuauagcuggguuua

SEQ ID NO: 1624312 - RNA, 19 nt, Artificial Sequence
  Description of Artificial Sequence: Synthetic oligonucleotide
  Antisense strand to SEQ ID NO: 1624311
uaaacccagcuauaaaugc

SEQ ID NO: 1624313 - RNA, 19 nt, Artificial Sequence
  Description of Artificial Sequence: Synthetic oligonucleotide
  Sense strand starting at position 383 of SEQ ID NO: 1560787
gggccaaucucaucaccaa

SEQ ID NO: 1624314 - RNA, 19 nt, Artificial Sequence
  Description of Artificial Sequence: Synthetic oligonucleotide
  Antisense strand to SEQ ID NO: 1624313
uuggugaugagauuggccc

SEQ ID NO: 1624315 - RNA, 19 nt, Artificial Sequence
  Description of Artificial Sequence: Synthetic oligonucleotide
  Sense strand starting at position 478 of SEQ ID NO: 1560787
ucucacagaugaugacaua

SEQ ID NO: 1624316 - RNA, 19 nt, Artificial Sequence
  Description of Artificial Sequence: Synthetic oligonucleotide
  Antisense strand to SEQ ID NO: 1624315
uaugucaucaucugugaga

SEQ ID NO: 1624317 - RNA, 19 nt, Artificial Sequence
  Description of Artificial Sequence: Synthetic oligonucleotide
  Sense strand starting at position 523 of SEQ ID NO: 1560787
gucagacaugcaggucaaa

SEQ ID NO: 1624318 - RNA, 19 nt, Artificial Sequence
  Description of Artificial Sequence: Synthetic oligonucleotide
  Antisense strand to SEQ ID NO: 1624317
uuugaccugcaugucugac

SEQ ID NO: 1624319 - RNA, 19 nt, Artificial Sequence
  Description of Artificial Sequence: Synthetic oligonucleotide
  Sense strand starting at position 793 of SEQ ID NO: 1560787
caugguucugcauacgcaa

SEQ ID NO: 1624320 - RNA, 19 nt, Artificial Sequence
  Description of Artificial Sequence: Synthetic oligonucleotide
  Antisense strand to SEQ ID NO: 1624319
uugcguaugcagaaccaug

SEQ ID NO: 1624321 - RNA, 19 nt, Artificial Sequence
  Description of Artificial Sequence: Synthetic oligonucleotide
  Sense strand starting at position 804 of SEQ ID NO: 1560787
auacgcaaccacugucaua

SEQ ID NO: 1624322 - RNA, 19 nt, Artificial Sequence
  Description of Artificial Sequence: Synthetic oligonucleotide
  Antisense strand to SEQ ID NO: 1624321
uaugacagugguugcguau

SEQ ID NO: 1624323 - RNA, 19 nt, Artificial Sequence
  Description of Artificial Sequence: Synthetic oligonucleotide
  Sense strand starting at position 914 of SEQ ID NO: 1560787
gugucacucacguauauaa

SEQ ID NO: 1624324 - RNA, 19 nt, Artificial Sequence
  Description of Artificial Sequence: Synthetic oligonucleotide
  Antisense strand to SEQ ID NO: 1624323
uuauauacgugagugacac

SEQ ID NO: 1624325 - RNA, 19 nt, Artificial Sequence
  Description of Artificial Sequence: Synthetic oligonucleotide
  Sense strand starting at position 951 of SEQ ID NO: 1560787
cuauaaacauugucaguca

SEQ ID NO: 1624326 - RNA, 19 nt, Artificial Sequence
  Description of Artificial Sequence: Synthetic oligonucleotide
  Antisense strand to SEQ ID NO: 1624325
ugacugacaauguuuauag

SEQ ID NO: 1624327 - RNA, 19 nt, Artificial Sequence
  Description of Artificial Sequence: Synthetic oligonucleotide
  Sense strand starting at position 1097 of SEQ ID NO: 1560787
guuauaguuaccgaggcau

SEQ ID NO: 1624328 - RNA, 19 nt, Artificial Sequence
  Description of Artificial Sequence: Synthetic oligonucleotide
  Antisense strand to SEQ ID NO: 1624327
augccucgguaacuauaac

SEQ ID NO: 1624329 - RNA, 19 nt, Artificial Sequence
  Description of Artificial Sequence: Synthetic oligonucleotide
  Sense strand starting at position 1099 of SEQ ID NO: 1560787
uauaguuaccgaggcauac

SEQ ID NO: 1624330 - RNA, 19 nt, Artificial Sequence
  Description of Artificial Sequence: Synthetic oligonucleotide
  Antisense strand to SEQ ID NO: 1624329
guaugccucgguaacuaua

SEQ ID NO: 1624331 - RNA, 19 nt, Artificial Sequence
  Description of Artificial Sequence: Synthetic oligonucleotide
  Sense strand starting at position 1248 of SEQ ID NO: 1560787
cacagauacuagggucaca

SEQ ID NO: 1624332 - RNA, 19 nt, Artificial Sequence
  Description of Artificial Sequence: Synthetic oligonucleotide
  Antisense strand to SEQ ID NO: 1624331
ugugacccuaguaucugug

SEQ ID NO: 1624333 - RNA, 19 nt, Artificial Sequence
  Description of Artificial Sequence: Synthetic oligonucleotide
  Sense strand starting at position 1696 of SEQ ID NO: 1560787
gccugaaauuguccuuauu

SEQ ID NO: 1624334 - RNA, 19 nt, Artificial Sequence
  Description of Artificial Sequence: Synthetic oligonucleotide
  Antisense strand to SEQ ID NO: 1624333
aauaaggacaauuucaggc

SEQ ID NO: 1624335 - RNA, 19 nt, Artificial Sequence
  Description of Artificial Sequence: Synthetic oligonucleotide
  Sense strand starting at position 1921 of SEQ ID NO: 1560787
ggcaguuguugugcugaga

SEQ ID NO: 1624336 - RNA, 19 nt, Artificial Sequence
  Description of Artificial Sequence: Synthetic oligonucleotide
  Antisense strand to SEQ ID NO: 1624335
ucucagcacaacaacugcc

SEQ ID NO: 1624337 - RNA, 19 nt, Artificial Sequence
  Description of Artificial Sequence: Synthetic oligonucleotide
  Sense strand starting at position 1960 of SEQ ID NO: 1560787
uagggauugugucuggaau

SEQ ID NO: 1624338 - RNA, 19 nt, Artificial Sequence
  Description of Artificial Sequence: Synthetic oligonucleotide
  Antisense strand to SEQ ID NO: 1624337
auuccagacacaaucccua

SEQ ID NO: 1624339 - RNA, 19 nt, Artificial Sequence
  Description of Artificial Sequence: Synthetic oligonucleotide
  Sense strand starting at position 1961 of SEQ ID NO: 1560787
agggauugugucuggaauc

SEQ ID NO: 1624340 - RNA, 19 nt, Artificial Sequence
  Description of Artificial Sequence: Synthetic oligonucleotide
  Antisense strand to SEQ ID NO: 1624339
gauuccagacacaaucccu

SEQ ID NO: 1624341 - RNA, 19 nt, Artificial Sequence
  Description of Artificial Sequence: Synthetic oligonucleotide
  Sense strand starting at position 2036 of SEQ ID NO: 1560787
cccaucuaguucuaggagu

SEQ ID NO: 1624342 - RNA, 19 nt, Artificial Sequence
  Description of Artificial Sequence: Synthetic oligonucleotide
  Antisense strand to SEQ ID NO: 1624341
acuccuagaacuagauggg

SEQ ID NO: 1624343 - RNA, 19 nt, Artificial Sequence
  Description of Artificial Sequence: Synthetic oligonucleotide
  Sense strand starting at position 2038 of SEQ ID NO: 1560787
caucuaguucuaggaguug

SEQ ID NO: 1624344 - RNA, 19 nt, Artificial Sequence
  Description of Artificial Sequence: Synthetic oligonucleotide
  Antisense strand to SEQ ID NO: 1624343
caacuccuagaacuagaug

SEQ ID NO: 1624345 - RNA, 19 nt, Artificial Sequence
  Description of Artificial Sequence: Synthetic oligonucleotide
  Sense strand starting at position 2602 of SEQ ID NO: 1560787
gccguauaugcagaaaggu

SEQ ID NO: 1624346 - RNA, 19 nt, Artificial Sequence
  Description of Artificial Sequence: Synthetic oligonucleotide
  Antisense strand to SEQ ID NO: 1624345
accuuucugcauauacggc

SEQ ID NO: 1624347 - RNA, 19 nt, Artificial Sequence
  Description of Artificial Sequence: Synthetic oligonucleotide
  Sense strand starting at position 2729 of SEQ ID NO: 1560787
ugagcaugccuaugaacau

SEQ ID NO: 1624348 - RNA, 19 nt, Artificial Sequence
  Description of Artificial Sequence: Synthetic oligonucleotide
  Antisense strand to SEQ ID NO: 1624347
auguucauaggcaugcuca

SEQ ID NO: 1624349 - RNA, 19 nt, Artificial Sequence
  Description of Artificial Sequence: Synthetic oligonucleotide
  Sense strand starting at position 2785 of SEQ ID NO: 1560787
ucccuuucccuccgugaca

SEQ ID NO: 1624350 - RNA, 19 nt, Artificial Sequence
  Description of Artificial Sequence: Synthetic oligonucleotide
  Antisense strand to SEQ ID NO: 1624349
ugucacggagggaaaggga

SEQ ID NO: 1624351 - RNA, 19 nt, Artificial Sequence
  Description of Artificial Sequence: Synthetic oligonucleotide
  Sense strand starting at position 2826 of SEQ ID NO: 1560787
cuccgcguccgaaagaguu

SEQ ID NO: 1624352 - RNA, 19 nt, Artificial Sequence
  Description of Artificial Sequence: Synthetic oligonucleotide
  Antisense strand to SEQ ID NO: 1624351
aacucuuucggacgcggag

SEQ ID NO: 1624353 - RNA, 19 nt, Artificial Sequence
  Description of Artificial Sequence: Synthetic oligonucleotide
  Sense strand starting at position 2832 of SEQ ID NO: 1560787
guccgaaagaguugcuucu

SEQ ID NO: 1624354 - RNA, 19 nt, Artificial Sequence
  Description of Artificial Sequence: Synthetic oligonucleotide
  Antisense strand to SEQ ID NO: 1624353
agaagcaacucuuucggac

SEQ ID NO: 1624355 - RNA, 19 nt, Artificial Sequence
  Description of Artificial Sequence: Synthetic oligonucleotide
  Sense strand starting at position 3078 of SEQ ID NO: 1560787
acgccaauccuguggguuu

SEQ ID NO: 1624356 - RNA, 19 nt, Artificial Sequence
  Description of Artificial Sequence: Synthetic oligonucleotide
  Antisense strand to SEQ ID NO: 1624355
aaacccacaggauuggcgu

SEQ ID NO: 1624357 - RNA, 19 nt, Artificial Sequence
  Description of Artificial Sequence: Synthetic oligonucleotide
  Sense strand starting at position 3115 of SEQ ID NO: 1560787
gacauuagagcccauuagu

SEQ ID NO: 1624358 - RNA, 19 nt, Artificial Sequence
  Description of Artificial Sequence: Synthetic oligonucleotide
  Antisense strand to SEQ ID NO: 1624357
acuaaugggcucuaauguc

SEQ ID NO: 1624359 - RNA, 19 nt, Artificial Sequence
  Description of Artificial Sequence: Synthetic oligonucleotide
  Sense strand starting at position 3118 of SEQ ID NO: 1560787
auuagagcccauuaguaaa

SEQ ID NO: 1624360 - RNA, 19 nt, Artificial Sequence
  Description of Artificial Sequence: Synthetic oligonucleotide
  Antisense strand to SEQ ID NO: 1624359
uuuacuaaugggcucuaau

SEQ ID NO: 1624361 - RNA, 19 nt, Artificial Sequence
  Description of Artificial Sequence: Synthetic oligonucleotide
  Sense strand starting at position 3138 of SEQ ID NO: 1560787
gcgagguugccaggaguga

SEQ ID NO: 1624362 - RNA, 19 nt, Artificial Sequence
  Description of Artificial Sequence: Synthetic oligonucleotide
  Antisense strand to SEQ ID NO: 1624361
ucacuccuggcaaccucgc

SEQ ID NO: 1624363 - RNA, 19 nt, Artificial Sequence
  Description of Artificial Sequence: Synthetic oligonucleotide
  Sense strand starting at position 3264 of SEQ ID NO: 1560787
ggagguucccggcaacaga

SEQ ID NO: 1624364 - RNA, 19 nt, Artificial Sequence
  Description of Artificial Sequence: Synthetic oligonucleotide
  Antisense strand to SEQ ID NO: 1624363
ucuguugccgggaaccucc

SEQ ID NO: 1624365 - RNA, 19 nt, Artificial Sequence
  Description of Artificial Sequence: Synthetic oligonucleotide
  Sense strand starting at position 3601 of SEQ ID NO: 1560787
cccugaugagucugaucug

SEQ ID NO: 1624366 - RNA, 19 nt, Artificial Sequence
  Description of Artificial Sequence: Synthetic oligonucleotide
  Antisense strand to SEQ ID NO: 1624365
cagaucagacucaucaggg

SEQ ID NO: 1624367 - RNA, 19 nt, Artificial Sequence
  Description of Artificial Sequence: Synthetic oligonucleotide
  Sense strand starting at position 3604 of SEQ ID NO: 1560787
ugaugagucugaucugcau

SEQ ID NO: 1624368 - RNA, 19 nt, Artificial Sequence
  Description of Artificial Sequence: Synthetic oligonucleotide
  Antisense strand to SEQ ID NO: 1624367
augcagaucagacucauca

SEQ ID NO: 1624369 - RNA, 19 nt, Artificial Sequence
  Description of Artificial Sequence: Synthetic oligonucleotide
  Sense strand starting at position 3607 of SEQ ID NO: 1560787
ugagucugaucugcauaac

SEQ ID NO: 1624370 - RNA, 19 nt, Artificial Sequence
  Description of Artificial Sequence: Synthetic oligonucleotide
  Antisense strand to SEQ ID NO: 1624369
guuaugcagaucagacuca

SEQ ID NO: 1624371 - RNA, 19 nt, Artificial Sequence
  Description of Artificial Sequence: Synthetic oligonucleotide
  Sense strand starting at position 3610 of SEQ ID NO: 1560787
gucugaucugcauaacgac

SEQ ID NO: 1624372 - RNA, 19 nt, Artificial Sequence
  Description of Artificial Sequence: Synthetic oligonucleotide
  Antisense strand to SEQ ID NO: 1624371
gucguuaugcagaucagac

SEQ ID NO: 1624373 - RNA, 19 nt, Artificial Sequence
  Description of Artificial Sequence: Synthetic oligonucleotide
  Sense strand starting at position 3637 of SEQ ID NO: 1560787
gcccaaggcucccucaaau

SEQ ID NO: 1624374 - RNA, 19 nt, Artificial Sequence
  Description of Artificial Sequence: Synthetic oligonucleotide
  Antisense strand to SEQ ID NO: 1624373
auuugagggagccuugggc

SEQ ID NO: 1624375 - RNA, 19 nt, Artificial Sequence
  Description of Artificial Sequence: Synthetic oligonucleotide
  Sense strand starting at position 3648 of SEQ ID NO: 1560787
ccucaaauguuggcaaaga

SEQ ID NO: 1624376 - RNA, 19 nt, Artificial Sequence
  Description of Artificial Sequence: Synthetic oligonucleotide
  Antisense strand to SEQ ID NO: 1624375
ucuuugccaacauuugagg

SEQ ID NO: 1624377 - RNA, 19 nt, Artificial Sequence
  Description of Artificial Sequence: Synthetic oligonucleotide
  Sense strand starting at position 3649 of SEQ ID NO: 1560787
cucaaauguuggcaaagau

SEQ ID NO: 1624378 - RNA, 19 nt, Artificial Sequence
  Description of Artificial Sequence: Synthetic oligonucleotide
  Antisense strand to SEQ ID NO: 1624377
aucuuugccaacauuugag

SEQ ID NO: 1624379 - RNA, 19 nt, Artificial Sequence
  Description of Artificial Sequence: Synthetic oligonucleotide
  Sense strand starting at position 63 of SEQ ID NO: 1560788
caguaagugcucuaaggga

SEQ ID NO: 1624380 - RNA, 19 nt, Artificial Sequence
  Description of Artificial Sequence: Synthetic oligonucleotide
  Antisense strand to SEQ ID NO: 1624379
ucccuuagagcacuuacug

SEQ ID NO: 1624381 - RNA, 19 nt, Artificial Sequence
  Description of Artificial Sequence: Synthetic oligonucleotide
  Sense strand starting at position 142 of SEQ ID NO: 1560788
uuguguguaccgcucagua

SEQ ID NO: 1624382 - RNA, 19 nt, Artificial Sequence
  Description of Artificial Sequence: Synthetic oligonucleotide
  Antisense strand to SEQ ID NO: 1624381
uacugagcgguacacacaa

SEQ ID NO: 1624383 - RNA, 19 nt, Artificial Sequence
  Description of Artificial Sequence: Synthetic oligonucleotide
  Sense strand starting at position 245 of SEQ ID NO: 1560788
uccugauguggaugggaca

SEQ ID NO: 1624384 - RNA, 19 nt, Artificial Sequence
  Description of Artificial Sequence: Synthetic oligonucleotide
  Antisense strand to SEQ ID NO: 1624383
ugucccauccacaucagga

SEQ ID NO: 1624385 - RNA, 19 nt, Artificial Sequence
  Description of Artificial Sequence: Synthetic oligonucleotide
  Sense strand starting at position 344 of SEQ ID NO: 1560788
auggcuacccugugacuaa

SEQ ID NO: 1624386 - RNA, 19 nt, Artificial Sequence
  Description of Artificial Sequence: Synthetic oligonucleotide
  Antisense strand to SEQ ID NO: 1624385
uuagucacaggguagccau

SEQ ID NO: 1624387 - RNA, 19 nt, Artificial Sequence
  Description of Artificial Sequence: Synthetic oligonucleotide
  Sense strand starting at position 389 of SEQ ID NO: 1560788
gcaggguugggagauaguu

SEQ ID NO: 1624388 - RNA, 19 nt, Artificial Sequence
  Description of Artificial Sequence: Synthetic oligonucleotide
  Antisense strand to SEQ ID NO: 1624387
aacuaucucccaacccugc

SEQ ID NO: 1624389 - RNA, 19 nt, Artificial Sequence
  Description of Artificial Sequence: Synthetic oligonucleotide
  Sense strand starting at position 397 of SEQ ID NO: 1560788
gggagauaguuccuaucca

SEQ ID NO: 1624390 - RNA, 19 nt, Artificial Sequence
  Description of Artificial Sequence: Synthetic oligonucleotide
  Antisense strand to SEQ ID NO: 1624389
uggauaggaacuaucuccc

SEQ ID NO: 1624391 - RNA, 19 nt, Artificial Sequence
  Description of Artificial Sequence: Synthetic oligonucleotide
  Sense strand starting at position 398 of SEQ ID NO: 1560788
ggagauaguuccuauccag

SEQ ID NO: 1624392 - RNA, 19 nt, Artificial Sequence
  Description of Artificial Sequence: Synthetic oligonucleotide
  Antisense strand to SEQ ID NO: 1624391
cuggauaggaacuaucucc

SEQ ID NO: 1624393 - RNA, 19 nt, Artificial Sequence
  Description of Artificial Sequence: Synthetic oligonucleotide
  Sense strand starting at position 627 of SEQ ID NO: 1560788
ggcucuuacaagugguaag

SEQ ID NO: 1624394 - RNA, 19 nt, Artificial Sequence
  Description of Artificial Sequence: Synthetic oligonucleotide
  Antisense strand to SEQ ID NO: 1624393
cuuaccacuuguaagagcc

SEQ ID NO: 1624395 - RNA, 19 nt, Artificial Sequence
  Description of Artificial Sequence: Synthetic oligonucleotide
  Sense strand starting at position 630 of SEQ ID NO: 1560788
ucuuacaagugguaaggaa

SEQ ID NO: 1624396 - RNA, 19 nt, Artificial Sequence
  Description of Artificial Sequence: Synthetic oligonucleotide
  Antisense strand to SEQ ID NO: 1624395
uuccuuaccacuuguaaga

SEQ ID NO: 1624397 - RNA, 19 nt, Artificial Sequence
  Description of Artificial Sequence: Synthetic oligonucleotide
  Sense strand starting at position 998 of SEQ ID NO: 1560788
acaggaauguaugaguuga

SEQ ID NO: 1624398 - RNA, 19 nt, Artificial Sequence
  Description of Artificial Sequence: Synthetic oligonucleotide
  Antisense strand to SEQ ID NO: 1624397
ucaacucauacauuccugu

SEQ ID NO: 1624399 - RNA, 19 nt, Artificial Sequence
  Description of Artificial Sequence: Synthetic oligonucleotide
  Sense strand starting at position 1002 of SEQ ID NO: 1560788
gaauguaugaguugagcuc

SEQ ID NO: 1624400 - RNA, 19 nt, Artificial Sequence
  Description of Artificial Sequence: Synthetic oligonucleotide
  Antisense strand to SEQ ID NO: 1624399
gagcucaacucauacauuc

SEQ ID NO: 1624401 - RNA, 19 nt, Artificial Sequence
  Description of Artificial Sequence: Synthetic oligonucleotide
  Sense strand starting at position 1009 of SEQ ID NO: 1560788
ugaguugagcucugugcau

SEQ ID NO: 1624402 - RNA, 19 nt, Artificial Sequence
  Description of Artificial Sequence: Synthetic oligonucleotide
  Antisense strand to SEQ ID NO: 1624401
augcacagagcucaacuca

SEQ ID NO: 1624403 - RNA, 19 nt, Artificial Sequence
  Description of Artificial Sequence: Synthetic oligonucleotide
  Sense strand starting at position 1011 of SEQ ID NO: 1560788
aguugagcucugugcauaa

SEQ ID NO: 1624404 - RNA, 19 nt, Artificial Sequence
  Description of Artificial Sequence: Synthetic oligonucleotide
  Antisense strand to SEQ ID NO: 1624403
uuaugcacagagcucaacu

SEQ ID NO: 1624405 - RNA, 19 nt, Artificial Sequence
  Description of Artificial Sequence: Synthetic oligonucleotide
  Sense strand starting at position 1022 of SEQ ID NO: 1560788
gugcauaaggcuugccaga

SEQ ID NO: 1624406 - RNA, 19 nt, Artificial Sequence
  Description of Artificial Sequence: Synthetic oligonucleotide
  Antisense strand to SEQ ID NO: 1624405
ucuggcaagccuuaugcac

SEQ ID NO: 1624407 - RNA, 19 nt, Artificial Sequence
  Description of Artificial Sequence: Synthetic oligonucleotide
  Sense strand starting at position 1024 of SEQ ID NO: 1560788
gcauaaggcuugccagaca

SEQ ID NO: 1624408 - RNA, 19 nt, Artificial Sequence
  Description of Artificial Sequence: Synthetic oligonucleotide
  Antisense strand to SEQ ID NO: 1624407
ugucuggcaagccuuaugc

SEQ ID NO: 1624409 - RNA, 19 nt, Artificial Sequence
  Description of Artificial Sequence: Synthetic oligonucleotide
  Sense strand starting at position 1032 of SEQ ID NO: 1560788
cuugccagacaucgucuua

SEQ ID NO: 1624410 - RNA, 19 nt, Artificial Sequence
  Description of Artificial Sequence: Synthetic oligonucleotide
  Antisense strand to SEQ ID NO: 1624409
uaagacgaugucuggcaag

SEQ ID NO: 1624411 - RNA, 19 nt, Artificial Sequence
  Description of Artificial Sequence: Synthetic oligonucleotide
  Sense strand starting at position 1037 of SEQ ID NO: 1560788
cagacaucgucuuauuuga

SEQ ID NO: 1624412 - RNA, 19 nt, Artificial Sequence
  Description of Artificial Sequence: Synthetic oligonucleotide
  Antisense strand to SEQ ID NO: 1624411
ucaaauaagacgaugucug

SEQ ID NO: 1624413 - RNA, 19 nt, Artificial Sequence
  Description of Artificial Sequence: Synthetic oligonucleotide
  Sense strand starting at position 1039 of SEQ ID NO: 1560788
gacaucgucuuauuugagu

SEQ ID NO: 1624414 - RNA, 19 nt, Artificial Sequence
  Description of Artificial Sequence: Synthetic oligonucleotide
  Antisense strand to SEQ ID NO: 1624413
acucaaauaagacgauguc

SEQ ID NO: 1624415 - RNA, 19 nt, Artificial Sequence
  Description of Artificial Sequence: Synthetic oligonucleotide
  Sense strand starting at position 1044 of SEQ ID NO: 1560788
cgucuuauuugagucucau

SEQ ID NO: 1624416 - RNA, 19 nt, Artificial Sequence
  Description of Artificial Sequence: Synthetic oligonucleotide
  Antisense strand to SEQ ID NO: 1624415
augagacucaaauaagacg

SEQ ID NO: 1624417 - RNA, 19 nt, Artificial Sequence
  Description of Artificial Sequence: Synthetic oligonucleotide
  Sense strand starting at position 1126 of SEQ ID NO: 1560788
aguuauuugcccgaggcca

SEQ ID NO: 1624418 - RNA, 19 nt, Artificial Sequence
  Description of Artificial Sequence: Synthetic oligonucleotide
  Antisense strand to SEQ ID NO: 1624417
uggccucgggcaaauaacu

SEQ ID NO: 1624419 - RNA, 19 nt, Artificial Sequence
  Description of Artificial Sequence: Synthetic oligonucleotide
  Sense strand starting at position 1154 of SEQ ID NO: 1560788
gucuguauuugggagagug

SEQ ID NO: 1624420 - RNA, 19 nt, Artificial Sequence
  Description of Artificial Sequence: Synthetic oligonucleotide
  Antisense strand to SEQ ID NO: 1624419
cacucucccaaauacagac

SEQ ID NO: 1624421 - RNA, 19 nt, Artificial Sequence
  Description of Artificial Sequence: Synthetic oligonucleotide
  Sense strand starting at position 1848 of SEQ ID NO: 1560788
gcagccauggagugaguaa

SEQ ID NO: 1624422 - RNA, 19 nt, Artificial Sequence
  Description of Artificial Sequence: Synthetic oligonucleotide
  Antisense strand to SEQ ID NO: 1624421
uuacucacuccauggcugc

SEQ ID NO: 1624423 - RNA, 19 nt, Artificial Sequence
  Description of Artificial Sequence: Synthetic oligonucleotide
  Sense strand starting at position 1860 of SEQ ID NO: 1560788
ugaguaaccgcuuaccucu

SEQ ID NO: 1624424 - RNA, 19 nt, Artificial Sequence
  Description of Artificial Sequence: Synthetic oligonucleotide
  Antisense strand to SEQ ID NO: 1624423
agagguaagcgguuacuca

SEQ ID NO: 1624425 - RNA, 19 nt, Artificial Sequence
  Description of Artificial Sequence: Synthetic oligonucleotide
  Sense strand starting at position 2039 of SEQ ID NO: 1560788
gugggagaguucuagacuc

SEQ ID NO: 1624426 - RNA, 19 nt, Artificial Sequence
  Description of Artificial Sequence: Synthetic oligonucleotide
  Antisense strand to SEQ ID NO: 1624425
gagucuagaacucucccac

SEQ ID NO: 1624427 - RNA, 19 nt, Artificial Sequence
  Description of Artificial Sequence: Synthetic oligonucleotide
  Sense strand starting at position 2045 of SEQ ID NO: 1560788
gaguucuagacucgauguu

SEQ ID NO: 1624428 - RNA, 19 nt, Artificial Sequence
  Description of Artificial Sequence: Synthetic oligonucleotide
  Antisense strand to SEQ ID NO: 1624427
aacaucgagucuagaacuc

SEQ ID NO: 1624429 - RNA, 19 nt, Artificial Sequence
  Description of Artificial Sequence: Synthetic oligonucleotide
  Sense strand starting at position 2046 of SEQ ID NO: 1560788
aguucuagacucgauguuu

SEQ ID NO: 1624430 - RNA, 19 nt, Artificial Sequence
  Description of Artificial Sequence: Synthetic oligonucleotide
  Antisense strand to SEQ ID NO: 1624429
aaacaucgagucuagaacu

SEQ ID NO: 1624431 - RNA, 19 nt, Artificial Sequence
  Description of Artificial Sequence: Synthetic oligonucleotide
  Sense strand starting at position 2128 of SEQ ID NO: 1560788
cgauucuucgugcuugguu

SEQ ID NO: 1624432 - RNA, 19 nt, Artificial Sequence
  Description of Artificial Sequence: Synthetic oligonucleotide
  Antisense strand to SEQ ID NO: 1624431
aaccaagcacgaagaaucg

SEQ ID NO: 1624433 - RNA, 19 nt, Artificial Sequence
  Description of Artificial Sequence: Synthetic oligonucleotide
  Sense strand starting at position 2441 of SEQ ID NO: 1560788
cuuagauugacagggcaga

SEQ ID NO: 1624434 - RNA, 19 nt, Artificial Sequence
  Description of Artificial Sequence: Synthetic oligonucleotide
  Antisense strand to SEQ ID NO: 1624433
ucugcccugucaaucuaag

SEQ ID NO: 1624435 - RNA, 19 nt, Artificial Sequence
  Description of Artificial Sequence: Synthetic oligonucleotide
  Sense strand starting at position 2500 of SEQ ID NO: 1560788
gaaccacugucgucacgau

SEQ ID NO: 1624436 - RNA, 19 nt, Artificial Sequence
  Description of Artificial Sequence: Synthetic oligonucleotide
  Antisense strand to SEQ ID NO: 1624435
aucgugacgacagugguuc

SEQ ID NO: 1624437 - RNA, 19 nt, Artificial Sequence
  Description of Artificial Sequence: Synthetic oligonucleotide
  Sense strand starting at position 2556 of SEQ ID NO: 1560788
ggcuaaaccaaccguuagu

SEQ ID NO: 1624438 - RNA, 19 nt, Artificial Sequence
  Description of Artificial Sequence: Synthetic oligonucleotide
  Antisense strand to SEQ ID NO: 1624437
acuaacgguugguuuagcc

SEQ ID NO: 1624439 - RNA, 19 nt, Artificial Sequence
  Description of Artificial Sequence: Synthetic oligonucleotide
  Sense strand starting at position 2900 of SEQ ID NO: 1560788
cugggagaccuuuagguuu

SEQ ID NO: 1624440 - RNA, 19 nt, Artificial Sequence
  Description of Artificial Sequence: Synthetic oligonucleotide
  Antisense strand to SEQ ID NO: 1624439
aaaccuaaaggucucccag

SEQ ID NO: 1624441 - RNA, 19 nt, Artificial Sequence
  Description of Artificial Sequence: Synthetic oligonucleotide
  Sense strand starting at position 2972 of SEQ ID NO: 1560788
aagaaauucccuugggagu

SEQ ID NO: 1624442 - RNA, 19 nt, Artificial Sequence
  Description of Artificial Sequence: Synthetic oligonucleotide
  Antisense strand to SEQ ID NO: 1624441
acucccaagggaauuucuu

SEQ ID NO: 1624443 - RNA, 19 nt, Artificial Sequence
  Description of Artificial Sequence: Synthetic oligonucleotide
  Sense strand starting at position 2999 of SEQ ID NO: 1560788
cucagagauuuggguaaag

SEQ ID NO: 1624444 - RNA, 19 nt, Artificial Sequence
  Description of Artificial Sequence: Synthetic oligonucleotide
  Antisense strand to SEQ ID NO: 1624443
cuuuacccaaaucucugag

SEQ ID NO: 1624445 - RNA, 19 nt, Artificial Sequence
  Description of Artificial Sequence: Synthetic oligonucleotide
  Sense strand starting at position 3047 of SEQ ID NO: 1560788
gaggcuuaguguucuaaac

SEQ ID NO: 1624446 - RNA, 19 nt, Artificial Sequence
  Description of Artificial Sequence: Synthetic oligonucleotide
  Antisense strand to SEQ ID NO: 1624445
guuuagaacacuaagccuc

SEQ ID NO: 1624447 - RNA, 19 nt, Artificial Sequence
  Description of Artificial Sequence: Synthetic oligonucleotide
  Sense strand starting at position 3689 of SEQ ID NO: 1560788
auuaaaugagaguguauug

SEQ ID NO: 1624448 - RNA, 19 nt, Artificial Sequence
  Description of Artificial Sequence: Synthetic oligonucleotide
  Antisense strand to SEQ ID NO: 1624447
caauacacucucauuuaau

SEQ ID NO: 1624449 - RNA, 19 nt, Artificial Sequence
  Description of Artificial Sequence: Synthetic oligonucleotide
  Sense strand starting at position 3696 of SEQ ID NO: 1560788
gagaguguauuggaauaag

SEQ ID NO: 1624450 - RNA, 19 nt, Artificial Sequence
  Description of Artificial Sequence: Synthetic oligonucleotide
  Antisense strand to SEQ ID NO: 1624449
cuuauuccaauacacucuc

SEQ ID NO: 1624451 - RNA, 19 nt, Artificial Sequence
  Description of Artificial Sequence: Synthetic oligonucleotide
  Sense strand starting at position 3699 of SEQ ID NO: 1560788
aguguauuggaauaaguca

SEQ ID NO: 1624452 - RNA, 19 nt, Artificial Sequence
  Description of Artificial Sequence: Synthetic oligonucleotide
  Antisense strand to SEQ ID NO: 1624451
ugacuuauuccaauacacu

SEQ ID NO: 1624453 - RNA, 19 nt, Artificial Sequence
  Description of Artificial Sequence: Synthetic oligonucleotide
  Sense strand starting at position 3764 of SEQ ID NO: 1560788
uagaauggguagccagaaa

SEQ ID NO: 1624454 - RNA, 19 nt, Artificial Sequence
  Description of Artificial Sequence: Synthetic oligonucleotide
  Antisense strand to SEQ ID NO: 1624453
uuucuggcuacccauucua

SEQ ID NO: 1624455 - RNA, 19 nt, Artificial Sequence
  Description of Artificial Sequence: Synthetic oligonucleotide
  Sense strand starting at position 3804 of SEQ ID NO: 1560788
uguugacugaggcauaaau

SEQ ID NO: 1624456 - RNA, 19 nt, Artificial Sequence
  Description of Artificial Sequence: Synthetic oligonucleotide
  Antisense strand to SEQ ID NO: 1624455
auuuaugccucagucaaca

SEQ ID NO: 1624457 - RNA, 19 nt, Artificial Sequence
  Description of Artificial Sequence: Synthetic oligonucleotide
  Sense strand starting at position 3816 of SEQ ID NO: 1560788
cauaaaugaugggaaggaa

SEQ ID NO: 1624458 - RNA, 19 nt, Artificial Sequence
  Description of Artificial Sequence: Synthetic oligonucleotide
  Antisense strand to SEQ ID NO: 1624457
uuccuucccaucauuuaug

SEQ ID NO: 1624459 - RNA, 19 nt, Artificial Sequence
  Description of Artificial Sequence: Synthetic oligonucleotide
  Sense strand starting at position 9 of SEQ ID NO: 1560789
uguauacugccucagugau

SEQ ID NO: 1624460 - RNA, 19 nt, Artificial Sequence
  Description of Artificial Sequence: Synthetic oligonucleotide
  Antisense strand to SEQ ID NO: 1624459
aucacugaggcaguauaca

SEQ ID NO: 1624461 - RNA, 19 nt, Artificial Sequence
  Description of Artificial Sequence: Synthetic oligonucleotide
  Sense strand starting at position 89 of SEQ ID NO: 1560789
caguaagugcucuaaggga

SEQ ID NO: 1624462 - RNA, 19 nt, Artificial Sequence
  Description of Artificial Sequence: Synthetic oligonucleotide
  Antisense strand to SEQ ID NO: 1624461
ucccuuagagcacuuacug

SEQ ID NO: 1624463 - RNA, 19 nt, Artificial Sequence
  Description of Artificial Sequence: Synthetic oligonucleotide
  Sense strand starting at position 168 of SEQ ID NO: 1560789
uuguguguaccgcucagua

SEQ ID NO: 1624464 - RNA, 19 nt, Artificial Sequence
  Description of Artificial Sequence: Synthetic oligonucleotide
  Antisense strand to SEQ ID NO: 1624463
uacugagcgguacacacaa

SEQ ID NO: 1624465 - RNA, 19 nt, Artificial Sequence
  Description of Artificial Sequence: Synthetic oligonucleotide
  Sense strand starting at position 271 of SEQ ID NO: 1560789
uccugauguggaugggaca

SEQ ID NO: 1624466 - RNA, 19 nt, Artificial Sequence
  Description of Artificial Sequence: Synthetic oligonucleotide
  Antisense strand to SEQ ID NO: 1624465
ugucccauccacaucagga

SEQ ID NO: 1624467 - RNA, 19 nt, Artificial Sequence
  Description of Artificial Sequence: Synthetic oligonucleotide
  Sense strand starting at position 370 of SEQ ID NO: 1560789
auggcuacccugugacuaa

SEQ ID NO: 1624468 - RNA, 19 nt, Artificial Sequence
  Description of Artificial Sequence: Synthetic oligonucleotide
  Antisense strand to SEQ ID NO: 1624467
uuagucacaggguagccau

SEQ ID NO: 1624469 - RNA, 19 nt, Artificial Sequence
  Description of Artificial Sequence: Synthetic oligonucleotide
  Sense strand starting at position 415 of SEQ ID NO: 1560789
gcaggguugggagauaguu

SEQ ID NO: 1624470 - RNA, 19 nt, Artificial Sequence
  Description of Artificial Sequence: Synthetic oligonucleotide
  Antisense strand to SEQ ID NO: 1624469
aacuaucucccaacccugc

SEQ ID NO: 1624471 - RNA, 19 nt, Artificial Sequence
  Description of Artificial Sequence: Synthetic oligonucleotide
  Sense strand starting at position 423 of SEQ ID NO: 1560789
gggagauaguuccuaucca

SEQ ID NO: 1624472 - RNA, 19 nt, Artificial Sequence
  Description of Artificial Sequence: Synthetic oligonucleotide
  Antisense strand to SEQ ID NO: 1624471
uggauaggaacuaucuccc

SEQ ID NO: 1624473 - RNA, 19 nt, Artificial Sequence
  Description of Artificial Sequence: Synthetic oligonucleotide
  Sense strand starting at position 424 of SEQ ID NO: 1560789
ggagauaguuccuauccag

SEQ ID NO: 1624474 - RNA, 19 nt, Artificial Sequence
  Description of Artificial Sequence: Synthetic oligonucleotide
  Antisense strand to SEQ ID NO: 1624473
cuggauaggaacuaucucc

SEQ ID NO: 1624475 - RNA, 19 nt, Artificial Sequence
  Description of Artificial Sequence: Synthetic oligonucleotide
  Sense strand starting at position 653 of SEQ ID NO: 1560789
ggcucuuacaagugguaag

SEQ ID NO: 1624476 - RNA, 19 nt, Artificial Sequence
  Description of Artificial Sequence: Synthetic oligonucleotide
  Antisense strand to SEQ ID NO: 1624475
cuuaccacuuguaagagcc

SEQ ID NO: 1624477 - RNA, 19 nt, Artificial Sequence
  Description of Artificial Sequence: Synthetic oligonucleotide
  Sense strand starting at position 656 of SEQ ID NO: 1560789
ucuuacaagugguaaggaa

SEQ ID NO: 1624478 - RNA, 19 nt, Artificial Sequence
  Description of Artificial Sequence: Synthetic oligonucleotide
  Antisense strand to SEQ ID NO: 1624477
uuccuuaccacuuguaaga

SEQ ID NO: 1624479 - RNA, 19 nt, Artificial Sequence
  Description of Artificial Sequence: Synthetic oligonucleotide
  Sense strand starting at position 1024 of SEQ ID NO: 1560789
acaggaauguaugaguuga

SEQ ID NO: 1624480 - RNA, 19 nt, Artificial Sequence
  Description of Artificial Sequence: Synthetic oligonucleotide
  Antisense strand to SEQ ID NO: 1624479
ucaacucauacauuccugu

SEQ ID NO: 1624481 - RNA, 19 nt, Artificial Sequence
  Description of Artificial Sequence: Synthetic oligonucleotide
  Sense strand starting at position 1028 of SEQ ID NO: 1560789
gaauguaugaguugagcuc

SEQ ID NO: 1624482 - RNA, 19 nt, Artificial Sequence
  Description of Artificial Sequence: Synthetic oligonucleotide
  Antisense strand to SEQ ID NO: 1624481
gagcucaacucauacauuc

SEQ ID NO: 1624483 - RNA, 19 nt, Artificial Sequence
  Description of Artificial Sequence: Synthetic oligonucleotide
  Sense strand starting at position 1035 of SEQ ID NO: 1560789
ugaguugagcucugugcau

SEQ ID NO: 1624484 - RNA, 19 nt, Artificial Sequence
  Description of Artificial Sequence: Synthetic oligonucleotide
  Antisense strand to SEQ ID NO: 1624483
augcacagagcucaacuca

SEQ ID NO: 1624485 - RNA, 19 nt, Artificial Sequence
  Description of Artificial Sequence: Synthetic oligonucleotide
  Sense strand starting at position 1037 of SEQ ID NO: 1560789
aguugagcucugugcauaa

SEQ ID NO: 1624486 - RNA, 19 nt, Artificial Sequence
  Description of Artificial Sequence: Synthetic oligonucleotide
  Antisense strand to SEQ ID NO: 1624485
uuaugcacagagcucaacu

SEQ ID NO: 1624487 - RNA, 19 nt, Artificial Sequence
  Description of Artificial Sequence: Synthetic oligonucleotide
  Sense strand starting at position 1048 of SEQ ID NO: 1560789
gugcauaaggcuugccaga

SEQ ID NO: 1624488 - RNA, 19 nt, Artificial Sequence
  Description of Artificial Sequence: Synthetic oligonucleotide
  Antisense strand to SEQ ID NO: 1624487
ucuggcaagccuuaugcac

SEQ ID NO: 1624489 - RNA, 19 nt, Artificial Sequence
  Description of Artificial Sequence: Synthetic oligonucleotide
  Sense strand starting at position 1050 of SEQ ID NO: 1560789
gcauaaggcuugccagaca

SEQ ID NO: 1624490 - RNA, 19 nt, Artificial Sequence
  Description of Artificial Sequence: Synthetic oligonucleotide
  Antisense strand to SEQ ID NO: 1624489
ugucuggcaagccuuaugc

SEQ ID NO: 1624491 - RNA, 19 nt, Artificial Sequence
  Description of Artificial Sequence: Synthetic oligonucleotide
  Sense strand starting at position 1058 of SEQ ID NO: 1560789
cuugccagacaucgucuua

SEQ ID NO: 1624492 - RNA, 19 nt, Artificial Sequence
  Description of Artificial Sequence: Synthetic oligonucleotide
  Antisense strand to SEQ ID NO: 1624491
uaagacgaugucuggcaag

SEQ ID NO: 1624493 - RNA, 19 nt, Artificial Sequence
  Description of Artificial Sequence: Synthetic oligonucleotide
  Sense strand starting at position 1063 of SEQ ID NO: 1560789
cagacaucgucuuauuuga

SEQ ID NO: 1624494 - RNA, 19 nt, Artificial Sequence
  Description of Artificial Sequence: Synthetic oligonucleotide
  Antisense strand to SEQ ID NO: 1624493
ucaaauaagacgaugucug

SEQ ID NO: 1624495 - RNA, 19 nt, Artificial Sequence
  Description of Artificial Sequence: Synthetic oligonucleotide
  Sense strand starting at position 1065 of SEQ ID NO: 1560789
gacaucgucuuauuugagu

SEQ ID NO: 1624496 - RNA, 19 nt, Artificial Sequence
  Description of Artificial Sequence: Synthetic oligonucleotide
  Antisense strand to SEQ ID NO: 1624495
acucaaauaagacgauguc

SEQ ID NO: 1624497 - RNA, 19 nt, Artificial Sequence
  Description of Artificial Sequence: Synthetic oligonucleotide
  Sense strand starting at position 1070 of SEQ ID NO: 1560789
cgucuuauuugagucucau

SEQ ID NO: 1624498 - RNA, 19 nt, Artificial Sequence
  Description of Artificial Sequence: Synthetic oligonucleotide
  Antisense strand to SEQ ID NO: 1624497
augagacucaaauaagacg

SEQ ID NO: 1624499 - RNA, 19 nt, Artificial Sequence
  Description of Artificial Sequence: Synthetic oligonucleotide
  Sense strand starting at position 1152 of SEQ ID NO: 1560789
aguuauuugcccgaggcca

SEQ ID NO: 1624500 - RNA, 19 nt, Artificial Sequence
  Description of Artificial Sequence: Synthetic oligonucleotide
  Antisense strand to SEQ ID NO: 1624499
uggccucgggcaaauaacu

SEQ ID NO: 1624501 - RNA, 19 nt, Artificial Sequence
  Description of Artificial Sequence: Synthetic oligonucleotide
  Sense strand starting at position 1180 of SEQ ID NO: 1560789
gucuguauuugggagagug

SEQ ID NO: 1624502 - RNA, 19 nt, Artificial Sequence
  Description of Artificial Sequence: Synthetic oligonucleotide
  Antisense strand to SEQ ID NO: 1624501
cacucucccaaauacagac

SEQ ID NO: 1624503 - RNA, 19 nt, Artificial Sequence
  Description of Artificial Sequence: Synthetic oligonucleotide
  Sense strand starting at position 1874 of SEQ ID NO: 1560789
gcagccauggagugaguaa

SEQ ID NO: 1624504 - RNA, 19 nt, Artificial Sequence
  Description of Artificial Sequence: Synthetic oligonucleotide
  Antisense strand to SEQ ID NO: 1624503
uuacucacuccauggcugc

SEQ ID NO: 1624505 - RNA, 19 nt, Artificial Sequence
  Description of Artificial Sequence: Synthetic oligonucleotide
  Sense strand starting at position 1886 of SEQ ID NO: 1560789
ugaguaaccgcuuaccucu

SEQ ID NO: 1624506 - RNA, 19 nt, Artificial Sequence
  Description of Artificial Sequence: Synthetic oligonucleotide
  Antisense strand to SEQ ID NO: 1624505
agagguaagcgguuacuca

SEQ ID NO: 1624507 - RNA, 19 nt, Artificial Sequence
  Description of Artificial Sequence: Synthetic oligonucleotide
  Sense strand starting at position 2071 of SEQ ID NO: 1560789
gaguucuagacucgauguu

SEQ ID NO: 1624508 - RNA, 19 nt, Artificial Sequence
  Description of Artificial Sequence: Synthetic oligonucleotide
  Antisense strand to SEQ ID NO: 1624507
aacaucgagucuagaacuc

SEQ ID NO: 1624509 - RNA, 19 nt, Artificial Sequence
  Description of Artificial Sequence: Synthetic oligonucleotide
  Sense strand starting at position 2072 of SEQ ID NO: 1560789
aguucuagacucgauguuu

SEQ ID NO: 1624510 - RNA, 19 nt, Artificial Sequence
  Description of Artificial Sequence: Synthetic oligonucleotide
  Antisense strand to SEQ ID NO: 1624509
aaacaucgagucuagaacu

SEQ ID NO: 1624511 - RNA, 19 nt, Artificial Sequence
  Description of Artificial Sequence: Synthetic oligonucleotide
  Sense strand starting at position 2154 of SEQ ID NO: 1560789
cgauucuucgugcuugguu

SEQ ID NO: 1624512 - RNA, 19 nt, Artificial Sequence
  Description of Artificial Sequence: Synthetic oligonucleotide
  Antisense strand to SEQ ID NO: 1624511
aaccaagcacgaagaaucg

SEQ ID NO: 1624513 - RNA, 19 nt, Artificial Sequence
  Description of Artificial Sequence: Synthetic oligonucleotide
  Sense strand starting at position 2467 of SEQ ID NO: 1560789
cuuagauugacagggcaga

SEQ ID NO: 1624514 - RNA, 19 nt, Artificial Sequence
  Description of Artificial Sequence: Synthetic oligonucleotide
  Antisense strand to SEQ ID NO: 1624513
ucugcccugucaaucuaag

SEQ ID NO: 1624515 - RNA, 19 nt, Artificial Sequence
  Description of Artificial Sequence: Synthetic oligonucleotide
  Sense strand starting at position 2526 of SEQ ID NO: 1560789
gaaccacugucgucacgau

SEQ ID NO: 1624516 - RNA, 19 nt, Artificial Sequence
  Description of Artificial Sequence: Synthetic oligonucleotide
  Antisense strand to SEQ ID NO: 1624515
aucgugacgacagugguuc

SEQ ID NO: 1624517 - RNA, 19 nt, Artificial Sequence
  Description of Artificial Sequence: Synthetic oligonucleotide
  Sense strand starting at position 2582 of SEQ ID NO: 1560789
ggcuaaaccaaccguuagu

SEQ ID NO: 1624518 - RNA, 19 nt, Artificial Sequence
  Description of Artificial Sequence: Synthetic oligonucleotide
  Antisense strand to SEQ ID NO: 1624517
acuaacgguugguuuagcc

SEQ ID NO: 1624519 - RNA, 19 nt, Artificial Sequence
  Description of Artificial Sequence: Synthetic oligonucleotide
  Sense strand starting at position 2926 of SEQ ID NO: 1560789
cugggagaccuuuagguuu

SEQ ID NO: 1624520 - RNA, 19 nt, Artificial Sequence
  Description of Artificial Sequence: Synthetic oligonucleotide
  Antisense strand to SEQ ID NO: 1624519
aaaccuaaaggucucccag

SEQ ID NO: 1624521 - RNA, 19 nt, Artificial Sequence
  Description of Artificial Sequence: Synthetic oligonucleotide
  Sense strand starting at position 2998 of SEQ ID NO: 1560789
aagaaauucccuugggagu

SEQ ID NO: 1624522 - RNA, 19 nt, Artificial Sequence
  Description of Artificial Sequence: Synthetic oligonucleotide
  Antisense strand to SEQ ID NO: 1624521
acucccaagggaauuucuu

SEQ ID NO: 1624523 - RNA, 19 nt, Artificial Sequence
  Description of Artificial Sequence: Synthetic oligonucleotide
  Sense strand starting at position 3025 of SEQ ID NO: 1560789
cucagagauuuggguaaag

SEQ ID NO: 1624524 - RNA, 19 nt, Artificial Sequence
  Description of Artificial Sequence: Synthetic oligonucleotide
  Antisense strand to SEQ ID NO: 1624523
cuuuacccaaaucucugag

SEQ ID NO: 1624525 - RNA, 19 nt, Artificial Sequence
  Description of Artificial Sequence: Synthetic oligonucleotide
  Sense strand starting at position 3073 of SEQ ID NO: 1560789
gaggcuuaguguucuaaac

SEQ ID NO: 1624526 - RNA, 19 nt, Artificial Sequence
  Description of Artificial Sequence: Synthetic oligonucleotide
  Antisense strand to SEQ ID NO: 1624525
guuuagaacacuaagccuc

SEQ ID NO: 1624527 - RNA, 19 nt, Artificial Sequence
  Description of Artificial Sequence: Synthetic oligonucleotide
  Sense strand starting at position 3715 of SEQ ID NO: 1560789
auuaaaugagaguguauug

SEQ ID NO: 1624528 - RNA, 19 nt, Artificial Sequence
  Description of Artificial Sequence: Synthetic oligonucleotide
  Antisense strand to SEQ ID NO: 1624527
caauacacucucauuuaau

SEQ ID NO: 1624529 - RNA, 19 nt, Artificial Sequence
  Description of Artificial Sequence: Synthetic oligonucleotide
  Sense strand starting at position 3722 of SEQ ID NO: 1560789
gagaguguauuggaauaag

SEQ ID NO: 1624530 - RNA, 19 nt, Artificial Sequence
  Description of Artificial Sequence: Synthetic oligonucleotide
  Antisense strand to SEQ ID NO: 1624529
cuuauuccaauacacucuc

SEQ ID NO: 1624531 - RNA, 19 nt, Artificial Sequence
  Description of Artificial Sequence: Synthetic oligonucleotide
  Sense strand starting at position 3725 of SEQ ID NO: 1560789
aguguauuggaauaaguca

SEQ ID NO: 1624532 - RNA, 19 nt, Artificial Sequence
  Description of Artificial Sequence: Synthetic oligonucleotide
  Antisense strand to SEQ ID NO: 1624531
ugacuuauuccaauacacu

SEQ ID NO: 1624533 - RNA, 19 nt, Artificial Sequence
  Description of Artificial Sequence: Synthetic oligonucleotide
  Sense strand starting at position 3790 of SEQ ID NO: 1560789
uagaauggguagccagaaa

SEQ ID NO: 1624534 - RNA, 19 nt, Artificial Sequence
  Description of Artificial Sequence: Synthetic oligonucleotide
  Antisense strand to SEQ ID NO: 1624533
uuucuggcuacccauucua

SEQ ID NO: 1624535 - RNA, 19 nt, Artificial Sequence
  Description of Artificial Sequence: Synthetic oligonucleotide
  Sense strand starting at position 3830 of SEQ ID NO: 1560789
uguugacugaggcauaaau

SEQ ID NO: 1624536 - RNA, 19 nt, Artificial Sequence
  Description of Artificial Sequence: Synthetic oligonucleotide
  Antisense strand to SEQ ID NO: 1624535
auuuaugccucagucaaca

SEQ ID NO: 1624537 - RNA, 19 nt, Artificial Sequence
  Description of Artificial Sequence: Synthetic oligonucleotide
  Sense strand starting at position 3842 of SEQ ID NO: 1560789
cauaaaugaugggaaggaa

SEQ ID NO: 1624538 - RNA, 19 nt, Artificial Sequence
  Description of Artificial Sequence: Synthetic oligonucleotide
  Antisense strand to SEQ ID NO: 1624537
uuccuucccaucauuuaug

SEQ ID NO: 1624539 - RNA, 19 nt, Artificial Sequence
  Description of Artificial Sequence: Synthetic oligonucleotide
  Sense strand starting at position 56 of SEQ ID NO: 1560790
uccugauguggaugggaca

SEQ ID NO: 1624540 - RNA, 19 nt, Artificial Sequence
  Description of Artificial Sequence: Synthetic oligonucleotide
  Antisense strand to SEQ ID NO: 1624539
ugucccauccacaucagga

SEQ ID NO: 1624541 - RNA, 19 nt, Artificial Sequence
  Description of Artificial Sequence: Synthetic oligonucleotide
  Sense strand starting at position 155 of SEQ ID NO: 1560790
auggcuacccugugacuaa

SEQ ID NO: 1624542 - RNA, 19 nt, Artificial Sequence
  Description of Artificial Sequence: Synthetic oligonucleotide
  Antisense strand to SEQ ID NO: 1624541
uuagucacaggguagccau

SEQ ID NO: 1624543 - RNA, 19 nt, Artificial Sequence
  Description of Artificial Sequence: Synthetic oligonucleotide
  Sense strand starting at position 200 of SEQ ID NO: 1560790
gcaggguugggagauaguu

SEQ ID NO: 1624544 - RNA, 19 nt, Artificial Sequence
  Description of Artificial Sequence: Synthetic oligonucleotide
  Antisense strand to SEQ ID NO: 1624543
aacuaucucccaacccugc

SEQ ID NO: 1624545 - RNA, 19 nt, Artificial Sequence
  Description of Artificial Sequence: Synthetic oligonucleotide
  Sense strand starting at position 208 of SEQ ID NO: 1560790
gggagauaguuccuaucca

SEQ ID NO: 1624546 - RNA, 19 nt, Artificial Sequence
  Description of Artificial Sequence: Synthetic oligonucleotide
  Antisense strand to SEQ ID NO: 1624545
uggauaggaacuaucuccc

SEQ ID NO: 1624547 - RNA, 19 nt, Artificial Sequence
  Description of Artificial Sequence: Synthetic oligonucleotide
  Sense strand starting at position 209 of SEQ ID NO: 1560790
ggagauaguuccuauccag

SEQ ID NO: 1624548 - RNA, 19 nt, Artificial Sequence
  Description of Artificial Sequence: Synthetic oligonucleotide
  Antisense strand to SEQ ID NO: 1624547
cuggauaggaacuaucucc

SEQ ID NO: 1624549 - RNA, 19 nt, Artificial Sequence
  Description of Artificial Sequence: Synthetic oligonucleotide
  Sense strand starting at position 438 of SEQ ID NO: 1560790
ggcucuuacaagugguaag

SEQ ID NO: 1624550 - RNA, 19 nt, Artificial Sequence
  Description of Artificial Sequence: Synthetic oligonucleotide
  Antisense strand to SEQ ID NO: 1624549
cuuaccacuuguaagagcc

SEQ ID NO: 1624551 - RNA, 19 nt, Artificial Sequence
  Description of Artificial Sequence: Synthetic oligonucleotide
  Sense strand starting at position 441 of SEQ ID NO: 1560790
ucuuacaagugguaaggaa

SEQ ID NO: 1624552 - RNA, 19 nt, Artificial Sequence
  Description of Artificial Sequence: Synthetic oligonucleotide
  Antisense strand to SEQ ID NO: 1624551
uuccuuaccacuuguaaga

SEQ ID NO: 1624553 - RNA, 19 nt, Artificial Sequence
  Description of Artificial Sequence: Synthetic oligonucleotide
  Sense strand starting at position 809 of SEQ ID NO: 1560790
acaggaauguaugaguuga

SEQ ID NO: 1624554 - RNA, 19 nt, Artificial Sequence
  Description of Artificial Sequence: Synthetic oligonucleotide
  Antisense strand to SEQ ID NO: 1624553
ucaacucauacauuccugu

SEQ ID NO: 1624555 - RNA, 19 nt, Artificial Sequence
  Description of Artificial Sequence: Synthetic oligonucleotide
  Sense strand starting at position 813 of SEQ ID NO: 1560790
gaauguaugaguugagcuc

SEQ ID NO: 1624556 - RNA, 19 nt, Artificial Sequence
  Description of Artificial Sequence: Synthetic oligonucleotide
  Antisense strand to SEQ ID NO: 1624555
gagcucaacucauacauuc

SEQ ID NO: 1624557 - RNA, 19 nt, Artificial Sequence
  Description of Artificial Sequence: Synthetic oligonucleotide
  Sense strand starting at position 820 of SEQ ID NO: 1560790
ugaguugagcucugugcau

SEQ ID NO: 1624558 - RNA, 19 nt, Artificial Sequence
  Description of Artificial Sequence: Synthetic oligonucleotide
  Antisense strand to SEQ ID NO: 1624557
augcacagagcucaacuca

SEQ ID NO: 1624559 - RNA, 19 nt, Artificial Sequence
  Description of Artificial Sequence: Synthetic oligonucleotide
  Sense strand starting at position 822 of SEQ ID NO: 1560790
aguugagcucugugcauaa

SEQ ID NO: 1624560 - RNA, 19 nt, Artificial Sequence
  Description of Artificial Sequence: Synthetic oligonucleotide
  Antisense strand to SEQ ID NO: 1624559
uuaugcacagagcucaacu

SEQ ID NO: 1624561 - RNA, 19 nt, Artificial Sequence
  Description of Artificial Sequence: Synthetic oligonucleotide
  Sense strand starting at position 833 of SEQ ID NO: 1560790
gugcauaaggcuugccaga

SEQ ID NO: 1624562 - RNA, 19 nt, Artificial Sequence
  Description of Artificial Sequence: Synthetic oligonucleotide
  Antisense strand to SEQ ID NO: 1624561
ucuggcaagccuuaugcac

SEQ ID NO: 1624563 - RNA, 19 nt, Artificial Sequence
  Description of Artificial Sequence: Synthetic oligonucleotide
  Sense strand starting at position 835 of SEQ ID NO: 1560790
gcauaaggcuugccagaca

SEQ ID NO: 1624564 - RNA, 19 nt, Artificial Sequence
  Description of Artificial Sequence: Synthetic oligonucleotide
  Antisense strand to SEQ ID NO: 1624563
ugucuggcaagccuuaugc

SEQ ID NO: 1624565 - RNA, 19 nt, Artificial Sequence
  Description of Artificial Sequence: Synthetic oligonucleotide
  Sense strand starting at position 843 of SEQ ID NO: 1560790
cuugccagacaucgucuua

SEQ ID NO: 1624566 - RNA, 19 nt, Artificial Sequence
  Description of Artificial Sequence: Synthetic oligonucleotide
  Antisense strand to SEQ ID NO: 1624565
uaagacgaugucuggcaag

SEQ ID NO: 1624567 - RNA, 19 nt, Artificial Sequence
  Description of Artificial Sequence: Synthetic oligonucleotide
  Sense strand starting at position 848 of SEQ ID NO: 1560790
cagacaucgucuuauuuga

SEQ ID NO: 1624568 - RNA, 19 nt, Artificial Sequence
  Description of Artificial Sequence: Synthetic oligonucleotide
  Antisense strand to SEQ ID NO: 1624567
ucaaauaagacgaugucug

SEQ ID NO: 1624569 - RNA, 19 nt, Artificial Sequence
  Description of Artificial Sequence: Synthetic oligonucleotide
  Sense strand starting at position 850 of SEQ ID NO: 1560790
gacaucgucuuauuugagu

SEQ ID NO: 1624570 - RNA, 19 nt, Artificial Sequence
  Description of Artificial Sequence: Synthetic oligonucleotide
  Antisense strand to SEQ ID NO: 1624569
acucaaauaagacgauguc

SEQ ID NO: 1624571 - RNA, 19 nt, Artificial Sequence
  Description of Artificial Sequence: Synthetic oligonucleotide
  Sense strand starting at position 855 of SEQ ID NO: 1560790
cgucuuauuugagucucau

SEQ ID NO: 1624572 - RNA, 19 nt, Artificial Sequence
  Description of Artificial Sequence: Synthetic oligonucleotide
  Antisense strand to SEQ ID NO: 1624571
augagacucaaauaagacg

SEQ ID NO: 1624573 - RNA, 19 nt, Artificial Sequence
  Description of Artificial Sequence: Synthetic oligonucleotide
  Sense strand starting at position 937 of SEQ ID NO: 1560790
aguuauuugcccgaggcca

SEQ ID NO: 1624574 - RNA, 19 nt, Artificial Sequence
  Description of Artificial Sequence: Synthetic oligonucleotide
  Antisense strand to SEQ ID NO: 1624573
uggccucgggcaaauaacu

SEQ ID NO: 1624575 - RNA, 19 nt, Artificial Sequence
  Description of Artificial Sequence: Synthetic oligonucleotide
  Sense strand starting at position 965 of SEQ ID NO: 1560790
gucuguauuugggagagug

SEQ ID NO: 1624576 - RNA, 19 nt, Artificial Sequence
  Description of Artificial Sequence: Synthetic oligonucleotide
  Antisense strand to SEQ ID NO: 1624575
cacucucccaaauacagac

SEQ ID NO: 1624577 - RNA, 19 nt, Artificial Sequence
  Description of Artificial Sequence: Synthetic oligonucleotide
  Sense strand starting at position 1659 of SEQ ID NO: 1560790
gcagccauggagugaguaa

SEQ ID NO: 1624578 - RNA, 19 nt, Artificial Sequence
  Description of Artificial Sequence: Synthetic oligonucleotide
  Antisense strand to SEQ ID NO: 1624577
uuacucacuccauggcugc

SEQ ID NO: 1624579 - RNA, 19 nt, Artificial Sequence
  Description of Artificial Sequence: Synthetic oligonucleotide
  Sense strand starting at position 1671 of SEQ ID NO: 1560790
ugaguaaccgcuuaccucu

SEQ ID NO: 1624580 - RNA, 19 nt, Artificial Sequence
  Description of Artificial Sequence: Synthetic oligonucleotide
  Antisense strand to SEQ ID NO: 1624579
agagguaagcgguuacuca

SEQ ID NO: 1624581 - RNA, 19 nt, Artificial Sequence
  Description of Artificial Sequence: Synthetic oligonucleotide
  Sense strand starting at position 1850 of SEQ ID NO: 1560790
gugggagaguucuagacuc

SEQ ID NO: 1624582 - RNA, 19 nt, Artificial Sequence
  Description of Artificial Sequence: Synthetic oligonucleotide
  Antisense strand to SEQ ID NO: 1624581
gagucuagaacucucccac

SEQ ID NO: 1624583 - RNA, 19 nt, Artificial Sequence
  Description of Artificial Sequence: Synthetic oligonucleotide
  Sense strand starting at position 1856 of SEQ ID NO: 1560790
gaguucuagacucgauguu

SEQ ID NO: 1624584 - RNA, 19 nt, Artificial Sequence
  Description of Artificial Sequence: Synthetic oligonucleotide
  Antisense strand to SEQ ID NO: 1624583
aacaucgagucuagaacuc

SEQ ID NO: 1624585 - RNA, 19 nt, Artificial Sequence
  Description of Artificial Sequence: Synthetic oligonucleotide
  Sense strand starting at position 1857 of SEQ ID NO: 1560790
aguucuagacucgauguuu

SEQ ID NO: 1624586 - RNA, 19 nt, Artificial Sequence
  Description of Artificial Sequence: Synthetic oligonucleotide
  Antisense strand to SEQ ID NO: 1624585
aaacaucgagucuagaacu

SEQ ID NO: 1624587 - RNA, 19 nt, Artificial Sequence
  Description of Artificial Sequence: Synthetic oligonucleotide
  Sense strand starting at position 1939 of SEQ ID NO: 1560790
cgauucuucgugcuugguu

SEQ ID NO: 1624588 - RNA, 19 nt, Artificial Sequence
  Description of Artificial Sequence: Synthetic oligonucleotide
  Antisense strand to SEQ ID NO: 1624587
aaccaagcacgaagaaucg

SEQ ID NO: 1624589 - RNA, 19 nt, Artificial Sequence
  Description of Artificial Sequence: Synthetic oligonucleotide
  Sense strand starting at position 2252 of SEQ ID NO: 1560790
cuuagauugacagggcaga

SEQ ID NO: 1624590 - RNA, 19 nt, Artificial Sequence
  Description of Artificial Sequence: Synthetic oligonucleotide
  Antisense strand to SEQ ID NO: 1624589
ucugcccugucaaucuaag

SEQ ID NO: 1624591 - RNA, 19 nt, Artificial Sequence
  Description of Artificial Sequence: Synthetic oligonucleotide
  Sense strand starting at position 2311 of SEQ ID NO: 1560790
gaaccacugucgucacgau

SEQ ID NO: 1624592 - RNA, 19 nt, Artificial Sequence
  Description of Artificial Sequence: Synthetic oligonucleotide
  Antisense strand to SEQ ID NO: 1624591
aucgugacgacagugguuc

SEQ ID NO: 1624593 - RNA, 19 nt, Artificial Sequence
  Description of Artificial Sequence: Synthetic oligonucleotide
  Sense strand starting at position 2367 of SEQ ID NO: 1560790
ggcuaaaccaaccguuagu

SEQ ID NO: 1624594 - RNA, 19 nt, Artificial Sequence
  Description of Artificial Sequence: Synthetic oligonucleotide
  Antisense strand to SEQ ID NO: 1624593
acuaacgguugguuuagcc

SEQ ID NO: 1624595 - RNA, 19 nt, Artificial Sequence
  Description of Artificial Sequence: Synthetic oligonucleotide
  Sense strand starting at position 2711 of SEQ ID NO: 1560790
cugggagaccuuuagguuu

SEQ ID NO: 1624596 - RNA, 19 nt, Artificial Sequence
  Description of Artificial Sequence: Synthetic oligonucleotide
  Antisense strand to SEQ ID NO: 1624595
aaaccuaaaggucucccag

SEQ ID NO: 1624597 - RNA, 19 nt, Artificial Sequence
  Description of Artificial Sequence: Synthetic oligonucleotide
  Sense strand starting at position 2783 of SEQ ID NO: 1560790
aagaaauucccuugggagu

SEQ ID NO: 1624598 - RNA, 19 nt, Artificial Sequence
  Description of Artificial Sequence: Synthetic oligonucleotide
  Antisense strand to SEQ ID NO: 1624597
acucccaagggaauuucuu

SEQ ID NO: 1624599 - RNA, 19 nt, Artificial Sequence
  Description of Artificial Sequence: Synthetic oligonucleotide
  Sense strand starting at position 2810 of SEQ ID NO: 1560790
cucagagauuuggguaaag

SEQ ID NO: 1624600 - RNA, 19 nt, Artificial Sequence
  Description of Artificial Sequence: Synthetic oligonucleotide
  Antisense strand to SEQ ID NO: 1624599
cuuuacccaaaucucugag

SEQ ID NO: 1624601 - RNA, 19 nt, Artificial Sequence
  Description of Artificial Sequence: Synthetic oligonucleotide
  Sense strand starting at position 2858 of SEQ ID NO: 1560790
gaggcuuaguguucuaaac

SEQ ID NO: 1624602 - RNA, 19 nt, Artificial Sequence
  Description of Artificial Sequence: Synthetic oligonucleotide
  Antisense strand to SEQ ID NO: 1624601
guuuagaacacuaagccuc

SEQ ID NO: 1624603 - RNA, 19 nt, Artificial Sequence
  Description of Artificial Sequence: Synthetic oligonucleotide
  Sense strand starting at position 3500 of SEQ ID NO: 1560790
auuaaaugagaguguauug

SEQ ID NO: 1624604 - RNA, 19 nt, Artificial Sequence
  Description of Artificial Sequence: Synthetic oligonucleotide
  Antisense strand to SEQ ID NO: 1624603
caauacacucucauuuaau

SEQ ID NO: 1624605 - RNA, 19 nt, Artificial Sequence
  Description of Artificial Sequence: Synthetic oligonucleotide
  Sense strand starting at position 3507 of SEQ ID NO: 1560790
gagaguguauuggaauaag

SEQ ID NO: 1624606 - RNA, 19 nt, Artificial Sequence
  Description of Artificial Sequence: Synthetic oligonucleotide
  Antisense strand to SEQ ID NO: 1624605
cuuauuccaauacacucuc

SEQ ID NO: 1624607 - RNA, 19 nt, Artificial Sequence
  Description of Artificial Sequence: Synthetic oligonucleotide
  Sense strand starting at position 3510 of SEQ ID NO: 1560790
aguguauuggaauaaguca

SEQ ID NO: 1624608 - RNA, 19 nt, Artificial Sequence
  Description of Artificial Sequence: Synthetic oligonucleotide
  Antisense strand to SEQ ID NO: 1624607
ugacuuauuccaauacacu

SEQ ID NO: 1624609 - RNA, 19 nt, Artificial Sequence
  Description of Artificial Sequence: Synthetic oligonucleotide
  Sense strand starting at position 3575 of SEQ ID NO: 1560790
uagaauggguagccagaaa

SEQ ID NO: 1624610 - RNA, 19 nt, Artificial Sequence
  Description of Artificial Sequence: Synthetic oligonucleotide
  Antisense strand to SEQ ID NO: 1624609
uuucuggcuacccauucua

SEQ ID NO: 1624611 - RNA, 19 nt, Artificial Sequence
  Description of Artificial Sequence: Synthetic oligonucleotide
  Sense strand starting at position 3615 of SEQ ID NO: 1560790
uguugacugaggcauaaau

SEQ ID NO: 1624612 - RNA, 19 nt, Artificial Sequence
  Description of Artificial Sequence: Synthetic oligonucleotide
  Antisense strand to SEQ ID NO: 1624611
auuuaugccucagucaaca

SEQ ID NO: 1624613 - RNA, 19 nt, Artificial Sequence
  Description of Artificial Sequence: Synthetic oligonucleotide
  Sense strand starting at position 3627 of SEQ ID NO: 1560790
cauaaaugaugggaaggaa

SEQ ID NO: 1624614 - RNA, 19 nt, Artificial Sequence
  Description of Artificial Sequence: Synthetic oligonucleotide
  Antisense strand to SEQ ID NO: 1624613
uuccuucccaucauuuaug

SEQ ID NO: 1624615 - RNA, 19 nt, Artificial Sequence
  Description of Artificial Sequence: Synthetic oligonucleotide
  Sense strand starting at position 3975 of SEQ ID NO: 1560790
guuggagggaacuguauau

SEQ ID NO: 1624616 - RNA, 19 nt, Artificial Sequence
  Description of Artificial Sequence: Synthetic oligonucleotide
  Antisense strand to SEQ ID NO: 1624615
auauacaguucccuccaac

SEQ ID NO: 1624617 - RNA, 19 nt, Artificial Sequence
  Description of Artificial Sequence: Synthetic oligonucleotide
  Sense strand starting at position 3981 of SEQ ID NO: 1560790
gggaacuguauaugcagaa

SEQ ID NO: 1624618 - RNA, 19 nt, Artificial Sequence
  Description of Artificial Sequence: Synthetic oligonucleotide
  Antisense strand to SEQ ID NO: 1624617
uucugcauauacaguuccc

SEQ ID NO: 1624619 - RNA, 19 nt, Artificial Sequence
  Description of Artificial Sequence: Synthetic oligonucleotide
  Sense strand starting at position 74 of SEQ ID NO: 1560791
caguaagugcucuaaggga

SEQ ID NO: 1624620 - RNA, 19 nt, Artificial Sequence
  Description of Artificial Sequence: Synthetic oligonucleotide
  Antisense strand to SEQ ID NO: 1624619
ucccuuagagcacuuacug

SEQ ID NO: 1624621 - RNA, 19 nt, Artificial Sequence
  Description of Artificial Sequence: Synthetic oligonucleotide
  Sense strand starting at position 153 of SEQ ID NO: 1560791
uuguguguaccgcucagua

SEQ ID NO: 1624622 - RNA, 19 nt, Artificial Sequence
  Description of Artificial Sequence: Synthetic oligonucleotide
  Antisense strand to SEQ ID NO: 1624621
uacugagcgguacacacaa

SEQ ID NO: 1624623 - RNA, 19 nt, Artificial Sequence
  Description of Artificial Sequence: Synthetic oligonucleotide
  Sense strand starting at position 256 of SEQ ID NO: 1560791
uccugauguggaugggaca

SEQ ID NO: 1624624 - RNA, 19 nt, Artificial Sequence
  Description of Artificial Sequence: Synthetic oligonucleotide
  Antisense strand to SEQ ID NO: 1624623
ugucccauccacaucagga

SEQ ID NO: 1624625 - RNA, 19 nt, Artificial Sequence
  Description of Artificial Sequence: Synthetic oligonucleotide
  Sense strand starting at position 355 of SEQ ID NO: 1560791
auggcuacccugugacuaa

SEQ ID NO: 1624626 - RNA, 19 nt, Artificial Sequence
  Description of Artificial Sequence: Synthetic oligonucleotide
  Antisense strand to SEQ ID NO: 1624625
uuagucacaggguagccau

SEQ ID NO: 1624627 - RNA, 19 nt, Artificial Sequence
  Description of Artificial Sequence: Synthetic oligonucleotide
  Sense strand starting at position 400 of SEQ ID NO: 1560791
gcaggguugggagauaguu

SEQ ID NO: 1624628 - RNA, 19 nt, Artificial Sequence
  Description of Artificial Sequence: Synthetic oligonucleotide
  Antisense strand to SEQ ID NO: 1624627
aacuaucucccaacccugc

SEQ ID NO: 1624629 - RNA, 19 nt, Artificial Sequence
  Description of Artificial Sequence: Synthetic oligonucleotide
  Sense strand starting at position 408 of SEQ ID NO: 1560791
gggagauaguuccuaucca

SEQ ID NO: 1624630 - RNA, 19 nt, Artificial Sequence
  Description of Artificial Sequence: Synthetic oligonucleotide
  Antisense strand to SEQ ID NO: 1624629
uggauaggaacuaucuccc

SEQ ID NO: 1624631 - RNA, 19 nt, Artificial Sequence
  Description of Artificial Sequence: Synthetic oligonucleotide
  Sense strand starting at position 409 of SEQ ID NO: 1560791
ggagauaguuccuauccag

SEQ ID NO: 1624632 - RNA, 19 nt, Artificial Sequence
  Description of Artificial Sequence: Synthetic oligonucleotide
  Antisense strand to SEQ ID NO: 1624631
cuggauaggaacuaucucc

SEQ ID NO: 1624633 - RNA, 19 nt, Artificial Sequence
  Description of Artificial Sequence: Synthetic oligonucleotide
  Sense strand starting at position 638 of SEQ ID NO: 1560791
ggcucuuacaagugguaag

SEQ ID NO: 1624634 - RNA, 19 nt, Artificial Sequence
  Description of Artificial Sequence: Synthetic oligonucleotide
  Antisense strand to SEQ ID NO: 1624633
cuuaccacuuguaagagcc

SEQ ID NO: 1624635 - RNA, 19 nt, Artificial Sequence
  Description of Artificial Sequence: Synthetic oligonucleotide
  Sense strand starting at position 641 of SEQ ID NO: 1560791
ucuuacaagugguaaggaa

SEQ ID NO: 1624636 - RNA, 19 nt, Artificial Sequence
  Description of Artificial Sequence: Synthetic oligonucleotide
  Antisense strand to SEQ ID NO: 1624635
uuccuuaccacuuguaaga

SEQ ID NO: 1624637 - RNA, 19 nt, Artificial Sequence
  Description of Artificial Sequence: Synthetic oligonucleotide
  Sense strand starting at position 1009 of SEQ ID NO: 1560791
acaggaauguaugaguuga

SEQ ID NO: 1624638 - RNA, 19 nt, Artificial Sequence
  Description of Artificial Sequence: Synthetic oligonucleotide
  Antisense strand to SEQ ID NO: 1624637
ucaacucauacauuccugu

SEQ ID NO: 1624639 - RNA, 19 nt, Artificial Sequence
  Description of Artificial Sequence: Synthetic oligonucleotide
  Sense strand starting at position 1013 of SEQ ID NO: 1560791
gaauguaugaguugagcuc

SEQ ID NO: 1624640 - RNA, 19 nt, Artificial Sequence
  Description of Artificial Sequence: Synthetic oligonucleotide
  Antisense strand to SEQ ID NO: 1624639
gagcucaacucauacauuc

SEQ ID NO: 1624641 - RNA, 19 nt, Artificial Sequence
  Description of Artificial Sequence: Synthetic oligonucleotide
  Sense strand starting at position 1020 of SEQ ID NO: 1560791
ugaguugagcucugugcau

SEQ ID NO: 1624642 - RNA, 19 nt, Artificial Sequence
  Description of Artificial Sequence: Synthetic oligonucleotide
  Antisense strand to SEQ ID NO: 1624641
augcacagagcucaacuca

SEQ ID NO: 1624643 - RNA, 19 nt, Artificial Sequence
  Description of Artificial Sequence: Synthetic oligonucleotide
  Sense strand starting at position 1022 of SEQ ID NO: 1560791
aguugagcucugugcauaa

SEQ ID NO: 1624644 - RNA, 19 nt, Artificial Sequence
  Description of Artificial Sequence: Synthetic oligonucleotide
  Antisense strand to SEQ ID NO: 1624643
uuaugcacagagcucaacu

SEQ ID NO: 1624645 - RNA, 19 nt, Artificial Sequence
  Description of Artificial Sequence: Synthetic oligonucleotide
  Sense strand starting at position 1033 of SEQ ID NO: 1560791
gugcauaaggcuugccaga

SEQ ID NO: 1624646 - RNA, 19 nt, Artificial Sequence
  Description of Artificial Sequence: Synthetic oligonucleotide
  Antisense strand to SEQ ID NO: 1624645
ucuggcaagccuuaugcac

SEQ ID NO: 1624647 - RNA, 19 nt, Artificial Sequence
  Description of Artificial Sequence: Synthetic oligonucleotide
  Sense strand starting at position 1035 of SEQ ID NO: 1560791
gcauaaggcuugccagaca

SEQ ID NO: 1624648 - RNA, 19 nt, Artificial Sequence
  Description of Artificial Sequence: Synthetic oligonucleotide
  Antisense strand to SEQ ID NO: 1624647
ugucuggcaagccuuaugc

SEQ ID NO: 1624649 - RNA, 19 nt, Artificial Sequence
  Description of Artificial Sequence: Synthetic oligonucleotide
  Sense strand starting at position 1043 of SEQ ID NO: 1560791
cuugccagacaucgucuua

SEQ ID NO: 1624650 - RNA, 19 nt, Artificial Sequence
  Description of Artificial Sequence: Synthetic oligonucleotide
  Antisense strand to SEQ ID NO: 1624649
uaagacgaugucuggcaag

SEQ ID NO: 1624651 - RNA, 19 nt, Artificial Sequence
  Description of Artificial Sequence: Synthetic oligonucleotide
  Sense strand starting at position 1048 of SEQ ID NO: 1560791
cagacaucgucuuauuuga

SEQ ID NO: 1624652 - RNA, 19 nt, Artificial Sequence
  Description of Artificial Sequence: Synthetic oligonucleotide
  Antisense strand to SEQ ID NO: 1624651
ucaaauaagacgaugucug

SEQ ID NO: 1624653 - RNA, 19 nt, Artificial Sequence
  Description of Artificial Sequence: Synthetic oligonucleotide
  Sense strand starting at position 1050 of SEQ ID NO: 1560791
gacaucgucuuauuugagu

SEQ ID NO: 1624654 - RNA, 19 nt, Artificial Sequence
  Description of Artificial Sequence: Synthetic oligonucleotide
  Antisense strand to SEQ ID NO: 1624653
acucaaauaagacgauguc

SEQ ID NO: 1624655 - RNA, 19 nt, Artificial Sequence
  Description of Artificial Sequence: Synthetic oligonucleotide
  Sense strand starting at position 1055 of SEQ ID NO: 1560791
cgucuuauuugagucucau

SEQ ID NO: 1624656 - RNA, 19 nt, Artificial Sequence
  Description of Artificial Sequence: Synthetic oligonucleotide
  Antisense strand to SEQ ID NO: 1624655
augagacucaaauaagacg

SEQ ID NO: 1624657 - RNA, 19 nt, Artificial Sequence
  Description of Artificial Sequence: Synthetic oligonucleotide
  Sense strand starting at position 1137 of SEQ ID NO: 1560791
aguuauuugcccgaggcca

SEQ ID NO: 1624658 - RNA, 19 nt, Artificial Sequence
  Description of Artificial Sequence: Synthetic oligonucleotide
  Antisense strand to SEQ ID NO: 1624657
uggccucgggcaaauaacu

SEQ ID NO: 1624659 - RNA, 19 nt, Artificial Sequence
  Description of Artificial Sequence: Synthetic oligonucleotide
  Sense strand starting at position 1165 of SEQ ID NO: 1560791
gucuguauuugggagagug

SEQ ID NO: 1624660 - RNA, 19 nt, Artificial Sequence
  Description of Artificial Sequence: Synthetic oligonucleotide
  Antisense strand to SEQ ID NO: 1624659
cacucucccaaauacagac

SEQ ID NO: 1624661 - RNA, 19 nt, Artificial Sequence
  Description of Artificial Sequence: Synthetic oligonucleotide
  Sense strand starting at position 1859 of SEQ ID NO: 1560791
gcagccauggagugaguaa

SEQ ID NO: 1624662 - RNA, 19 nt, Artificial Sequence
  Description of Artificial Sequence: Synthetic oligonucleotide
  Antisense strand to SEQ ID NO: 1624661
uuacucacuccauggcugc

SEQ ID NO: 1624663 - RNA, 19 nt, Artificial Sequence
  Description of Artificial Sequence: Synthetic oligonucleotide
  Sense strand starting at position 1871 of SEQ ID NO: 1560791
ugaguaaccgcuuaccucu

SEQ ID NO: 1624664 - RNA, 19 nt, Artificial Sequence
  Description of Artificial Sequence: Synthetic oligonucleotide
  Antisense strand to SEQ ID NO: 1624663
agagguaagcgguuacuca

SEQ ID NO: 1624665 - RNA, 19 nt, Artificial Sequence
  Description of Artificial Sequence: Synthetic oligonucleotide
  Sense strand starting at position 2050 of SEQ ID NO: 1560791
gugggagaguucuagacuc

SEQ ID NO: 1624666 - RNA, 19 nt, Artificial Sequence
  Description of Artificial Sequence: Synthetic oligonucleotide
  Antisense strand to SEQ ID NO: 1624665
gagucuagaacucucccac

SEQ ID NO: 1624667 - RNA, 19 nt, Artificial Sequence
  Description of Artificial Sequence: Synthetic oligonucleotide
  Sense strand starting at position 2056 of SEQ ID NO: 1560791
gaguucuagacucgauguu

SEQ ID NO: 1624668 - RNA, 19 nt, Artificial Sequence
  Description of Artificial Sequence: Synthetic oligonucleotide
  Antisense strand to SEQ ID NO: 1624667
aacaucgagucuagaacuc

SEQ ID NO: 1624669 - RNA, 19 nt, Artificial Sequence
  Description of Artificial Sequence: Synthetic oligonucleotide
  Sense strand starting at position 2057 of SEQ ID NO: 1560791
aguucuagacucgauguuu

SEQ ID NO: 1624670 - RNA, 19 nt, Artificial Sequence
  Description of Artificial Sequence: Synthetic oligonucleotide
  Antisense strand to SEQ ID NO: 1624669
aaacaucgagucuagaacu

SEQ ID NO: 1624671 - RNA, 19 nt, Artificial Sequence
  Description of Artificial Sequence: Synthetic oligonucleotide
  Sense strand starting at position 2139 of SEQ ID NO: 1560791
cgauucuucgugcuugguu

SEQ ID NO: 1624672 - RNA, 19 nt, Artificial Sequence
  Description of Artificial Sequence: Synthetic oligonucleotide
  Antisense strand to SEQ ID NO: 1624671
aaccaagcacgaagaaucg

SEQ ID NO: 1624673 - RNA, 19 nt, Artificial Sequence
  Description of Artificial Sequence: Synthetic oligonucleotide
  Sense strand starting at position 2452 of SEQ ID NO: 1560791
cuuagauugacagggcaga

SEQ ID NO: 1624674 - RNA, 19 nt, Artificial Sequence
  Description of Artificial Sequence: Synthetic oligonucleotide
  Antisense strand to SEQ ID NO: 1624673
ucugcccugucaaucuaag

SEQ ID NO: 1624675 - RNA, 19 nt, Artificial Sequence
  Description of Artificial Sequence: Synthetic oligonucleotide
  Sense strand starting at position 2511 of SEQ ID NO: 1560791
gaaccacugucgucacgau

SEQ ID NO: 1624676 - RNA, 19 nt, Artificial Sequence
  Description of Artificial Sequence: Synthetic oligonucleotide
  Antisense strand to SEQ ID NO: 1624675
aucgugacgacagugguuc

SEQ ID NO: 1624677 - RNA, 19 nt, Artificial Sequence
  Description of Artificial Sequence: Synthetic oligonucleotide
  Sense strand starting at position 2567 of SEQ ID NO: 1560791
ggcuaaaccaaccguuagu

SEQ ID NO: 1624678 - RNA, 19 nt, Artificial Sequence
  Description of Artificial Sequence: Synthetic oligonucleotide
  Antisense strand to SEQ ID NO: 1624677
acuaacgguugguuuagcc

SEQ ID NO: 1624679 - RNA, 19 nt, Artificial Sequence
  Description of Artificial Sequence: Synthetic oligonucleotide
  Sense strand starting at position 2911 of SEQ ID NO: 1560791
cugggagaccuuuagguuu

SEQ ID NO: 1624680 - RNA, 19 nt, Artificial Sequence
  Description of Artificial Sequence: Synthetic oligonucleotide
  Antisense strand to SEQ ID NO: 1624679
aaaccuaaaggucucccag

SEQ ID NO: 1624681 - RNA, 19 nt, Artificial Sequence
  Description of Artificial Sequence: Synthetic oligonucleotide
  Sense strand starting at position 2983 of SEQ ID NO: 1560791
aagaaauucccuugggagu

SEQ ID NO: 1624682 - RNA, 19 nt, Artificial Sequence
  Description of Artificial Sequence: Synthetic oligonucleotide
  Antisense strand to SEQ ID NO: 1624681
acucccaagggaauuucuu

SEQ ID NO: 1624683 - RNA, 19 nt, Artificial Sequence
  Description of Artificial Sequence: Synthetic oligonucleotide
  Sense strand starting at position 3010 of SEQ ID NO: 1560791
cucagagauuuggguaaag

SEQ ID NO: 1624684 - RNA, 19 nt, Artificial Sequence
  Description of Artificial Sequence: Synthetic oligonucleotide
  Antisense strand to SEQ ID NO: 1624683
cuuuacccaaaucucugag

SEQ ID NO: 1624685 - RNA, 19 nt, Artificial Sequence
  Description of Artificial Sequence: Synthetic oligonucleotide
  Sense strand starting at position 3058 of SEQ ID NO: 1560791
gaggcuuaguguucuaaac

SEQ ID NO: 1624686 - RNA, 19 nt, Artificial Sequence
  Description of Artificial Sequence: Synthetic oligonucleotide
  Antisense strand to SEQ ID NO: 1624685
guuuagaacacuaagccuc

SEQ ID NO: 1624687 - RNA, 19 nt, Artificial Sequence
  Description of Artificial Sequence: Synthetic oligonucleotide
  Sense strand starting at position 3700 of SEQ ID NO: 1560791
auuaaaugagaguguauug

SEQ ID NO: 1624688 - RNA, 19 nt, Artificial Sequence
  Description of Artificial Sequence: Synthetic oligonucleotide
  Antisense strand to SEQ ID NO: 1624687
caauacacucucauuuaau

SEQ ID NO: 1624689 - RNA, 19 nt, Artificial Sequence
  Description of Artificial Sequence: Synthetic oligonucleotide
  Sense strand starting at position 3707 of SEQ ID NO: 1560791
gagaguguauuggaauaag

SEQ ID NO: 1624690 - RNA, 19 nt, Artificial Sequence
  Description of Artificial Sequence: Synthetic oligonucleotide
  Antisense strand to SEQ ID NO: 1624689
cuuauuccaauacacucuc

SEQ ID NO: 1624691 - RNA, 19 nt, Artificial Sequence
  Description of Artificial Sequence: Synthetic oligonucleotide
  Sense strand starting at position 3710 of SEQ ID NO: 1560791
aguguauuggaauaaguca

SEQ ID NO: 1624692 - RNA, 19 nt, Artificial Sequence
  Description of Artificial Sequence: Synthetic oligonucleotide
  Antisense strand to SEQ ID NO: 1624691
ugacuuauuccaauacacu

SEQ ID NO: 1624693 - RNA, 19 nt, Artificial Sequence
  Description of Artificial Sequence: Synthetic oligonucleotide
  Sense strand starting at position 3775 of SEQ ID NO: 1560791
uagaauggguagccagaaa

SEQ ID NO: 1624694 - RNA, 19 nt, Artificial Sequence
  Description of Artificial Sequence: Synthetic oligonucleotide
  Antisense strand to SEQ ID NO: 1624693
uuucuggcuacccauucua

SEQ ID NO: 1624695 - RNA, 19 nt, Artificial Sequence
  Description of Artificial Sequence: Synthetic oligonucleotide
  Sense strand starting at position 3815 of SEQ ID NO: 1560791
uguugacugaggcauaaau

SEQ ID NO: 1624696 - RNA, 19 nt, Artificial Sequence
  Description of Artificial Sequence: Synthetic oligonucleotide
  Antisense strand to SEQ ID NO: 1624695
auuuaugccucagucaaca

SEQ ID NO: 1624697 - RNA, 19 nt, Artificial Sequence
  Description of Artificial Sequence: Synthetic oligonucleotide
  Sense strand starting at position 3827 of SEQ ID NO: 1560791
cauaaaugaugggaaggaa

SEQ ID NO: 1624698 - RNA, 19 nt, Artificial Sequence
  Description of Artificial Sequence: Synthetic oligonucleotide
  Antisense strand to SEQ ID NO: 1624697
uuccuucccaucauuuaug

SEQ ID NO: 1624699 - RNA, 19 nt, Artificial Sequence
  Description of Artificial Sequence: Synthetic oligonucleotide
  Sense strand starting at position 142 of SEQ ID NO: 1560792
ggcagccagaguuaauuau

SEQ ID NO: 1624700 - RNA, 19 nt, Artificial Sequence
  Description of Artificial Sequence: Synthetic oligonucleotide
  Antisense strand to SEQ ID NO: 1624699
auaauuaacucuggcugcc

SEQ ID NO: 1624701 - RNA, 19 nt, Artificial Sequence
  Description of Artificial Sequence: Synthetic oligonucleotide
  Sense strand starting at position 168 of SEQ ID NO: 1560792
gcaguaaaggcccaguaaa

SEQ ID NO: 1624702 - RNA, 19 nt, Artificial Sequence
  Description of Artificial Sequence: Synthetic oligonucleotide
  Antisense strand to SEQ ID NO: 1624701
uuuacugggccuuuacugc

SEQ ID NO: 1624703 - RNA, 19 nt, Artificial Sequence
  Description of Artificial Sequence: Synthetic oligonucleotide
  Sense strand starting at position 188 of SEQ ID NO: 1560792
agaguugagcgucaccauu

SEQ ID NO: 1624704 - RNA, 19 nt, Artificial Sequence
  Description of Artificial Sequence: Synthetic oligonucleotide
  Antisense strand to SEQ ID NO: 1624703
aauggugacgcucaacucu

SEQ ID NO: 1624705 - RNA, 19 nt, Artificial Sequence
  Description of Artificial Sequence: Synthetic oligonucleotide
  Sense strand starting at position 226 of SEQ ID NO: 1560792
agcuuagagugagaacuuu

SEQ ID NO: 1624706 - RNA, 19 nt, Artificial Sequence
  Description of Artificial Sequence: Synthetic oligonucleotide
  Antisense strand to SEQ ID NO: 1624705
aaaguucucacucuaagcu

SEQ ID NO: 1624707 - RNA, 19 nt, Artificial Sequence
  Description of Artificial Sequence: Synthetic oligonucleotide
  Sense strand starting at position 234 of SEQ ID NO: 1560792
gugagaacuuucucaccag

SEQ ID NO: 1624708 - RNA, 19 nt, Artificial Sequence
  Description of Artificial Sequence: Synthetic oligonucleotide
  Antisense strand to SEQ ID NO: 1624707
cuggugagaaaguucucac

SEQ ID NO: 1624709 - RNA, 19 nt, Artificial Sequence
  Description of Artificial Sequence: Synthetic oligonucleotide
  Sense strand starting at position 572 of SEQ ID NO: 1560792
guuacugccugcugaugau

SEQ ID NO: 1624710 - RNA, 19 nt, Artificial Sequence
  Description of Artificial Sequence: Synthetic oligonucleotide
  Antisense strand to SEQ ID NO: 1624709
aucaucagcaggcaguaac

SEQ ID NO: 1624711 - RNA, 19 nt, Artificial Sequence
  Description of Artificial Sequence: Synthetic oligonucleotide
  Sense strand starting at position 598 of SEQ ID NO: 1560792
ggauaagagucuuugaccu

SEQ ID NO: 1624712 - RNA, 19 nt, Artificial Sequence
  Description of Artificial Sequence: Synthetic oligonucleotide
  Antisense strand to SEQ ID NO: 1624711
aggucaaagacucuuaucc

SEQ ID NO: 1624713 - RNA, 19 nt, Artificial Sequence
  Description of Artificial Sequence: Synthetic oligonucleotide
  Sense strand starting at position 661 of SEQ ID NO: 1560792
ccuccaucucaguaugaca

SEQ ID NO: 1624714 - RNA, 19 nt, Artificial Sequence
  Description of Artificial Sequence: Synthetic oligonucleotide
  Antisense strand to SEQ ID NO: 1624713
ugucauacugagauggagg

SEQ ID NO: 1624715 - RNA, 19 nt, Artificial Sequence
  Description of Artificial Sequence: Synthetic oligonucleotide
  Sense strand starting at position 709 of SEQ ID NO: 1560792
uggcaauugucccaugcau

SEQ ID NO: 1624716 - RNA, 19 nt, Artificial Sequence
  Description of Artificial Sequence: Synthetic oligonucleotide
  Antisense strand to SEQ ID NO: 1624715
augcaugggacaauugcca

SEQ ID NO: 1624717 - RNA, 19 nt, Artificial Sequence
  Description of Artificial Sequence: Synthetic oligonucleotide
  Sense strand starting at position 711 of SEQ ID NO: 1560792
gcaauugucccaugcauuu

SEQ ID NO: 1624718 - RNA, 19 nt, Artificial Sequence
  Description of Artificial Sequence: Synthetic oligonucleotide
  Antisense strand to SEQ ID NO: 1624717
aaaugcaugggacaauugc

SEQ ID NO: 1624719 - RNA, 19 nt, Artificial Sequence
  Description of Artificial Sequence: Synthetic oligonucleotide
  Sense strand starting at position 794 of SEQ ID NO: 1560792
ccaccaaagucgucacaau

SEQ ID NO: 1624720 - RNA, 19 nt, Artificial Sequence
  Description of Artificial Sequence: Synthetic oligonucleotide
  Antisense strand to SEQ ID NO: 1624719
auugugacgacuuuggugg

SEQ ID NO: 1624721 - RNA, 19 nt, Artificial Sequence
  Description of Artificial Sequence: Synthetic oligonucleotide
  Sense strand starting at position 1336 of SEQ ID NO: 1560792
cagagcuugcaguaacuga

SEQ ID NO: 1624722 - RNA, 19 nt, Artificial Sequence
  Description of Artificial Sequence: Synthetic oligonucleotide
  Antisense strand to SEQ ID NO: 1624721
ucaguuacugcaagcucug

SEQ ID NO: 1624723 - RNA, 19 nt, Artificial Sequence
  Description of Artificial Sequence: Synthetic oligonucleotide
  Sense strand starting at position 1521 of SEQ ID NO: 1560792
ccuguacuuuagugcucua

SEQ ID NO: 1624724 - RNA, 19 nt, Artificial Sequence
  Description of Artificial Sequence: Synthetic oligonucleotide
  Antisense strand to SEQ ID NO: 1624723
uagagcacuaaaguacagg

SEQ ID NO: 1624725 - RNA, 19 nt, Artificial Sequence
  Description of Artificial Sequence: Synthetic oligonucleotide
  Sense strand starting at position 2005 of SEQ ID NO: 1560792
ggaaauagguuagagagga

SEQ ID NO: 1624726 - RNA, 19 nt, Artificial Sequence
  Description of Artificial Sequence: Synthetic oligonucleotide
  Antisense strand to SEQ ID NO: 1624725
uccucucuaaccuauuucc

SEQ ID NO: 1624727 - RNA, 19 nt, Artificial Sequence
  Description of Artificial Sequence: Synthetic oligonucleotide
  Sense strand starting at position 2063 of SEQ ID NO: 1560792
uggcuauccuaguaacuuu

SEQ ID NO: 1624728 - RNA, 19 nt, Artificial Sequence
  Description of Artificial Sequence: Synthetic oligonucleotide
  Antisense strand to SEQ ID NO: 1624727
aaaguuacuaggauagcca

SEQ ID NO: 1624729 - RNA, 19 nt, Artificial Sequence
  Description of Artificial Sequence: Synthetic oligonucleotide
  Sense strand starting at position 2070 of SEQ ID NO: 1560792
ccuaguaacuuucgucuua

SEQ ID NO: 1624730 - RNA, 19 nt, Artificial Sequence
  Description of Artificial Sequence: Synthetic oligonucleotide
  Antisense strand to SEQ ID NO: 1624729
uaagacgaaaguuacuagg

SEQ ID NO: 1624731 - RNA, 19 nt, Artificial Sequence
  Description of Artificial Sequence: Synthetic oligonucleotide
  Sense strand starting at position 2075 of SEQ ID NO: 1560792
uaacuuucgucuuagguau

SEQ ID NO: 1624732 - RNA, 19 nt, Artificial Sequence
  Description of Artificial Sequence: Synthetic oligonucleotide
  Antisense strand to SEQ ID NO: 1624731
auaccuaagacgaaaguua

SEQ ID NO: 1624733 - RNA, 19 nt, Artificial Sequence
  Description of Artificial Sequence: Synthetic oligonucleotide
  Sense strand starting at position 2077 of SEQ ID NO: 1560792
acuuucgucuuagguauuu

SEQ ID NO: 1624734 - RNA, 19 nt, Artificial Sequence
  Description of Artificial Sequence: Synthetic oligonucleotide
  Antisense strand to SEQ ID NO: 1624733
aaauaccuaagacgaaagu

SEQ ID NO: 1624735 - RNA, 19 nt, Artificial Sequence
  Description of Artificial Sequence: Synthetic oligonucleotide
  Sense strand starting at position 2132 of SEQ ID NO: 1560792
ggauaaugaaagcgauugu

SEQ ID NO: 1624736 - RNA, 19 nt, Artificial Sequence
  Description of Artificial Sequence: Synthetic oligonucleotide
  Antisense strand to SEQ ID NO: 1624735
acaaucgcuuucauuaucc

SEQ ID NO: 1624737 - RNA, 19 nt, Artificial Sequence
  Description of Artificial Sequence: Synthetic oligonucleotide
  Sense strand starting at position 2139 of SEQ ID NO: 1560792
gaaagcgauuguuugcacu

SEQ ID NO: 1624738 - RNA, 19 nt, Artificial Sequence
  Description of Artificial Sequence: Synthetic oligonucleotide
  Antisense strand to SEQ ID NO: 1624737
agugcaaacaaucgcuuuc

SEQ ID NO: 1624739 - RNA, 19 nt, Artificial Sequence
  Description of Artificial Sequence: Synthetic oligonucleotide
  Sense strand starting at position 2145 of SEQ ID NO: 1560792
gauuguuugcacuagggca

SEQ ID NO: 1624740 - RNA, 19 nt, Artificial Sequence
  Description of Artificial Sequence: Synthetic oligonucleotide
  Antisense strand to SEQ ID NO: 1624739
ugcccuagugcaaacaauc

SEQ ID NO: 1624741 - RNA, 19 nt, Artificial Sequence
  Description of Artificial Sequence: Synthetic oligonucleotide
  Sense strand starting at position 2183 of SEQ ID NO: 1560792
agcccagacuuagugguua

SEQ ID NO: 1624742 - RNA, 19 nt, Artificial Sequence
  Description of Artificial Sequence: Synthetic oligonucleotide
  Antisense strand to SEQ ID NO: 1624741
uaaccacuaagucugggcu

SEQ ID NO: 1624743 - RNA, 19 nt, Artificial Sequence
  Description of Artificial Sequence: Synthetic oligonucleotide
  Sense strand starting at position 2187 of SEQ ID NO: 1560792
cagacuuagugguuaacua

SEQ ID NO: 1624744 - RNA, 19 nt, Artificial Sequence
  Description of Artificial Sequence: Synthetic oligonucleotide
  Antisense strand to SEQ ID NO: 1624743
uaguuaaccacuaagucug

SEQ ID NO: 1624745 - RNA, 19 nt, Artificial Sequence
  Description of Artificial Sequence: Synthetic oligonucleotide
  Sense strand starting at position 2188 of SEQ ID NO: 1560792
agacuuagugguuaacuau

SEQ ID NO: 1624746 - RNA, 19 nt, Artificial Sequence
  Description of Artificial Sequence: Synthetic oligonucleotide
  Antisense strand to SEQ ID NO: 1624745
auaguuaaccacuaagucu

SEQ ID NO: 1624747 - RNA, 19 nt, Artificial Sequence
  Description of Artificial Sequence: Synthetic oligonucleotide
  Sense strand starting at position 2197 of SEQ ID NO: 1560792
gguuaacuauugugugcca

SEQ ID NO: 1624748 - RNA, 19 nt, Artificial Sequence
  Description of Artificial Sequence: Synthetic oligonucleotide
  Antisense strand to SEQ ID NO: 1624747
uggcacacaauaguuaacc

SEQ ID NO: 1624749 - RNA, 19 nt, Artificial Sequence
  Description of Artificial Sequence: Synthetic oligonucleotide
  Sense strand starting at position 2219 of SEQ ID NO: 1560792
ugauacggcuccucguaaa

SEQ ID NO: 1624750 - RNA, 19 nt, Artificial Sequence
  Description of Artificial Sequence: Synthetic oligonucleotide
  Antisense strand to SEQ ID NO: 1624749
uuuacgaggagccguauca

SEQ ID NO: 1624751 - RNA, 19 nt, Artificial Sequence
  Description of Artificial Sequence: Synthetic oligonucleotide
  Sense strand starting at position 2239 of SEQ ID NO: 1560792
gaugccauuugcugacagu

SEQ ID NO: 1624752 - RNA, 19 nt, Artificial Sequence
  Description of Artificial Sequence: Synthetic oligonucleotide
  Antisense strand to SEQ ID NO: 1624751
acugucagcaaauggcauc

SEQ ID NO: 1624753 - RNA, 19 nt, Artificial Sequence
  Description of Artificial Sequence: Synthetic oligonucleotide
  Sense strand starting at position 2242 of SEQ ID NO: 1560792
gccauuugcugacagucua

SEQ ID NO: 1624754 - RNA, 19 nt, Artificial Sequence
  Description of Artificial Sequence: Synthetic oligonucleotide
  Antisense strand to SEQ ID NO: 1624753
uagacugucagcaaauggc

SEQ ID NO: 1624755 - RNA, 19 nt, Artificial Sequence
  Description of Artificial Sequence: Synthetic oligonucleotide
  Sense strand starting at position 2285 of SEQ ID NO: 1560792
gcauuagcaguccacauua

SEQ ID NO: 1624756 - RNA, 19 nt, Artificial Sequence
  Description of Artificial Sequence: Synthetic oligonucleotide
  Antisense strand to SEQ ID NO: 1624755
uaauguggacugcuaaugc

SEQ ID NO: 1624757 - RNA, 19 nt, Artificial Sequence
  Description of Artificial Sequence: Synthetic oligonucleotide
  Sense strand starting at position 2287 of SEQ ID NO: 1560792
auuagcaguccacauuauu

SEQ ID NO: 1624758 - RNA, 19 nt, Artificial Sequence
  Description of Artificial Sequence: Synthetic oligonucleotide
  Antisense strand to SEQ ID NO: 1624757
aauaauguggacugcuaau

SEQ ID NO: 1624759 - RNA, 19 nt, Artificial Sequence
  Description of Artificial Sequence: Synthetic oligonucleotide
  Sense strand starting at position 2420 of SEQ ID NO: 1560792
acuuccuguguuggugaga

SEQ ID NO: 1624760 - RNA, 19 nt, Artificial Sequence
  Description of Artificial Sequence: Synthetic oligonucleotide
  Antisense strand to SEQ ID NO: 1624759
ucucaccaacacaggaagu

SEQ ID NO: 1624761 - RNA, 19 nt, Artificial Sequence
  Description of Artificial Sequence: Synthetic oligonucleotide
  Sense strand starting at position 2423 of SEQ ID NO: 1560792
uccuguguuggugagacaa

SEQ ID NO: 1624762 - RNA, 19 nt, Artificial Sequence
  Description of Artificial Sequence: Synthetic oligonucleotide
  Antisense strand to SEQ ID NO: 1624761
uugucucaccaacacagga

SEQ ID NO: 1624763 - RNA, 19 nt, Artificial Sequence
  Description of Artificial Sequence: Synthetic oligonucleotide
  Sense strand starting at position 2425 of SEQ ID NO: 1560792
cuguguuggugagacaaug

SEQ ID NO: 1624764 - RNA, 19 nt, Artificial Sequence
  Description of Artificial Sequence: Synthetic oligonucleotide
  Antisense strand to SEQ ID NO: 1624763
cauugucucaccaacacag

SEQ ID NO: 1624765 - RNA, 19 nt, Artificial Sequence
  Description of Artificial Sequence: Synthetic oligonucleotide
  Sense strand starting at position 2461 of SEQ ID NO: 1560792
gagugagacuaacacuaca

SEQ ID NO: 1624766 - RNA, 19 nt, Artificial Sequence
  Description of Artificial Sequence: Synthetic oligonucleotide
  Antisense strand to SEQ ID NO: 1624765
uguaguguuagucucacuc

SEQ ID NO: 1624767 - RNA, 19 nt, Artificial Sequence
  Description of Artificial Sequence: Synthetic oligonucleotide
  Sense strand starting at position 2501 of SEQ ID NO: 1560792
gugagauguuagccaugau

SEQ ID NO: 1624768 - RNA, 19 nt, Artificial Sequence
  Description of Artificial Sequence: Synthetic oligonucleotide
  Antisense strand to SEQ ID NO: 1624767
aucauggcuaacaucucac

SEQ ID NO: 1624769 - RNA, 19 nt, Artificial Sequence
  Description of Artificial Sequence: Synthetic oligonucleotide
  Sense strand starting at position 2502 of SEQ ID NO: 1560792
ugagauguuagccaugauu

SEQ ID NO: 1624770 - RNA, 19 nt, Artificial Sequence
  Description of Artificial Sequence: Synthetic oligonucleotide
  Antisense strand to SEQ ID NO: 1624769
aaucauggcuaacaucuca

SEQ ID NO: 1624771 - RNA, 19 nt, Artificial Sequence
  Description of Artificial Sequence: Synthetic oligonucleotide
  Sense strand starting at position 2504 of SEQ ID NO: 1560792
agauguuagccaugauuaa

SEQ ID NO: 1624772 - RNA, 19 nt, Artificial Sequence
  Description of Artificial Sequence: Synthetic oligonucleotide
  Antisense strand to SEQ ID NO: 1624771
uuaaucauggcuaacaucu

SEQ ID NO: 1624773 - RNA, 19 nt, Artificial Sequence
  Description of Artificial Sequence: Synthetic oligonucleotide
  Sense strand starting at position 2505 of SEQ ID NO: 1560792
gauguuagccaugauuaau

SEQ ID NO: 1624774 - RNA, 19 nt, Artificial Sequence
  Description of Artificial Sequence: Synthetic oligonucleotide
  Antisense strand to SEQ ID NO: 1624773
auuaaucauggcuaacauc

SEQ ID NO: 1624775 - RNA, 19 nt, Artificial Sequence
  Description of Artificial Sequence: Synthetic oligonucleotide
  Sense strand starting at position 211 of SEQ ID NO: 1560793
cugcuacucugaggaucau

SEQ ID NO: 1624776 - RNA, 19 nt, Artificial Sequence
  Description of Artificial Sequence: Synthetic oligonucleotide
  Antisense strand to SEQ ID NO: 1624775
augauccucagaguagcag

SEQ ID NO: 1624777 - RNA, 19 nt, Artificial Sequence
  Description of Artificial Sequence: Synthetic oligonucleotide
  Sense strand starting at position 217 of SEQ ID NO: 1560793
cucugaggaucaugucuau

SEQ ID NO: 1624778 - RNA, 19 nt, Artificial Sequence
  Description of Artificial Sequence: Synthetic oligonucleotide
  Antisense strand to SEQ ID NO: 1624777
auagacaugauccucagag

SEQ ID NO: 1624779 - RNA, 19 nt, Artificial Sequence
  Description of Artificial Sequence: Synthetic oligonucleotide
  Sense strand starting at position 220 of SEQ ID NO: 1560793
ugaggaucaugucuauacu

SEQ ID NO: 1624780 - RNA, 19 nt, Artificial Sequence
  Description of Artificial Sequence: Synthetic oligonucleotide
  Antisense strand to SEQ ID NO: 1624779
aguauagacaugauccuca

SEQ ID NO: 1624781 - RNA, 19 nt, Artificial Sequence
  Description of Artificial Sequence: Synthetic oligonucleotide
  Sense strand starting at position 223 of SEQ ID NO: 1560793
ggaucaugucuauacuugu

SEQ ID NO: 1624782 - RNA, 19 nt, Artificial Sequence
  Description of Artificial Sequence: Synthetic oligonucleotide
  Antisense strand to SEQ ID NO: 1624781
acaaguauagacaugaucc

SEQ ID NO: 1624783 - RNA, 19 nt, Artificial Sequence
  Description of Artificial Sequence: Synthetic oligonucleotide
  Sense strand starting at position 226 of SEQ ID NO: 1560793
ucaugucuauacuuguuaa

SEQ ID NO: 1624784 - RNA, 19 nt, Artificial Sequence
  Description of Artificial Sequence: Synthetic oligonucleotide
  Antisense strand to SEQ ID NO: 1624783
uuaacaaguauagacauga

SEQ ID NO: 1624785 - RNA, 19 nt, Artificial Sequence
  Description of Artificial Sequence: Synthetic oligonucleotide
  Sense strand starting at position 229 of SEQ ID NO: 1560793
ugucuauacuuguuaaggu

SEQ ID NO: 1624786 - RNA, 19 nt, Artificial Sequence
  Description of Artificial Sequence: Synthetic oligonucleotide
  Antisense strand to SEQ ID NO: 1624785
accuuaacaaguauagaca

SEQ ID NO: 1624787 - RNA, 19 nt, Artificial Sequence
  Description of Artificial Sequence: Synthetic oligonucleotide
  Sense strand starting at position 288 of SEQ ID NO: 1560793
gacaaaugcgugggcagua

SEQ ID NO: 1624788 - RNA, 19 nt, Artificial Sequence
  Description of Artificial Sequence: Synthetic oligonucleotide
  Antisense strand to SEQ ID NO: 1624787
uacugcccacgcauuuguc

SEQ ID NO: 1624789 - RNA, 19 nt, Artificial Sequence
  Description of Artificial Sequence: Synthetic oligonucleotide
  Sense strand starting at position 293 of SEQ ID NO: 1560793
augcgugggcaguaacaau

SEQ ID NO: 1624790 - RNA, 19 nt, Artificial Sequence
  Description of Artificial Sequence: Synthetic oligonucleotide
  Antisense strand to SEQ ID NO: 1624789
auuguuacugcccacgcau

SEQ ID NO: 1624791 - RNA, 19 nt, Artificial Sequence
  Description of Artificial Sequence: Synthetic oligonucleotide
  Sense strand starting at position 323 of SEQ ID NO: 1560793
uuugauccucuccggaauu

SEQ ID NO: 1624792 - RNA, 19 nt, Artificial Sequence
  Description of Artificial Sequence: Synthetic oligonucleotide
  Antisense strand to SEQ ID NO: 1624791
aauuccggagaggaucaaa

SEQ ID NO: 1624793 - RNA, 19 nt, Artificial Sequence
  Description of Artificial Sequence: Synthetic oligonucleotide
  Sense strand starting at position 324 of SEQ ID NO: 1560793
uugauccucuccggaauua

SEQ ID NO: 1624794 - RNA, 19 nt, Artificial Sequence
  Description of Artificial Sequence: Synthetic oligonucleotide
  Antisense strand to SEQ ID NO: 1624793
uaauuccggagaggaucaa

SEQ ID NO: 1624795 - RNA, 19 nt, Artificial Sequence
  Description of Artificial Sequence: Synthetic oligonucleotide
  Sense strand starting at position 362 of SEQ ID NO: 1560793
gguuguucuuucucugaca

SEQ ID NO: 1624796 - RNA, 19 nt, Artificial Sequence
  Description of Artificial Sequence: Synthetic oligonucleotide
  Antisense strand to SEQ ID NO: 1624795
ugucagagaaagaacaacc

SEQ ID NO: 1624797 - RNA, 19 nt, Artificial Sequence
  Description of Artificial Sequence: Synthetic oligonucleotide
  Sense strand starting at position 449 of SEQ ID NO: 1560793
ucuuucuucucauuggagu

SEQ ID NO: 1624798 - RNA, 19 nt, Artificial Sequence
  Description of Artificial Sequence: Synthetic oligonucleotide
  Antisense strand to SEQ ID NO: 1624797
acuccaaugagaagaaaga

SEQ ID NO: 1624799 - RNA, 19 nt, Artificial Sequence
  Description of Artificial Sequence: Synthetic oligonucleotide
  Sense strand starting at position 460 of SEQ ID NO: 1560793
auuggagucucccuguaau

SEQ ID NO: 1624800 - RNA, 19 nt, Artificial Sequence
  Description of Artificial Sequence: Synthetic oligonucleotide
  Antisense strand to SEQ ID NO: 1624799
auuacagggagacuccaau

SEQ ID NO: 1624801 - RNA, 19 nt, Artificial Sequence
  Description of Artificial Sequence: Synthetic oligonucleotide
  Sense strand starting at position 568 of SEQ ID NO: 1560793
cucggaucacugcaacuuu

SEQ ID NO: 1624802 - RNA, 19 nt, Artificial Sequence
  Description of Artificial Sequence: Synthetic oligonucleotide
  Antisense strand to SEQ ID NO: 1624801
aaaguugcagugauccgag

SEQ ID NO: 1624803 - RNA, 19 nt, Artificial Sequence
  Description of Artificial Sequence: Synthetic oligonucleotide
  Sense strand starting at position 1021 of SEQ ID NO: 1560793
agguuucccucauuguauu

SEQ ID NO: 1624804 - RNA, 19 nt, Artificial Sequence
  Description of Artificial Sequence: Synthetic oligonucleotide
  Antisense strand to SEQ ID NO: 1624803
aauacaaugagggaaaccu

SEQ ID NO: 1624805 - RNA, 19 nt, Artificial Sequence
  Description of Artificial Sequence: Synthetic oligonucleotide
  Sense strand starting at position 1022 of SEQ ID NO: 1560793
gguuucccucauuguauuu

SEQ ID NO: 1624806 - RNA, 19 nt, Artificial Sequence
  Description of Artificial Sequence: Synthetic oligonucleotide
  Antisense strand to SEQ ID NO: 1624805
aaauacaaugagggaaacc

SEQ ID NO: 1624807 - RNA, 19 nt, Artificial Sequence
  Description of Artificial Sequence: Synthetic oligonucleotide
  Sense strand starting at position 1075 of SEQ ID NO: 1560793
acugcaauucgcuauuaua

SEQ ID NO: 1624808 - RNA, 19 nt, Artificial Sequence
  Description of Artificial Sequence: Synthetic oligonucleotide
  Antisense strand to SEQ ID NO: 1624807
uauaauagcgaauugcagu

SEQ ID NO: 1624809 - RNA, 19 nt, Artificial Sequence
  Description of Artificial Sequence: Synthetic oligonucleotide
  Sense strand starting at position 1078 of SEQ ID NO: 1560793
gcaauucgcuauuauauau

SEQ ID NO: 1624810 - RNA, 19 nt, Artificial Sequence
  Description of Artificial Sequence: Synthetic oligonucleotide
  Antisense strand to SEQ ID NO: 1624809
auauauaauagcgaauugc

SEQ ID NO: 1624811 - RNA, 19 nt, Artificial Sequence
  Description of Artificial Sequence: Synthetic oligonucleotide
  Sense strand starting at position 1667 of SEQ ID NO: 1560793
uuuggcauguccuugagga

SEQ ID NO: 1624812 - RNA, 19 nt, Artificial Sequence
  Description of Artificial Sequence: Synthetic oligonucleotide
  Antisense strand to SEQ ID NO: 1624811
uccucaaggacaugccaaa

SEQ ID NO: 1624813 - RNA, 19 nt, Artificial Sequence
  Description of Artificial Sequence: Synthetic oligonucleotide
  Sense strand starting at position 1668 of SEQ ID NO: 1560793
uuggcauguccuugaggaa

SEQ ID NO: 1624814 - RNA, 19 nt, Artificial Sequence
  Description of Artificial Sequence: Synthetic oligonucleotide
  Antisense strand to SEQ ID NO: 1624813
uuccucaaggacaugccaa

SEQ ID NO: 1624815 - RNA, 19 nt, Artificial Sequence
  Description of Artificial Sequence: Synthetic oligonucleotide
  Sense strand starting at position 1669 of SEQ ID NO: 1560793
uggcauguccuugaggaac

SEQ ID NO: 1624816 - RNA, 19 nt, Artificial Sequence
  Description of Artificial Sequence: Synthetic oligonucleotide
  Antisense strand to SEQ ID NO: 1624815
guuccucaaggacaugcca

SEQ ID NO: 1624817 - RNA, 19 nt, Artificial Sequence
  Description of Artificial Sequence: Synthetic oligonucleotide
  Sense strand starting at position 1779 of SEQ ID NO: 1560793
cgaagaaguccuugaggau

SEQ ID NO: 1624818 - RNA, 19 nt, Artificial Sequence
  Description of Artificial Sequence: Synthetic oligonucleotide
  Antisense strand to SEQ ID NO: 1624817
auccucaaggacuucuucg

SEQ ID NO: 1624819 - RNA, 19 nt, Artificial Sequence
  Description of Artificial Sequence: Synthetic oligonucleotide
  Sense strand starting at position 1907 of SEQ ID NO: 1560793
ucgcuauuguugcggauca

SEQ ID NO: 1624820 - RNA, 19 nt, Artificial Sequence
  Description of Artificial Sequence: Synthetic oligonucleotide
  Antisense strand to SEQ ID NO: 1624819
ugauccgcaacaauagcga

SEQ ID NO: 1624821 - RNA, 19 nt, Artificial Sequence
  Description of Artificial Sequence: Synthetic oligonucleotide
  Sense strand starting at position 2010 of SEQ ID NO: 1560793
uggcuccucucccagaaau

SEQ ID NO: 1624822 - RNA, 19 nt, Artificial Sequence
  Description of Artificial Sequence: Synthetic oligonucleotide
  Antisense strand to SEQ ID NO: 1624821
auuucugggagaggagcca

SEQ ID NO: 1624823 - RNA, 19 nt, Artificial Sequence
  Description of Artificial Sequence: Synthetic oligonucleotide
  Sense strand starting at position 2012 of SEQ ID NO: 1560793
gcuccucucccagaaauag

SEQ ID NO: 1624824 - RNA, 19 nt, Artificial Sequence
  Description of Artificial Sequence: Synthetic oligonucleotide
  Antisense strand to SEQ ID NO: 1624823
cuauuucugggagaggagc

SEQ ID NO: 1624825 - RNA, 19 nt, Artificial Sequence
  Description of Artificial Sequence: Synthetic oligonucleotide
  Sense strand starting at position 2121 of SEQ ID NO: 1560793
uggcccuucucaggagaga

SEQ ID NO: 1624826 - RNA, 19 nt, Artificial Sequence
  Description of Artificial Sequence: Synthetic oligonucleotide
  Antisense strand to SEQ ID NO: 1624825
ucucuccugagaagggcca

SEQ ID NO: 1624827 - RNA, 19 nt, Artificial Sequence
  Description of Artificial Sequence: Synthetic oligonucleotide
  Sense strand starting at position 2141 of SEQ ID NO: 1560793
ccgcaaacgcauuaagaaa

SEQ ID NO: 1624828 - RNA, 19 nt, Artificial Sequence
  Description of Artificial Sequence: Synthetic oligonucleotide
  Antisense strand to SEQ ID NO: 1624827
uuucuuaaugcguuugcgg

SEQ ID NO: 1624829 - RNA, 19 nt, Artificial Sequence
  Description of Artificial Sequence: Synthetic oligonucleotide
  Sense strand starting at position 3626 of SEQ ID NO: 1560793
gagacaagauugucccacu

SEQ ID NO: 1624830 - RNA, 19 nt, Artificial Sequence
  Description of Artificial Sequence: Synthetic oligonucleotide
  Antisense strand to SEQ ID NO: 1624829
agugggacaaucuugucuc

SEQ ID NO: 1624831 - RNA, 19 nt, Artificial Sequence
  Description of Artificial Sequence: Synthetic oligonucleotide
  Sense strand starting at position 3629 of SEQ ID NO: 1560793
acaagauugucccacugca

SEQ ID NO: 1624832 - RNA, 19 nt, Artificial Sequence
  Description of Artificial Sequence: Synthetic oligonucleotide
  Antisense strand to SEQ ID NO: 1624831
ugcagugggacaaucuugu

SEQ ID NO: 1624833 - RNA, 19 nt, Artificial Sequence
  Description of Artificial Sequence: Synthetic oligonucleotide
  Sense strand starting at position 3845 of SEQ ID NO: 1560793
ccuguuagcuggcacuaga

SEQ ID NO: 1624834 - RNA, 19 nt, Artificial Sequence
  Description of Artificial Sequence: Synthetic oligonucleotide
  Antisense strand to SEQ ID NO: 1624833
ucuagugccagcuaacagg

SEQ ID NO: 1624835 - RNA, 19 nt, Artificial Sequence
  Description of Artificial Sequence: Synthetic oligonucleotide
  Sense strand starting at position 3848 of SEQ ID NO: 1560793
guuagcuggcacuagaguu

SEQ ID NO: 1624836 - RNA, 19 nt, Artificial Sequence
  Description of Artificial Sequence: Synthetic oligonucleotide
  Antisense strand to SEQ ID NO: 1624835
aacucuagugccagcuaac

SEQ ID NO: 1624837 - RNA, 19 nt, Artificial Sequence
  Description of Artificial Sequence: Synthetic oligonucleotide
  Sense strand starting at position 3856 of SEQ ID NO: 1560793
gcacuagaguucugugcca

SEQ ID NO: 1624838 - RNA, 19 nt, Artificial Sequence
  Description of Artificial Sequence: Synthetic oligonucleotide
  Antisense strand to SEQ ID NO: 1624837
uggcacagaacucuagugc

SEQ ID NO: 1624839 - RNA, 19 nt, Artificial Sequence
  Description of Artificial Sequence: Synthetic oligonucleotide
  Sense strand starting at position 1616 of SEQ ID NO: 1560794
cgauucuggccuugacaaa

SEQ ID NO: 1624840 - RNA, 19 nt, Artificial Sequence
  Description of Artificial Sequence: Synthetic oligonucleotide
  Antisense strand to SEQ ID NO: 1624839
uuugucaaggccagaaucg

SEQ ID NO: 1624841 - RNA, 19 nt, Artificial Sequence
  Description of Artificial Sequence: Synthetic oligonucleotide
  Sense strand starting at position 2097 of SEQ ID NO: 1560794
cagcgccugauuggugaaa

SEQ ID NO: 1624842 - RNA, 19 nt, Artificial Sequence
  Description of Artificial Sequence: Synthetic oligonucleotide
  Antisense strand to SEQ ID NO: 1624841
uuucaccaaucaggcgcug

SEQ ID NO: 1624843 - RNA, 19 nt, Artificial Sequence
  Description of Artificial Sequence: Synthetic oligonucleotide
  Sense strand starting at position 2139 of SEQ ID NO: 1560794
ucuggagauugguugguga

SEQ ID NO: 1624844 - RNA, 19 nt, Artificial Sequence
  Description of Artificial Sequence: Synthetic oligonucleotide
  Antisense strand to SEQ ID NO: 1624843
ucaccaaccaaucuccaga

SEQ ID NO: 1624845 - RNA, 19 nt, Artificial Sequence
  Description of Artificial Sequence: Synthetic oligonucleotide
  Sense strand starting at position 2412 of SEQ ID NO: 1560794
guccaaccgcgccagaauu

SEQ ID NO: 1624846 - RNA, 19 nt, Artificial Sequence
  Description of Artificial Sequence: Synthetic oligonucleotide
  Antisense strand to SEQ ID NO: 1624845
aauucuggcgcgguuggac

SEQ ID NO: 1624847 - RNA, 19 nt, Artificial Sequence
  Description of Artificial Sequence: Synthetic oligonucleotide
  Sense strand starting at position 2437 of SEQ ID NO: 1560794
aguaacaccugguaaucau

SEQ ID NO: 1624848 - RNA, 19 nt, Artificial Sequence
  Description of Artificial Sequence: Synthetic oligonucleotide
  Antisense strand to SEQ ID NO: 1624847
augauuaccagguguuacu

SEQ ID NO: 1624849 - RNA, 19 nt, Artificial Sequence
  Description of Artificial Sequence: Synthetic oligonucleotide
  Sense strand starting at position 2444 of SEQ ID NO: 1560794
ccugguaaucaucgaugau

SEQ ID NO: 1624850 - RNA, 19 nt, Artificial Sequence
  Description of Artificial Sequence: Synthetic oligonucleotide
  Antisense strand to SEQ ID NO: 1624849
aucaucgaugauuaccagg

SEQ ID NO: 1624851 - RNA, 19 nt, Artificial Sequence
  Description of Artificial Sequence: Synthetic oligonucleotide
  Sense strand starting at position 2445 of SEQ ID NO: 1560794
cugguaaucaucgaugaua

SEQ ID NO: 1624852 - RNA, 19 nt, Artificial Sequence
  Description of Artificial Sequence: Synthetic oligonucleotide
  Antisense strand to SEQ ID NO: 1624851
uaucaucgaugauuaccag

SEQ ID NO: 1624853 - RNA, 19 nt, Artificial Sequence
  Description of Artificial Sequence: Synthetic oligonucleotide
  Sense strand starting at position 2447 of SEQ ID NO: 1560794
gguaaucaucgaugauauu

SEQ ID NO: 1624854 - RNA, 19 nt, Artificial Sequence
  Description of Artificial Sequence: Synthetic oligonucleotide
  Antisense strand to SEQ ID NO: 1624853
aauaucaucgaugauuacc

SEQ ID NO: 1624855 - RNA, 19 nt, Artificial Sequence
  Description of Artificial Sequence: Synthetic oligonucleotide
  Sense strand starting at position 2448 of SEQ ID NO: 1560794
guaaucaucgaugauauua

SEQ ID NO: 1624856 - RNA, 19 nt, Artificial Sequence
  Description of Artificial Sequence: Synthetic oligonucleotide
  Antisense strand to SEQ ID NO: 1624855
uaauaucaucgaugauuac

SEQ ID NO: 1624857 - RNA, 19 nt, Artificial Sequence
  Description of Artificial Sequence: Synthetic oligonucleotide
  Sense strand starting at position 2482 of SEQ ID NO: 1560794
uaaauuuggucuugcaguu

SEQ ID NO: 1624858 - RNA, 19 nt, Artificial Sequence
  Description of Artificial Sequence: Synthetic oligonucleotide
  Antisense strand to SEQ ID NO: 1624857
aacugcaagaccaaauuua

SEQ ID NO: 1624859 - RNA, 19 nt, Artificial Sequence
  Description of Artificial Sequence: Synthetic oligonucleotide
  Sense strand starting at position 2573 of SEQ ID NO: 1560794
cguguacaauuuggacuua

SEQ ID NO: 1624860 - RNA, 19 nt, Artificial Sequence
  Description of Artificial Sequence: Synthetic oligonucleotide
  Antisense strand to SEQ ID NO: 1624859
uaaguccaaauuguacacg

SEQ ID NO: 1624861 - RNA, 19 nt, Artificial Sequence
  Description of Artificial Sequence: Synthetic oligonucleotide
  Sense strand starting at position 2574 of SEQ ID NO: 1560794
guguacaauuuggacuuaa

SEQ ID NO: 1624862 - RNA, 19 nt, Artificial Sequence
  Description of Artificial Sequence: Synthetic oligonucleotide
  Antisense strand to SEQ ID NO: 1624861
uuaaguccaaauuguacac

SEQ ID NO: 1624863 - RNA, 19 nt, Artificial Sequence
  Description of Artificial Sequence: Synthetic oligonucleotide
  Sense strand starting at position 2735 of SEQ ID NO: 1560794
aaacgauuucuuugguggu

SEQ ID NO: 1624864 - RNA, 19 nt, Artificial Sequence
  Description of Artificial Sequence: Synthetic oligonucleotide
  Antisense strand to SEQ ID NO: 1624863
accaccaaagaaaucguuu

SEQ ID NO: 1624865 - RNA, 19 nt, Artificial Sequence
  Description of Artificial Sequence: Synthetic oligonucleotide
  Sense strand starting at position 2737 of SEQ ID NO: 1560794
acgauuucuuuggugguca

SEQ ID NO: 1624866 - RNA, 19 nt, Artificial Sequence
  Description of Artificial Sequence: Synthetic oligonucleotide
  Antisense strand to SEQ ID NO: 1624865
ugaccaccaaagaaaucgu

SEQ ID NO: 1624867 - RNA, 19 nt, Artificial Sequence
  Description of Artificial Sequence: Synthetic oligonucleotide
  Sense strand starting at position 2738 of SEQ ID NO: 1560794
cgauuucuuugguggucaa

SEQ ID NO: 1624868 - RNA, 19 nt, Artificial Sequence
  Description of Artificial Sequence: Synthetic oligonucleotide
  Antisense strand to SEQ ID NO: 1624867
uugaccaccaaagaaaucg

SEQ ID NO: 1624869 - RNA, 19 nt, Artificial Sequence
  Description of Artificial Sequence: Synthetic oligonucleotide
  Sense strand starting at position 2741 of SEQ ID NO: 1560794
uuucuuugguggucaaguu

SEQ ID NO: 1624870 - RNA, 19 nt, Artificial Sequence
  Description of Artificial Sequence: Synthetic oligonucleotide
  Antisense strand to SEQ ID NO: 1624869
aacuugaccaccaaagaaa

SEQ ID NO: 1624871 - RNA, 19 nt, Artificial Sequence
  Description of Artificial Sequence: Synthetic oligonucleotide
  Sense strand starting at position 2748 of SEQ ID NO: 1560794
gguggucaaguucgguaaa

SEQ ID NO: 1624872 - RNA, 19 nt, Artificial Sequence
  Description of Artificial Sequence: Synthetic oligonucleotide
  Antisense strand to SEQ ID NO: 1624871
uuuaccgaacuugaccacc

SEQ ID NO: 1624873 - RNA, 19 nt, Artificial Sequence
  Description of Artificial Sequence: Synthetic oligonucleotide
  Sense strand starting at position 2750 of SEQ ID NO: 1560794
uggucaaguucgguaaacu

SEQ ID NO: 1624874 - RNA, 19 nt, Artificial Sequence
  Description of Artificial Sequence: Synthetic oligonucleotide
  Antisense strand to SEQ ID NO: 1624873
aguuuaccgaacuugacca

SEQ ID NO: 1624875 - RNA, 19 nt, Artificial Sequence
  Description of Artificial Sequence: Synthetic oligonucleotide
  Sense strand starting at position 2751 of SEQ ID NO: 1560794
ggucaaguucgguaaacug

SEQ ID NO: 1624876 - RNA, 19 nt, Artificial Sequence
  Description of Artificial Sequence: Synthetic oligonucleotide
  Antisense strand to SEQ ID NO: 1624875
caguuuaccgaacuugacc

SEQ ID NO: 1624877 - RNA, 19 nt, Artificial Sequence
  Description of Artificial Sequence: Synthetic oligonucleotide
  Sense strand starting at position 2763 of SEQ ID NO: 1560794
uaaacuguuucgccuguga

SEQ ID NO: 1624878 - RNA, 19 nt, Artificial Sequence
  Description of Artificial Sequence: Synthetic oligonucleotide
  Antisense strand to SEQ ID NO: 1624877
ucacaggcgaaacaguuua

SEQ ID NO: 1624879 - RNA, 19 nt, Artificial Sequence
  Description of Artificial Sequence: Synthetic oligonucleotide
  Sense strand starting at position 2766 of SEQ ID NO: 1560794
acuguuucgccugugaggu

SEQ ID NO: 1624880 - RNA, 19 nt, Artificial Sequence
  Description of Artificial Sequence: Synthetic oligonucleotide
  Antisense strand to SEQ ID NO: 1624879
accucacaggcgaaacagu

SEQ ID NO: 1624881 - RNA, 19 nt, Artificial Sequence
  Description of Artificial Sequence: Synthetic oligonucleotide
  Sense strand starting at position 2767 of SEQ ID NO: 1560794
cuguuucgccugugaggua

SEQ ID NO: 1624882 - RNA, 19 nt, Artificial Sequence
  Description of Artificial Sequence: Synthetic oligonucleotide
  Antisense strand to SEQ ID NO: 1624881
uaccucacaggcgaaacag

SEQ ID NO: 1624883 - RNA, 19 nt, Artificial Sequence
  Description of Artificial Sequence: Synthetic oligonucleotide
  Sense strand starting at position 2880 of SEQ ID NO: 1560794
agauauaacucuuggcagu

SEQ ID NO: 1624884 - RNA, 19 nt, Artificial Sequence
  Description of Artificial Sequence: Synthetic oligonucleotide
  Antisense strand to SEQ ID NO: 1624883
acugccaagaguuauaucu

SEQ ID NO: 1624885 - RNA, 19 nt, Artificial Sequence
  Description of Artificial Sequence: Synthetic oligonucleotide
  Sense strand starting at position 2881 of SEQ ID NO: 1560794
gauauaacucuuggcaguc

SEQ ID NO: 1624886 - RNA, 19 nt, Artificial Sequence
  Description of Artificial Sequence: Synthetic oligonucleotide
  Antisense strand to SEQ ID NO: 1624885
gacugccaagaguuauauc

SEQ ID NO: 1624887 - RNA, 19 nt, Artificial Sequence
  Description of Artificial Sequence: Synthetic oligonucleotide
  Sense strand starting at position 2882 of SEQ ID NO: 1560794
auauaacucuuggcaguca

SEQ ID NO: 1624888 - RNA, 19 nt, Artificial Sequence
  Description of Artificial Sequence: Synthetic oligonucleotide
  Antisense strand to SEQ ID NO: 1624887
ugacugccaagaguuauau

SEQ ID NO: 1624889 - RNA, 19 nt, Artificial Sequence
  Description of Artificial Sequence: Synthetic oligonucleotide
  Sense strand starting at position 2909 of SEQ ID NO: 1560794
uacauagcuuguguguaga

SEQ ID NO: 1624890 - RNA, 19 nt, Artificial Sequence
  Description of Artificial Sequence: Synthetic oligonucleotide
  Antisense strand to SEQ ID NO: 1624889
ucuacacacaagcuaugua

SEQ ID NO: 1624891 - RNA, 19 nt, Artificial Sequence
  Description of Artificial Sequence: Synthetic oligonucleotide
  Sense strand starting at position 2912 of SEQ ID NO: 1560794
auagcuuguguguagacua

SEQ ID NO: 1624892 - RNA, 19 nt, Artificial Sequence
  Description of Artificial Sequence: Synthetic oligonucleotide
  Antisense strand to SEQ ID NO: 1624891
uagucuacacacaagcuau

SEQ ID NO: 1624893 - RNA, 19 nt, Artificial Sequence
  Description of Artificial Sequence: Synthetic oligonucleotide
  Sense strand starting at position 2917 of SEQ ID NO: 1560794
uuguguguagacuaaauua

SEQ ID NO: 1624894 - RNA, 19 nt, Artificial Sequence
  Description of Artificial Sequence: Synthetic oligonucleotide
  Antisense strand to SEQ ID NO: 1624893
uaauuuagucuacacacaa

SEQ ID NO: 1624895 - RNA, 19 nt, Artificial Sequence
  Description of Artificial Sequence: Synthetic oligonucleotide
  Sense strand starting at position 2954 of SEQ ID NO: 1560794
gccacuuugcagugagguu

SEQ ID NO: 1624896 - RNA, 19 nt, Artificial Sequence
  Description of Artificial Sequence: Synthetic oligonucleotide
  Antisense strand to SEQ ID NO: 1624895
aaccucacugcaaaguggc

SEQ ID NO: 1624897 - RNA, 19 nt, Artificial Sequence
  Description of Artificial Sequence: Synthetic oligonucleotide
  Sense strand starting at position 2961 of SEQ ID NO: 1560794
ugcagugagguuuaauaaa

SEQ ID NO: 1624898 - RNA, 19 nt, Artificial Sequence
  Description of Artificial Sequence: Synthetic oligonucleotide
  Antisense strand to SEQ ID NO: 1624897
uuuauuaaaccucacugca

SEQ ID NO: 1624899 - RNA, 19 nt, Artificial Sequence
  Description of Artificial Sequence: Synthetic oligonucleotide
  Sense strand starting at position 3038 of SEQ ID NO: 1560794
cuggcaaauccugauuccu

SEQ ID NO: 1624900 - RNA, 19 nt, Artificial Sequence
  Description of Artificial Sequence: Synthetic oligonucleotide
  Antisense strand to SEQ ID NO: 1624899
aggaaucaggauuugccag

SEQ ID NO: 1624901 - RNA, 19 nt, Artificial Sequence
  Description of Artificial Sequence: Synthetic oligonucleotide
  Sense strand starting at position 3040 of SEQ ID NO: 1560794
ggcaaauccugauuccuuu

SEQ ID NO: 1624902 - RNA, 19 nt, Artificial Sequence
  Description of Artificial Sequence: Synthetic oligonucleotide
  Antisense strand to SEQ ID NO: 1624901
aaaggaaucaggauuugcc

SEQ ID NO: 1624903 - RNA, 19 nt, Artificial Sequence
  Description of Artificial Sequence: Synthetic oligonucleotide
  Sense strand starting at position 3356 of SEQ ID NO: 1560794
gccugccugucuuucgaga

SEQ ID NO: 1624904 - RNA, 19 nt, Artificial Sequence
  Description of Artificial Sequence: Synthetic oligonucleotide
  Antisense strand to SEQ ID NO: 1624903
ucucgaaagacaggcaggc

SEQ ID NO: 1624905 - RNA, 19 nt, Artificial Sequence
  Description of Artificial Sequence: Synthetic oligonucleotide
  Sense strand starting at position 3371 of SEQ ID NO: 1560794
gagauuucguacugcacca

SEQ ID NO: 1624906 - RNA, 19 nt, Artificial Sequence
  Description of Artificial Sequence: Synthetic oligonucleotide
  Antisense strand to SEQ ID NO: 1624905
uggugcaguacgaaaucuc

SEQ ID NO: 1624907 - RNA, 19 nt, Artificial Sequence
  Description of Artificial Sequence: Synthetic oligonucleotide
  Sense strand starting at position 3403 of SEQ ID NO: 1560794
gcaucucugcuacgagcau

SEQ ID NO: 1624908 - RNA, 19 nt, Artificial Sequence
  Description of Artificial Sequence: Synthetic oligonucleotide
  Antisense strand to SEQ ID NO: 1624907
augcucguagcagagaugc

SEQ ID NO: 1624909 - RNA, 19 nt, Artificial Sequence
  Description of Artificial Sequence: Synthetic oligonucleotide
  Sense strand starting at position 3432 of SEQ ID NO: 1560794
gguguugaggcagaaauua

SEQ ID NO: 1624910 - RNA, 19 nt, Artificial Sequence
  Description of Artificial Sequence: Synthetic oligonucleotide
  Antisense strand to SEQ ID NO: 1624909
uaauuucugccucaacacc

SEQ ID NO: 1624911 - RNA, 19 nt, Artificial Sequence
  Description of Artificial Sequence: Synthetic oligonucleotide
  Sense strand starting at position 3450 of SEQ ID NO: 1560794
aacuccugcgguugacauu

SEQ ID NO: 1624912 - RNA, 19 nt, Artificial Sequence
  Description of Artificial Sequence: Synthetic oligonucleotide
  Antisense strand to SEQ ID NO: 1624911
aaugucaaccgcaggaguu

SEQ ID NO: 1624913 - RNA, 19 nt, Artificial Sequence
  Description of Artificial Sequence: Synthetic oligonucleotide
  Sense strand starting at position 3555 of SEQ ID NO: 1560794
ccacaaguauccgcagaca

SEQ ID NO: 1624914 - RNA, 19 nt, Artificial Sequence
  Description of Artificial Sequence: Synthetic oligonucleotide
  Antisense strand to SEQ ID NO: 1624913
ugucugcggauacuugugg

SEQ ID NO: 1624915 - RNA, 19 nt, Artificial Sequence
  Description of Artificial Sequence: Synthetic oligonucleotide
  Sense strand starting at position 3558 of SEQ ID NO: 1560794
caaguauccgcagacauca

SEQ ID NO: 1624916 - RNA, 19 nt, Artificial Sequence
  Description of Artificial Sequence: Synthetic oligonucleotide
  Antisense strand to SEQ ID NO: 1624915
ugaugucugcggauacuug

SEQ ID NO: 1624917 - RNA, 19 nt, Artificial Sequence
  Description of Artificial Sequence: Synthetic oligonucleotide
  Sense strand starting at position 3899 of SEQ ID NO: 1560794
ggaguuuauccugaggcug

SEQ ID NO: 1624918 - RNA, 19 nt, Artificial Sequence
  Description of Artificial Sequence: Synthetic oligonucleotide
  Antisense strand to SEQ ID NO: 1624917
cagccucaggauaaacucc

SEQ ID NO: 1624919 - RNA, 19 nt, Artificial Sequence
  Description of Artificial Sequence: Synthetic oligonucleotide
  Sense strand starting at position 102 of SEQ ID NO: 1560795
ugaccuuagccauguguca

SEQ ID NO: 1624920 - RNA, 19 nt, Artificial Sequence
  Description of Artificial Sequence: Synthetic oligonucleotide
  Antisense strand to SEQ ID NO: 1624919
ugacacauggcuaagguca

SEQ ID NO: 1624921 - RNA, 19 nt, Artificial Sequence
  Description of Artificial Sequence: Synthetic oligonucleotide
  Sense strand starting at position 142 of SEQ ID NO: 1560795
gagaaagaguccuggaaau

SEQ ID NO: 1624922 - RNA, 19 nt, Artificial Sequence
  Description of Artificial Sequence: Synthetic oligonucleotide
  Antisense strand to SEQ ID NO: 1624921
auuuccaggacucuuucuc

SEQ ID NO: 1624923 - RNA, 19 nt, Artificial Sequence
  Description of Artificial Sequence: Synthetic oligonucleotide
  Sense strand starting at position 170 of SEQ ID NO: 1560795
gugggugucccagaggcuu

SEQ ID NO: 1624924 - RNA, 19 nt, Artificial Sequence
  Description of Artificial Sequence: Synthetic oligonucleotide
  Antisense strand to SEQ ID NO: 1624923
aagccucugggacacccac

SEQ ID NO: 1624925 - RNA, 19 nt, Artificial Sequence
  Description of Artificial Sequence: Synthetic oligonucleotide
  Sense strand starting at position 220 of SEQ ID NO: 1560795
gggcuuucucccuagugcu

SEQ ID NO: 1624926 - RNA, 19 nt, Artificial Sequence
  Description of Artificial Sequence: Synthetic oligonucleotide
  Antisense strand to SEQ ID NO: 1624925
agcacuagggagaaagccc

SEQ ID NO: 1624927 - RNA, 19 nt, Artificial Sequence
  Description of Artificial Sequence: Synthetic oligonucleotide
  Sense strand starting at position 425 of SEQ ID NO: 1560795
gucagagugugaguguaaa

SEQ ID NO: 1624928 - RNA, 19 nt, Artificial Sequence
  Description of Artificial Sequence: Synthetic oligonucleotide
  Antisense strand to SEQ ID NO: 1624927
uuuacacucacacucugac

SEQ ID NO: 1624929 - RNA, 19 nt, Artificial Sequence
  Description of Artificial Sequence: Synthetic oligonucleotide
  Sense strand starting at position 462 of SEQ ID NO: 1560795
cagucaguguaauuugcuu

SEQ ID NO: 1624930 - RNA, 19 nt, Artificial Sequence
  Description of Artificial Sequence: Synthetic oligonucleotide
  Antisense strand to SEQ ID NO: 1624929
aagcaaauuacacugacug

SEQ ID NO: 1624931 - RNA, 19 nt, Artificial Sequence
  Description of Artificial Sequence: Synthetic oligonucleotide
  Sense strand starting at position 936 of SEQ ID NO: 1560795
agggauccuuuccuuucua

SEQ ID NO: 1624932 - RNA, 19 nt, Artificial Sequence
  Description of Artificial Sequence: Synthetic oligonucleotide
  Antisense strand to SEQ ID NO: 1624931
uagaaaggaaaggaucccu

SEQ ID NO: 1624933 - RNA, 19 nt, Artificial Sequence
  Description of Artificial Sequence: Synthetic oligonucleotide
  Sense strand starting at position 1262 of SEQ ID NO: 1560795
ggaaucguggucuggaguu

SEQ ID NO: 1624934 - RNA, 19 nt, Artificial Sequence
  Description of Artificial Sequence: Synthetic oligonucleotide
  Antisense strand to SEQ ID NO: 1624933
aacuccagaccacgauucc

SEQ ID NO: 1624935 - RNA, 19 nt, Artificial Sequence
  Description of Artificial Sequence: Synthetic oligonucleotide
  Sense strand starting at position 1264 of SEQ ID NO: 1560795
aaucguggucuggaguuaa

SEQ ID NO: 1624936 - RNA, 19 nt, Artificial Sequence
  Description of Artificial Sequence: Synthetic oligonucleotide
  Antisense strand to SEQ ID NO: 1624935
uuaacuccagaccacgauu

SEQ ID NO: 1624937 - RNA, 19 nt, Artificial Sequence
  Description of Artificial Sequence: Synthetic oligonucleotide
  Sense strand starting at position 1746 of SEQ ID NO: 1560795
auaagcgcuauguaaauga

SEQ ID NO: 1624938 - RNA, 19 nt, Artificial Sequence
  Description of Artificial Sequence: Synthetic oligonucleotide
  Antisense strand to SEQ ID NO: 1624937
ucauuuacauagcgcuuau

SEQ ID NO: 1624939 - RNA, 19 nt, Artificial Sequence
  Description of Artificial Sequence: Synthetic oligonucleotide
  Sense strand starting at position 1750 of SEQ ID NO: 1560795
gcgcuauguaaaugaacuc

SEQ ID NO: 1624940 - RNA, 19 nt, Artificial Sequence
  Description of Artificial Sequence: Synthetic oligonucleotide
  Antisense strand to SEQ ID NO: 1624939
gaguucauuuacauagcgc

SEQ ID NO: 1624941 - RNA, 19 nt, Artificial Sequence
  Description of Artificial Sequence: Synthetic oligonucleotide
  Sense strand starting at position 2151 of SEQ ID NO: 1560795
cccucaaguuugucugaaa

SEQ ID NO: 1624942 - RNA, 19 nt, Artificial Sequence
  Description of Artificial Sequence: Synthetic oligonucleotide
  Antisense strand to SEQ ID NO: 1624941
uuucagacaaacuugaggg

SEQ ID NO: 1624943 - RNA, 19 nt, Artificial Sequence
  Description of Artificial Sequence: Synthetic oligonucleotide
  Sense strand starting at position 2687 of SEQ ID NO: 1560795
gguguuagauggcaucuuu

SEQ ID NO: 1624944 - RNA, 19 nt, Artificial Sequence
  Description of Artificial Sequence: Synthetic oligonucleotide
  Antisense strand to SEQ ID NO: 1624943
aaagaugccaucuaacacc

SEQ ID NO: 1624945 - RNA, 19 nt, Artificial Sequence
  Description of Artificial Sequence: Synthetic oligonucleotide
  Sense strand starting at position 2712 of SEQ ID NO: 1560795
caguacuguuccuggcaga

SEQ ID NO: 1624946 - RNA, 19 nt, Artificial Sequence
  Description of Artificial Sequence: Synthetic oligonucleotide
  Antisense strand to SEQ ID NO: 1624945
ucugccaggaacaguacug

SEQ ID NO: 1624947 - RNA, 19 nt, Artificial Sequence
  Description of Artificial Sequence: Synthetic oligonucleotide
  Sense strand starting at position 3056 of SEQ ID NO: 1560795
ccauaaucgugcuuggcau

SEQ ID NO: 1624948 - RNA, 19 nt, Artificial Sequence
  Description of Artificial Sequence: Synthetic oligonucleotide
  Antisense strand to SEQ ID NO: 1624947
augccaagcacgauuaugg

SEQ ID NO: 1624949 - RNA, 19 nt, Artificial Sequence
  Description of Artificial Sequence: Synthetic oligonucleotide
  Sense strand starting at position 3057 of SEQ ID NO: 1560795
cauaaucgugcuuggcauu

SEQ ID NO: 1624950 - RNA, 19 nt, Artificial Sequence
  Description of Artificial Sequence: Synthetic oligonucleotide
  Antisense strand to SEQ ID NO: 1624949
aaugccaagcacgauuaug

SEQ ID NO: 1624951 - RNA, 19 nt, Artificial Sequence
  Description of Artificial Sequence: Synthetic oligonucleotide
  Sense strand starting at position 3107 of SEQ ID NO: 1560795
aggaaauguccuuaugggu

SEQ ID NO: 1624952 - RNA, 19 nt, Artificial Sequence
  Description of Artificial Sequence: Synthetic oligonucleotide
  Antisense strand to SEQ ID NO: 1624951
acccauaaggacauuuccu

SEQ ID NO: 1624953 - RNA, 19 nt, Artificial Sequence
  Description of Artificial Sequence: Synthetic oligonucleotide
  Sense strand starting at position 3205 of SEQ ID NO: 1560795
ggaacauacugccaaguua

SEQ ID NO: 1624954 - RNA, 19 nt, Artificial Sequence
  Description of Artificial Sequence: Synthetic oligonucleotide
  Antisense strand to SEQ ID NO: 1624953
uaacuuggcaguauguucc

SEQ ID NO: 1624955 - RNA, 19 nt, Artificial Sequence
  Description of Artificial Sequence: Synthetic oligonucleotide
  Sense strand starting at position 3216 of SEQ ID NO: 1560795
ccaaguuacuccuuaguga

SEQ ID NO: 1624956 - RNA, 19 nt, Artificial Sequence
  Description of Artificial Sequence: Synthetic oligonucleotide
  Antisense strand to SEQ ID NO: 1624955
ucacuaaggaguaacuugg

SEQ ID NO: 1624957 - RNA, 19 nt, Artificial Sequence
  Description of Artificial Sequence: Synthetic oligonucleotide
  Sense strand starting at position 3217 of SEQ ID NO: 1560795
caaguuacuccuuagugag

SEQ ID NO: 1624958 - RNA, 19 nt, Artificial Sequence
  Description of Artificial Sequence: Synthetic oligonucleotide
  Antisense strand to SEQ ID NO: 1624957
cucacuaaggaguaacuug

SEQ ID NO: 1624959 - RNA, 19 nt, Artificial Sequence
  Description of Artificial Sequence: Synthetic oligonucleotide
  Sense strand starting at position 3219 of SEQ ID NO: 1560795
aguuacuccuuagugagau

SEQ ID NO: 1624960 - RNA, 19 nt, Artificial Sequence
  Description of Artificial Sequence: Synthetic oligonucleotide
  Antisense strand to SEQ ID NO: 1624959
aucucacuaaggaguaacu

SEQ ID NO: 1624961 - RNA, 19 nt, Artificial Sequence
  Description of Artificial Sequence: Synthetic oligonucleotide
  Sense strand starting at position 3220 of SEQ ID NO: 1560795
guuacuccuuagugagauu

SEQ ID NO: 1624962 - RNA, 19 nt, Artificial Sequence
  Description of Artificial Sequence: Synthetic oligonucleotide
  Antisense strand to SEQ ID NO: 1624961
aaucucacuaaggaguaac

SEQ ID NO: 1624963 - RNA, 19 nt, Artificial Sequence
  Description of Artificial Sequence: Synthetic oligonucleotide
  Sense strand starting at position 3223 of SEQ ID NO: 1560795
acuccuuagugagauugua

SEQ ID NO: 1624964 - RNA, 19 nt, Artificial Sequence
  Description of Artificial Sequence: Synthetic oligonucleotide
  Antisense strand to SEQ ID NO: 1624963
uacaaucucacuaaggagu

SEQ ID NO: 1624965 - RNA, 19 nt, Artificial Sequence
  Description of Artificial Sequence: Synthetic oligonucleotide
  Sense strand starting at position 3231 of SEQ ID NO: 1560795
gugagauuguaccauuuau

SEQ ID NO: 1624966 - RNA, 19 nt, Artificial Sequence
  Description of Artificial Sequence: Synthetic oligonucleotide
  Antisense strand to SEQ ID NO: 1624965
auaaaugguacaaucucac

SEQ ID NO: 1624967 - RNA, 19 nt, Artificial Sequence
  Description of Artificial Sequence: Synthetic oligonucleotide
  Sense strand starting at position 3285 of SEQ ID NO: 1560795
gcggcacuggcaugauaac

SEQ ID NO: 1624968 - RNA, 19 nt, Artificial Sequence
  Description of Artificial Sequence: Synthetic oligonucleotide
  Antisense strand to SEQ ID NO: 1624967
guuaucaugccagugccgc

SEQ ID NO: 1624969 - RNA, 19 nt, Artificial Sequence
  Description of Artificial Sequence: Synthetic oligonucleotide
  Sense strand starting at position 3955 of SEQ ID NO: 1560795
aggaaauauugccuagugu

SEQ ID NO: 1624970 - RNA, 19 nt, Artificial Sequence
  Description of Artificial Sequence: Synthetic oligonucleotide
  Antisense strand to SEQ ID NO: 1624969
acacuaggcaauauuuccu

SEQ ID NO: 1624971 - RNA, 19 nt, Artificial Sequence
  Description of Artificial Sequence: Synthetic oligonucleotide
  Sense strand starting at position 3956 of SEQ ID NO: 1560795
ggaaauauugccuagugua

SEQ ID NO: 1624972 - RNA, 19 nt, Artificial Sequence
  Description of Artificial Sequence: Synthetic oligonucleotide
  Antisense strand to SEQ ID NO: 1624971
uacacuaggcaauauuucc

SEQ ID NO: 1624973 - RNA, 19 nt, Artificial Sequence
  Description of Artificial Sequence: Synthetic oligonucleotide
  Sense strand starting at position 3959 of SEQ ID NO: 1560795
aauauugccuaguguauga

SEQ ID NO: 1624974 - RNA, 19 nt, Artificial Sequence
  Description of Artificial Sequence: Synthetic oligonucleotide
  Antisense strand to SEQ ID NO: 1624973
ucauacacuaggcaauauu

SEQ ID NO: 1624975 - RNA, 19 nt, Artificial Sequence
  Description of Artificial Sequence: Synthetic oligonucleotide
  Sense strand starting at position 3963 of SEQ ID NO: 1560795
uugccuaguguaugaguga

SEQ ID NO: 1624976 - RNA, 19 nt, Artificial Sequence
  Description of Artificial Sequence: Synthetic oligonucleotide
  Antisense strand to SEQ ID NO: 1624975
ucacucauacacuaggcaa

SEQ ID NO: 1624977 - RNA, 19 nt, Artificial Sequence
  Description of Artificial Sequence: Synthetic oligonucleotide
  Sense strand starting at position 3964 of SEQ ID NO: 1560795
ugccuaguguaugagugaa

SEQ ID NO: 1624978 - RNA, 19 nt, Artificial Sequence
  Description of Artificial Sequence: Synthetic oligonucleotide
  Antisense strand to SEQ ID NO: 1624977
uucacucauacacuaggca

SEQ ID NO: 1624979 - RNA, 19 nt, Artificial Sequence
  Description of Artificial Sequence: Synthetic oligonucleotide
  Sense strand starting at position 315 of SEQ ID NO: 1560796
ggccuaggcagagauacau

SEQ ID NO: 1624980 - RNA, 19 nt, Artificial Sequence
  Description of Artificial Sequence: Synthetic oligonucleotide
  Antisense strand to SEQ ID NO: 1624979
auguaucucugccuaggcc

SEQ ID NO: 1624981 - RNA, 19 nt, Artificial Sequence
  Description of Artificial Sequence: Synthetic oligonucleotide
  Sense strand starting at position 579 of SEQ ID NO: 1560796
ggucacagaucgggaaacu

SEQ ID NO: 1624982 - RNA, 19 nt, Artificial Sequence
  Description of Artificial Sequence: Synthetic oligonucleotide
  Antisense strand to SEQ ID NO: 1624981
aguuucccgaucugugacc

SEQ ID NO: 1624983 - RNA, 19 nt, Artificial Sequence
  Description of Artificial Sequence: Synthetic oligonucleotide
  Sense strand starting at position 1090 of SEQ ID NO: 1560796
uguuguggcuucugcagaa

SEQ ID NO: 1624984 - RNA, 19 nt, Artificial Sequence
  Description of Artificial Sequence: Synthetic oligonucleotide
  Antisense strand to SEQ ID NO: 1624983
uucugcagaagccacaaca

SEQ ID NO: 1624985 - RNA, 19 nt, Artificial Sequence
  Description of Artificial Sequence: Synthetic oligonucleotide
  Sense strand starting at position 1103 of SEQ ID NO: 1560796
gcagaaucucgaugccaca

SEQ ID NO: 1624986 - RNA, 19 nt, Artificial Sequence
  Description of Artificial Sequence: Synthetic oligonucleotide
  Antisense strand to SEQ ID NO: 1624985
uguggcaucgagauucugc

SEQ ID NO: 1624987 - RNA, 19 nt, Artificial Sequence
  Description of Artificial Sequence: Synthetic oligonucleotide
  Sense strand starting at position 1180 of SEQ ID NO: 1560796
cgcuaauugugggugagga

SEQ ID NO: 1624988 - RNA, 19 nt, Artificial Sequence
  Description of Artificial Sequence: Synthetic oligonucleotide
  Antisense strand to SEQ ID NO: 1624987
uccucacccacaauuagcg

SEQ ID NO: 1624989 - RNA, 19 nt, Artificial Sequence
  Description of Artificial Sequence: Synthetic oligonucleotide
  Sense strand starting at position 1181 of SEQ ID NO: 1560796
gcuaauugugggugaggaa

SEQ ID NO: 1624990 - RNA, 19 nt, Artificial Sequence
  Description of Artificial Sequence: Synthetic oligonucleotide
  Antisense strand to SEQ ID NO: 1624989
uuccucacccacaauuagc

SEQ ID NO: 1624991 - RNA, 19 nt, Artificial Sequence
  Description of Artificial Sequence: Synthetic oligonucleotide
  Sense strand starting at position 1356 of SEQ ID NO: 1560796
gcaugaucgcuguggcuuu

SEQ ID NO: 1624992 - RNA, 19 nt, Artificial Sequence
  Description of Artificial Sequence: Synthetic oligonucleotide
  Antisense strand to SEQ ID NO: 1624991
aaagccacagcgaucaugc

SEQ ID NO: 1624993 - RNA, 19 nt, Artificial Sequence
  Description of Artificial Sequence: Synthetic oligonucleotide
  Sense strand starting at position 1426 of SEQ ID NO: 1560796
gcagcuuccguuggacaga

SEQ ID NO: 1624994 - RNA, 19 nt, Artificial Sequence
  Description of Artificial Sequence: Synthetic oligonucleotide
  Antisense strand to SEQ ID NO: 1624993
ucuguccaacggaagcugc

SEQ ID NO: 1624995 - RNA, 19 nt, Artificial Sequence
  Description of Artificial Sequence: Synthetic oligonucleotide
  Sense strand starting at position 2013 of SEQ ID NO: 1560796
gcuggaugguccaggaaag

SEQ ID NO: 1624996 - RNA, 19 nt, Artificial Sequence
  Description of Artificial Sequence: Synthetic oligonucleotide
  Antisense strand to SEQ ID NO: 1624995
cuuuccuggaccauccagc

SEQ ID NO: 1624997 - RNA, 19 nt, Artificial Sequence
  Description of Artificial Sequence: Synthetic oligonucleotide
  Sense strand starting at position 2025 of SEQ ID NO: 1560796
aggaaagaguccgguguca

SEQ ID NO: 1624998 - RNA, 19 nt, Artificial Sequence
  Description of Artificial Sequence: Synthetic oligonucleotide
  Antisense strand to SEQ ID NO: 1624997
ugacaccggacucuuuccu

SEQ ID NO: 1624999 - RNA, 19 nt, Artificial Sequence
  Description of Artificial Sequence: Synthetic oligonucleotide
  Sense strand starting at position 2228 of SEQ ID NO: 1560796
guacacaacucugggaguu

SEQ ID NO: 1625000 - RNA, 19 nt, Artificial Sequence
  Description of Artificial Sequence: Synthetic oligonucleotide
  Antisense strand to SEQ ID NO: 1624999
aacucccagaguuguguac

SEQ ID NO: 1625001 - RNA, 19 nt, Artificial Sequence
  Description of Artificial Sequence: Synthetic oligonucleotide
  Sense strand starting at position 2229 of SEQ ID NO: 1560796
uacacaacucugggaguuu

SEQ ID NO: 1625002 - RNA, 19 nt, Artificial Sequence
  Description of Artificial Sequence: Synthetic oligonucleotide
  Antisense strand to SEQ ID NO: 1625001
aaacucccagaguugugua

SEQ ID NO: 1625003 - RNA, 19 nt, Artificial Sequence
  Description of Artificial Sequence: Synthetic oligonucleotide
  Sense strand starting at position 2238 of SEQ ID NO: 1560796
cugggaguuucagcucuga

SEQ ID NO: 1625004 - RNA, 19 nt, Artificial Sequence
  Description of Artificial Sequence: Synthetic oligonucleotide
  Antisense strand to SEQ ID NO: 1625003
ucagagcugaaacucccag

SEQ ID NO: 1625005 - RNA, 19 nt, Artificial Sequence
  Description of Artificial Sequence: Synthetic oligonucleotide
  Sense strand starting at position 2274 of SEQ ID NO: 1560796
gccucauccugucacucau

SEQ ID NO: 1625006 - RNA, 19 nt, Artificial Sequence
  Description of Artificial Sequence: Synthetic oligonucleotide
  Antisense strand to SEQ ID NO: 1625005
augagugacaggaugaggc

SEQ ID NO: 1625007 - RNA, 19 nt, Artificial Sequence
  Description of Artificial Sequence: Synthetic oligonucleotide
  Sense strand starting at position 2378 of SEQ ID NO: 1560796
aggagauguucucaggaug

SEQ ID NO: 1625008 - RNA, 19 nt, Artificial Sequence
  Description of Artificial Sequence: Synthetic oligonucleotide
  Antisense strand to SEQ ID NO: 1625007
cauccugagaacaucuccu

SEQ ID NO: 1625009 - RNA, 19 nt, Artificial Sequence
  Description of Artificial Sequence: Synthetic oligonucleotide
  Sense strand starting at position 2400 of SEQ ID NO: 1560796
gagagaaagucgucaguaa

SEQ ID NO: 1625010 - RNA, 19 nt, Artificial Sequence
  Description of Artificial Sequence: Synthetic oligonucleotide
  Antisense strand to SEQ ID NO: 1625009
uuacugacgacuuucucuc

SEQ ID NO: 1625011 - RNA, 19 nt, Artificial Sequence
  Description of Artificial Sequence: Synthetic oligonucleotide
  Sense strand starting at position 2401 of SEQ ID NO: 1560796
agagaaagucgucaguaaa

SEQ ID NO: 1625012 - RNA, 19 nt, Artificial Sequence
  Description of Artificial Sequence: Synthetic oligonucleotide
  Antisense strand to SEQ ID NO: 1625011
uuuacugacgacuuucucu

SEQ ID NO: 1625013 - RNA, 19 nt, Artificial Sequence
  Description of Artificial Sequence: Synthetic oligonucleotide
  Sense strand starting at position 2404 of SEQ ID NO: 1560796
gaaagucgucaguaaaugu

SEQ ID NO: 1625014 - RNA, 19 nt, Artificial Sequence
  Description of Artificial Sequence: Synthetic oligonucleotide
  Antisense strand to SEQ ID NO: 1625013
acauuuacugacgacuuuc

SEQ ID NO: 1625015 - RNA, 19 nt, Artificial Sequence
  Description of Artificial Sequence: Synthetic oligonucleotide
  Sense strand starting at position 2408 of SEQ ID NO: 1560796
gucgucaguaaaugugaua

SEQ ID NO: 1625016 - RNA, 19 nt, Artificial Sequence
  Description of Artificial Sequence: Synthetic oligonucleotide
  Antisense strand to SEQ ID NO: 1625015
uaucacauuuacugacgac

SEQ ID NO: 1625017 - RNA, 19 nt, Artificial Sequence
  Description of Artificial Sequence: Synthetic oligonucleotide
  Sense strand starting at position 2411 of SEQ ID NO: 1560796
gucaguaaaugugauaagu

SEQ ID NO: 1625018 - RNA, 19 nt, Artificial Sequence
  Description of Artificial Sequence: Synthetic oligonucleotide
  Antisense strand to SEQ ID NO: 1625017
acuuaucacauuuacugac

SEQ ID NO: 1625019 - RNA, 19 nt, Artificial Sequence
  Description of Artificial Sequence: Synthetic oligonucleotide
  Sense strand starting at position 2413 of SEQ ID NO: 1560796
caguaaaugugauaaguga

SEQ ID NO: 1625020 - RNA, 19 nt, Artificial Sequence
  Description of Artificial Sequence: Synthetic oligonucleotide
  Antisense strand to SEQ ID NO: 1625019
ucacuuaucacauuuacug

SEQ ID NO: 1625021 - RNA, 19 nt, Artificial Sequence
  Description of Artificial Sequence: Synthetic oligonucleotide
  Sense strand starting at position 2431 of SEQ ID NO: 1560796
aacacagucugguguauga

SEQ ID NO: 1625022 - RNA, 19 nt, Artificial Sequence
  Description of Artificial Sequence: Synthetic oligonucleotide
  Antisense strand to SEQ ID NO: 1625021
ucauacaccagacuguguu

SEQ ID NO: 1625023 - RNA, 19 nt, Artificial Sequence
  Description of Artificial Sequence: Synthetic oligonucleotide
  Sense strand starting at position 2633 of SEQ ID NO: 1560796
cccagaugccuccgagauu

SEQ ID NO: 1625024 - RNA, 19 nt, Artificial Sequence
  Description of Artificial Sequence: Synthetic oligonucleotide
  Antisense strand to SEQ ID NO: 1625023
aaucucggaggcaucuggg

SEQ ID NO: 1625025 - RNA, 19 nt, Artificial Sequence
  Description of Artificial Sequence: Synthetic oligonucleotide
  Sense strand starting at position 2634 of SEQ ID NO: 1560796
ccagaugccuccgagauuu

SEQ ID NO: 1625026 - RNA, 19 nt, Artificial Sequence
  Description of Artificial Sequence: Synthetic oligonucleotide
  Antisense strand to SEQ ID NO: 1625025
aaaucucggaggcaucugg

SEQ ID NO: 1625027 - RNA, 19 nt, Artificial Sequence
  Description of Artificial Sequence: Synthetic oligonucleotide
  Sense strand starting at position 2753 of SEQ ID NO: 1560796
cuuguuuguuucuguauuu

SEQ ID NO: 1625028 - RNA, 19 nt, Artificial Sequence
  Description of Artificial Sequence: Synthetic oligonucleotide
  Antisense strand to SEQ ID NO: 1625027
aaauacagaaacaaacaag

SEQ ID NO: 1625029 - RNA, 19 nt, Artificial Sequence
  Description of Artificial Sequence: Synthetic oligonucleotide
  Sense strand starting at position 2882 of SEQ ID NO: 1560796
ccggguuuaugcgauuauc

SEQ ID NO: 1625030 - RNA, 19 nt, Artificial Sequence
  Description of Artificial Sequence: Synthetic oligonucleotide
  Antisense strand to SEQ ID NO: 1625029
gauaaucgcauaaacccgg

SEQ ID NO: 1625031 - RNA, 19 nt, Artificial Sequence
  Description of Artificial Sequence: Synthetic oligonucleotide
  Sense strand starting at position 2885 of SEQ ID NO: 1560796
gguuuaugcgauuauccug

SEQ ID NO: 1625032 - RNA, 19 nt, Artificial Sequence
  Description of Artificial Sequence: Synthetic oligonucleotide
  Antisense strand to SEQ ID NO: 1625031
caggauaaucgcauaaacc

SEQ ID NO: 1625033 - RNA, 19 nt, Artificial Sequence
  Description of Artificial Sequence: Synthetic oligonucleotide
  Sense strand starting at position 3505 of SEQ ID NO: 1560796
ccugcagugucaucuuuaa

SEQ ID NO: 1625034 - RNA, 19 nt, Artificial Sequence
  Description of Artificial Sequence: Synthetic oligonucleotide
  Antisense strand to SEQ ID NO: 1625033
uuaaagaugacacugcagg

SEQ ID NO: 1625035 - RNA, 19 nt, Artificial Sequence
  Description of Artificial Sequence: Synthetic oligonucleotide
  Sense strand starting at position 3685 of SEQ ID NO: 1560796
agagcauauuaucugguga

SEQ ID NO: 1625036 - RNA, 19 nt, Artificial Sequence
  Description of Artificial Sequence: Synthetic oligonucleotide
  Antisense strand to SEQ ID NO: 1625035
ucaccagauaauaugcucu

SEQ ID NO: 1625037 - RNA, 19 nt, Artificial Sequence
  Description of Artificial Sequence: Synthetic oligonucleotide
  Sense strand starting at position 3687 of SEQ ID NO: 1560796
agcauauuaucuggugaaa

SEQ ID NO: 1625038 - RNA, 19 nt, Artificial Sequence
  Description of Artificial Sequence: Synthetic oligonucleotide
  Antisense strand to SEQ ID NO: 1625037
uuucaccagauaauaugcu

SEQ ID NO: 1625039 - RNA, 19 nt, Artificial Sequence
  Description of Artificial Sequence: Synthetic oligonucleotide
  Sense strand starting at position 3862 of SEQ ID NO: 1560796
cauauuaaacuguguagga

SEQ ID NO: 1625040 - RNA, 19 nt, Artificial Sequence
  Description of Artificial Sequence: Synthetic oligonucleotide
  Antisense strand to SEQ ID NO: 1625039
uccuacacaguuuaauaug

SEQ ID NO: 1625041 - RNA, 19 nt, Artificial Sequence
  Description of Artificial Sequence: Synthetic oligonucleotide
  Sense strand starting at position 3863 of SEQ ID NO: 1560796
auauuaaacuguguaggau

SEQ ID NO: 1625042 - RNA, 19 nt, Artificial Sequence
  Description of Artificial Sequence: Synthetic oligonucleotide
  Antisense strand to SEQ ID NO: 1625041
auccuacacaguuuaauau

SEQ ID NO: 1625043 - RNA, 19 nt, Artificial Sequence
  Description of Artificial Sequence: Synthetic oligonucleotide
  Sense strand starting at position 3871 of SEQ ID NO: 1560796
cuguguaggaugcaguuaa

SEQ ID NO: 1625044 - RNA, 19 nt, Artificial Sequence
  Description of Artificial Sequence: Synthetic oligonucleotide
  Antisense strand to SEQ ID NO: 1625043
uuaacugcauccuacacag

SEQ ID NO: 1625045 - RNA, 19 nt, Artificial Sequence
  Description of Artificial Sequence: Synthetic oligonucleotide
  Sense strand starting at position 73 of SEQ ID NO: 1560797
cuagccaaucuuggugaga

SEQ ID NO: 1625046 - RNA, 19 nt, Artificial Sequence
  Description of Artificial Sequence: Synthetic oligonucleotide
  Antisense strand to SEQ ID NO: 1625045
ucucaccaagauuggcuag

SEQ ID NO: 1625047 - RNA, 19 nt, Artificial Sequence
  Description of Artificial Sequence: Synthetic oligonucleotide
  Sense strand starting at position 74 of SEQ ID NO: 1560797
uagccaaucuuggugagaa

SEQ ID NO: 1625048 - RNA, 19 nt, Artificial Sequence
  Description of Artificial Sequence: Synthetic oligonucleotide
  Antisense strand to SEQ ID NO: 1625047
uucucaccaagauuggcua

SEQ ID NO: 1625049 - RNA, 19 nt, Artificial Sequence
  Description of Artificial Sequence: Synthetic oligonucleotide
  Sense strand starting at position 162 of SEQ ID NO: 1560797
cugcuaggucaaggauaau

SEQ ID NO: 1625050 - RNA, 19 nt, Artificial Sequence
  Description of Artificial Sequence: Synthetic oligonucleotide
  Antisense strand to SEQ ID NO: 1625049
auuauccuugaccuagcag

SEQ ID NO: 1625051 - RNA, 19 nt, Artificial Sequence
  Description of Artificial Sequence: Synthetic oligonucleotide
  Sense strand starting at position 185 of SEQ ID NO: 1560797
cuugauuccuggcucauuu

SEQ ID NO: 1625052 - RNA, 19 nt, Artificial Sequence
  Description of Artificial Sequence: Synthetic oligonucleotide
  Antisense strand to SEQ ID NO: 1625051
aaaugagccaggaaucaag

SEQ ID NO: 1625053 - RNA, 19 nt, Artificial Sequence
  Description of Artificial Sequence: Synthetic oligonucleotide
  Sense strand starting at position 412 of SEQ ID NO: 1560797
cuccucguggccuggaaau

SEQ ID NO: 1625054 - RNA, 19 nt, Artificial Sequence
  Description of Artificial Sequence: Synthetic oligonucleotide
  Antisense strand to SEQ ID NO: 1625053
auuuccaggccacgaggag

SEQ ID NO: 1625055 - RNA, 19 nt, Artificial Sequence
  Description of Artificial Sequence: Synthetic oligonucleotide
  Sense strand starting at position 430 of SEQ ID NO: 1560797
uccuucuaucuggagucua

SEQ ID NO: 1625056 - RNA, 19 nt, Artificial Sequence
  Description of Artificial Sequence: Synthetic oligonucleotide
  Antisense strand to SEQ ID NO: 1625055
uagacuccagauagaagga

SEQ ID NO: 1625057 - RNA, 19 nt, Artificial Sequence
  Description of Artificial Sequence: Synthetic oligonucleotide
  Sense strand starting at position 483 of SEQ ID NO: 1560797
gcacaagggucugauucuu

SEQ ID NO: 1625058 - RNA, 19 nt, Artificial Sequence
  Description of Artificial Sequence: Synthetic oligonucleotide
  Antisense strand to SEQ ID NO: 1625057
aagaaucagacccuugugc

SEQ ID NO: 1625059 - RNA, 19 nt, Artificial Sequence
  Description of Artificial Sequence: Synthetic oligonucleotide
  Sense strand starting at position 592 of SEQ ID NO: 1560797
acccauggagcggauuauu

SEQ ID NO: 1625060 - RNA, 19 nt, Artificial Sequence
  Description of Artificial Sequence: Synthetic oligonucleotide
  Antisense strand to SEQ ID NO: 1625059
aauaauccgcuccaugggu

SEQ ID NO: 1625061 - RNA, 19 nt, Artificial Sequence
  Description of Artificial Sequence: Synthetic oligonucleotide
  Sense strand starting at position 776 of SEQ ID NO: 1560797
gguuaaaugccuuagucug

SEQ ID NO: 1625062 - RNA, 19 nt, Artificial Sequence
  Description of Artificial Sequence: Synthetic oligonucleotide
  Antisense strand to SEQ ID NO: 1625061
cagacuaaggcauuuaacc

SEQ ID NO: 1625063 - RNA, 19 nt, Artificial Sequence
  Description of Artificial Sequence: Synthetic oligonucleotide
  Sense strand starting at position 788 of SEQ ID NO: 1560797
uagucugugcugugugauu

SEQ ID NO: 1625064 - RNA, 19 nt, Artificial Sequence
  Description of Artificial Sequence: Synthetic oligonucleotide
  Antisense strand to SEQ ID NO: 1625063
aaucacacagcacagacua

SEQ ID NO: 1625065 - RNA, 19 nt, Artificial Sequence
  Description of Artificial Sequence: Synthetic oligonucleotide
  Sense strand starting at position 790 of SEQ ID NO: 1560797
gucugugcugugugauuga

SEQ ID NO: 1625066 - RNA, 19 nt, Artificial Sequence
  Description of Artificial Sequence: Synthetic oligonucleotide
  Antisense strand to SEQ ID NO: 1625065
ucaaucacacagcacagac

SEQ ID NO: 1625067 - RNA, 19 nt, Artificial Sequence
  Description of Artificial Sequence: Synthetic oligonucleotide
  Sense strand starting at position 793 of SEQ ID NO: 1560797
ugugcugugugauugaaac

SEQ ID NO: 1625068 - RNA, 19 nt, Artificial Sequence
  Description of Artificial Sequence: Synthetic oligonucleotide
  Antisense strand to SEQ ID NO: 1625067
guuucaaucacacagcaca

SEQ ID NO: 1625069 - RNA, 19 nt, Artificial Sequence
  Description of Artificial Sequence: Synthetic oligonucleotide
  Sense strand starting at position 795 of SEQ ID NO: 1560797
ugcugugugauugaaacag

SEQ ID NO: 1625070 - RNA, 19 nt, Artificial Sequence
  Description of Artificial Sequence: Synthetic oligonucleotide
  Antisense strand to SEQ ID NO: 1625069
cuguuucaaucacacagca

SEQ ID NO: 1625071 - RNA, 19 nt, Artificial Sequence
  Description of Artificial Sequence: Synthetic oligonucleotide
  Sense strand starting at position 819 of SEQ ID NO: 1560797
cucaaauuagcacguaaug

SEQ ID NO: 1625072 - RNA, 19 nt, Artificial Sequence
  Description of Artificial Sequence: Synthetic oligonucleotide
  Antisense strand to SEQ ID NO: 1625071
cauuacgugcuaauuugag

SEQ ID NO: 1625073 - RNA, 19 nt, Artificial Sequence
  Description of Artificial Sequence: Synthetic oligonucleotide
  Sense strand starting at position 831 of SEQ ID NO: 1560797
cguaaugaaugaucacugu

SEQ ID NO: 1625074 - RNA, 19 nt, Artificial Sequence
  Description of Artificial Sequence: Synthetic oligonucleotide
  Antisense strand to SEQ ID NO: 1625073
acagugaucauucauuacg

SEQ ID NO: 1625075 - RNA, 19 nt, Artificial Sequence
  Description of Artificial Sequence: Synthetic oligonucleotide
  Sense strand starting at position 835 of SEQ ID NO: 1560797
augaaugaucacuguuauc

SEQ ID NO: 1625076 - RNA, 19 nt, Artificial Sequence
  Description of Artificial Sequence: Synthetic oligonucleotide
  Antisense strand to SEQ ID NO: 1625075
gauaacagugaucauucau

SEQ ID NO: 1625077 - RNA, 19 nt, Artificial Sequence
  Description of Artificial Sequence: Synthetic oligonucleotide
  Sense strand starting at position 881 of SEQ ID NO: 1560797
ccagcuucccugugaacuc

SEQ ID NO: 1625078 - RNA, 19 nt, Artificial Sequence
  Description of Artificial Sequence: Synthetic oligonucleotide
  Antisense strand to SEQ ID NO: 1625077
gaguucacagggaagcugg

SEQ ID NO: 1625079 - RNA, 19 nt, Artificial Sequence
  Description of Artificial Sequence: Synthetic oligonucleotide
  Sense strand starting at position 891 of SEQ ID NO: 1560797
ugugaacuccuacagaucu

SEQ ID NO: 1625080 - RNA, 19 nt, Artificial Sequence
  Description of Artificial Sequence: Synthetic oligonucleotide
  Antisense strand to SEQ ID NO: 1625079
agaucuguaggaguucaca

SEQ ID NO: 1625081 - RNA, 19 nt, Artificial Sequence
  Description of Artificial Sequence: Synthetic oligonucleotide
  Sense strand starting at position 1262 of SEQ ID NO: 1560797
gucaucuggagccaguaau

SEQ ID NO: 1625082 - RNA, 19 nt, Artificial Sequence
  Description of Artificial Sequence: Synthetic oligonucleotide
  Antisense strand to SEQ ID NO: 1625081
auuacuggcuccagaugac

SEQ ID NO: 1625083 - RNA, 19 nt, Artificial Sequence
  Description of Artificial Sequence: Synthetic oligonucleotide
  Sense strand starting at position 2342 of SEQ ID NO: 1560797
gcccgucacguguuuguaa

SEQ ID NO: 1625084 - RNA, 19 nt, Artificial Sequence
  Description of Artificial Sequence: Synthetic oligonucleotide
  Antisense strand to SEQ ID NO: 1625083
uuacaaacacgugacgggc

SEQ ID NO: 1625085 - RNA, 19 nt, Artificial Sequence
  Description of Artificial Sequence: Synthetic oligonucleotide
  Sense strand starting at position 2343 of SEQ ID NO: 1560797
cccgucacguguuuguaaa

SEQ ID NO: 1625086 - RNA, 19 nt, Artificial Sequence
  Description of Artificial Sequence: Synthetic oligonucleotide
  Antisense strand to SEQ ID NO: 1625085
uuuacaaacacgugacggg

SEQ ID NO: 1625087 - RNA, 19 nt, Artificial Sequence
  Description of Artificial Sequence: Synthetic oligonucleotide
  Sense strand starting at position 2344 of SEQ ID NO: 1560797
ccgucacguguuuguaaau

SEQ ID NO: 1625088 - RNA, 19 nt, Artificial Sequence
  Description of Artificial Sequence: Synthetic oligonucleotide
  Antisense strand to SEQ ID NO: 1625087
auuuacaaacacgugacgg

SEQ ID NO: 1625089 - RNA, 19 nt, Artificial Sequence
  Description of Artificial Sequence: Synthetic oligonucleotide
  Sense strand starting at position 2345 of SEQ ID NO: 1560797
cgucacguguuuguaaauu

SEQ ID NO: 1625090 - RNA, 19 nt, Artificial Sequence
  Description of Artificial Sequence: Synthetic oligonucleotide
  Antisense strand to SEQ ID NO: 1625089
aauuuacaaacacgugacg

SEQ ID NO: 1625091 - RNA, 19 nt, Artificial Sequence
  Description of Artificial Sequence: Synthetic oligonucleotide
  Sense strand starting at position 2506 of SEQ ID NO: 1560797
gaggcagaaucugaaauug

SEQ ID NO: 1625092 - RNA, 19 nt, Artificial Sequence
  Description of Artificial Sequence: Synthetic oligonucleotide
  Antisense strand to SEQ ID NO: 1625091
caauuucagauucugccuc

SEQ ID NO: 1625093 - RNA, 19 nt, Artificial Sequence
  Description of Artificial Sequence: Synthetic oligonucleotide
  Sense strand starting at position 2632 of SEQ ID NO: 1560797
gcaagaggccaauggaaau

SEQ ID NO: 1625094 - RNA, 19 nt, Artificial Sequence
  Description of Artificial Sequence: Synthetic oligonucleotide
  Antisense strand to SEQ ID NO: 1625093
auuuccauuggccucuugc

SEQ ID NO: 1625095 - RNA, 19 nt, Artificial Sequence
  Description of Artificial Sequence: Synthetic oligonucleotide
  Sense strand starting at position 2764 of SEQ ID NO: 1560797
ggaagaguuucucuucgcu

SEQ ID NO: 1625096 - RNA, 19 nt, Artificial Sequence
  Description of Artificial Sequence: Synthetic oligonucleotide
  Antisense strand to SEQ ID NO: 1625095
agcgaagagaaacucuucc

SEQ ID NO: 1625097 - RNA, 19 nt, Artificial Sequence
  Description of Artificial Sequence: Synthetic oligonucleotide
  Sense strand starting at position 2852 of SEQ ID NO: 1560797
cgcgaagccauuugcauau

SEQ ID NO: 1625098 - RNA, 19 nt, Artificial Sequence
  Description of Artificial Sequence: Synthetic oligonucleotide
  Antisense strand to SEQ ID NO: 1625097
auaugcaaauggcuucgcg

SEQ ID NO: 1625099 - RNA, 19 nt, Artificial Sequence
  Description of Artificial Sequence: Synthetic oligonucleotide
  Sense strand starting at position 3216 of SEQ ID NO: 1560797
aggagcaaaccuugucuca

SEQ ID NO: 1625100 - RNA, 19 nt, Artificial Sequence
  Description of Artificial Sequence: Synthetic oligonucleotide
  Antisense strand to SEQ ID NO: 1625099
ugagacaagguuugcuccu

SEQ ID NO: 1625101 - RNA, 19 nt, Artificial Sequence
  Description of Artificial Sequence: Synthetic oligonucleotide
  Sense strand starting at position 3286 of SEQ ID NO: 1560797
ccucuagggauucggauau

SEQ ID NO: 1625102 - RNA, 19 nt, Artificial Sequence
  Description of Artificial Sequence: Synthetic oligonucleotide
  Antisense strand to SEQ ID NO: 1625101
auauccgaaucccuagagg

SEQ ID NO: 1625103 - RNA, 19 nt, Artificial Sequence
  Description of Artificial Sequence: Synthetic oligonucleotide
  Sense strand starting at position 3290 of SEQ ID NO: 1560797
uagggauucggauauaugu

SEQ ID NO: 1625104 - RNA, 19 nt, Artificial Sequence
  Description of Artificial Sequence: Synthetic oligonucleotide
  Antisense strand to SEQ ID NO: 1625103
acauauauccgaaucccua

SEQ ID NO: 1625105 - RNA, 19 nt, Artificial Sequence
  Description of Artificial Sequence: Synthetic oligonucleotide
  Sense strand starting at position 3300 of SEQ ID NO: 1560797
gauauauguaggcagaggu

SEQ ID NO: 1625106 - RNA, 19 nt, Artificial Sequence
  Description of Artificial Sequence: Synthetic oligonucleotide
  Antisense strand to SEQ ID NO: 1625105
accucugccuacauauauc

SEQ ID NO: 1625107 - RNA, 19 nt, Artificial Sequence
  Description of Artificial Sequence: Synthetic oligonucleotide
  Sense strand starting at position 3334 of SEQ ID NO: 1560797
gcaaauaagucagauugga

SEQ ID NO: 1625108 - RNA, 19 nt, Artificial Sequence
  Description of Artificial Sequence: Synthetic oligonucleotide
  Antisense strand to SEQ ID NO: 1625107
uccaaucugacuuauuugc

SEQ ID NO: 1625109 - RNA, 19 nt, Artificial Sequence
  Description of Artificial Sequence: Synthetic oligonucleotide
  Sense strand starting at position 3339 of SEQ ID NO: 1560797
uaagucagauuggaaagaa

SEQ ID NO: 1625110 - RNA, 19 nt, Artificial Sequence
  Description of Artificial Sequence: Synthetic oligonucleotide
  Antisense strand to SEQ ID NO: 1625109
uucuuuccaaucugacuua

SEQ ID NO: 1625111 - RNA, 19 nt, Artificial Sequence
  Description of Artificial Sequence: Synthetic oligonucleotide
  Sense strand starting at position 3349 of SEQ ID NO: 1560797
uggaaagaaaucgggcaua

SEQ ID NO: 1625112 - RNA, 19 nt, Artificial Sequence
  Description of Artificial Sequence: Synthetic oligonucleotide
  Antisense strand to SEQ ID NO: 1625111
uaugcccgauuucuuucca

SEQ ID NO: 1625113 - RNA, 19 nt, Artificial Sequence
  Description of Artificial Sequence: Synthetic oligonucleotide
  Sense strand starting at position 3478 of SEQ ID NO: 1560797
uuaacaccaucgcaagaau

SEQ ID NO: 1625114 - RNA, 19 nt, Artificial Sequence
  Description of Artificial Sequence: Synthetic oligonucleotide
  Antisense strand to SEQ ID NO: 1625113
auucuugcgaugguguuaa

SEQ ID NO: 1625115 - RNA, 19 nt, Artificial Sequence
  Description of Artificial Sequence: Synthetic oligonucleotide
  Sense strand starting at position 3573 of SEQ ID NO: 1560797
agggagugggcguacuuaa

SEQ ID NO: 1625116 - RNA, 19 nt, Artificial Sequence
  Description of Artificial Sequence: Synthetic oligonucleotide
  Antisense strand to SEQ ID NO: 1625115
uuaaguacgcccacucccu

SEQ ID NO: 1625117 - RNA, 19 nt, Artificial Sequence
  Description of Artificial Sequence: Synthetic oligonucleotide
  Sense strand starting at position 3619 of SEQ ID NO: 1560797
gacugcuaccuuuaugugu

SEQ ID NO: 1625118 - RNA, 19 nt, Artificial Sequence
  Description of Artificial Sequence: Synthetic oligonucleotide
  Antisense strand to SEQ ID NO: 1625117
acacauaaagguagcaguc

SEQ ID NO: 1625119 - RNA, 19 nt, Artificial Sequence
  Description of Artificial Sequence: Synthetic oligonucleotide
  Sense strand starting at position 3946 of SEQ ID NO: 1560797
gccacuguguaucucuuua

SEQ ID NO: 1625120 - RNA, 19 nt, Artificial Sequence
  Description of Artificial Sequence: Synthetic oligonucleotide
  Antisense strand to SEQ ID NO: 1625119
uaaagagauacacaguggc

SEQ ID NO: 1625121 - RNA, 19 nt, Artificial Sequence
  Description of Artificial Sequence: Synthetic oligonucleotide
  Sense strand starting at position 3950 of SEQ ID NO: 1560797
cuguguaucucuuuaacca

SEQ ID NO: 1625122 - RNA, 19 nt, Artificial Sequence
  Description of Artificial Sequence: Synthetic oligonucleotide
  Antisense strand to SEQ ID NO: 1625121
ugguuaaagagauacacag

SEQ ID NO: 1625123 - RNA, 19 nt, Artificial Sequence
  Description of Artificial Sequence: Synthetic oligonucleotide
  Sense strand starting at position 3951 of SEQ ID NO: 1560797
uguguaucucuuuaaccaa

SEQ ID NO: 1625124 - RNA, 19 nt, Artificial Sequence
  Description of Artificial Sequence: Synthetic oligonucleotide
  Antisense strand to SEQ ID NO: 1625123
uugguuaaagagauacaca

SEQ ID NO: 1625125 - RNA, 19 nt, Artificial Sequence
  Description of Artificial Sequence: Synthetic oligonucleotide
  Sense strand starting at position 173 of SEQ ID NO: 1560798
gccauucucgggugaccuu

SEQ ID NO: 1625126 - RNA, 19 nt, Artificial Sequence
  Description of Artificial Sequence: Synthetic oligonucleotide
  Antisense strand to SEQ ID NO: 1625125
aaggucacccgagaauggc

SEQ ID NO: 1625127 - RNA, 19 nt, Artificial Sequence
  Description of Artificial Sequence: Synthetic oligonucleotide
  Sense strand starting at position 659 of SEQ ID NO: 1560798
ggucuagcuuccugauagg

SEQ ID NO: 1625128 - RNA, 19 nt, Artificial Sequence
  Description of Artificial Sequence: Synthetic oligonucleotide
  Antisense strand to SEQ ID NO: 1625127
ccuaucaggaagcuagacc

SEQ ID NO: 1625129 - RNA, 19 nt, Artificial Sequence
  Description of Artificial Sequence: Synthetic oligonucleotide
  Sense strand starting at position 2288 of SEQ ID NO: 1560798
gccgaagucggccagacuu

SEQ ID NO: 1625130 - RNA, 19 nt, Artificial Sequence
  Description of Artificial Sequence: Synthetic oligonucleotide
  Antisense strand to SEQ ID NO: 1625129
aagucuggccgacuucggc

SEQ ID NO: 1625131 - RNA, 19 nt, Artificial Sequence
  Description of Artificial Sequence: Synthetic oligonucleotide
  Sense strand starting at position 2450 of SEQ ID NO: 1560798
cugugugauucucuccaga

SEQ ID NO: 1625132 - RNA, 19 nt, Artificial Sequence
  Description of Artificial Sequence: Synthetic oligonucleotide
  Antisense strand to SEQ ID NO: 1625131
ucuggagagaaucacacag

SEQ ID NO: 1625133 - RNA, 19 nt, Artificial Sequence
  Description of Artificial Sequence: Synthetic oligonucleotide
  Sense strand starting at position 2452 of SEQ ID NO: 1560798
gugugauucucuccagagu

SEQ ID NO: 1625134 - RNA, 19 nt, Artificial Sequence
  Description of Artificial Sequence: Synthetic oligonucleotide
  Antisense strand to SEQ ID NO: 1625133
acucuggagagaaucacac

SEQ ID NO: 1625135 - RNA, 19 nt, Artificial Sequence
  Description of Artificial Sequence: Synthetic oligonucleotide
  Sense strand starting at position 2453 of SEQ ID NO: 1560798
ugugauucucuccagaguc

SEQ ID NO: 1625136 - RNA, 19 nt, Artificial Sequence
  Description of Artificial Sequence: Synthetic oligonucleotide
  Antisense strand to SEQ ID NO: 1625135
gacucuggagagaaucaca

SEQ ID NO: 1625137 - RNA, 19 nt, Artificial Sequence
  Description of Artificial Sequence: Synthetic oligonucleotide
  Sense strand starting at position 2503 of SEQ ID NO: 1560798
guccaucuccagggaguuu

SEQ ID NO: 1625138 - RNA, 19 nt, Artificial Sequence
  Description of Artificial Sequence: Synthetic oligonucleotide
  Antisense strand to SEQ ID NO: 1625137
aaacucccuggagauggac

SEQ ID NO: 1625139 - RNA, 19 nt, Artificial Sequence
  Description of Artificial Sequence: Synthetic oligonucleotide
  Sense strand starting at position 2536 of SEQ ID NO: 1560798
ggacggucgccuguaaugu

SEQ ID NO: 1625140 - RNA, 19 nt, Artificial Sequence
  Description of Artificial Sequence: Synthetic oligonucleotide
  Antisense strand to SEQ ID NO: 1625139
acauuacaggcgaccgucc

SEQ ID NO: 1625141 - RNA, 19 nt, Artificial Sequence
  Description of Artificial Sequence: Synthetic oligonucleotide
  Sense strand starting at position 2537 of SEQ ID NO: 1560798
gacggucgccuguaaugua

SEQ ID NO: 1625142 - RNA, 19 nt, Artificial Sequence
  Description of Artificial Sequence: Synthetic oligonucleotide
  Antisense strand to SEQ ID NO: 1625141
uacauuacaggcgaccguc

SEQ ID NO: 1625143 - RNA, 19 nt, Artificial Sequence
  Description of Artificial Sequence: Synthetic oligonucleotide
  Sense strand starting at position 2668 of SEQ ID NO: 1560798
caaccucuuuguggaggaa

SEQ ID NO: 1625144 - RNA, 19 nt, Artificial Sequence
  Description of Artificial Sequence: Synthetic oligonucleotide
  Antisense strand to SEQ ID NO: 1625143
uuccuccacaaagagguug

SEQ ID NO: 1625145 - RNA, 19 nt, Artificial Sequence
  Description of Artificial Sequence: Synthetic oligonucleotide
  Sense strand starting at position 2960 of SEQ ID NO: 1560798
ggugcaaacuccucuuugu

SEQ ID NO: 1625146 - RNA, 19 nt, Artificial Sequence
  Description of Artificial Sequence: Synthetic oligonucleotide
  Antisense strand to SEQ ID NO: 1625145
acaaagaggaguuugcacc

SEQ ID NO: 1625147 - RNA, 19 nt, Artificial Sequence
  Description of Artificial Sequence: Synthetic oligonucleotide
  Sense strand starting at position 3086 of SEQ ID NO: 1560798
gggcuccuauaaucagaga

SEQ ID NO: 1625148 - RNA, 19 nt, Artificial Sequence
  Description of Artificial Sequence: Synthetic oligonucleotide
  Antisense strand to SEQ ID NO: 1625147
ucucugauuauaggagccc

SEQ ID NO: 1625149 - RNA, 19 nt, Artificial Sequence
  Description of Artificial Sequence: Synthetic oligonucleotide
  Sense strand starting at position 3089 of SEQ ID NO: 1560798
cuccuauaaucagagagac

SEQ ID NO: 1625150 - RNA, 19 nt, Artificial Sequence
  Description of Artificial Sequence: Synthetic oligonucleotide
  Antisense strand to SEQ ID NO: 1625149
gucucucugauuauaggag

SEQ ID NO: 1625151 - RNA, 19 nt, Artificial Sequence
  Description of Artificial Sequence: Synthetic oligonucleotide
  Sense strand starting at position 3179 of SEQ ID NO: 1560798
agaggaugcucugucuugu

SEQ ID NO: 1625152 - RNA, 19 nt, Artificial Sequence
  Description of Artificial Sequence: Synthetic oligonucleotide
  Antisense strand to SEQ ID NO: 1625151
acaagacagagcauccucu

SEQ ID NO: 1625153 - RNA, 19 nt, Artificial Sequence
  Description of Artificial Sequence: Synthetic oligonucleotide
  Sense strand starting at position 3289 of SEQ ID NO: 1560798
uugugcacuuucuagaaga

SEQ ID NO: 1625154 - RNA, 19 nt, Artificial Sequence
  Description of Artificial Sequence: Synthetic oligonucleotide
  Antisense strand to SEQ ID NO: 1625153
ucuucuagaaagugcacaa

SEQ ID NO: 1625155 - RNA, 19 nt, Artificial Sequence
  Description of Artificial Sequence: Synthetic oligonucleotide
  Sense strand starting at position 3433 of SEQ ID NO: 1560798
gugcaaaccuucugggcaa

SEQ ID NO: 1625156 - RNA, 19 nt, Artificial Sequence
  Description of Artificial Sequence: Synthetic oligonucleotide
  Antisense strand to SEQ ID NO: 1625155
uugcccagaagguuugcac

SEQ ID NO: 1625157 - RNA, 19 nt, Artificial Sequence
  Description of Artificial Sequence: Synthetic oligonucleotide
  Sense strand starting at position 3503 of SEQ ID NO: 1560798
guggcuacacauuggagau

SEQ ID NO: 1625158 - RNA, 19 nt, Artificial Sequence
  Description of Artificial Sequence: Synthetic oligonucleotide
  Antisense strand to SEQ ID NO: 1625157
aucuccaauguguagccac

SEQ ID NO: 1625159 - RNA, 19 nt, Artificial Sequence
  Description of Artificial Sequence: Synthetic oligonucleotide
  Sense strand starting at position 3509 of SEQ ID NO: 1560798
acacauuggagaugcgauu

SEQ ID NO: 1625160 - RNA, 19 nt, Artificial Sequence
  Description of Artificial Sequence: Synthetic oligonucleotide
  Antisense strand to SEQ ID NO: 1625159
aaucgcaucuccaaugugu

SEQ ID NO: 1625161 - RNA, 19 nt, Artificial Sequence
  Description of Artificial Sequence: Synthetic oligonucleotide
  Sense strand starting at position 3541 of SEQ ID NO: 1560798
cuagguuggcucuggaaua

SEQ ID NO: 1625162 - RNA, 19 nt, Artificial Sequence
  Description of Artificial Sequence: Synthetic oligonucleotide
  Antisense strand to SEQ ID NO: 1625161
uauuccagagccaaccuag

SEQ ID NO: 1625163 - RNA, 19 nt, Artificial Sequence
  Description of Artificial Sequence: Synthetic oligonucleotide
  Sense strand starting at position 3755 of SEQ ID NO: 1560798
guuaguacucgcugcuuag

SEQ ID NO: 1625164 - RNA, 19 nt, Artificial Sequence
  Description of Artificial Sequence: Synthetic oligonucleotide
  Antisense strand to SEQ ID NO: 1625163
cuaagcagcgaguacuaac

SEQ ID NO: 1625165 - RNA, 19 nt, Artificial Sequence
  Description of Artificial Sequence: Synthetic oligonucleotide
  Sense strand starting at position 3783 of SEQ ID NO: 1560798
uuuaguaagugccuguuau

SEQ ID NO: 1625166 - RNA, 19 nt, Artificial Sequence
  Description of Artificial Sequence: Synthetic oligonucleotide
  Antisense strand to SEQ ID NO: 1625165
auaacaggcacuuacuaaa

SEQ ID NO: 1625167 - RNA, 19 nt, Artificial Sequence
  Description of Artificial Sequence: Synthetic oligonucleotide
  Sense strand starting at position 3784 of SEQ ID NO: 1560798
uuaguaagugccuguuauu

SEQ ID NO: 1625168 - RNA, 19 nt, Artificial Sequence
  Description of Artificial Sequence: Synthetic oligonucleotide
  Antisense strand to SEQ ID NO: 1625167
aauaacaggcacuuacuaa

SEQ ID NO: 1625169 - RNA, 19 nt, Artificial Sequence
  Description of Artificial Sequence: Synthetic oligonucleotide
  Sense strand starting at position 3787 of SEQ ID NO: 1560798
guaagugccuguuauuuac

SEQ ID NO: 1625170 - RNA, 19 nt, Artificial Sequence
  Description of Artificial Sequence: Synthetic oligonucleotide
  Antisense strand to SEQ ID NO: 1625169
guaaauaacaggcacuuac

SEQ ID NO: 1625171 - RNA, 19 nt, Artificial Sequence
  Description of Artificial Sequence: Synthetic oligonucleotide
  Sense strand starting at position 3793 of SEQ ID NO: 1560798
gccuguuauuuaccaggca

SEQ ID NO: 1625172 - RNA, 19 nt, Artificial Sequence
  Description of Artificial Sequence: Synthetic oligonucleotide
  Antisense strand to SEQ ID NO: 1625171
ugccugguaaauaacaggc

SEQ ID NO: 1625173 - RNA, 19 nt, Artificial Sequence
  Description of Artificial Sequence: Synthetic oligonucleotide
  Sense strand starting at position 3794 of SEQ ID NO: 1560798
ccuguuauuuaccaggcau

SEQ ID NO: 1625174 - RNA, 19 nt, Artificial Sequence
  Description of Artificial Sequence: Synthetic oligonucleotide
  Antisense strand to SEQ ID NO: 1625173
augccugguaaauaacagg

SEQ ID NO: 1625175 - RNA, 19 nt, Artificial Sequence
  Description of Artificial Sequence: Synthetic oligonucleotide
  Sense strand starting at position 3949 of SEQ ID NO: 1560798
ccugaagugucggucccua

SEQ ID NO: 1625176 - RNA, 19 nt, Artificial Sequence
  Description of Artificial Sequence: Synthetic oligonucleotide
  Antisense strand to SEQ ID NO: 1625175
uagggaccgacacuucagg

SEQ ID NO: 1625177 - RNA, 19 nt, Artificial Sequence
  Description of Artificial Sequence: Synthetic oligonucleotide
  Sense strand starting at position 3953 of SEQ ID NO: 1560798
aagugucggucccuaaacu

SEQ ID NO: 1625178 - RNA, 19 nt, Artificial Sequence
  Description of Artificial Sequence: Synthetic oligonucleotide
  Antisense strand to SEQ ID NO: 1625177
aguuuagggaccgacacuu

SEQ ID NO: 1625179 - RNA, 19 nt, Artificial Sequence
  Description of Artificial Sequence: Synthetic oligonucleotide
  Sense strand starting at position 3954 of SEQ ID NO: 1560798
agugucggucccuaaacuu

SEQ ID NO: 1625180 - RNA, 19 nt, Artificial Sequence
  Description of Artificial Sequence: Synthetic oligonucleotide
  Antisense strand to SEQ ID NO: 1625179
aaguuuagggaccgacacu

SEQ ID NO: 1625181 - RNA, 19 nt, Artificial Sequence
  Description of Artificial Sequence: Synthetic oligonucleotide
  Sense strand starting at position 52 of SEQ ID NO: 1560799
guuaccauguuuguuuaaa

SEQ ID NO: 1625182 - RNA, 19 nt, Artificial Sequence
  Description of Artificial Sequence: Synthetic oligonucleotide
  Antisense strand to SEQ ID NO: 1625181
uuuaaacaaacaugguaac

SEQ ID NO: 1625183 - RNA, 19 nt, Artificial Sequence
  Description of Artificial Sequence: Synthetic oligonucleotide
  Sense strand starting at position 159 of SEQ ID NO: 1560799
ggaguaaguuaacuuagau

SEQ ID NO: 1625184 - RNA, 19 nt, Artificial Sequence
  Description of Artificial Sequence: Synthetic oligonucleotide
  Antisense strand to SEQ ID NO: 1625183
aucuaaguuaacuuacucc

SEQ ID NO: 1625185 - RNA, 19 nt, Artificial Sequence
  Description of Artificial Sequence: Synthetic oligonucleotide
  Sense strand starting at position 1054 of SEQ ID NO: 1560799
cuggguugacagugaugga

SEQ ID NO: 1625186 - RNA, 19 nt, Artificial Sequence
  Description of Artificial Sequence: Synthetic oligonucleotide
  Antisense strand to SEQ ID NO: 1625185
uccaucacugucaacccag

SEQ ID NO: 1625187 - RNA, 19 nt, Artificial Sequence
  Description of Artificial Sequence: Synthetic oligonucleotide
  Sense strand starting at position 1136 of SEQ ID NO: 1560799
cggcguaugagcgcauuaa

SEQ ID NO: 1625188 - RNA, 19 nt, Artificial Sequence
  Description of Artificial Sequence: Synthetic oligonucleotide
  Antisense strand to SEQ ID NO: 1625187
uuaaugcgcucauacgccg

SEQ ID NO: 1625189 - RNA, 19 nt, Artificial Sequence
  Description of Artificial Sequence: Synthetic oligonucleotide
  Sense strand starting at position 1140 of SEQ ID NO: 1560799
guaugagcgcauuaaugag

SEQ ID NO: 1625190 - RNA, 19 nt, Artificial Sequence
  Description of Artificial Sequence: Synthetic oligonucleotide
  Antisense strand to SEQ ID NO: 1625189
cucauuaaugcgcucauac

SEQ ID NO: 1625191 - RNA, 19 nt, Artificial Sequence
  Description of Artificial Sequence: Synthetic oligonucleotide
  Sense strand starting at position 1155 of SEQ ID NO: 1560799
ugaguacacagaugaaugu

SEQ ID NO: 1625192 - RNA, 19 nt, Artificial Sequence
  Description of Artificial Sequence: Synthetic oligonucleotide
  Antisense strand to SEQ ID NO: 1625191
acauucaucuguguacuca

SEQ ID NO: 1625193 - RNA, 19 nt, Artificial Sequence
  Description of Artificial Sequence: Synthetic oligonucleotide
  Sense strand starting at position 1168 of SEQ ID NO: 1560799
gaauguccucucuggcuca

SEQ ID NO: 1625194 - RNA, 19 nt, Artificial Sequence
  Description of Artificial Sequence: Synthetic oligonucleotide
  Antisense strand to SEQ ID NO: 1625193
ugagccagagaggacauuc

SEQ ID NO: 1625195 - RNA, 19 nt, Artificial Sequence
  Description of Artificial Sequence: Synthetic oligonucleotide
  Sense strand starting at position 1295 of SEQ ID NO: 1560799
guccuaaacggaggauaua

SEQ ID NO: 1625196 - RNA, 19 nt, Artificial Sequence
  Description of Artificial Sequence: Synthetic oligonucleotide
  Antisense strand to SEQ ID NO: 1625195
uauauccuccguuuaggac

SEQ ID NO: 1625197 - RNA, 19 nt, Artificial Sequence
  Description of Artificial Sequence: Synthetic oligonucleotide
  Sense strand starting at position 1519 of SEQ ID NO: 1560799
ccuuuaucggcuggcauuu

SEQ ID NO: 1625198 - RNA, 19 nt, Artificial Sequence
  Description of Artificial Sequence: Synthetic oligonucleotide
  Antisense strand to SEQ ID NO: 1625197
aaaugccagccgauaaagg

SEQ ID NO: 1625199 - RNA, 19 nt, Artificial Sequence
  Description of Artificial Sequence: Synthetic oligonucleotide
  Sense strand starting at position 1805 of SEQ ID NO: 1560799
gcgggcggccuccuuaaua

SEQ ID NO: 1625200 - RNA, 19 nt, Artificial Sequence
  Description of Artificial Sequence: Synthetic oligonucleotide
  Antisense strand to SEQ ID NO: 1625199
uauuaaggaggccgcccgc

SEQ ID NO: 1625201 - RNA, 19 nt, Artificial Sequence
  Description of Artificial Sequence: Synthetic oligonucleotide
  Sense strand starting at position 1867 of SEQ ID NO: 1560799
gcagcuucgccauagggaa

SEQ ID NO: 1625202 - RNA, 19 nt, Artificial Sequence
  Description of Artificial Sequence: Synthetic oligonucleotide
  Antisense strand to SEQ ID NO: 1625201
uucccuauggcgaagcugc

SEQ ID NO: 1625203 - RNA, 19 nt, Artificial Sequence
  Description of Artificial Sequence: Synthetic oligonucleotide
  Sense strand starting at position 2091 of SEQ ID NO: 1560799
ugcaaauauacacggaagu

SEQ ID NO: 1625204 - RNA, 19 nt, Artificial Sequence
  Description of Artificial Sequence: Synthetic oligonucleotide
  Antisense strand to SEQ ID NO: 1625203
acuuccguguauauuugca

SEQ ID NO: 1625205 - RNA, 19 nt, Artificial Sequence
  Description of Artificial Sequence: Synthetic oligonucleotide
  Sense strand starting at position 2190 of SEQ ID NO: 1560799
guacuccuucgugauguca

SEQ ID NO: 1625206 - RNA, 19 nt, Artificial Sequence
  Description of Artificial Sequence: Synthetic oligonucleotide
  Antisense strand to SEQ ID NO: 1625205
ugacaucacgaaggaguac

SEQ ID NO: 1625207 - RNA, 19 nt, Artificial Sequence
  Description of Artificial Sequence: Synthetic oligonucleotide
  Sense strand starting at position 2198 of SEQ ID NO: 1560799
ucgugaugucacguuccga

SEQ ID NO: 1625208 - RNA, 19 nt, Artificial Sequence
  Description of Artificial Sequence: Synthetic oligonucleotide
  Antisense strand to SEQ ID NO: 1625207
ucggaacgugacaucacga

SEQ ID NO: 1625209 - RNA, 19 nt, Artificial Sequence
  Description of Artificial Sequence: Synthetic oligonucleotide
  Sense strand starting at position 2200 of SEQ ID NO: 1560799
gugaugucacguuccgagu

SEQ ID NO: 1625210 - RNA, 19 nt, Artificial Sequence
  Description of Artificial Sequence: Synthetic oligonucleotide
  Antisense strand to SEQ ID NO: 1625209
acucggaacgugacaucac

SEQ ID NO: 1625211 - RNA, 19 nt, Artificial Sequence
  Description of Artificial Sequence: Synthetic oligonucleotide
  Sense strand starting at position 2239 of SEQ ID NO: 1560799
ggcucuuaauuaguccuaa

SEQ ID NO: 1625212 - RNA, 19 nt, Artificial Sequence
  Description of Artificial Sequence: Synthetic oligonucleotide
  Antisense strand to SEQ ID NO: 1625211
uuaggacuaauuaagagcc

SEQ ID NO: 1625213 - RNA, 19 nt, Artificial Sequence
  Description of Artificial Sequence: Synthetic oligonucleotide
  Sense strand starting at position 2297 of SEQ ID NO: 1560799
uagggcucucauugggauu

SEQ ID NO: 1625214 - RNA, 19 nt, Artificial Sequence
  Description of Artificial Sequence: Synthetic oligonucleotide
  Antisense strand to SEQ ID NO: 1625213
aaucccaaugagagcccua

SEQ ID NO: 1625215 - RNA, 19 nt, Artificial Sequence
  Description of Artificial Sequence: Synthetic oligonucleotide
  Sense strand starting at position 2298 of SEQ ID NO: 1560799
agggcucucauugggauua

SEQ ID NO: 1625216 - RNA, 19 nt, Artificial Sequence
  Description of Artificial Sequence: Synthetic oligonucleotide
  Antisense strand to SEQ ID NO: 1625215
uaaucccaaugagagcccu

SEQ ID NO: 1625217 - RNA, 19 nt, Artificial Sequence
  Description of Artificial Sequence: Synthetic oligonucleotide
  Sense strand starting at position 2365 of SEQ ID NO: 1560799
ccauuuccucgcuguguaa

SEQ ID NO: 1625218 - RNA, 19 nt, Artificial Sequence
  Description of Artificial Sequence: Synthetic oligonucleotide
  Antisense strand to SEQ ID NO: 1625217
uuacacagcgaggaaaugg

SEQ ID NO: 1625219 - RNA, 19 nt, Artificial Sequence
  Description of Artificial Sequence: Synthetic oligonucleotide
  Sense strand starting at position 2367 of SEQ ID NO: 1560799
auuuccucgcuguguaaua

SEQ ID NO: 1625220 - RNA, 19 nt, Artificial Sequence
  Description of Artificial Sequence: Synthetic oligonucleotide
  Antisense strand to SEQ ID NO: 1625219
uauuacacagcgaggaaau

SEQ ID NO: 1625221 - RNA, 19 nt, Artificial Sequence
  Description of Artificial Sequence: Synthetic oligonucleotide
  Sense strand starting at position 2383 of SEQ ID NO: 1560799
auauuagaugaguggcaua

SEQ ID NO: 1625222 - RNA, 19 nt, Artificial Sequence
  Description of Artificial Sequence: Synthetic oligonucleotide
  Antisense strand to SEQ ID NO: 1625221
uaugccacucaucuaauau

SEQ ID NO: 1625223 - RNA, 19 nt, Artificial Sequence
  Description of Artificial Sequence: Synthetic oligonucleotide
  Sense strand starting at position 2396 of SEQ ID NO: 1560799
ggcauaaccucucuggacu

SEQ ID NO: 1625224 - RNA, 19 nt, Artificial Sequence
  Description of Artificial Sequence: Synthetic oligonucleotide
  Antisense strand to SEQ ID NO: 1625223
aguccagagagguuaugcc

SEQ ID NO: 1625225 - RNA, 19 nt, Artificial Sequence
  Description of Artificial Sequence: Synthetic oligonucleotide
  Sense strand starting at position 2397 of SEQ ID NO: 1560799
gcauaaccucucuggacuu

SEQ ID NO: 1625226 - RNA, 19 nt, Artificial Sequence
  Description of Artificial Sequence: Synthetic oligonucleotide
  Antisense strand to SEQ ID NO: 1625225
aaguccagagagguuaugc

SEQ ID NO: 1625227 - RNA, 19 nt, Artificial Sequence
  Description of Artificial Sequence: Synthetic oligonucleotide
  Sense strand starting at position 2417 of SEQ ID NO: 1560799
aguauuaccgucuaccaaa

SEQ ID NO: 1625228 - RNA, 19 nt, Artificial Sequence
  Description of Artificial Sequence: Synthetic oligonucleotide
  Antisense strand to SEQ ID NO: 1625227
uuugguagacgguaauacu

SEQ ID NO: 1625229 - RNA, 19 nt, Artificial Sequence
  Description of Artificial Sequence: Synthetic oligonucleotide
  Sense strand starting at position 2424 of SEQ ID NO: 1560799
ccgucuaccaaaugggaau

SEQ ID NO: 1625230 - RNA, 19 nt, Artificial Sequence
  Description of Artificial Sequence: Synthetic oligonucleotide
  Antisense strand to SEQ ID NO: 1625229
auucccauuugguagacgg

SEQ ID NO: 1625231 - RNA, 19 nt, Artificial Sequence
  Description of Artificial Sequence: Synthetic oligonucleotide
  Sense strand starting at position 2473 of SEQ ID NO: 1560799
ugaggcuucuaugcuaauc

SEQ ID NO: 1625232 - RNA, 19 nt, Artificial Sequence
  Description of Artificial Sequence: Synthetic oligonucleotide
  Antisense strand to SEQ ID NO: 1625231
gauuagcauagaagccuca

SEQ ID NO: 1625233 - RNA, 19 nt, Artificial Sequence
  Description of Artificial Sequence: Synthetic oligonucleotide
  Sense strand starting at position 2484 of SEQ ID NO: 1560799
ugcuaaucuugaguguaaa

SEQ ID NO: 1625234 - RNA, 19 nt, Artificial Sequence
  Description of Artificial Sequence: Synthetic oligonucleotide
  Antisense strand to SEQ ID NO: 1625233
uuuacacucaagauuagca

SEQ ID NO: 1625235 - RNA, 19 nt, Artificial Sequence
  Description of Artificial Sequence: Synthetic oligonucleotide
  Sense strand starting at position 2544 of SEQ ID NO: 1560799
uaguuaagcgcucaguaaa

SEQ ID NO: 1625236 - RNA, 19 nt, Artificial Sequence
  Description of Artificial Sequence: Synthetic oligonucleotide
  Antisense strand to SEQ ID NO: 1625235
uuuacugagcgcuuaacua

SEQ ID NO: 1625237 - RNA, 19 nt, Artificial Sequence
  Description of Artificial Sequence: Synthetic oligonucleotide
  Sense strand starting at position 2579 of SEQ ID NO: 1560799
acaggucaugauugcauua

SEQ ID NO: 1625238 - RNA, 19 nt, Artificial Sequence
  Description of Artificial Sequence: Synthetic oligonucleotide
  Antisense strand to SEQ ID NO: 1625237
uaaugcaaucaugaccugu

SEQ ID NO: 1625239 - RNA, 19 nt, Artificial Sequence
  Description of Artificial Sequence: Synthetic oligonucleotide
  Sense strand starting at position 2660 of SEQ ID NO: 1560799
ccaaguaacugacaaggaa

SEQ ID NO: 1625240 - RNA, 19 nt, Artificial Sequence
  Description of Artificial Sequence: Synthetic oligonucleotide
  Antisense strand to SEQ ID NO: 1625239
uuccuugucaguuacuugg

SEQ ID NO: 1625241 - RNA, 19 nt, Artificial Sequence
  Description of Artificial Sequence: Synthetic oligonucleotide
  Sense strand starting at position 2735 of SEQ ID NO: 1560799
cuggcaucuuggccaauaa

SEQ ID NO: 1625242 - RNA, 19 nt, Artificial Sequence
  Description of Artificial Sequence: Synthetic oligonucleotide
  Antisense strand to SEQ ID NO: 1625241
uuauuggccaagaugccag

SEQ ID NO: 1625243 - RNA, 19 nt, Artificial Sequence
  Description of Artificial Sequence: Synthetic oligonucleotide
  Sense strand starting at position 2736 of SEQ ID NO: 1560799
uggcaucuuggccaauaaa

SEQ ID NO: 1625244 - RNA, 19 nt, Artificial Sequence
  Description of Artificial Sequence: Synthetic oligonucleotide
  Antisense strand to SEQ ID NO: 1625243
uuuauuggccaagaugcca

SEQ ID NO: 1625245 - RNA, 19 nt, Artificial Sequence
  Description of Artificial Sequence: Synthetic oligonucleotide
  Sense strand starting at position 2843 of SEQ ID NO: 1560799
cccagacuguccuuucuua

SEQ ID NO: 1625246 - RNA, 19 nt, Artificial Sequence
  Description of Artificial Sequence: Synthetic oligonucleotide
  Antisense strand to SEQ ID NO: 1625245
uaagaaaggacagucuggg

SEQ ID NO: 1625247 - RNA, 19 nt, Artificial Sequence
  Description of Artificial Sequence: Synthetic oligonucleotide
  Sense strand starting at position 2925 of SEQ ID NO: 1560799
uggagugcugauggguaau

SEQ ID NO: 1625248 - RNA, 19 nt, Artificial Sequence
  Description of Artificial Sequence: Synthetic oligonucleotide
  Antisense strand to SEQ ID NO: 1625247
auuacccaucagcacucca

SEQ ID NO: 1625249 - RNA, 19 nt, Artificial Sequence
  Description of Artificial Sequence: Synthetic oligonucleotide
  Sense strand starting at position 2928 of SEQ ID NO: 1560799
agugcugauggguaauuga

SEQ ID NO: 1625250 - RNA, 19 nt, Artificial Sequence
  Description of Artificial Sequence: Synthetic oligonucleotide
  Antisense strand to SEQ ID NO: 1625249
ucaauuacccaucagcacu

SEQ ID NO: 1625251 - RNA, 19 nt, Artificial Sequence
  Description of Artificial Sequence: Synthetic oligonucleotide
  Sense strand starting at position 3310 of SEQ ID NO: 1560799
agaggagugguguguagga

SEQ ID NO: 1625252 - RNA, 19 nt, Artificial Sequence
  Description of Artificial Sequence: Synthetic oligonucleotide
  Antisense strand to SEQ ID NO: 1625251
uccuacacaccacuccucu

SEQ ID NO: 1625253 - RNA, 19 nt, Artificial Sequence
  Description of Artificial Sequence: Synthetic oligonucleotide
  Sense strand starting at position 3314 of SEQ ID NO: 1560799
gagugguguguaggaggaa

SEQ ID NO: 1625254 - RNA, 19 nt, Artificial Sequence
  Description of Artificial Sequence: Synthetic oligonucleotide
  Antisense strand to SEQ ID NO: 1625253
uuccuccuacacaccacuc

SEQ ID NO: 1625255 - RNA, 19 nt, Artificial Sequence
  Description of Artificial Sequence: Synthetic oligonucleotide
  Sense strand starting at position 3365 of SEQ ID NO: 1560799
uggacuucuuugguaucca

SEQ ID NO: 1625256 - RNA, 19 nt, Artificial Sequence
  Description of Artificial Sequence: Synthetic oligonucleotide
  Antisense strand to SEQ ID NO: 1625255
uggauaccaaagaagucca

SEQ ID NO: 1625257 - RNA, 19 nt, Artificial Sequence
  Description of Artificial Sequence: Synthetic oligonucleotide
  Sense strand starting at position 3435 of SEQ ID NO: 1560799
guuuccucaucuuuacuga

SEQ ID NO: 1625258 - RNA, 19 nt, Artificial Sequence
  Description of Artificial Sequence: Synthetic oligonucleotide
  Antisense strand to SEQ ID NO: 1625257
ucaguaaagaugaggaaac

SEQ ID NO: 1625259 - RNA, 19 nt, Artificial Sequence
  Description of Artificial Sequence: Synthetic oligonucleotide
  Sense strand starting at position 3466 of SEQ ID NO: 1560799
gugugugaacccugauauu

SEQ ID NO: 1625260 - RNA, 19 nt, Artificial Sequence
  Description of Artificial Sequence: Synthetic oligonucleotide
  Antisense strand to SEQ ID NO: 1625259
aauaucaggguucacacac

SEQ ID NO: 1625261 - RNA, 19 nt, Artificial Sequence
  Description of Artificial Sequence: Synthetic oligonucleotide
  Sense strand starting at position 32 of SEQ ID NO: 1560800
auuagaugacccuggcuuu

SEQ ID NO: 1625262 - RNA, 19 nt, Artificial Sequence
  Description of Artificial Sequence: Synthetic oligonucleotide
  Antisense strand to SEQ ID NO: 1625261
aaagccagggucaucuaau

SEQ ID NO: 1625263 - RNA, 19 nt, Artificial Sequence
  Description of Artificial Sequence: Synthetic oligonucleotide
  Sense strand starting at position 67 of SEQ ID NO: 1560800
gauggagguuuggugcuaa

SEQ ID NO: 1625264 - RNA, 19 nt, Artificial Sequence
  Description of Artificial Sequence: Synthetic oligonucleotide
  Antisense strand to SEQ ID NO: 1625263
uuagcaccaaaccuccauc

SEQ ID NO: 1625265 - RNA, 19 nt, Artificial Sequence
  Description of Artificial Sequence: Synthetic oligonucleotide
  Sense strand starting at position 95 of SEQ ID NO: 1560800
uuucuugcagcagauagaa

SEQ ID NO: 1625266 - RNA, 19 nt, Artificial Sequence
  Description of Artificial Sequence: Synthetic oligonucleotide
  Antisense strand to SEQ ID NO: 1625265
uucuaucugcugcaagaaa

SEQ ID NO: 1625267 - RNA, 19 nt, Artificial Sequence
  Description of Artificial Sequence: Synthetic oligonucleotide
  Sense strand starting at position 174 of SEQ ID NO: 1560800
cccugaugcugauuaaccu

SEQ ID NO: 1625268 - RNA, 19 nt, Artificial Sequence
  Description of Artificial Sequence: Synthetic oligonucleotide
  Antisense strand to SEQ ID NO: 1625267
agguuaaucagcaucaggg

SEQ ID NO: 1625269 - RNA, 19 nt, Artificial Sequence
  Description of Artificial Sequence: Synthetic oligonucleotide
  Sense strand starting at position 182 of SEQ ID NO: 1560800
cugauuaaccuuuguguuu

SEQ ID NO: 1625270 - RNA, 19 nt, Artificial Sequence
  Description of Artificial Sequence: Synthetic oligonucleotide
  Antisense strand to SEQ ID NO: 1625269
aaacacaaagguuaaucag

SEQ ID NO: 1625271 - RNA, 19 nt, Artificial Sequence
  Description of Artificial Sequence: Synthetic oligonucleotide
  Sense strand starting at position 183 of SEQ ID NO: 1560800
ugauuaaccuuuguguuua

SEQ ID NO: 1625272 - RNA, 19 nt, Artificial Sequence
  Description of Artificial Sequence: Synthetic oligonucleotide
  Antisense strand to SEQ ID NO: 1625271
uaaacacaaagguuaauca

SEQ ID NO: 1625273 - RNA, 19 nt, Artificial Sequence
  Description of Artificial Sequence: Synthetic oligonucleotide
  Sense strand starting at position 215 of SEQ ID NO: 1560800
ucuacaaggucccuuguaa

SEQ ID NO: 1625274 - RNA, 19 nt, Artificial Sequence
  Description of Artificial Sequence: Synthetic oligonucleotide
  Antisense strand to SEQ ID NO: 1625273
uuacaagggaccuuguaga

SEQ ID NO: 1625275 - RNA, 19 nt, Artificial Sequence
  Description of Artificial Sequence: Synthetic oligonucleotide
  Sense strand starting at position 370 of SEQ ID NO: 1560800
ucuggacuuaggcaguaau

SEQ ID NO: 1625276 - RNA, 19 nt, Artificial Sequence
  Description of Artificial Sequence: Synthetic oligonucleotide
  Antisense strand to SEQ ID NO: 1625275
auuacugccuaaguccaga

SEQ ID NO: 1625277 - RNA, 19 nt, Artificial Sequence
  Description of Artificial Sequence: Synthetic oligonucleotide
  Sense strand starting at position 933 of SEQ ID NO: 1560800
aguuguucccagugaauuu

SEQ ID NO: 1625278 - RNA, 19 nt, Artificial Sequence
  Description of Artificial Sequence: Synthetic oligonucleotide
  Antisense strand to SEQ ID NO: 1625277
aaauucacugggaacaacu

SEQ ID NO: 1625279 - RNA, 19 nt, Artificial Sequence
  Description of Artificial Sequence: Synthetic oligonucleotide
  Sense strand starting at position 975 of SEQ ID NO: 1560800
cuggguagaguuuacugaa

SEQ ID NO: 1625280 - RNA, 19 nt, Artificial Sequence
  Description of Artificial Sequence: Synthetic oligonucleotide
  Antisense strand to SEQ ID NO: 1625279
uucaguaaacucuacccag

SEQ ID NO: 1625281 - RNA, 19 nt, Artificial Sequence
  Description of Artificial Sequence: Synthetic oligonucleotide
  Sense strand starting at position 1090 of SEQ ID NO: 1560800
caaggugucuccuuccaga

SEQ ID NO: 1625282 - RNA, 19 nt, Artificial Sequence
  Description of Artificial Sequence: Synthetic oligonucleotide
  Antisense strand to SEQ ID NO: 1625281
ucuggaaggagacaccuug

SEQ ID NO: 1625283 - RNA, 19 nt, Artificial Sequence
  Description of Artificial Sequence: Synthetic oligonucleotide
  Sense strand starting at position 1392 of SEQ ID NO: 1560800
ucuccuuguguccacagaa

SEQ ID NO: 1625284 - RNA, 19 nt, Artificial Sequence
  Description of Artificial Sequence: Synthetic oligonucleotide
  Antisense strand to SEQ ID NO: 1625283
uucuguggacacaaggaga

SEQ ID NO: 1625285 - RNA, 19 nt, Artificial Sequence
  Description of Artificial Sequence: Synthetic oligonucleotide
  Sense strand starting at position 1677 of SEQ ID NO: 1560800
ggaugauggccacggugua

SEQ ID NO: 1625286 - RNA, 19 nt, Artificial Sequence
  Description of Artificial Sequence: Synthetic oligonucleotide
  Antisense strand to SEQ ID NO: 1625285
uacaccguggccaucaucc

SEQ ID NO: 1625287 - RNA, 19 nt, Artificial Sequence
  Description of Artificial Sequence: Synthetic oligonucleotide
  Sense strand starting at position 1942 of SEQ ID NO: 1560800
ggagaugucaguuacugca

SEQ ID NO: 1625288 - RNA, 19 nt, Artificial Sequence
  Description of Artificial Sequence: Synthetic oligonucleotide
  Antisense strand to SEQ ID NO: 1625287
ugcaguaacugacaucucc

SEQ ID NO: 1625289 - RNA, 19 nt, Artificial Sequence
  Description of Artificial Sequence: Synthetic oligonucleotide
  Sense strand starting at position 1949 of SEQ ID NO: 1560800
ucaguuacugcaugaagaa

SEQ ID NO: 1625290 - RNA, 19 nt, Artificial Sequence
  Description of Artificial Sequence: Synthetic oligonucleotide
  Antisense strand to SEQ ID NO: 1625289
uucuucaugcaguaacuga

SEQ ID NO: 1625291 - RNA, 19 nt, Artificial Sequence
  Description of Artificial Sequence: Synthetic oligonucleotide
  Sense strand starting at position 2013 of SEQ ID NO: 1560800
cuugauaaaugguuugguu

SEQ ID NO: 1625292 - RNA, 19 nt, Artificial Sequence
  Description of Artificial Sequence: Synthetic oligonucleotide
  Antisense strand to SEQ ID NO: 1625291
aaccaaaccauuuaucaag

SEQ ID NO: 1625293 - RNA, 19 nt, Artificial Sequence
  Description of Artificial Sequence: Synthetic oligonucleotide
  Sense strand starting at position 2075 of SEQ ID NO: 1560800
ccuagugagaacgguacua

SEQ ID NO: 1625294 - RNA, 19 nt, Artificial Sequence
  Description of Artificial Sequence: Synthetic oligonucleotide
  Antisense strand to SEQ ID NO: 1625293
uaguaccguucucacuagg

SEQ ID NO: 1625295 - RNA, 19 nt, Artificial Sequence
  Description of Artificial Sequence: Synthetic oligonucleotide
  Sense strand starting at position 2077 of SEQ ID NO: 1560800
uagugagaacgguacuauu

SEQ ID NO: 1625296 - RNA, 19 nt, Artificial Sequence
  Description of Artificial Sequence: Synthetic oligonucleotide
  Antisense strand to SEQ ID NO: 1625295
aauaguaccguucucacua

SEQ ID NO: 1625297 - RNA, 19 nt, Artificial Sequence
  Description of Artificial Sequence: Synthetic oligonucleotide
  Sense strand starting at position 2109 of SEQ ID NO: 1560800
uuugaaguaccuugagcau

SEQ ID NO: 1625298 - RNA, 19 nt, Artificial Sequence
  Description of Artificial Sequence: Synthetic oligonucleotide
  Antisense strand to SEQ ID NO: 1625297
augcucaagguacuucaaa

SEQ ID NO: 1625299 - RNA, 19 nt, Artificial Sequence
  Description of Artificial Sequence: Synthetic oligonucleotide
  Sense strand starting at position 2115 of SEQ ID NO: 1560800
guaccuugagcauagucau

SEQ ID NO: 1625300 - RNA, 19 nt, Artificial Sequence
  Description of Artificial Sequence: Synthetic oligonucleotide
  Antisense strand to SEQ ID NO: 1625299
augacuaugcucaagguac

SEQ ID NO: 1625301 - RNA, 19 nt, Artificial Sequence
  Description of Artificial Sequence: Synthetic oligonucleotide
  Sense strand starting at position 2118 of SEQ ID NO: 1560800
ccuugagcauagucauuga

SEQ ID NO: 1625302 - RNA, 19 nt, Artificial Sequence
  Description of Artificial Sequence: Synthetic oligonucleotide
  Antisense strand to SEQ ID NO: 1625301
ucaaugacuaugcucaagg

SEQ ID NO: 1625303 - RNA, 19 nt, Artificial Sequence
  Description of Artificial Sequence: Synthetic oligonucleotide
  Sense strand starting at position 2121 of SEQ ID NO: 1560800
ugagcauagucauugagaa

SEQ ID NO: 1625304 - RNA, 19 nt, Artificial Sequence
  Description of Artificial Sequence: Synthetic oligonucleotide
  Antisense strand to SEQ ID NO: 1625303
uucucaaugacuaugcuca

SEQ ID NO: 1625305 - RNA, 19 nt, Artificial Sequence
  Description of Artificial Sequence: Synthetic oligonucleotide
  Sense strand starting at position 2122 of SEQ ID NO: 1560800
gagcauagucauugagaau

SEQ ID NO: 1625306 - RNA, 19 nt, Artificial Sequence
  Description of Artificial Sequence: Synthetic oligonucleotide
  Antisense strand to SEQ ID NO: 1625305
auucucaaugacuaugcuc

SEQ ID NO: 1625307 - RNA, 19 nt, Artificial Sequence
  Description of Artificial Sequence: Synthetic oligonucleotide
  Sense strand starting at position 2145 of SEQ ID NO: 1560800
aaauguagagcuugcucaa

SEQ ID NO: 1625308 - RNA, 19 nt, Artificial Sequence
  Description of Artificial Sequence: Synthetic oligonucleotide
  Antisense strand to SEQ ID NO: 1625307
uugagcaagcucuacauuu

SEQ ID NO: 1625309 - RNA, 19 nt, Artificial Sequence
  Description of Artificial Sequence: Synthetic oligonucleotide
  Sense strand starting at position 2169 of SEQ ID NO: 1560800
agcuguugaaacgguagau

SEQ ID NO: 1625310 - RNA, 19 nt, Artificial Sequence
  Description of Artificial Sequence: Synthetic oligonucleotide
  Antisense strand to SEQ ID NO: 1625309
aucuaccguuucaacagcu

SEQ ID NO: 1625311 - RNA, 19 nt, Artificial Sequence
  Description of Artificial Sequence: Synthetic oligonucleotide
  Sense strand starting at position 2173 of SEQ ID NO: 1560800
guugaaacgguagaucaga

SEQ ID NO: 1625312 - RNA, 19 nt, Artificial Sequence
  Description of Artificial Sequence: Synthetic oligonucleotide
  Antisense strand to SEQ ID NO: 1625311
ucugaucuaccguuucaac

SEQ ID NO: 1625313 - RNA, 19 nt, Artificial Sequence
  Description of Artificial Sequence: Synthetic oligonucleotide
  Sense strand starting at position 2765 of SEQ ID NO: 1560800
acauauuccuuugcuggaa

SEQ ID NO: 1625314 - RNA, 19 nt, Artificial Sequence
  Description of Artificial Sequence: Synthetic oligonucleotide
  Antisense strand to SEQ ID NO: 1625313
uuccagcaaaggaauaugu

SEQ ID NO: 1625315 - RNA, 19 nt, Artificial Sequence
  Description of Artificial Sequence: Synthetic oligonucleotide
  Sense strand starting at position 2963 of SEQ ID NO: 1560800
gagacuguguugcucuaag

SEQ ID NO: 1625316 - RNA, 19 nt, Artificial Sequence
  Description of Artificial Sequence: Synthetic oligonucleotide
  Antisense strand to SEQ ID NO: 1625315
cuuagagcaacacagucuc

SEQ ID NO: 1625317 - RNA, 19 nt, Artificial Sequence
  Description of Artificial Sequence: Synthetic oligonucleotide
  Sense strand starting at position 2990 of SEQ ID NO: 1560800
cagaaaucaugcuuugguu

SEQ ID NO: 1625318 - RNA, 19 nt, Artificial Sequence
  Description of Artificial Sequence: Synthetic oligonucleotide
  Antisense strand to SEQ ID NO: 1625317
aaccaaagcaugauuucug

SEQ ID NO: 1625319 - RNA, 19 nt, Artificial Sequence
  Description of Artificial Sequence: Synthetic oligonucleotide
  Sense strand starting at position 2992 of SEQ ID NO: 1560800
gaaaucaugcuuugguugu

SEQ ID NO: 1625320 - RNA, 19 nt, Artificial Sequence
  Description of Artificial Sequence: Synthetic oligonucleotide
  Antisense strand to SEQ ID NO: 1625319
acaaccaaagcaugauuuc

SEQ ID NO: 1625321 - RNA, 19 nt, Artificial Sequence
  Description of Artificial Sequence: Synthetic oligonucleotide
  Sense strand starting at position 3025 of SEQ ID NO: 1560800
gagguaugccucuauguuc

SEQ ID NO: 1625322 - RNA, 19 nt, Artificial Sequence
  Description of Artificial Sequence: Synthetic oligonucleotide
  Antisense strand to SEQ ID NO: 1625321
gaacauagaggcauaccuc

SEQ ID NO: 1625323 - RNA, 19 nt, Artificial Sequence
  Description of Artificial Sequence: Synthetic oligonucleotide
  Sense strand starting at position 3118 of SEQ ID NO: 1560800
cuggcuguuguguaaugau

SEQ ID NO: 1625324 - RNA, 19 nt, Artificial Sequence
  Description of Artificial Sequence: Synthetic oligonucleotide
  Antisense strand to SEQ ID NO: 1625323
aucauuacacaacagccag

SEQ ID NO: 1625325 - RNA, 19 nt, Artificial Sequence
  Description of Artificial Sequence: Synthetic oligonucleotide
  Sense strand starting at position 3473 of SEQ ID NO: 1560800
uuguaaaguugagcagauu

SEQ ID NO: 1625326 - RNA, 19 nt, Artificial Sequence
  Description of Artificial Sequence: Synthetic oligonucleotide
  Antisense strand to SEQ ID NO: 1625325
aaucugcucaacuuuacaa

SEQ ID NO: 1625327 - RNA, 19 nt, Artificial Sequence
  Description of Artificial Sequence: Synthetic oligonucleotide
  Sense strand starting at position 3482 of SEQ ID NO: 1560800
ugagcagauuccuuuaucu

SEQ ID NO: 1625328 - RNA, 19 nt, Artificial Sequence
  Description of Artificial Sequence: Synthetic oligonucleotide
  Antisense strand to SEQ ID NO: 1625327
agauaaaggaaucugcuca

SEQ ID NO: 1625329 - RNA, 19 nt, Artificial Sequence
  Description of Artificial Sequence: Synthetic oligonucleotide
  Sense strand starting at position 3522 of SEQ ID NO: 1560800
aggguuguugugggaagga

SEQ ID NO: 1625330 - RNA, 19 nt, Artificial Sequence
  Description of Artificial Sequence: Synthetic oligonucleotide
  Antisense strand to SEQ ID NO: 1625329
uccuucccacaacaacccu

SEQ ID NO: 1625331 - RNA, 19 nt, Artificial Sequence
  Description of Artificial Sequence: Synthetic oligonucleotide
  Sense strand starting at position 3551 of SEQ ID NO: 1560800
ucuuaagugaccuggcaug

SEQ ID NO: 1625332 - RNA, 19 nt, Artificial Sequence
  Description of Artificial Sequence: Synthetic oligonucleotide
  Antisense strand to SEQ ID NO: 1625331
caugccaggucacuuaaga

SEQ ID NO: 1625333 - RNA, 19 nt, Artificial Sequence
  Description of Artificial Sequence: Synthetic oligonucleotide
  Sense strand starting at position 3597 of SEQ ID NO: 1560800
acaguaaaugagugacugu

SEQ ID NO: 1625334 - RNA, 19 nt, Artificial Sequence
  Description of Artificial Sequence: Synthetic oligonucleotide
  Antisense strand to SEQ ID NO: 1625333
acagucacucauuuacugu

SEQ ID NO: 1625335 - RNA, 19 nt, Artificial Sequence
  Description of Artificial Sequence: Synthetic oligonucleotide
  Sense strand starting at position 3600 of SEQ ID NO: 1560800
guaaaugagugacuguaca

SEQ ID NO: 1625336 - RNA, 19 nt, Artificial Sequence
  Description of Artificial Sequence: Synthetic oligonucleotide
  Antisense strand to SEQ ID NO: 1625335
uguacagucacucauuuac

SEQ ID NO: 1625337 - RNA, 19 nt, Artificial Sequence
  Description of Artificial Sequence: Synthetic oligonucleotide
  Sense strand starting at position 3621 of SEQ ID NO: 1560800
gucuuugcucaguaacuuu

SEQ ID NO: 1625338 - RNA, 19 nt, Artificial Sequence
  Description of Artificial Sequence: Synthetic oligonucleotide
  Antisense strand to SEQ ID NO: 1625337
aaaguuacugagcaaagac

SEQ ID NO: 1625339 - RNA, 19 nt, Artificial Sequence
  Description of Artificial Sequence: Synthetic oligonucleotide
  Sense strand starting at position 3653 of SEQ ID NO: 1560800
uucuaugugucuuuaugaa

SEQ ID NO: 1625340 - RNA, 19 nt, Artificial Sequence
  Description of Artificial Sequence: Synthetic oligonucleotide
  Antisense strand to SEQ ID NO: 1625339
uucauaaagacacauagaa

SEQ ID NO: 1625341 - RNA, 19 nt, Artificial Sequence
  Description of Artificial Sequence: Synthetic oligonucleotide
  Sense strand starting at position 34 of SEQ ID NO: 1560801
uuuacaguuguccauugau

SEQ ID NO: 1625342 - RNA, 19 nt, Artificial Sequence
  Description of Artificial Sequence: Synthetic oligonucleotide
  Antisense strand to SEQ ID NO: 1625341
aucaauggacaacuguaaa

SEQ ID NO: 1625343 - RNA, 19 nt, Artificial Sequence
  Description of Artificial Sequence: Synthetic oligonucleotide
  Sense strand starting at position 37 of SEQ ID NO: 1560801
acaguuguccauugaugug

SEQ ID NO: 1625344 - RNA, 19 nt, Artificial Sequence
  Description of Artificial Sequence: Synthetic oligonucleotide
  Antisense strand to SEQ ID NO: 1625343
cacaucaauggacaacugu

SEQ ID NO: 1625345 - RNA, 19 nt, Artificial Sequence
  Description of Artificial Sequence: Synthetic oligonucleotide
  Sense strand starting at position 42 of SEQ ID NO: 1560801
uguccauugaugugaaacg

SEQ ID NO: 1625346 - RNA, 19 nt, Artificial Sequence
  Description of Artificial Sequence: Synthetic oligonucleotide
  Antisense strand to SEQ ID NO: 1625345
cguuucacaucaauggaca

SEQ ID NO: 1625347 - RNA, 19 nt, Artificial Sequence
  Description of Artificial Sequence: Synthetic oligonucleotide
  Sense strand starting at position 89 of SEQ ID NO: 1560801
aaagauuaguggcucccua

SEQ ID NO: 1625348 - RNA, 19 nt, Artificial Sequence
  Description of Artificial Sequence: Synthetic oligonucleotide
  Antisense strand to SEQ ID NO: 1625347
uagggagccacuaaucuuu

SEQ ID NO: 1625349 - RNA, 19 nt, Artificial Sequence
  Description of Artificial Sequence: Synthetic oligonucleotide
  Sense strand starting at position 140 of SEQ ID NO: 1560801
gagagugacugauaaugag

SEQ ID NO: 1625350 - RNA, 19 nt, Artificial Sequence
  Description of Artificial Sequence: Synthetic oligonucleotide
  Antisense strand to SEQ ID NO: 1625349
cucauuaucagucacucuc

SEQ ID NO: 1625351 - RNA, 19 nt, Artificial Sequence
  Description of Artificial Sequence: Synthetic oligonucleotide
  Sense strand starting at position 152 of SEQ ID NO: 1560801
uaaugaguauggguuguuu

SEQ ID NO: 1625352 - RNA, 19 nt, Artificial Sequence
  Description of Artificial Sequence: Synthetic oligonucleotide
  Antisense strand to SEQ ID NO: 1625351
aaacaacccauacucauua

SEQ ID NO: 1625353 - RNA, 19 nt, Artificial Sequence
  Description of Artificial Sequence: Synthetic oligonucleotide
  Sense strand starting at position 206 of SEQ ID NO: 1560801
gucagaguucaguggugau

SEQ ID NO: 1625354 - RNA, 19 nt, Artificial Sequence
  Description of Artificial Sequence: Synthetic oligonucleotide
  Antisense strand to SEQ ID NO: 1625353
aucaccacugaacucugac

SEQ ID NO: 1625355 - RNA, 19 nt, Artificial Sequence
  Description of Artificial Sequence: Synthetic oligonucleotide
  Sense strand starting at position 597 of SEQ ID NO: 1560801
cuauguuguccagaccgau

SEQ ID NO: 1625356 - RNA, 19 nt, Artificial Sequence
  Description of Artificial Sequence: Synthetic oligonucleotide
  Antisense strand to SEQ ID NO: 1625355
aucggucuggacaacauag

SEQ ID NO: 1625357 - RNA, 19 nt, Artificial Sequence
  Description of Artificial Sequence: Synthetic oligonucleotide
  Sense strand starting at position 613 of SEQ ID NO: 1560801
gaucgugaauuccugacau

SEQ ID NO: 1625358 - RNA, 19 nt, Artificial Sequence
  Description of Artificial Sequence: Synthetic oligonucleotide
  Antisense strand to SEQ ID NO: 1625357
augucaggaauucacgauc

SEQ ID NO: 1625359 - RNA, 19 nt, Artificial Sequence
  Description of Artificial Sequence: Synthetic oligonucleotide
  Sense strand starting at position 615 of SEQ ID NO: 1560801
ucgugaauuccugacauca

SEQ ID NO: 1625360 - RNA, 19 nt, Artificial Sequence
  Description of Artificial Sequence: Synthetic oligonucleotide
  Antisense strand to SEQ ID NO: 1625359
ugaugucaggaauucacga

SEQ ID NO: 1625361 - RNA, 19 nt, Artificial Sequence
  Description of Artificial Sequence: Synthetic oligonucleotide
  Sense strand starting at position 703 of SEQ ID NO: 1560801
uaagccagauugucaugau

SEQ ID NO: 1625362 - RNA, 19 nt, Artificial Sequence
  Description of Artificial Sequence: Synthetic oligonucleotide
  Antisense strand to SEQ ID NO: 1625361
aucaugacaaucuggcuua

SEQ ID NO: 1625363 - RNA, 19 nt, Artificial Sequence
  Description of Artificial Sequence: Synthetic oligonucleotide
  Sense strand starting at position 707 of SEQ ID NO: 1560801
ccagauugucaugaugguu

SEQ ID NO: 1625364 - RNA, 19 nt, Artificial Sequence
  Description of Artificial Sequence: Synthetic oligonucleotide
  Antisense strand to SEQ ID NO: 1625363
aaccaucaugacaaucugg

SEQ ID NO: 1625365 - RNA, 19 nt, Artificial Sequence
  Description of Artificial Sequence: Synthetic oligonucleotide
  Sense strand starting at position 710 of SEQ ID NO: 1560801
gauugucaugaugguugca

SEQ ID NO: 1625366 - RNA, 19 nt, Artificial Sequence
  Description of Artificial Sequence: Synthetic oligonucleotide
  Antisense strand to SEQ ID NO: 1625365
ugcaaccaucaugacaauc

SEQ ID NO: 1625367 - RNA, 19 nt, Artificial Sequence
  Description of Artificial Sequence: Synthetic oligonucleotide
  Sense strand starting at position 712 of SEQ ID NO: 1560801
uugucaugaugguugcaua

SEQ ID NO: 1625368 - RNA, 19 nt, Artificial Sequence
  Description of Artificial Sequence: Synthetic oligonucleotide
  Antisense strand to SEQ ID NO: 1625367
uaugcaaccaucaugacaa

SEQ ID NO: 1625369 - RNA, 19 nt, Artificial Sequence
  Description of Artificial Sequence: Synthetic oligonucleotide
  Sense strand starting at position 713 of SEQ ID NO: 1560801
ugucaugaugguugcauaa

SEQ ID NO: 1625370 - RNA, 19 nt, Artificial Sequence
  Description of Artificial Sequence: Synthetic oligonucleotide
  Antisense strand to SEQ ID NO: 1625369
uuaugcaaccaucaugaca

SEQ ID NO: 1625371 - RNA, 19 nt, Artificial Sequence
  Description of Artificial Sequence: Synthetic oligonucleotide
  Sense strand starting at position 723 of SEQ ID NO: 1560801
guugcauaacucugaauac

SEQ ID NO: 1625372 - RNA, 19 nt, Artificial Sequence
  Description of Artificial Sequence: Synthetic oligonucleotide
  Antisense strand to SEQ ID NO: 1625371
guauucagaguuaugcaac

SEQ ID NO: 1625373 - RNA, 19 nt, Artificial Sequence
  Description of Artificial Sequence: Synthetic oligonucleotide
  Sense strand starting at position 751 of SEQ ID NO: 1560801
acagaaaugugcgcucuaa

SEQ ID NO: 1625374 - RNA, 19 nt, Artificial Sequence
  Description of Artificial Sequence: Synthetic oligonucleotide
  Antisense strand to SEQ ID NO: 1625373
uuagagcgcacauuucugu

SEQ ID NO: 1625375 - RNA, 19 nt, Artificial Sequence
  Description of Artificial Sequence: Synthetic oligonucleotide
  Sense strand starting at position 776 of SEQ ID NO: 1560801
cauuguaugguaggugaau

SEQ ID NO: 1625376 - RNA, 19 nt, Artificial Sequence
  Description of Artificial Sequence: Synthetic oligonucleotide
  Antisense strand to SEQ ID NO: 1625375
auucaccuaccauacaaug

SEQ ID NO: 1625377 - RNA, 19 nt, Artificial Sequence
  Description of Artificial Sequence: Synthetic oligonucleotide
  Sense strand starting at position 853 of SEQ ID NO: 1560801
ucaagaguuguggaaguaa

SEQ ID NO: 1625378 - RNA, 19 nt, Artificial Sequence
  Description of Artificial Sequence: Synthetic oligonucleotide
  Antisense strand to SEQ ID NO: 1625377
uuacuuccacaacucuuga

SEQ ID NO: 1625379 - RNA, 19 nt, Artificial Sequence
  Description of Artificial Sequence: Synthetic oligonucleotide
  Sense strand starting at position 898 of SEQ ID NO: 1560801
cuacuaugugaugaguguu

SEQ ID NO: 1625380 - RNA, 19 nt, Artificial Sequence
  Description of Artificial Sequence: Synthetic oligonucleotide
  Antisense strand to SEQ ID NO: 1625379
aacacucaucacauaguag

SEQ ID NO: 1625381 - RNA, 19 nt, Artificial Sequence
  Description of Artificial Sequence: Synthetic oligonucleotide
  Sense strand starting at position 906 of SEQ ID NO: 1560801
ugaugaguguugucauaua

SEQ ID NO: 1625382 - RNA, 19 nt, Artificial Sequence
  Description of Artificial Sequence: Synthetic oligonucleotide
  Antisense strand to SEQ ID NO: 1625381
uauaugacaacacucauca

SEQ ID NO: 1625383 - RNA, 19 nt, Artificial Sequence
  Description of Artificial Sequence: Synthetic oligonucleotide
  Sense strand starting at position 911 of SEQ ID NO: 1560801
aguguugucauauacagaa

SEQ ID NO: 1625384 - RNA, 19 nt, Artificial Sequence
  Description of Artificial Sequence: Synthetic oligonucleotide
  Antisense strand to SEQ ID NO: 1625383
uucuguauaugacaacacu

SEQ ID NO: 1625385 - RNA, 19 nt, Artificial Sequence
  Description of Artificial Sequence: Synthetic oligonucleotide
  Sense strand starting at position 2104 of SEQ ID NO: 1560801
guuacuccaucugcagaaa

SEQ ID NO: 1625386 - RNA, 19 nt, Artificial Sequence
  Description of Artificial Sequence: Synthetic oligonucleotide
  Antisense strand to SEQ ID NO: 1625385
uuucugcagauggaguaac

SEQ ID NO: 1625387 - RNA, 19 nt, Artificial Sequence
  Description of Artificial Sequence: Synthetic oligonucleotide
  Sense strand starting at position 2247 of SEQ ID NO: 1560801
uguuauugccaucacgauu

SEQ ID NO: 1625388 - RNA, 19 nt, Artificial Sequence
  Description of Artificial Sequence: Synthetic oligonucleotide
  Antisense strand to SEQ ID NO: 1625387
aaucgugauggcaauaaca

SEQ ID NO: 1625389 - RNA, 19 nt, Artificial Sequence
  Description of Artificial Sequence: Synthetic oligonucleotide
  Sense strand starting at position 2253 of SEQ ID NO: 1560801
ugccaucacgauuauuaga

SEQ ID NO: 1625390 - RNA, 19 nt, Artificial Sequence
  Description of Artificial Sequence: Synthetic oligonucleotide
  Antisense strand to SEQ ID NO: 1625389
ucuaauaaucgugauggca

SEQ ID NO: 1625391 - RNA, 19 nt, Artificial Sequence
  Description of Artificial Sequence: Synthetic oligonucleotide
  Sense strand starting at position 2255 of SEQ ID NO: 1560801
ccaucacgauuauuagauc

SEQ ID NO: 1625392 - RNA, 19 nt, Artificial Sequence
  Description of Artificial Sequence: Synthetic oligonucleotide
  Antisense strand to SEQ ID NO: 1625391
gaucuaauaaucgugaugg

SEQ ID NO: 1625393 - RNA, 19 nt, Artificial Sequence
  Description of Artificial Sequence: Synthetic oligonucleotide
  Sense strand starting at position 2338 of SEQ ID NO: 1560801
cuaucuuuauggguccaaa

SEQ ID NO: 1625394 - RNA, 19 nt, Artificial Sequence
  Description of Artificial Sequence: Synthetic oligonucleotide
  Antisense strand to SEQ ID NO: 1625393
uuuggacccauaaagauag

SEQ ID NO: 1625395 - RNA, 19 nt, Artificial Sequence
  Description of Artificial Sequence: Synthetic oligonucleotide
  Sense strand starting at position 2421 of SEQ ID NO: 1560801
cccuaugucauggaaacgu

SEQ ID NO: 1625396 - RNA, 19 nt, Artificial Sequence
  Description of Artificial Sequence: Synthetic oligonucleotide
  Antisense strand to SEQ ID NO: 1625395
acguuuccaugacauaggg

SEQ ID NO: 1625397 - RNA, 19 nt, Artificial Sequence
  Description of Artificial Sequence: Synthetic oligonucleotide
  Sense strand starting at position 2436 of SEQ ID NO: 1560801
acguccagacucuguuuaa

SEQ ID NO: 1625398 - RNA, 19 nt, Artificial Sequence
  Description of Artificial Sequence: Synthetic oligonucleotide
  Antisense strand to SEQ ID NO: 1625397
uuaaacagagucuggacgu

SEQ ID NO: 1625399 - RNA, 19 nt, Artificial Sequence
  Description of Artificial Sequence: Synthetic oligonucleotide
  Sense strand starting at position 2437 of SEQ ID NO: 1560801
cguccagacucuguuuaau

SEQ ID NO: 1625400 - RNA, 19 nt, Artificial Sequence
  Description of Artificial Sequence: Synthetic oligonucleotide
  Antisense strand to SEQ ID NO: 1625399
auuaaacagagucuggacg

SEQ ID NO: 1625401 - RNA, 19 nt, Artificial Sequence
  Description of Artificial Sequence: Synthetic oligonucleotide
  Sense strand starting at position 2450 of SEQ ID NO: 1560801
uuuaauucucggcaccacu

SEQ ID NO: 1625402 - RNA, 19 nt, Artificial Sequence
  Description of Artificial Sequence: Synthetic oligonucleotide
  Antisense strand to SEQ ID NO: 1625401
aguggugccgagaauuaaa

SEQ ID NO: 1625403 - RNA, 19 nt, Artificial Sequence
  Description of Artificial Sequence: Synthetic oligonucleotide
  Sense strand starting at position 2683 of SEQ ID NO: 1560801
uaguuuauaguuuggaaca

SEQ ID NO: 1625404 - RNA, 19 nt, Artificial Sequence
  Description of Artificial Sequence: Synthetic oligonucleotide
  Antisense strand to SEQ ID NO: 1625403
uguuccaaacuauaaacua

SEQ ID NO: 1625405 - RNA, 19 nt, Artificial Sequence
  Description of Artificial Sequence: Synthetic oligonucleotide
  Sense strand starting at position 2751 of SEQ ID NO: 1560801
uuagauugccuuuguagaa

SEQ ID NO: 1625406 - RNA, 19 nt, Artificial Sequence
  Description of Artificial Sequence: Synthetic oligonucleotide
  Antisense strand to SEQ ID NO: 1625405
uucuacaaaggcaaucuaa

SEQ ID NO: 1625407 - RNA, 19 nt, Artificial Sequence
  Description of Artificial Sequence: Synthetic oligonucleotide
  Sense strand starting at position 2918 of SEQ ID NO: 1560801
ggucgauaaacuggcucaa

SEQ ID NO: 1625408 - RNA, 19 nt, Artificial Sequence
  Description of Artificial Sequence: Synthetic oligonucleotide
  Antisense strand to SEQ ID NO: 1625407
uugagccaguuuaucgacc

SEQ ID NO: 1625409 - RNA, 19 nt, Artificial Sequence
  Description of Artificial Sequence: Synthetic oligonucleotide
  Sense strand starting at position 2920 of SEQ ID NO: 1560801
ucgauaaacuggcucaacu

SEQ ID NO: 1625410 - RNA, 19 nt, Artificial Sequence
  Description of Artificial Sequence: Synthetic oligonucleotide
  Antisense strand to SEQ ID NO: 1625409
aguugagccaguuuaucga

SEQ ID NO: 1625411 - RNA, 19 nt, Artificial Sequence
  Description of Artificial Sequence: Synthetic oligonucleotide
  Sense strand starting at position 3070 of SEQ ID NO: 1560801
ccaagugcucagggagacu

SEQ ID NO: 1625412 - RNA, 19 nt, Artificial Sequence
  Description of Artificial Sequence: Synthetic oligonucleotide
  Antisense strand to SEQ ID NO: 1625411
agucucccugagcacuugg

SEQ ID NO: 1625413 - RNA, 19 nt, Artificial Sequence
  Description of Artificial Sequence: Synthetic oligonucleotide
  Sense strand starting at position 3523 of SEQ ID NO: 1560801
gcaugcuuccacuacguga

SEQ ID NO: 1625414 - RNA, 19 nt, Artificial Sequence
  Description of Artificial Sequence: Synthetic oligonucleotide
  Antisense strand to SEQ ID NO: 1625413
ucacguaguggaagcaugc

SEQ ID NO: 1625415 - RNA, 19 nt, Artificial Sequence
  Description of Artificial Sequence: Synthetic oligonucleotide
  Sense strand starting at position 3658 of SEQ ID NO: 1560801
agagucagaucugcccaau

SEQ ID NO: 1625416 - RNA, 19 nt, Artificial Sequence
  Description of Artificial Sequence: Synthetic oligonucleotide
  Antisense strand to SEQ ID NO: 1625415
auugggcagaucugacucu

SEQ ID NO: 1625417 - RNA, 19 nt, Artificial Sequence
  Description of Artificial Sequence: Synthetic oligonucleotide
  Sense strand starting at position 3768 of SEQ ID NO: 1560801
ggcugugacuccucuccca

SEQ ID NO: 1625418 - RNA, 19 nt, Artificial Sequence
  Description of Artificial Sequence: Synthetic oligonucleotide
  Antisense strand to SEQ ID NO: 1625417
ugggagaggagucacagcc

SEQ ID NO: 1625419 - RNA, 19 nt, Artificial Sequence
  Description of Artificial Sequence: Synthetic oligonucleotide
  Sense strand starting at position 3952 of SEQ ID NO: 1560801
guggaugcacuuugagaac

SEQ ID NO: 1625420 - RNA, 19 nt, Artificial Sequence
  Description of Artificial Sequence: Synthetic oligonucleotide
  Antisense strand to SEQ ID NO: 1625419
guucucaaagugcauccac

SEQ ID NO: 1625421 - RNA, 19 nt, Artificial Sequence
  Description of Artificial Sequence: Synthetic oligonucleotide
  Sense strand starting at position 17 of SEQ ID NO: 1560802
uuacauuucuuguacagau

SEQ ID NO: 1625422 - RNA, 19 nt, Artificial Sequence
  Description of Artificial Sequence: Synthetic oligonucleotide
  Antisense strand to SEQ ID NO: 1625421
aucuguacaagaaauguaa

SEQ ID NO: 1625423 - RNA, 19 nt, Artificial Sequence
  Description of Artificial Sequence: Synthetic oligonucleotide
  Sense strand starting at position 218 of SEQ ID NO: 1560802
uaggguauaugucucccaa

SEQ ID NO: 1625424 - RNA, 19 nt, Artificial Sequence
  Description of Artificial Sequence: Synthetic oligonucleotide
  Antisense strand to SEQ ID NO: 1625423
uugggagacauauacccua

SEQ ID NO: 1625425 - RNA, 19 nt, Artificial Sequence
  Description of Artificial Sequence: Synthetic oligonucleotide
  Sense strand starting at position 220 of SEQ ID NO: 1560802
ggguauaugucucccaaag

SEQ ID NO: 1625426 - RNA, 19 nt, Artificial Sequence
  Description of Artificial Sequence: Synthetic oligonucleotide
  Antisense strand to SEQ ID NO: 1625425
cuuugggagacauauaccc

SEQ ID NO: 1625427 - RNA, 19 nt, Artificial Sequence
  Description of Artificial Sequence: Synthetic oligonucleotide
  Sense strand starting at position 564 of SEQ ID NO: 1560802
gaaaccaguuucucugaga

SEQ ID NO: 1625428 - RNA, 19 nt, Artificial Sequence
  Description of Artificial Sequence: Synthetic oligonucleotide
  Antisense strand to SEQ ID NO: 1625427
ucucagagaaacugguuuc

SEQ ID NO: 1625429 - RNA, 19 nt, Artificial Sequence
  Description of Artificial Sequence: Synthetic oligonucleotide
  Sense strand starting at position 774 of SEQ ID NO: 1560802
gugcauaaaugcccagaca

SEQ ID NO: 1625430 - RNA, 19 nt, Artificial Sequence
  Description of Artificial Sequence: Synthetic oligonucleotide
  Antisense strand to SEQ ID NO: 1625429
ugucugggcauuuaugcac

SEQ ID NO: 1625431 - RNA, 19 nt, Artificial Sequence
  Description of Artificial Sequence: Synthetic oligonucleotide
  Sense strand starting at position 798 of SEQ ID NO: 1560802
acgugaugaucuccaccua

SEQ ID NO: 1625432 - RNA, 19 nt, Artificial Sequence
  Description of Artificial Sequence: Synthetic oligonucleotide
  Antisense strand to SEQ ID NO: 1625431
uagguggagaucaucacgu

SEQ ID NO: 1625433 - RNA, 19 nt, Artificial Sequence
  Description of Artificial Sequence: Synthetic oligonucleotide
  Sense strand starting at position 799 of SEQ ID NO: 1560802
cgugaugaucuccaccuau

SEQ ID NO: 1625434 - RNA, 19 nt, Artificial Sequence
  Description of Artificial Sequence: Synthetic oligonucleotide
  Antisense strand to SEQ ID NO: 1625433
auagguggagaucaucacg

SEQ ID NO: 1625435 - RNA, 19 nt, Artificial Sequence
  Description of Artificial Sequence: Synthetic oligonucleotide
  Sense strand starting at position 853 of SEQ ID NO: 1560802
ugggauaaaguucguuaca

SEQ ID NO: 1625436 - RNA, 19 nt, Artificial Sequence
  Description of Artificial Sequence: Synthetic oligonucleotide
  Antisense strand to SEQ ID NO: 1625435
uguaacgaacuuuauccca

SEQ ID NO: 1625437 - RNA, 19 nt, Artificial Sequence
  Description of Artificial Sequence: Synthetic oligonucleotide
  Sense strand starting at position 854 of SEQ ID NO: 1560802
gggauaaaguucguuacaa

SEQ ID NO: 1625438 - RNA, 19 nt, Artificial Sequence
  Description of Artificial Sequence: Synthetic oligonucleotide
  Antisense strand to SEQ ID NO: 1625437
uuguaacgaacuuuauccc

SEQ ID NO: 1625439 - RNA, 19 nt, Artificial Sequence
  Description of Artificial Sequence: Synthetic oligonucleotide
  Sense strand starting at position 855 of SEQ ID NO: 1560802
ggauaaaguucguuacaau

SEQ ID NO: 1625440 - RNA, 19 nt, Artificial Sequence
  Description of Artificial Sequence: Synthetic oligonucleotide
  Antisense strand to SEQ ID NO: 1625439
auuguaacgaacuuuaucc

SEQ ID NO: 1625441 - RNA, 19 nt, Artificial Sequence
  Description of Artificial Sequence: Synthetic oligonucleotide
  Sense strand starting at position 856 of SEQ ID NO: 1560802
gauaaaguucguuacaaug

SEQ ID NO: 1625442 - RNA, 19 nt, Artificial Sequence
  Description of Artificial Sequence: Synthetic oligonucleotide
  Antisense strand to SEQ ID NO: 1625441
cauuguaacgaacuuuauc

SEQ ID NO: 1625443 - RNA, 19 nt, Artificial Sequence
  Description of Artificial Sequence: Synthetic oligonucleotide
  Sense strand starting at position 864 of SEQ ID NO: 1560802
ucguuacaauggcucauaa

SEQ ID NO: 1625444 - RNA, 19 nt, Artificial Sequence
  Description of Artificial Sequence: Synthetic oligonucleotide
  Antisense strand to SEQ ID NO: 1625443
uuaugagccauuguaacga

SEQ ID NO: 1625445 - RNA, 19 nt, Artificial Sequence
  Description of Artificial Sequence: Synthetic oligonucleotide
  Sense strand starting at position 866 of SEQ ID NO: 1560802
guuacaauggcucauaaau

SEQ ID NO: 1625446 - RNA, 19 nt, Artificial Sequence
  Description of Artificial Sequence: Synthetic oligonucleotide
  Antisense strand to SEQ ID NO: 1625445
auuuaugagccauuguaac

SEQ ID NO: 1625447 - RNA, 19 nt, Artificial Sequence
  Description of Artificial Sequence: Synthetic oligonucleotide
  Sense strand starting at position 875 of SEQ ID NO: 1560802
gcucauaaaugaucacaug

SEQ ID NO: 1625448 - RNA, 19 nt, Artificial Sequence
  Description of Artificial Sequence: Synthetic oligonucleotide
  Antisense strand to SEQ ID NO: 1625447
caugugaucauuuaugagc

SEQ ID NO: 1625449 - RNA, 19 nt, Artificial Sequence
  Description of Artificial Sequence: Synthetic oligonucleotide
  Sense strand starting at position 978 of SEQ ID NO: 1560802
acaacaguccuauggagau

SEQ ID NO: 1625450 - RNA, 19 nt, Artificial Sequence
  Description of Artificial Sequence: Synthetic oligonucleotide
  Antisense strand to SEQ ID NO: 1625449
aucuccauaggacuguugu

SEQ ID NO: 1625451 - RNA, 19 nt, Artificial Sequence
  Description of Artificial Sequence: Synthetic oligonucleotide
  Sense strand starting at position 2226 of SEQ ID NO: 1560802
gucagauguuggcuacuaa

SEQ ID NO: 1625452 - RNA, 19 nt, Artificial Sequence
  Description of Artificial Sequence: Synthetic oligonucleotide
  Antisense strand to SEQ ID NO: 1625451
uuaguagccaacaucugac

SEQ ID NO: 1625453 - RNA, 19 nt, Artificial Sequence
  Description of Artificial Sequence: Synthetic oligonucleotide
  Sense strand starting at position 2227 of SEQ ID NO: 1560802
ucagauguuggcuacuaau

SEQ ID NO: 1625454 - RNA, 19 nt, Artificial Sequence
  Description of Artificial Sequence: Synthetic oligonucleotide
  Antisense strand to SEQ ID NO: 1625453
auuaguagccaacaucuga

SEQ ID NO: 1625455 - RNA, 19 nt, Artificial Sequence
  Description of Artificial Sequence: Synthetic oligonucleotide
  Sense strand starting at position 2237 of SEQ ID NO: 1560802
gcuacuaauuggguuucca

SEQ ID NO: 1625456 - RNA, 19 nt, Artificial Sequence
  Description of Artificial Sequence: Synthetic oligonucleotide
  Antisense strand to SEQ ID NO: 1625455
uggaaacccaauuaguagc

SEQ ID NO: 1625457 - RNA, 19 nt, Artificial Sequence
  Description of Artificial Sequence: Synthetic oligonucleotide
  Sense strand starting at position 2241 of SEQ ID NO: 1560802
cuaauuggguuuccauuaa

SEQ ID NO: 1625458 - RNA, 19 nt, Artificial Sequence
  Description of Artificial Sequence: Synthetic oligonucleotide
  Antisense strand to SEQ ID NO: 1625457
uuaauggaaacccaauuag

SEQ ID NO: 1625459 - RNA, 19 nt, Artificial Sequence
  Description of Artificial Sequence: Synthetic oligonucleotide
  Sense strand starting at position 2245 of SEQ ID NO: 1560802
uuggguuuccauuaacacu

SEQ ID NO: 1625460 - RNA, 19 nt, Artificial Sequence
  Description of Artificial Sequence: Synthetic oligonucleotide
  Antisense strand to SEQ ID NO: 1625459
aguguuaauggaaacccaa

SEQ ID NO: 1625461 - RNA, 19 nt, Artificial Sequence
  Description of Artificial Sequence: Synthetic oligonucleotide
  Sense strand starting at position 2544 of SEQ ID NO: 1560802
uggguaaauauaugucuga

SEQ ID NO: 1625462 - RNA, 19 nt, Artificial Sequence
  Description of Artificial Sequence: Synthetic oligonucleotide
  Antisense strand to SEQ ID NO: 1625461
ucagacauauauuuaccca

SEQ ID NO: 1625463 - RNA, 19 nt, Artificial Sequence
  Description of Artificial Sequence: Synthetic oligonucleotide
  Sense strand starting at position 2545 of SEQ ID NO: 1560802
ggguaaauauaugucugaa

SEQ ID NO: 1625464 - RNA, 19 nt, Artificial Sequence
  Description of Artificial Sequence: Synthetic oligonucleotide
  Antisense strand to SEQ ID NO: 1625463
uucagacauauauuuaccc

SEQ ID NO: 1625465 - RNA, 19 nt, Artificial Sequence
  Description of Artificial Sequence: Synthetic oligonucleotide
  Sense strand starting at position 2547 of SEQ ID NO: 1560802
guaaauauaugucugaaga

SEQ ID NO: 1625466 - RNA, 19 nt, Artificial Sequence
  Description of Artificial Sequence: Synthetic oligonucleotide
  Antisense strand to SEQ ID NO: 1625465
ucuucagacauauauuuac

SEQ ID NO: 1625467 - RNA, 19 nt, Artificial Sequence
  Description of Artificial Sequence: Synthetic oligonucleotide
  Sense strand starting at position 2608 of SEQ ID NO: 1560802
aguggaauuuaaggaaaca

SEQ ID NO: 1625468 - RNA, 19 nt, Artificial Sequence
  Description of Artificial Sequence: Synthetic oligonucleotide
  Antisense strand to SEQ ID NO: 1625467
uguuuccuuaaauuccacu

SEQ ID NO: 1625469 - RNA, 19 nt, Artificial Sequence
  Description of Artificial Sequence: Synthetic oligonucleotide
  Sense strand starting at position 2631 of SEQ ID NO: 1560802
ucgcaaggucucuaauaca

SEQ ID NO: 1625470 - RNA, 19 nt, Artificial Sequence
  Description of Artificial Sequence: Synthetic oligonucleotide
  Antisense strand to SEQ ID NO: 1625469
uguauuagagaccuugcga

SEQ ID NO: 1625471 - RNA, 19 nt, Artificial Sequence
  Description of Artificial Sequence: Synthetic oligonucleotide
  Sense strand starting at position 2665 of SEQ ID NO: 1560802
gaaguagaguuccuuaaca

SEQ ID NO: 1625472 - RNA, 19 nt, Artificial Sequence
  Description of Artificial Sequence: Synthetic oligonucleotide
  Antisense strand to SEQ ID NO: 1625471
uguuaaggaacucuacuuc

SEQ ID NO: 1625473 - RNA, 19 nt, Artificial Sequence
  Description of Artificial Sequence: Synthetic oligonucleotide
  Sense strand starting at position 2667 of SEQ ID NO: 1560802
aguagaguuccuuaacaca

SEQ ID NO: 1625474 - RNA, 19 nt, Artificial Sequence
  Description of Artificial Sequence: Synthetic oligonucleotide
  Antisense strand to SEQ ID NO: 1625473
uguguuaaggaacucuacu

SEQ ID NO: 1625475 - RNA, 19 nt, Artificial Sequence
  Description of Artificial Sequence: Synthetic oligonucleotide
  Sense strand starting at position 2690 of SEQ ID NO: 1560802
ugaucuguggucuggacau

SEQ ID NO: 1625476 - RNA, 19 nt, Artificial Sequence
  Description of Artificial Sequence: Synthetic oligonucleotide
  Antisense strand to SEQ ID NO: 1625475
auguccagaccacagauca

SEQ ID NO: 1625477 - RNA, 19 nt, Artificial Sequence
  Description of Artificial Sequence: Synthetic oligonucleotide
  Sense strand starting at position 2696 of SEQ ID NO: 1560802
guggucuggacauggaaga

SEQ ID NO: 1625478 - RNA, 19 nt, Artificial Sequence
  Description of Artificial Sequence: Synthetic oligonucleotide
  Antisense strand to SEQ ID NO: 1625477
ucuuccauguccagaccac

SEQ ID NO: 1625479 - RNA, 19 nt, Artificial Sequence
  Description of Artificial Sequence: Synthetic oligonucleotide
  Sense strand starting at position 2710 of SEQ ID NO: 1560802
gaagaaagccuuggacauc

SEQ ID NO: 1625480 - RNA, 19 nt, Artificial Sequence
  Description of Artificial Sequence: Synthetic oligonucleotide
  Antisense strand to SEQ ID NO: 1625479
gauguccaaggcuuucuuc

SEQ ID NO: 1625481 - RNA, 19 nt, Artificial Sequence
  Description of Artificial Sequence: Synthetic oligonucleotide
  Sense strand starting at position 2909 of SEQ ID NO: 1560802
cagaacaauuggucugguu

SEQ ID NO: 1625482 - RNA, 19 nt, Artificial Sequence
  Description of Artificial Sequence: Synthetic oligonucleotide
  Antisense strand to SEQ ID NO: 1625481
aaccagaccaauuguucug

SEQ ID NO: 1625483 - RNA, 19 nt, Artificial Sequence
  Description of Artificial Sequence: Synthetic oligonucleotide
  Sense strand starting at position 2911 of SEQ ID NO: 1560802
gaacaauuggucugguuuc

SEQ ID NO: 1625484 - RNA, 19 nt, Artificial Sequence
  Description of Artificial Sequence: Synthetic oligonucleotide
  Antisense strand to SEQ ID NO: 1625483
gaaaccagaccaauuguuc

SEQ ID NO: 1625485 - RNA, 19 nt, Artificial Sequence
  Description of Artificial Sequence: Synthetic oligonucleotide
  Sense strand starting at position 3001 of SEQ ID NO: 1560802
guugaaucuugaucuacau

SEQ ID NO: 1625486 - RNA, 19 nt, Artificial Sequence
  Description of Artificial Sequence: Synthetic oligonucleotide
  Antisense strand to SEQ ID NO: 1625485
auguagaucaagauucaac

SEQ ID NO: 1625487 - RNA, 19 nt, Artificial Sequence
  Description of Artificial Sequence: Synthetic oligonucleotide
  Sense strand starting at position 3057 of SEQ ID NO: 1560802
uugauuacaguaugaauga

SEQ ID NO: 1625488 - RNA, 19 nt, Artificial Sequence
  Description of Artificial Sequence: Synthetic oligonucleotide
  Antisense strand to SEQ ID NO: 1625487
ucauucauacuguaaucaa

SEQ ID NO: 1625489 - RNA, 19 nt, Artificial Sequence
  Description of Artificial Sequence: Synthetic oligonucleotide
  Sense strand starting at position 3075 of SEQ ID NO: 1560802
aaugauuacguaugaguaa

SEQ ID NO: 1625490 - RNA, 19 nt, Artificial Sequence
  Description of Artificial Sequence: Synthetic oligonucleotide
  Antisense strand to SEQ ID NO: 1625489
uuacucauacguaaucauu

SEQ ID NO: 1625491 - RNA, 19 nt, Artificial Sequence
  Description of Artificial Sequence: Synthetic oligonucleotide
  Sense strand starting at position 3078 of SEQ ID NO: 1560802
gauuacguaugaguaauau

SEQ ID NO: 1625492 - RNA, 19 nt, Artificial Sequence
  Description of Artificial Sequence: Synthetic oligonucleotide
  Antisense strand to SEQ ID NO: 1625491
auauuacucauacguaauc

SEQ ID NO: 1625493 - RNA, 19 nt, Artificial Sequence
  Description of Artificial Sequence: Synthetic oligonucleotide
  Sense strand starting at position 3451 of SEQ ID NO: 1560802
uuugacuaugaagguaaau

SEQ ID NO: 1625494 - RNA, 19 nt, Artificial Sequence
  Description of Artificial Sequence: Synthetic oligonucleotide
  Antisense strand to SEQ ID NO: 1625493
auuuaccuucauagucaaa

SEQ ID NO: 1625495 - RNA, 19 nt, Artificial Sequence
  Description of Artificial Sequence: Synthetic oligonucleotide
  Sense strand starting at position 3460 of SEQ ID NO: 1560802
gaagguaaauguuuaguuu

SEQ ID NO: 1625496 - RNA, 19 nt, Artificial Sequence
  Description of Artificial Sequence: Synthetic oligonucleotide
  Antisense strand to SEQ ID NO: 1625495
aaacuaaacauuuaccuuc

SEQ ID NO: 1625497 - RNA, 19 nt, Artificial Sequence
  Description of Artificial Sequence: Synthetic oligonucleotide
  Sense strand starting at position 3602 of SEQ ID NO: 1560802
guaacuauauauccuggaa

SEQ ID NO: 1625498 - RNA, 19 nt, Artificial Sequence
  Description of Artificial Sequence: Synthetic oligonucleotide
  Antisense strand to SEQ ID NO: 1625497
uuccaggauauauaguuac

SEQ ID NO: 1625499 - RNA, 19 nt, Artificial Sequence
  Description of Artificial Sequence: Synthetic oligonucleotide
  Sense strand starting at position 3983 of SEQ ID NO: 1560802
gcagauagauuauuauagu

SEQ ID NO: 1625500 - RNA, 19 nt, Artificial Sequence
  Description of Artificial Sequence: Synthetic oligonucleotide
  Antisense strand to SEQ ID NO: 1625499
acuauaauaaucuaucugc

SEQ ID NO: 1625501 - RNA, 19 nt, Artificial Sequence
  Description of Artificial Sequence: Synthetic oligonucleotide
  Sense strand starting at position 39 of SEQ ID NO: 1560803
ggaugagacacguggcuau

SEQ ID NO: 1625502 - RNA, 19 nt, Artificial Sequence
  Description of Artificial Sequence: Synthetic oligonucleotide
  Antisense strand to SEQ ID NO: 1625501
auagccacgugucucaucc

SEQ ID NO: 1625503 - RNA, 19 nt, Artificial Sequence
  Description of Artificial Sequence: Synthetic oligonucleotide
  Sense strand starting at position 43 of SEQ ID NO: 1560803
gagacacguggcuaucuua

SEQ ID NO: 1625504 - RNA, 19 nt, Artificial Sequence
  Description of Artificial Sequence: Synthetic oligonucleotide
  Antisense strand to SEQ ID NO: 1625503
uaagauagccacgugucuc

SEQ ID NO: 1625505 - RNA, 19 nt, Artificial Sequence
  Description of Artificial Sequence: Synthetic oligonucleotide
  Sense strand starting at position 46 of SEQ ID NO: 1560803
acacguggcuaucuuauua

SEQ ID NO: 1625506 - RNA, 19 nt, Artificial Sequence
  Description of Artificial Sequence: Synthetic oligonucleotide
  Antisense strand to SEQ ID NO: 1625505
uaauaagauagccacgugu

SEQ ID NO: 1625507 - RNA, 19 nt, Artificial Sequence
  Description of Artificial Sequence: Synthetic oligonucleotide
  Sense strand starting at position 532 of SEQ ID NO: 1560803
acacaaacuuaggguauau

SEQ ID NO: 1625508 - RNA, 19 nt, Artificial Sequence
  Description of Artificial Sequence: Synthetic oligonucleotide
  Antisense strand to SEQ ID NO: 1625507
auauacccuaaguuugugu

SEQ ID NO: 1625509 - RNA, 19 nt, Artificial Sequence
  Description of Artificial Sequence: Synthetic oligonucleotide
  Sense strand starting at position 543 of SEQ ID NO: 1560803
ggguauaucucucccaaag

SEQ ID NO: 1625510 - RNA, 19 nt, Artificial Sequence
  Description of Artificial Sequence: Synthetic oligonucleotide
  Antisense strand to SEQ ID NO: 1625509
cuuugggagagauauaccc

SEQ ID NO: 1625511 - RNA, 19 nt, Artificial Sequence
  Description of Artificial Sequence: Synthetic oligonucleotide
  Sense strand starting at position 586 of SEQ ID NO: 1560803
accaguuuaucugaggcaa

SEQ ID NO: 1625512 - RNA, 19 nt, Artificial Sequence
  Description of Artificial Sequence: Synthetic oligonucleotide
  Antisense strand to SEQ ID NO: 1625511
uugccucagauaaacuggu

SEQ ID NO: 1625513 - RNA, 19 nt, Artificial Sequence
  Description of Artificial Sequence: Synthetic oligonucleotide
  Sense strand starting at position 590 of SEQ ID NO: 1560803
guuuaucugaggcaaauag

SEQ ID NO: 1625514 - RNA, 19 nt, Artificial Sequence
  Description of Artificial Sequence: Synthetic oligonucleotide
  Antisense strand to SEQ ID NO: 1625513
cuauuugccucagauaaac

SEQ ID NO: 1625515 - RNA, 19 nt, Artificial Sequence
  Description of Artificial Sequence: Synthetic oligonucleotide
  Sense strand starting at position 909 of SEQ ID NO: 1560803
uuaugaucacuugagcuua

SEQ ID NO: 1625516 - RNA, 19 nt, Artificial Sequence
  Description of Artificial Sequence: Synthetic oligonucleotide
  Antisense strand to SEQ ID NO: 1625515
uaagcucaagugaucauaa

SEQ ID NO: 1625517 - RNA, 19 nt, Artificial Sequence
  Description of Artificial Sequence: Synthetic oligonucleotide
  Sense strand starting at position 2203 of SEQ ID NO: 1560803
agaucacuauauuagauga

SEQ ID NO: 1625518 - RNA, 19 nt, Artificial Sequence
  Description of Artificial Sequence: Synthetic oligonucleotide
  Antisense strand to SEQ ID NO: 1625517
ucaucuaauauagugaucu

SEQ ID NO: 1625519 - RNA, 19 nt, Artificial Sequence
  Description of Artificial Sequence: Synthetic oligonucleotide
  Sense strand starting at position 2237 of SEQ ID NO: 1560803
gcuacuaauuggguuucua

SEQ ID NO: 1625520 - RNA, 19 nt, Artificial Sequence
  Description of Artificial Sequence: Synthetic oligonucleotide
  Antisense strand to SEQ ID NO: 1625519
uagaaacccaauuaguagc

SEQ ID NO: 1625521 - RNA, 19 nt, Artificial Sequence
  Description of Artificial Sequence: Synthetic oligonucleotide
  Sense strand starting at position 2241 of SEQ ID NO: 1560803
cuaauuggguuucuauuaa

SEQ ID NO: 1625522 - RNA, 19 nt, Artificial Sequence
  Description of Artificial Sequence: Synthetic oligonucleotide
  Antisense strand to SEQ ID NO: 1625521
uuaauagaaacccaauuag

SEQ ID NO: 1625523 - RNA, 19 nt, Artificial Sequence
  Description of Artificial Sequence: Synthetic oligonucleotide
  Sense strand starting at position 2245 of SEQ ID NO: 1560803
uuggguuucuauuaacacu

SEQ ID NO: 1625524 - RNA, 19 nt, Artificial Sequence
  Description of Artificial Sequence: Synthetic oligonucleotide
  Antisense strand to SEQ ID NO: 1625523
aguguuaauagaaacccaa

SEQ ID NO: 1625525 - RNA, 19 nt, Artificial Sequence
  Description of Artificial Sequence: Synthetic oligonucleotide
  Sense strand starting at position 2296 of SEQ ID NO: 1560803
gccauuagagaccagcaua

SEQ ID NO: 1625526 - RNA, 19 nt, Artificial Sequence
  Description of Artificial Sequence: Synthetic oligonucleotide
  Antisense strand to SEQ ID NO: 1625525
uaugcuggucucuaauggc

SEQ ID NO: 1625527 - RNA, 19 nt, Artificial Sequence
  Description of Artificial Sequence: Synthetic oligonucleotide
  Sense strand starting at position 2322 of SEQ ID NO: 1560803
agggucagguucucuugau

SEQ ID NO: 1625528 - RNA, 19 nt, Artificial Sequence
  Description of Artificial Sequence: Synthetic oligonucleotide
  Antisense strand to SEQ ID NO: 1625527
aucaagagaaccugacccu

SEQ ID NO: 1625529 - RNA, 19 nt, Artificial Sequence
  Description of Artificial Sequence: Synthetic oligonucleotide
  Sense strand starting at position 2323 of SEQ ID NO: 1560803
gggucagguucucuugaua

SEQ ID NO: 1625530 - RNA, 19 nt, Artificial Sequence
  Description of Artificial Sequence: Synthetic oligonucleotide
  Antisense strand to SEQ ID NO: 1625529
uaucaagagaaccugaccc

SEQ ID NO: 1625531 - RNA, 19 nt, Artificial Sequence
  Description of Artificial Sequence: Synthetic oligonucleotide
  Sense strand starting at position 2326 of SEQ ID NO: 1560803
ucagguucucuugauaaug

SEQ ID NO: 1625532 - RNA, 19 nt, Artificial Sequence
  Description of Artificial Sequence: Synthetic oligonucleotide
  Antisense strand to SEQ ID NO: 1625531
cauuaucaagagaaccuga

SEQ ID NO: 1625533 - RNA, 19 nt, Artificial Sequence
  Description of Artificial Sequence: Synthetic oligonucleotide
  Sense strand starting at position 2491 of SEQ ID NO: 1560803
uggugcauuuacuauucua

SEQ ID NO: 1625534 - RNA, 19 nt, Artificial Sequence
  Description of Artificial Sequence: Synthetic oligonucleotide
  Antisense strand to SEQ ID NO: 1625533
uagaauaguaaaugcacca

SEQ ID NO: 1625535 - RNA, 19 nt, Artificial Sequence
  Description of Artificial Sequence: Synthetic oligonucleotide
  Sense strand starting at position 2613 of SEQ ID NO: 1560803
gguggaaucuaaggaaaca

SEQ ID NO: 1625536 - RNA, 19 nt, Artificial Sequence
  Description of Artificial Sequence: Synthetic oligonucleotide
  Antisense strand to SEQ ID NO: 1625535
uguuuccuuagauuccacc

SEQ ID NO: 1625537 - RNA, 19 nt, Artificial Sequence
  Description of Artificial Sequence: Synthetic oligonucleotide
  Sense strand starting at position 2670 of SEQ ID NO: 1560803
gaaccagaguuccuugaga

SEQ ID NO: 1625538 - RNA, 19 nt, Artificial Sequence
  Description of Artificial Sequence: Synthetic oligonucleotide
  Antisense strand to SEQ ID NO: 1625537
ucucaaggaacucugguuc

SEQ ID NO: 1625539 - RNA, 19 nt, Artificial Sequence
  Description of Artificial Sequence: Synthetic oligonucleotide
  Sense strand starting at position 2672 of SEQ ID NO: 1560803
accagaguuccuugagaca

SEQ ID NO: 1625540 - RNA, 19 nt, Artificial Sequence
  Description of Artificial Sequence: Synthetic oligonucleotide
  Antisense strand to SEQ ID NO: 1625539
ugucucaaggaacucuggu

SEQ ID NO: 1625541 - RNA, 19 nt, Artificial Sequence
  Description of Artificial Sequence: Synthetic oligonucleotide
  Sense strand starting at position 2690 of SEQ ID NO: 1560803
auggcaaaucugugaucug

SEQ ID NO: 1625542 - RNA, 19 nt, Artificial Sequence
  Description of Artificial Sequence: Synthetic oligonucleotide
  Antisense strand to SEQ ID NO: 1625541
cagaucacagauuugccau

SEQ ID NO: 1625543 - RNA, 19 nt, Artificial Sequence
  Description of Artificial Sequence: Synthetic oligonucleotide
  Sense strand starting at position 2693 of SEQ ID NO: 1560803
gcaaaucugugaucuggac

SEQ ID NO: 1625544 - RNA, 19 nt, Artificial Sequence
  Description of Artificial Sequence: Synthetic oligonucleotide
  Antisense strand to SEQ ID NO: 1625543
guccagaucacagauuugc

SEQ ID NO: 1625545 - RNA, 19 nt, Artificial Sequence
  Description of Artificial Sequence: Synthetic oligonucleotide
  Sense strand starting at position 2715 of SEQ ID NO: 1560803
gaagaaagccuuggauauc

SEQ ID NO: 1625546 - RNA, 19 nt, Artificial Sequence
  Description of Artificial Sequence: Synthetic oligonucleotide
  Antisense strand to SEQ ID NO: 1625545
gauauccaaggcuuucuuc

SEQ ID NO: 1625547 - RNA, 19 nt, Artificial Sequence
  Description of Artificial Sequence: Synthetic oligonucleotide
  Sense strand starting at position 2733 of SEQ ID NO: 1560803
cuuguaccagugugaaaug

SEQ ID NO: 1625548 - RNA, 19 nt, Artificial Sequence
  Description of Artificial Sequence: Synthetic oligonucleotide
  Antisense strand to SEQ ID NO: 1625547
cauuucacacugguacaag

SEQ ID NO: 1625549 - RNA, 19 nt, Artificial Sequence
  Description of Artificial Sequence: Synthetic oligonucleotide
  Sense strand starting at position 2787 of SEQ ID NO: 1560803
cugcaaguacuagauugaa

SEQ ID NO: 1625550 - RNA, 19 nt, Artificial Sequence
  Description of Artificial Sequence: Synthetic oligonucleotide
  Antisense strand to SEQ ID NO: 1625549
uucaaucuaguacuugcag

SEQ ID NO: 1625551 - RNA, 19 nt, Artificial Sequence
  Description of Artificial Sequence: Synthetic oligonucleotide
  Sense strand starting at position 2916 of SEQ ID NO: 1560803
gaacaauuggucuggucuc

SEQ ID NO: 1625552 - RNA, 19 nt, Artificial Sequence
  Description of Artificial Sequence: Synthetic oligonucleotide
  Antisense strand to SEQ ID NO: 1625551
gagaccagaccaauuguuc

SEQ ID NO: 1625553 - RNA, 19 nt, Artificial Sequence
  Description of Artificial Sequence: Synthetic oligonucleotide
  Sense strand starting at position 3077 of SEQ ID NO: 1560803
aaugaaugauuagguauga

SEQ ID NO: 1625554 - RNA, 19 nt, Artificial Sequence
  Description of Artificial Sequence: Synthetic oligonucleotide
  Antisense strand to SEQ ID NO: 1625553
ucauaccuaaucauucauu

SEQ ID NO: 1625555 - RNA, 19 nt, Artificial Sequence
  Description of Artificial Sequence: Synthetic oligonucleotide
  Sense strand starting at position 3081 of SEQ ID NO: 1560803
aaugauuagguaugaguaa

SEQ ID NO: 1625556 - RNA, 19 nt, Artificial Sequence
  Description of Artificial Sequence: Synthetic oligonucleotide
  Antisense strand to SEQ ID NO: 1625555
uuacucauaccuaaucauu

SEQ ID NO: 1625557 - RNA, 19 nt, Artificial Sequence
  Description of Artificial Sequence: Synthetic oligonucleotide
  Sense strand starting at position 3082 of SEQ ID NO: 1560803
augauuagguaugaguaau

SEQ ID NO: 1625558 - RNA, 19 nt, Artificial Sequence
  Description of Artificial Sequence: Synthetic oligonucleotide
  Antisense strand to SEQ ID NO: 1625557
auuacucauaccuaaucau

SEQ ID NO: 1625559 - RNA, 19 nt, Artificial Sequence
  Description of Artificial Sequence: Synthetic oligonucleotide
  Sense strand starting at position 3171 of SEQ ID NO: 1560803
guaggaucgugauucacug

SEQ ID NO: 1625560 - RNA, 19 nt, Artificial Sequence
  Description of Artificial Sequence: Synthetic oligonucleotide
  Antisense strand to SEQ ID NO: 1625559
cagugaaucacgauccuac

SEQ ID NO: 1625561 - RNA, 19 nt, Artificial Sequence
  Description of Artificial Sequence: Synthetic oligonucleotide
  Sense strand starting at position 3352 of SEQ ID NO: 1560803
gugaucuuccuaugucauc

SEQ ID NO: 1625562 - RNA, 19 nt, Artificial Sequence
  Description of Artificial Sequence: Synthetic oligonucleotide
  Antisense strand to SEQ ID NO: 1625561
gaugacauaggaagaucac

SEQ ID NO: 1625563 - RNA, 19 nt, Artificial Sequence
  Description of Artificial Sequence: Synthetic oligonucleotide
  Sense strand starting at position 3430 of SEQ ID NO: 1560803
agugcaaucugguuauuuc

SEQ ID NO: 1625564 - RNA, 19 nt, Artificial Sequence
  Description of Artificial Sequence: Synthetic oligonucleotide
  Antisense strand to SEQ ID NO: 1625563
gaaauaaccagauugcacu

SEQ ID NO: 1625565 - RNA, 19 nt, Artificial Sequence
  Description of Artificial Sequence: Synthetic oligonucleotide
  Sense strand starting at position 3438 of SEQ ID NO: 1560803
cugguuauuucggcuguga

SEQ ID NO: 1625566 - RNA, 19 nt, Artificial Sequence
  Description of Artificial Sequence: Synthetic oligonucleotide
  Antisense strand to SEQ ID NO: 1625565
ucacagccgaaauaaccag

SEQ ID NO: 1625567 - RNA, 19 nt, Artificial Sequence
  Description of Artificial Sequence: Synthetic oligonucleotide
  Sense strand starting at position 3440 of SEQ ID NO: 1560803
gguuauuucggcugugaag

SEQ ID NO: 1625568 - RNA, 19 nt, Artificial Sequence
  Description of Artificial Sequence: Synthetic oligonucleotide
  Antisense strand to SEQ ID NO: 1625567
cuucacagccgaaauaacc

SEQ ID NO: 1625569 - RNA, 19 nt, Artificial Sequence
  Description of Artificial Sequence: Synthetic oligonucleotide
  Sense strand starting at position 3443 of SEQ ID NO: 1560803
uauuucggcugugaagaaa

SEQ ID NO: 1625570 - RNA, 19 nt, Artificial Sequence
  Description of Artificial Sequence: Synthetic oligonucleotide
  Antisense strand to SEQ ID NO: 1625569
uuucuucacagccgaaaua

SEQ ID NO: 1625571 - RNA, 19 nt, Artificial Sequence
  Description of Artificial Sequence: Synthetic oligonucleotide
  Sense strand starting at position 3469 of SEQ ID NO: 1560803
uuucuugaugcaugcuaaa

SEQ ID NO: 1625572 - RNA, 19 nt, Artificial Sequence
  Description of Artificial Sequence: Synthetic oligonucleotide
  Antisense strand to SEQ ID NO: 1625571
uuuagcaugcaucaagaaa

SEQ ID NO: 1625573 - RNA, 19 nt, Artificial Sequence
  Description of Artificial Sequence: Synthetic oligonucleotide
  Sense strand starting at position 3591 of SEQ ID NO: 1560803
cuggaauauuaaggauaau

SEQ ID NO: 1625574 - RNA, 19 nt, Artificial Sequence
  Description of Artificial Sequence: Synthetic oligonucleotide
  Antisense strand to SEQ ID NO: 1625573
auuauccuuaauauuccag

SEQ ID NO: 1625575 - RNA, 19 nt, Artificial Sequence
  Description of Artificial Sequence: Synthetic oligonucleotide
  Sense strand starting at position 3603 of SEQ ID NO: 1560803
ggauaauaauccuggaaua

SEQ ID NO: 1625576 - RNA, 19 nt, Artificial Sequence
  Description of Artificial Sequence: Synthetic oligonucleotide
  Antisense strand to SEQ ID NO: 1625575
uauuccaggauuauuaucc

SEQ ID NO: 1625577 - RNA, 19 nt, Artificial Sequence
  Description of Artificial Sequence: Synthetic oligonucleotide
  Sense strand starting at position 3655 of SEQ ID NO: 1560803
uagaaaguuuaacagaguu

SEQ ID NO: 1625578 - RNA, 19 nt, Artificial Sequence
  Description of Artificial Sequence: Synthetic oligonucleotide
  Antisense strand to SEQ ID NO: 1625577
aacucuguuaaacuuucua

SEQ ID NO: 1625579 - RNA, 19 nt, Artificial Sequence
  Description of Artificial Sequence: Synthetic oligonucleotide
  Sense strand starting at position 3929 of SEQ ID NO: 1560803
cuuggaagcuaacuauaua

SEQ ID NO: 1625580 - RNA, 19 nt, Artificial Sequence
  Description of Artificial Sequence: Synthetic oligonucleotide
  Antisense strand to SEQ ID NO: 1625579
uauauaguuagcuuccaag

SEQ ID NO: 1625581 - RNA, 19 nt, Artificial Sequence
  Description of Artificial Sequence: Synthetic oligonucleotide
  Sense strand starting at position 77 of SEQ ID NO: 1560804
ucgugagauccugucgcua

SEQ ID NO: 1625582 - RNA, 19 nt, Artificial Sequence
  Description of Artificial Sequence: Synthetic oligonucleotide
  Antisense strand to SEQ ID NO: 1625581
uagcgacaggaucucacga

SEQ ID NO: 1625583 - RNA, 19 nt, Artificial Sequence
  Description of Artificial Sequence: Synthetic oligonucleotide
  Sense strand starting at position 195 of SEQ ID NO: 1560804
gcacuuagccaugauugga

SEQ ID NO: 1625584 - RNA, 19 nt, Artificial Sequence
  Description of Artificial Sequence: Synthetic oligonucleotide
  Antisense strand to SEQ ID NO: 1625583
uccaaucauggcuaagugc

SEQ ID NO: 1625585 - RNA, 19 nt, Artificial Sequence
  Description of Artificial Sequence: Synthetic oligonucleotide
  Sense strand starting at position 238 of SEQ ID NO: 1560804
agagcaagaccguguauaa

SEQ ID NO: 1625586 - RNA, 19 nt, Artificial Sequence
  Description of Artificial Sequence: Synthetic oligonucleotide
  Antisense strand to SEQ ID NO: 1625585
uuauacacggucuugcucu

SEQ ID NO: 1625587 - RNA, 19 nt, Artificial Sequence
  Description of Artificial Sequence: Synthetic oligonucleotide
  Sense strand starting at position 284 of SEQ ID NO: 1560804
uggaguuaguaauccuauc

SEQ ID NO: 1625588 - RNA, 19 nt, Artificial Sequence
  Description of Artificial Sequence: Synthetic oligonucleotide
  Antisense strand to SEQ ID NO: 1625587
gauaggauuacuaacucca

SEQ ID NO: 1625589 - RNA, 19 nt, Artificial Sequence
  Description of Artificial Sequence: Synthetic oligonucleotide
  Sense strand starting at position 296 of SEQ ID NO: 1560804
uccuaucuucccugugaag

SEQ ID NO: 1625590 - RNA, 19 nt, Artificial Sequence
  Description of Artificial Sequence: Synthetic oligonucleotide
  Antisense strand to SEQ ID NO: 1625589
cuucacagggaagauagga

SEQ ID NO: 1625591 - RNA, 19 nt, Artificial Sequence
  Description of Artificial Sequence: Synthetic oligonucleotide
  Sense strand starting at position 298 of SEQ ID NO: 1560804
cuaucuucccugugaagua

SEQ ID NO: 1625592 - RNA, 19 nt, Artificial Sequence
  Description of Artificial Sequence: Synthetic oligonucleotide
  Antisense strand to SEQ ID NO: 1625591
uacuucacagggaagauag

SEQ ID NO: 1625593 - RNA, 19 nt, Artificial Sequence
  Description of Artificial Sequence: Synthetic oligonucleotide
  Sense strand starting at position 337 of SEQ ID NO: 1560804
gcaccuaaagccugucauu

SEQ ID NO: 1625594 - RNA, 19 nt, Artificial Sequence
  Description of Artificial Sequence: Synthetic oligonucleotide
  Antisense strand to SEQ ID NO: 1625593
aaugacaggcuuuaggugc

SEQ ID NO: 1625595 - RNA, 19 nt, Artificial Sequence
  Description of Artificial Sequence: Synthetic oligonucleotide
  Sense strand starting at position 479 of SEQ ID NO: 1560804
ggcauaaugccugagguca

SEQ ID NO: 1625596 - RNA, 19 nt, Artificial Sequence
  Description of Artificial Sequence: Synthetic oligonucleotide
  Antisense strand to SEQ ID NO: 1625595
ugaccucaggcauuaugcc

SEQ ID NO: 1625597 - RNA, 19 nt, Artificial Sequence
  Description of Artificial Sequence: Synthetic oligonucleotide
  Sense strand starting at position 1004 of SEQ ID NO: 1560804
agacuaaaguguucccauu

SEQ ID NO: 1625598 - RNA, 19 nt, Artificial Sequence
  Description of Artificial Sequence: Synthetic oligonucleotide
  Antisense strand to SEQ ID NO: 1625597
aaugggaacacuuuagucu

SEQ ID NO: 1625599 - RNA, 19 nt, Artificial Sequence
  Description of Artificial Sequence: Synthetic oligonucleotide
  Sense strand starting at position 1021 of SEQ ID NO: 1560804
uucgcuacaucucuugaga

SEQ ID NO: 1625600 - RNA, 19 nt, Artificial Sequence
  Description of Artificial Sequence: Synthetic oligonucleotide
  Antisense strand to SEQ ID NO: 1625599
ucucaagagauguagcgaa

SEQ ID NO: 1625601 - RNA, 19 nt, Artificial Sequence
  Description of Artificial Sequence: Synthetic oligonucleotide
  Sense strand starting at position 2121 of SEQ ID NO: 1560804
augguuacuccaugugcaa

SEQ ID NO: 1625602 - RNA, 19 nt, Artificial Sequence
  Description of Artificial Sequence: Synthetic oligonucleotide
  Antisense strand to SEQ ID NO: 1625601
uugcacauggaguaaccau

SEQ ID NO: 1625603 - RNA, 19 nt, Artificial Sequence
  Description of Artificial Sequence: Synthetic oligonucleotide
  Sense strand starting at position 2465 of SEQ ID NO: 1560804
uaauaaugugcugaaguuu

SEQ ID NO: 1625604 - RNA, 19 nt, Artificial Sequence
  Description of Artificial Sequence: Synthetic oligonucleotide
  Antisense strand to SEQ ID NO: 1625603
aaacuucagcacauuauua

SEQ ID NO: 1625605 - RNA, 19 nt, Artificial Sequence
  Description of Artificial Sequence: Synthetic oligonucleotide
  Sense strand starting at position 2476 of SEQ ID NO: 1560804
ugaaguuuagccugggaau

SEQ ID NO: 1625606 - RNA, 19 nt, Artificial Sequence
  Description of Artificial Sequence: Synthetic oligonucleotide
  Antisense strand to SEQ ID NO: 1625605
auucccaggcuaaacuuca

SEQ ID NO: 1625607 - RNA, 19 nt, Artificial Sequence
  Description of Artificial Sequence: Synthetic oligonucleotide
  Sense strand starting at position 2477 of SEQ ID NO: 1560804
gaaguuuagccugggaaug

SEQ ID NO: 1625608 - RNA, 19 nt, Artificial Sequence
  Description of Artificial Sequence: Synthetic oligonucleotide
  Antisense strand to SEQ ID NO: 1625607
cauucccaggcuaaacuuc

SEQ ID NO: 1625609 - RNA, 19 nt, Artificial Sequence
  Description of Artificial Sequence: Synthetic oligonucleotide
  Sense strand starting at position 2478 of SEQ ID NO: 1560804
aaguuuagccugggaauga

SEQ ID NO: 1625610 - RNA, 19 nt, Artificial Sequence
  Description of Artificial Sequence: Synthetic oligonucleotide
  Antisense strand to SEQ ID NO: 1625609
ucauucccaggcuaaacuu

SEQ ID NO: 1625611 - RNA, 19 nt, Artificial Sequence
  Description of Artificial Sequence: Synthetic oligonucleotide
  Sense strand starting at position 2479 of SEQ ID NO: 1560804
aguuuagccugggaaugau

SEQ ID NO: 1625612 - RNA, 19 nt, Artificial Sequence
  Description of Artificial Sequence: Synthetic oligonucleotide
  Antisense strand to SEQ ID NO: 1625611
aucauucccaggcuaaacu

SEQ ID NO: 1625613 - RNA, 19 nt, Artificial Sequence
  Description of Artificial Sequence: Synthetic oligonucleotide
  Sense strand starting at position 2742 of SEQ ID NO: 1560804
augucuacgaaguauaaga

SEQ ID NO: 1625614 - RNA, 19 nt, Artificial Sequence
  Description of Artificial Sequence: Synthetic oligonucleotide
  Antisense strand to SEQ ID NO: 1625613
ucuuauacuucguagacau

SEQ ID NO: 1625615 - RNA, 19 nt, Artificial Sequence
  Description of Artificial Sequence: Synthetic oligonucleotide
  Sense strand starting at position 2890 of SEQ ID NO: 1560804
gugauagagcgagaugcua

SEQ ID NO: 1625616 - RNA, 19 nt, Artificial Sequence
  Description of Artificial Sequence: Synthetic oligonucleotide
  Antisense strand to SEQ ID NO: 1625615
uagcaucucgcucuaucac

SEQ ID NO: 1625617 - RNA, 19 nt, Artificial Sequence
  Description of Artificial Sequence: Synthetic oligonucleotide
  Sense strand starting at position 2898 of SEQ ID NO: 1560804
gcgagaugcuaucucauaa

SEQ ID NO: 1625618 - RNA, 19 nt, Artificial Sequence
  Description of Artificial Sequence: Synthetic oligonucleotide
  Antisense strand to SEQ ID NO: 1625617
uuaugagauagcaucucgc

SEQ ID NO: 1625619 - RNA, 19 nt, Artificial Sequence
  Description of Artificial Sequence: Synthetic oligonucleotide
  Sense strand starting at position 2983 of SEQ ID NO: 1560804
gcacaagucuuggcccgua

SEQ ID NO: 1625620 - RNA, 19 nt, Artificial Sequence
  Description of Artificial Sequence: Synthetic oligonucleotide
  Antisense strand to SEQ ID NO: 1625619
uacgggccaagacuugugc

SEQ ID NO: 1625621 - RNA, 19 nt, Artificial Sequence
  Description of Artificial Sequence: Synthetic oligonucleotide
  Sense strand starting at position 2986 of SEQ ID NO: 1560804
caagucuuggcccguagua

SEQ ID NO: 1625622 - RNA, 19 nt, Artificial Sequence
  Description of Artificial Sequence: Synthetic oligonucleotide
  Antisense strand to SEQ ID NO: 1625621
uacuacgggccaagacuug

SEQ ID NO: 1625623 - RNA, 19 nt, Artificial Sequence
  Description of Artificial Sequence: Synthetic oligonucleotide
  Sense strand starting at position 2988 of SEQ ID NO: 1560804
agucuuggcccguaguaag

SEQ ID NO: 1625624 - RNA, 19 nt, Artificial Sequence
  Description of Artificial Sequence: Synthetic oligonucleotide
  Antisense strand to SEQ ID NO: 1625623
cuuacuacgggccaagacu

SEQ ID NO: 1625625 - RNA, 19 nt, Artificial Sequence
  Description of Artificial Sequence: Synthetic oligonucleotide
  Sense strand starting at position 3002 of SEQ ID NO: 1560804
guaagaaccucacaaauag

SEQ ID NO: 1625626 - RNA, 19 nt, Artificial Sequence
  Description of Artificial Sequence: Synthetic oligonucleotide
  Antisense strand to SEQ ID NO: 1625625
cuauuugugagguucuuac

SEQ ID NO: 1625627 - RNA, 19 nt, Artificial Sequence
  Description of Artificial Sequence: Synthetic oligonucleotide
  Sense strand starting at position 3122 of SEQ ID NO: 1560804
guggguuggucccuugauu

SEQ ID NO: 1625628 - RNA, 19 nt, Artificial Sequence
  Description of Artificial Sequence: Synthetic oligonucleotide
  Antisense strand to SEQ ID NO: 1625627
aaucaagggaccaacccac

SEQ ID NO: 1625629 - RNA, 19 nt, Artificial Sequence
  Description of Artificial Sequence: Synthetic oligonucleotide
  Sense strand starting at position 3177 of SEQ ID NO: 1560804
ggauaauaaucccaaauug

SEQ ID NO: 1625630 - RNA, 19 nt, Artificial Sequence
  Description of Artificial Sequence: Synthetic oligonucleotide
  Antisense strand to SEQ ID NO: 1625629
caauuugggauuauuaucc

SEQ ID NO: 1625631 - RNA, 19 nt, Artificial Sequence
  Description of Artificial Sequence: Synthetic oligonucleotide
  Sense strand starting at position 3221 of SEQ ID NO: 1560804
agauuaugcucauaaugua

SEQ ID NO: 1625632 - RNA, 19 nt, Artificial Sequence
  Description of Artificial Sequence: Synthetic oligonucleotide
  Antisense strand to SEQ ID NO: 1625631
uacauuaugagcauaaucu

SEQ ID NO: 1625633 - RNA, 19 nt, Artificial Sequence
  Description of Artificial Sequence: Synthetic oligonucleotide
  Sense strand starting at position 3609 of SEQ ID NO: 1560804
cauggauggucagacuaaa

SEQ ID NO: 1625634 - RNA, 19 nt, Artificial Sequence
  Description of Artificial Sequence: Synthetic oligonucleotide
  Antisense strand to SEQ ID NO: 1625633
uuuagucugaccauccaug

SEQ ID NO: 1625635 - RNA, 19 nt, Artificial Sequence
  Description of Artificial Sequence: Synthetic oligonucleotide
  Sense strand starting at position 3640 of SEQ ID NO: 1560804
uguagcaagugcuaauaaa

SEQ ID NO: 1625636 - RNA, 19 nt, Artificial Sequence
  Description of Artificial Sequence: Synthetic oligonucleotide
  Antisense strand to SEQ ID NO: 1625635
uuuauuagcacuugcuaca

SEQ ID NO: 1625637 - RNA, 19 nt, Artificial Sequence
  Description of Artificial Sequence: Synthetic oligonucleotide
  Sense strand starting at position 3674 of SEQ ID NO: 1560804
uucugagcauucugaaaua

SEQ ID NO: 1625638 - RNA, 19 nt, Artificial Sequence
  Description of Artificial Sequence: Synthetic oligonucleotide
  Antisense strand to SEQ ID NO: 1625637
uauuucagaaugcucagaa

SEQ ID NO: 1625639 - RNA, 19 nt, Artificial Sequence
  Description of Artificial Sequence: Synthetic oligonucleotide
  Sense strand starting at position 3695 of SEQ ID NO: 1560804
auuggaaauuacuaagaug

SEQ ID NO: 1625640 - RNA, 19 nt, Artificial Sequence
  Description of Artificial Sequence: Synthetic oligonucleotide
  Antisense strand to SEQ ID NO: 1625639
caucuuaguaauuuccaau

SEQ ID NO: 1625641 - RNA, 19 nt, Artificial Sequence
  Description of Artificial Sequence: Synthetic oligonucleotide
  Sense strand starting at position 3747 of SEQ ID NO: 1560804
uaaauaucagguugaguua

SEQ ID NO: 1625642 - RNA, 19 nt, Artificial Sequence
  Description of Artificial Sequence: Synthetic oligonucleotide
  Antisense strand to SEQ ID NO: 1625641
uaacucaaccugauauuua

SEQ ID NO: 1625643 - RNA, 19 nt, Artificial Sequence
  Description of Artificial Sequence: Synthetic oligonucleotide
  Sense strand starting at position 3756 of SEQ ID NO: 1560804
gguugaguuacgugauauu

SEQ ID NO: 1625644 - RNA, 19 nt, Artificial Sequence
  Description of Artificial Sequence: Synthetic oligonucleotide
  Antisense strand to SEQ ID NO: 1625643
aauaucacguaacucaacc

SEQ ID NO: 1625645 - RNA, 19 nt, Artificial Sequence
  Description of Artificial Sequence: Synthetic oligonucleotide
  Sense strand starting at position 3767 of SEQ ID NO: 1560804
gugauauugccacaguaac

SEQ ID NO: 1625646 - RNA, 19 nt, Artificial Sequence
  Description of Artificial Sequence: Synthetic oligonucleotide
  Antisense strand to SEQ ID NO: 1625645
guuacuguggcaauaucac

SEQ ID NO: 1625647 - RNA, 19 nt, Artificial Sequence
  Description of Artificial Sequence: Synthetic oligonucleotide
  Sense strand starting at position 3872 of SEQ ID NO: 1560804
ugaaaugaauugugcccua

SEQ ID NO: 1625648 - RNA, 19 nt, Artificial Sequence
  Description of Artificial Sequence: Synthetic oligonucleotide
  Antisense strand to SEQ ID NO: 1625647
uagggcacaauucauuuca

SEQ ID NO: 1625649 - RNA, 19 nt, Artificial Sequence
  Description of Artificial Sequence: Synthetic oligonucleotide
  Sense strand starting at position 3931 of SEQ ID NO: 1560804
caguaagaucugcagcacu

SEQ ID NO: 1625650 - RNA, 19 nt, Artificial Sequence
  Description of Artificial Sequence: Synthetic oligonucleotide
  Antisense strand to SEQ ID NO: 1625649
agugcugcagaucuuacug

SEQ ID NO: 1625651 - RNA, 19 nt, Artificial Sequence
  Description of Artificial Sequence: Synthetic oligonucleotide
  Sense strand starting at position 3943 of SEQ ID NO: 1560804
cagcacuggugggugaaua

SEQ ID NO: 1625652 - RNA, 19 nt, Artificial Sequence
  Description of Artificial Sequence: Synthetic oligonucleotide
  Antisense strand to SEQ ID NO: 1625651
uauucacccaccagugcug

SEQ ID NO: 1625653 - RNA, 19 nt, Artificial Sequence
  Description of Artificial Sequence: Synthetic oligonucleotide
  Sense strand starting at position 3951 of SEQ ID NO: 1560804
gugggugaauauggcuaau

SEQ ID NO: 1625654 - RNA, 19 nt, Artificial Sequence
  Description of Artificial Sequence: Synthetic oligonucleotide
  Antisense strand to SEQ ID NO: 1625653
auuagccauauucacccac

SEQ ID NO: 1625655 - RNA, 19 nt, Artificial Sequence
  Description of Artificial Sequence: Synthetic oligonucleotide
  Sense strand starting at position 3953 of SEQ ID NO: 1560804
gggugaauauggcuaauug

SEQ ID NO: 1625656 - RNA, 19 nt, Artificial Sequence
  Description of Artificial Sequence: Synthetic oligonucleotide
  Antisense strand to SEQ ID NO: 1625655
caauuagccauauucaccc

SEQ ID NO: 1625657 - RNA, 19 nt, Artificial Sequence
  Description of Artificial Sequence: Synthetic oligonucleotide
  Sense strand starting at position 3954 of SEQ ID NO: 1560804
ggugaauauggcuaauugu

SEQ ID NO: 1625658 - RNA, 19 nt, Artificial Sequence
  Description of Artificial Sequence: Synthetic oligonucleotide
  Antisense strand to SEQ ID NO: 1625657
acaauuagccauauucacc

SEQ ID NO: 1625659 - RNA, 19 nt, Artificial Sequence
  Description of Artificial Sequence: Synthetic oligonucleotide
  Sense strand starting at position 3963 of SEQ ID NO: 1560804
ggcuaauuguaacuuauug

SEQ ID NO: 1625660 - RNA, 19 nt, Artificial Sequence
  Description of Artificial Sequence: Synthetic oligonucleotide
  Antisense strand to SEQ ID NO: 1625659
caauaaguuacaauuagcc

SEQ ID NO: 1625661 - RNA, 19 nt, Artificial Sequence
  Description of Artificial Sequence: Synthetic oligonucleotide
  Sense strand starting at position 31 of SEQ ID NO: 1560805
caucuaucuguugaucgau

SEQ ID NO: 1625662 - RNA, 19 nt, Artificial Sequence
  Description of Artificial Sequence: Synthetic oligonucleotide
  Antisense strand to SEQ ID NO: 1625661
aucgaucaacagauagaug

SEQ ID NO: 1625663 - RNA, 19 nt, Artificial Sequence
  Description of Artificial Sequence: Synthetic oligonucleotide
  Sense strand starting at position 34 of SEQ ID NO: 1560805
cuaucuguugaucgauuga

SEQ ID NO: 1625664 - RNA, 19 nt, Artificial Sequence
  Description of Artificial Sequence: Synthetic oligonucleotide
  Antisense strand to SEQ ID NO: 1625663
ucaaucgaucaacagauag

SEQ ID NO: 1625665 - RNA, 19 nt, Artificial Sequence
  Description of Artificial Sequence: Synthetic oligonucleotide
  Sense strand starting at position 39 of SEQ ID NO: 1560805
uguugaucgauugaucaau

SEQ ID NO: 1625666 - RNA, 19 nt, Artificial Sequence
  Description of Artificial Sequence: Synthetic oligonucleotide
  Antisense strand to SEQ ID NO: 1625665
auugaucaaucgaucaaca

SEQ ID NO: 1625667 - RNA, 19 nt, Artificial Sequence
  Description of Artificial Sequence: Synthetic oligonucleotide
  Sense strand starting at position 50 of SEQ ID NO: 1560805
ugaucaaucgaucgacuga

SEQ ID NO: 1625668 - RNA, 19 nt, Artificial Sequence
  Description of Artificial Sequence: Synthetic oligonucleotide
  Antisense strand to SEQ ID NO: 1625667
ucagucgaucgauugauca

SEQ ID NO: 1625669 - RNA, 19 nt, Artificial Sequence
  Description of Artificial Sequence: Synthetic oligonucleotide
  Sense strand starting at position 150 of SEQ ID NO: 1560805
ucaucuaucugucugucaa

SEQ ID NO: 1625670 - RNA, 19 nt, Artificial Sequence
  Description of Artificial Sequence: Synthetic oligonucleotide
  Antisense strand to SEQ ID NO: 1625669
uugacagacagauagauga

SEQ ID NO: 1625671 - RNA, 19 nt, Artificial Sequence
  Description of Artificial Sequence: Synthetic oligonucleotide
  Sense strand starting at position 152 of SEQ ID NO: 1560805
aucuaucugucugucaaua

SEQ ID NO: 1625672 - RNA, 19 nt, Artificial Sequence
  Description of Artificial Sequence: Synthetic oligonucleotide
  Antisense strand to SEQ ID NO: 1625671
uauugacagacagauagau

SEQ ID NO: 1625673 - RNA, 19 nt, Artificial Sequence
  Description of Artificial Sequence: Synthetic oligonucleotide
  Sense strand starting at position 157 of SEQ ID NO: 1560805
ucugucugucaauagauag

SEQ ID NO: 1625674 - RNA, 19 nt, Artificial Sequence
  Description of Artificial Sequence: Synthetic oligonucleotide
  Antisense strand to SEQ ID NO: 1625673
cuaucuauugacagacaga

SEQ ID NO: 1625675 - RNA, 19 nt, Artificial Sequence
  Description of Artificial Sequence: Synthetic oligonucleotide
  Sense strand starting at position 171 of SEQ ID NO: 1560805
gauagaucuaucgaucggu

SEQ ID NO: 1625676 - RNA, 19 nt, Artificial Sequence
  Description of Artificial Sequence: Synthetic oligonucleotide
  Antisense strand to SEQ ID NO: 1625675
accgaucgauagaucuauc

SEQ ID NO: 1625677 - RNA, 19 nt, Artificial Sequence
  Description of Artificial Sequence: Synthetic oligonucleotide
  Sense strand starting at position 174 of SEQ ID NO: 1560805
agaucuaucgaucgguuga

SEQ ID NO: 1625678 - RNA, 19 nt, Artificial Sequence
  Description of Artificial Sequence: Synthetic oligonucleotide
  Antisense strand to SEQ ID NO: 1625677
ucaaccgaucgauagaucu

SEQ ID NO: 1625679 - RNA, 19 nt, Artificial Sequence
  Description of Artificial Sequence: Synthetic oligonucleotide
  Sense strand starting at position 175 of SEQ ID NO: 1560805
gaucuaucgaucgguugac

SEQ ID NO: 1625680 - RNA, 19 nt, Artificial Sequence
  Description of Artificial Sequence: Synthetic oligonucleotide
  Antisense strand to SEQ ID NO: 1625679
gucaaccgaucgauagauc

SEQ ID NO: 1625681 - RNA, 19 nt, Artificial Sequence
  Description of Artificial Sequence: Synthetic oligonucleotide
  Sense strand starting at position 395 of SEQ ID NO: 1560805
ucuaucuaccuaugaguga

SEQ ID NO: 1625682 - RNA, 19 nt, Artificial Sequence
  Description of Artificial Sequence: Synthetic oligonucleotide
  Antisense strand to SEQ ID NO: 1625681
ucacucauagguagauaga

SEQ ID NO: 1625683 - RNA, 19 nt, Artificial Sequence
  Description of Artificial Sequence: Synthetic oligonucleotide
  Sense strand starting at position 399 of SEQ ID NO: 1560805
ucuaccuaugagugacaga

SEQ ID NO: 1625684 - RNA, 19 nt, Artificial Sequence
  Description of Artificial Sequence: Synthetic oligonucleotide
  Antisense strand to SEQ ID NO: 1625683
ucugucacucauagguaga

SEQ ID NO: 1625685 - RNA, 19 nt, Artificial Sequence
  Description of Artificial Sequence: Synthetic oligonucleotide
  Sense strand starting at position 412 of SEQ ID NO: 1560805
gacagaucuugcucaguuu

SEQ ID NO: 1625686 - RNA, 19 nt, Artificial Sequence
  Description of Artificial Sequence: Synthetic oligonucleotide
  Antisense strand to SEQ ID NO: 1625685
aaacugagcaagaucuguc

SEQ ID NO: 1625687 - RNA, 19 nt, Artificial Sequence
  Description of Artificial Sequence: Synthetic oligonucleotide
  Sense strand starting at position 668 of SEQ ID NO: 1560805
ggaucacaggcuugagcuu

SEQ ID NO: 1625688 - RNA, 19 nt, Artificial Sequence
  Description of Artificial Sequence: Synthetic oligonucleotide
  Antisense strand to SEQ ID NO: 1625687
aagcucaagccugugaucc

SEQ ID NO: 1625689 - RNA, 19 nt, Artificial Sequence
  Description of Artificial Sequence: Synthetic oligonucleotide
  Sense strand starting at position 695 of SEQ ID NO: 1560805
ggccuuugucaauacuaaa

SEQ ID NO: 1625690 - RNA, 19 nt, Artificial Sequence
  Description of Artificial Sequence: Synthetic oligonucleotide
  Antisense strand to SEQ ID NO: 1625689
uuuaguauugacaaaggcc

SEQ ID NO: 1625691 - RNA, 19 nt, Artificial Sequence
  Description of Artificial Sequence: Synthetic oligonucleotide
  Sense strand starting at position 802 of SEQ ID NO: 1560805
ccaguuugauccuugcuau

SEQ ID NO: 1625692 - RNA, 19 nt, Artificial Sequence
  Description of Artificial Sequence: Synthetic oligonucleotide
  Antisense strand to SEQ ID NO: 1625691
auagcaaggaucaaacugg

SEQ ID NO: 1625693 - RNA, 19 nt, Artificial Sequence
  Description of Artificial Sequence: Synthetic oligonucleotide
  Sense strand starting at position 805 of SEQ ID NO: 1560805
guuugauccuugcuauucu

SEQ ID NO: 1625694 - RNA, 19 nt, Artificial Sequence
  Description of Artificial Sequence: Synthetic oligonucleotide
  Antisense strand to SEQ ID NO: 1625693
agaauagcaaggaucaaac

SEQ ID NO: 1625695 - RNA, 19 nt, Artificial Sequence
  Description of Artificial Sequence: Synthetic oligonucleotide
  Sense strand starting at position 867 of SEQ ID NO: 1560805
uccuuugggugcucauaca

SEQ ID NO: 1625696 - RNA, 19 nt, Artificial Sequence
  Description of Artificial Sequence: Synthetic oligonucleotide
  Antisense strand to SEQ ID NO: 1625695
uguaugagcacccaaagga

SEQ ID NO: 1625697 - RNA, 19 nt, Artificial Sequence
  Description of Artificial Sequence: Synthetic oligonucleotide
  Sense strand starting at position 908 of SEQ ID NO: 1560805
cauuuaucacguuguacug

SEQ ID NO: 1625698 - RNA, 19 nt, Artificial Sequence
  Description of Artificial Sequence: Synthetic oligonucleotide
  Antisense strand to SEQ ID NO: 1625697
caguacaacgugauaaaug

SEQ ID NO: 1625699 - RNA, 19 nt, Artificial Sequence
  Description of Artificial Sequence: Synthetic oligonucleotide
  Sense strand starting at position 914 of SEQ ID NO: 1560805
ucacguuguacuggaagga

SEQ ID NO: 1625700 - RNA, 19 nt, Artificial Sequence
  Description of Artificial Sequence: Synthetic oligonucleotide
  Antisense strand to SEQ ID NO: 1625699
uccuuccaguacaacguga

SEQ ID NO: 1625701 - RNA, 19 nt, Artificial Sequence
  Description of Artificial Sequence: Synthetic oligonucleotide
  Sense strand starting at position 915 of SEQ ID NO: 1560805
cacguuguacuggaaggau

SEQ ID NO: 1625702 - RNA, 19 nt, Artificial Sequence
  Description of Artificial Sequence: Synthetic oligonucleotide
  Antisense strand to SEQ ID NO: 1625701
auccuuccaguacaacgug

SEQ ID NO: 1625703 - RNA, 19 nt, Artificial Sequence
  Description of Artificial Sequence: Synthetic oligonucleotide
  Sense strand starting at position 1996 of SEQ ID NO: 1560805
uuccauguauggucuguga

SEQ ID NO: 1625704 - RNA, 19 nt, Artificial Sequence
  Description of Artificial Sequence: Synthetic oligonucleotide
  Antisense strand to SEQ ID NO: 1625703
ucacagaccauacauggaa

SEQ ID NO: 1625705 - RNA, 19 nt, Artificial Sequence
  Description of Artificial Sequence: Synthetic oligonucleotide
  Sense strand starting at position 1998 of SEQ ID NO: 1560805
ccauguauggucugugacu

SEQ ID NO: 1625706 - RNA, 19 nt, Artificial Sequence
  Description of Artificial Sequence: Synthetic oligonucleotide
  Antisense strand to SEQ ID NO: 1625705
agucacagaccauacaugg

SEQ ID NO: 1625707 - RNA, 19 nt, Artificial Sequence
  Description of Artificial Sequence: Synthetic oligonucleotide
  Sense strand starting at position 1999 of SEQ ID NO: 1560805
cauguauggucugugacua

SEQ ID NO: 1625708 - RNA, 19 nt, Artificial Sequence
  Description of Artificial Sequence: Synthetic oligonucleotide
  Antisense strand to SEQ ID NO: 1625707
uagucacagaccauacaug

SEQ ID NO: 1625709 - RNA, 19 nt, Artificial Sequence
  Description of Artificial Sequence: Synthetic oligonucleotide
  Sense strand starting at position 2000 of SEQ ID NO: 1560805
auguauggucugugacuag

SEQ ID NO: 1625710 - RNA, 19 nt, Artificial Sequence
  Description of Artificial Sequence: Synthetic oligonucleotide
  Antisense strand to SEQ ID NO: 1625709
cuagucacagaccauacau

SEQ ID NO: 1625711 - RNA, 19 nt, Artificial Sequence
  Description of Artificial Sequence: Synthetic oligonucleotide
  Sense strand starting at position 2009 of SEQ ID NO: 1560805
cugugacuagugggaacaa

SEQ ID NO: 1625712 - RNA, 19 nt, Artificial Sequence
  Description of Artificial Sequence: Synthetic oligonucleotide
  Antisense strand to SEQ ID NO: 1625711
uuguucccacuagucacag

SEQ ID NO: 1625713 - RNA, 19 nt, Artificial Sequence
  Description of Artificial Sequence: Synthetic oligonucleotide
  Sense strand starting at position 2010 of SEQ ID NO: 1560805
ugugacuagugggaacaaa

SEQ ID NO: 1625714 - RNA, 19 nt, Artificial Sequence
  Description of Artificial Sequence: Synthetic oligonucleotide
  Antisense strand to SEQ ID NO: 1625713
uuuguucccacuagucaca

SEQ ID NO: 1625715 - RNA, 19 nt, Artificial Sequence
  Description of Artificial Sequence: Synthetic oligonucleotide
  Sense strand starting at position 2053 of SEQ ID NO: 1560805
aggugucagagaugccauu

SEQ ID NO: 1625716 - RNA, 19 nt, Artificial Sequence
  Description of Artificial Sequence: Synthetic oligonucleotide
  Antisense strand to SEQ ID NO: 1625715
aauggcaucucugacaccu

SEQ ID NO: 1625717 - RNA, 19 nt, Artificial Sequence
  Description of Artificial Sequence: Synthetic oligonucleotide
  Sense strand starting at position 2087 of SEQ ID NO: 1560805
cacggaaaccuauacuguu

SEQ ID NO: 1625718 - RNA, 19 nt, Artificial Sequence
  Description of Artificial Sequence: Synthetic oligonucleotide
  Antisense strand to SEQ ID NO: 1625717
aacaguauagguuuccgug

SEQ ID NO: 1625719 - RNA, 19 nt, Artificial Sequence
  Description of Artificial Sequence: Synthetic oligonucleotide
  Sense strand starting at position 2126 of SEQ ID NO: 1560805
ccaucaaauuccuuugugu

SEQ ID NO: 1625720 - RNA, 19 nt, Artificial Sequence
  Description of Artificial Sequence: Synthetic oligonucleotide
  Antisense strand to SEQ ID NO: 1625719
acacaaaggaauuugaugg

SEQ ID NO: 1625721 - RNA, 19 nt, Artificial Sequence
  Description of Artificial Sequence: Synthetic oligonucleotide
  Sense strand starting at position 2128 of SEQ ID NO: 1560805
aucaaauuccuuuguguuc

SEQ ID NO: 1625722 - RNA, 19 nt, Artificial Sequence
  Description of Artificial Sequence: Synthetic oligonucleotide
  Antisense strand to SEQ ID NO: 1625721
gaacacaaaggaauuugau

SEQ ID NO: 1625723 - RNA, 19 nt, Artificial Sequence
  Description of Artificial Sequence: Synthetic oligonucleotide
  Sense strand starting at position 2255 of SEQ ID NO: 1560805
cuuggauguucucuauaaa

SEQ ID NO: 1625724 - RNA, 19 nt, Artificial Sequence
  Description of Artificial Sequence: Synthetic oligonucleotide
  Antisense strand to SEQ ID NO: 1625723
uuuauagagaacauccaag

SEQ ID NO: 1625725 - RNA, 19 nt, Artificial Sequence
  Description of Artificial Sequence: Synthetic oligonucleotide
  Sense strand starting at position 2256 of SEQ ID NO: 1560805
uuggauguucucuauaaac

SEQ ID NO: 1625726 - RNA, 19 nt, Artificial Sequence
  Description of Artificial Sequence: Synthetic oligonucleotide
  Antisense strand to SEQ ID NO: 1625725
guuuauagagaacauccaa

SEQ ID NO: 1625727 - RNA, 19 nt, Artificial Sequence
  Description of Artificial Sequence: Synthetic oligonucleotide
  Sense strand starting at position 2528 of SEQ ID NO: 1560805
aaaguuugcagcgagcaga

SEQ ID NO: 1625728 - RNA, 19 nt, Artificial Sequence
  Description of Artificial Sequence: Synthetic oligonucleotide
  Antisense strand to SEQ ID NO: 1625727
ucugcucgcugcaaacuuu

SEQ ID NO: 1625729 - RNA, 19 nt, Artificial Sequence
  Description of Artificial Sequence: Synthetic oligonucleotide
  Sense strand starting at position 2713 of SEQ ID NO: 1560805
cuguguucucucccuguuu

SEQ ID NO: 1625730 - RNA, 19 nt, Artificial Sequence
  Description of Artificial Sequence: Synthetic oligonucleotide
  Antisense strand to SEQ ID NO: 1625729
aaacagggagagaacacag

SEQ ID NO: 1625731 - RNA, 19 nt, Artificial Sequence
  Description of Artificial Sequence: Synthetic oligonucleotide
  Sense strand starting at position 3238 of SEQ ID NO: 1560805
gaaggacauucuguuacau

SEQ ID NO: 1625732 - RNA, 19 nt, Artificial Sequence
  Description of Artificial Sequence: Synthetic oligonucleotide
  Antisense strand to SEQ ID NO: 1625731
auguaacagaauguccuuc

SEQ ID NO: 1625733 - RNA, 19 nt, Artificial Sequence
  Description of Artificial Sequence: Synthetic oligonucleotide
  Sense strand starting at position 3375 of SEQ ID NO: 1560805
guggguguuagggagauau

SEQ ID NO: 1625734 - RNA, 19 nt, Artificial Sequence
  Description of Artificial Sequence: Synthetic oligonucleotide
  Antisense strand to SEQ ID NO: 1625733
auaucucccuaacacccac

SEQ ID NO: 1625735 - RNA, 19 nt, Artificial Sequence
  Description of Artificial Sequence: Synthetic oligonucleotide
  Sense strand starting at position 3492 of SEQ ID NO: 1560805
cagagaaacucagagucaa

SEQ ID NO: 1625736 - RNA, 19 nt, Artificial Sequence
  Description of Artificial Sequence: Synthetic oligonucleotide
  Antisense strand to SEQ ID NO: 1625735
uugacucugaguuucucug

SEQ ID NO: 1625737 - RNA, 19 nt, Artificial Sequence
  Description of Artificial Sequence: Synthetic oligonucleotide
  Sense strand starting at position 3547 of SEQ ID NO: 1560805
auguucugaggcugauaau

SEQ ID NO: 1625738 - RNA, 19 nt, Artificial Sequence
  Description of Artificial Sequence: Synthetic oligonucleotide
  Antisense strand to SEQ ID NO: 1625737
auuaucagccucagaacau

SEQ ID NO: 1625739 - RNA, 19 nt, Artificial Sequence
  Description of Artificial Sequence: Synthetic oligonucleotide
  Sense strand starting at position 3548 of SEQ ID NO: 1560805
uguucugaggcugauaaug

SEQ ID NO: 1625740 - RNA, 19 nt, Artificial Sequence
  Description of Artificial Sequence: Synthetic oligonucleotide
  Antisense strand to SEQ ID NO: 1625739
cauuaucagccucagaaca

SEQ ID NO: 1625741 - RNA, 19 nt, Artificial Sequence
  Description of Artificial Sequence: Synthetic oligonucleotide
  Sense strand starting at position 10 of SEQ ID NO: 1560806
agugaaguggauugucuca

SEQ ID NO: 1625742 - RNA, 19 nt, Artificial Sequence
  Description of Artificial Sequence: Synthetic oligonucleotide
  Antisense strand to SEQ ID NO: 1625741
ugagacaauccacuucacu

SEQ ID NO: 1625743 - RNA, 19 nt, Artificial Sequence
  Description of Artificial Sequence: Synthetic oligonucleotide
  Sense strand starting at position 27 of SEQ ID NO: 1560806
caugguucugagggucaga

SEQ ID NO: 1625744 - RNA, 19 nt, Artificial Sequence
  Description of Artificial Sequence: Synthetic oligonucleotide
  Antisense strand to SEQ ID NO: 1625743
ucugacccucagaaccaug

SEQ ID NO: 1625745 - RNA, 19 nt, Artificial Sequence
  Description of Artificial Sequence: Synthetic oligonucleotide
  Sense strand starting at position 467 of SEQ ID NO: 1560806
uccugagacuucccgugaa

SEQ ID NO: 1625746 - RNA, 19 nt, Artificial Sequence
  Description of Artificial Sequence: Synthetic oligonucleotide
  Antisense strand to SEQ ID NO: 1625745
uucacgggaagucucagga

SEQ ID NO: 1625747 - RNA, 19 nt, Artificial Sequence
  Description of Artificial Sequence: Synthetic oligonucleotide
  Sense strand starting at position 470 of SEQ ID NO: 1560806
ugagacuucccgugaaacu

SEQ ID NO: 1625748 - RNA, 19 nt, Artificial Sequence
  Description of Artificial Sequence: Synthetic oligonucleotide
  Antisense strand to SEQ ID NO: 1625747
aguuucacgggaagucuca

SEQ ID NO: 1625749 - RNA, 19 nt, Artificial Sequence
  Description of Artificial Sequence: Synthetic oligonucleotide
  Sense strand starting at position 471 of SEQ ID NO: 1560806
gagacuucccgugaaacuu

SEQ ID NO: 1625750 - RNA, 19 nt, Artificial Sequence
  Description of Artificial Sequence: Synthetic oligonucleotide
  Antisense strand to SEQ ID NO: 1625749
aaguuucacgggaagucuc

SEQ ID NO: 1625751 - RNA, 19 nt, Artificial Sequence
  Description of Artificial Sequence: Synthetic oligonucleotide
  Sense strand starting at position 992 of SEQ ID NO: 1560806
uccagauguuagcccaaga

SEQ ID NO: 1625752 - RNA, 19 nt, Artificial Sequence
  Description of Artificial Sequence: Synthetic oligonucleotide
  Antisense strand to SEQ ID NO: 1625751
ucuugggcuaacaucugga

SEQ ID NO: 1625753 - RNA, 19 nt, Artificial Sequence
  Description of Artificial Sequence: Synthetic oligonucleotide
  Sense strand starting at position 1036 of SEQ ID NO: 1560806
ccagaaguuccugaguccu

SEQ ID NO: 1625754 - RNA, 19 nt, Artificial Sequence
  Description of Artificial Sequence: Synthetic oligonucleotide
  Antisense strand to SEQ ID NO: 1625753
aggacucaggaacuucugg

SEQ ID NO: 1625755 - RNA, 19 nt, Artificial Sequence
  Description of Artificial Sequence: Synthetic oligonucleotide
  Sense strand starting at position 1048 of SEQ ID NO: 1560806
gaguccugguggucaggaa

SEQ ID NO: 1625756 - RNA, 19 nt, Artificial Sequence
  Description of Artificial Sequence: Synthetic oligonucleotide
  Antisense strand to SEQ ID NO: 1625755
uuccugaccaccaggacuc

SEQ ID NO: 1625757 - RNA, 19 nt, Artificial Sequence
  Description of Artificial Sequence: Synthetic oligonucleotide
  Sense strand starting at position 1993 of SEQ ID NO: 1560806
ugguuccaugggugugauu

SEQ ID NO: 1625758 - RNA, 19 nt, Artificial Sequence
  Description of Artificial Sequence: Synthetic oligonucleotide
  Antisense strand to SEQ ID NO: 1625757
aaucacacccauggaacca

SEQ ID NO: 1625759 - RNA, 19 nt, Artificial Sequence
  Description of Artificial Sequence: Synthetic oligonucleotide
  Sense strand starting at position 2002 of SEQ ID NO: 1560806
gggugugauuccucuggaa

SEQ ID NO: 1625760 - RNA, 19 nt, Artificial Sequence
  Description of Artificial Sequence: Synthetic oligonucleotide
  Antisense strand to SEQ ID NO: 1625759
uuccagaggaaucacaccc

SEQ ID NO: 1625761 - RNA, 19 nt, Artificial Sequence
  Description of Artificial Sequence: Synthetic oligonucleotide
  Sense strand starting at position 2004 of SEQ ID NO: 1560806
gugugauuccucuggaagu

SEQ ID NO: 1625762 - RNA, 19 nt, Artificial Sequence
  Description of Artificial Sequence: Synthetic oligonucleotide
  Antisense strand to SEQ ID NO: 1625761
acuuccagaggaaucacac

SEQ ID NO: 1625763 - RNA, 19 nt, Artificial Sequence
  Description of Artificial Sequence: Synthetic oligonucleotide
  Sense strand starting at position 2006 of SEQ ID NO: 1560806
gugauuccucuggaaguau

SEQ ID NO: 1625764 - RNA, 19 nt, Artificial Sequence
  Description of Artificial Sequence: Synthetic oligonucleotide
  Antisense strand to SEQ ID NO: 1625763
auacuuccagaggaaucac

SEQ ID NO: 1625765 - RNA, 19 nt, Artificial Sequence
  Description of Artificial Sequence: Synthetic oligonucleotide
  Sense strand starting at position 2063 of SEQ ID NO: 1560806
uggaaaguuagaugcgauc

SEQ ID NO: 1625766 - RNA, 19 nt, Artificial Sequence
  Description of Artificial Sequence: Synthetic oligonucleotide
  Antisense strand to SEQ ID NO: 1625765
gaucgcaucuaacuuucca

SEQ ID NO: 1625767 - RNA, 19 nt, Artificial Sequence
  Description of Artificial Sequence: Synthetic oligonucleotide
  Sense strand starting at position 2090 of SEQ ID NO: 1560806
guucucauuugggcuaauu

SEQ ID NO: 1625768 - RNA, 19 nt, Artificial Sequence
  Description of Artificial Sequence: Synthetic oligonucleotide
  Antisense strand to SEQ ID NO: 1625767
aauuagcccaaaugagaac

SEQ ID NO: 1625769 - RNA, 19 nt, Artificial Sequence
  Description of Artificial Sequence: Synthetic oligonucleotide
  Sense strand starting at position 2101 of SEQ ID NO: 1560806
ggcuaauuaugagaccaga

SEQ ID NO: 1625770 - RNA, 19 nt, Artificial Sequence
  Description of Artificial Sequence: Synthetic oligonucleotide
  Antisense strand to SEQ ID NO: 1625769
ucuggucucauaauuagcc

SEQ ID NO: 1625771 - RNA, 19 nt, Artificial Sequence
  Description of Artificial Sequence: Synthetic oligonucleotide
  Sense strand starting at position 2110 of SEQ ID NO: 1560806
ugagaccagauguguauau

SEQ ID NO: 1625772 - RNA, 19 nt, Artificial Sequence
  Description of Artificial Sequence: Synthetic oligonucleotide
  Antisense strand to SEQ ID NO: 1625771
auauacacaucuggucuca

SEQ ID NO: 1625773 - RNA, 19 nt, Artificial Sequence
  Description of Artificial Sequence: Synthetic oligonucleotide
  Sense strand starting at position 2111 of SEQ ID NO: 1560806
gagaccagauguguauaua

SEQ ID NO: 1625774 - RNA, 19 nt, Artificial Sequence
  Description of Artificial Sequence: Synthetic oligonucleotide
  Antisense strand to SEQ ID NO: 1625773
uauauacacaucuggucuc

SEQ ID NO: 1625775 - RNA, 19 nt, Artificial Sequence
  Description of Artificial Sequence: Synthetic oligonucleotide
  Sense strand starting at position 2246 of SEQ ID NO: 1560806
acacauguacgguguugua

SEQ ID NO: 1625776 - RNA, 19 nt, Artificial Sequence
  Description of Artificial Sequence: Synthetic oligonucleotide
  Antisense strand to SEQ ID NO: 1625775
uacaacaccguacaugugu

SEQ ID NO: 1625777 - RNA, 19 nt, Artificial Sequence
  Description of Artificial Sequence: Synthetic oligonucleotide
  Sense strand starting at position 2778 of SEQ ID NO: 1560806
auaaguaagccuggcuuau

SEQ ID NO: 1625778 - RNA, 19 nt, Artificial Sequence
  Description of Artificial Sequence: Synthetic oligonucleotide
  Antisense strand to SEQ ID NO: 1625777
auaagccaggcuuacuuau

SEQ ID NO: 1625779 - RNA, 19 nt, Artificial Sequence
  Description of Artificial Sequence: Synthetic oligonucleotide
  Sense strand starting at position 2780 of SEQ ID NO: 1560806
aaguaagccuggcuuauuu

SEQ ID NO: 1625780 - RNA, 19 nt, Artificial Sequence
  Description of Artificial Sequence: Synthetic oligonucleotide
  Antisense strand to SEQ ID NO: 1625779
aaauaagccaggcuuacuu

SEQ ID NO: 1625781 - RNA, 19 nt, Artificial Sequence
  Description of Artificial Sequence: Synthetic oligonucleotide
  Sense strand starting at position 2857 of SEQ ID NO: 1560806
auuccugagcuugagugau

SEQ ID NO: 1625782 - RNA, 19 nt, Artificial Sequence
  Description of Artificial Sequence: Synthetic oligonucleotide
  Antisense strand to SEQ ID NO: 1625781
aucacucaagcucaggaau

SEQ ID NO: 1625783 - RNA, 19 nt, Artificial Sequence
  Description of Artificial Sequence: Synthetic oligonucleotide
  Sense strand starting at position 2900 of SEQ ID NO: 1560806
gcuacaauugcagguguga

SEQ ID NO: 1625784 - RNA, 19 nt, Artificial Sequence
  Description of Artificial Sequence: Synthetic oligonucleotide
  Antisense strand to SEQ ID NO: 1625783
ucacaccugcaauuguagc

SEQ ID NO: 1625785 - RNA, 19 nt, Artificial Sequence
  Description of Artificial Sequence: Synthetic oligonucleotide
  Sense strand starting at position 2924 of SEQ ID NO: 1560806
cgcacuuggccugacaaca

SEQ ID NO: 1625786 - RNA, 19 nt, Artificial Sequence
  Description of Artificial Sequence: Synthetic oligonucleotide
  Antisense strand to SEQ ID NO: 1625785
uguugucaggccaagugcg

SEQ ID NO: 1625787 - RNA, 19 nt, Artificial Sequence
  Description of Artificial Sequence: Synthetic oligonucleotide
  Sense strand starting at position 3227 of SEQ ID NO: 1560806
ggaagauugcuugacccuu

SEQ ID NO: 1625788 - RNA, 19 nt, Artificial Sequence
  Description of Artificial Sequence: Synthetic oligonucleotide
  Antisense strand to SEQ ID NO: 1625787
aagggucaagcaaucuucc

SEQ ID NO: 1625789 - RNA, 19 nt, Artificial Sequence
  Description of Artificial Sequence: Synthetic oligonucleotide
  Sense strand starting at position 3334 of SEQ ID NO: 1560806
auaauaggguuauacaaag

SEQ ID NO: 1625790 - RNA, 19 nt, Artificial Sequence
  Description of Artificial Sequence: Synthetic oligonucleotide
  Antisense strand to SEQ ID NO: 1625789
cuuuguauaacccuauuau

SEQ ID NO: 1625791 - RNA, 19 nt, Artificial Sequence
  Description of Artificial Sequence: Synthetic oligonucleotide
  Sense strand starting at position 3427 of SEQ ID NO: 1560806
gagccacuauguccaugaa

SEQ ID NO: 1625792 - RNA, 19 nt, Artificial Sequence
  Description of Artificial Sequence: Synthetic oligonucleotide
  Antisense strand to SEQ ID NO: 1625791
uucauggacauaguggcuc

SEQ ID NO: 1625793 - RNA, 19 nt, Artificial Sequence
  Description of Artificial Sequence: Synthetic oligonucleotide
  Sense strand starting at position 3428 of SEQ ID NO: 1560806
agccacuauguccaugaau

SEQ ID NO: 1625794 - RNA, 19 nt, Artificial Sequence
  Description of Artificial Sequence: Synthetic oligonucleotide
  Antisense strand to SEQ ID NO: 1625793
auucauggacauaguggcu

SEQ ID NO: 1625795 - RNA, 19 nt, Artificial Sequence
  Description of Artificial Sequence: Synthetic oligonucleotide
  Sense strand starting at position 3430 of SEQ ID NO: 1560806
ccacuauguccaugaaugg

SEQ ID NO: 1625796 - RNA, 19 nt, Artificial Sequence
  Description of Artificial Sequence: Synthetic oligonucleotide
  Antisense strand to SEQ ID NO: 1625795
ccauucauggacauagugg

SEQ ID NO: 1625797 - RNA, 19 nt, Artificial Sequence
  Description of Artificial Sequence: Synthetic oligonucleotide
  Sense strand starting at position 3461 of SEQ ID NO: 1560806
uccagauaccuguguuuga

SEQ ID NO: 1625798 - RNA, 19 nt, Artificial Sequence
  Description of Artificial Sequence: Synthetic oligonucleotide
  Antisense strand to SEQ ID NO: 1625797
ucaaacacagguaucugga

SEQ ID NO: 1625799 - RNA, 19 nt, Artificial Sequence
  Description of Artificial Sequence: Synthetic oligonucleotide
  Sense strand starting at position 3464 of SEQ ID NO: 1560806
agauaccuguguuugaaau

SEQ ID NO: 1625800 - RNA, 19 nt, Artificial Sequence
  Description of Artificial Sequence: Synthetic oligonucleotide
  Antisense strand to SEQ ID NO: 1625799
auuucaaacacagguaucu

SEQ ID NO: 1625801 - RNA, 19 nt, Artificial Sequence
  Description of Artificial Sequence: Synthetic oligonucleotide
  Sense strand starting at position 3465 of SEQ ID NO: 1560806
gauaccuguguuugaaauu

SEQ ID NO: 1625802 - RNA, 19 nt, Artificial Sequence
  Description of Artificial Sequence: Synthetic oligonucleotide
  Antisense strand to SEQ ID NO: 1625801
aauuucaaacacagguauc

SEQ ID NO: 1625803 - RNA, 19 nt, Artificial Sequence
  Description of Artificial Sequence: Synthetic oligonucleotide
  Sense strand starting at position 3519 of SEQ ID NO: 1560806
gcaauccaucaaugagugu

SEQ ID NO: 1625804 - RNA, 19 nt, Artificial Sequence
  Description of Artificial Sequence: Synthetic oligonucleotide
  Antisense strand to SEQ ID NO: 1625803
acacucauugauggauugc

SEQ ID NO: 1625805 - RNA, 19 nt, Artificial Sequence
  Description of Artificial Sequence: Synthetic oligonucleotide
  Sense strand starting at position 3523 of SEQ ID NO: 1560806
uccaucaaugaguguuaca

SEQ ID NO: 1625806 - RNA, 19 nt, Artificial Sequence
  Description of Artificial Sequence: Synthetic oligonucleotide
  Antisense strand to SEQ ID NO: 1625805
uguaacacucauugaugga

SEQ ID NO: 1625807 - RNA, 19 nt, Artificial Sequence
  Description of Artificial Sequence: Synthetic oligonucleotide
  Sense strand starting at position 3533 of SEQ ID NO: 1560806
aguguuacauccucuacaa

SEQ ID NO: 1625808 - RNA, 19 nt, Artificial Sequence
  Description of Artificial Sequence: Synthetic oligonucleotide
  Antisense strand to SEQ ID NO: 1625807
uuguagaggauguaacacu

SEQ ID NO: 1625809 - RNA, 19 nt, Artificial Sequence
  Description of Artificial Sequence: Synthetic oligonucleotide
  Sense strand starting at position 3535 of SEQ ID NO: 1560806
uguuacauccucuacaagu

SEQ ID NO: 1625810 - RNA, 19 nt, Artificial Sequence
  Description of Artificial Sequence: Synthetic oligonucleotide
  Antisense strand to SEQ ID NO: 1625809
acuuguagaggauguaaca

SEQ ID NO: 1625811 - RNA, 19 nt, Artificial Sequence
  Description of Artificial Sequence: Synthetic oligonucleotide
  Sense strand starting at position 3830 of SEQ ID NO: 1560806
gcuuuauucuuagcaugug

SEQ ID NO: 1625812 - RNA, 19 nt, Artificial Sequence
  Description of Artificial Sequence: Synthetic oligonucleotide
  Antisense strand to SEQ ID NO: 1625811
cacaugcuaagaauaaagc

SEQ ID NO: 1625813 - RNA, 19 nt, Artificial Sequence
  Description of Artificial Sequence: Synthetic oligonucleotide
  Sense strand starting at position 3848 of SEQ ID NO: 1560806
guggcaauucuugauuaau

SEQ ID NO: 1625814 - RNA, 19 nt, Artificial Sequence
  Description of Artificial Sequence: Synthetic oligonucleotide
  Antisense strand to SEQ ID NO: 1625813
auuaaucaagaauugccac

SEQ ID NO: 1625815 - RNA, 19 nt, Artificial Sequence
  Description of Artificial Sequence: Synthetic oligonucleotide
  Sense strand starting at position 3850 of SEQ ID NO: 1560806
ggcaauucuugauuaauug

SEQ ID NO: 1625816 - RNA, 19 nt, Artificial Sequence
  Description of Artificial Sequence: Synthetic oligonucleotide
  Antisense strand to SEQ ID NO: 1625815
caauuaaucaagaauugcc

SEQ ID NO: 1625817 - RNA, 19 nt, Artificial Sequence
  Description of Artificial Sequence: Synthetic oligonucleotide
  Sense strand starting at position 3894 of SEQ ID NO: 1560806
uggugcaaauacuauuuaa

SEQ ID NO: 1625818 - RNA, 19 nt, Artificial Sequence
  Description of Artificial Sequence: Synthetic oligonucleotide
  Antisense strand to SEQ ID NO: 1625817
uuaaauaguauuugcacca

SEQ ID NO: 1625819 - RNA, 19 nt, Artificial Sequence
  Description of Artificial Sequence: Synthetic oligonucleotide
  Sense strand starting at position 3974 of SEQ ID NO: 1560806
aggugauccgcccacacuu

SEQ ID NO: 1625820 - RNA, 19 nt, Artificial Sequence
  Description of Artificial Sequence: Synthetic oligonucleotide
  Antisense strand to SEQ ID NO: 1625819
aagugugggcggaucaccu

SEQ ID NO: 1625821 - RNA, 19 nt, Artificial Sequence
  Description of Artificial Sequence: Synthetic oligonucleotide
  Sense strand starting at position 285 of SEQ ID NO: 1560807
gguacauuguuacagaaau

SEQ ID NO: 1625822 - RNA, 19 nt, Artificial Sequence
  Description of Artificial Sequence: Synthetic oligonucleotide
  Antisense strand to SEQ ID NO: 1625821
auuucuguaacaauguacc

SEQ ID NO: 1625823 - RNA, 19 nt, Artificial Sequence
  Description of Artificial Sequence: Synthetic oligonucleotide
  Sense strand starting at position 302 of SEQ ID NO: 1560807
auaauauacugucugagca

SEQ ID NO: 1625824 - RNA, 19 nt, Artificial Sequence
  Description of Artificial Sequence: Synthetic oligonucleotide
  Antisense strand to SEQ ID NO: 1625823
ugcucagacaguauauuau

SEQ ID NO: 1625825 - RNA, 19 nt, Artificial Sequence
  Description of Artificial Sequence: Synthetic oligonucleotide
  Sense strand starting at position 522 of SEQ ID NO: 1560807
gaguucuagucugcgguga

SEQ ID NO: 1625826 - RNA, 19 nt, Artificial Sequence
  Description of Artificial Sequence: Synthetic oligonucleotide
  Antisense strand to SEQ ID NO: 1625825
ucaccgcagacuagaacuc

SEQ ID NO: 1625827 - RNA, 19 nt, Artificial Sequence
  Description of Artificial Sequence: Synthetic oligonucleotide
  Sense strand starting at position 526 of SEQ ID NO: 1560807
ucuagucugcggugagcua

SEQ ID NO: 1625828 - RNA, 19 nt, Artificial Sequence
  Description of Artificial Sequence: Synthetic oligonucleotide
  Antisense strand to SEQ ID NO: 1625827
uagcucaccgcagacuaga

SEQ ID NO: 1625829 - RNA, 19 nt, Artificial Sequence
  Description of Artificial Sequence: Synthetic oligonucleotide
  Sense strand starting at position 539 of SEQ ID NO: 1560807
gagcuaugaccaugucaca

SEQ ID NO: 1625830 - RNA, 19 nt, Artificial Sequence
  Description of Artificial Sequence: Synthetic oligonucleotide
  Antisense strand to SEQ ID NO: 1625829
ugugacauggucauagcuc

SEQ ID NO: 1625831 - RNA, 19 nt, Artificial Sequence
  Description of Artificial Sequence: Synthetic oligonucleotide
  Sense strand starting at position 621 of SEQ ID NO: 1560807
aaauaugcugaaugugauu

SEQ ID NO: 1625832 - RNA, 19 nt, Artificial Sequence
  Description of Artificial Sequence: Synthetic oligonucleotide
  Antisense strand to SEQ ID NO: 1625831
aaucacauucagcauauuu

SEQ ID NO: 1625833 - RNA, 19 nt, Artificial Sequence
  Description of Artificial Sequence: Synthetic oligonucleotide
  Sense strand starting at position 626 of SEQ ID NO: 1560807
ugcugaaugugauugggau

SEQ ID NO: 1625834 - RNA, 19 nt, Artificial Sequence
  Description of Artificial Sequence: Synthetic oligonucleotide
  Antisense strand to SEQ ID NO: 1625833
aucccaaucacauucagca

SEQ ID NO: 1625835 - RNA, 19 nt, Artificial Sequence
  Description of Artificial Sequence: Synthetic oligonucleotide
  Sense strand starting at position 627 of SEQ ID NO: 1560807
gcugaaugugauugggaug

SEQ ID NO: 1625836 - RNA, 19 nt, Artificial Sequence
  Description of Artificial Sequence: Synthetic oligonucleotide
  Antisense strand to SEQ ID NO: 1625835
caucccaaucacauucagc

SEQ ID NO: 1625837 - RNA, 19 nt, Artificial Sequence
  Description of Artificial Sequence: Synthetic oligonucleotide
  Sense strand starting at position 628 of SEQ ID NO: 1560807
cugaaugugauugggauga

SEQ ID NO: 1625838 - RNA, 19 nt, Artificial Sequence
  Description of Artificial Sequence: Synthetic oligonucleotide
  Antisense strand to SEQ ID NO: 1625837
ucaucccaaucacauucag

SEQ ID NO: 1625839 - RNA, 19 nt, Artificial Sequence
  Description of Artificial Sequence: Synthetic oligonucleotide
  Sense strand starting at position 630 of SEQ ID NO: 1560807
gaaugugauugggaugauu

SEQ ID NO: 1625840 - RNA, 19 nt, Artificial Sequence
  Description of Artificial Sequence: Synthetic oligonucleotide
  Antisense strand to SEQ ID NO: 1625839
aaucaucccaaucacauuc

SEQ ID NO: 1625841 - RNA, 19 nt, Artificial Sequence
  Description of Artificial Sequence: Synthetic oligonucleotide
  Sense strand starting at position 632 of SEQ ID NO: 1560807
augugauugggaugauuac

SEQ ID NO: 1625842 - RNA, 19 nt, Artificial Sequence
  Description of Artificial Sequence: Synthetic oligonucleotide
  Antisense strand to SEQ ID NO: 1625841
guaaucaucccaaucacau

SEQ ID NO: 1625843 - RNA, 19 nt, Artificial Sequence
  Description of Artificial Sequence: Synthetic oligonucleotide
  Sense strand starting at position 659 of SEQ ID NO: 1560807
uccacaaguccaugaggga

SEQ ID NO: 1625844 - RNA, 19 nt, Artificial Sequence
  Description of Artificial Sequence: Synthetic oligonucleotide
  Antisense strand to SEQ ID NO: 1625843
ucccucauggacuugugga

SEQ ID NO: 1625845 - RNA, 19 nt, Artificial Sequence
  Description of Artificial Sequence: Synthetic oligonucleotide
  Sense strand starting at position 741 of SEQ ID NO: 1560807
gacacuuagccuuggacau

SEQ ID NO: 1625846 - RNA, 19 nt, Artificial Sequence
  Description of Artificial Sequence: Synthetic oligonucleotide
  Antisense strand to SEQ ID NO: 1625845
auguccaaggcuaaguguc

SEQ ID NO: 1625847 - RNA, 19 nt, Artificial Sequence
  Description of Artificial Sequence: Synthetic oligonucleotide
  Sense strand starting at position 742 of SEQ ID NO: 1560807
acacuuagccuuggacaua

SEQ ID NO: 1625848 - RNA, 19 nt, Artificial Sequence
  Description of Artificial Sequence: Synthetic oligonucleotide
  Antisense strand to SEQ ID NO: 1625847
uauguccaaggcuaagugu

SEQ ID NO: 1625849 - RNA, 19 nt, Artificial Sequence
  Description of Artificial Sequence: Synthetic oligonucleotide
  Sense strand starting at position 802 of SEQ ID NO: 1560807
uuauguuacguguauucua

SEQ ID NO: 1625850 - RNA, 19 nt, Artificial Sequence
  Description of Artificial Sequence: Synthetic oligonucleotide
  Antisense strand to SEQ ID NO: 1625849
uagaauacacguaacauaa

SEQ ID NO: 1625851 - RNA, 19 nt, Artificial Sequence
  Description of Artificial Sequence: Synthetic oligonucleotide
  Sense strand starting at position 807 of SEQ ID NO: 1560807
uuacguguauucuaccuca

SEQ ID NO: 1625852 - RNA, 19 nt, Artificial Sequence
  Description of Artificial Sequence: Synthetic oligonucleotide
  Antisense strand to SEQ ID NO: 1625851
ugagguagaauacacguaa

SEQ ID NO: 1625853 - RNA, 19 nt, Artificial Sequence
  Description of Artificial Sequence: Synthetic oligonucleotide
  Sense strand starting at position 810 of SEQ ID NO: 1560807
cguguauucuaccucaauu

SEQ ID NO: 1625854 - RNA, 19 nt, Artificial Sequence
  Description of Artificial Sequence: Synthetic oligonucleotide
  Antisense strand to SEQ ID NO: 1625853
aauugagguagaauacacg

SEQ ID NO: 1625855 - RNA, 19 nt, Artificial Sequence
  Description of Artificial Sequence: Synthetic oligonucleotide
  Sense strand starting at position 863 of SEQ ID NO: 1560807
ugggcaauggcuggauauu

SEQ ID NO: 1625856 - RNA, 19 nt, Artificial Sequence
  Description of Artificial Sequence: Synthetic oligonucleotide
  Antisense strand to SEQ ID NO: 1625855
aauauccagccauugccca

SEQ ID NO: 1625857 - RNA, 19 nt, Artificial Sequence
  Description of Artificial Sequence: Synthetic oligonucleotide
  Sense strand starting at position 872 of SEQ ID NO: 1560807
gcuggauauuuggccaguu

SEQ ID NO: 1625858 - RNA, 19 nt, Artificial Sequence
  Description of Artificial Sequence: Synthetic oligonucleotide
  Antisense strand to SEQ ID NO: 1625857
aacuggccaaauauccagc

SEQ ID NO: 1625859 - RNA, 19 nt, Artificial Sequence
  Description of Artificial Sequence: Synthetic oligonucleotide
  Sense strand starting at position 898 of SEQ ID NO: 1560807
uuggcaauugaaugccaaa

SEQ ID NO: 1625860 - RNA, 19 nt, Artificial Sequence
  Description of Artificial Sequence: Synthetic oligonucleotide
  Antisense strand to SEQ ID NO: 1625859
uuuggcauucaauugccaa

SEQ ID NO: 1625861 - RNA, 19 nt, Artificial Sequence
  Description of Artificial Sequence: Synthetic oligonucleotide
  Sense strand starting at position 2015 of SEQ ID NO: 1560807
ugccaaucaucauugauug

SEQ ID NO: 1625862 - RNA, 19 nt, Artificial Sequence
  Description of Artificial Sequence: Synthetic oligonucleotide
  Antisense strand to SEQ ID NO: 1625861
caaucaaugaugauuggca

SEQ ID NO: 1625863 - RNA, 19 nt, Artificial Sequence
  Description of Artificial Sequence: Synthetic oligonucleotide
  Sense strand starting at position 2033 of SEQ ID NO: 1560807
gguaguggcuuccugggau

SEQ ID NO: 1625864 - RNA, 19 nt, Artificial Sequence
  Description of Artificial Sequence: Synthetic oligonucleotide
  Antisense strand to SEQ ID NO: 1625863
aucccaggaagccacuacc

SEQ ID NO: 1625865 - RNA, 19 nt, Artificial Sequence
  Description of Artificial Sequence: Synthetic oligonucleotide
  Sense strand starting at position 2047 of SEQ ID NO: 1560807
gggauggugucuugagaag

SEQ ID NO: 1625866 - RNA, 19 nt, Artificial Sequence
  Description of Artificial Sequence: Synthetic oligonucleotide
  Antisense strand to SEQ ID NO: 1625865
cuucucaagacaccauccc

SEQ ID NO: 1625867 - RNA, 19 nt, Artificial Sequence
  Description of Artificial Sequence: Synthetic oligonucleotide
  Sense strand starting at position 2053 of SEQ ID NO: 1560807
gugucuugagaagaguaau

SEQ ID NO: 1625868 - RNA, 19 nt, Artificial Sequence
  Description of Artificial Sequence: Synthetic oligonucleotide
  Antisense strand to SEQ ID NO: 1625867
auuacucuucucaagacac

SEQ ID NO: 1625869 - RNA, 19 nt, Artificial Sequence
  Description of Artificial Sequence: Synthetic oligonucleotide
  Sense strand starting at position 2110 of SEQ ID NO: 1560807
cuuaaucaguuagugucua

SEQ ID NO: 1625870 - RNA, 19 nt, Artificial Sequence
  Description of Artificial Sequence: Synthetic oligonucleotide
  Antisense strand to SEQ ID NO: 1625869
uagacacuaacugauuaag

SEQ ID NO: 1625871 - RNA, 19 nt, Artificial Sequence
  Description of Artificial Sequence: Synthetic oligonucleotide
  Sense strand starting at position 2111 of SEQ ID NO: 1560807
uuaaucaguuagugucuau

SEQ ID NO: 1625872 - RNA, 19 nt, Artificial Sequence
  Description of Artificial Sequence: Synthetic oligonucleotide
  Antisense strand to SEQ ID NO: 1625871
auagacacuaacugauuaa

SEQ ID NO: 1625873 - RNA, 19 nt, Artificial Sequence
  Description of Artificial Sequence: Synthetic oligonucleotide
  Sense strand starting at position 2114 of SEQ ID NO: 1560807
aucaguuagugucuaucca

SEQ ID NO: 1625874 - RNA, 19 nt, Artificial Sequence
  Description of Artificial Sequence: Synthetic oligonucleotide
  Antisense strand to SEQ ID NO: 1625873
uggauagacacuaacugau

SEQ ID NO: 1625875 - RNA, 19 nt, Artificial Sequence
  Description of Artificial Sequence: Synthetic oligonucleotide
  Sense strand starting at position 2115 of SEQ ID NO: 1560807
ucaguuagugucuauccaa

SEQ ID NO: 1625876 - RNA, 19 nt, Artificial Sequence
  Description of Artificial Sequence: Synthetic oligonucleotide
  Antisense strand to SEQ ID NO: 1625875
uuggauagacacuaacuga

SEQ ID NO: 1625877 - RNA, 19 nt, Artificial Sequence
  Description of Artificial Sequence: Synthetic oligonucleotide
  Sense strand starting at position 2659 of SEQ ID NO: 1560807
gcaacaagcuaaguaagaa

SEQ ID NO: 1625878 - RNA, 19 nt, Artificial Sequence
  Description of Artificial Sequence: Synthetic oligonucleotide
  Antisense strand to SEQ ID NO: 1625877
uucuuacuuagcuuguugc

SEQ ID NO: 1625879 - RNA, 19 nt, Artificial Sequence
  Description of Artificial Sequence: Synthetic oligonucleotide
  Sense strand starting at position 2689 of SEQ ID NO: 1560807
gggcuugcuugggucuaaa

SEQ ID NO: 1625880 - RNA, 19 nt, Artificial Sequence
  Description of Artificial Sequence: Synthetic oligonucleotide
  Antisense strand to SEQ ID NO: 1625879
uuuagacccaagcaagccc

SEQ ID NO: 1625881 - RNA, 19 nt, Artificial Sequence
  Description of Artificial Sequence: Synthetic oligonucleotide
  Sense strand starting at position 2700 of SEQ ID NO: 1560807
ggucuaaaugcguggauga

SEQ ID NO: 1625882 - RNA, 19 nt, Artificial Sequence
  Description of Artificial Sequence: Synthetic oligonucleotide
  Antisense strand to SEQ ID NO: 1625881
ucauccacgcauuuagacc

SEQ ID NO: 1625883 - RNA, 19 nt, Artificial Sequence
  Description of Artificial Sequence: Synthetic oligonucleotide
  Sense strand starting at position 2702 of SEQ ID NO: 1560807
ucuaaaugcguggaugaga

SEQ ID NO: 1625884 - RNA, 19 nt, Artificial Sequence
  Description of Artificial Sequence: Synthetic oligonucleotide
  Antisense strand to SEQ ID NO: 1625883
ucucauccacgcauuuaga

SEQ ID NO: 1625885 - RNA, 19 nt, Artificial Sequence
  Description of Artificial Sequence: Synthetic oligonucleotide
  Sense strand starting at position 2713 of SEQ ID NO: 1560807
ggaugagaaucugaagcaa

SEQ ID NO: 1625886 - RNA, 19 nt, Artificial Sequence
  Description of Artificial Sequence: Synthetic oligonucleotide
  Antisense strand to SEQ ID NO: 1625885
uugcuucagauucucaucc

SEQ ID NO: 1625887 - RNA, 19 nt, Artificial Sequence
  Description of Artificial Sequence: Synthetic oligonucleotide
  Sense strand starting at position 2732 of SEQ ID NO: 1560807
agagaaaucugugaugagc

SEQ ID NO: 1625888 - RNA, 19 nt, Artificial Sequence
  Description of Artificial Sequence: Synthetic oligonucleotide
  Antisense strand to SEQ ID NO: 1625887
gcucaucacagauuucucu

SEQ ID NO: 1625889 - RNA, 19 nt, Artificial Sequence
  Description of Artificial Sequence: Synthetic oligonucleotide
  Sense strand starting at position 2734 of SEQ ID NO: 1560807
agaaaucugugaugagcca

SEQ ID NO: 1625890 - RNA, 19 nt, Artificial Sequence
  Description of Artificial Sequence: Synthetic oligonucleotide
  Antisense strand to SEQ ID NO: 1625889
uggcucaucacagauuucu

SEQ ID NO: 1625891 - RNA, 19 nt, Artificial Sequence
  Description of Artificial Sequence: Synthetic oligonucleotide
  Sense strand starting at position 2800 of SEQ ID NO: 1560807
accaaaugagcauguuuau

SEQ ID NO: 1625892 - RNA, 19 nt, Artificial Sequence
  Description of Artificial Sequence: Synthetic oligonucleotide
  Antisense strand to SEQ ID NO: 1625891
auaaacaugcucauuuggu

SEQ ID NO: 1625893 - RNA, 19 nt, Artificial Sequence
  Description of Artificial Sequence: Synthetic oligonucleotide
  Sense strand starting at position 2807 of SEQ ID NO: 1560807
gagcauguuuaucacagca

SEQ ID NO: 1625894 - RNA, 19 nt, Artificial Sequence
  Description of Artificial Sequence: Synthetic oligonucleotide
  Antisense strand to SEQ ID NO: 1625893
ugcugugauaaacaugcuc

SEQ ID NO: 1625895 - RNA, 19 nt, Artificial Sequence
  Description of Artificial Sequence: Synthetic oligonucleotide
  Sense strand starting at position 3512 of SEQ ID NO: 1560807
gcaagaccuugucuuagaa

SEQ ID NO: 1625896 - RNA, 19 nt, Artificial Sequence
  Description of Artificial Sequence: Synthetic oligonucleotide
  Antisense strand to SEQ ID NO: 1625895
uucuaagacaaggucuugc

SEQ ID NO: 1625897 - RNA, 19 nt, Artificial Sequence
  Description of Artificial Sequence: Synthetic oligonucleotide
  Sense strand starting at position 3642 of SEQ ID NO: 1560807
ggaagcuaaucacugggua

SEQ ID NO: 1625898 - RNA, 19 nt, Artificial Sequence
  Description of Artificial Sequence: Synthetic oligonucleotide
  Antisense strand to SEQ ID NO: 1625897
uacccagugauuagcuucc

SEQ ID NO: 1625899 - RNA, 19 nt, Artificial Sequence
  Description of Artificial Sequence: Synthetic oligonucleotide
  Sense strand starting at position 3654 of SEQ ID NO: 1560807
cuggguacgcaggaauaua

SEQ ID NO: 1625900 - RNA, 19 nt, Artificial Sequence
  Description of Artificial Sequence: Synthetic oligonucleotide
  Antisense strand to SEQ ID NO: 1625899
uauauuccugcguacccag

SEQ ID NO: 1625901 - RNA, 19 nt, Artificial Sequence
  Description of Artificial Sequence: Synthetic oligonucleotide
  Sense strand starting at position 2767 of SEQ ID NO: 1560808
agccuaacaguagguaaua

SEQ ID NO: 1625902 - RNA, 19 nt, Artificial Sequence
  Description of Artificial Sequence: Synthetic oligonucleotide
  Antisense strand to SEQ ID NO: 1625901
uauuaccuacuguuaggcu

SEQ ID NO: 1625903 - RNA, 19 nt, Artificial Sequence
  Description of Artificial Sequence: Synthetic oligonucleotide
  Sense strand starting at position 2768 of SEQ ID NO: 1560808
gccuaacaguagguaauaa

SEQ ID NO: 1625904 - RNA, 19 nt, Artificial Sequence
  Description of Artificial Sequence: Synthetic oligonucleotide
  Antisense strand to SEQ ID NO: 1625903
uuauuaccuacuguuaggc

SEQ ID NO: 1625905 - RNA, 19 nt, Artificial Sequence
  Description of Artificial Sequence: Synthetic oligonucleotide
  Sense strand starting at position 3478 of SEQ ID NO: 1560808
gaaagugaggcauagccau

SEQ ID NO: 1625906 - RNA, 19 nt, Artificial Sequence
  Description of Artificial Sequence: Synthetic oligonucleotide
  Antisense strand to SEQ ID NO: 1625905
auggcuaugccucacuuuc

SEQ ID NO: 1625907 - RNA, 19 nt, Artificial Sequence
  Description of Artificial Sequence: Synthetic oligonucleotide
  Sense strand starting at position 3857 of SEQ ID NO: 1560808
ucugcuuagcacuguaaua

SEQ ID NO: 1625908 - RNA, 19 nt, Artificial Sequence
  Description of Artificial Sequence: Synthetic oligonucleotide
  Antisense strand to SEQ ID NO: 1625907
uauuacagugcuaagcaga

SEQ ID NO: 1625909 - RNA, 19 nt, Artificial Sequence
  Description of Artificial Sequence: Synthetic oligonucleotide
  Sense strand starting at position 3859 of SEQ ID NO: 1560808
ugcuuagcacuguaauaaa

SEQ ID NO: 1625910 - RNA, 19 nt, Artificial Sequence
  Description of Artificial Sequence: Synthetic oligonucleotide
  Antisense strand to SEQ ID NO: 1625909
uuuauuacagugcuaagca

SEQ ID NO: 1625911 - RNA, 19 nt, Artificial Sequence
  Description of Artificial Sequence: Synthetic oligonucleotide
  Sense strand starting at position 6 of SEQ ID NO: 1560809
augcuaauccaccagguua

SEQ ID NO: 1625912 - RNA, 19 nt, Artificial Sequence
  Description of Artificial Sequence: Synthetic oligonucleotide
  Antisense strand to SEQ ID NO: 1625911
uaaccugguggauuagcau

SEQ ID NO: 1625913 - RNA, 19 nt, Artificial Sequence
  Description of Artificial Sequence: Synthetic oligonucleotide
  Sense strand starting at position 301 of SEQ ID NO: 1560809
guaaguuuaccugguaaau

SEQ ID NO: 1625914 - RNA, 19 nt, Artificial Sequence
  Description of Artificial Sequence: Synthetic oligonucleotide
  Antisense strand to SEQ ID NO: 1625913
auuuaccagguaaacuuac

SEQ ID NO: 1625915 - RNA, 19 nt, Artificial Sequence
  Description of Artificial Sequence: Synthetic oligonucleotide
  Sense strand starting at position 383 of SEQ ID NO: 1560809
gggaacugcuuugcauaua

SEQ ID NO: 1625916 - RNA, 19 nt, Artificial Sequence
  Description of Artificial Sequence: Synthetic oligonucleotide
  Antisense strand to SEQ ID NO: 1625915
uauaugcaaagcaguuccc

SEQ ID NO: 1625917 - RNA, 19 nt, Artificial Sequence
  Description of Artificial Sequence: Synthetic oligonucleotide
  Sense strand starting at position 465 of SEQ ID NO: 1560809
ucucuauucccagaggcaa

SEQ ID NO: 1625918 - RNA, 19 nt, Artificial Sequence
  Description of Artificial Sequence: Synthetic oligonucleotide
  Antisense strand to SEQ ID NO: 1625917
uugccucugggaauagaga

SEQ ID NO: 1625919 - RNA, 19 nt, Artificial Sequence
  Description of Artificial Sequence: Synthetic oligonucleotide
  Sense strand starting at position 511 of SEQ ID NO: 1560809
ugagucauccuuugaucau

SEQ ID NO: 1625920 - RNA, 19 nt, Artificial Sequence
  Description of Artificial Sequence: Synthetic oligonucleotide
  Antisense strand to SEQ ID NO: 1625919
augaucaaaggaugacuca

SEQ ID NO: 1625921 - RNA, 19 nt, Artificial Sequence
  Description of Artificial Sequence: Synthetic oligonucleotide
  Sense strand starting at position 518 of SEQ ID NO: 1560809
uccuuugaucaugagaguu

SEQ ID NO: 1625922 - RNA, 19 nt, Artificial Sequence
  Description of Artificial Sequence: Synthetic oligonucleotide
  Antisense strand to SEQ ID NO: 1625921
aacucucaugaucaaagga

SEQ ID NO: 1625923 - RNA, 19 nt, Artificial Sequence
  Description of Artificial Sequence: Synthetic oligonucleotide
  Sense strand starting at position 528 of SEQ ID NO: 1560809
augagaguugaagaguguu

SEQ ID NO: 1625924 - RNA, 19 nt, Artificial Sequence
  Description of Artificial Sequence: Synthetic oligonucleotide
  Antisense strand to SEQ ID NO: 1625923
aacacucuucaacucucau

SEQ ID NO: 1625925 - RNA, 19 nt, Artificial Sequence
  Description of Artificial Sequence: Synthetic oligonucleotide
  Sense strand starting at position 531 of SEQ ID NO: 1560809
agaguugaagaguguuuag

SEQ ID NO: 1625926 - RNA, 19 nt, Artificial Sequence
  Description of Artificial Sequence: Synthetic oligonucleotide
  Antisense strand to SEQ ID NO: 1625925
cuaaacacucuucaacucu

SEQ ID NO: 1625927 - RNA, 19 nt, Artificial Sequence
  Description of Artificial Sequence: Synthetic oligonucleotide
  Sense strand starting at position 663 of SEQ ID NO: 1560809
gucauauuuguaggcagca

SEQ ID NO: 1625928 - RNA, 19 nt, Artificial Sequence
  Description of Artificial Sequence: Synthetic oligonucleotide
  Antisense strand to SEQ ID NO: 1625927
ugcugccuacaaauaugac

SEQ ID NO: 1625929 - RNA, 19 nt, Artificial Sequence
  Description of Artificial Sequence: Synthetic oligonucleotide
  Sense strand starting at position 884 of SEQ ID NO: 1560809
ggucaucucugacucuaag

SEQ ID NO: 1625930 - RNA, 19 nt, Artificial Sequence
  Description of Artificial Sequence: Synthetic oligonucleotide
  Antisense strand to SEQ ID NO: 1625929
cuuagagucagagaugacc

SEQ ID NO: 1625931 - RNA, 19 nt, Artificial Sequence
  Description of Artificial Sequence: Synthetic oligonucleotide
  Sense strand starting at position 904 of SEQ ID NO: 1560809
agaacaguguaagcucuau

SEQ ID NO: 1625932 - RNA, 19 nt, Artificial Sequence
  Description of Artificial Sequence: Synthetic oligonucleotide
  Antisense strand to SEQ ID NO: 1625931
auagagcuuacacuguucu

SEQ ID NO: 1625933 - RNA, 19 nt, Artificial Sequence
  Description of Artificial Sequence: Synthetic oligonucleotide
  Sense strand starting at position 908 of SEQ ID NO: 1560809
caguguaagcucuauaaag

SEQ ID NO: 1625934 - RNA, 19 nt, Artificial Sequence
  Description of Artificial Sequence: Synthetic oligonucleotide
  Antisense strand to SEQ ID NO: 1625933
cuuuauagagcuuacacug

SEQ ID NO: 1625935 - RNA, 19 nt, Artificial Sequence
  Description of Artificial Sequence: Synthetic oligonucleotide
  Sense strand starting at position 910 of SEQ ID NO: 1560809
guguaagcucuauaaagua

SEQ ID NO: 1625936 - RNA, 19 nt, Artificial Sequence
  Description of Artificial Sequence: Synthetic oligonucleotide
  Antisense strand to SEQ ID NO: 1625935
uacuuuauagagcuuacac

SEQ ID NO: 1625937 - RNA, 19 nt, Artificial Sequence
  Description of Artificial Sequence: Synthetic oligonucleotide
  Sense strand starting at position 918 of SEQ ID NO: 1560809
ucuauaaaguaguugagga

SEQ ID NO: 1625938 - RNA, 19 nt, Artificial Sequence
  Description of Artificial Sequence: Synthetic oligonucleotide
  Antisense strand to SEQ ID NO: 1625937
uccucaacuacuuuauaga

SEQ ID NO: 1625939 - RNA, 19 nt, Artificial Sequence
  Description of Artificial Sequence: Synthetic oligonucleotide
  Sense strand starting at position 919 of SEQ ID NO: 1560809
cuauaaaguaguugaggaa

SEQ ID NO: 1625940 - RNA, 19 nt, Artificial Sequence
  Description of Artificial Sequence: Synthetic oligonucleotide
  Antisense strand to SEQ ID NO: 1625939
uuccucaacuacuuuauag

SEQ ID NO: 1625941 - RNA, 19 nt, Artificial Sequence
  Description of Artificial Sequence: Synthetic oligonucleotide
  Sense strand starting at position 1073 of SEQ ID NO: 1560809
auugcuuuccucugaagaa

SEQ ID NO: 1625942 - RNA, 19 nt, Artificial Sequence
  Description of Artificial Sequence: Synthetic oligonucleotide
  Antisense strand to SEQ ID NO: 1625941
uucuucagaggaaagcaau

SEQ ID NO: 1625943 - RNA, 19 nt, Artificial Sequence
  Description of Artificial Sequence: Synthetic oligonucleotide
  Sense strand starting at position 1077 of SEQ ID NO: 1560809
cuuuccucugaagaauguu

SEQ ID NO: 1625944 - RNA, 19 nt, Artificial Sequence
  Description of Artificial Sequence: Synthetic oligonucleotide
  Antisense strand to SEQ ID NO: 1625943
aacauucuucagaggaaag

SEQ ID NO: 1625945 - RNA, 19 nt, Artificial Sequence
  Description of Artificial Sequence: Synthetic oligonucleotide
  Sense strand starting at position 1113 of SEQ ID NO: 1560809
guguuuauuccucagacug

SEQ ID NO: 1625946 - RNA, 19 nt, Artificial Sequence
  Description of Artificial Sequence: Synthetic oligonucleotide
  Antisense strand to SEQ ID NO: 1625945
cagucugaggaauaaacac

SEQ ID NO: 1625947 - RNA, 19 nt, Artificial Sequence
  Description of Artificial Sequence: Synthetic oligonucleotide
  Sense strand starting at position 1477 of SEQ ID NO: 1560809
gggauuuccauguguguac

SEQ ID NO: 1625948 - RNA, 19 nt, Artificial Sequence
  Description of Artificial Sequence: Synthetic oligonucleotide
  Antisense strand to SEQ ID NO: 1625947
guacacacauggaaauccc

SEQ ID NO: 1625949 - RNA, 19 nt, Artificial Sequence
  Description of Artificial Sequence: Synthetic oligonucleotide
  Sense strand starting at position 1784 of SEQ ID NO: 1560809
aacagaugucuacgaagga

SEQ ID NO: 1625950 - RNA, 19 nt, Artificial Sequence
  Description of Artificial Sequence: Synthetic oligonucleotide
  Antisense strand to SEQ ID NO: 1625949
uccuucguagacaucuguu

SEQ ID NO: 1625951 - RNA, 19 nt, Artificial Sequence
  Description of Artificial Sequence: Synthetic oligonucleotide
  Sense strand starting at position 1980 of SEQ ID NO: 1560809
uguauuguuccaugauuuc

SEQ ID NO: 1625952 - RNA, 19 nt, Artificial Sequence
  Description of Artificial Sequence: Synthetic oligonucleotide
  Antisense strand to SEQ ID NO: 1625951
gaaaucauggaacaauaca

SEQ ID NO: 1625953 - RNA, 19 nt, Artificial Sequence
  Description of Artificial Sequence: Synthetic oligonucleotide
  Sense strand starting at position 2002 of SEQ ID NO: 1560809
uugugaugugacuaccaga

SEQ ID NO: 1625954 - RNA, 19 nt, Artificial Sequence
  Description of Artificial Sequence: Synthetic oligonucleotide
  Antisense strand to SEQ ID NO: 1625953
ucugguagucacaucacaa

SEQ ID NO: 1625955 - RNA, 19 nt, Artificial Sequence
  Description of Artificial Sequence: Synthetic oligonucleotide
  Sense strand starting at position 2103 of SEQ ID NO: 1560809
uuccacagucaagaaguua

SEQ ID NO: 1625956 - RNA, 19 nt, Artificial Sequence
  Description of Artificial Sequence: Synthetic oligonucleotide
  Antisense strand to SEQ ID NO: 1625955
uaacuucuugacuguggaa

SEQ ID NO: 1625957 - RNA, 19 nt, Artificial Sequence
  Description of Artificial Sequence: Synthetic oligonucleotide
  Sense strand starting at position 2264 of SEQ ID NO: 1560809
ggguuuaguguauagguua

SEQ ID NO: 1625958 - RNA, 19 nt, Artificial Sequence
  Description of Artificial Sequence: Synthetic oligonucleotide
  Antisense strand to SEQ ID NO: 1625957
uaaccuauacacuaaaccc

SEQ ID NO: 1625959 - RNA, 19 nt, Artificial Sequence
  Description of Artificial Sequence: Synthetic oligonucleotide
  Sense strand starting at position 2298 of SEQ ID NO: 1560809
auaaccauaguacguaaua

SEQ ID NO: 1625960 - RNA, 19 nt, Artificial Sequence
  Description of Artificial Sequence: Synthetic oligonucleotide
  Antisense strand to SEQ ID NO: 1625959
uauuacguacuaugguuau

SEQ ID NO: 1625961 - RNA, 19 nt, Artificial Sequence
  Description of Artificial Sequence: Synthetic oligonucleotide
  Sense strand starting at position 2684 of SEQ ID NO: 1560809
uuguguucacgugcacuca

SEQ ID NO: 1625962 - RNA, 19 nt, Artificial Sequence
  Description of Artificial Sequence: Synthetic oligonucleotide
  Antisense strand to SEQ ID NO: 1625961
ugagugcacgugaacacaa

SEQ ID NO: 1625963 - RNA, 19 nt, Artificial Sequence
  Description of Artificial Sequence: Synthetic oligonucleotide
  Sense strand starting at position 2935 of SEQ ID NO: 1560809
ugcugugaugaauauaagu

SEQ ID NO: 1625964 - RNA, 19 nt, Artificial Sequence
  Description of Artificial Sequence: Synthetic oligonucleotide
  Antisense strand to SEQ ID NO: 1625963
acuuauauucaucacagca

SEQ ID NO: 1625965 - RNA, 19 nt, Artificial Sequence
  Description of Artificial Sequence: Synthetic oligonucleotide
  Sense strand starting at position 2937 of SEQ ID NO: 1560809
cugugaugaauauaagugu

SEQ ID NO: 1625966 - RNA, 19 nt, Artificial Sequence
  Description of Artificial Sequence: Synthetic oligonucleotide
  Antisense strand to SEQ ID NO: 1625965
acacuuauauucaucacag

SEQ ID NO: 1625967 - RNA, 19 nt, Artificial Sequence
  Description of Artificial Sequence: Synthetic oligonucleotide
  Sense strand starting at position 2943 of SEQ ID NO: 1560809
ugaauauaaguguggaugu

SEQ ID NO: 1625968 - RNA, 19 nt, Artificial Sequence
  Description of Artificial Sequence: Synthetic oligonucleotide
  Antisense strand to SEQ ID NO: 1625967
acauccacacuuauauuca

SEQ ID NO: 1625969 - RNA, 19 nt, Artificial Sequence
  Description of Artificial Sequence: Synthetic oligonucleotide
  Sense strand starting at position 3053 of SEQ ID NO: 1560809
agaaauugccaagggucua

SEQ ID NO: 1625970 - RNA, 19 nt, Artificial Sequence
  Description of Artificial Sequence: Synthetic oligonucleotide
  Antisense strand to SEQ ID NO: 1625969
uagacccuuggcaauuucu

SEQ ID NO: 1625971 - RNA, 19 nt, Artificial Sequence
  Description of Artificial Sequence: Synthetic oligonucleotide
  Sense strand starting at position 3058 of SEQ ID NO: 1560809
uugccaagggucuaauauc

SEQ ID NO: 1625972 - RNA, 19 nt, Artificial Sequence
  Description of Artificial Sequence: Synthetic oligonucleotide
  Antisense strand to SEQ ID NO: 1625971
gauauuagacccuuggcaa

SEQ ID NO: 1625973 - RNA, 19 nt, Artificial Sequence
  Description of Artificial Sequence: Synthetic oligonucleotide
  Sense strand starting at position 3205 of SEQ ID NO: 1560809
gcucaacgucccuaaucau

SEQ ID NO: 1625974 - RNA, 19 nt, Artificial Sequence
  Description of Artificial Sequence: Synthetic oligonucleotide
  Antisense strand to SEQ ID NO: 1625973
augauuagggacguugagc

SEQ ID NO: 1625975 - RNA, 19 nt, Artificial Sequence
  Description of Artificial Sequence: Synthetic oligonucleotide
  Sense strand starting at position 3416 of SEQ ID NO: 1560809
acaugauguguugaaguac

SEQ ID NO: 1625976 - RNA, 19 nt, Artificial Sequence
  Description of Artificial Sequence: Synthetic oligonucleotide
  Antisense strand to SEQ ID NO: 1625975
guacuucaacacaucaugu

SEQ ID NO: 1625977 - RNA, 19 nt, Artificial Sequence
  Description of Artificial Sequence: Synthetic oligonucleotide
  Sense strand starting at position 3431 of SEQ ID NO: 1560809
guacaaauacauuguggaa

SEQ ID NO: 1625978 - RNA, 19 nt, Artificial Sequence
  Description of Artificial Sequence: Synthetic oligonucleotide
  Antisense strand to SEQ ID NO: 1625977
uuccacaauguauuuguac

SEQ ID NO: 1625979 - RNA, 19 nt, Artificial Sequence
  Description of Artificial Sequence: Synthetic oligonucleotide
  Sense strand starting at position 3541 of SEQ ID NO: 1560809
uugagaauacaguguauca

SEQ ID NO: 1625980 - RNA, 19 nt, Artificial Sequence
  Description of Artificial Sequence: Synthetic oligonucleotide
  Antisense strand to SEQ ID NO: 1625979
ugauacacuguauucucaa

SEQ ID NO: 1625981 - RNA, 19 nt, Artificial Sequence
  Description of Artificial Sequence: Synthetic oligonucleotide
  Sense strand starting at position 3630 of SEQ ID NO: 1560809
gugucuauuggccaacauc

SEQ ID NO: 1625982 - RNA, 19 nt, Artificial Sequence
  Description of Artificial Sequence: Synthetic oligonucleotide
  Antisense strand to SEQ ID NO: 1625981
gauguuggccaauagacac

SEQ ID NO: 1625983 - RNA, 19 nt, Artificial Sequence
  Description of Artificial Sequence: Synthetic oligonucleotide
  Sense strand starting at position 3787 of SEQ ID NO: 1560809
gggcaucuacucuacaagu

SEQ ID NO: 1625984 - RNA, 19 nt, Artificial Sequence
  Description of Artificial Sequence: Synthetic oligonucleotide
  Antisense strand to SEQ ID NO: 1625983
acuuguagaguagaugccc

SEQ ID NO: 1625985 - RNA, 19 nt, Artificial Sequence
  Description of Artificial Sequence: Synthetic oligonucleotide
  Sense strand starting at position 3861 of SEQ ID NO: 1560809
uccagaugcugucuagaca

SEQ ID NO: 1625986 - RNA, 19 nt, Artificial Sequence
  Description of Artificial Sequence: Synthetic oligonucleotide
  Antisense strand to SEQ ID NO: 1625985
ugucuagacagcaucugga

SEQ ID NO: 1625987 - RNA, 19 nt, Artificial Sequence
  Description of Artificial Sequence: Synthetic oligonucleotide
  Sense strand starting at position 3869 of SEQ ID NO: 1560809
cugucuagacagugaguaa

SEQ ID NO: 1625988 - RNA, 19 nt, Artificial Sequence
  Description of Artificial Sequence: Synthetic oligonucleotide
  Antisense strand to SEQ ID NO: 1625987
uuacucacugucuagacag

SEQ ID NO: 1625989 - RNA, 19 nt, Artificial Sequence
  Description of Artificial Sequence: Synthetic oligonucleotide
  Sense strand starting at position 3900 of SEQ ID NO: 1560809
aacagaaguccuuguguua

SEQ ID NO: 1625990 - RNA, 19 nt, Artificial Sequence
  Description of Artificial Sequence: Synthetic oligonucleotide
  Antisense strand to SEQ ID NO: 1625989
uaacacaaggacuucuguu

SEQ ID NO: 1625991 - RNA, 19 nt, Artificial Sequence
  Description of Artificial Sequence: Synthetic oligonucleotide
  Sense strand starting at position 201 of SEQ ID NO: 1560810
ugcacuugauaggaaauuu

SEQ ID NO: 1625992 - RNA, 19 nt, Artificial Sequence
  Description of Artificial Sequence: Synthetic oligonucleotide
  Antisense strand to SEQ ID NO: 1625991
aaauuuccuaucaagugca

SEQ ID NO: 1625993 - RNA, 19 nt, Artificial Sequence
  Description of Artificial Sequence: Synthetic oligonucleotide
  Sense strand starting at position 228 of SEQ ID NO: 1560810
uuacucuuuccagggaauu

SEQ ID NO: 1625994 - RNA, 19 nt, Artificial Sequence
  Description of Artificial Sequence: Synthetic oligonucleotide
  Antisense strand to SEQ ID NO: 1625993
aauucccuggaaagaguaa

SEQ ID NO: 1625995 - RNA, 19 nt, Artificial Sequence
  Description of Artificial Sequence: Synthetic oligonucleotide
  Sense strand starting at position 746 of SEQ ID NO: 1560810
auugauucugcaggacuaa

SEQ ID NO: 1625996 - RNA, 19 nt, Artificial Sequence
  Description of Artificial Sequence: Synthetic oligonucleotide
  Antisense strand to SEQ ID NO: 1625995
uuaguccugcagaaucaau

SEQ ID NO: 1625997 - RNA, 19 nt, Artificial Sequence
  Description of Artificial Sequence: Synthetic oligonucleotide
  Sense strand starting at position 747 of SEQ ID NO: 1560810
uugauucugcaggacuaau

SEQ ID NO: 1625998 - RNA, 19 nt, Artificial Sequence
  Description of Artificial Sequence: Synthetic oligonucleotide
  Antisense strand to SEQ ID NO: 1625997
auuaguccugcagaaucaa

SEQ ID NO: 1625999 - RNA, 19 nt, Artificial Sequence
  Description of Artificial Sequence: Synthetic oligonucleotide
  Sense strand starting at position 770 of SEQ ID NO: 1560810
cccacaaguguaggagaaa

SEQ ID NO: 1626000 - RNA, 19 nt, Artificial Sequence
  Description of Artificial Sequence: Synthetic oligonucleotide
  Antisense strand to SEQ ID NO: 1625999
uuucuccuacacuuguggg

SEQ ID NO: 1626001 - RNA, 19 nt, Artificial Sequence
  Description of Artificial Sequence: Synthetic oligonucleotide
  Sense strand starting at position 890 of SEQ ID NO: 1560810
agcggaaagcuuuauaaag

SEQ ID NO: 1626002 - RNA, 19 nt, Artificial Sequence
  Description of Artificial Sequence: Synthetic oligonucleotide
  Antisense strand to SEQ ID NO: 1626001
cuuuauaaagcuuuccgcu

SEQ ID NO: 1626003 - RNA, 19 nt, Artificial Sequence
  Description of Artificial Sequence: Synthetic oligonucleotide
  Sense strand starting at position 919 of SEQ ID NO: 1560810
aauucuaugucaguugaga

SEQ ID NO: 1626004 - RNA, 19 nt, Artificial Sequence
  Description of Artificial Sequence: Synthetic oligonucleotide
  Antisense strand to SEQ ID NO: 1626003
ucucaacugacauagaauu

SEQ ID NO: 1626005 - RNA, 19 nt, Artificial Sequence
  Description of Artificial Sequence: Synthetic oligonucleotide
  Sense strand starting at position 1005 of SEQ ID NO: 1560810
aucacaauuucugaguaug

SEQ ID NO: 1626006 - RNA, 19 nt, Artificial Sequence
  Description of Artificial Sequence: Synthetic oligonucleotide
  Antisense strand to SEQ ID NO: 1626005
cauacucagaaauugugau

SEQ ID NO: 1626007 - RNA, 19 nt, Artificial Sequence
  Description of Artificial Sequence: Synthetic oligonucleotide
  Sense strand starting at position 1073 of SEQ ID NO: 1560810
auugcuuuccucugaagga

SEQ ID NO: 1626008 - RNA, 19 nt, Artificial Sequence
  Description of Artificial Sequence: Synthetic oligonucleotide
  Antisense strand to SEQ ID NO: 1626007
uccuucagaggaaagcaau

SEQ ID NO: 1626009 - RNA, 19 nt, Artificial Sequence
  Description of Artificial Sequence: Synthetic oligonucleotide
  Sense strand starting at position 1514 of SEQ ID NO: 1560810
ccauuaagcuuugugacaa

SEQ ID NO: 1626010 - RNA, 19 nt, Artificial Sequence
  Description of Artificial Sequence: Synthetic oligonucleotide
  Antisense strand to SEQ ID NO: 1626009
uugucacaaagcuuaaugg

SEQ ID NO: 1626011 - RNA, 19 nt, Artificial Sequence
  Description of Artificial Sequence: Synthetic oligonucleotide
  Sense strand starting at position 1543 of SEQ ID NO: 1560810
gcagcaaucauccaggaug

SEQ ID NO: 1626012 - RNA, 19 nt, Artificial Sequence
  Description of Artificial Sequence: Synthetic oligonucleotide
  Antisense strand to SEQ ID NO: 1626011
cauccuggaugauugcugc

SEQ ID NO: 1626013 - RNA, 19 nt, Artificial Sequence
  Description of Artificial Sequence: Synthetic oligonucleotide
  Sense strand starting at position 1546 of SEQ ID NO: 1560810
gcaaucauccaggaugcca

SEQ ID NO: 1626014 - RNA, 19 nt, Artificial Sequence
  Description of Artificial Sequence: Synthetic oligonucleotide
  Antisense strand to SEQ ID NO: 1626013
uggcauccuggaugauugc

SEQ ID NO: 1626015 - RNA, 19 nt, Artificial Sequence
  Description of Artificial Sequence: Synthetic oligonucleotide
  Sense strand starting at position 1659 of SEQ ID NO: 1560810
gaguaagcugucuaacccu

SEQ ID NO: 1626016 - RNA, 19 nt, Artificial Sequence
  Description of Artificial Sequence: Synthetic oligonucleotide
  Antisense strand to SEQ ID NO: 1626015
aggguuagacagcuuacuc

SEQ ID NO: 1626017 - RNA, 19 nt, Artificial Sequence
  Description of Artificial Sequence: Synthetic oligonucleotide
  Sense strand starting at position 1745 of SEQ ID NO: 1560810
ggauguuaaugagcaucuu

SEQ ID NO: 1626018 - RNA, 19 nt, Artificial Sequence
  Description of Artificial Sequence: Synthetic oligonucleotide
  Antisense strand to SEQ ID NO: 1626017
aagaugcucauuaacaucc

SEQ ID NO: 1626019 - RNA, 19 nt, Artificial Sequence
  Description of Artificial Sequence: Synthetic oligonucleotide
  Sense strand starting at position 1746 of SEQ ID NO: 1560810
gauguuaaugagcaucuuu

SEQ ID NO: 1626020 - RNA, 19 nt, Artificial Sequence
  Description of Artificial Sequence: Synthetic oligonucleotide
  Antisense strand to SEQ ID NO: 1626019
aaagaugcucauuaacauc

SEQ ID NO: 1626021 - RNA, 19 nt, Artificial Sequence
  Description of Artificial Sequence: Synthetic oligonucleotide
  Sense strand starting at position 1751 of SEQ ID NO: 1560810
uaaugagcaucuuugggau

SEQ ID NO: 1626022 - RNA, 19 nt, Artificial Sequence
  Description of Artificial Sequence: Synthetic oligonucleotide
  Antisense strand to SEQ ID NO: 1626021
aucccaaagaugcucauua

SEQ ID NO: 1626023 - RNA, 19 nt, Artificial Sequence
  Description of Artificial Sequence: Synthetic oligonucleotide
  Sense strand starting at position 1782 of SEQ ID NO: 1560810
gaaacagaugucugcaaag

SEQ ID NO: 1626024 - RNA, 19 nt, Artificial Sequence
  Description of Artificial Sequence: Synthetic oligonucleotide
  Antisense strand to SEQ ID NO: 1626023
cuuugcagacaucuguuuc

SEQ ID NO: 1626025 - RNA, 19 nt, Artificial Sequence
  Description of Artificial Sequence: Synthetic oligonucleotide
  Sense strand starting at position 1859 of SEQ ID NO: 1560810
ccaggaugaugagcagauu

SEQ ID NO: 1626026 - RNA, 19 nt, Artificial Sequence
  Description of Artificial Sequence: Synthetic oligonucleotide
  Antisense strand to SEQ ID NO: 1626025
aaucugcucaucauccugg

SEQ ID NO: 1626027 - RNA, 19 nt, Artificial Sequence
  Description of Artificial Sequence: Synthetic oligonucleotide
  Sense strand starting at position 2387 of SEQ ID NO: 1560810
ggcuaaaucuagccaauua

SEQ ID NO: 1626028 - RNA, 19 nt, Artificial Sequence
  Description of Artificial Sequence: Synthetic oligonucleotide
  Antisense strand to SEQ ID NO: 1626027
uaauuggcuagauuuagcc

SEQ ID NO: 1626029 - RNA, 19 nt, Artificial Sequence
  Description of Artificial Sequence: Synthetic oligonucleotide
  Sense strand starting at position 2432 of SEQ ID NO: 1560810
cauucuuguggcgagaaca

SEQ ID NO: 1626030 - RNA, 19 nt, Artificial Sequence
  Description of Artificial Sequence: Synthetic oligonucleotide
  Antisense strand to SEQ ID NO: 1626029
uguucucgccacaagaaug

SEQ ID NO: 1626031 - RNA, 19 nt, Artificial Sequence
  Description of Artificial Sequence: Synthetic oligonucleotide
  Sense strand starting at position 2664 of SEQ ID NO: 1560810
aaaucuggucccuguuaga

SEQ ID NO: 1626032 - RNA, 19 nt, Artificial Sequence
  Description of Artificial Sequence: Synthetic oligonucleotide
  Antisense strand to SEQ ID NO: 1626031
ucuaacagggaccagauuu

SEQ ID NO: 1626033 - RNA, 19 nt, Artificial Sequence
  Description of Artificial Sequence: Synthetic oligonucleotide
  Sense strand starting at position 2680 of SEQ ID NO: 1560810
agaagaucuccuugccauc

SEQ ID NO: 1626034 - RNA, 19 nt, Artificial Sequence
  Description of Artificial Sequence: Synthetic oligonucleotide
  Antisense strand to SEQ ID NO: 1626033
gauggcaaggagaucuucu

SEQ ID NO: 1626035 - RNA, 19 nt, Artificial Sequence
  Description of Artificial Sequence: Synthetic oligonucleotide
  Sense strand starting at position 2693 of SEQ ID NO: 1560810
gccaucucugauuaggaau

SEQ ID NO: 1626036 - RNA, 19 nt, Artificial Sequence
  Description of Artificial Sequence: Synthetic oligonucleotide
  Antisense strand to SEQ ID NO: 1626035
auuccuaaucagagauggc

SEQ ID NO: 1626037 - RNA, 19 nt, Artificial Sequence
  Description of Artificial Sequence: Synthetic oligonucleotide
  Sense strand starting at position 2771 of SEQ ID NO: 1560810
uguauucuacaguaucauu

SEQ ID NO: 1626038 - RNA, 19 nt, Artificial Sequence
  Description of Artificial Sequence: Synthetic oligonucleotide
  Antisense strand to SEQ ID NO: 1626037
aaugauacuguagaauaca

SEQ ID NO: 1626039 - RNA, 19 nt, Artificial Sequence
  Description of Artificial Sequence: Synthetic oligonucleotide
  Sense strand starting at position 2828 of SEQ ID NO: 1560810
ugaguugauguucagggua

SEQ ID NO: 1626040 - RNA, 19 nt, Artificial Sequence
  Description of Artificial Sequence: Synthetic oligonucleotide
  Antisense strand to SEQ ID NO: 1626039
uacccugaacaucaacuca

SEQ ID NO: 1626041 - RNA, 19 nt, Artificial Sequence
  Description of Artificial Sequence: Synthetic oligonucleotide
  Sense strand starting at position 2833 of SEQ ID NO: 1560810
ugauguucaggguacugua

SEQ ID NO: 1626042 - RNA, 19 nt, Artificial Sequence
  Description of Artificial Sequence: Synthetic oligonucleotide
  Antisense strand to SEQ ID NO: 1626041
uacaguacccugaacauca

SEQ ID NO: 1626043 - RNA, 19 nt, Artificial Sequence
  Description of Artificial Sequence: Synthetic oligonucleotide
  Sense strand starting at position 2913 of SEQ ID NO: 1560810
acauauauacuaugucagu

SEQ ID NO: 1626044 - RNA, 19 nt, Artificial Sequence
  Description of Artificial Sequence: Synthetic oligonucleotide
  Antisense strand to SEQ ID NO: 1626043
acugacauaguauauaugu

SEQ ID NO: 1626045 - RNA, 19 nt, Artificial Sequence
  Description of Artificial Sequence: Synthetic oligonucleotide
  Sense strand starting at position 2935 of SEQ ID NO: 1560810
ugauuaguccuaugaauaa

SEQ ID NO: 1626046 - RNA, 19 nt, Artificial Sequence
  Description of Artificial Sequence: Synthetic oligonucleotide
  Antisense strand to SEQ ID NO: 1626045
uuauucauaggacuaauca

SEQ ID NO: 1626047 - RNA, 19 nt, Artificial Sequence
  Description of Artificial Sequence: Synthetic oligonucleotide
  Sense strand starting at position 3129 of SEQ ID NO: 1560810
guucaaggugcucaaggaa

SEQ ID NO: 1626048 - RNA, 19 nt, Artificial Sequence
  Description of Artificial Sequence: Synthetic oligonucleotide
  Antisense strand to SEQ ID NO: 1626047
uuccuugagcaccuugaac

SEQ ID NO: 1626049 - RNA, 19 nt, Artificial Sequence
  Description of Artificial Sequence: Synthetic oligonucleotide
  Sense strand starting at position 3287 of SEQ ID NO: 1560810
uuuauuaauuugccugcga

SEQ ID NO: 1626050 - RNA, 19 nt, Artificial Sequence
  Description of Artificial Sequence: Synthetic oligonucleotide
  Antisense strand to SEQ ID NO: 1626049
ucgcaggcaaauuaauaaa

SEQ ID NO: 1626051 - RNA, 19 nt, Artificial Sequence
  Description of Artificial Sequence: Synthetic oligonucleotide
  Sense strand starting at position 3288 of SEQ ID NO: 1560810
uuauuaauuugccugcgaa

SEQ ID NO: 1626052 - RNA, 19 nt, Artificial Sequence
  Description of Artificial Sequence: Synthetic oligonucleotide
  Antisense strand to SEQ ID NO: 1626051
uucgcaggcaaauuaauaa

SEQ ID NO: 1626053 - RNA, 19 nt, Artificial Sequence
  Description of Artificial Sequence: Synthetic oligonucleotide
  Sense strand starting at position 3289 of SEQ ID NO: 1560810
uauuaauuugccugcgaag

SEQ ID NO: 1626054 - RNA, 19 nt, Artificial Sequence
  Description of Artificial Sequence: Synthetic oligonucleotide
  Antisense strand to SEQ ID NO: 1626053
cuucgcaggcaaauuaaua

SEQ ID NO: 1626055 - RNA, 19 nt, Artificial Sequence
  Description of Artificial Sequence: Synthetic oligonucleotide
  Sense strand starting at position 3565 of SEQ ID NO: 1560810
ccaggcaaguugucaauuu

SEQ ID NO: 1626056 - RNA, 19 nt, Artificial Sequence
  Description of Artificial Sequence: Synthetic oligonucleotide
  Antisense strand to SEQ ID NO: 1626055
aaauugacaacuugccugg

SEQ ID NO: 1626057 - RNA, 19 nt, Artificial Sequence
  Description of Artificial Sequence: Synthetic oligonucleotide
  Sense strand starting at position 3608 of SEQ ID NO: 1560810
ucagaaauggucugauagc

SEQ ID NO: 1626058 - RNA, 19 nt, Artificial Sequence
  Description of Artificial Sequence: Synthetic oligonucleotide
  Antisense strand to SEQ ID NO: 1626057
gcuaucagaccauuucuga

SEQ ID NO: 1626059 - RNA, 19 nt, Artificial Sequence
  Description of Artificial Sequence: Synthetic oligonucleotide
  Sense strand starting at position 3618 of SEQ ID NO: 1560810
ucugauagcaugugagaca

SEQ ID NO: 1626060 - RNA, 19 nt, Artificial Sequence
  Description of Artificial Sequence: Synthetic oligonucleotide
  Antisense strand to SEQ ID NO: 1626059
ugucucacaugcuaucaga

SEQ ID NO: 1626061 - RNA, 19 nt, Artificial Sequence
  Description of Artificial Sequence: Synthetic oligonucleotide
  Sense strand starting at position 3691 of SEQ ID NO: 1560810
cagggucuuugggauuuga

SEQ ID NO: 1626062 - RNA, 19 nt, Artificial Sequence
  Description of Artificial Sequence: Synthetic oligonucleotide
  Antisense strand to SEQ ID NO: 1626061
ucaaaucccaaagacccug

SEQ ID NO: 1626063 - RNA, 19 nt, Artificial Sequence
  Description of Artificial Sequence: Synthetic oligonucleotide
  Sense strand starting at position 3717 of SEQ ID NO: 1560810
uugacaguccuauggaauu

SEQ ID NO: 1626064 - RNA, 19 nt, Artificial Sequence
  Description of Artificial Sequence: Synthetic oligonucleotide
  Antisense strand to SEQ ID NO: 1626063
aauuccauaggacugucaa

SEQ ID NO: 1626065 - RNA, 19 nt, Artificial Sequence
  Description of Artificial Sequence: Synthetic oligonucleotide
  Sense strand starting at position 3728 of SEQ ID NO: 1560810
auggaauugcacuaguucu

SEQ ID NO: 1626066 - RNA, 19 nt, Artificial Sequence
  Description of Artificial Sequence: Synthetic oligonucleotide
  Antisense strand to SEQ ID NO: 1626065
agaacuagugcaauuccau

SEQ ID NO: 1626067 - RNA, 19 nt, Artificial Sequence
  Description of Artificial Sequence: Synthetic oligonucleotide
  Sense strand starting at position 3751 of SEQ ID NO: 1560810
cuggucuuccuguaacaug

SEQ ID NO: 1626068 - RNA, 19 nt, Artificial Sequence
  Description of Artificial Sequence: Synthetic oligonucleotide
  Antisense strand to SEQ ID NO: 1626067
cauguuacaggaagaccag

SEQ ID NO: 1626069 - RNA, 19 nt, Artificial Sequence
  Description of Artificial Sequence: Synthetic oligonucleotide
  Sense strand starting at position 3772 of SEQ ID NO: 1560810
auguccuuccuagaccaua

SEQ ID NO: 1626070 - RNA, 19 nt, Artificial Sequence
  Description of Artificial Sequence: Synthetic oligonucleotide
  Antisense strand to SEQ ID NO: 1626069
uauggucuaggaaggacau

SEQ ID NO: 1626071 - RNA, 19 nt, Artificial Sequence
  Description of Artificial Sequence: Synthetic oligonucleotide
  Sense strand starting at position 44 of SEQ ID NO: 1560811
acuuauauaugggcacuaa

SEQ ID NO: 1626072 - RNA, 19 nt, Artificial Sequence
  Description of Artificial Sequence: Synthetic oligonucleotide
  Antisense strand to SEQ ID NO: 1626071
uuagugcccauauauaagu

SEQ ID NO: 1626073 - RNA, 19 nt, Artificial Sequence
  Description of Artificial Sequence: Synthetic oligonucleotide
  Sense strand starting at position 78 of SEQ ID NO: 1560811
ugaguccaugcacaucaua

SEQ ID NO: 1626074 - RNA, 19 nt, Artificial Sequence
  Description of Artificial Sequence: Synthetic oligonucleotide
  Antisense strand to SEQ ID NO: 1626073
uaugaugugcauggacuca

SEQ ID NO: 1626075 - RNA, 19 nt, Artificial Sequence
  Description of Artificial Sequence: Synthetic oligonucleotide
  Sense strand starting at position 157 of SEQ ID NO: 1560811
ggucaucucugacuguaag

SEQ ID NO: 1626076 - RNA, 19 nt, Artificial Sequence
  Description of Artificial Sequence: Synthetic oligonucleotide
  Antisense strand to SEQ ID NO: 1626075
cuuacagucagagaugacc

SEQ ID NO: 1626077 - RNA, 19 nt, Artificial Sequence
  Description of Artificial Sequence: Synthetic oligonucleotide
  Sense strand starting at position 168 of SEQ ID NO: 1560811
acuguaaguccauauuaag

SEQ ID NO: 1626078 - RNA, 19 nt, Artificial Sequence
  Description of Artificial Sequence: Synthetic oligonucleotide
  Antisense strand to SEQ ID NO: 1626077
cuuaauauggacuuacagu

SEQ ID NO: 1626079 - RNA, 19 nt, Artificial Sequence
  Description of Artificial Sequence: Synthetic oligonucleotide
  Sense strand starting at position 296 of SEQ ID NO: 1560811
uggacauggcacugacaaa

SEQ ID NO: 1626080 - RNA, 19 nt, Artificial Sequence
  Description of Artificial Sequence: Synthetic oligonucleotide
  Antisense strand to SEQ ID NO: 1626079
uuugucagugccaugucca

SEQ ID NO: 1626081 - RNA, 19 nt, Artificial Sequence
  Description of Artificial Sequence: Synthetic oligonucleotide
  Sense strand starting at position 313 of SEQ ID NO: 1560811
aagacaugauguccuaaug

SEQ ID NO: 1626082 - RNA, 19 nt, Artificial Sequence
  Description of Artificial Sequence: Synthetic oligonucleotide
  Antisense strand to SEQ ID NO: 1626081
cauuaggacaucaugucuu

SEQ ID NO: 1626083 - RNA, 19 nt, Artificial Sequence
  Description of Artificial Sequence: Synthetic oligonucleotide
  Sense strand starting at position 510 of SEQ ID NO: 1560811
uagucuaugccacaggaga

SEQ ID NO: 1626084 - RNA, 19 nt, Artificial Sequence
  Description of Artificial Sequence: Synthetic oligonucleotide
  Antisense strand to SEQ ID NO: 1626083
ucuccuguggcauagacua

SEQ ID NO: 1626085 - RNA, 19 nt, Artificial Sequence
  Description of Artificial Sequence: Synthetic oligonucleotide
  Sense strand starting at position 569 of SEQ ID NO: 1560811
aaguguuucugauccaaag

SEQ ID NO: 1626086 - RNA, 19 nt, Artificial Sequence
  Description of Artificial Sequence: Synthetic oligonucleotide
  Antisense strand to SEQ ID NO: 1626085
cuuuggaucagaaacacuu

SEQ ID NO: 1626087 - RNA, 19 nt, Artificial Sequence
  Description of Artificial Sequence: Synthetic oligonucleotide
  Sense strand starting at position 571 of SEQ ID NO: 1560811
guguuucugauccaaaguc

SEQ ID NO: 1626088 - RNA, 19 nt, Artificial Sequence
  Description of Artificial Sequence: Synthetic oligonucleotide
  Antisense strand to SEQ ID NO: 1626087
gacuuuggaucagaaacac

SEQ ID NO: 1626089 - RNA, 19 nt, Artificial Sequence
  Description of Artificial Sequence: Synthetic oligonucleotide
  Sense strand starting at position 578 of SEQ ID NO: 1560811
ugauccaaagucggaaaua

SEQ ID NO: 1626090 - RNA, 19 nt, Artificial Sequence
  Description of Artificial Sequence: Synthetic oligonucleotide
  Antisense strand to SEQ ID NO: 1626089
uauuuccgacuuuggauca

SEQ ID NO: 1626091 - RNA, 19 nt, Artificial Sequence
  Description of Artificial Sequence: Synthetic oligonucleotide
  Sense strand starting at position 803 of SEQ ID NO: 1560811
cuuagagcccugcaaucau

SEQ ID NO: 1626092 - RNA, 19 nt, Artificial Sequence
  Description of Artificial Sequence: Synthetic oligonucleotide
  Antisense strand to SEQ ID NO: 1626091
augauugcagggcucuaag

SEQ ID NO: 1626093 - RNA, 19 nt, Artificial Sequence
  Description of Artificial Sequence: Synthetic oligonucleotide
  Sense strand starting at position 890 of SEQ ID NO: 1560811
gucuuuauuccucagacua

SEQ ID NO: 1626094 - RNA, 19 nt, Artificial Sequence
  Description of Artificial Sequence: Synthetic oligonucleotide
  Antisense strand to SEQ ID NO: 1626093
uagucugaggaauaaagac

SEQ ID NO: 1626095 - RNA, 19 nt, Artificial Sequence
  Description of Artificial Sequence: Synthetic oligonucleotide
  Sense strand starting at position 1283 of SEQ ID NO: 1560811
ccguacuaccauuaagauu

SEQ ID NO: 1626096 - RNA, 19 nt, Artificial Sequence
  Description of Artificial Sequence: Synthetic oligonucleotide
  Antisense strand to SEQ ID NO: 1626095
aaucuuaaugguaguacgg

SEQ ID NO: 1626097 - RNA, 19 nt, Artificial Sequence
  Description of Artificial Sequence: Synthetic oligonucleotide
  Sense strand starting at position 1295 of SEQ ID NO: 1560811
uaagauuuguagcaaggaa

SEQ ID NO: 1626098 - RNA, 19 nt, Artificial Sequence
  Description of Artificial Sequence: Synthetic oligonucleotide
  Antisense strand to SEQ ID NO: 1626097
uuccuugcuacaaaucuua

SEQ ID NO: 1626099 - RNA, 19 nt, Artificial Sequence
  Description of Artificial Sequence: Synthetic oligonucleotide
  Sense strand starting at position 1490 of SEQ ID NO: 1560811
ggcuauguaggugaugacu

SEQ ID NO: 1626100 - RNA, 19 nt, Artificial Sequence
  Description of Artificial Sequence: Synthetic oligonucleotide
  Antisense strand to SEQ ID NO: 1626099
agucaucaccuacauagcc

SEQ ID NO: 1626101 - RNA, 19 nt, Artificial Sequence
  Description of Artificial Sequence: Synthetic oligonucleotide
  Sense strand starting at position 1498 of SEQ ID NO: 1560811
aggugaugacuuuguucug

SEQ ID NO: 1626102 - RNA, 19 nt, Artificial Sequence
  Description of Artificial Sequence: Synthetic oligonucleotide
  Antisense strand to SEQ ID NO: 1626101
cagaacaaagucaucaccu

SEQ ID NO: 1626103 - RNA, 19 nt, Artificial Sequence
  Description of Artificial Sequence: Synthetic oligonucleotide
  Sense strand starting at position 1541 of SEQ ID NO: 1560811
uggaauggugguggaagua

SEQ ID NO: 1626104 - RNA, 19 nt, Artificial Sequence
  Description of Artificial Sequence: Synthetic oligonucleotide
  Antisense strand to SEQ ID NO: 1626103
uacuuccaccaccauucca

SEQ ID NO: 1626105 - RNA, 19 nt, Artificial Sequence
  Description of Artificial Sequence: Synthetic oligonucleotide
  Sense strand starting at position 1755 of SEQ ID NO: 1560811
uguguaucauuuccugguu

SEQ ID NO: 1626106 - RNA, 19 nt, Artificial Sequence
  Description of Artificial Sequence: Synthetic oligonucleotide
  Antisense strand to SEQ ID NO: 1626105
aaccaggaaaugauacaca

SEQ ID NO: 1626107 - RNA, 19 nt, Artificial Sequence
  Description of Artificial Sequence: Synthetic oligonucleotide
  Sense strand starting at position 1758 of SEQ ID NO: 1560811
guaucauuuccugguucca

SEQ ID NO: 1626108 - RNA, 19 nt, Artificial Sequence
  Description of Artificial Sequence: Synthetic oligonucleotide
  Antisense strand to SEQ ID NO: 1626107
uggaaccaggaaaugauac

SEQ ID NO: 1626109 - RNA, 19 nt, Artificial Sequence
  Description of Artificial Sequence: Synthetic oligonucleotide
  Sense strand starting at position 1903 of SEQ ID NO: 1560811
ugaaucugguucucuuuaa

SEQ ID NO: 1626110 - RNA, 19 nt, Artificial Sequence
  Description of Artificial Sequence: Synthetic oligonucleotide
  Antisense strand to SEQ ID NO: 1626109
uuaaagagaaccagauuca

SEQ ID NO: 1626111 - RNA, 19 nt, Artificial Sequence
  Description of Artificial Sequence: Synthetic oligonucleotide
  Sense strand starting at position 1904 of SEQ ID NO: 1560811
gaaucugguucucuuuaag

SEQ ID NO: 1626112 - RNA, 19 nt, Artificial Sequence
  Description of Artificial Sequence: Synthetic oligonucleotide
  Antisense strand to SEQ ID NO: 1626111
cuuaaagagaaccagauuc

SEQ ID NO: 1626113 - RNA, 19 nt, Artificial Sequence
  Description of Artificial Sequence: Synthetic oligonucleotide
  Sense strand starting at position 1907 of SEQ ID NO: 1560811
ucugguucucuuuaaggga

SEQ ID NO: 1626114 - RNA, 19 nt, Artificial Sequence
  Description of Artificial Sequence: Synthetic oligonucleotide
  Antisense strand to SEQ ID NO: 1626113
ucccuuaaagagaaccaga

SEQ ID NO: 1626115 - RNA, 19 nt, Artificial Sequence
  Description of Artificial Sequence: Synthetic oligonucleotide
  Sense strand starting at position 1920 of SEQ ID NO: 1560811
aagggaucuccaugucauc

SEQ ID NO: 1626116 - RNA, 19 nt, Artificial Sequence
  Description of Artificial Sequence: Synthetic oligonucleotide
  Antisense strand to SEQ ID NO: 1626115
gaugacauggagaucccuu

SEQ ID NO: 1626117 - RNA, 19 nt, Artificial Sequence
  Description of Artificial Sequence: Synthetic oligonucleotide
  Sense strand starting at position 1929 of SEQ ID NO: 1560811
ccaugucaucucugauuag

SEQ ID NO: 1626118 - RNA, 19 nt, Artificial Sequence
  Description of Artificial Sequence: Synthetic oligonucleotide
  Antisense strand to SEQ ID NO: 1626117
cuaaucagagaugacaugg

SEQ ID NO: 1626119 - RNA, 19 nt, Artificial Sequence
  Description of Artificial Sequence: Synthetic oligonucleotide
  Sense strand starting at position 1932 of SEQ ID NO: 1560811
ugucaucucugauuaggaa

SEQ ID NO: 1626120 - RNA, 19 nt, Artificial Sequence
  Description of Artificial Sequence: Synthetic oligonucleotide
  Antisense strand to SEQ ID NO: 1626119
uuccuaaucagagaugaca

SEQ ID NO: 1626121 - RNA, 19 nt, Artificial Sequence
  Description of Artificial Sequence: Synthetic oligonucleotide
  Sense strand starting at position 2337 of SEQ ID NO: 1560811
uucuaugaauuugaggaau

SEQ ID NO: 1626122 - RNA, 19 nt, Artificial Sequence
  Description of Artificial Sequence: Synthetic oligonucleotide
  Antisense strand to SEQ ID NO: 1626121
auuccucaaauucauagaa

SEQ ID NO: 1626123 - RNA, 19 nt, Artificial Sequence
  Description of Artificial Sequence: Synthetic oligonucleotide
  Sense strand starting at position 2339 of SEQ ID NO: 1560811
cuaugaauuugaggaauau

SEQ ID NO: 1626124 - RNA, 19 nt, Artificial Sequence
  Description of Artificial Sequence: Synthetic oligonucleotide
  Antisense strand to SEQ ID NO: 1626123
auauuccucaaauucauag

SEQ ID NO: 1626125 - RNA, 19 nt, Artificial Sequence
  Description of Artificial Sequence: Synthetic oligonucleotide
  Sense strand starting at position 2360 of SEQ ID NO: 1560811
auugaauguugaccauguu

SEQ ID NO: 1626126 - RNA, 19 nt, Artificial Sequence
  Description of Artificial Sequence: Synthetic oligonucleotide
  Antisense strand to SEQ ID NO: 1626125
aacauggucaacauucaau

SEQ ID NO: 1626127 - RNA, 19 nt, Artificial Sequence
  Description of Artificial Sequence: Synthetic oligonucleotide
  Sense strand starting at position 2363 of SEQ ID NO: 1560811
gaauguugaccauguucuu

SEQ ID NO: 1626128 - RNA, 19 nt, Artificial Sequence
  Description of Artificial Sequence: Synthetic oligonucleotide
  Antisense strand to SEQ ID NO: 1626127
aagaacauggucaacauuc

SEQ ID NO: 1626129 - RNA, 19 nt, Artificial Sequence
  Description of Artificial Sequence: Synthetic oligonucleotide
  Sense strand starting at position 2379 of SEQ ID NO: 1560811
cuugucacugucuagauaa

SEQ ID NO: 1626130 - RNA, 19 nt, Artificial Sequence
  Description of Artificial Sequence: Synthetic oligonucleotide
  Antisense strand to SEQ ID NO: 1626129
uuaucuagacagugacaag

SEQ ID NO: 1626131 - RNA, 19 nt, Artificial Sequence
  Description of Artificial Sequence: Synthetic oligonucleotide
  Sense strand starting at position 2381 of SEQ ID NO: 1560811
ugucacugucuagauaaug

SEQ ID NO: 1626132 - RNA, 19 nt, Artificial Sequence
  Description of Artificial Sequence: Synthetic oligonucleotide
  Antisense strand to SEQ ID NO: 1626131
cauuaucuagacagugaca

SEQ ID NO: 1626133 - RNA, 19 nt, Artificial Sequence
  Description of Artificial Sequence: Synthetic oligonucleotide
  Sense strand starting at position 2556 of SEQ ID NO: 1560811
gaggguaugaaguguuucu

SEQ ID NO: 1626134 - RNA, 19 nt, Artificial Sequence
  Description of Artificial Sequence: Synthetic oligonucleotide
  Antisense strand to SEQ ID NO: 1626133
agaaacacuucauacccuc

SEQ ID NO: 1626135 - RNA, 19 nt, Artificial Sequence
  Description of Artificial Sequence: Synthetic oligonucleotide
  Sense strand starting at position 2668 of SEQ ID NO: 1560811
ucaugaaguuaucuguuga

SEQ ID NO: 1626136 - RNA, 19 nt, Artificial Sequence
  Description of Artificial Sequence: Synthetic oligonucleotide
  Antisense strand to SEQ ID NO: 1626135
ucaacagauaacuucauga

SEQ ID NO: 1626137 - RNA, 19 nt, Artificial Sequence
  Description of Artificial Sequence: Synthetic oligonucleotide
  Sense strand starting at position 2721 of SEQ ID NO: 1560811
aacuuugagggaugugcuu

SEQ ID NO: 1626138 - RNA, 19 nt, Artificial Sequence
  Description of Artificial Sequence: Synthetic oligonucleotide
  Antisense strand to SEQ ID NO: 1626137
aagcacaucccucaaaguu

SEQ ID NO: 1626139 - RNA, 19 nt, Artificial Sequence
  Description of Artificial Sequence: Synthetic oligonucleotide
  Sense strand starting at position 3078 of SEQ ID NO: 1560811
gccaguguggccagggaau

SEQ ID NO: 1626140 - RNA, 19 nt, Artificial Sequence
  Description of Artificial Sequence: Synthetic oligonucleotide
  Antisense strand to SEQ ID NO: 1626139
auucccuggccacacuggc

SEQ ID NO: 1626141 - RNA, 19 nt, Artificial Sequence
  Description of Artificial Sequence: Synthetic oligonucleotide
  Sense strand starting at position 3120 of SEQ ID NO: 1560811
cauggugucagaggauguu

SEQ ID NO: 1626142 - RNA, 19 nt, Artificial Sequence
  Description of Artificial Sequence: Synthetic oligonucleotide
  Antisense strand to SEQ ID NO: 1626141
aacauccucugacaccaug

SEQ ID NO: 1626143 - RNA, 19 nt, Artificial Sequence
  Description of Artificial Sequence: Synthetic oligonucleotide
  Sense strand starting at position 3174 of SEQ ID NO: 1560811
ggacaaaguguccaucugu

SEQ ID NO: 1626144 - RNA, 19 nt, Artificial Sequence
  Description of Artificial Sequence: Synthetic oligonucleotide
  Antisense strand to SEQ ID NO: 1626143
acagauggacacuuugucc

SEQ ID NO: 1626145 - RNA, 19 nt, Artificial Sequence
  Description of Artificial Sequence: Synthetic oligonucleotide
  Sense strand starting at position 3225 of SEQ ID NO: 1560811
ggacuagaaaggugucaca

SEQ ID NO: 1626146 - RNA, 19 nt, Artificial Sequence
  Description of Artificial Sequence: Synthetic oligonucleotide
  Antisense strand to SEQ ID NO: 1626145
ugugacaccuuucuagucc

SEQ ID NO: 1626147 - RNA, 19 nt, Artificial Sequence
  Description of Artificial Sequence: Synthetic oligonucleotide
  Sense strand starting at position 3558 of SEQ ID NO: 1560811
uuggcugauuucuacauuu

SEQ ID NO: 1626148 - RNA, 19 nt, Artificial Sequence
  Description of Artificial Sequence: Synthetic oligonucleotide
  Antisense strand to SEQ ID NO: 1626147
aaauguagaaaucagccaa

SEQ ID NO: 1626149 - RNA, 19 nt, Artificial Sequence
  Description of Artificial Sequence: Synthetic oligonucleotide
  Sense strand starting at position 3823 of SEQ ID NO: 1560811
cagcccuguguuuaaagaa

SEQ ID NO: 1626150 - RNA, 19 nt, Artificial Sequence
  Description of Artificial Sequence: Synthetic oligonucleotide
  Antisense strand to SEQ ID NO: 1626149
uucuuuaaacacagggcug

SEQ ID NO: 1626151 - RNA, 19 nt, Artificial Sequence
  Description of Artificial Sequence: Synthetic oligonucleotide
  Sense strand starting at position 48 of SEQ ID NO: 1560812
cuauauugucaaggaaagc

SEQ ID NO: 1626152 - RNA, 19 nt, Artificial Sequence
  Description of Artificial Sequence: Synthetic oligonucleotide
  Antisense strand to SEQ ID NO: 1626151
gcuuuccuugacaauauag

SEQ ID NO: 1626153 - RNA, 19 nt, Artificial Sequence
  Description of Artificial Sequence: Synthetic oligonucleotide
  Sense strand starting at position 168 of SEQ ID NO: 1560812
ggcgucauagucuacagaa

SEQ ID NO: 1626154 - RNA, 19 nt, Artificial Sequence
  Description of Artificial Sequence: Synthetic oligonucleotide
  Antisense strand to SEQ ID NO: 1626153
uucuguagacuaugacgcc

SEQ ID NO: 1626155 - RNA, 19 nt, Artificial Sequence
  Description of Artificial Sequence: Synthetic oligonucleotide
  Sense strand starting at position 170 of SEQ ID NO: 1560812
cgucauagucuacagaaau

SEQ ID NO: 1626156 - RNA, 19 nt, Artificial Sequence
  Description of Artificial Sequence: Synthetic oligonucleotide
  Antisense strand to SEQ ID NO: 1626155
auuucuguagacuaugacg

SEQ ID NO: 1626157 - RNA, 19 nt, Artificial Sequence
  Description of Artificial Sequence: Synthetic oligonucleotide
  Sense strand starting at position 176 of SEQ ID NO: 1560812
agucuacagaaaugugaga

SEQ ID NO: 1626158 - RNA, 19 nt, Artificial Sequence
  Description of Artificial Sequence: Synthetic oligonucleotide
  Antisense strand to SEQ ID NO: 1626157
ucucacauuucuguagacu

SEQ ID NO: 1626159 - RNA, 19 nt, Artificial Sequence
  Description of Artificial Sequence: Synthetic oligonucleotide
  Sense strand starting at position 241 of SEQ ID NO: 1560812
acagaugcccuagaaaguu

SEQ ID NO: 1626160 - RNA, 19 nt, Artificial Sequence
  Description of Artificial Sequence: Synthetic oligonucleotide
  Antisense strand to SEQ ID NO: 1626159
aacuuucuagggcaucugu

SEQ ID NO: 1626161 - RNA, 19 nt, Artificial Sequence
  Description of Artificial Sequence: Synthetic oligonucleotide
  Sense strand starting at position 971 of SEQ ID NO: 1560812
auacauugauguuuggaua

SEQ ID NO: 1626162 - RNA, 19 nt, Artificial Sequence
  Description of Artificial Sequence: Synthetic oligonucleotide
  Antisense strand to SEQ ID NO: 1626161
uauccaaacaucaauguau

SEQ ID NO: 1626163 - RNA, 19 nt, Artificial Sequence
  Description of Artificial Sequence: Synthetic oligonucleotide
  Sense strand starting at position 1040 of SEQ ID NO: 1560812
augaaaguccugcagugau

SEQ ID NO: 1626164 - RNA, 19 nt, Artificial Sequence
  Description of Artificial Sequence: Synthetic oligonucleotide
  Antisense strand to SEQ ID NO: 1626163
aucacugcaggacuuucau

SEQ ID NO: 1626165 - RNA, 19 nt, Artificial Sequence
  Description of Artificial Sequence: Synthetic oligonucleotide
  Sense strand starting at position 1181 of SEQ ID NO: 1560812
ccaccagacuuguccuaga

SEQ ID NO: 1626166 - RNA, 19 nt, Artificial Sequence
  Description of Artificial Sequence: Synthetic oligonucleotide
  Antisense strand to SEQ ID NO: 1626165
ucuaggacaagucuggugg

SEQ ID NO: 1626167 - RNA, 19 nt, Artificial Sequence
  Description of Artificial Sequence: Synthetic oligonucleotide
  Sense strand starting at position 1413 of SEQ ID NO: 1560812
guuauuaaugaagguguca

SEQ ID NO: 1626168 - RNA, 19 nt, Artificial Sequence
  Description of Artificial Sequence: Synthetic oligonucleotide
  Antisense strand to SEQ ID NO: 1626167
ugacaccuucauuaauaac

SEQ ID NO: 1626169 - RNA, 19 nt, Artificial Sequence
  Description of Artificial Sequence: Synthetic oligonucleotide
  Sense strand starting at position 1592 of SEQ ID NO: 1560812
ucaugaugaccguauagug

SEQ ID NO: 1626170 - RNA, 19 nt, Artificial Sequence
  Description of Artificial Sequence: Synthetic oligonucleotide
  Antisense strand to SEQ ID NO: 1626169
cacuauacggucaucauga

SEQ ID NO: 1626171 - RNA, 19 nt, Artificial Sequence
  Description of Artificial Sequence: Synthetic oligonucleotide
  Sense strand starting at position 1647 of SEQ ID NO: 1560812
caucacggucaagaguaaa

SEQ ID NO: 1626172 - RNA, 19 nt, Artificial Sequence
  Description of Artificial Sequence: Synthetic oligonucleotide
  Antisense strand to SEQ ID NO: 1626171
uuuacucuugaccgugaug

SEQ ID NO: 1626173 - RNA, 19 nt, Artificial Sequence
  Description of Artificial Sequence: Synthetic oligonucleotide
  Sense strand starting at position 1658 of SEQ ID NO: 1560812
agaguaaauuguccaggca

SEQ ID NO: 1626174 - RNA, 19 nt, Artificial Sequence
  Description of Artificial Sequence: Synthetic oligonucleotide
  Antisense strand to SEQ ID NO: 1626173
ugccuggacaauuuacucu

SEQ ID NO: 1626175 - RNA, 19 nt, Artificial Sequence
  Description of Artificial Sequence: Synthetic oligonucleotide
  Sense strand starting at position 1659 of SEQ ID NO: 1560812
gaguaaauuguccaggcau

SEQ ID NO: 1626176 - RNA, 19 nt, Artificial Sequence
  Description of Artificial Sequence: Synthetic oligonucleotide
  Antisense strand to SEQ ID NO: 1626175
augccuggacaauuuacuc

SEQ ID NO: 1626177 - RNA, 19 nt, Artificial Sequence
  Description of Artificial Sequence: Synthetic oligonucleotide
  Sense strand starting at position 1724 of SEQ ID NO: 1560812
uuaugaauuuguucugugu

SEQ ID NO: 1626178 - RNA, 19 nt, Artificial Sequence
  Description of Artificial Sequence: Synthetic oligonucleotide
  Antisense strand to SEQ ID NO: 1626177
acacagaacaaauucauaa

SEQ ID NO: 1626179 - RNA, 19 nt, Artificial Sequence
  Description of Artificial Sequence: Synthetic oligonucleotide
  Sense strand starting at position 1752 of SEQ ID NO: 1560812
caguaacaucuuugggaca

SEQ ID NO: 1626180 - RNA, 19 nt, Artificial Sequence
  Description of Artificial Sequence: Synthetic oligonucleotide
  Antisense strand to SEQ ID NO: 1626179
ugucccaaagauguuacug

SEQ ID NO: 1626181 - RNA, 19 nt, Artificial Sequence
  Description of Artificial Sequence: Synthetic oligonucleotide
  Sense strand starting at position 1765 of SEQ ID NO: 1560812
gggacagucguggagguaa

SEQ ID NO: 1626182 - RNA, 19 nt, Artificial Sequence
  Description of Artificial Sequence: Synthetic oligonucleotide
  Antisense strand to SEQ ID NO: 1626181
uuaccuccacgacuguccc

SEQ ID NO: 1626183 - RNA, 19 nt, Artificial Sequence
  Description of Artificial Sequence: Synthetic oligonucleotide
  Sense strand starting at position 1961 of SEQ ID NO: 1560812
ggagaaauucuugggcaug

SEQ ID NO: 1626184 - RNA, 19 nt, Artificial Sequence
  Description of Artificial Sequence: Synthetic oligonucleotide
  Antisense strand to SEQ ID NO: 1626183
caugcccaagaauuucucc

SEQ ID NO: 1626185 - RNA, 19 nt, Artificial Sequence
  Description of Artificial Sequence: Synthetic oligonucleotide
  Sense strand starting at position 1964 of SEQ ID NO: 1560812
gaaauucuugggcaugugu

SEQ ID NO: 1626186 - RNA, 19 nt, Artificial Sequence
  Description of Artificial Sequence: Synthetic oligonucleotide
  Antisense strand to SEQ ID NO: 1626185
acacaugcccaagaauuuc

SEQ ID NO: 1626187 - RNA, 19 nt, Artificial Sequence
  Description of Artificial Sequence: Synthetic oligonucleotide
  Sense strand starting at position 1971 of SEQ ID NO: 1560812
uugggcauguguuugauuu

SEQ ID NO: 1626188 - RNA, 19 nt, Artificial Sequence
  Description of Artificial Sequence: Synthetic oligonucleotide
  Antisense strand to SEQ ID NO: 1626187
aaaucaaacacaugcccaa

SEQ ID NO: 1626189 - RNA, 19 nt, Artificial Sequence
  Description of Artificial Sequence: Synthetic oligonucleotide
  Sense strand starting at position 1972 of SEQ ID NO: 1560812
ugggcauguguuugauuuc

SEQ ID NO: 1626190 - RNA, 19 nt, Artificial Sequence
  Description of Artificial Sequence: Synthetic oligonucleotide
  Antisense strand to SEQ ID NO: 1626189
gaaaucaaacacaugccca

SEQ ID NO: 1626191 - RNA, 19 nt, Artificial Sequence
  Description of Artificial Sequence: Synthetic oligonucleotide
  Sense strand starting at position 1978 of SEQ ID NO: 1560812
uguguuugauuuccuguuu

SEQ ID NO: 1626192 - RNA, 19 nt, Artificial Sequence
  Description of Artificial Sequence: Synthetic oligonucleotide
  Antisense strand to SEQ ID NO: 1626191
aaacaggaaaucaaacaca

SEQ ID NO: 1626193 - RNA, 19 nt, Artificial Sequence
  Description of Artificial Sequence: Synthetic oligonucleotide
  Sense strand starting at position 2199 of SEQ ID NO: 1560812
guguuaguuccauaauacu

SEQ ID NO: 1626194 - RNA, 19 nt, Artificial Sequence
  Description of Artificial Sequence: Synthetic oligonucleotide
  Antisense strand to SEQ ID NO: 1626193
aguauuauggaacuaacac

SEQ ID NO: 1626195 - RNA, 19 nt, Artificial Sequence
  Description of Artificial Sequence: Synthetic oligonucleotide
  Sense strand starting at position 2242 of SEQ ID NO: 1560812
caaaguguuguccaugaac

SEQ ID NO: 1626196 - RNA, 19 nt, Artificial Sequence
  Description of Artificial Sequence: Synthetic oligonucleotide
  Antisense strand to SEQ ID NO: 1626195
guucauggacaacacuuug

SEQ ID NO: 1626197 - RNA, 19 nt, Artificial Sequence
  Description of Artificial Sequence: Synthetic oligonucleotide
  Sense strand starting at position 2289 of SEQ ID NO: 1560812
ugcagaaucccuggucaga

SEQ ID NO: 1626198 - RNA, 19 nt, Artificial Sequence
  Description of Artificial Sequence: Synthetic oligonucleotide
  Antisense strand to SEQ ID NO: 1626197
ucugaccagggauucugca

SEQ ID NO: 1626199 - RNA, 19 nt, Artificial Sequence
  Description of Artificial Sequence: Synthetic oligonucleotide
  Sense strand starting at position 2354 of SEQ ID NO: 1560812
acaugcauauuagugauau

SEQ ID NO: 1626200 - RNA, 19 nt, Artificial Sequence
  Description of Artificial Sequence: Synthetic oligonucleotide
  Antisense strand to SEQ ID NO: 1626199
auaucacuaauaugcaugu

SEQ ID NO: 1626201 - RNA, 19 nt, Artificial Sequence
  Description of Artificial Sequence: Synthetic oligonucleotide
  Sense strand starting at position 2362 of SEQ ID NO: 1560812
auuagugauauaggaguua

SEQ ID NO: 1626202 - RNA, 19 nt, Artificial Sequence
  Description of Artificial Sequence: Synthetic oligonucleotide
  Antisense strand to SEQ ID NO: 1626201
uaacuccuauaucacuaau

SEQ ID NO: 1626203 - RNA, 19 nt, Artificial Sequence
  Description of Artificial Sequence: Synthetic oligonucleotide
  Sense strand starting at position 2388 of SEQ ID NO: 1560812
aucacuuacgcagauagua

SEQ ID NO: 1626204 - RNA, 19 nt, Artificial Sequence
  Description of Artificial Sequence: Synthetic oligonucleotide
  Antisense strand to SEQ ID NO: 1626203
uacuaucugcguaagugau

SEQ ID NO: 1626205 - RNA, 19 nt, Artificial Sequence
  Description of Artificial Sequence: Synthetic oligonucleotide
  Sense strand starting at position 2619 of SEQ ID NO: 1560812
cgcagaucaacuggaaagu

SEQ ID NO: 1626206 - RNA, 19 nt, Artificial Sequence
  Description of Artificial Sequence: Synthetic oligonucleotide
  Antisense strand to SEQ ID NO: 1626205
acuuuccaguugaucugcg

SEQ ID NO: 1626207 - RNA, 19 nt, Artificial Sequence
  Description of Artificial Sequence: Synthetic oligonucleotide
  Sense strand starting at position 2675 of SEQ ID NO: 1560812
uucccugagcacuaugaaa

SEQ ID NO: 1626208 - RNA, 19 nt, Artificial Sequence
  Description of Artificial Sequence: Synthetic oligonucleotide
  Antisense strand to SEQ ID NO: 1626207
uuucauagugcucagggaa

SEQ ID NO: 1626209 - RNA, 19 nt, Artificial Sequence
  Description of Artificial Sequence: Synthetic oligonucleotide
  Sense strand starting at position 2715 of SEQ ID NO: 1560812
aucugugagccugauguaa

SEQ ID NO: 1626210 - RNA, 19 nt, Artificial Sequence
  Description of Artificial Sequence: Synthetic oligonucleotide
  Antisense strand to SEQ ID NO: 1626209
uuacaucaggcucacagau

SEQ ID NO: 1626211 - RNA, 19 nt, Artificial Sequence
  Description of Artificial Sequence: Synthetic oligonucleotide
  Sense strand starting at position 2719 of SEQ ID NO: 1560812
gugagccugauguaaauca

SEQ ID NO: 1626212 - RNA, 19 nt, Artificial Sequence
  Description of Artificial Sequence: Synthetic oligonucleotide
  Antisense strand to SEQ ID NO: 1626211
ugauuuacaucaggcucac

SEQ ID NO: 1626213 - RNA, 19 nt, Artificial Sequence
  Description of Artificial Sequence: Synthetic oligonucleotide
  Sense strand starting at position 2977 of SEQ ID NO: 1560812
agcaauggucuuggacacu

SEQ ID NO: 1626214 - RNA, 19 nt, Artificial Sequence
  Description of Artificial Sequence: Synthetic oligonucleotide
  Antisense strand to SEQ ID NO: 1626213
aguguccaagaccauugcu

SEQ ID NO: 1626215 - RNA, 19 nt, Artificial Sequence
  Description of Artificial Sequence: Synthetic oligonucleotide
  Sense strand starting at position 3231 of SEQ ID NO: 1560812
uguuuaugugaucauaugu

SEQ ID NO: 1626216 - RNA, 19 nt, Artificial Sequence
  Description of Artificial Sequence: Synthetic oligonucleotide
  Antisense strand to SEQ ID NO: 1626215
acauaugaucacauaaaca

SEQ ID NO: 1626217 - RNA, 19 nt, Artificial Sequence
  Description of Artificial Sequence: Synthetic oligonucleotide
  Sense strand starting at position 3282 of SEQ ID NO: 1560812
cuguucugucacuggaaag

SEQ ID NO: 1626218 - RNA, 19 nt, Artificial Sequence
  Description of Artificial Sequence: Synthetic oligonucleotide
  Antisense strand to SEQ ID NO: 1626217
cuuuccagugacagaacag

SEQ ID NO: 1626219 - RNA, 19 nt, Artificial Sequence
  Description of Artificial Sequence: Synthetic oligonucleotide
  Sense strand starting at position 3304 of SEQ ID NO: 1560812
gucagacauuaugcuuuaa

SEQ ID NO: 1626220 - RNA, 19 nt, Artificial Sequence
  Description of Artificial Sequence: Synthetic oligonucleotide
  Antisense strand to SEQ ID NO: 1626219
uuaaagcauaaugucugac

SEQ ID NO: 1626221 - RNA, 19 nt, Artificial Sequence
  Description of Artificial Sequence: Synthetic oligonucleotide
  Sense strand starting at position 3358 of SEQ ID NO: 1560812
auagguacugcguauuaaa

SEQ ID NO: 1626222 - RNA, 19 nt, Artificial Sequence
  Description of Artificial Sequence: Synthetic oligonucleotide
  Antisense strand to SEQ ID NO: 1626221
uuuaauacgcaguaccuau

SEQ ID NO: 1626223 - RNA, 19 nt, Artificial Sequence
  Description of Artificial Sequence: Synthetic oligonucleotide
  Sense strand starting at position 3478 of SEQ ID NO: 1560812
acuugaucaguguauuagu

SEQ ID NO: 1626224 - RNA, 19 nt, Artificial Sequence
  Description of Artificial Sequence: Synthetic oligonucleotide
  Antisense strand to SEQ ID NO: 1626223
acuaauacacugaucaagu

SEQ ID NO: 1626225 - RNA, 19 nt, Artificial Sequence
  Description of Artificial Sequence: Synthetic oligonucleotide
  Sense strand starting at position 3543 of SEQ ID NO: 1560812
ugaagaaagugguuuaguu

SEQ ID NO: 1626226 - RNA, 19 nt, Artificial Sequence
  Description of Artificial Sequence: Synthetic oligonucleotide
  Antisense strand to SEQ ID NO: 1626225
aacuaaaccacuuucuuca

SEQ ID NO: 1626227 - RNA, 19 nt, Artificial Sequence
  Description of Artificial Sequence: Synthetic oligonucleotide
  Sense strand starting at position 3545 of SEQ ID NO: 1560812
aagaaagugguuuaguuga

SEQ ID NO: 1626228 - RNA, 19 nt, Artificial Sequence
  Description of Artificial Sequence: Synthetic oligonucleotide
  Antisense strand to SEQ ID NO: 1626227
ucaacuaaaccacuuucuu

SEQ ID NO: 1626229 - RNA, 19 nt, Artificial Sequence
  Description of Artificial Sequence: Synthetic oligonucleotide
  Sense strand starting at position 3547 of SEQ ID NO: 1560812
gaaagugguuuaguugauu

SEQ ID NO: 1626230 - RNA, 19 nt, Artificial Sequence
  Description of Artificial Sequence: Synthetic oligonucleotide
  Antisense strand to SEQ ID NO: 1626229
aaucaacuaaaccacuuuc

SEQ ID NO: 1626231 - RNA, 19 nt, Artificial Sequence
  Description of Artificial Sequence: Synthetic oligonucleotide
  Sense strand starting at position 255 of SEQ ID NO: 1560813
aaguuaagauuacugguua

SEQ ID NO: 1626232 - RNA, 19 nt, Artificial Sequence
  Description of Artificial Sequence: Synthetic oligonucleotide
  Antisense strand to SEQ ID NO: 1626231
uaaccaguaaucuuaacuu

SEQ ID NO: 1626233 - RNA, 19 nt, Artificial Sequence
  Description of Artificial Sequence: Synthetic oligonucleotide
  Sense strand starting at position 256 of SEQ ID NO: 1560813
aguuaagauuacugguuag

SEQ ID NO: 1626234 - RNA, 19 nt, Artificial Sequence
  Description of Artificial Sequence: Synthetic oligonucleotide
  Antisense strand to SEQ ID NO: 1626233
cuaaccaguaaucuuaacu

SEQ ID NO: 1626235 - RNA, 19 nt, Artificial Sequence
  Description of Artificial Sequence: Synthetic oligonucleotide
  Sense strand starting at position 323 of SEQ ID NO: 1560813
caggaaacguuccaaagga

SEQ ID NO: 1626236 - RNA, 19 nt, Artificial Sequence
  Description of Artificial Sequence: Synthetic oligonucleotide
  Antisense strand to SEQ ID NO: 1626235
uccuuuggaacguuuccug

SEQ ID NO: 1626237 - RNA, 19 nt, Artificial Sequence
  Description of Artificial Sequence: Synthetic oligonucleotide
  Sense strand starting at position 809 of SEQ ID NO: 1560813
aaacaauuggccgggaauu

SEQ ID NO: 1626238 - RNA, 19 nt, Artificial Sequence
  Description of Artificial Sequence: Synthetic oligonucleotide
  Antisense strand to SEQ ID NO: 1626237
aauucccggccaauuguuu

SEQ ID NO: 1626239 - RNA, 19 nt, Artificial Sequence
  Description of Artificial Sequence: Synthetic oligonucleotide
  Sense strand starting at position 985 of SEQ ID NO: 1560813
aguugaaauauuggcugaa

SEQ ID NO: 1626240 - RNA, 19 nt, Artificial Sequence
  Description of Artificial Sequence: Synthetic oligonucleotide
  Antisense strand to SEQ ID NO: 1626239
uucagccaauauuucaacu

SEQ ID NO: 1626241 - RNA, 19 nt, Artificial Sequence
  Description of Artificial Sequence: Synthetic oligonucleotide
  Sense strand starting at position 986 of SEQ ID NO: 1560813
guugaaauauuggcugaaa

SEQ ID NO: 1626242 - RNA, 19 nt, Artificial Sequence
  Description of Artificial Sequence: Synthetic oligonucleotide
  Antisense strand to SEQ ID NO: 1626241
uuucagccaauauuucaac

SEQ ID NO: 1626243 - RNA, 19 nt, Artificial Sequence
  Description of Artificial Sequence: Synthetic oligonucleotide
  Sense strand starting at position 987 of SEQ ID NO: 1560813
uugaaauauuggcugaaag

SEQ ID NO: 1626244 - RNA, 19 nt, Artificial Sequence
  Description of Artificial Sequence: Synthetic oligonucleotide
  Antisense strand to SEQ ID NO: 1626243
cuuucagccaauauuucaa

SEQ ID NO: 1626245 - RNA, 19 nt, Artificial Sequence
  Description of Artificial Sequence: Synthetic oligonucleotide
  Sense strand starting at position 1009 of SEQ ID NO: 1560813
ccagucuggccucaguauu

SEQ ID NO: 1626246 - RNA, 19 nt, Artificial Sequence
  Description of Artificial Sequence: Synthetic oligonucleotide
  Antisense strand to SEQ ID NO: 1626245
aauacugaggccagacugg

SEQ ID NO: 1626247 - RNA, 19 nt, Artificial Sequence
  Description of Artificial Sequence: Synthetic oligonucleotide
  Sense strand starting at position 2129 of SEQ ID NO: 1560813
uuggcuaauuauuggauuu

SEQ ID NO: 1626248 - RNA, 19 nt, Artificial Sequence
  Description of Artificial Sequence: Synthetic oligonucleotide
  Antisense strand to SEQ ID NO: 1626247
aaauccaauaauuagccaa

SEQ ID NO: 1626249 - RNA, 19 nt, Artificial Sequence
  Description of Artificial Sequence: Synthetic oligonucleotide
  Sense strand starting at position 2131 of SEQ ID NO: 1560813
ggcuaauuauuggauuucu

SEQ ID NO: 1626250 - RNA, 19 nt, Artificial Sequence
  Description of Artificial Sequence: Synthetic oligonucleotide
  Antisense strand to SEQ ID NO: 1626249
agaaauccaauaauuagcc

SEQ ID NO: 1626251 - RNA, 19 nt, Artificial Sequence
  Description of Artificial Sequence: Synthetic oligonucleotide
  Sense strand starting at position 2139 of SEQ ID NO: 1560813
auuggauuucuuugccgac

SEQ ID NO: 1626252 - RNA, 19 nt, Artificial Sequence
  Description of Artificial Sequence: Synthetic oligonucleotide
  Antisense strand to SEQ ID NO: 1626251
gucggcaaagaaauccaau

SEQ ID NO: 1626253 - RNA, 19 nt, Artificial Sequence
  Description of Artificial Sequence: Synthetic oligonucleotide
  Sense strand starting at position 2140 of SEQ ID NO: 1560813
uuggauuucuuugccgaca

SEQ ID NO: 1626254 - RNA, 19 nt, Artificial Sequence
  Description of Artificial Sequence: Synthetic oligonucleotide
  Antisense strand to SEQ ID NO: 1626253
ugucggcaaagaaauccaa

SEQ ID NO: 1626255 - RNA, 19 nt, Artificial Sequence
  Description of Artificial Sequence: Synthetic oligonucleotide
  Sense strand starting at position 2142 of SEQ ID NO: 1560813
ggauuucuuugccgacaag

SEQ ID NO: 1626256 - RNA, 19 nt, Artificial Sequence
  Description of Artificial Sequence: Synthetic oligonucleotide
  Antisense strand to SEQ ID NO: 1626255
cuugucggcaaagaaaucc

SEQ ID NO: 1626257 - RNA, 19 nt, Artificial Sequence
  Description of Artificial Sequence: Synthetic oligonucleotide
  Sense strand starting at position 2145 of SEQ ID NO: 1560813
uuucuuugccgacaaguua

SEQ ID NO: 1626258 - RNA, 19 nt, Artificial Sequence
  Description of Artificial Sequence: Synthetic oligonucleotide
  Antisense strand to SEQ ID NO: 1626257
uaacuugucggcaaagaaa

SEQ ID NO: 1626259 - RNA, 19 nt, Artificial Sequence
  Description of Artificial Sequence: Synthetic oligonucleotide
  Sense strand starting at position 2171 of SEQ ID NO: 1560813
caucgcuaccuggagaagu

SEQ ID NO: 1626260 - RNA, 19 nt, Artificial Sequence
  Description of Artificial Sequence: Synthetic oligonucleotide
  Antisense strand to SEQ ID NO: 1626259
acuucuccagguagcgaug

SEQ ID NO: 1626261 - RNA, 19 nt, Artificial Sequence
  Description of Artificial Sequence: Synthetic oligonucleotide
  Sense strand starting at position 2213 of SEQ ID NO: 1560813
aacugugguuccuggaaca

SEQ ID NO: 1626262 - RNA, 19 nt, Artificial Sequence
  Description of Artificial Sequence: Synthetic oligonucleotide
  Antisense strand to SEQ ID NO: 1626261
uguuccaggaaccacaguu

SEQ ID NO: 1626263 - RNA, 19 nt, Artificial Sequence
  Description of Artificial Sequence: Synthetic oligonucleotide
  Sense strand starting at position 2250 of SEQ ID NO: 1560813
gggaacucauuagacaugu

SEQ ID NO: 1626264 - RNA, 19 nt, Artificial Sequence
  Description of Artificial Sequence: Synthetic oligonucleotide
  Antisense strand to SEQ ID NO: 1626263
acaugucuaaugaguuccc

SEQ ID NO: 1626265 - RNA, 19 nt, Artificial Sequence
  Description of Artificial Sequence: Synthetic oligonucleotide
  Sense strand starting at position 2259 of SEQ ID NO: 1560813
uuagacaugugccuuauca

SEQ ID NO: 1626266 - RNA, 19 nt, Artificial Sequence
  Description of Artificial Sequence: Synthetic oligonucleotide
  Antisense strand to SEQ ID NO: 1626265
ugauaaggcacaugucuaa

SEQ ID NO: 1626267 - RNA, 19 nt, Artificial Sequence
  Description of Artificial Sequence: Synthetic oligonucleotide
  Sense strand starting at position 2261 of SEQ ID NO: 1560813
agacaugugccuuaucaug

SEQ ID NO: 1626268 - RNA, 19 nt, Artificial Sequence
  Description of Artificial Sequence: Synthetic oligonucleotide
  Antisense strand to SEQ ID NO: 1626267
caugauaaggcacaugucu

SEQ ID NO: 1626269 - RNA, 19 nt, Artificial Sequence
  Description of Artificial Sequence: Synthetic oligonucleotide
  Sense strand starting at position 2297 of SEQ ID NO: 1560813
aucugauacucuggguaug

SEQ ID NO: 1626270 - RNA, 19 nt, Artificial Sequence
  Description of Artificial Sequence: Synthetic oligonucleotide
  Antisense strand to SEQ ID NO: 1626269
cauacccagaguaucagau

SEQ ID NO: 1626271 - RNA, 19 nt, Artificial Sequence
  Description of Artificial Sequence: Synthetic oligonucleotide
  Sense strand starting at position 2299 of SEQ ID NO: 1560813
cugauacucuggguaugga

SEQ ID NO: 1626272 - RNA, 19 nt, Artificial Sequence
  Description of Artificial Sequence: Synthetic oligonucleotide
  Antisense strand to SEQ ID NO: 1626271
uccauacccagaguaucag

SEQ ID NO: 1626273 - RNA, 19 nt, Artificial Sequence
  Description of Artificial Sequence: Synthetic oligonucleotide
  Sense strand starting at position 2316 of SEQ ID NO: 1560813
gagccagcauucugguuua

SEQ ID NO: 1626274 - RNA, 19 nt, Artificial Sequence
  Description of Artificial Sequence: Synthetic oligonucleotide
  Antisense strand to SEQ ID NO: 1626273
uaaaccagaaugcuggcuc

SEQ ID NO: 1626275 - RNA, 19 nt, Artificial Sequence
  Description of Artificial Sequence: Synthetic oligonucleotide
  Sense strand starting at position 2319 of SEQ ID NO: 1560813
ccagcauucugguuuaguu

SEQ ID NO: 1626276 - RNA, 19 nt, Artificial Sequence
  Description of Artificial Sequence: Synthetic oligonucleotide
  Antisense strand to SEQ ID NO: 1626275
aacuaaaccagaaugcugg

SEQ ID NO: 1626277 - RNA, 19 nt, Artificial Sequence
  Description of Artificial Sequence: Synthetic oligonucleotide
  Sense strand starting at position 2993 of SEQ ID NO: 1560813
acucaaguuugaggacuau

SEQ ID NO: 1626278 - RNA, 19 nt, Artificial Sequence
  Description of Artificial Sequence: Synthetic oligonucleotide
  Antisense strand to SEQ ID NO: 1626277
auaguccucaaacuugagu

SEQ ID NO: 1626279 - RNA, 19 nt, Artificial Sequence
  Description of Artificial Sequence: Synthetic oligonucleotide
  Sense strand starting at position 3078 of SEQ ID NO: 1560813
gcccuuucugccuaaggca

SEQ ID NO: 1626280 - RNA, 19 nt, Artificial Sequence
  Description of Artificial Sequence: Synthetic oligonucleotide
  Antisense strand to SEQ ID NO: 1626279
ugccuuaggcagaaagggc

SEQ ID NO: 1626281 - RNA, 19 nt, Artificial Sequence
  Description of Artificial Sequence: Synthetic oligonucleotide
  Sense strand starting at position 3126 of SEQ ID NO: 1560813
ucccuaauucuaggcagau

SEQ ID NO: 1626282 - RNA, 19 nt, Artificial Sequence
  Description of Artificial Sequence: Synthetic oligonucleotide
  Antisense strand to SEQ ID NO: 1626281
aucugccuagaauuaggga

SEQ ID NO: 1626283 - RNA, 19 nt, Artificial Sequence
  Description of Artificial Sequence: Synthetic oligonucleotide
  Sense strand starting at position 3127 of SEQ ID NO: 1560813
cccuaauucuaggcagauu

SEQ ID NO: 1626284 - RNA, 19 nt, Artificial Sequence
  Description of Artificial Sequence: Synthetic oligonucleotide
  Antisense strand to SEQ ID NO: 1626283
aaucugccuagaauuaggg

SEQ ID NO: 1626285 - RNA, 19 nt, Artificial Sequence
  Description of Artificial Sequence: Synthetic oligonucleotide
  Sense strand starting at position 3142 of SEQ ID NO: 1560813
gauugucaauccucagaag

SEQ ID NO: 1626286 - RNA, 19 nt, Artificial Sequence
  Description of Artificial Sequence: Synthetic oligonucleotide
  Antisense strand to SEQ ID NO: 1626285
cuucugaggauugacaauc

SEQ ID NO: 1626287 - RNA, 19 nt, Artificial Sequence
  Description of Artificial Sequence: Synthetic oligonucleotide
  Sense strand starting at position 3145 of SEQ ID NO: 1560813
ugucaauccucagaaggcu

SEQ ID NO: 1626288 - RNA, 19 nt, Artificial Sequence
  Description of Artificial Sequence: Synthetic oligonucleotide
  Antisense strand to SEQ ID NO: 1626287
agccuucugaggauugaca

SEQ ID NO: 1626289 - RNA, 19 nt, Artificial Sequence
  Description of Artificial Sequence: Synthetic oligonucleotide
  Sense strand starting at position 3175 of SEQ ID NO: 1560813
ugugcugcauuccuguaau

SEQ ID NO: 1626290 - RNA, 19 nt, Artificial Sequence
  Description of Artificial Sequence: Synthetic oligonucleotide
  Antisense strand to SEQ ID NO: 1626289
auuacaggaaugcagcaca

SEQ ID NO: 1626291 - RNA, 19 nt, Artificial Sequence
  Description of Artificial Sequence: Synthetic oligonucleotide
  Sense strand starting at position 3178 of SEQ ID NO: 1560813
gcugcauuccuguaauuua

SEQ ID NO: 1626292 - RNA, 19 nt, Artificial Sequence
  Description of Artificial Sequence: Synthetic oligonucleotide
  Antisense strand to SEQ ID NO: 1626291
uaaauuacaggaaugcagc

SEQ ID NO: 1626293 - RNA, 19 nt, Artificial Sequence
  Description of Artificial Sequence: Synthetic oligonucleotide
  Sense strand starting at position 3357 of SEQ ID NO: 1560813
aguuguaaugucuacaugu

SEQ ID NO: 1626294 - RNA, 19 nt, Artificial Sequence
  Description of Artificial Sequence: Synthetic oligonucleotide
  Antisense strand to SEQ ID NO: 1626293
acauguagacauuacaacu

SEQ ID NO: 1626295 - RNA, 19 nt, Artificial Sequence
  Description of Artificial Sequence: Synthetic oligonucleotide
  Sense strand starting at position 3373 of SEQ ID NO: 1560813
uguuaaauccucuggaucu

SEQ ID NO: 1626296 - RNA, 19 nt, Artificial Sequence
  Description of Artificial Sequence: Synthetic oligonucleotide
  Antisense strand to SEQ ID NO: 1626295
agauccagaggauuuaaca

SEQ ID NO: 1626297 - RNA, 19 nt, Artificial Sequence
  Description of Artificial Sequence: Synthetic oligonucleotide
  Sense strand starting at position 3374 of SEQ ID NO: 1560813
guuaaauccucuggaucuu

SEQ ID NO: 1626298 - RNA, 19 nt, Artificial Sequence
  Description of Artificial Sequence: Synthetic oligonucleotide
  Antisense strand to SEQ ID NO: 1626297
aagauccagaggauuuaac

SEQ ID NO: 1626299 - RNA, 19 nt, Artificial Sequence
  Description of Artificial Sequence: Synthetic oligonucleotide
  Sense strand starting at position 3512 of SEQ ID NO: 1560813
gcccuagaguuucuagaua

SEQ ID NO: 1626300 - RNA, 19 nt, Artificial Sequence
  Description of Artificial Sequence: Synthetic oligonucleotide
  Antisense strand to SEQ ID NO: 1626299
uaucuagaaacucuagggc

SEQ ID NO: 1626301 - RNA, 19 nt, Artificial Sequence
  Description of Artificial Sequence: Synthetic oligonucleotide
  Sense strand starting at position 3712 of SEQ ID NO: 1560813
uuagguuaaucuguaaaug

SEQ ID NO: 1626302 - RNA, 19 nt, Artificial Sequence
  Description of Artificial Sequence: Synthetic oligonucleotide
  Antisense strand to SEQ ID NO: 1626301
cauuuacagauuaaccuaa

SEQ ID NO: 1626303 - RNA, 19 nt, Artificial Sequence
  Description of Artificial Sequence: Synthetic oligonucleotide
  Sense strand starting at position 3730 of SEQ ID NO: 1560813
ggccuuucucaguuguugu

SEQ ID NO: 1626304 - RNA, 19 nt, Artificial Sequence
  Description of Artificial Sequence: Synthetic oligonucleotide
  Antisense strand to SEQ ID NO: 1626303
acaacaacugagaaaggcc

SEQ ID NO: 1626305 - RNA, 19 nt, Artificial Sequence
  Description of Artificial Sequence: Synthetic oligonucleotide
  Sense strand starting at position 3731 of SEQ ID NO: 1560813
gccuuucucaguuguuguu

SEQ ID NO: 1626306 - RNA, 19 nt, Artificial Sequence
  Description of Artificial Sequence: Synthetic oligonucleotide
  Antisense strand to SEQ ID NO: 1626305
aacaacaacugagaaaggc

SEQ ID NO: 1626307 - RNA, 19 nt, Artificial Sequence
  Description of Artificial Sequence: Synthetic oligonucleotide
  Sense strand starting at position 2149 of SEQ ID NO: 1560814
auagaaauguuguccauac

SEQ ID NO: 1626308 - RNA, 19 nt, Artificial Sequence
  Description of Artificial Sequence: Synthetic oligonucleotide
  Antisense strand to SEQ ID NO: 1626307
guauggacaacauuucuau

SEQ ID NO: 1626309 - RNA, 19 nt, Artificial Sequence
  Description of Artificial Sequence: Synthetic oligonucleotide
  Sense strand starting at position 2151 of SEQ ID NO: 1560814
agaaauguuguccauacua

SEQ ID NO: 1626310 - RNA, 19 nt, Artificial Sequence
  Description of Artificial Sequence: Synthetic oligonucleotide
  Antisense strand to SEQ ID NO: 1626309
uaguauggacaacauuucu

SEQ ID NO: 1626311 - RNA, 19 nt, Artificial Sequence
  Description of Artificial Sequence: Synthetic oligonucleotide
  Sense strand starting at position 2342 of SEQ ID NO: 1560814
ugguuacuguagugaaaca

SEQ ID NO: 1626312 - RNA, 19 nt, Artificial Sequence
  Description of Artificial Sequence: Synthetic oligonucleotide
  Antisense strand to SEQ ID NO: 1626311
uguuucacuacaguaacca

SEQ ID NO: 1626313 - RNA, 19 nt, Artificial Sequence
  Description of Artificial Sequence: Synthetic oligonucleotide
  Sense strand starting at position 2366 of SEQ ID NO: 1560814
acauauccaucgucuuaca

SEQ ID NO: 1626314 - RNA, 19 nt, Artificial Sequence
  Description of Artificial Sequence: Synthetic oligonucleotide
  Antisense strand to SEQ ID NO: 1626313
uguaagacgauggauaugu

SEQ ID NO: 1626315 - RNA, 19 nt, Artificial Sequence
  Description of Artificial Sequence: Synthetic oligonucleotide
  Sense strand starting at position 2371 of SEQ ID NO: 1560814
uccaucgucuuacauaguu

SEQ ID NO: 1626316 - RNA, 19 nt, Artificial Sequence
  Description of Artificial Sequence: Synthetic oligonucleotide
  Antisense strand to SEQ ID NO: 1626315
aacuauguaagacgaugga

SEQ ID NO: 1626317 - RNA, 19 nt, Artificial Sequence
  Description of Artificial Sequence: Synthetic oligonucleotide
  Sense strand starting at position 2415 of SEQ ID NO: 1560814
gcuacagucuacugaugua

SEQ ID NO: 1626318 - RNA, 19 nt, Artificial Sequence
  Description of Artificial Sequence: Synthetic oligonucleotide
  Antisense strand to SEQ ID NO: 1626317
uacaucaguagacuguagc

SEQ ID NO: 1626319 - RNA, 19 nt, Artificial Sequence
  Description of Artificial Sequence: Synthetic oligonucleotide
  Sense strand starting at position 2431 of SEQ ID NO: 1560814
guagcauaaauccggaaua

SEQ ID NO: 1626320 - RNA, 19 nt, Artificial Sequence
  Description of Artificial Sequence: Synthetic oligonucleotide
  Antisense strand to SEQ ID NO: 1626319
uauuccggauuuaugcuac

SEQ ID NO: 1626321 - RNA, 19 nt, Artificial Sequence
  Description of Artificial Sequence: Synthetic oligonucleotide
  Sense strand starting at position 2433 of SEQ ID NO: 1560814
agcauaaauccggaauacu

SEQ ID NO: 1626322 - RNA, 19 nt, Artificial Sequence
  Description of Artificial Sequence: Synthetic oligonucleotide
  Antisense strand to SEQ ID NO: 1626321
aguauuccggauuuaugcu

SEQ ID NO: 1626323 - RNA, 19 nt, Artificial Sequence
  Description of Artificial Sequence: Synthetic oligonucleotide
  Sense strand starting at position 2452 of SEQ ID NO: 1560814
acauacuguuauugacuau

SEQ ID NO: 1626324 - RNA, 19 nt, Artificial Sequence
  Description of Artificial Sequence: Synthetic oligonucleotide
  Antisense strand to SEQ ID NO: 1626323
auagucaauaacaguaugu

SEQ ID NO: 1626325 - RNA, 19 nt, Artificial Sequence
  Description of Artificial Sequence: Synthetic oligonucleotide
  Sense strand starting at position 2494 of SEQ ID NO: 1560814
ucuagacucguuuauccua

SEQ ID NO: 1626326 - RNA, 19 nt, Artificial Sequence
  Description of Artificial Sequence: Synthetic oligonucleotide
  Antisense strand to SEQ ID NO: 1626325
uaggauaaacgagucuaga

SEQ ID NO: 1626327 - RNA, 19 nt, Artificial Sequence
  Description of Artificial Sequence: Synthetic oligonucleotide
  Sense strand starting at position 2497 of SEQ ID NO: 1560814
agacucguuuauccuauau

SEQ ID NO: 1626328 - RNA, 19 nt, Artificial Sequence
  Description of Artificial Sequence: Synthetic oligonucleotide
  Antisense strand to SEQ ID NO: 1626327
auauaggauaaacgagucu

SEQ ID NO: 1626329 - RNA, 19 nt, Artificial Sequence
  Description of Artificial Sequence: Synthetic oligonucleotide
  Sense strand starting at position 2499 of SEQ ID NO: 1560814
acucguuuauccuauauau

SEQ ID NO: 1626330 - RNA, 19 nt, Artificial Sequence
  Description of Artificial Sequence: Synthetic oligonucleotide
  Antisense strand to SEQ ID NO: 1626329
auauauaggauaaacgagu

SEQ ID NO: 1626331 - RNA, 19 nt, Artificial Sequence
  Description of Artificial Sequence: Synthetic oligonucleotide
  Sense strand starting at position 2501 of SEQ ID NO: 1560814
ucguuuauccuauauaucu

SEQ ID NO: 1626332 - RNA, 19 nt, Artificial Sequence
  Description of Artificial Sequence: Synthetic oligonucleotide
  Antisense strand to SEQ ID NO: 1626331
agauauauaggauaaacga

SEQ ID NO: 1626333 - RNA, 19 nt, Artificial Sequence
  Description of Artificial Sequence: Synthetic oligonucleotide
  Sense strand starting at position 2717 of SEQ ID NO: 1560814
ggcaaauggcaggaucuau

SEQ ID NO: 1626334 - RNA, 19 nt, Artificial Sequence
  Description of Artificial Sequence: Synthetic oligonucleotide
  Antisense strand to SEQ ID NO: 1626333
auagauccugccauuugcc

SEQ ID NO: 1626335 - RNA, 19 nt, Artificial Sequence
  Description of Artificial Sequence: Synthetic oligonucleotide
  Sense strand starting at position 2742 of SEQ ID NO: 1560814
uuuaucaaucaguggaaua

SEQ ID NO: 1626336 - RNA, 19 nt, Artificial Sequence
  Description of Artificial Sequence: Synthetic oligonucleotide
  Antisense strand to SEQ ID NO: 1626335
uauuccacugauugauaaa

SEQ ID NO: 1626337 - RNA, 19 nt, Artificial Sequence
  Description of Artificial Sequence: Synthetic oligonucleotide
  Sense strand starting at position 2753 of SEQ ID NO: 1560814
guggaauaauauugauugu

SEQ ID NO: 1626338 - RNA, 19 nt, Artificial Sequence
  Description of Artificial Sequence: Synthetic oligonucleotide
  Antisense strand to SEQ ID NO: 1626337
acaaucaauauuauuccac

SEQ ID NO: 1626339 - RNA, 19 nt, Artificial Sequence
  Description of Artificial Sequence: Synthetic oligonucleotide
  Sense strand starting at position 2948 of SEQ ID NO: 1560814
guuuccauaucuugacuuu

SEQ ID NO: 1626340 - RNA, 19 nt, Artificial Sequence
  Description of Artificial Sequence: Synthetic oligonucleotide
  Antisense strand to SEQ ID NO: 1626339
aaagucaagauauggaaac

SEQ ID NO: 1626341 - RNA, 19 nt, Artificial Sequence
  Description of Artificial Sequence: Synthetic oligonucleotide
  Sense strand starting at position 2996 of SEQ ID NO: 1560814
ugcagauaucuuuacgagu

SEQ ID NO: 1626342 - RNA, 19 nt, Artificial Sequence
  Description of Artificial Sequence: Synthetic oligonucleotide
  Antisense strand to SEQ ID NO: 1626341
acucguaaagauaucugca

SEQ ID NO: 1626343 - RNA, 19 nt, Artificial Sequence
  Description of Artificial Sequence: Synthetic oligonucleotide
  Sense strand starting at position 3002 of SEQ ID NO: 1560814
uaucuuuacgaguggcaau

SEQ ID NO: 1626344 - RNA, 19 nt, Artificial Sequence
  Description of Artificial Sequence: Synthetic oligonucleotide
  Antisense strand to SEQ ID NO: 1626343
auugccacucguaaagaua

SEQ ID NO: 1626345 - RNA, 19 nt, Artificial Sequence
  Description of Artificial Sequence: Synthetic oligonucleotide
  Sense strand starting at position 3003 of SEQ ID NO: 1560814
aucuuuacgaguggcaauu

SEQ ID NO: 1626346 - RNA, 19 nt, Artificial Sequence
  Description of Artificial Sequence: Synthetic oligonucleotide
  Antisense strand to SEQ ID NO: 1626345
aauugccacucguaaagau

SEQ ID NO: 1626347 - RNA, 19 nt, Artificial Sequence
  Description of Artificial Sequence: Synthetic oligonucleotide
  Sense strand starting at position 3942 of SEQ ID NO: 1560814
gugaauaguuaguuaauag

SEQ ID NO: 1626348 - RNA, 19 nt, Artificial Sequence
  Description of Artificial Sequence: Synthetic oligonucleotide
  Antisense strand to SEQ ID NO: 1626347
cuauuaacuaacuauucac

SEQ ID NO: 1626349 - RNA, 19 nt, Artificial Sequence
  Description of Artificial Sequence: Synthetic oligonucleotide
  Sense strand starting at position 3949 of SEQ ID NO: 1560814
guuaguuaauaguuagcua

SEQ ID NO: 1626350 - RNA, 19 nt, Artificial Sequence
  Description of Artificial Sequence: Synthetic oligonucleotide
  Antisense strand to SEQ ID NO: 1626349
uagcuaacuauuaacuaac

SEQ ID NO: 1626351 - RNA, 19 nt, Artificial Sequence
  Description of Artificial Sequence: Synthetic oligonucleotide
  Sense strand starting at position 3973 of SEQ ID NO: 1560814
agagccaauuguuagcuaa

SEQ ID NO: 1626352 - RNA, 19 nt, Artificial Sequence
  Description of Artificial Sequence: Synthetic oligonucleotide
  Antisense strand to SEQ ID NO: 1626351
uuagcuaacaauuggcucu

SEQ ID NO: 1626353 - RNA, 19 nt, Artificial Sequence
  Description of Artificial Sequence: Synthetic oligonucleotide
  Sense strand starting at position 85 of SEQ ID NO: 1560815
aaguuagaagugugggcaa

SEQ ID NO: 1626354 - RNA, 19 nt, Artificial Sequence
  Description of Artificial Sequence: Synthetic oligonucleotide
  Antisense strand to SEQ ID NO: 1626353
uugcccacacuucuaacuu

SEQ ID NO: 1626355 - RNA, 19 nt, Artificial Sequence
  Description of Artificial Sequence: Synthetic oligonucleotide
  Sense strand starting at position 88 of SEQ ID NO: 1560815
uuagaagugugggcaaagu

SEQ ID NO: 1626356 - RNA, 19 nt, Artificial Sequence
  Description of Artificial Sequence: Synthetic oligonucleotide
  Antisense strand to SEQ ID NO: 1626355
acuuugcccacacuucuaa

SEQ ID NO: 1626357 - RNA, 19 nt, Artificial Sequence
  Description of Artificial Sequence: Synthetic oligonucleotide
  Sense strand starting at position 104 of SEQ ID NO: 1560815
agugucagauuguuaggau

SEQ ID NO: 1626358 - RNA, 19 nt, Artificial Sequence
  Description of Artificial Sequence: Synthetic oligonucleotide
  Antisense strand to SEQ ID NO: 1626357
auccuaacaaucugacacu

SEQ ID NO: 1626359 - RNA, 19 nt, Artificial Sequence
  Description of Artificial Sequence: Synthetic oligonucleotide
  Sense strand starting at position 139 of SEQ ID NO: 1560815
ucagucuccuccuuugaga

SEQ ID NO: 1626360 - RNA, 19 nt, Artificial Sequence
  Description of Artificial Sequence: Synthetic oligonucleotide
  Antisense strand to SEQ ID NO: 1626359
ucucaaaggaggagacuga

SEQ ID NO: 1626361 - RNA, 19 nt, Artificial Sequence
  Description of Artificial Sequence: Synthetic oligonucleotide
  Sense strand starting at position 141 of SEQ ID NO: 1560815
agucuccuccuuugagaaa

SEQ ID NO: 1626362 - RNA, 19 nt, Artificial Sequence
  Description of Artificial Sequence: Synthetic oligonucleotide
  Antisense strand to SEQ ID NO: 1626361
uuucucaaaggaggagacu

SEQ ID NO: 1626363 - RNA, 19 nt, Artificial Sequence
  Description of Artificial Sequence: Synthetic oligonucleotide
  Sense strand starting at position 153 of SEQ ID NO: 1560815
ugagaaaugcagugaauga

SEQ ID NO: 1626364 - RNA, 19 nt, Artificial Sequence
  Description of Artificial Sequence: Synthetic oligonucleotide
  Antisense strand to SEQ ID NO: 1626363
ucauucacugcauuucuca

SEQ ID NO: 1626365 - RNA, 19 nt, Artificial Sequence
  Description of Artificial Sequence: Synthetic oligonucleotide
  Sense strand starting at position 198 of SEQ ID NO: 1560815
aggauugaauaacaucaga

SEQ ID NO: 1626366 - RNA, 19 nt, Artificial Sequence
  Description of Artificial Sequence: Synthetic oligonucleotide
  Antisense strand to SEQ ID NO: 1626365
ucugauguuauucaauccu

SEQ ID NO: 1626367 - RNA, 19 nt, Artificial Sequence
  Description of Artificial Sequence: Synthetic oligonucleotide
  Sense strand starting at position 230 of SEQ ID NO: 1560815
aagcacuguccugauauug

SEQ ID NO: 1626368 - RNA, 19 nt, Artificial Sequence
  Description of Artificial Sequence: Synthetic oligonucleotide
  Antisense strand to SEQ ID NO: 1626367
caauaucaggacagugcuu

SEQ ID NO: 1626369 - RNA, 19 nt, Artificial Sequence
  Description of Artificial Sequence: Synthetic oligonucleotide
  Sense strand starting at position 377 of SEQ ID NO: 1560815
ugauauugggagugccaua

SEQ ID NO: 1626370 - RNA, 19 nt, Artificial Sequence
  Description of Artificial Sequence: Synthetic oligonucleotide
  Antisense strand to SEQ ID NO: 1626369
uauggcacucccaauauca

SEQ ID NO: 1626371 - RNA, 19 nt, Artificial Sequence
  Description of Artificial Sequence: Synthetic oligonucleotide
  Sense strand starting at position 382 of SEQ ID NO: 1560815
uugggagugccauacacau

SEQ ID NO: 1626372 - RNA, 19 nt, Artificial Sequence
  Description of Artificial Sequence: Synthetic oligonucleotide
  Antisense strand to SEQ ID NO: 1626371
auguguauggcacucccaa

SEQ ID NO: 1626373 - RNA, 19 nt, Artificial Sequence
  Description of Artificial Sequence: Synthetic oligonucleotide
  Sense strand starting at position 415 of SEQ ID NO: 1560815
cagaaagagugguaagaaa

SEQ ID NO: 1626374 - RNA, 19 nt, Artificial Sequence
  Description of Artificial Sequence: Synthetic oligonucleotide
  Antisense strand to SEQ ID NO: 1626373
uuucuuaccacucuuucug

SEQ ID NO: 1626375 - RNA, 19 nt, Artificial Sequence
  Description of Artificial Sequence: Synthetic oligonucleotide
  Sense strand starting at position 447 of SEQ ID NO: 1560815
ggaacuuuaugggaaacau

SEQ ID NO: 1626376 - RNA, 19 nt, Artificial Sequence
  Description of Artificial Sequence: Synthetic oligonucleotide
  Antisense strand to SEQ ID NO: 1626375
auguuucccauaaaguucc

SEQ ID NO: 1626377 - RNA, 19 nt, Artificial Sequence
  Description of Artificial Sequence: Synthetic oligonucleotide
  Sense strand starting at position 458 of SEQ ID NO: 1560815
ggaaacaucuagggaagaa

SEQ ID NO: 1626378 - RNA, 19 nt, Artificial Sequence
  Description of Artificial Sequence: Synthetic oligonucleotide
  Antisense strand to SEQ ID NO: 1626377
uucuucccuagauguuucc

SEQ ID NO: 1626379 - RNA, 19 nt, Artificial Sequence
  Description of Artificial Sequence: Synthetic oligonucleotide
  Sense strand starting at position 1151 of SEQ ID NO: 1560815
ggagcugcucugggaagaa

SEQ ID NO: 1626380 - RNA, 19 nt, Artificial Sequence
  Description of Artificial Sequence: Synthetic oligonucleotide
  Antisense strand to SEQ ID NO: 1626379
uucuucccagagcagcucc

SEQ ID NO: 1626381 - RNA, 19 nt, Artificial Sequence
  Description of Artificial Sequence: Synthetic oligonucleotide
  Sense strand starting at position 1200 of SEQ ID NO: 1560815
aguccuguuccauagaaca

SEQ ID NO: 1626382 - RNA, 19 nt, Artificial Sequence
  Description of Artificial Sequence: Synthetic oligonucleotide
  Antisense strand to SEQ ID NO: 1626381
uguucuauggaacaggacu

SEQ ID NO: 1626383 - RNA, 19 nt, Artificial Sequence
  Description of Artificial Sequence: Synthetic oligonucleotide
  Sense strand starting at position 1235 of SEQ ID NO: 1560815
gugagauccacagguggaa

SEQ ID NO: 1626384 - RNA, 19 nt, Artificial Sequence
  Description of Artificial Sequence: Synthetic oligonucleotide
  Antisense strand to SEQ ID NO: 1626383
uuccaccuguggaucucac

SEQ ID NO: 1626385 - RNA, 19 nt, Artificial Sequence
  Description of Artificial Sequence: Synthetic oligonucleotide
  Sense strand starting at position 1297 of SEQ ID NO: 1560815
aggagacaaucugagagua

SEQ ID NO: 1626386 - RNA, 19 nt, Artificial Sequence
  Description of Artificial Sequence: Synthetic oligonucleotide
  Antisense strand to SEQ ID NO: 1626385
uacucucagauugucuccu

SEQ ID NO: 1626387 - RNA, 19 nt, Artificial Sequence
  Description of Artificial Sequence: Synthetic oligonucleotide
  Sense strand starting at position 1379 of SEQ ID NO: 1560815
guuauugaggaggguguua

SEQ ID NO: 1626388 - RNA, 19 nt, Artificial Sequence
  Description of Artificial Sequence: Synthetic oligonucleotide
  Antisense strand to SEQ ID NO: 1626387
uaacacccuccucaauaac

SEQ ID NO: 1626389 - RNA, 19 nt, Artificial Sequence
  Description of Artificial Sequence: Synthetic oligonucleotide
  Sense strand starting at position 1681 of SEQ ID NO: 1560815
ccauguaggagaugucuuu

SEQ ID NO: 1626390 - RNA, 19 nt, Artificial Sequence
  Description of Artificial Sequence: Synthetic oligonucleotide
  Antisense strand to SEQ ID NO: 1626389
aaagacaucuccuacaugg

SEQ ID NO: 1626391 - RNA, 19 nt, Artificial Sequence
  Description of Artificial Sequence: Synthetic oligonucleotide
  Sense strand starting at position 1708 of SEQ ID NO: 1560815
ccuggaugcucacuagcau

SEQ ID NO: 1626392 - RNA, 19 nt, Artificial Sequence
  Description of Artificial Sequence: Synthetic oligonucleotide
  Antisense strand to SEQ ID NO: 1626391
augcuagugagcauccagg

SEQ ID NO: 1626393 - RNA, 19 nt, Artificial Sequence
  Description of Artificial Sequence: Synthetic oligonucleotide
  Sense strand starting at position 1816 of SEQ ID NO: 1560815
agcugacggccagaaugau

SEQ ID NO: 1626394 - RNA, 19 nt, Artificial Sequence
  Description of Artificial Sequence: Synthetic oligonucleotide
  Antisense strand to SEQ ID NO: 1626393
aucauucuggccgucagcu

SEQ ID NO: 1626395 - RNA, 19 nt, Artificial Sequence
  Description of Artificial Sequence: Synthetic oligonucleotide
  Sense strand starting at position 1935 of SEQ ID NO: 1560815
uuugauaauucuguaaggu

SEQ ID NO: 1626396 - RNA, 19 nt, Artificial Sequence
  Description of Artificial Sequence: Synthetic oligonucleotide
  Antisense strand to SEQ ID NO: 1626395
accuuacagaauuaucaaa

SEQ ID NO: 1626397 - RNA, 19 nt, Artificial Sequence
  Description of Artificial Sequence: Synthetic oligonucleotide
  Sense strand starting at position 1936 of SEQ ID NO: 1560815
uugauaauucuguaagguu

SEQ ID NO: 1626398 - RNA, 19 nt, Artificial Sequence
  Description of Artificial Sequence: Synthetic oligonucleotide
  Antisense strand to SEQ ID NO: 1626397
aaccuuacagaauuaucaa

SEQ ID NO: 1626399 - RNA, 19 nt, Artificial Sequence
  Description of Artificial Sequence: Synthetic oligonucleotide
  Sense strand starting at position 2030 of SEQ ID NO: 1560815
ucagcuugucaucacuuua

SEQ ID NO: 1626400 - RNA, 19 nt, Artificial Sequence
  Description of Artificial Sequence: Synthetic oligonucleotide
  Antisense strand to SEQ ID NO: 1626399
uaaagugaugacaagcuga

SEQ ID NO: 1626401 - RNA, 19 nt, Artificial Sequence
  Description of Artificial Sequence: Synthetic oligonucleotide
  Sense strand starting at position 2134 of SEQ ID NO: 1560815
uauucuauuuguguagagu

SEQ ID NO: 1626402 - RNA, 19 nt, Artificial Sequence
  Description of Artificial Sequence: Synthetic oligonucleotide
  Antisense strand to SEQ ID NO: 1626401
acucuacacaaauagaaua

SEQ ID NO: 1626403 - RNA, 19 nt, Artificial Sequence
  Description of Artificial Sequence: Synthetic oligonucleotide
  Sense strand starting at position 2586 of SEQ ID NO: 1560815
uaauuaaagguaugucaug

SEQ ID NO: 1626404 - RNA, 19 nt, Artificial Sequence
  Description of Artificial Sequence: Synthetic oligonucleotide
  Antisense strand to SEQ ID NO: 1626403
caugacauaccuuuaauua

SEQ ID NO: 1626405 - RNA, 19 nt, Artificial Sequence
  Description of Artificial Sequence: Synthetic oligonucleotide
  Sense strand starting at position 2687 of SEQ ID NO: 1560815
accuuuauucugugaccca

SEQ ID NO: 1626406 - RNA, 19 nt, Artificial Sequence
  Description of Artificial Sequence: Synthetic oligonucleotide
  Antisense strand to SEQ ID NO: 1626405
ugggucacagaauaaaggu

SEQ ID NO: 1626407 - RNA, 19 nt, Artificial Sequence
  Description of Artificial Sequence: Synthetic oligonucleotide
  Sense strand starting at position 2706 of SEQ ID NO: 1560815
gugcuuggaagugauguga

SEQ ID NO: 1626408 - RNA, 19 nt, Artificial Sequence
  Description of Artificial Sequence: Synthetic oligonucleotide
  Antisense strand to SEQ ID NO: 1626407
ucacaucacuuccaagcac

SEQ ID NO: 1626409 - RNA, 19 nt, Artificial Sequence
  Description of Artificial Sequence: Synthetic oligonucleotide
  Sense strand starting at position 2710 of SEQ ID NO: 1560815
uuggaagugaugugacagu

SEQ ID NO: 1626410 - RNA, 19 nt, Artificial Sequence
  Description of Artificial Sequence: Synthetic oligonucleotide
  Antisense strand to SEQ ID NO: 1626409
acugucacaucacuuccaa

SEQ ID NO: 1626411 - RNA, 19 nt, Artificial Sequence
  Description of Artificial Sequence: Synthetic oligonucleotide
  Sense strand starting at position 2773 of SEQ ID NO: 1560815
auuacuuucuuauugaggu

SEQ ID NO: 1626412 - RNA, 19 nt, Artificial Sequence
  Description of Artificial Sequence: Synthetic oligonucleotide
  Antisense strand to SEQ ID NO: 1626411
accucaauaagaaaguaau

SEQ ID NO: 1626413 - RNA, 19 nt, Artificial Sequence
  Description of Artificial Sequence: Synthetic oligonucleotide
  Sense strand starting at position 2801 of SEQ ID NO: 1560815
ccauaugcacgguaggaau

SEQ ID NO: 1626414 - RNA, 19 nt, Artificial Sequence
  Description of Artificial Sequence: Synthetic oligonucleotide
  Antisense strand to SEQ ID NO: 1626413
auuccuaccgugcauaugg

SEQ ID NO: 1626415 - RNA, 19 nt, Artificial Sequence
  Description of Artificial Sequence: Synthetic oligonucleotide
  Sense strand starting at position 2919 of SEQ ID NO: 1560815
auagcauagagcugugauu

SEQ ID NO: 1626416 - RNA, 19 nt, Artificial Sequence
  Description of Artificial Sequence: Synthetic oligonucleotide
  Antisense strand to SEQ ID NO: 1626415
aaucacagcucuaugcuau

SEQ ID NO: 1626417 - RNA, 19 nt, Artificial Sequence
  Description of Artificial Sequence: Synthetic oligonucleotide
  Sense strand starting at position 3440 of SEQ ID NO: 1560815
cucuauaggcacugaaauu

SEQ ID NO: 1626418 - RNA, 19 nt, Artificial Sequence
  Description of Artificial Sequence: Synthetic oligonucleotide
  Antisense strand to SEQ ID NO: 1626417
aauuucagugccuauagag

SEQ ID NO: 1626419 - RNA, 19 nt, Artificial Sequence
  Description of Artificial Sequence: Synthetic oligonucleotide
  Sense strand starting at position 3503 of SEQ ID NO: 1560815
acagccaaacuaugugaau

SEQ ID NO: 1626420 - RNA, 19 nt, Artificial Sequence
  Description of Artificial Sequence: Synthetic oligonucleotide
  Antisense strand to SEQ ID NO: 1626419
auucacauaguuuggcugu

SEQ ID NO: 1626421 - RNA, 19 nt, Artificial Sequence
  Description of Artificial Sequence: Synthetic oligonucleotide
  Sense strand starting at position 3600 of SEQ ID NO: 1560815
aguaguaaauacucccuau

SEQ ID NO: 1626422 - RNA, 19 nt, Artificial Sequence
  Description of Artificial Sequence: Synthetic oligonucleotide
  Antisense strand to SEQ ID NO: 1626421
auagggaguauuuacuacu

SEQ ID NO: 1626423 - RNA, 19 nt, Artificial Sequence
  Description of Artificial Sequence: Synthetic oligonucleotide
  Sense strand starting at position 3603 of SEQ ID NO: 1560815
aguaaauacucccuaugug

SEQ ID NO: 1626424 - RNA, 19 nt, Artificial Sequence
  Description of Artificial Sequence: Synthetic oligonucleotide
  Antisense strand to SEQ ID NO: 1626423
cacauagggaguauuuacu

SEQ ID NO: 1626425 - RNA, 19 nt, Artificial Sequence
  Description of Artificial Sequence: Synthetic oligonucleotide
  Sense strand starting at position 3606 of SEQ ID NO: 1560815
aaauacucccuauguggga

SEQ ID NO: 1626426 - RNA, 19 nt, Artificial Sequence
  Description of Artificial Sequence: Synthetic oligonucleotide
  Antisense strand to SEQ ID NO: 1626425
ucccacauagggaguauuu

SEQ ID NO: 1626427 - RNA, 19 nt, Artificial Sequence
  Description of Artificial Sequence: Synthetic oligonucleotide
  Sense strand starting at position 3610 of SEQ ID NO: 1560815
acucccuaugugggaauau

SEQ ID NO: 1626428 - RNA, 19 nt, Artificial Sequence
  Description of Artificial Sequence: Synthetic oligonucleotide
  Antisense strand to SEQ ID NO: 1626427
auauucccacauagggagu

SEQ ID NO: 1626429 - RNA, 19 nt, Artificial Sequence
  Description of Artificial Sequence: Synthetic oligonucleotide
  Sense strand starting at position 3619 of SEQ ID NO: 1560815
gugggaauauugaagagug

SEQ ID NO: 1626430 - RNA, 19 nt, Artificial Sequence
  Description of Artificial Sequence: Synthetic oligonucleotide
  Antisense strand to SEQ ID NO: 1626429
cacucuucaauauucccac

SEQ ID NO: 1626431 - RNA, 19 nt, Artificial Sequence
  Description of Artificial Sequence: Synthetic oligonucleotide
  Sense strand starting at position 3646 of SEQ ID NO: 1560815
ugagauuauccaugucauu

SEQ ID NO: 1626432 - RNA, 19 nt, Artificial Sequence
  Description of Artificial Sequence: Synthetic oligonucleotide
  Antisense strand to SEQ ID NO: 1626431
aaugacauggauaaucuca

SEQ ID NO: 1626433 - RNA, 19 nt, Artificial Sequence
  Description of Artificial Sequence: Synthetic oligonucleotide
  Sense strand starting at position 155 of SEQ ID NO: 1560816
uucuacagugcugaacaau

SEQ ID NO: 1626434 - RNA, 19 nt, Artificial Sequence
  Description of Artificial Sequence: Synthetic oligonucleotide
  Antisense strand to SEQ ID NO: 1626433
auuguucagcacuguagaa

SEQ ID NO: 1626435 - RNA, 19 nt, Artificial Sequence
  Description of Artificial Sequence: Synthetic oligonucleotide
  Sense strand starting at position 395 of SEQ ID NO: 1560816
gaggaccauugauagacau

SEQ ID NO: 1626436 - RNA, 19 nt, Artificial Sequence
  Description of Artificial Sequence: Synthetic oligonucleotide
  Antisense strand to SEQ ID NO: 1626435
augucuaucaaugguccuc

SEQ ID NO: 1626437 - RNA, 19 nt, Artificial Sequence
  Description of Artificial Sequence: Synthetic oligonucleotide
  Sense strand starting at position 405 of SEQ ID NO: 1560816
gauagacaucaucauacgu

SEQ ID NO: 1626438 - RNA, 19 nt, Artificial Sequence
  Description of Artificial Sequence: Synthetic oligonucleotide
  Antisense strand to SEQ ID NO: 1626437
acguaugaugaugucuauc

SEQ ID NO: 1626439 - RNA, 19 nt, Artificial Sequence
  Description of Artificial Sequence: Synthetic oligonucleotide
  Sense strand starting at position 446 of SEQ ID NO: 1560816
agaugcgauuuggacagaa

SEQ ID NO: 1626440 - RNA, 19 nt, Artificial Sequence
  Description of Artificial Sequence: Synthetic oligonucleotide
  Antisense strand to SEQ ID NO: 1626439
uucuguccaaaucgcaucu

SEQ ID NO: 1626441 - RNA, 19 nt, Artificial Sequence
  Description of Artificial Sequence: Synthetic oligonucleotide
  Sense strand starting at position 491 of SEQ ID NO: 1560816
guaaauacgaaguacgaua

SEQ ID NO: 1626442 - RNA, 19 nt, Artificial Sequence
  Description of Artificial Sequence: Synthetic oligonucleotide
  Antisense strand to SEQ ID NO: 1626441
uaucguacuucguauuuac

SEQ ID NO: 1626443 - RNA, 19 nt, Artificial Sequence
  Description of Artificial Sequence: Synthetic oligonucleotide
  Sense strand starting at position 504 of SEQ ID NO: 1560816
acgauaaguccucacuuaa

SEQ ID NO: 1626444 - RNA, 19 nt, Artificial Sequence
  Description of Artificial Sequence: Synthetic oligonucleotide
  Antisense strand to SEQ ID NO: 1626443
uuaagugaggacuuaucgu

SEQ ID NO: 1626445 - RNA, 19 nt, Artificial Sequence
  Description of Artificial Sequence: Synthetic oligonucleotide
  Sense strand starting at position 730 of SEQ ID NO: 1560816
ugugauugcaccuggauau

SEQ ID NO: 1626446 - RNA, 19 nt, Artificial Sequence
  Description of Artificial Sequence: Synthetic oligonucleotide
  Antisense strand to SEQ ID NO: 1626445
auauccaggugcaaucaca

SEQ ID NO: 1626447 - RNA, 19 nt, Artificial Sequence
  Description of Artificial Sequence: Synthetic oligonucleotide
  Sense strand starting at position 731 of SEQ ID NO: 1560816
gugauugcaccuggauauc

SEQ ID NO: 1626448 - RNA, 19 nt, Artificial Sequence
  Description of Artificial Sequence: Synthetic oligonucleotide
  Antisense strand to SEQ ID NO: 1626447
gauauccaggugcaaucac

SEQ ID NO: 1626449 - RNA, 19 nt, Artificial Sequence
  Description of Artificial Sequence: Synthetic oligonucleotide
  Sense strand starting at position 740 of SEQ ID NO: 1560816
ccuggauaucaaggucauu

SEQ ID NO: 1626450 - RNA, 19 nt, Artificial Sequence
  Description of Artificial Sequence: Synthetic oligonucleotide
  Antisense strand to SEQ ID NO: 1626449
aaugaccuugauauccagg

SEQ ID NO: 1626451 - RNA, 19 nt, Artificial Sequence
  Description of Artificial Sequence: Synthetic oligonucleotide
  Sense strand starting at position 773 of SEQ ID NO: 1560816
ggaggcugucuagguauau

SEQ ID NO: 1626452 - RNA, 19 nt, Artificial Sequence
  Description of Artificial Sequence: Synthetic oligonucleotide
  Antisense strand to SEQ ID NO: 1626451
auauaccuagacagccucc

SEQ ID NO: 1626453 - RNA, 19 nt, Artificial Sequence
  Description of Artificial Sequence: Synthetic oligonucleotide
  Sense strand starting at position 774 of SEQ ID NO: 1560816
gaggcugucuagguauauu

SEQ ID NO: 1626454 - RNA, 19 nt, Artificial Sequence
  Description of Artificial Sequence: Synthetic oligonucleotide
  Antisense strand to SEQ ID NO: 1626453
aauauaccuagacagccuc

SEQ ID NO: 1626455 - RNA, 19 nt, Artificial Sequence
  Description of Artificial Sequence: Synthetic oligonucleotide
  Sense strand starting at position 777 of SEQ ID NO: 1560816
gcugucuagguauauugga

SEQ ID NO: 1626456 - RNA, 19 nt, Artificial Sequence
  Description of Artificial Sequence: Synthetic oligonucleotide
  Antisense strand to SEQ ID NO: 1626455
uccaauauaccuagacagc

SEQ ID NO: 1626457 - RNA, 19 nt, Artificial Sequence
  Description of Artificial Sequence: Synthetic oligonucleotide
  Sense strand starting at position 801 of SEQ ID NO: 1560816
ucaugauguguaugaugaa

SEQ ID NO: 1626458 - RNA, 19 nt, Artificial Sequence
  Description of Artificial Sequence: Synthetic oligonucleotide
  Antisense strand to SEQ ID NO: 1626457
uucaucauacacaucauga

SEQ ID NO: 1626459 - RNA, 19 nt, Artificial Sequence
  Description of Artificial Sequence: Synthetic oligonucleotide
  Sense strand starting at position 952 of SEQ ID NO: 1560816
aggccuagguguuaaauuu

SEQ ID NO: 1626460 - RNA, 19 nt, Artificial Sequence
  Description of Artificial Sequence: Synthetic oligonucleotide
  Antisense strand to SEQ ID NO: 1626459
aaauuuaacaccuaggccu

SEQ ID NO: 1626461 - RNA, 19 nt, Artificial Sequence
  Description of Artificial Sequence: Synthetic oligonucleotide
  Sense strand starting at position 2016 of SEQ ID NO: 1560816
cuagcacugugucuauauu

SEQ ID NO: 1626462 - RNA, 19 nt, Artificial Sequence
  Description of Artificial Sequence: Synthetic oligonucleotide
  Antisense strand to SEQ ID NO: 1626461
aauauagacacagugcuag

SEQ ID NO: 1626463 - RNA, 19 nt, Artificial Sequence
  Description of Artificial Sequence: Synthetic oligonucleotide
  Sense strand starting at position 2086 of SEQ ID NO: 1560816
cagcaauaguucucaguug

SEQ ID NO: 1626464 - RNA, 19 nt, Artificial Sequence
  Description of Artificial Sequence: Synthetic oligonucleotide
  Antisense strand to SEQ ID NO: 1626463
caacugagaacuauugcug

SEQ ID NO: 1626465 - RNA, 19 nt, Artificial Sequence
  Description of Artificial Sequence: Synthetic oligonucleotide
  Sense strand starting at position 2091 of SEQ ID NO: 1560816
auaguucucaguugugaca

SEQ ID NO: 1626466 - RNA, 19 nt, Artificial Sequence
  Description of Artificial Sequence: Synthetic oligonucleotide
  Antisense strand to SEQ ID NO: 1626465
ugucacaacugagaacuau

SEQ ID NO: 1626467 - RNA, 19 nt, Artificial Sequence
  Description of Artificial Sequence: Synthetic oligonucleotide
  Sense strand starting at position 2186 of SEQ ID NO: 1560816
cagucuauugaagaauguu

SEQ ID NO: 1626468 - RNA, 19 nt, Artificial Sequence
  Description of Artificial Sequence: Synthetic oligonucleotide
  Antisense strand to SEQ ID NO: 1626467
aacauucuucaauagacug

SEQ ID NO: 1626469 - RNA, 19 nt, Artificial Sequence
  Description of Artificial Sequence: Synthetic oligonucleotide
  Sense strand starting at position 2192 of SEQ ID NO: 1560816
auugaagaauguuaggaga

SEQ ID NO: 1626470 - RNA, 19 nt, Artificial Sequence
  Description of Artificial Sequence: Synthetic oligonucleotide
  Antisense strand to SEQ ID NO: 1626469
ucuccuaacauucuucaau

SEQ ID NO: 1626471 - RNA, 19 nt, Artificial Sequence
  Description of Artificial Sequence: Synthetic oligonucleotide
  Sense strand starting at position 2195 of SEQ ID NO: 1560816
gaagaauguuaggagagca

SEQ ID NO: 1626472 - RNA, 19 nt, Artificial Sequence
  Description of Artificial Sequence: Synthetic oligonucleotide
  Antisense strand to SEQ ID NO: 1626471
ugcucuccuaacauucuuc

SEQ ID NO: 1626473 - RNA, 19 nt, Artificial Sequence
  Description of Artificial Sequence: Synthetic oligonucleotide
  Sense strand starting at position 2257 of SEQ ID NO: 1560816
agccuaauuuaucaggaaa

SEQ ID NO: 1626474 - RNA, 19 nt, Artificial Sequence
  Description of Artificial Sequence: Synthetic oligonucleotide
  Antisense strand to SEQ ID NO: 1626473
uuuccugauaaauuaggcu

SEQ ID NO: 1626475 - RNA, 19 nt, Artificial Sequence
  Description of Artificial Sequence: Synthetic oligonucleotide
  Sense strand starting at position 2341 of SEQ ID NO: 1560816
gaaggagucagcuaugucu

SEQ ID NO: 1626476 - RNA, 19 nt, Artificial Sequence
  Description of Artificial Sequence: Synthetic oligonucleotide
  Antisense strand to SEQ ID NO: 1626475
agacauagcugacuccuuc

SEQ ID NO: 1626477 - RNA, 19 nt, Artificial Sequence
  Description of Artificial Sequence: Synthetic oligonucleotide
  Sense strand starting at position 2428 of SEQ ID NO: 1560816
aggaucauguugucucaaa

SEQ ID NO: 1626478 - RNA, 19 nt, Artificial Sequence
  Description of Artificial Sequence: Synthetic oligonucleotide
  Antisense strand to SEQ ID NO: 1626477
uuugagacaacaugauccu

SEQ ID NO: 1626479 - RNA, 19 nt, Artificial Sequence
  Description of Artificial Sequence: Synthetic oligonucleotide
  Sense strand starting at position 2549 of SEQ ID NO: 1560816
ggaaguaaguacucacuca

SEQ ID NO: 1626480 - RNA, 19 nt, Artificial Sequence
  Description of Artificial Sequence: Synthetic oligonucleotide
  Antisense strand to SEQ ID NO: 1626479
ugagugaguacuuacuucc

SEQ ID NO: 1626481 - RNA, 19 nt, Artificial Sequence
  Description of Artificial Sequence: Synthetic oligonucleotide
  Sense strand starting at position 2710 of SEQ ID NO: 1560816
auugcuugaggaugugagu

SEQ ID NO: 1626482 - RNA, 19 nt, Artificial Sequence
  Description of Artificial Sequence: Synthetic oligonucleotide
  Antisense strand to SEQ ID NO: 1626481
acucacauccucaagcaau

SEQ ID NO: 1626483 - RNA, 19 nt, Artificial Sequence
  Description of Artificial Sequence: Synthetic oligonucleotide
  Sense strand starting at position 2953 of SEQ ID NO: 1560816
aaggaagguuuaguuaaau

SEQ ID NO: 1626484 - RNA, 19 nt, Artificial Sequence
  Description of Artificial Sequence: Synthetic oligonucleotide
  Antisense strand to SEQ ID NO: 1626483
auuuaacuaaaccuuccuu

SEQ ID NO: 1626485 - RNA, 19 nt, Artificial Sequence
  Description of Artificial Sequence: Synthetic oligonucleotide
  Sense strand starting at position 2986 of SEQ ID NO: 1560816
ggacaucacugauagcaaa

SEQ ID NO: 1626486 - RNA, 19 nt, Artificial Sequence
  Description of Artificial Sequence: Synthetic oligonucleotide
  Antisense strand to SEQ ID NO: 1626485
uuugcuaucagugaugucc

SEQ ID NO: 1626487 - RNA, 19 nt, Artificial Sequence
  Description of Artificial Sequence: Synthetic oligonucleotide
  Sense strand starting at position 3008 of SEQ ID NO: 1560816
guugauagugugcaacgua

SEQ ID NO: 1626488 - RNA, 19 nt, Artificial Sequence
  Description of Artificial Sequence: Synthetic oligonucleotide
  Antisense strand to SEQ ID NO: 1626487
uacguugcacacuaucaac

SEQ ID NO: 1626489 - RNA, 19 nt, Artificial Sequence
  Description of Artificial Sequence: Synthetic oligonucleotide
  Sense strand starting at position 3522 of SEQ ID NO: 1560816
cugccauggucuuuaagua

SEQ ID NO: 1626490 - RNA, 19 nt, Artificial Sequence
  Description of Artificial Sequence: Synthetic oligonucleotide
  Antisense strand to SEQ ID NO: 1626489
uacuuaaagaccauggcag

SEQ ID NO: 1626491 - RNA, 19 nt, Artificial Sequence
  Description of Artificial Sequence: Synthetic oligonucleotide
  Sense strand starting at position 3523 of SEQ ID NO: 1560816
ugccauggucuuuaaguaa

SEQ ID NO: 1626492 - RNA, 19 nt, Artificial Sequence
  Description of Artificial Sequence: Synthetic oligonucleotide
  Antisense strand to SEQ ID NO: 1626491
uuacuuaaagaccauggca

SEQ ID NO: 1626493 - RNA, 19 nt, Artificial Sequence
  Description of Artificial Sequence: Synthetic oligonucleotide
  Sense strand starting at position 3530 of SEQ ID NO: 1560816
gucuuuaaguaauugaaug

SEQ ID NO: 1626494 - RNA, 19 nt, Artificial Sequence
  Description of Artificial Sequence: Synthetic oligonucleotide
  Antisense strand to SEQ ID NO: 1626493
cauucaauuacuuaaagac

SEQ ID NO: 1626495 - RNA, 19 nt, Artificial Sequence
  Description of Artificial Sequence: Synthetic oligonucleotide
  Sense strand starting at position 3542 of SEQ ID NO: 1560816
uugaauguuguagaugcua

SEQ ID NO: 1626496 - RNA, 19 nt, Artificial Sequence
  Description of Artificial Sequence: Synthetic oligonucleotide
  Antisense strand to SEQ ID NO: 1626495
uagcaucuacaacauucaa

SEQ ID NO: 1626497 - RNA, 19 nt, Artificial Sequence
  Description of Artificial Sequence: Synthetic oligonucleotide
  Sense strand starting at position 3558 of SEQ ID NO: 1560816
cuauuauuauguguccaua

SEQ ID NO: 1626498 - RNA, 19 nt, Artificial Sequence
  Description of Artificial Sequence: Synthetic oligonucleotide
  Antisense strand to SEQ ID NO: 1626497
uauggacacauaauaauag

SEQ ID NO: 1626499 - RNA, 19 nt, Artificial Sequence
  Description of Artificial Sequence: Synthetic oligonucleotide
  Sense strand starting at position 3748 of SEQ ID NO: 1560816
uggugucuccucuguacca

SEQ ID NO: 1626500 - RNA, 19 nt, Artificial Sequence
  Description of Artificial Sequence: Synthetic oligonucleotide
  Antisense strand to SEQ ID NO: 1626499
ugguacagaggagacacca

SEQ ID NO: 1626501 - RNA, 19 nt, Artificial Sequence
  Description of Artificial Sequence: Synthetic oligonucleotide
  Sense strand starting at position 3749 of SEQ ID NO: 1560816
ggugucuccucuguaccaa

SEQ ID NO: 1626502 - RNA, 19 nt, Artificial Sequence
  Description of Artificial Sequence: Synthetic oligonucleotide
  Antisense strand to SEQ ID NO: 1626501
uugguacagaggagacacc

SEQ ID NO: 1626503 - RNA, 19 nt, Artificial Sequence
  Description of Artificial Sequence: Synthetic oligonucleotide
  Sense strand starting at position 3862 of SEQ ID NO: 1560816
uguccugucagagacauug

SEQ ID NO: 1626504 - RNA, 19 nt, Artificial Sequence
  Description of Artificial Sequence: Synthetic oligonucleotide
  Antisense strand to SEQ ID NO: 1626503
caaugucucugacaggaca

SEQ ID NO: 1626505 - RNA, 19 nt, Artificial Sequence
  Description of Artificial Sequence: Synthetic oligonucleotide
  Sense strand starting at position 3870 of SEQ ID NO: 1560816
cagagacauugggaaccau

SEQ ID NO: 1626506 - RNA, 19 nt, Artificial Sequence
  Description of Artificial Sequence: Synthetic oligonucleotide
  Antisense strand to SEQ ID NO: 1626505
augguucccaaugucucug

SEQ ID NO: 1626507 - RNA, 19 nt, Artificial Sequence
  Description of Artificial Sequence: Synthetic oligonucleotide
  Sense strand starting at position 3887 of SEQ ID NO: 1560816
auagcuagguuccuggaua

SEQ ID NO: 1626508 - RNA, 19 nt, Artificial Sequence
  Description of Artificial Sequence: Synthetic oligonucleotide
  Antisense strand to SEQ ID NO: 1626507
uauccaggaaccuagcuau

SEQ ID NO: 1626509 - RNA, 19 nt, Artificial Sequence
  Description of Artificial Sequence: Synthetic oligonucleotide
  Sense strand starting at position 3910 of SEQ ID NO: 1560816
aguucaaugguauggagau

SEQ ID NO: 1626510 - RNA, 19 nt, Artificial Sequence
  Description of Artificial Sequence: Synthetic oligonucleotide
  Antisense strand to SEQ ID NO: 1626509
aucuccauaccauugaacu

SEQ ID NO: 1626511 - RNA, 19 nt, Artificial Sequence
  Description of Artificial Sequence: Synthetic oligonucleotide
  Sense strand starting at position 3925 of SEQ ID NO: 1560816
agauuaaccuuggaauauu

SEQ ID NO: 1626512 - RNA, 19 nt, Artificial Sequence
  Description of Artificial Sequence: Synthetic oligonucleotide
  Antisense strand to SEQ ID NO: 1626511
aauauuccaagguuaaucu

SEQ ID NO: 1626513 - RNA, 19 nt, Artificial Sequence
  Description of Artificial Sequence: Synthetic oligonucleotide
  Sense strand starting at position 101 of SEQ ID NO: 1560817
gaaacugagcuuugagaau

SEQ ID NO: 1626514 - RNA, 19 nt, Artificial Sequence
  Description of Artificial Sequence: Synthetic oligonucleotide
  Antisense strand to SEQ ID NO: 1626513
auucucaaagcucaguuuc

SEQ ID NO: 1626515 - RNA, 19 nt, Artificial Sequence
  Description of Artificial Sequence: Synthetic oligonucleotide
  Sense strand starting at position 203 of SEQ ID NO: 1560817
gaugcagacuagucacuuu

SEQ ID NO: 1626516 - RNA, 19 nt, Artificial Sequence
  Description of Artificial Sequence: Synthetic oligonucleotide
  Antisense strand to SEQ ID NO: 1626515
aaagugacuagucugcauc

SEQ ID NO: 1626517 - RNA, 19 nt, Artificial Sequence
  Description of Artificial Sequence: Synthetic oligonucleotide
  Sense strand starting at position 206 of SEQ ID NO: 1560817
gcagacuagucacuuuaag

SEQ ID NO: 1626518 - RNA, 19 nt, Artificial Sequence
  Description of Artificial Sequence: Synthetic oligonucleotide
  Antisense strand to SEQ ID NO: 1626517
cuuaaagugacuagucugc

SEQ ID NO: 1626519 - RNA, 19 nt, Artificial Sequence
  Description of Artificial Sequence: Synthetic oligonucleotide
  Sense strand starting at position 598 of SEQ ID NO: 1560817
cugucauguugauuccuuu

SEQ ID NO: 1626520 - RNA, 19 nt, Artificial Sequence
  Description of Artificial Sequence: Synthetic oligonucleotide
  Antisense strand to SEQ ID NO: 1626519
aaaggaaucaacaugacag

SEQ ID NO: 1626521 - RNA, 19 nt, Artificial Sequence
  Description of Artificial Sequence: Synthetic oligonucleotide
  Sense strand starting at position 964 of SEQ ID NO: 1560817
aguaaaucucgaugcaaga

SEQ ID NO: 1626522 - RNA, 19 nt, Artificial Sequence
  Description of Artificial Sequence: Synthetic oligonucleotide
  Antisense strand to SEQ ID NO: 1626521
ucuugcaucgagauuuacu

SEQ ID NO: 1626523 - RNA, 19 nt, Artificial Sequence
  Description of Artificial Sequence: Synthetic oligonucleotide
  Sense strand starting at position 1003 of SEQ ID NO: 1560817
aaggaauccuguuaugaug

SEQ ID NO: 1626524 - RNA, 19 nt, Artificial Sequence
  Description of Artificial Sequence: Synthetic oligonucleotide
  Antisense strand to SEQ ID NO: 1626523
caucauaacaggauuccuu

SEQ ID NO: 1626525 - RNA, 19 nt, Artificial Sequence
  Description of Artificial Sequence: Synthetic oligonucleotide
  Sense strand starting at position 1051 of SEQ ID NO: 1560817
gaggacaaagaucgcuaaa

SEQ ID NO: 1626526 - RNA, 19 nt, Artificial Sequence
  Description of Artificial Sequence: Synthetic oligonucleotide
  Antisense strand to SEQ ID NO: 1626525
uuuagcgaucuuuguccuc

SEQ ID NO: 1626527 - RNA, 19 nt, Artificial Sequence
  Description of Artificial Sequence: Synthetic oligonucleotide
  Sense strand starting at position 1186 of SEQ ID NO: 1560817
gcaguaauucgggaagacu

SEQ ID NO: 1626528 - RNA, 19 nt, Artificial Sequence
  Description of Artificial Sequence: Synthetic oligonucleotide
  Antisense strand to SEQ ID NO: 1626527
agucuucccgaauuacugc

SEQ ID NO: 1626529 - RNA, 19 nt, Artificial Sequence
  Description of Artificial Sequence: Synthetic oligonucleotide
  Sense strand starting at position 1331 of SEQ ID NO: 1560817
aggugacuauuugagaaua

SEQ ID NO: 1626530 - RNA, 19 nt, Artificial Sequence
  Description of Artificial Sequence: Synthetic oligonucleotide
  Antisense strand to SEQ ID NO: 1626529
uauucucaaauagucaccu

SEQ ID NO: 1626531 - RNA, 19 nt, Artificial Sequence
  Description of Artificial Sequence: Synthetic oligonucleotide
  Sense strand starting at position 1333 of SEQ ID NO: 1560817
gugacuauuugagaauaag

SEQ ID NO: 1626532 - RNA, 19 nt, Artificial Sequence
  Description of Artificial Sequence: Synthetic oligonucleotide
  Antisense strand to SEQ ID NO: 1626531
cuuauucucaaauagucac

SEQ ID NO: 1626533 - RNA, 19 nt, Artificial Sequence
  Description of Artificial Sequence: Synthetic oligonucleotide
  Sense strand starting at position 1400 of SEQ ID NO: 1560817
aauauaugaggauguuguu

SEQ ID NO: 1626534 - RNA, 19 nt, Artificial Sequence
  Description of Artificial Sequence: Synthetic oligonucleotide
  Antisense strand to SEQ ID NO: 1626533
aacaacauccucauauauu

SEQ ID NO: 1626535 - RNA, 19 nt, Artificial Sequence
  Description of Artificial Sequence: Synthetic oligonucleotide
  Sense strand starting at position 1415 of SEQ ID NO: 1560817
uguugaugagggugucaga

SEQ ID NO: 1626536 - RNA, 19 nt, Artificial Sequence
  Description of Artificial Sequence: Synthetic oligonucleotide
  Antisense strand to SEQ ID NO: 1626535
ucugacacccucaucaaca

SEQ ID NO: 1626537 - RNA, 19 nt, Artificial Sequence
  Description of Artificial Sequence: Synthetic oligonucleotide
  Sense strand starting at position 1536 of SEQ ID NO: 1560817
auccauagugcucaugaac

SEQ ID NO: 1626538 - RNA, 19 nt, Artificial Sequence
  Description of Artificial Sequence: Synthetic oligonucleotide
  Antisense strand to SEQ ID NO: 1626537
guucaugagcacuauggau

SEQ ID NO: 1626539 - RNA, 19 nt, Artificial Sequence
  Description of Artificial Sequence: Synthetic oligonucleotide
  Sense strand starting at position 1694 of SEQ ID NO: 1560817
gacagaucugggugaggca

SEQ ID NO: 1626540 - RNA, 19 nt, Artificial Sequence
  Description of Artificial Sequence: Synthetic oligonucleotide
  Antisense strand to SEQ ID NO: 1626539
ugccucacccagaucuguc

SEQ ID NO: 1626541 - RNA, 19 nt, Artificial Sequence
  Description of Artificial Sequence: Synthetic oligonucleotide
  Sense strand starting at position 1723 of SEQ ID NO: 1560817
gugauacucugauucugag

SEQ ID NO: 1626542 - RNA, 19 nt, Artificial Sequence
  Description of Artificial Sequence: Synthetic oligonucleotide
  Antisense strand to SEQ ID NO: 1626541
cucagaaucagaguaucac

SEQ ID NO: 1626543 - RNA, 19 nt, Artificial Sequence
  Description of Artificial Sequence: Synthetic oligonucleotide
  Sense strand starting at position 1729 of SEQ ID NO: 1560817
cucugauucugagcuugga

SEQ ID NO: 1626544 - RNA, 19 nt, Artificial Sequence
  Description of Artificial Sequence: Synthetic oligonucleotide
  Antisense strand to SEQ ID NO: 1626543
uccaagcucagaaucagag

SEQ ID NO: 1626545 - RNA, 19 nt, Artificial Sequence
  Description of Artificial Sequence: Synthetic oligonucleotide
  Sense strand starting at position 1758 of SEQ ID NO: 1560817
gaucuuugggacugugguu

SEQ ID NO: 1626546 - RNA, 19 nt, Artificial Sequence
  Description of Artificial Sequence: Synthetic oligonucleotide
  Antisense strand to SEQ ID NO: 1626545
aaccacagucccaaagauc

SEQ ID NO: 1626547 - RNA, 19 nt, Artificial Sequence
  Description of Artificial Sequence: Synthetic oligonucleotide
  Sense strand starting at position 1776 of SEQ ID NO: 1560817
ugugguuaaacagauguca

SEQ ID NO: 1626548 - RNA, 19 nt, Artificial Sequence
  Description of Artificial Sequence: Synthetic oligonucleotide
  Antisense strand to SEQ ID NO: 1626547
ugacaucuguuuaaccaca

SEQ ID NO: 1626549 - RNA, 19 nt, Artificial Sequence
  Description of Artificial Sequence: Synthetic oligonucleotide
  Sense strand starting at position 1778 of SEQ ID NO: 1560817
ugguuaaacagaugucagu

SEQ ID NO: 1626550 - RNA, 19 nt, Artificial Sequence
  Description of Artificial Sequence: Synthetic oligonucleotide
  Antisense strand to SEQ ID NO: 1626549
acugacaucuguuuaacca

SEQ ID NO: 1626551 - RNA, 19 nt, Artificial Sequence
  Description of Artificial Sequence: Synthetic oligonucleotide
  Sense strand starting at position 2019 of SEQ ID NO: 1560817
augggauaauuagacaauc

SEQ ID NO: 1626552 - RNA, 19 nt, Artificial Sequence
  Description of Artificial Sequence: Synthetic oligonucleotide
  Antisense strand to SEQ ID NO: 1626551
gauugucuaauuaucccau

SEQ ID NO: 1626553 - RNA, 19 nt, Artificial Sequence
  Description of Artificial Sequence: Synthetic oligonucleotide
  Sense strand starting at position 2397 of SEQ ID NO: 1560817
auuaaagaugcuugccaca

SEQ ID NO: 1626554 - RNA, 19 nt, Artificial Sequence
  Description of Artificial Sequence: Synthetic oligonucleotide
  Antisense strand to SEQ ID NO: 1626553
uguggcaagcaucuuuaau

SEQ ID NO: 1626555 - RNA, 19 nt, Artificial Sequence
  Description of Artificial Sequence: Synthetic oligonucleotide
  Sense strand starting at position 2713 of SEQ ID NO: 1560817
ccacucugcuguucugauu

SEQ ID NO: 1626556 - RNA, 19 nt, Artificial Sequence
  Description of Artificial Sequence: Synthetic oligonucleotide
  Antisense strand to SEQ ID NO: 1626555
aaucagaacagcagagugg

SEQ ID NO: 1626557 - RNA, 19 nt, Artificial Sequence
  Description of Artificial Sequence: Synthetic oligonucleotide
  Sense strand starting at position 2719 of SEQ ID NO: 1560817
ugcuguucugauuauuaaa

SEQ ID NO: 1626558 - RNA, 19 nt, Artificial Sequence
  Description of Artificial Sequence: Synthetic oligonucleotide
  Antisense strand to SEQ ID NO: 1626557
uuuaauaaucagaacagca

SEQ ID NO: 1626559 - RNA, 19 nt, Artificial Sequence
  Description of Artificial Sequence: Synthetic oligonucleotide
  Sense strand starting at position 2854 of SEQ ID NO: 1560817
auacaaagcugugucaaga

SEQ ID NO: 1626560 - RNA, 19 nt, Artificial Sequence
  Description of Artificial Sequence: Synthetic oligonucleotide
  Antisense strand to SEQ ID NO: 1626559
ucuugacacagcuuuguau

SEQ ID NO: 1626561 - RNA, 19 nt, Artificial Sequence
  Description of Artificial Sequence: Synthetic oligonucleotide
  Sense strand starting at position 3053 of SEQ ID NO: 1560817
gcaaguaaauuacagagaa

SEQ ID NO: 1626562 - RNA, 19 nt, Artificial Sequence
  Description of Artificial Sequence: Synthetic oligonucleotide
  Antisense strand to SEQ ID NO: 1626561
uucucuguaauuuacuugc

SEQ ID NO: 1626563 - RNA, 19 nt, Artificial Sequence
  Description of Artificial Sequence: Synthetic oligonucleotide
  Sense strand starting at position 3074 of SEQ ID NO: 1560817
uuauaacagucauccuguu

SEQ ID NO: 1626564 - RNA, 19 nt, Artificial Sequence
  Description of Artificial Sequence: Synthetic oligonucleotide
  Antisense strand to SEQ ID NO: 1626563
aacaggaugacuguuauaa

SEQ ID NO: 1626565 - RNA, 19 nt, Artificial Sequence
  Description of Artificial Sequence: Synthetic oligonucleotide
  Sense strand starting at position 3127 of SEQ ID NO: 1560817
guguauuuguugcuggaag

SEQ ID NO: 1626566 - RNA, 19 nt, Artificial Sequence
  Description of Artificial Sequence: Synthetic oligonucleotide
  Antisense strand to SEQ ID NO: 1626565
cuuccagcaacaaauacac

SEQ ID NO: 1626567 - RNA, 19 nt, Artificial Sequence
  Description of Artificial Sequence: Synthetic oligonucleotide
  Sense strand starting at position 3181 of SEQ ID NO: 1560817
agguucuauggugaugaca

SEQ ID NO: 1626568 - RNA, 19 nt, Artificial Sequence
  Description of Artificial Sequence: Synthetic oligonucleotide
  Antisense strand to SEQ ID NO: 1626567
ugucaucaccauagaaccu

SEQ ID NO: 1626569 - RNA, 19 nt, Artificial Sequence
  Description of Artificial Sequence: Synthetic oligonucleotide
  Sense strand starting at position 3242 of SEQ ID NO: 1560817
auguuacuauucucucaga

SEQ ID NO: 1626570 - RNA, 19 nt, Artificial Sequence
  Description of Artificial Sequence: Synthetic oligonucleotide
  Antisense strand to SEQ ID NO: 1626569
ucugagagaauaguaacau

SEQ ID NO: 1626571 - RNA, 19 nt, Artificial Sequence
  Description of Artificial Sequence: Synthetic oligonucleotide
  Sense strand starting at position 3553 of SEQ ID NO: 1560817
gccacugugcucuacacua

SEQ ID NO: 1626572 - RNA, 19 nt, Artificial Sequence
  Description of Artificial Sequence: Synthetic oligonucleotide
  Antisense strand to SEQ ID NO: 1626571
uaguguagagcacaguggc

SEQ ID NO: 1626573 - RNA, 19 nt, Artificial Sequence
  Description of Artificial Sequence: Synthetic oligonucleotide
  Sense strand starting at position 3711 of SEQ ID NO: 1560817
agagguuaucagcaucucu

SEQ ID NO: 1626574 - RNA, 19 nt, Artificial Sequence
  Description of Artificial Sequence: Synthetic oligonucleotide
  Antisense strand to SEQ ID NO: 1626573
agagaugcugauaaccucu

SEQ ID NO: 1626575 - RNA, 19 nt, Artificial Sequence
  Description of Artificial Sequence: Synthetic oligonucleotide
  Sense strand starting at position 3783 of SEQ ID NO: 1560817
ccaguaguucucgggcaag

SEQ ID NO: 1626576 - RNA, 19 nt, Artificial Sequence
  Description of Artificial Sequence: Synthetic oligonucleotide
  Antisense strand to SEQ ID NO: 1626575
cuugcccgagaacuacugg

SEQ ID NO: 1626577 - RNA, 19 nt, Artificial Sequence
  Description of Artificial Sequence: Synthetic oligonucleotide
  Sense strand starting at position 3847 of SEQ ID NO: 1560817
ugugucuguucuguggaca

SEQ ID NO: 1626578 - RNA, 19 nt, Artificial Sequence
  Description of Artificial Sequence: Synthetic oligonucleotide
  Antisense strand to SEQ ID NO: 1626577
uguccacagaacagacaca

SEQ ID NO: 1626579 - RNA, 19 nt, Artificial Sequence
  Description of Artificial Sequence: Synthetic oligonucleotide
  Sense strand starting at position 3871 of SEQ ID NO: 1560817
agaggaaucucaguccuag

SEQ ID NO: 1626580 - RNA, 19 nt, Artificial Sequence
  Description of Artificial Sequence: Synthetic oligonucleotide
  Antisense strand to SEQ ID NO: 1626579
cuaggacugagauuccucu

SEQ ID NO: 1626581 - RNA, 19 nt, Artificial Sequence
  Description of Artificial Sequence: Synthetic oligonucleotide
  Sense strand starting at position 3875 of SEQ ID NO: 1560817
gaaucucaguccuaggaga

SEQ ID NO: 1626582 - RNA, 19 nt, Artificial Sequence
  Description of Artificial Sequence: Synthetic oligonucleotide
  Antisense strand to SEQ ID NO: 1626581
ucuccuaggacugagauuc

SEQ ID NO: 1626583 - RNA, 19 nt, Artificial Sequence
  Description of Artificial Sequence: Synthetic oligonucleotide
  Sense strand starting at position 3877 of SEQ ID NO: 1560817
aucucaguccuaggagacu

SEQ ID NO: 1626584 - RNA, 19 nt, Artificial Sequence
  Description of Artificial Sequence: Synthetic oligonucleotide
  Antisense strand to SEQ ID NO: 1626583
agucuccuaggacugagau

SEQ ID NO: 1626585 - RNA, 19 nt, Artificial Sequence
  Description of Artificial Sequence: Synthetic oligonucleotide
  Sense strand starting at position 3891 of SEQ ID NO: 1560817
agacucuaugagugcuaga

SEQ ID NO: 1626586 - RNA, 19 nt, Artificial Sequence
  Description of Artificial Sequence: Synthetic oligonucleotide
  Antisense strand to SEQ ID NO: 1626585
ucuagcacucauagagucu

SEQ ID NO: 1626587 - RNA, 19 nt, Artificial Sequence
  Description of Artificial Sequence: Synthetic oligonucleotide
  Sense strand starting at position 3915 of SEQ ID NO: 1560817
agcugcguuccagauaugu

SEQ ID NO: 1626588 - RNA, 19 nt, Artificial Sequence
  Description of Artificial Sequence: Synthetic oligonucleotide
  Antisense strand to SEQ ID NO: 1626587
acauaucuggaacgcagcu

SEQ ID NO: 1626589 - RNA, 19 nt, Artificial Sequence
  Description of Artificial Sequence: Synthetic oligonucleotide
  Sense strand starting at position 3917 of SEQ ID NO: 1560817
cugcguuccagauauguaa

SEQ ID NO: 1626590 - RNA, 19 nt, Artificial Sequence
  Description of Artificial Sequence: Synthetic oligonucleotide
  Antisense strand to SEQ ID NO: 1626589
uuacauaucuggaacgcag

SEQ ID NO: 1626591 - RNA, 19 nt, Artificial Sequence
  Description of Artificial Sequence: Synthetic oligonucleotide
  Sense strand starting at position 3919 of SEQ ID NO: 1560817
gcguuccagauauguaaga

SEQ ID NO: 1626592 - RNA, 19 nt, Artificial Sequence
  Description of Artificial Sequence: Synthetic oligonucleotide
  Antisense strand to SEQ ID NO: 1626591
ucuuacauaucuggaacgc

SEQ ID NO: 1626593 - RNA, 19 nt, Artificial Sequence
  Description of Artificial Sequence: Synthetic oligonucleotide
  Sense strand starting at position 444 of SEQ ID NO: 1560818
gagucuauggccugagcaa

SEQ ID NO: 1626594 - RNA, 19 nt, Artificial Sequence
  Description of Artificial Sequence: Synthetic oligonucleotide
  Antisense strand to SEQ ID NO: 1626593
uugcucaggccauagacuc

SEQ ID NO: 1626595 - RNA, 19 nt, Artificial Sequence
  Description of Artificial Sequence: Synthetic oligonucleotide
  Sense strand starting at position 445 of SEQ ID NO: 1560818
agucuauggccugagcaaa

SEQ ID NO: 1626596 - RNA, 19 nt, Artificial Sequence
  Description of Artificial Sequence: Synthetic oligonucleotide
  Antisense strand to SEQ ID NO: 1626595
uuugcucaggccauagacu

SEQ ID NO: 1626597 - RNA, 19 nt, Artificial Sequence
  Description of Artificial Sequence: Synthetic oligonucleotide
  Sense strand starting at position 546 of SEQ ID NO: 1560818
guggaaauguaguuggcuu

SEQ ID NO: 1626598 - RNA, 19 nt, Artificial Sequence
  Description of Artificial Sequence: Synthetic oligonucleotide
  Antisense strand to SEQ ID NO: 1626597
aagccaacuacauuuccac

SEQ ID NO: 1626599 - RNA, 19 nt, Artificial Sequence
  Description of Artificial Sequence: Synthetic oligonucleotide
  Sense strand starting at position 547 of SEQ ID NO: 1560818
uggaaauguaguuggcuuu

SEQ ID NO: 1626600 - RNA, 19 nt, Artificial Sequence
  Description of Artificial Sequence: Synthetic oligonucleotide
  Antisense strand to SEQ ID NO: 1626599
aaagccaacuacauuucca

SEQ ID NO: 1626601 - RNA, 19 nt, Artificial Sequence
  Description of Artificial Sequence: Synthetic oligonucleotide
  Sense strand starting at position 582 of SEQ ID NO: 1560818
uuuagaagaacuuggugau

SEQ ID NO: 1626602 - RNA, 19 nt, Artificial Sequence
  Description of Artificial Sequence: Synthetic oligonucleotide
  Antisense strand to SEQ ID NO: 1626601
aucaccaaguucuucuaaa

SEQ ID NO: 1626603 - RNA, 19 nt, Artificial Sequence
  Description of Artificial Sequence: Synthetic oligonucleotide
  Sense strand starting at position 930 of SEQ ID NO: 1560818
auucuagcucaccaggaau

SEQ ID NO: 1626604 - RNA, 19 nt, Artificial Sequence
  Description of Artificial Sequence: Synthetic oligonucleotide
  Antisense strand to SEQ ID NO: 1626603
auuccuggugagcuagaau

SEQ ID NO: 1626605 - RNA, 19 nt, Artificial Sequence
  Description of Artificial Sequence: Synthetic oligonucleotide
  Sense strand starting at position 1011 of SEQ ID NO: 1560818
agguauccucccuaugaac

SEQ ID NO: 1626606 - RNA, 19 nt, Artificial Sequence
  Description of Artificial Sequence: Synthetic oligonucleotide
  Antisense strand to SEQ ID NO: 1626605
guucauagggaggauaccu

SEQ ID NO: 1626607 - RNA, 19 nt, Artificial Sequence
  Description of Artificial Sequence: Synthetic oligonucleotide
  Sense strand starting at position 1022 of SEQ ID NO: 1560818
cuaugaacuuccucaaggu

SEQ ID NO: 1626608 - RNA, 19 nt, Artificial Sequence
  Description of Artificial Sequence: Synthetic oligonucleotide
  Antisense strand to SEQ ID NO: 1626607
accuugaggaaguucauag

SEQ ID NO: 1626609 - RNA, 19 nt, Artificial Sequence
  Description of Artificial Sequence: Synthetic oligonucleotide
  Sense strand starting at position 1049 of SEQ ID NO: 1560818
uguccuuauuccucagacu

SEQ ID NO: 1626610 - RNA, 19 nt, Artificial Sequence
  Description of Artificial Sequence: Synthetic oligonucleotide
  Antisense strand to SEQ ID NO: 1626609
agucugaggaauaaggaca

SEQ ID NO: 1626611 - RNA, 19 nt, Artificial Sequence
  Description of Artificial Sequence: Synthetic oligonucleotide
  Sense strand starting at position 1050 of SEQ ID NO: 1560818
guccuuauuccucagacua

SEQ ID NO: 1626612 - RNA, 19 nt, Artificial Sequence
  Description of Artificial Sequence: Synthetic oligonucleotide
  Antisense strand to SEQ ID NO: 1626611
uagucugaggaauaaggac

SEQ ID NO: 1626613 - RNA, 19 nt, Artificial Sequence
  Description of Artificial Sequence: Synthetic oligonucleotide
  Sense strand starting at position 1125 of SEQ ID NO: 1560818
agucuuccuaggugaguca

SEQ ID NO: 1626614 - RNA, 19 nt, Artificial Sequence
  Description of Artificial Sequence: Synthetic oligonucleotide
  Antisense strand to SEQ ID NO: 1626613
ugacucaccuaggaagacu

SEQ ID NO: 1626615 - RNA, 19 nt, Artificial Sequence
  Description of Artificial Sequence: Synthetic oligonucleotide
  Sense strand starting at position 1271 of SEQ ID NO: 1560818
aggugaucugaguguaaga

SEQ ID NO: 1626616 - RNA, 19 nt, Artificial Sequence
  Description of Artificial Sequence: Synthetic oligonucleotide
  Antisense strand to SEQ ID NO: 1626615
ucuuacacucagaucaccu

SEQ ID NO: 1626617 - RNA, 19 nt, Artificial Sequence
  Description of Artificial Sequence: Synthetic oligonucleotide
  Sense strand starting at position 1273 of SEQ ID NO: 1560818
gugaucugaguguaagaca

SEQ ID NO: 1626618 - RNA, 19 nt, Artificial Sequence
  Description of Artificial Sequence: Synthetic oligonucleotide
  Antisense strand to SEQ ID NO: 1626617
ugucuuacacucagaucac

SEQ ID NO: 1626619 - RNA, 19 nt, Artificial Sequence
  Description of Artificial Sequence: Synthetic oligonucleotide
  Sense strand starting at position 1352 of SEQ ID NO: 1560818
uauugaugagggugucuga

SEQ ID NO: 1626620 - RNA, 19 nt, Artificial Sequence
  Description of Artificial Sequence: Synthetic oligonucleotide
  Antisense strand to SEQ ID NO: 1626619
ucagacacccucaucaaua

SEQ ID NO: 1626621 - RNA, 19 nt, Artificial Sequence
  Description of Artificial Sequence: Synthetic oligonucleotide
  Sense strand starting at position 1355 of SEQ ID NO: 1560818
ugaugagggugucugaaca

SEQ ID NO: 1626622 - RNA, 19 nt, Artificial Sequence
  Description of Artificial Sequence: Synthetic oligonucleotide
  Antisense strand to SEQ ID NO: 1626621
uguucagacacccucauca

SEQ ID NO: 1626623 - RNA, 19 nt, Artificial Sequence
  Description of Artificial Sequence: Synthetic oligonucleotide
  Sense strand starting at position 1412 of SEQ ID NO: 1560818
gcgggauuuccaggucugu

SEQ ID NO: 1626624 - RNA, 19 nt, Artificial Sequence
  Description of Artificial Sequence: Synthetic oligonucleotide
  Antisense strand to SEQ ID NO: 1626623
acagaccuggaaaucccgc

SEQ ID NO: 1626625 - RNA, 19 nt, Artificial Sequence
  Description of Artificial Sequence: Synthetic oligonucleotide
  Sense strand starting at position 1418 of SEQ ID NO: 1560818
uuuccaggucugugcagaa

SEQ ID NO: 1626626 - RNA, 19 nt, Artificial Sequence
  Description of Artificial Sequence: Synthetic oligonucleotide
  Antisense strand to SEQ ID NO: 1626625
uucugcacagaccuggaaa

SEQ ID NO: 1626627 - RNA, 19 nt, Artificial Sequence
  Description of Artificial Sequence: Synthetic oligonucleotide
  Sense strand starting at position 1529 of SEQ ID NO: 1560818
ucaugaugacuguguaucu

SEQ ID NO: 1626628 - RNA, 19 nt, Artificial Sequence
  Description of Artificial Sequence: Synthetic oligonucleotide
  Antisense strand to SEQ ID NO: 1626627
agauacacagucaucauga

SEQ ID NO: 1626629 - RNA, 19 nt, Artificial Sequence
  Description of Artificial Sequence: Synthetic oligonucleotide
  Sense strand starting at position 1530 of SEQ ID NO: 1560818
caugaugacuguguaucua

SEQ ID NO: 1626630 - RNA, 19 nt, Artificial Sequence
  Description of Artificial Sequence: Synthetic oligonucleotide
  Antisense strand to SEQ ID NO: 1626629
uagauacacagucaucaug

SEQ ID NO: 1626631 - RNA, 19 nt, Artificial Sequence
  Description of Artificial Sequence: Synthetic oligonucleotide
  Sense strand starting at position 1553 of SEQ ID NO: 1560818
ggugacaaauggccacaua

SEQ ID NO: 1626632 - RNA, 19 nt, Artificial Sequence
  Description of Artificial Sequence: Synthetic oligonucleotide
  Antisense strand to SEQ ID NO: 1626631
uauguggccauuugucacc

SEQ ID NO: 1626633 - RNA, 19 nt, Artificial Sequence
  Description of Artificial Sequence: Synthetic oligonucleotide
  Sense strand starting at position 1666 of SEQ ID NO: 1560818
cuccgauucugagcuugga

SEQ ID NO: 1626634 - RNA, 19 nt, Artificial Sequence
  Description of Artificial Sequence: Synthetic oligonucleotide
  Antisense strand to SEQ ID NO: 1626633
uccaagcucagaaucggag

SEQ ID NO: 1626635 - RNA, 19 nt, Artificial Sequence
  Description of Artificial Sequence: Synthetic oligonucleotide
  Sense strand starting at position 1688 of SEQ ID NO: 1560818
ucaccagcaucuuugggau

SEQ ID NO: 1626636 - RNA, 19 nt, Artificial Sequence
  Description of Artificial Sequence: Synthetic oligonucleotide
  Antisense strand to SEQ ID NO: 1626635
aucccaaagaugcugguga

SEQ ID NO: 1626637 - RNA, 19 nt, Artificial Sequence
  Description of Artificial Sequence: Synthetic oligonucleotide
  Sense strand starting at position 1707 of SEQ ID NO: 1560818
cgugguugugcuuaaacaa

SEQ ID NO: 1626638 - RNA, 19 nt, Artificial Sequence
  Description of Artificial Sequence: Synthetic oligonucleotide
  Antisense strand to SEQ ID NO: 1626637
uuguuuaagcacaaccacg

SEQ ID NO: 1626639 - RNA, 19 nt, Artificial Sequence
  Description of Artificial Sequence: Synthetic oligonucleotide
  Sense strand starting at position 1883 of SEQ ID NO: 1560818
cuaucagucccaggagaag

SEQ ID NO: 1626640 - RNA, 19 nt, Artificial Sequence
  Description of Artificial Sequence: Synthetic oligonucleotide
  Antisense strand to SEQ ID NO: 1626639
cuucuccugggacugauag

SEQ ID NO: 1626641 - RNA, 19 nt, Artificial Sequence
  Description of Artificial Sequence: Synthetic oligonucleotide
  Sense strand starting at position 1935 of SEQ ID NO: 1560818
caugcuguugaugaugaau

SEQ ID NO: 1626642 - RNA, 19 nt, Artificial Sequence
  Description of Artificial Sequence: Synthetic oligonucleotide
  Antisense strand to SEQ ID NO: 1626641
auucaucaucaacagcaug

SEQ ID NO: 1626643 - RNA, 19 nt, Artificial Sequence
  Description of Artificial Sequence: Synthetic oligonucleotide
  Sense strand starting at position 1944 of SEQ ID NO: 1560818
gaugaugaaucugauggaa

SEQ ID NO: 1626644 - RNA, 19 nt, Artificial Sequence
  Description of Artificial Sequence: Synthetic oligonucleotide
  Antisense strand to SEQ ID NO: 1626643
uuccaucagauucaucauc

SEQ ID NO: 1626645 - RNA, 19 nt, Artificial Sequence
  Description of Artificial Sequence: Synthetic oligonucleotide
  Sense strand starting at position 1994 of SEQ ID NO: 1560818
ucggcaucacucgagaaca

SEQ ID NO: 1626646 - RNA, 19 nt, Artificial Sequence
  Description of Artificial Sequence: Synthetic oligonucleotide
  Antisense strand to SEQ ID NO: 1626645
uguucucgagugaugccga

SEQ ID NO: 1626647 - RNA, 19 nt, Artificial Sequence
  Description of Artificial Sequence: Synthetic oligonucleotide
  Sense strand starting at position 1996 of SEQ ID NO: 1560818
ggcaucacucgagaacaug

SEQ ID NO: 1626648 - RNA, 19 nt, Artificial Sequence
  Description of Artificial Sequence: Synthetic oligonucleotide
  Antisense strand to SEQ ID NO: 1626647
cauguucucgagugaugcc

SEQ ID NO: 1626649 - RNA, 19 nt, Artificial Sequence
  Description of Artificial Sequence: Synthetic oligonucleotide
  Sense strand starting at position 2043 of SEQ ID NO: 1560818
ccagacuucuugcugauaa

SEQ ID NO: 1626650 - RNA, 19 nt, Artificial Sequence
  Description of Artificial Sequence: Synthetic oligonucleotide
  Antisense strand to SEQ ID NO: 1626649
uuaucagcaagaagucugg

SEQ ID NO: 1626651 - RNA, 19 nt, Artificial Sequence
  Description of Artificial Sequence: Synthetic oligonucleotide
  Sense strand starting at position 2045 of SEQ ID NO: 1560818
agacuucuugcugauaaac

SEQ ID NO: 1626652 - RNA, 19 nt, Artificial Sequence
  Description of Artificial Sequence: Synthetic oligonucleotide
  Antisense strand to SEQ ID NO: 1626651
guuuaucagcaagaagucu

SEQ ID NO: 1626653 - RNA, 19 nt, Artificial Sequence
  Description of Artificial Sequence: Synthetic oligonucleotide
  Sense strand starting at position 2149 of SEQ ID NO: 1560818
acauuuacuuaggaaugga

SEQ ID NO: 1626654 - RNA, 19 nt, Artificial Sequence
  Description of Artificial Sequence: Synthetic oligonucleotide
  Antisense strand to SEQ ID NO: 1626653
uccauuccuaaguaaaugu

SEQ ID NO: 1626655 - RNA, 19 nt, Artificial Sequence
  Description of Artificial Sequence: Synthetic oligonucleotide
  Sense strand starting at position 2153 of SEQ ID NO: 1560818
uuacuuaggaauggaguuu

SEQ ID NO: 1626656 - RNA, 19 nt, Artificial Sequence
  Description of Artificial Sequence: Synthetic oligonucleotide
  Antisense strand to SEQ ID NO: 1626655
aaacuccauuccuaaguaa

SEQ ID NO: 1626657 - RNA, 19 nt, Artificial Sequence
  Description of Artificial Sequence: Synthetic oligonucleotide
  Sense strand starting at position 2259 of SEQ ID NO: 1560818
gguguaaucuuagcuuauu

SEQ ID NO: 1626658 - RNA, 19 nt, Artificial Sequence
  Description of Artificial Sequence: Synthetic oligonucleotide
  Antisense strand to SEQ ID NO: 1626657
aauaagcuaagauuacacc

SEQ ID NO: 1626659 - RNA, 19 nt, Artificial Sequence
  Description of Artificial Sequence: Synthetic oligonucleotide
  Sense strand starting at position 2260 of SEQ ID NO: 1560818
guguaaucuuagcuuauug

SEQ ID NO: 1626660 - RNA, 19 nt, Artificial Sequence
  Description of Artificial Sequence: Synthetic oligonucleotide
  Antisense strand to SEQ ID NO: 1626659
caauaagcuaagauuacac

SEQ ID NO: 1626661 - RNA, 19 nt, Artificial Sequence
  Description of Artificial Sequence: Synthetic oligonucleotide
  Sense strand starting at position 2262 of SEQ ID NO: 1560818
guaaucuuagcuuauugca

SEQ ID NO: 1626662 - RNA, 19 nt, Artificial Sequence
  Description of Artificial Sequence: Synthetic oligonucleotide
  Antisense strand to SEQ ID NO: 1626661
ugcaauaagcuaagauuac

SEQ ID NO: 1626663 - RNA, 19 nt, Artificial Sequence
  Description of Artificial Sequence: Synthetic oligonucleotide
  Sense strand starting at position 2877 of SEQ ID NO: 1560818
ggccaaagaauguggaaau

SEQ ID NO: 1626664 - RNA, 19 nt, Artificial Sequence
  Description of Artificial Sequence: Synthetic oligonucleotide
  Antisense strand to SEQ ID NO: 1626663
auuuccacauucuuuggcc

SEQ ID NO: 1626665 - RNA, 19 nt, Artificial Sequence
  Description of Artificial Sequence: Synthetic oligonucleotide
  Sense strand starting at position 2988 of SEQ ID NO: 1560818
uugggauucuuaucagcau

SEQ ID NO: 1626666 - RNA, 19 nt, Artificial Sequence
  Description of Artificial Sequence: Synthetic oligonucleotide
  Antisense strand to SEQ ID NO: 1626665
augcugauaagaaucccaa

SEQ ID NO: 1626667 - RNA, 19 nt, Artificial Sequence
  Description of Artificial Sequence: Synthetic oligonucleotide
  Sense strand starting at position 2991 of SEQ ID NO: 1560818
ggauucuuaucagcauaga

SEQ ID NO: 1626668 - RNA, 19 nt, Artificial Sequence
  Description of Artificial Sequence: Synthetic oligonucleotide
  Antisense strand to SEQ ID NO: 1626667
ucuaugcugauaagaaucc

SEQ ID NO: 1626669 - RNA, 19 nt, Artificial Sequence
  Description of Artificial Sequence: Synthetic oligonucleotide
  Sense strand starting at position 3012 of SEQ ID NO: 1560818
uccaaacagcgcuagagau

SEQ ID NO: 1626670 - RNA, 19 nt, Artificial Sequence
  Description of Artificial Sequence: Synthetic oligonucleotide
  Antisense strand to SEQ ID NO: 1626669
aucucuagcgcuguuugga

SEQ ID NO: 1626671 - RNA, 19 nt, Artificial Sequence
  Description of Artificial Sequence: Synthetic oligonucleotide
  Sense strand starting at position 3862 of SEQ ID NO: 1560818
cuaucuuagccagacuggu

SEQ ID NO: 1626672 - RNA, 19 nt, Artificial Sequence
  Description of Artificial Sequence: Synthetic oligonucleotide
  Antisense strand to SEQ ID NO: 1626671
accagucuggcuaagauag

SEQ ID NO: 1626673 - RNA, 19 nt, Artificial Sequence
  Description of Artificial Sequence: Synthetic oligonucleotide
  Sense strand starting at position 228 of SEQ ID NO: 1560819
auuggaaugguuggagcau

SEQ ID NO: 1626674 - RNA, 19 nt, Artificial Sequence
  Description of Artificial Sequence: Synthetic oligonucleotide
  Antisense strand to SEQ ID NO: 1626673
augcuccaaccauuccaau

SEQ ID NO: 1626675 - RNA, 19 nt, Artificial Sequence
  Description of Artificial Sequence: Synthetic oligonucleotide
  Sense strand starting at position 268 of SEQ ID NO: 1560819
ggugauggauaucuaaagu

SEQ ID NO: 1626676 - RNA, 19 nt, Artificial Sequence
  Description of Artificial Sequence: Synthetic oligonucleotide
  Antisense strand to SEQ ID NO: 1626675
acuuuagauauccaucacc

SEQ ID NO: 1626677 - RNA, 19 nt, Artificial Sequence
  Description of Artificial Sequence: Synthetic oligonucleotide
  Sense strand starting at position 284 of SEQ ID NO: 1560819
aguaacaaauccuugcaga

SEQ ID NO: 1626678 - RNA, 19 nt, Artificial Sequence
  Description of Artificial Sequence: Synthetic oligonucleotide
  Antisense strand to SEQ ID NO: 1626677
ucugcaaggauuuguuacu

SEQ ID NO: 1626679 - RNA, 19 nt, Artificial Sequence
  Description of Artificial Sequence: Synthetic oligonucleotide
  Sense strand starting at position 285 of SEQ ID NO: 1560819
guaacaaauccuugcagau

SEQ ID NO: 1626680 - RNA, 19 nt, Artificial Sequence
  Description of Artificial Sequence: Synthetic oligonucleotide
  Antisense strand to SEQ ID NO: 1626679
aucugcaaggauuuguuac

SEQ ID NO: 1626681 - RNA, 19 nt, Artificial Sequence
  Description of Artificial Sequence: Synthetic oligonucleotide
  Sense strand starting at position 533 of SEQ ID NO: 1560819
aucaauuagucagucaauc

SEQ ID NO: 1626682 - RNA, 19 nt, Artificial Sequence
  Description of Artificial Sequence: Synthetic oligonucleotide
  Antisense strand to SEQ ID NO: 1626681
gauugacugacuaauugau

SEQ ID NO: 1626683 - RNA, 19 nt, Artificial Sequence
  Description of Artificial Sequence: Synthetic oligonucleotide
  Sense strand starting at position 609 of SEQ ID NO: 1560819
ucugaucucuggucucaug

SEQ ID NO: 1626684 - RNA, 19 nt, Artificial Sequence
  Description of Artificial Sequence: Synthetic oligonucleotide
  Antisense strand to SEQ ID NO: 1626683
caugagaccagagaucaga

SEQ ID NO: 1626685 - RNA, 19 nt, Artificial Sequence
  Description of Artificial Sequence: Synthetic oligonucleotide
  Sense strand starting at position 1024 of SEQ ID NO: 1560819
gacauaucccagcagugua

SEQ ID NO: 1626686 - RNA, 19 nt, Artificial Sequence
  Description of Artificial Sequence: Synthetic oligonucleotide
  Antisense strand to SEQ ID NO: 1626685
uacacugcugggauauguc

SEQ ID NO: 1626687 - RNA, 19 nt, Artificial Sequence
  Description of Artificial Sequence: Synthetic oligonucleotide
  Sense strand starting at position 1044 of SEQ ID NO: 1560819
gcccaagaagcugagacau

SEQ ID NO: 1626688 - RNA, 19 nt, Artificial Sequence
  Description of Artificial Sequence: Synthetic oligonucleotide
  Antisense strand to SEQ ID NO: 1626687
augucucagcuucuugggc

SEQ ID NO: 1626689 - RNA, 19 nt, Artificial Sequence
  Description of Artificial Sequence: Synthetic oligonucleotide
  Sense strand starting at position 1106 of SEQ ID NO: 1560819
ucaacauguccuuguuucu

SEQ ID NO: 1626690 - RNA, 19 nt, Artificial Sequence
  Description of Artificial Sequence: Synthetic oligonucleotide
  Antisense strand to SEQ ID NO: 1626689
agaaacaaggacauguuga

SEQ ID NO: 1626691 - RNA, 19 nt, Artificial Sequence
  Description of Artificial Sequence: Synthetic oligonucleotide
  Sense strand starting at position 1154 of SEQ ID NO: 1560819
gggugaccacgguauacau

SEQ ID NO: 1626692 - RNA, 19 nt, Artificial Sequence
  Description of Artificial Sequence: Synthetic oligonucleotide
  Antisense strand to SEQ ID NO: 1626691
auguauaccguggucaccc

SEQ ID NO: 1626693 - RNA, 19 nt, Artificial Sequence
  Description of Artificial Sequence: Synthetic oligonucleotide
  Sense strand starting at position 1161 of SEQ ID NO: 1560819
cacgguauacaucacugau

SEQ ID NO: 1626694 - RNA, 19 nt, Artificial Sequence
  Description of Artificial Sequence: Synthetic oligonucleotide
  Antisense strand to SEQ ID NO: 1626693
aucagugauguauaccgug

SEQ ID NO: 1626695 - RNA, 19 nt, Artificial Sequence
  Description of Artificial Sequence: Synthetic oligonucleotide
  Sense strand starting at position 1164 of SEQ ID NO: 1560819
gguauacaucacugaugcu

SEQ ID NO: 1626696 - RNA, 19 nt, Artificial Sequence
  Description of Artificial Sequence: Synthetic oligonucleotide
  Antisense strand to SEQ ID NO: 1626695
agcaucagugauguauacc

SEQ ID NO: 1626697 - RNA, 19 nt, Artificial Sequence
  Description of Artificial Sequence: Synthetic oligonucleotide
  Sense strand starting at position 1186 of SEQ ID NO: 1560819
gcacccuuccuggaggagu

SEQ ID NO: 1626698 - RNA, 19 nt, Artificial Sequence
  Description of Artificial Sequence: Synthetic oligonucleotide
  Antisense strand to SEQ ID NO: 1626697
acuccuccaggaagggugc

SEQ ID NO: 1626699 - RNA, 19 nt, Artificial Sequence
  Description of Artificial Sequence: Synthetic oligonucleotide
  Sense strand starting at position 1265 of SEQ ID NO: 1560819
uuaaaugugacccgcagau

SEQ ID NO: 1626700 - RNA, 19 nt, Artificial Sequence
  Description of Artificial Sequence: Synthetic oligonucleotide
  Antisense strand to SEQ ID NO: 1626699
aucugcgggucacauuuaa

SEQ ID NO: 1626701 - RNA, 19 nt, Artificial Sequence
  Description of Artificial Sequence: Synthetic oligonucleotide
  Sense strand starting at position 1331 of SEQ ID NO: 1560819
aggagacaauucgugugua

SEQ ID NO: 1626702 - RNA, 19 nt, Artificial Sequence
  Description of Artificial Sequence: Synthetic oligonucleotide
  Antisense strand to SEQ ID NO: 1626701
uacacacgaauugucuccu

SEQ ID NO: 1626703 - RNA, 19 nt, Artificial Sequence
  Description of Artificial Sequence: Synthetic oligonucleotide
  Sense strand starting at position 1334 of SEQ ID NO: 1560819
agacaauucguguguaaga

SEQ ID NO: 1626704 - RNA, 19 nt, Artificial Sequence
  Description of Artificial Sequence: Synthetic oligonucleotide
  Antisense strand to SEQ ID NO: 1626703
ucuuacacacgaauugucu

SEQ ID NO: 1626705 - RNA, 19 nt, Artificial Sequence
  Description of Artificial Sequence: Synthetic oligonucleotide
  Sense strand starting at position 1335 of SEQ ID NO: 1560819
gacaauucguguguaagag

SEQ ID NO: 1626706 - RNA, 19 nt, Artificial Sequence
  Description of Artificial Sequence: Synthetic oligonucleotide
  Antisense strand to SEQ ID NO: 1626705
cucuuacacacgaauuguc

SEQ ID NO: 1626707 - RNA, 19 nt, Artificial Sequence
  Description of Artificial Sequence: Synthetic oligonucleotide
  Sense strand starting at position 1336 of SEQ ID NO: 1560819
acaauucguguguaagaga

SEQ ID NO: 1626708 - RNA, 19 nt, Artificial Sequence
  Description of Artificial Sequence: Synthetic oligonucleotide
  Antisense strand to SEQ ID NO: 1626707
ucucuuacacacgaauugu

SEQ ID NO: 1626709 - RNA, 19 nt, Artificial Sequence
  Description of Artificial Sequence: Synthetic oligonucleotide
  Sense strand starting at position 1385 of SEQ ID NO: 1560819
acaggcuggucaccaaaua

SEQ ID NO: 1626710 - RNA, 19 nt, Artificial Sequence
  Description of Artificial Sequence: Synthetic oligonucleotide
  Antisense strand to SEQ ID NO: 1626709
uauuuggugaccagccugu

SEQ ID NO: 1626711 - RNA, 19 nt, Artificial Sequence
  Description of Artificial Sequence: Synthetic oligonucleotide
  Sense strand starting at position 1434 of SEQ ID NO: 1560819
acaggcgagcuugagaaua

SEQ ID NO: 1626712 - RNA, 19 nt, Artificial Sequence
  Description of Artificial Sequence: Synthetic oligonucleotide
  Antisense strand to SEQ ID NO: 1626711
uauucucaagcucgccugu

SEQ ID NO: 1626713 - RNA, 19 nt, Artificial Sequence
  Description of Artificial Sequence: Synthetic oligonucleotide
  Sense strand starting at position 1444 of SEQ ID NO: 1560819
uugagaauaugagcuaguu

SEQ ID NO: 1626714 - RNA, 19 nt, Artificial Sequence
  Description of Artificial Sequence: Synthetic oligonucleotide
  Antisense strand to SEQ ID NO: 1626713
aacuagcucauauucucaa

SEQ ID NO: 1626715 - RNA, 19 nt, Artificial Sequence
  Description of Artificial Sequence: Synthetic oligonucleotide
  Sense strand starting at position 1481 of SEQ ID NO: 1560819
uuuccaggucuaugcagaa

SEQ ID NO: 1626716 - RNA, 19 nt, Artificial Sequence
  Description of Artificial Sequence: Synthetic oligonucleotide
  Antisense strand to SEQ ID NO: 1626715
uucugcauagaccuggaaa

SEQ ID NO: 1626717 - RNA, 19 nt, Artificial Sequence
  Description of Artificial Sequence: Synthetic oligonucleotide
  Sense strand starting at position 1643 of SEQ ID NO: 1560819
aggccaucaugaccagaau

SEQ ID NO: 1626718 - RNA, 19 nt, Artificial Sequence
  Description of Artificial Sequence: Synthetic oligonucleotide
  Antisense strand to SEQ ID NO: 1626717
auucuggucaugauggccu

SEQ ID NO: 1626719 - RNA, 19 nt, Artificial Sequence
  Description of Artificial Sequence: Synthetic oligonucleotide
  Sense strand starting at position 1713 of SEQ ID NO: 1560819
gccuguguaauugauggau

SEQ ID NO: 1626720 - RNA, 19 nt, Artificial Sequence
  Description of Artificial Sequence: Synthetic oligonucleotide
  Antisense strand to SEQ ID NO: 1626719
auccaucaauuacacaggc

SEQ ID NO: 1626721 - RNA, 19 nt, Artificial Sequence
  Description of Artificial Sequence: Synthetic oligonucleotide
  Sense strand starting at position 1716 of SEQ ID NO: 1560819
uguguaauugauggauuga

SEQ ID NO: 1626722 - RNA, 19 nt, Artificial Sequence
  Description of Artificial Sequence: Synthetic oligonucleotide
  Antisense strand to SEQ ID NO: 1626721
ucaauccaucaauuacaca

SEQ ID NO: 1626723 - RNA, 19 nt, Artificial Sequence
  Description of Artificial Sequence: Synthetic oligonucleotide
  Sense strand starting at position 1767 of SEQ ID NO: 1560819
caucgugguggaggugaaa

SEQ ID NO: 1626724 - RNA, 19 nt, Artificial Sequence
  Description of Artificial Sequence: Synthetic oligonucleotide
  Antisense strand to SEQ ID NO: 1626723
uuucaccuccaccacgaug

SEQ ID NO: 1626725 - RNA, 19 nt, Artificial Sequence
  Description of Artificial Sequence: Synthetic oligonucleotide
  Sense strand starting at position 1835 of SEQ ID NO: 1560819
ggaggugggagucagaguu

SEQ ID NO: 1626726 - RNA, 19 nt, Artificial Sequence
  Description of Artificial Sequence: Synthetic oligonucleotide
  Antisense strand to SEQ ID NO: 1626725
aacucugacucccaccucc

SEQ ID NO: 1626727 - RNA, 19 nt, Artificial Sequence
  Description of Artificial Sequence: Synthetic oligonucleotide
  Sense strand starting at position 1964 of SEQ ID NO: 1560819
agaauucuggagugucuga

SEQ ID NO: 1626728 - RNA, 19 nt, Artificial Sequence
  Description of Artificial Sequence: Synthetic oligonucleotide
  Antisense strand to SEQ ID NO: 1626727
ucagacacuccagaauucu

SEQ ID NO: 1626729 - RNA, 19 nt, Artificial Sequence
  Description of Artificial Sequence: Synthetic oligonucleotide
  Sense strand starting at position 1979 of SEQ ID NO: 1560819
cugagaaguuuccugcuuu

SEQ ID NO: 1626730 - RNA, 19 nt, Artificial Sequence
  Description of Artificial Sequence: Synthetic oligonucleotide
  Antisense strand to SEQ ID NO: 1626729
aaagcaggaaacuucucag

SEQ ID NO: 1626731 - RNA, 19 nt, Artificial Sequence
  Description of Artificial Sequence: Synthetic oligonucleotide
  Sense strand starting at position 1998 of SEQ ID NO: 1560819
cauguuguugaugagucuu

SEQ ID NO: 1626732 - RNA, 19 nt, Artificial Sequence
  Description of Artificial Sequence: Synthetic oligonucleotide
  Antisense strand to SEQ ID NO: 1626731
aagacucaucaacaacaug

SEQ ID NO: 1626733 - RNA, 19 nt, Artificial Sequence
  Description of Artificial Sequence: Synthetic oligonucleotide
  Sense strand starting at position 2000 of SEQ ID NO: 1560819
uguuguugaugagucuuga

SEQ ID NO: 1626734 - RNA, 19 nt, Artificial Sequence
  Description of Artificial Sequence: Synthetic oligonucleotide
  Antisense strand to SEQ ID NO: 1626733
ucaagacucaucaacaaca

SEQ ID NO: 1626735 - RNA, 19 nt, Artificial Sequence
  Description of Artificial Sequence: Synthetic oligonucleotide
  Sense strand starting at position 2750 of SEQ ID NO: 1560819
gugucuuucucacccacca

SEQ ID NO: 1626736 - RNA, 19 nt, Artificial Sequence
  Description of Artificial Sequence: Synthetic oligonucleotide
  Antisense strand to SEQ ID NO: 1626735
uggugggugagaaagacac

SEQ ID NO: 1626737 - RNA, 19 nt, Artificial Sequence
  Description of Artificial Sequence: Synthetic oligonucleotide
  Sense strand starting at position 2779 of SEQ ID NO: 1560819
cucauuacaguuugugaaa

SEQ ID NO: 1626738 - RNA, 19 nt, Artificial Sequence
  Description of Artificial Sequence: Synthetic oligonucleotide
  Antisense strand to SEQ ID NO: 1626737
uuucacaaacuguaaugag

SEQ ID NO: 1626739 - RNA, 19 nt, Artificial Sequence
  Description of Artificial Sequence: Synthetic oligonucleotide
  Sense strand starting at position 3310 of SEQ ID NO: 1560819
ggaggaguccugugugagu

SEQ ID NO: 1626740 - RNA, 19 nt, Artificial Sequence
  Description of Artificial Sequence: Synthetic oligonucleotide
  Antisense strand to SEQ ID NO: 1626739
acucacacaggacuccucc

SEQ ID NO: 1626741 - RNA, 19 nt, Artificial Sequence
  Description of Artificial Sequence: Synthetic oligonucleotide
  Sense strand starting at position 3312 of SEQ ID NO: 1560819
aggaguccugugugaguca

SEQ ID NO: 1626742 - RNA, 19 nt, Artificial Sequence
  Description of Artificial Sequence: Synthetic oligonucleotide
  Antisense strand to SEQ ID NO: 1626741
ugacucacacaggacuccu

SEQ ID NO: 1626743 - RNA, 19 nt, Artificial Sequence
  Description of Artificial Sequence: Synthetic oligonucleotide
  Sense strand starting at position 3350 of SEQ ID NO: 1560819
ccuucuggcuuauccagau

SEQ ID NO: 1626744 - RNA, 19 nt, Artificial Sequence
  Description of Artificial Sequence: Synthetic oligonucleotide
  Antisense strand to SEQ ID NO: 1626743
aucuggauaagccagaagg

SEQ ID NO: 1626745 - RNA, 19 nt, Artificial Sequence
  Description of Artificial Sequence: Synthetic oligonucleotide
  Sense strand starting at position 3354 of SEQ ID NO: 1560819
cuggcuuauccagauucuu

SEQ ID NO: 1626746 - RNA, 19 nt, Artificial Sequence
  Description of Artificial Sequence: Synthetic oligonucleotide
  Antisense strand to SEQ ID NO: 1626745
aagaaucuggauaagccag

SEQ ID NO: 1626747 - RNA, 19 nt, Artificial Sequence
  Description of Artificial Sequence: Synthetic oligonucleotide
  Sense strand starting at position 3481 of SEQ ID NO: 1560819
cuguaaugaugacucagga

SEQ ID NO: 1626748 - RNA, 19 nt, Artificial Sequence
  Description of Artificial Sequence: Synthetic oligonucleotide
  Antisense strand to SEQ ID NO: 1626747
uccugagucaucauuacag

SEQ ID NO: 1626749 - RNA, 19 nt, Artificial Sequence
  Description of Artificial Sequence: Synthetic oligonucleotide
  Sense strand starting at position 3581 of SEQ ID NO: 1560819
aauugaguuccuggccaga

SEQ ID NO: 1626750 - RNA, 19 nt, Artificial Sequence
  Description of Artificial Sequence: Synthetic oligonucleotide
  Antisense strand to SEQ ID NO: 1626749
ucuggccaggaacucaauu

SEQ ID NO: 1626751 - RNA, 19 nt, Artificial Sequence
  Description of Artificial Sequence: Synthetic oligonucleotide
  Sense strand starting at position 3583 of SEQ ID NO: 1560819
uugaguuccuggccagaca

SEQ ID NO: 1626752 - RNA, 19 nt, Artificial Sequence
  Description of Artificial Sequence: Synthetic oligonucleotide
  Antisense strand to SEQ ID NO: 1626751
ugucuggccaggaacucaa

SEQ ID NO: 1626753 - RNA, 19 nt, Artificial Sequence
  Description of Artificial Sequence: Synthetic oligonucleotide
  Sense strand starting at position 198 of SEQ ID NO: 1560820
gauccucauuuacggaaga

SEQ ID NO: 1626754 - RNA, 19 nt, Artificial Sequence
  Description of Artificial Sequence: Synthetic oligonucleotide
  Antisense strand to SEQ ID NO: 1626753
ucuuccguaaaugaggauc

SEQ ID NO: 1626755 - RNA, 19 nt, Artificial Sequence
  Description of Artificial Sequence: Synthetic oligonucleotide
  Sense strand starting at position 247 of SEQ ID NO: 1560820
gugucauagcccuauggca

SEQ ID NO: 1626756 - RNA, 19 nt, Artificial Sequence
  Description of Artificial Sequence: Synthetic oligonucleotide
  Antisense strand to SEQ ID NO: 1626755
ugccauagggcuaugacac

SEQ ID NO: 1626757 - RNA, 19 nt, Artificial Sequence
  Description of Artificial Sequence: Synthetic oligonucleotide
  Sense strand starting at position 291 of SEQ ID NO: 1560820
agucauaaccugugguguu

SEQ ID NO: 1626758 - RNA, 19 nt, Artificial Sequence
  Description of Artificial Sequence: Synthetic oligonucleotide
  Antisense strand to SEQ ID NO: 1626757
aacaccacagguuaugacu

SEQ ID NO: 1626759 - RNA, 19 nt, Artificial Sequence
  Description of Artificial Sequence: Synthetic oligonucleotide
  Sense strand starting at position 550 of SEQ ID NO: 1560820
ucuugcugucauugauuga

SEQ ID NO: 1626760 - RNA, 19 nt, Artificial Sequence
  Description of Artificial Sequence: Synthetic oligonucleotide
  Antisense strand to SEQ ID NO: 1626759
ucaaucaaugacagcaaga

SEQ ID NO: 1626761 - RNA, 19 nt, Artificial Sequence
  Description of Artificial Sequence: Synthetic oligonucleotide
  Sense strand starting at position 554 of SEQ ID NO: 1560820
gcugucauugauugacaga

SEQ ID NO: 1626762 - RNA, 19 nt, Artificial Sequence
  Description of Artificial Sequence: Synthetic oligonucleotide
  Antisense strand to SEQ ID NO: 1626761
ucugucaaucaaugacagc

SEQ ID NO: 1626763 - RNA, 19 nt, Artificial Sequence
  Description of Artificial Sequence: Synthetic oligonucleotide
  Sense strand starting at position 606 of SEQ ID NO: 1560820
ccuugcugugauugaaaga

SEQ ID NO: 1626764 - RNA, 19 nt, Artificial Sequence
  Description of Artificial Sequence: Synthetic oligonucleotide
  Antisense strand to SEQ ID NO: 1626763
ucuuucaaucacagcaagg

SEQ ID NO: 1626765 - RNA, 19 nt, Artificial Sequence
  Description of Artificial Sequence: Synthetic oligonucleotide
  Sense strand starting at position 607 of SEQ ID NO: 1560820
cuugcugugauugaaagau

SEQ ID NO: 1626766 - RNA, 19 nt, Artificial Sequence
  Description of Artificial Sequence: Synthetic oligonucleotide
  Antisense strand to SEQ ID NO: 1626765
aucuuucaaucacagcaag

SEQ ID NO: 1626767 - RNA, 19 nt, Artificial Sequence
  Description of Artificial Sequence: Synthetic oligonucleotide
  Sense strand starting at position 706 of SEQ ID NO: 1560820
ccuugcugugauugauuga

SEQ ID NO: 1626768 - RNA, 19 nt, Artificial Sequence
  Description of Artificial Sequence: Synthetic oligonucleotide
  Antisense strand to SEQ ID NO: 1626767
ucaaucaaucacagcaagg

SEQ ID NO: 1626769 - RNA, 19 nt, Artificial Sequence
  Description of Artificial Sequence: Synthetic oligonucleotide
  Sense strand starting at position 707 of SEQ ID NO: 1560820
cuugcugugauugauugau

SEQ ID NO: 1626770 - RNA, 19 nt, Artificial Sequence
  Description of Artificial Sequence: Synthetic oligonucleotide
  Antisense strand to SEQ ID NO: 1626769
aucaaucaaucacagcaag

SEQ ID NO: 1626771 - RNA, 19 nt, Artificial Sequence
  Description of Artificial Sequence: Synthetic oligonucleotide
  Sense strand starting at position 758 of SEQ ID NO: 1560820
aggcccuugcugugauuaa

SEQ ID NO: 1626772 - RNA, 19 nt, Artificial Sequence
  Description of Artificial Sequence: Synthetic oligonucleotide
  Antisense strand to SEQ ID NO: 1626771
uuaaucacagcaagggccu

SEQ ID NO: 1626773 - RNA, 19 nt, Artificial Sequence
  Description of Artificial Sequence: Synthetic oligonucleotide
  Sense strand starting at position 762 of SEQ ID NO: 1560820
ccuugcugugauuaauuga

SEQ ID NO: 1626774 - RNA, 19 nt, Artificial Sequence
  Description of Artificial Sequence: Synthetic oligonucleotide
  Antisense strand to SEQ ID NO: 1626773
ucaauuaaucacagcaagg

SEQ ID NO: 1626775 - RNA, 19 nt, Artificial Sequence
  Description of Artificial Sequence: Synthetic oligonucleotide
  Sense strand starting at position 767 of SEQ ID NO: 1560820
cugugauuaauugaucgau

SEQ ID NO: 1626776 - RNA, 19 nt, Artificial Sequence
  Description of Artificial Sequence: Synthetic oligonucleotide
  Antisense strand to SEQ ID NO: 1626775
aucgaucaauuaaucacag

SEQ ID NO: 1626777 - RNA, 19 nt, Artificial Sequence
  Description of Artificial Sequence: Synthetic oligonucleotide
  Sense strand starting at position 769 of SEQ ID NO: 1560820
gugauuaauugaucgauug

SEQ ID NO: 1626778 - RNA, 19 nt, Artificial Sequence
  Description of Artificial Sequence: Synthetic oligonucleotide
  Antisense strand to SEQ ID NO: 1626777
caaucgaucaauuaaucac

SEQ ID NO: 1626779 - RNA, 19 nt, Artificial Sequence
  Description of Artificial Sequence: Synthetic oligonucleotide
  Sense strand starting at position 770 of SEQ ID NO: 1560820
ugauuaauugaucgauuga

SEQ ID NO: 1626780 - RNA, 19 nt, Artificial Sequence
  Description of Artificial Sequence: Synthetic oligonucleotide
  Antisense strand to SEQ ID NO: 1626779
ucaaucgaucaauuaauca

SEQ ID NO: 1626781 - RNA, 19 nt, Artificial Sequence
  Description of Artificial Sequence: Synthetic oligonucleotide
  Sense strand starting at position 779 of SEQ ID NO: 1560820
gaucgauugauagauuggu

SEQ ID NO: 1626782 - RNA, 19 nt, Artificial Sequence
  Description of Artificial Sequence: Synthetic oligonucleotide
  Antisense strand to SEQ ID NO: 1626781
accaaucuaucaaucgauc

SEQ ID NO: 1626783 - RNA, 19 nt, Artificial Sequence
  Description of Artificial Sequence: Synthetic oligonucleotide
  Sense strand starting at position 784 of SEQ ID NO: 1560820
auugauagauugguugaca

SEQ ID NO: 1626784 - RNA, 19 nt, Artificial Sequence
  Description of Artificial Sequence: Synthetic oligonucleotide
  Antisense strand to SEQ ID NO: 1626783
ugucaaccaaucuaucaau

SEQ ID NO: 1626785 - RNA, 19 nt, Artificial Sequence
  Description of Artificial Sequence: Synthetic oligonucleotide
  Sense strand starting at position 785 of SEQ ID NO: 1560820
uugauagauugguugacag

SEQ ID NO: 1626786 - RNA, 19 nt, Artificial Sequence
  Description of Artificial Sequence: Synthetic oligonucleotide
  Antisense strand to SEQ ID NO: 1626785
cugucaaccaaucuaucaa

SEQ ID NO: 1626787 - RNA, 19 nt, Artificial Sequence
  Description of Artificial Sequence: Synthetic oligonucleotide
  Sense strand starting at position 789 of SEQ ID NO: 1560820
uagauugguugacagagaa

SEQ ID NO: 1626788 - RNA, 19 nt, Artificial Sequence
  Description of Artificial Sequence: Synthetic oligonucleotide
  Antisense strand to SEQ ID NO: 1626787
uucucugucaaccaaucua

SEQ ID NO: 1626789 - RNA, 19 nt, Artificial Sequence
  Description of Artificial Sequence: Synthetic oligonucleotide
  Sense strand starting at position 830 of SEQ ID NO: 1560820
aggcucuuggugugauacu

SEQ ID NO: 1626790 - RNA, 19 nt, Artificial Sequence
  Description of Artificial Sequence: Synthetic oligonucleotide
  Antisense strand to SEQ ID NO: 1626789
aguaucacaccaagagccu

SEQ ID NO: 1626791 - RNA, 19 nt, Artificial Sequence
  Description of Artificial Sequence: Synthetic oligonucleotide
  Sense strand starting at position 839 of SEQ ID NO: 1560820
gugugauacuguguuagau

SEQ ID NO: 1626792 - RNA, 19 nt, Artificial Sequence
  Description of Artificial Sequence: Synthetic oligonucleotide
  Antisense strand to SEQ ID NO: 1626791
aucuaacacaguaucacac

SEQ ID NO: 1626793 - RNA, 19 nt, Artificial Sequence
  Description of Artificial Sequence: Synthetic oligonucleotide
  Sense strand starting at position 1612 of SEQ ID NO: 1560820
ccaggucaguuucuuaagu

SEQ ID NO: 1626794 - RNA, 19 nt, Artificial Sequence
  Description of Artificial Sequence: Synthetic oligonucleotide
  Antisense strand to SEQ ID NO: 1626793
acuuaagaaacugaccugg

SEQ ID NO: 1626795 - RNA, 19 nt, Artificial Sequence
  Description of Artificial Sequence: Synthetic oligonucleotide
  Sense strand starting at position 1617 of SEQ ID NO: 1560820
ucaguuucuuaagugaucu

SEQ ID NO: 1626796 - RNA, 19 nt, Artificial Sequence
  Description of Artificial Sequence: Synthetic oligonucleotide
  Antisense strand to SEQ ID NO: 1626795
agaucacuuaagaaacuga

SEQ ID NO: 1626797 - RNA, 19 nt, Artificial Sequence
  Description of Artificial Sequence: Synthetic oligonucleotide
  Sense strand starting at position 1628 of SEQ ID NO: 1560820
agugaucugagcuauaaug

SEQ ID NO: 1626798 - RNA, 19 nt, Artificial Sequence
  Description of Artificial Sequence: Synthetic oligonucleotide
  Antisense strand to SEQ ID NO: 1626797
cauuauagcucagaucacu

SEQ ID NO: 1626799 - RNA, 19 nt, Artificial Sequence
  Description of Artificial Sequence: Synthetic oligonucleotide
  Sense strand starting at position 1637 of SEQ ID NO: 1560820
agcuauaauggcgguaaca

SEQ ID NO: 1626800 - RNA, 19 nt, Artificial Sequence
  Description of Artificial Sequence: Synthetic oligonucleotide
  Antisense strand to SEQ ID NO: 1626799
uguuaccgccauuauagcu

SEQ ID NO: 1626801 - RNA, 19 nt, Artificial Sequence
  Description of Artificial Sequence: Synthetic oligonucleotide
  Sense strand starting at position 1639 of SEQ ID NO: 1560820
cuauaauggcgguaacaga

SEQ ID NO: 1626802 - RNA, 19 nt, Artificial Sequence
  Description of Artificial Sequence: Synthetic oligonucleotide
  Antisense strand to SEQ ID NO: 1626801
ucuguuaccgccauuauag

SEQ ID NO: 1626803 - RNA, 19 nt, Artificial Sequence
  Description of Artificial Sequence: Synthetic oligonucleotide
  Sense strand starting at position 1650 of SEQ ID NO: 1560820
guaacagagcacugugaga

SEQ ID NO: 1626804 - RNA, 19 nt, Artificial Sequence
  Description of Artificial Sequence: Synthetic oligonucleotide
  Antisense strand to SEQ ID NO: 1626803
ucucacagugcucuguuac

SEQ ID NO: 1626805 - RNA, 19 nt, Artificial Sequence
  Description of Artificial Sequence: Synthetic oligonucleotide
  Sense strand starting at position 1685 of SEQ ID NO: 1560820
uaacccaucugggaugaga

SEQ ID NO: 1626806 - RNA, 19 nt, Artificial Sequence
  Description of Artificial Sequence: Synthetic oligonucleotide
  Antisense strand to SEQ ID NO: 1626805
ucucaucccagauggguua

SEQ ID NO: 1626807 - RNA, 19 nt, Artificial Sequence
  Description of Artificial Sequence: Synthetic oligonucleotide
  Sense strand starting at position 1722 of SEQ ID NO: 1560820
agccgauguugagcugaga

SEQ ID NO: 1626808 - RNA, 19 nt, Artificial Sequence
  Description of Artificial Sequence: Synthetic oligonucleotide
  Antisense strand to SEQ ID NO: 1626807
ucucagcucaacaucggcu

SEQ ID NO: 1626809 - RNA, 19 nt, Artificial Sequence
  Description of Artificial Sequence: Synthetic oligonucleotide
  Sense strand starting at position 1883 of SEQ ID NO: 1560820
agcgacuucuaggcugaga

SEQ ID NO: 1626810 - RNA, 19 nt, Artificial Sequence
  Description of Artificial Sequence: Synthetic oligonucleotide
  Antisense strand to SEQ ID NO: 1626809
ucucagccuagaagucgcu

SEQ ID NO: 1626811 - RNA, 19 nt, Artificial Sequence
  Description of Artificial Sequence: Synthetic oligonucleotide
  Sense strand starting at position 1885 of SEQ ID NO: 1560820
cgacuucuaggcugagacu

SEQ ID NO: 1626812 - RNA, 19 nt, Artificial Sequence
  Description of Artificial Sequence: Synthetic oligonucleotide
  Antisense strand to SEQ ID NO: 1626811
agucucagccuagaagucg

SEQ ID NO: 1626813 - RNA, 19 nt, Artificial Sequence
  Description of Artificial Sequence: Synthetic oligonucleotide
  Sense strand starting at position 2188 of SEQ ID NO: 1560820
caaagauggcugcgaguaa

SEQ ID NO: 1626814 - RNA, 19 nt, Artificial Sequence
  Description of Artificial Sequence: Synthetic oligonucleotide
  Antisense strand to SEQ ID NO: 1626813
uuacucgcagccaucuuug

SEQ ID NO: 1626815 - RNA, 19 nt, Artificial Sequence
  Description of Artificial Sequence: Synthetic oligonucleotide
  Sense strand starting at position 2234 of SEQ ID NO: 1560820
cggguaguucugggaaccu

SEQ ID NO: 1626816 - RNA, 19 nt, Artificial Sequence
  Description of Artificial Sequence: Synthetic oligonucleotide
  Antisense strand to SEQ ID NO: 1626815
agguucccagaacuacccg

SEQ ID NO: 1626817 - RNA, 19 nt, Artificial Sequence
  Description of Artificial Sequence: Synthetic oligonucleotide
  Sense strand starting at position 2851 of SEQ ID NO: 1560820
gggaaucugugucuuguga

SEQ ID NO: 1626818 - RNA, 19 nt, Artificial Sequence
  Description of Artificial Sequence: Synthetic oligonucleotide
  Antisense strand to SEQ ID NO: 1626817
ucacaagacacagauuccc

SEQ ID NO: 1626819 - RNA, 19 nt, Artificial Sequence
  Description of Artificial Sequence: Synthetic oligonucleotide
  Sense strand starting at position 2878 of SEQ ID NO: 1560820
guaugaucccaaugugccu

SEQ ID NO: 1626820 - RNA, 19 nt, Artificial Sequence
  Description of Artificial Sequence: Synthetic oligonucleotide
  Antisense strand to SEQ ID NO: 1626819
aggcacauugggaucauac

SEQ ID NO: 1626821 - RNA, 19 nt, Artificial Sequence
  Description of Artificial Sequence: Synthetic oligonucleotide
  Sense strand starting at position 2946 of SEQ ID NO: 1560820
uuuaauuagcaccggaguu

SEQ ID NO: 1626822 - RNA, 19 nt, Artificial Sequence
  Description of Artificial Sequence: Synthetic oligonucleotide
  Antisense strand to SEQ ID NO: 1626821
aacuccggugcuaauuaaa

SEQ ID NO: 1626823 - RNA, 19 nt, Artificial Sequence
  Description of Artificial Sequence: Synthetic oligonucleotide
  Sense strand starting at position 3689 of SEQ ID NO: 1560820
ugaucugccuucccaaagu

SEQ ID NO: 1626824 - RNA, 19 nt, Artificial Sequence
  Description of Artificial Sequence: Synthetic oligonucleotide
  Antisense strand to SEQ ID NO: 1626823
acuuugggaaggcagauca

SEQ ID NO: 1626825 - RNA, 19 nt, Artificial Sequence
  Description of Artificial Sequence: Synthetic oligonucleotide
  Sense strand starting at position 3912 of SEQ ID NO: 1560820
ugaaguggugcugguauga

SEQ ID NO: 1626826 - RNA, 19 nt, Artificial Sequence
  Description of Artificial Sequence: Synthetic oligonucleotide
  Antisense strand to SEQ ID NO: 1626825
ucauaccagcaccacuuca

SEQ ID NO: 1626827 - RNA, 19 nt, Artificial Sequence
  Description of Artificial Sequence: Synthetic oligonucleotide
  Sense strand starting at position 3926 of SEQ ID NO: 1560820
uaugaauugaggugguaua

SEQ ID NO: 1626828 - RNA, 19 nt, Artificial Sequence
  Description of Artificial Sequence: Synthetic oligonucleotide
  Antisense strand to SEQ ID NO: 1626827
uauaccaccucaauucaua

SEQ ID NO: 1626829 - RNA, 19 nt, Artificial Sequence
  Description of Artificial Sequence: Synthetic oligonucleotide
  Sense strand starting at position 3927 of SEQ ID NO: 1560820
augaauugaggugguauaa

SEQ ID NO: 1626830 - RNA, 19 nt, Artificial Sequence
  Description of Artificial Sequence: Synthetic oligonucleotide
  Antisense strand to SEQ ID NO: 1626829
uuauaccaccucaauucau

SEQ ID NO: 1626831 - RNA, 19 nt, Artificial Sequence
  Description of Artificial Sequence: Synthetic oligonucleotide
  Sense strand starting at position 3967 of SEQ ID NO: 1560820
aguauaacagaguguguaa

SEQ ID NO: 1626832 - RNA, 19 nt, Artificial Sequence
  Description of Artificial Sequence: Synthetic oligonucleotide
  Antisense strand to SEQ ID NO: 1626831
uuacacacucuguuauacu

SEQ ID NO: 1626833 - RNA, 19 nt, Artificial Sequence
  Description of Artificial Sequence: Synthetic oligonucleotide
  Sense strand starting at position 10 of SEQ ID NO: 1560821
uggagccugaaucguauaa

SEQ ID NO: 1626834 - RNA, 19 nt, Artificial Sequence
  Description of Artificial Sequence: Synthetic oligonucleotide
  Antisense strand to SEQ ID NO: 1626833
uuauacgauucaggcucca

SEQ ID NO: 1626835 - RNA, 19 nt, Artificial Sequence
  Description of Artificial Sequence: Synthetic oligonucleotide
  Sense strand starting at position 107 of SEQ ID NO: 1560821
gagacaucaugucuugauu

SEQ ID NO: 1626836 - RNA, 19 nt, Artificial Sequence
  Description of Artificial Sequence: Synthetic oligonucleotide
  Antisense strand to SEQ ID NO: 1626835
aaucaagacaugaugucuc

SEQ ID NO: 1626837 - RNA, 19 nt, Artificial Sequence
  Description of Artificial Sequence: Synthetic oligonucleotide
  Sense strand starting at position 457 of SEQ ID NO: 1560821
aggaguuauuagccucucu

SEQ ID NO: 1626838 - RNA, 19 nt, Artificial Sequence
  Description of Artificial Sequence: Synthetic oligonucleotide
  Antisense strand to SEQ ID NO: 1626837
agagaggcuaauaacuccu

SEQ ID NO: 1626839 - RNA, 19 nt, Artificial Sequence
  Description of Artificial Sequence: Synthetic oligonucleotide
  Sense strand starting at position 494 of SEQ ID NO: 1560821
cuuuguuacucugcaaaug

SEQ ID NO: 1626840 - RNA, 19 nt, Artificial Sequence
  Description of Artificial Sequence: Synthetic oligonucleotide
  Antisense strand to SEQ ID NO: 1626839
cauuugcagaguaacaaag

SEQ ID NO: 1626841 - RNA, 19 nt, Artificial Sequence
  Description of Artificial Sequence: Synthetic oligonucleotide
  Sense strand starting at position 495 of SEQ ID NO: 1560821
uuuguuacucugcaaauga

SEQ ID NO: 1626842 - RNA, 19 nt, Artificial Sequence
  Description of Artificial Sequence: Synthetic oligonucleotide
  Antisense strand to SEQ ID NO: 1626841
ucauuugcagaguaacaaa

SEQ ID NO: 1626843 - RNA, 19 nt, Artificial Sequence
  Description of Artificial Sequence: Synthetic oligonucleotide
  Sense strand starting at position 560 of SEQ ID NO: 1560821
gugggagacagugauuagu

SEQ ID NO: 1626844 - RNA, 19 nt, Artificial Sequence
  Description of Artificial Sequence: Synthetic oligonucleotide
  Antisense strand to SEQ ID NO: 1626843
acuaaucacugucucccac

SEQ ID NO: 1626845 - RNA, 19 nt, Artificial Sequence
  Description of Artificial Sequence: Synthetic oligonucleotide
  Sense strand starting at position 562 of SEQ ID NO: 1560821
gggagacagugauuagugu

SEQ ID NO: 1626846 - RNA, 19 nt, Artificial Sequence
  Description of Artificial Sequence: Synthetic oligonucleotide
  Antisense strand to SEQ ID NO: 1626845
acacuaaucacugucuccc

SEQ ID NO: 1626847 - RNA, 19 nt, Artificial Sequence
  Description of Artificial Sequence: Synthetic oligonucleotide
  Sense strand starting at position 647 of SEQ ID NO: 1560821
cccaucuucugaugugaca

SEQ ID NO: 1626848 - RNA, 19 nt, Artificial Sequence
  Description of Artificial Sequence: Synthetic oligonucleotide
  Antisense strand to SEQ ID NO: 1626847
ugucacaucagaagauggg

SEQ ID NO: 1626849 - RNA, 19 nt, Artificial Sequence
  Description of Artificial Sequence: Synthetic oligonucleotide
  Sense strand starting at position 791 of SEQ ID NO: 1560821
ccacgauuacacgauugua

SEQ ID NO: 1626850 - RNA, 19 nt, Artificial Sequence
  Description of Artificial Sequence: Synthetic oligonucleotide
  Antisense strand to SEQ ID NO: 1626849
uacaaucguguaaucgugg

SEQ ID NO: 1626851 - RNA, 19 nt, Artificial Sequence
  Description of Artificial Sequence: Synthetic oligonucleotide
  Sense strand starting at position 1254 of SEQ ID NO: 1560821
ggaauuacaggcugacuaa

SEQ ID NO: 1626852 - RNA, 19 nt, Artificial Sequence
  Description of Artificial Sequence: Synthetic oligonucleotide
  Antisense strand to SEQ ID NO: 1626851
uuagucagccuguaauucc

SEQ ID NO: 1626853 - RNA, 19 nt, Artificial Sequence
  Description of Artificial Sequence: Synthetic oligonucleotide
  Sense strand starting at position 1332 of SEQ ID NO: 1560821
uugucuuauucccgcugaa

SEQ ID NO: 1626854 - RNA, 19 nt, Artificial Sequence
  Description of Artificial Sequence: Synthetic oligonucleotide
  Antisense strand to SEQ ID NO: 1626853
uucagcgggaauaagacaa

SEQ ID NO: 1626855 - RNA, 19 nt, Artificial Sequence
  Description of Artificial Sequence: Synthetic oligonucleotide
  Sense strand starting at position 1335 of SEQ ID NO: 1560821
ucuuauucccgcugaauau

SEQ ID NO: 1626856 - RNA, 19 nt, Artificial Sequence
  Description of Artificial Sequence: Synthetic oligonucleotide
  Antisense strand to SEQ ID NO: 1626855
auauucagcgggaauaaga

SEQ ID NO: 1626857 - RNA, 19 nt, Artificial Sequence
  Description of Artificial Sequence: Synthetic oligonucleotide
  Sense strand starting at position 1336 of SEQ ID NO: 1560821
cuuauucccgcugaauaua

SEQ ID NO: 1626858 - RNA, 19 nt, Artificial Sequence
  Description of Artificial Sequence: Synthetic oligonucleotide
  Antisense strand to SEQ ID NO: 1626857
uauauucagcgggaauaag

SEQ ID NO: 1626859 - RNA, 19 nt, Artificial Sequence
  Description of Artificial Sequence: Synthetic oligonucleotide
  Sense strand starting at position 1410 of SEQ ID NO: 1560821
gcgcuuuccuuccuccaau

SEQ ID NO: 1626860 - RNA, 19 nt, Artificial Sequence
  Description of Artificial Sequence: Synthetic oligonucleotide
  Antisense strand to SEQ ID NO: 1626859
auuggaggaaggaaagcgc

SEQ ID NO: 1626861 - RNA, 19 nt, Artificial Sequence
  Description of Artificial Sequence: Synthetic oligonucleotide
  Sense strand starting at position 1478 of SEQ ID NO: 1560821
ugucccauguucugacaua

SEQ ID NO: 1626862 - RNA, 19 nt, Artificial Sequence
  Description of Artificial Sequence: Synthetic oligonucleotide
  Antisense strand to SEQ ID NO: 1626861
uaugucagaacaugggaca

SEQ ID NO: 1626863 - RNA, 19 nt, Artificial Sequence
  Description of Artificial Sequence: Synthetic oligonucleotide
  Sense strand starting at position 1479 of SEQ ID NO: 1560821
gucccauguucugacauaa

SEQ ID NO: 1626864 - RNA, 19 nt, Artificial Sequence
  Description of Artificial Sequence: Synthetic oligonucleotide
  Antisense strand to SEQ ID NO: 1626863
uuaugucagaacaugggac

SEQ ID NO: 1626865 - RNA, 19 nt, Artificial Sequence
  Description of Artificial Sequence: Synthetic oligonucleotide
  Sense strand starting at position 1539 of SEQ ID NO: 1560821
ggaagagaucccuguggcu

SEQ ID NO: 1626866 - RNA, 19 nt, Artificial Sequence
  Description of Artificial Sequence: Synthetic oligonucleotide
  Antisense strand to SEQ ID NO: 1626865
agccacagggaucucuucc

SEQ ID NO: 1626867 - RNA, 19 nt, Artificial Sequence
  Description of Artificial Sequence: Synthetic oligonucleotide
  Sense strand starting at position 1594 of SEQ ID NO: 1560821
agagcucacuacuaggaaa

SEQ ID NO: 1626868 - RNA, 19 nt, Artificial Sequence
  Description of Artificial Sequence: Synthetic oligonucleotide
  Antisense strand to SEQ ID NO: 1626867
uuuccuaguagugagcucu

SEQ ID NO: 1626869 - RNA, 19 nt, Artificial Sequence
  Description of Artificial Sequence: Synthetic oligonucleotide
  Sense strand starting at position 1743 of SEQ ID NO: 1560821
uggcuuugcuagccaguua

SEQ ID NO: 1626870 - RNA, 19 nt, Artificial Sequence
  Description of Artificial Sequence: Synthetic oligonucleotide
  Antisense strand to SEQ ID NO: 1626869
uaacuggcuagcaaagcca

SEQ ID NO: 1626871 - RNA, 19 nt, Artificial Sequence
  Description of Artificial Sequence: Synthetic oligonucleotide
  Sense strand starting at position 2034 of SEQ ID NO: 1560821
gcuuccaccugcugucaga

SEQ ID NO: 1626872 - RNA, 19 nt, Artificial Sequence
  Description of Artificial Sequence: Synthetic oligonucleotide
  Antisense strand to SEQ ID NO: 1626871
ucugacagcagguggaagc

SEQ ID NO: 1626873 - RNA, 19 nt, Artificial Sequence
  Description of Artificial Sequence: Synthetic oligonucleotide
  Sense strand starting at position 2066 of SEQ ID NO: 1560821
augacuaucccugguggga

SEQ ID NO: 1626874 - RNA, 19 nt, Artificial Sequence
  Description of Artificial Sequence: Synthetic oligonucleotide
  Antisense strand to SEQ ID NO: 1626873
ucccaccagggauagucau

SEQ ID NO: 1626875 - RNA, 19 nt, Artificial Sequence
  Description of Artificial Sequence: Synthetic oligonucleotide
  Sense strand starting at position 2068 of SEQ ID NO: 1560821
gacuaucccuggugggaaa

SEQ ID NO: 1626876 - RNA, 19 nt, Artificial Sequence
  Description of Artificial Sequence: Synthetic oligonucleotide
  Antisense strand to SEQ ID NO: 1626875
uuucccaccagggauaguc

SEQ ID NO: 1626877 - RNA, 19 nt, Artificial Sequence
  Description of Artificial Sequence: Synthetic oligonucleotide
  Sense strand starting at position 2101 of SEQ ID NO: 1560821
ugaggaaccucauucucuu

SEQ ID NO: 1626878 - RNA, 19 nt, Artificial Sequence
  Description of Artificial Sequence: Synthetic oligonucleotide
  Antisense strand to SEQ ID NO: 1626877
aagagaaugagguuccuca

SEQ ID NO: 1626879 - RNA, 19 nt, Artificial Sequence
  Description of Artificial Sequence: Synthetic oligonucleotide
  Sense strand starting at position 2349 of SEQ ID NO: 1560821
gggucuguuugccaggcaa

SEQ ID NO: 1626880 - RNA, 19 nt, Artificial Sequence
  Description of Artificial Sequence: Synthetic oligonucleotide
  Antisense strand to SEQ ID NO: 1626879
uugccuggcaaacagaccc

SEQ ID NO: 1626881 - RNA, 19 nt, Artificial Sequence
  Description of Artificial Sequence: Synthetic oligonucleotide
  Sense strand starting at position 2417 of SEQ ID NO: 1560821
gcagcugucugaggacacu

SEQ ID NO: 1626882 - RNA, 19 nt, Artificial Sequence
  Description of Artificial Sequence: Synthetic oligonucleotide
  Antisense strand to SEQ ID NO: 1626881
aguguccucagacagcugc

SEQ ID NO: 1626883 - RNA, 19 nt, Artificial Sequence
  Description of Artificial Sequence: Synthetic oligonucleotide
  Sense strand starting at position 2452 of SEQ ID NO: 1560821
gugauugcccugcucugua

SEQ ID NO: 1626884 - RNA, 19 nt, Artificial Sequence
  Description of Artificial Sequence: Synthetic oligonucleotide
  Antisense strand to SEQ ID NO: 1626883
uacagagcagggcaaucac

SEQ ID NO: 1626885 - RNA, 19 nt, Artificial Sequence
  Description of Artificial Sequence: Synthetic oligonucleotide
  Sense strand starting at position 2483 of SEQ ID NO: 1560821
gacagcagaucuggauaaa

SEQ ID NO: 1626886 - RNA, 19 nt, Artificial Sequence
  Description of Artificial Sequence: Synthetic oligonucleotide
  Antisense strand to SEQ ID NO: 1626885
uuuauccagaucugcuguc

SEQ ID NO: 1626887 - RNA, 19 nt, Artificial Sequence
  Description of Artificial Sequence: Synthetic oligonucleotide
  Sense strand starting at position 2493 of SEQ ID NO: 1560821
cuggauaaaucagggcaaa

SEQ ID NO: 1626888 - RNA, 19 nt, Artificial Sequence
  Description of Artificial Sequence: Synthetic oligonucleotide
  Antisense strand to SEQ ID NO: 1626887
uuugcccugauuuauccag

SEQ ID NO: 1626889 - RNA, 19 nt, Artificial Sequence
  Description of Artificial Sequence: Synthetic oligonucleotide
  Sense strand starting at position 2523 of SEQ ID NO: 1560821
ggcugugcauccucaggua

SEQ ID NO: 1626890 - RNA, 19 nt, Artificial Sequence
  Description of Artificial Sequence: Synthetic oligonucleotide
  Antisense strand to SEQ ID NO: 1626889
uaccugaggaugcacagcc

SEQ ID NO: 1626891 - RNA, 19 nt, Artificial Sequence
  Description of Artificial Sequence: Synthetic oligonucleotide
  Sense strand starting at position 2649 of SEQ ID NO: 1560821
cuaguuacugccugggaca

SEQ ID NO: 1626892 - RNA, 19 nt, Artificial Sequence
  Description of Artificial Sequence: Synthetic oligonucleotide
  Antisense strand to SEQ ID NO: 1626891
ugucccaggcaguaacuag

SEQ ID NO: 1626893 - RNA, 19 nt, Artificial Sequence
  Description of Artificial Sequence: Synthetic oligonucleotide
  Sense strand starting at position 2650 of SEQ ID NO: 1560821
uaguuacugccugggacaa

SEQ ID NO: 1626894 - RNA, 19 nt, Artificial Sequence
  Description of Artificial Sequence: Synthetic oligonucleotide
  Antisense strand to SEQ ID NO: 1626893
uugucccaggcaguaacua

SEQ ID NO: 1626895 - RNA, 19 nt, Artificial Sequence
  Description of Artificial Sequence: Synthetic oligonucleotide
  Sense strand starting at position 2682 of SEQ ID NO: 1560821
ucccacagucuggaaagua

SEQ ID NO: 1626896 - RNA, 19 nt, Artificial Sequence
  Description of Artificial Sequence: Synthetic oligonucleotide
  Antisense strand to SEQ ID NO: 1626895
uacuuuccagacuguggga

SEQ ID NO: 1626897 - RNA, 19 nt, Artificial Sequence
  Description of Artificial Sequence: Synthetic oligonucleotide
  Sense strand starting at position 3087 of SEQ ID NO: 1560821
acuugauucuuagccagaa

SEQ ID NO: 1626898 - RNA, 19 nt, Artificial Sequence
  Description of Artificial Sequence: Synthetic oligonucleotide
  Antisense strand to SEQ ID NO: 1626897
uucuggcuaagaaucaagu

SEQ ID NO: 1626899 - RNA, 19 nt, Artificial Sequence
  Description of Artificial Sequence: Synthetic oligonucleotide
  Sense strand starting at position 3088 of SEQ ID NO: 1560821
cuugauucuuagccagaag

SEQ ID NO: 1626900 - RNA, 19 nt, Artificial Sequence
  Description of Artificial Sequence: Synthetic oligonucleotide
  Antisense strand to SEQ ID NO: 1626899
cuucuggcuaagaaucaag

SEQ ID NO: 1626901 - RNA, 19 nt, Artificial Sequence
  Description of Artificial Sequence: Synthetic oligonucleotide
  Sense strand starting at position 3194 of SEQ ID NO: 1560821
gaucuuggcuccucuauga

SEQ ID NO: 1626902 - RNA, 19 nt, Artificial Sequence
  Description of Artificial Sequence: Synthetic oligonucleotide
  Antisense strand to SEQ ID NO: 1626901
ucauagaggagccaagauc

SEQ ID NO: 1626903 - RNA, 19 nt, Artificial Sequence
  Description of Artificial Sequence: Synthetic oligonucleotide
  Sense strand starting at position 3798 of SEQ ID NO: 1560821
cgcguaaguccaugaagga

SEQ ID NO: 1626904 - RNA, 19 nt, Artificial Sequence
  Description of Artificial Sequence: Synthetic oligonucleotide
  Antisense strand to SEQ ID NO: 1626903
uccuucauggacuuacgcg

SEQ ID NO: 1626905 - RNA, 19 nt, Artificial Sequence
  Description of Artificial Sequence: Synthetic oligonucleotide
  Sense strand starting at position 3943 of SEQ ID NO: 1560821
agggauggcuuccuggaua

SEQ ID NO: 1626906 - RNA, 19 nt, Artificial Sequence
  Description of Artificial Sequence: Synthetic oligonucleotide
  Antisense strand to SEQ ID NO: 1626905
uauccaggaagccaucccu

SEQ ID NO: 1626907 - RNA, 19 nt, Artificial Sequence
  Description of Artificial Sequence: Synthetic oligonucleotide
  Sense strand starting at position 3956 of SEQ ID NO: 1560821
uggauaagcgcugaaaggu

SEQ ID NO: 1626908 - RNA, 19 nt, Artificial Sequence
  Description of Artificial Sequence: Synthetic oligonucleotide
  Antisense strand to SEQ ID NO: 1626907
accuuucagcgcuuaucca

SEQ ID NO: 1626909 - RNA, 19 nt, Artificial Sequence
  Description of Artificial Sequence: Synthetic oligonucleotide
  Sense strand starting at position 3965 of SEQ ID NO: 1560821
gcugaaagguuucagauga

SEQ ID NO: 1626910 - RNA, 19 nt, Artificial Sequence
  Description of Artificial Sequence: Synthetic oligonucleotide
  Antisense strand to SEQ ID NO: 1626909
ucaucugaaaccuuucagc

SEQ ID NO: 1626911 - RNA, 19 nt, Artificial Sequence
  Description of Artificial Sequence: Synthetic oligonucleotide
  Sense strand starting at position 50 of SEQ ID NO: 1560822
ggcucagagccaggguuau

SEQ ID NO: 1626912 - RNA, 19 nt, Artificial Sequence
  Description of Artificial Sequence: Synthetic oligonucleotide
  Antisense strand to SEQ ID NO: 1626911
auaacccuggcucugagcc

SEQ ID NO: 1626913 - RNA, 19 nt, Artificial Sequence
  Description of Artificial Sequence: Synthetic oligonucleotide
  Sense strand starting at position 230 of SEQ ID NO: 1560822
ucagaucugugccguccaa

SEQ ID NO: 1626914 - RNA, 19 nt, Artificial Sequence
  Description of Artificial Sequence: Synthetic oligonucleotide
  Antisense strand to SEQ ID NO: 1626913
uuggacggcacagaucuga

SEQ ID NO: 1626915 - RNA, 19 nt, Artificial Sequence
  Description of Artificial Sequence: Synthetic oligonucleotide
  Sense strand starting at position 536 of SEQ ID NO: 1560822
gcagacuugugccuuggua

SEQ ID NO: 1626916 - RNA, 19 nt, Artificial Sequence
  Description of Artificial Sequence: Synthetic oligonucleotide
  Antisense strand to SEQ ID NO: 1626915
uaccaaggcacaagucugc

SEQ ID NO: 1626917 - RNA, 19 nt, Artificial Sequence
  Description of Artificial Sequence: Synthetic oligonucleotide
  Sense strand starting at position 714 of SEQ ID NO: 1560822
caccacgccugguuuaauu

SEQ ID NO: 1626918 - RNA, 19 nt, Artificial Sequence
  Description of Artificial Sequence: Synthetic oligonucleotide
  Antisense strand to SEQ ID NO: 1626917
aauuaaaccaggcguggug

SEQ ID NO: 1626919 - RNA, 19 nt, Artificial Sequence
  Description of Artificial Sequence: Synthetic oligonucleotide
  Sense strand starting at position 972 of SEQ ID NO: 1560822
cucccuucccugcguuauu

SEQ ID NO: 1626920 - RNA, 19 nt, Artificial Sequence
  Description of Artificial Sequence: Synthetic oligonucleotide
  Antisense strand to SEQ ID NO: 1626919
aauaacgcagggaagggag

SEQ ID NO: 1626921 - RNA, 19 nt, Artificial Sequence
  Description of Artificial Sequence: Synthetic oligonucleotide
  Sense strand starting at position 1010 of SEQ ID NO: 1560822
accugaugacggugagaaa

SEQ ID NO: 1626922 - RNA, 19 nt, Artificial Sequence
  Description of Artificial Sequence: Synthetic oligonucleotide
  Antisense strand to SEQ ID NO: 1626921
uuucucaccgucaucaggu

SEQ ID NO: 1626923 - RNA, 19 nt, Artificial Sequence
  Description of Artificial Sequence: Synthetic oligonucleotide
  Sense strand starting at position 1214 of SEQ ID NO: 1560822
gaggaagugucgucuagac

SEQ ID NO: 1626924 - RNA, 19 nt, Artificial Sequence
  Description of Artificial Sequence: Synthetic oligonucleotide
  Antisense strand to SEQ ID NO: 1626923
gucuagacgacacuuccuc

SEQ ID NO: 1626925 - RNA, 19 nt, Artificial Sequence
  Description of Artificial Sequence: Synthetic oligonucleotide
  Sense strand starting at position 1216 of SEQ ID NO: 1560822
ggaagugucgucuagacgu

SEQ ID NO: 1626926 - RNA, 19 nt, Artificial Sequence
  Description of Artificial Sequence: Synthetic oligonucleotide
  Antisense strand to SEQ ID NO: 1626925
acgucuagacgacacuucc

SEQ ID NO: 1626927 - RNA, 19 nt, Artificial Sequence
  Description of Artificial Sequence: Synthetic oligonucleotide
  Sense strand starting at position 1985 of SEQ ID NO: 1560822
aagcucaucugcugaaagu

SEQ ID NO: 1626928 - RNA, 19 nt, Artificial Sequence
  Description of Artificial Sequence: Synthetic oligonucleotide
  Antisense strand to SEQ ID NO: 1626927
acuuucagcagaugagcuu

SEQ ID NO: 1626929 - RNA, 19 nt, Artificial Sequence
  Description of Artificial Sequence: Synthetic oligonucleotide
  Sense strand starting at position 2176 of SEQ ID NO: 1560822
ugcuuuguauggcuccaga

SEQ ID NO: 1626930 - RNA, 19 nt, Artificial Sequence
  Description of Artificial Sequence: Synthetic oligonucleotide
  Antisense strand to SEQ ID NO: 1626929
ucuggagccauacaaagca

SEQ ID NO: 1626931 - RNA, 19 nt, Artificial Sequence
  Description of Artificial Sequence: Synthetic oligonucleotide
  Sense strand starting at position 2179 of SEQ ID NO: 1560822
uuuguauggcuccagaauc

SEQ ID NO: 1626932 - RNA, 19 nt, Artificial Sequence
  Description of Artificial Sequence: Synthetic oligonucleotide
  Antisense strand to SEQ ID NO: 1626931
gauucuggagccauacaaa

SEQ ID NO: 1626933 - RNA, 19 nt, Artificial Sequence
  Description of Artificial Sequence: Synthetic oligonucleotide
  Sense strand starting at position 2815 of SEQ ID NO: 1560822
ggcucuucuuucuggagga

SEQ ID NO: 1626934 - RNA, 19 nt, Artificial Sequence
  Description of Artificial Sequence: Synthetic oligonucleotide
  Antisense strand to SEQ ID NO: 1626933
uccuccagaaagaagagcc

SEQ ID NO: 1626935 - RNA, 19 nt, Artificial Sequence
  Description of Artificial Sequence: Synthetic oligonucleotide
  Sense strand starting at position 3398 of SEQ ID NO: 1560822
cccuguguguaggacauaa

SEQ ID NO: 1626936 - RNA, 19 nt, Artificial Sequence
  Description of Artificial Sequence: Synthetic oligonucleotide
  Antisense strand to SEQ ID NO: 1626935
uuauguccuacacacaggg

SEQ ID NO: 1626937 - RNA, 19 nt, Artificial Sequence
  Description of Artificial Sequence: Synthetic oligonucleotide
  Sense strand starting at position 3918 of SEQ ID NO: 1560822
ccaguagacucauggcaaa

SEQ ID NO: 1626938 - RNA, 19 nt, Artificial Sequence
  Description of Artificial Sequence: Synthetic oligonucleotide
  Antisense strand to SEQ ID NO: 1626937
uuugccaugagucuacugg

SEQ ID NO: 1626939 - RNA, 19 nt, Artificial Sequence
  Description of Artificial Sequence: Synthetic oligonucleotide
  Sense strand starting at position 3921 of SEQ ID NO: 1560822
guagacucauggcaaaguu

SEQ ID NO: 1626940 - RNA, 19 nt, Artificial Sequence
  Description of Artificial Sequence: Synthetic oligonucleotide
  Antisense strand to SEQ ID NO: 1626939
aacuuugccaugagucuac

SEQ ID NO: 1626941 - RNA, 19 nt, Artificial Sequence
  Description of Artificial Sequence: Synthetic oligonucleotide
  Sense strand starting at position 93 of SEQ ID NO: 1560823
ucaggcuucucauuggaga

SEQ ID NO: 1626942 - RNA, 19 nt, Artificial Sequence
  Description of Artificial Sequence: Synthetic oligonucleotide
  Antisense strand to SEQ ID NO: 1626941
ucuccaaugagaagccuga

SEQ ID NO: 1626943 - RNA, 19 nt, Artificial Sequence
  Description of Artificial Sequence: Synthetic oligonucleotide
  Sense strand starting at position 94 of SEQ ID NO: 1560823
caggcuucucauuggagau

SEQ ID NO: 1626944 - RNA, 19 nt, Artificial Sequence
  Description of Artificial Sequence: Synthetic oligonucleotide
  Antisense strand to SEQ ID NO: 1626943
aucuccaaugagaagccug

SEQ ID NO: 1626945 - RNA, 19 nt, Artificial Sequence
  Description of Artificial Sequence: Synthetic oligonucleotide
  Sense strand starting at position 113 of SEQ ID NO: 1560823
gccauaacgguugaacuca

SEQ ID NO: 1626946 - RNA, 19 nt, Artificial Sequence
  Description of Artificial Sequence: Synthetic oligonucleotide
  Antisense strand to SEQ ID NO: 1626945
ugaguucaaccguuauggc

SEQ ID NO: 1626947 - RNA, 19 nt, Artificial Sequence
  Description of Artificial Sequence: Synthetic oligonucleotide
  Sense strand starting at position 121 of SEQ ID NO: 1560823
gguugaacucaguggagau

SEQ ID NO: 1626948 - RNA, 19 nt, Artificial Sequence
  Description of Artificial Sequence: Synthetic oligonucleotide
  Antisense strand to SEQ ID NO: 1626947
aucuccacugaguucaacc

SEQ ID NO: 1626949 - RNA, 19 nt, Artificial Sequence
  Description of Artificial Sequence: Synthetic oligonucleotide
  Sense strand starting at position 122 of SEQ ID NO: 1560823
guugaacucaguggagaug

SEQ ID NO: 1626950 - RNA, 19 nt, Artificial Sequence
  Description of Artificial Sequence: Synthetic oligonucleotide
  Antisense strand to SEQ ID NO: 1626949
caucuccacugaguucaac

SEQ ID NO: 1626951 - RNA, 19 nt, Artificial Sequence
  Description of Artificial Sequence: Synthetic oligonucleotide
  Sense strand starting at position 134 of SEQ ID NO: 1560823
ggagauguacucugucuuu

SEQ ID NO: 1626952 - RNA, 19 nt, Artificial Sequence
  Description of Artificial Sequence: Synthetic oligonucleotide
  Antisense strand to SEQ ID NO: 1626951
aaagacagaguacaucucc

SEQ ID NO: 1626953 - RNA, 19 nt, Artificial Sequence
  Description of Artificial Sequence: Synthetic oligonucleotide
  Sense strand starting at position 472 of SEQ ID NO: 1560823
gauugaugagaucgauggu

SEQ ID NO: 1626954 - RNA, 19 nt, Artificial Sequence
  Description of Artificial Sequence: Synthetic oligonucleotide
  Antisense strand to SEQ ID NO: 1626953
accaucgaucucaucaauc

SEQ ID NO: 1626955 - RNA, 19 nt, Artificial Sequence
  Description of Artificial Sequence: Synthetic oligonucleotide
  Sense strand starting at position 475 of SEQ ID NO: 1560823
ugaugagaucgauggugac

SEQ ID NO: 1626956 - RNA, 19 nt, Artificial Sequence
  Description of Artificial Sequence: Synthetic oligonucleotide
  Antisense strand to SEQ ID NO: 1626955
gucaccaucgaucucauca

SEQ ID NO: 1626957 - RNA, 19 nt, Artificial Sequence
  Description of Artificial Sequence: Synthetic oligonucleotide
  Sense strand starting at position 523 of SEQ ID NO: 1560823
guuugugcuguuucuccaa

SEQ ID NO: 1626958 - RNA, 19 nt, Artificial Sequence
  Description of Artificial Sequence: Synthetic oligonucleotide
  Antisense strand to SEQ ID NO: 1626957
uuggagaaacagcacaaac

SEQ ID NO: 1626959 - RNA, 19 nt, Artificial Sequence
  Description of Artificial Sequence: Synthetic oligonucleotide
  Sense strand starting at position 547 of SEQ ID NO: 1560823
uggcuuuguacuggacgaa

SEQ ID NO: 1626960 - RNA, 19 nt, Artificial Sequence
  Description of Artificial Sequence: Synthetic oligonucleotide
  Antisense strand to SEQ ID NO: 1626959
uucguccaguacaaagcca

SEQ ID NO: 1626961 - RNA, 19 nt, Artificial Sequence
  Description of Artificial Sequence: Synthetic oligonucleotide
  Sense strand starting at position 832 of SEQ ID NO: 1560823
aggaacucauaccugagua

SEQ ID NO: 1626962 - RNA, 19 nt, Artificial Sequence
  Description of Artificial Sequence: Synthetic oligonucleotide
  Antisense strand to SEQ ID NO: 1626961
uacucagguaugaguuccu

SEQ ID NO: 1626963 - RNA, 19 nt, Artificial Sequence
  Description of Artificial Sequence: Synthetic oligonucleotide
  Sense strand starting at position 833 of SEQ ID NO: 1560823
ggaacucauaccugaguag

SEQ ID NO: 1626964 - RNA, 19 nt, Artificial Sequence
  Description of Artificial Sequence: Synthetic oligonucleotide
  Antisense strand to SEQ ID NO: 1626963
cuacucagguaugaguucc

SEQ ID NO: 1626965 - RNA, 19 nt, Artificial Sequence
  Description of Artificial Sequence: Synthetic oligonucleotide
  Sense strand starting at position 834 of SEQ ID NO: 1560823
gaacucauaccugaguagu

SEQ ID NO: 1626966 - RNA, 19 nt, Artificial Sequence
  Description of Artificial Sequence: Synthetic oligonucleotide
  Antisense strand to SEQ ID NO: 1626965
acuacucagguaugaguuc

SEQ ID NO: 1626967 - RNA, 19 nt, Artificial Sequence
  Description of Artificial Sequence: Synthetic oligonucleotide
  Sense strand starting at position 836 of SEQ ID NO: 1560823
acucauaccugaguaguuu

SEQ ID NO: 1626968 - RNA, 19 nt, Artificial Sequence
  Description of Artificial Sequence: Synthetic oligonucleotide
  Antisense strand to SEQ ID NO: 1626967
aaacuacucagguaugagu

SEQ ID NO: 1626969 - RNA, 19 nt, Artificial Sequence
  Description of Artificial Sequence: Synthetic oligonucleotide
  Sense strand starting at position 917 of SEQ ID NO: 1560823
ggauaucagggaggcuauu

SEQ ID NO: 1626970 - RNA, 19 nt, Artificial Sequence
  Description of Artificial Sequence: Synthetic oligonucleotide
  Antisense strand to SEQ ID NO: 1626969
aauagccucccugauaucc

SEQ ID NO: 1626971 - RNA, 19 nt, Artificial Sequence
  Description of Artificial Sequence: Synthetic oligonucleotide
  Sense strand starting at position 928 of SEQ ID NO: 1560823
aggcuauugcaguacuuga

SEQ ID NO: 1626972 - RNA, 19 nt, Artificial Sequence
  Description of Artificial Sequence: Synthetic oligonucleotide
  Antisense strand to SEQ ID NO: 1626971
ucaaguacugcaauagccu

SEQ ID NO: 1626973 - RNA, 19 nt, Artificial Sequence
  Description of Artificial Sequence: Synthetic oligonucleotide
  Sense strand starting at position 1071 of SEQ ID NO: 1560823
ggcagaguccggugggaau

SEQ ID NO: 1626974 - RNA, 19 nt, Artificial Sequence
  Description of Artificial Sequence: Synthetic oligonucleotide
  Antisense strand to SEQ ID NO: 1626973
auucccaccggacucugcc

SEQ ID NO: 1626975 - RNA, 19 nt, Artificial Sequence
  Description of Artificial Sequence: Synthetic oligonucleotide
  Sense strand starting at position 1072 of SEQ ID NO: 1560823
gcagaguccggugggaauu

SEQ ID NO: 1626976 - RNA, 19 nt, Artificial Sequence
  Description of Artificial Sequence: Synthetic oligonucleotide
  Antisense strand to SEQ ID NO: 1626975
aauucccaccggacucugc

SEQ ID NO: 1626977 - RNA, 19 nt, Artificial Sequence
  Description of Artificial Sequence: Synthetic oligonucleotide
  Sense strand starting at position 1190 of SEQ ID NO: 1560823
gacaaaugcugguuucuuu

SEQ ID NO: 1626978 - RNA, 19 nt, Artificial Sequence
  Description of Artificial Sequence: Synthetic oligonucleotide
  Antisense strand to SEQ ID NO: 1626977
aaagaaaccagcauuuguc

SEQ ID NO: 1626979 - RNA, 19 nt, Artificial Sequence
  Description of Artificial Sequence: Synthetic oligonucleotide
  Sense strand starting at position 1228 of SEQ ID NO: 1560823
guccaaaugcuuuaaugga

SEQ ID NO: 1626980 - RNA, 19 nt, Artificial Sequence
  Description of Artificial Sequence: Synthetic oligonucleotide
  Antisense strand to SEQ ID NO: 1626979
uccauuaaagcauuuggac

SEQ ID NO: 1626981 - RNA, 19 nt, Artificial Sequence
  Description of Artificial Sequence: Synthetic oligonucleotide
  Sense strand starting at position 1366 of SEQ ID NO: 1560823
acucaaucgucuucggaag

SEQ ID NO: 1626982 - RNA, 19 nt, Artificial Sequence
  Description of Artificial Sequence: Synthetic oligonucleotide
  Antisense strand to SEQ ID NO: 1626981
cuuccgaagacgauugagu

SEQ ID NO: 1626983 - RNA, 19 nt, Artificial Sequence
  Description of Artificial Sequence: Synthetic oligonucleotide
  Sense strand starting at position 1367 of SEQ ID NO: 1560823
cucaaucgucuucggaaga

SEQ ID NO: 1626984 - RNA, 19 nt, Artificial Sequence
  Description of Artificial Sequence: Synthetic oligonucleotide
  Antisense strand to SEQ ID NO: 1626983
ucuuccgaagacgauugag

SEQ ID NO: 1626985 - RNA, 19 nt, Artificial Sequence
  Description of Artificial Sequence: Synthetic oligonucleotide
  Sense strand starting at position 1477 of SEQ ID NO: 1560823
accugaaucucagaaggaa

SEQ ID NO: 1626986 - RNA, 19 nt, Artificial Sequence
  Description of Artificial Sequence: Synthetic oligonucleotide
  Antisense strand to SEQ ID NO: 1626985
uuccuucugagauucaggu

SEQ ID NO: 1626987 - RNA, 19 nt, Artificial Sequence
  Description of Artificial Sequence: Synthetic oligonucleotide
  Sense strand starting at position 1555 of SEQ ID NO: 1560823
ugacguuguucagcagaaa

SEQ ID NO: 1626988 - RNA, 19 nt, Artificial Sequence
  Description of Artificial Sequence: Synthetic oligonucleotide
  Antisense strand to SEQ ID NO: 1626987
uuucugcugaacaacguca

SEQ ID NO: 1626989 - RNA, 19 nt, Artificial Sequence
  Description of Artificial Sequence: Synthetic oligonucleotide
  Sense strand starting at position 1790 of SEQ ID NO: 1560823
cggaaaguggguugagaug

SEQ ID NO: 1626990 - RNA, 19 nt, Artificial Sequence
  Description of Artificial Sequence: Synthetic oligonucleotide
  Antisense strand to SEQ ID NO: 1626989
caucucaacccacuuuccg

SEQ ID NO: 1626991 - RNA, 19 nt, Artificial Sequence
  Description of Artificial Sequence: Synthetic oligonucleotide
  Sense strand starting at position 2031 of SEQ ID NO: 1560823
ugugauugguggagagaua

SEQ ID NO: 1626992 - RNA, 19 nt, Artificial Sequence
  Description of Artificial Sequence: Synthetic oligonucleotide
  Antisense strand to SEQ ID NO: 1626991
uaucucuccaccaaucaca

SEQ ID NO: 1626993 - RNA, 19 nt, Artificial Sequence
  Description of Artificial Sequence: Synthetic oligonucleotide
  Sense strand starting at position 2043 of SEQ ID NO: 1560823
agagauaucucagucugga

SEQ ID NO: 1626994 - RNA, 19 nt, Artificial Sequence
  Description of Artificial Sequence: Synthetic oligonucleotide
  Antisense strand to SEQ ID NO: 1626993
uccagacugagauaucucu

SEQ ID NO: 1626995 - RNA, 19 nt, Artificial Sequence
  Description of Artificial Sequence: Synthetic oligonucleotide
  Sense strand starting at position 2069 of SEQ ID NO: 1560823
uugagagugacguaacguu

SEQ ID NO: 1626996 - RNA, 19 nt, Artificial Sequence
  Description of Artificial Sequence: Synthetic oligonucleotide
  Antisense strand to SEQ ID NO: 1626995
aacguuacgucacucucaa

SEQ ID NO: 1626997 - RNA, 19 nt, Artificial Sequence
  Description of Artificial Sequence: Synthetic oligonucleotide
  Sense strand starting at position 2443 of SEQ ID NO: 1560823
ggugauuggccuuaagcag

SEQ ID NO: 1626998 - RNA, 19 nt, Artificial Sequence
  Description of Artificial Sequence: Synthetic oligonucleotide
  Antisense strand to SEQ ID NO: 1626997
cugcuuaaggccaaucacc

SEQ ID NO: 1626999 - RNA, 19 nt, Artificial Sequence
  Description of Artificial Sequence: Synthetic oligonucleotide
  Sense strand starting at position 2506 of SEQ ID NO: 1560823
gccagguuagucggagaga

SEQ ID NO: 1627000 - RNA, 19 nt, Artificial Sequence
  Description of Artificial Sequence: Synthetic oligonucleotide
  Antisense strand to SEQ ID NO: 1626999
ucucuccgacuaaccuggc

SEQ ID NO: 1627001 - RNA, 19 nt, Artificial Sequence
  Description of Artificial Sequence: Synthetic oligonucleotide
  Sense strand starting at position 2878 of SEQ ID NO: 1560823
agcgaagcucggcagagau

SEQ ID NO: 1627002 - RNA, 19 nt, Artificial Sequence
  Description of Artificial Sequence: Synthetic oligonucleotide
  Antisense strand to SEQ ID NO: 1627001
aucucugccgagcuucgcu

SEQ ID NO: 1627003 - RNA, 19 nt, Artificial Sequence
  Description of Artificial Sequence: Synthetic oligonucleotide
  Sense strand starting at position 2975 of SEQ ID NO: 1560823
ucguuaaagccugaggaga

SEQ ID NO: 1627004 - RNA, 19 nt, Artificial Sequence
  Description of Artificial Sequence: Synthetic oligonucleotide
  Antisense strand to SEQ ID NO: 1627003
ucuccucaggcuuuaacga

SEQ ID NO: 1627005 - RNA, 19 nt, Artificial Sequence
  Description of Artificial Sequence: Synthetic oligonucleotide
  Sense strand starting at position 3007 of SEQ ID NO: 1560823
cggagauucugcccuugau

SEQ ID NO: 1627006 - RNA, 19 nt, Artificial Sequence
  Description of Artificial Sequence: Synthetic oligonucleotide
  Antisense strand to SEQ ID NO: 1627005
aucaagggcagaaucuccg

SEQ ID NO: 1627007 - RNA, 19 nt, Artificial Sequence
  Description of Artificial Sequence: Synthetic oligonucleotide
  Sense strand starting at position 3010 of SEQ ID NO: 1560823
agauucugcccuugauuga

SEQ ID NO: 1627008 - RNA, 19 nt, Artificial Sequence
  Description of Artificial Sequence: Synthetic oligonucleotide
  Antisense strand to SEQ ID NO: 1627007
ucaaucaagggcagaaucu

SEQ ID NO: 1627009 - RNA, 19 nt, Artificial Sequence
  Description of Artificial Sequence: Synthetic oligonucleotide
  Sense strand starting at position 3011 of SEQ ID NO: 1560823
gauucugcccuugauugau

SEQ ID NO: 1627010 - RNA, 19 nt, Artificial Sequence
  Description of Artificial Sequence: Synthetic oligonucleotide
  Antisense strand to SEQ ID NO: 1627009
aucaaucaagggcagaauc

SEQ ID NO: 1627011 - RNA, 19 nt, Artificial Sequence
  Description of Artificial Sequence: Synthetic oligonucleotide
  Sense strand starting at position 3096 of SEQ ID NO: 1560823
aguggugacagcuauagga

SEQ ID NO: 1627012 - RNA, 19 nt, Artificial Sequence
  Description of Artificial Sequence: Synthetic oligonucleotide
  Antisense strand to SEQ ID NO: 1627011
uccuauagcugucaccacu

SEQ ID NO: 1627013 - RNA, 19 nt, Artificial Sequence
  Description of Artificial Sequence: Synthetic oligonucleotide
  Sense strand starting at position 3122 of SEQ ID NO: 1560823
cgaauauuacuuuggaaag

SEQ ID NO: 1627014 - RNA, 19 nt, Artificial Sequence
  Description of Artificial Sequence: Synthetic oligonucleotide
  Antisense strand to SEQ ID NO: 1627013
cuuuccaaaguaauauucg

SEQ ID NO: 1627015 - RNA, 19 nt, Artificial Sequence
  Description of Artificial Sequence: Synthetic oligonucleotide
  Sense strand starting at position 3201 of SEQ ID NO: 1560823
guagaucugccagagguau

SEQ ID NO: 1627016 - RNA, 19 nt, Artificial Sequence
  Description of Artificial Sequence: Synthetic oligonucleotide
  Antisense strand to SEQ ID NO: 1627015
auaccucuggcagaucuac

SEQ ID NO: 1627017 - RNA, 19 nt, Artificial Sequence
  Description of Artificial Sequence: Synthetic oligonucleotide
  Sense strand starting at position 3232 of SEQ ID NO: 1560823
uuccauuucccacguguuu

SEQ ID NO: 1627018 - RNA, 19 nt, Artificial Sequence
  Description of Artificial Sequence: Synthetic oligonucleotide
  Antisense strand to SEQ ID NO: 1627017
aaacacgugggaaauggaa

SEQ ID NO: 1627019 - RNA, 19 nt, Artificial Sequence
  Description of Artificial Sequence: Synthetic oligonucleotide
  Sense strand starting at position 3597 of SEQ ID NO: 1560823
cuggcuaauuuguaagauu

SEQ ID NO: 1627020 - RNA, 19 nt, Artificial Sequence
  Description of Artificial Sequence: Synthetic oligonucleotide
  Antisense strand to SEQ ID NO: 1627019
aaucuuacaaauuagccag

SEQ ID NO: 1627021 - RNA, 19 nt, Artificial Sequence
  Description of Artificial Sequence: Synthetic oligonucleotide
  Sense strand starting at position 334 of SEQ ID NO: 1560824
ugccuagagucucucacuu

SEQ ID NO: 1627022 - RNA, 19 nt, Artificial Sequence
  Description of Artificial Sequence: Synthetic oligonucleotide
  Antisense strand to SEQ ID NO: 1627021
aagugagagacucuaggca

SEQ ID NO: 1627023 - RNA, 19 nt, Artificial Sequence
  Description of Artificial Sequence: Synthetic oligonucleotide
  Sense strand starting at position 698 of SEQ ID NO: 1560824
gucugcuugagccaugcau

SEQ ID NO: 1627024 - RNA, 19 nt, Artificial Sequence
  Description of Artificial Sequence: Synthetic oligonucleotide
  Antisense strand to SEQ ID NO: 1627023
augcauggcucaagcagac

SEQ ID NO: 1627025 - RNA, 19 nt, Artificial Sequence
  Description of Artificial Sequence: Synthetic oligonucleotide
  Sense strand starting at position 702 of SEQ ID NO: 1560824
gcuugagccaugcauugaa

SEQ ID NO: 1627026 - RNA, 19 nt, Artificial Sequence
  Description of Artificial Sequence: Synthetic oligonucleotide
  Antisense strand to SEQ ID NO: 1627025
uucaaugcauggcucaagc

SEQ ID NO: 1627027 - RNA, 19 nt, Artificial Sequence
  Description of Artificial Sequence: Synthetic oligonucleotide
  Sense strand starting at position 705 of SEQ ID NO: 1560824
ugagccaugcauugaauca

SEQ ID NO: 1627028 - RNA, 19 nt, Artificial Sequence
  Description of Artificial Sequence: Synthetic oligonucleotide
  Antisense strand to SEQ ID NO: 1627027
ugauucaaugcauggcuca

SEQ ID NO: 1627029 - RNA, 19 nt, Artificial Sequence
  Description of Artificial Sequence: Synthetic oligonucleotide
  Sense strand starting at position 726 of SEQ ID NO: 1560824
ggcauuacaguugaaacuu

SEQ ID NO: 1627030 - RNA, 19 nt, Artificial Sequence
  Description of Artificial Sequence: Synthetic oligonucleotide
  Antisense strand to SEQ ID NO: 1627029
aaguuucaacuguaaugcc

SEQ ID NO: 1627031 - RNA, 19 nt, Artificial Sequence
  Description of Artificial Sequence: Synthetic oligonucleotide
  Sense strand starting at position 767 of SEQ ID NO: 1560824
uuggacaugcuuuguggaa

SEQ ID NO: 1627032 - RNA, 19 nt, Artificial Sequence
  Description of Artificial Sequence: Synthetic oligonucleotide
  Antisense strand to SEQ ID NO: 1627031
uuccacaaagcauguccaa

SEQ ID NO: 1627033 - RNA, 19 nt, Artificial Sequence
  Description of Artificial Sequence: Synthetic oligonucleotide
  Sense strand starting at position 768 of SEQ ID NO: 1560824
uggacaugcuuuguggaaa

SEQ ID NO: 1627034 - RNA, 19 nt, Artificial Sequence
  Description of Artificial Sequence: Synthetic oligonucleotide
  Antisense strand to SEQ ID NO: 1627033
uuuccacaaagcaugucca

SEQ ID NO: 1627035 - RNA, 19 nt, Artificial Sequence
  Description of Artificial Sequence: Synthetic oligonucleotide
  Sense strand starting at position 771 of SEQ ID NO: 1560824
acaugcuuuguggaaagau

SEQ ID NO: 1627036 - RNA, 19 nt, Artificial Sequence
  Description of Artificial Sequence: Synthetic oligonucleotide
  Antisense strand to SEQ ID NO: 1627035
aucuuuccacaaagcaugu

SEQ ID NO: 1627037 - RNA, 19 nt, Artificial Sequence
  Description of Artificial Sequence: Synthetic oligonucleotide
  Sense strand starting at position 780 of SEQ ID NO: 1560824
guggaaagauauuauuaug

SEQ ID NO: 1627038 - RNA, 19 nt, Artificial Sequence
  Description of Artificial Sequence: Synthetic oligonucleotide
  Antisense strand to SEQ ID NO: 1627037
cauaauaauaucuuuccac

SEQ ID NO: 1627039 - RNA, 19 nt, Artificial Sequence
  Description of Artificial Sequence: Synthetic oligonucleotide
  Sense strand starting at position 796 of SEQ ID NO: 1560824
augauugaguccucuuugu

SEQ ID NO: 1627040 - RNA, 19 nt, Artificial Sequence
  Description of Artificial Sequence: Synthetic oligonucleotide
  Antisense strand to SEQ ID NO: 1627039
acaaagaggacucaaucau

SEQ ID NO: 1627041 - RNA, 19 nt, Artificial Sequence
  Description of Artificial Sequence: Synthetic oligonucleotide
  Sense strand starting at position 852 of SEQ ID NO: 1560824
ugacuauagcuuuguguaa

SEQ ID NO: 1627042 - RNA, 19 nt, Artificial Sequence
  Description of Artificial Sequence: Synthetic oligonucleotide
  Antisense strand to SEQ ID NO: 1627041
uuacacaaagcuauaguca

SEQ ID NO: 1627043 - RNA, 19 nt, Artificial Sequence
  Description of Artificial Sequence: Synthetic oligonucleotide
  Sense strand starting at position 853 of SEQ ID NO: 1560824
gacuauagcuuuguguaaa

SEQ ID NO: 1627044 - RNA, 19 nt, Artificial Sequence
  Description of Artificial Sequence: Synthetic oligonucleotide
  Antisense strand to SEQ ID NO: 1627043
uuuacacaaagcuauaguc

SEQ ID NO: 1627045 - RNA, 19 nt, Artificial Sequence
  Description of Artificial Sequence: Synthetic oligonucleotide
  Sense strand starting at position 1104 of SEQ ID NO: 1560824
gguucugguccagaugugu

SEQ ID NO: 1627046 - RNA, 19 nt, Artificial Sequence
  Description of Artificial Sequence: Synthetic oligonucleotide
  Antisense strand to SEQ ID NO: 1627045
acacaucuggaccagaacc

SEQ ID NO: 1627047 - RNA, 19 nt, Artificial Sequence
  Description of Artificial Sequence: Synthetic oligonucleotide
  Sense strand starting at position 1113 of SEQ ID NO: 1560824
ccagaugugucagcaugga

SEQ ID NO: 1627048 - RNA, 19 nt, Artificial Sequence
  Description of Artificial Sequence: Synthetic oligonucleotide
  Antisense strand to SEQ ID NO: 1627047
uccaugcugacacaucugg

SEQ ID NO: 1627049 - RNA, 19 nt, Artificial Sequence
  Description of Artificial Sequence: Synthetic oligonucleotide
  Sense strand starting at position 1912 of SEQ ID NO: 1560824
ggcgaacuaccugaagagu

SEQ ID NO: 1627050 - RNA, 19 nt, Artificial Sequence
  Description of Artificial Sequence: Synthetic oligonucleotide
  Antisense strand to SEQ ID NO: 1627049
acucuucagguaguucgcc

SEQ ID NO: 1627051 - RNA, 19 nt, Artificial Sequence
  Description of Artificial Sequence: Synthetic oligonucleotide
  Sense strand starting at position 1986 of SEQ ID NO: 1560824
ugcuguacagagugaaaug

SEQ ID NO: 1627052 - RNA, 19 nt, Artificial Sequence
  Description of Artificial Sequence: Synthetic oligonucleotide
  Antisense strand to SEQ ID NO: 1627051
cauuucacucuguacagca

SEQ ID NO: 1627053 - RNA, 19 nt, Artificial Sequence
  Description of Artificial Sequence: Synthetic oligonucleotide
  Sense strand starting at position 1987 of SEQ ID NO: 1560824
gcuguacagagugaaaugu

SEQ ID NO: 1627054 - RNA, 19 nt, Artificial Sequence
  Description of Artificial Sequence: Synthetic oligonucleotide
  Antisense strand to SEQ ID NO: 1627053
acauuucacucuguacagc

SEQ ID NO: 1627055 - RNA, 19 nt, Artificial Sequence
  Description of Artificial Sequence: Synthetic oligonucleotide
  Sense strand starting at position 1997 of SEQ ID NO: 1560824
gugaaaugugcggaaggga

SEQ ID NO: 1627056 - RNA, 19 nt, Artificial Sequence
  Description of Artificial Sequence: Synthetic oligonucleotide
  Antisense strand to SEQ ID NO: 1627055
ucccuuccgcacauuucac

SEQ ID NO: 1627057 - RNA, 19 nt, Artificial Sequence
  Description of Artificial Sequence: Synthetic oligonucleotide
  Sense strand starting at position 2193 of SEQ ID NO: 1560824
auucgaggcucccuucuaa

SEQ ID NO: 1627058 - RNA, 19 nt, Artificial Sequence
  Description of Artificial Sequence: Synthetic oligonucleotide
  Antisense strand to SEQ ID NO: 1627057
uuagaagggagccucgaau

SEQ ID NO: 1627059 - RNA, 19 nt, Artificial Sequence
  Description of Artificial Sequence: Synthetic oligonucleotide
  Sense strand starting at position 2235 of SEQ ID NO: 1560824
gggcuuuagugagccuauc

SEQ ID NO: 1627060 - RNA, 19 nt, Artificial Sequence
  Description of Artificial Sequence: Synthetic oligonucleotide
  Antisense strand to SEQ ID NO: 1627059
gauaggcucacuaaagccc

SEQ ID NO: 1627061 - RNA, 19 nt, Artificial Sequence
  Description of Artificial Sequence: Synthetic oligonucleotide
  Sense strand starting at position 2689 of SEQ ID NO: 1560824
accucagugucuucucaga

SEQ ID NO: 1627062 - RNA, 19 nt, Artificial Sequence
  Description of Artificial Sequence: Synthetic oligonucleotide
  Antisense strand to SEQ ID NO: 1627061
ucugagaagacacugaggu

SEQ ID NO: 1627063 - RNA, 19 nt, Artificial Sequence
  Description of Artificial Sequence: Synthetic oligonucleotide
  Sense strand starting at position 2691 of SEQ ID NO: 1560824
cucagugucuucucagauc

SEQ ID NO: 1627064 - RNA, 19 nt, Artificial Sequence
  Description of Artificial Sequence: Synthetic oligonucleotide
  Antisense strand to SEQ ID NO: 1627063
gaucugagaagacacugag

SEQ ID NO: 1627065 - RNA, 19 nt, Artificial Sequence
  Description of Artificial Sequence: Synthetic oligonucleotide
  Sense strand starting at position 2735 of SEQ ID NO: 1560824
gggcucacucccugcuaaa

SEQ ID NO: 1627066 - RNA, 19 nt, Artificial Sequence
  Description of Artificial Sequence: Synthetic oligonucleotide
  Antisense strand to SEQ ID NO: 1627065
uuuagcagggagugagccc

SEQ ID NO: 1627067 - RNA, 19 nt, Artificial Sequence
  Description of Artificial Sequence: Synthetic oligonucleotide
  Sense strand starting at position 2789 of SEQ ID NO: 1560824
gggaccuucccauguauuc

SEQ ID NO: 1627068 - RNA, 19 nt, Artificial Sequence
  Description of Artificial Sequence: Synthetic oligonucleotide
  Antisense strand to SEQ ID NO: 1627067
gaauacaugggaagguccc

SEQ ID NO: 1627069 - RNA, 19 nt, Artificial Sequence
  Description of Artificial Sequence: Synthetic oligonucleotide
  Sense strand starting at position 2806 of SEQ ID NO: 1560824
ucauuccuucgagguggau

SEQ ID NO: 1627070 - RNA, 19 nt, Artificial Sequence
  Description of Artificial Sequence: Synthetic oligonucleotide
  Antisense strand to SEQ ID NO: 1627069
auccaccucgaaggaauga

SEQ ID NO: 1627071 - RNA, 19 nt, Artificial Sequence
  Description of Artificial Sequence: Synthetic oligonucleotide
  Sense strand starting at position 2822 of SEQ ID NO: 1560824
gauugauacugagacagag

SEQ ID NO: 1627072 - RNA, 19 nt, Artificial Sequence
  Description of Artificial Sequence: Synthetic oligonucleotide
  Antisense strand to SEQ ID NO: 1627071
cucugucucaguaucaauc

SEQ ID NO: 1627073 - RNA, 19 nt, Artificial Sequence
  Description of Artificial Sequence: Synthetic oligonucleotide
  Sense strand starting at position 2834 of SEQ ID NO: 1560824
gacagagaugaguguuauu

SEQ ID NO: 1627074 - RNA, 19 nt, Artificial Sequence
  Description of Artificial Sequence: Synthetic oligonucleotide
  Antisense strand to SEQ ID NO: 1627073
aauaacacucaucucuguc

SEQ ID NO: 1627075 - RNA, 19 nt, Artificial Sequence
  Description of Artificial Sequence: Synthetic oligonucleotide
  Sense strand starting at position 2912 of SEQ ID NO: 1560824
uccacaagugcuugcugaa

SEQ ID NO: 1627076 - RNA, 19 nt, Artificial Sequence
  Description of Artificial Sequence: Synthetic oligonucleotide
  Antisense strand to SEQ ID NO: 1627075
uucagcaagcacuugugga

SEQ ID NO: 1627077 - RNA, 19 nt, Artificial Sequence
  Description of Artificial Sequence: Synthetic oligonucleotide
  Sense strand starting at position 2922 of SEQ ID NO: 1560824
cuugcugaaugaguaguaa

SEQ ID NO: 1627078 - RNA, 19 nt, Artificial Sequence
  Description of Artificial Sequence: Synthetic oligonucleotide
  Antisense strand to SEQ ID NO: 1627077
uuacuacucauucagcaag

SEQ ID NO: 1627079 - RNA, 19 nt, Artificial Sequence
  Description of Artificial Sequence: Synthetic oligonucleotide
  Sense strand starting at position 2934 of SEQ ID NO: 1560824
guaguaaaugaguggguca

SEQ ID NO: 1627080 - RNA, 19 nt, Artificial Sequence
  Description of Artificial Sequence: Synthetic oligonucleotide
  Antisense strand to SEQ ID NO: 1627079
ugacccacucauuuacuac

SEQ ID NO: 1627081 - RNA, 19 nt, Artificial Sequence
  Description of Artificial Sequence: Synthetic oligonucleotide
  Sense strand starting at position 2965 of SEQ ID NO: 1560824
gucccaauguguuuaggga

SEQ ID NO: 1627082 - RNA, 19 nt, Artificial Sequence
  Description of Artificial Sequence: Synthetic oligonucleotide
  Antisense strand to SEQ ID NO: 1627081
ucccuaaacacauugggac

SEQ ID NO: 1627083 - RNA, 19 nt, Artificial Sequence
  Description of Artificial Sequence: Synthetic oligonucleotide
  Sense strand starting at position 3012 of SEQ ID NO: 1560824
ugucaaaguuguguuugag

SEQ ID NO: 1627084 - RNA, 19 nt, Artificial Sequence
  Description of Artificial Sequence: Synthetic oligonucleotide
  Antisense strand to SEQ ID NO: 1627083
cucaaacacaacuuugaca

SEQ ID NO: 1627085 - RNA, 19 nt, Artificial Sequence
  Description of Artificial Sequence: Synthetic oligonucleotide
  Sense strand starting at position 3015 of SEQ ID NO: 1560824
caaaguuguguuugaggga

SEQ ID NO: 1627086 - RNA, 19 nt, Artificial Sequence
  Description of Artificial Sequence: Synthetic oligonucleotide
  Antisense strand to SEQ ID NO: 1627085
ucccucaaacacaacuuug

SEQ ID NO: 1627087 - RNA, 19 nt, Artificial Sequence
  Description of Artificial Sequence: Synthetic oligonucleotide
  Sense strand starting at position 3019 of SEQ ID NO: 1560824
guuguguuugagggagaga

SEQ ID NO: 1627088 - RNA, 19 nt, Artificial Sequence
  Description of Artificial Sequence: Synthetic oligonucleotide
  Antisense strand to SEQ ID NO: 1627087
ucucucccucaaacacaac

SEQ ID NO: 1627089 - RNA, 19 nt, Artificial Sequence
  Description of Artificial Sequence: Synthetic oligonucleotide
  Sense strand starting at position 3069 of SEQ ID NO: 1560824
cucugaggacuauggguuu

SEQ ID NO: 1627090 - RNA, 19 nt, Artificial Sequence
  Description of Artificial Sequence: Synthetic oligonucleotide
  Antisense strand to SEQ ID NO: 1627089
aaacccauaguccucagag

SEQ ID NO: 1627091 - RNA, 19 nt, Artificial Sequence
  Description of Artificial Sequence: Synthetic oligonucleotide
  Sense strand starting at position 3076 of SEQ ID NO: 1560824
gacuauggguuuccuagga

SEQ ID NO: 1627092 - RNA, 19 nt, Artificial Sequence
  Description of Artificial Sequence: Synthetic oligonucleotide
  Antisense strand to SEQ ID NO: 1627091
uccuaggaaacccauaguc

SEQ ID NO: 1627093 - RNA, 19 nt, Artificial Sequence
  Description of Artificial Sequence: Synthetic oligonucleotide
  Sense strand starting at position 3080 of SEQ ID NO: 1560824
auggguuuccuaggaguag

SEQ ID NO: 1627094 - RNA, 19 nt, Artificial Sequence
  Description of Artificial Sequence: Synthetic oligonucleotide
  Antisense strand to SEQ ID NO: 1627093
cuacuccuaggaaacccau

SEQ ID NO: 1627095 - RNA, 19 nt, Artificial Sequence
  Description of Artificial Sequence: Synthetic oligonucleotide
  Sense strand starting at position 3102 of SEQ ID NO: 1560824
cucagcugggucugaaaga

SEQ ID NO: 1627096 - RNA, 19 nt, Artificial Sequence
  Description of Artificial Sequence: Synthetic oligonucleotide
  Antisense strand to SEQ ID NO: 1627095
ucuuucagacccagcugag

SEQ ID NO: 1627097 - RNA, 19 nt, Artificial Sequence
  Description of Artificial Sequence: Synthetic oligonucleotide
  Sense strand starting at position 3160 of SEQ ID NO: 1560824
aucacuuucuuauuagguu

SEQ ID NO: 1627098 - RNA, 19 nt, Artificial Sequence
  Description of Artificial Sequence: Synthetic oligonucleotide
  Antisense strand to SEQ ID NO: 1627097
aaccuaauaagaaagugau

SEQ ID NO: 1627099 - RNA, 19 nt, Artificial Sequence
  Description of Artificial Sequence: Synthetic oligonucleotide
  Sense strand starting at position 3410 of SEQ ID NO: 1560824
aggacaauugcuugagucu

SEQ ID NO: 1627100 - RNA, 19 nt, Artificial Sequence
  Description of Artificial Sequence: Synthetic oligonucleotide
  Antisense strand to SEQ ID NO: 1627099
agacucaagcaauuguccu

SEQ ID NO: 1627101 - RNA, 19 nt, Artificial Sequence
  Description of Artificial Sequence: Synthetic oligonucleotide
  Sense strand starting at position 311 of SEQ ID NO: 1560825
ugccuagagucucucacuu

SEQ ID NO: 1627102 - RNA, 19 nt, Artificial Sequence
  Description of Artificial Sequence: Synthetic oligonucleotide
  Antisense strand to SEQ ID NO: 1627101
aagugagagacucuaggca

SEQ ID NO: 1627103 - RNA, 19 nt, Artificial Sequence
  Description of Artificial Sequence: Synthetic oligonucleotide
  Sense strand starting at position 675 of SEQ ID NO: 1560825
gucugcuugagccaugcau

SEQ ID NO: 1627104 - RNA, 19 nt, Artificial Sequence
  Description of Artificial Sequence: Synthetic oligonucleotide
  Antisense strand to SEQ ID NO: 1627103
augcauggcucaagcagac

SEQ ID NO: 1627105 - RNA, 19 nt, Artificial Sequence
  Description of Artificial Sequence: Synthetic oligonucleotide
  Sense strand starting at position 679 of SEQ ID NO: 1560825
gcuugagccaugcauugaa

SEQ ID NO: 1627106 - RNA, 19 nt, Artificial Sequence
  Description of Artificial Sequence: Synthetic oligonucleotide
  Antisense strand to SEQ ID NO: 1627105
uucaaugcauggcucaagc

SEQ ID NO: 1627107 - RNA, 19 nt, Artificial Sequence
  Description of Artificial Sequence: Synthetic oligonucleotide
  Sense strand starting at position 682 of SEQ ID NO: 1560825
ugagccaugcauugaauca

SEQ ID NO: 1627108 - RNA, 19 nt, Artificial Sequence
  Description of Artificial Sequence: Synthetic oligonucleotide
  Antisense strand to SEQ ID NO: 1627107
ugauucaaugcauggcuca

SEQ ID NO: 1627109 - RNA, 19 nt, Artificial Sequence
  Description of Artificial Sequence: Synthetic oligonucleotide
  Sense strand starting at position 703 of SEQ ID NO: 1560825
ggcauuacaguugaaacuu

SEQ ID NO: 1627110 - RNA, 19 nt, Artificial Sequence
  Description of Artificial Sequence: Synthetic oligonucleotide
  Antisense strand to SEQ ID NO: 1627109
aaguuucaacuguaaugcc

SEQ ID NO: 1627111 - RNA, 19 nt, Artificial Sequence
  Description of Artificial Sequence: Synthetic oligonucleotide
  Sense strand starting at position 744 of SEQ ID NO: 1560825
uuggacaugcuuuguggaa

SEQ ID NO: 1627112 - RNA, 19 nt, Artificial Sequence
  Description of Artificial Sequence: Synthetic oligonucleotide
  Antisense strand to SEQ ID NO: 1627111
uuccacaaagcauguccaa

SEQ ID NO: 1627113 - RNA, 19 nt, Artificial Sequence
  Description of Artificial Sequence: Synthetic oligonucleotide
  Sense strand starting at position 745 of SEQ ID NO: 1560825
uggacaugcuuuguggaaa

SEQ ID NO: 1627114 - RNA, 19 nt, Artificial Sequence
  Description of Artificial Sequence: Synthetic oligonucleotide
  Antisense strand to SEQ ID NO: 1627113
uuuccacaaagcaugucca

SEQ ID NO: 1627115 - RNA, 19 nt, Artificial Sequence
  Description of Artificial Sequence: Synthetic oligonucleotide
  Sense strand starting at position 748 of SEQ ID NO: 1560825
acaugcuuuguggaaagau

SEQ ID NO: 1627116 - RNA, 19 nt, Artificial Sequence
  Description of Artificial Sequence: Synthetic oligonucleotide
  Antisense strand to SEQ ID NO: 1627115
aucuuuccacaaagcaugu

SEQ ID NO: 1627117 - RNA, 19 nt, Artificial Sequence
  Description of Artificial Sequence: Synthetic oligonucleotide
  Sense strand starting at position 757 of SEQ ID NO: 1560825
guggaaagauauuauuaug

SEQ ID NO: 1627118 - RNA, 19 nt, Artificial Sequence
  Description of Artificial Sequence: Synthetic oligonucleotide
  Antisense strand to SEQ ID NO: 1627117
cauaauaauaucuuuccac

SEQ ID NO: 1627119 - RNA, 19 nt, Artificial Sequence
  Description of Artificial Sequence: Synthetic oligonucleotide
  Sense strand starting at position 773 of SEQ ID NO: 1560825
augauugaguccucuuugu

SEQ ID NO: 1627120 - RNA, 19 nt, Artificial Sequence
  Description of Artificial Sequence: Synthetic oligonucleotide
  Antisense strand to SEQ ID NO: 1627119
acaaagaggacucaaucau

SEQ ID NO: 1627121 - RNA, 19 nt, Artificial Sequence
  Description of Artificial Sequence: Synthetic oligonucleotide
  Sense strand starting at position 829 of SEQ ID NO: 1560825
ugacuauagcuuuguguaa

SEQ ID NO: 1627122 - RNA, 19 nt, Artificial Sequence
  Description of Artificial Sequence: Synthetic oligonucleotide
  Antisense strand to SEQ ID NO: 1627121
uuacacaaagcuauaguca

SEQ ID NO: 1627123 - RNA, 19 nt, Artificial Sequence
  Description of Artificial Sequence: Synthetic oligonucleotide
  Sense strand starting at position 830 of SEQ ID NO: 1560825
gacuauagcuuuguguaaa

SEQ ID NO: 1627124 - RNA, 19 nt, Artificial Sequence
  Description of Artificial Sequence: Synthetic oligonucleotide
  Antisense strand to SEQ ID NO: 1627123
uuuacacaaagcuauaguc

SEQ ID NO: 1627125 - RNA, 19 nt, Artificial Sequence
  Description of Artificial Sequence: Synthetic oligonucleotide
  Sense strand starting at position 1081 of SEQ ID NO: 1560825
gguucugguccagaugugu

SEQ ID NO: 1627126 - RNA, 19 nt, Artificial Sequence
  Description of Artificial Sequence: Synthetic oligonucleotide
  Antisense strand to SEQ ID NO: 1627125
acacaucuggaccagaacc

SEQ ID NO: 1627127 - RNA, 19 nt, Artificial Sequence
  Description of Artificial Sequence: Synthetic oligonucleotide
  Sense strand starting at position 1090 of SEQ ID NO: 1560825
ccagaugugucagcaugga

SEQ ID NO: 1627128 - RNA, 19 nt, Artificial Sequence
  Description of Artificial Sequence: Synthetic oligonucleotide
  Antisense strand to SEQ ID NO: 1627127
uccaugcugacacaucugg

SEQ ID NO: 1627129 - RNA, 19 nt, Artificial Sequence
  Description of Artificial Sequence: Synthetic oligonucleotide
  Sense strand starting at position 1889 of SEQ ID NO: 1560825
ggcgaacuaccugaagagu

SEQ ID NO: 1627130 - RNA, 19 nt, Artificial Sequence
  Description of Artificial Sequence: Synthetic oligonucleotide
  Antisense strand to SEQ ID NO: 1627129
acucuucagguaguucgcc

SEQ ID NO: 1627131 - RNA, 19 nt, Artificial Sequence
  Description of Artificial Sequence: Synthetic oligonucleotide
  Sense strand starting at position 1963 of SEQ ID NO: 1560825
ugcuguacagagugaaaug

SEQ ID NO: 1627132 - RNA, 19 nt, Artificial Sequence
  Description of Artificial Sequence: Synthetic oligonucleotide
  Antisense strand to SEQ ID NO: 1627131
cauuucacucuguacagca

SEQ ID NO: 1627133 - RNA, 19 nt, Artificial Sequence
  Description of Artificial Sequence: Synthetic oligonucleotide
  Sense strand starting at position 1964 of SEQ ID NO: 1560825
gcuguacagagugaaaugu

SEQ ID NO: 1627134 - RNA, 19 nt, Artificial Sequence
  Description of Artificial Sequence: Synthetic oligonucleotide
  Antisense strand to SEQ ID NO: 1627133
acauuucacucuguacagc

SEQ ID NO: 1627135 - RNA, 19 nt, Artificial Sequence
  Description of Artificial Sequence: Synthetic oligonucleotide
  Sense strand starting at position 1974 of SEQ ID NO: 1560825
gugaaaugugcggaaggga

SEQ ID NO: 1627136 - RNA, 19 nt, Artificial Sequence
  Description of Artificial Sequence: Synthetic oligonucleotide
  Antisense strand to SEQ ID NO: 1627135
ucccuuccgcacauuucac

SEQ ID NO: 1627137 - RNA, 19 nt, Artificial Sequence
  Description of Artificial Sequence: Synthetic oligonucleotide
  Sense strand starting at position 2170 of SEQ ID NO: 1560825
auucgaggcucccuucuaa

SEQ ID NO: 1627138 - RNA, 19 nt, Artificial Sequence
  Description of Artificial Sequence: Synthetic oligonucleotide
  Antisense strand to SEQ ID NO: 1627137
uuagaagggagccucgaau

SEQ ID NO: 1627139 - RNA, 19 nt, Artificial Sequence
  Description of Artificial Sequence: Synthetic oligonucleotide
  Sense strand starting at position 2212 of SEQ ID NO: 1560825
gggcuuuagugagccuauc

SEQ ID NO: 1627140 - RNA, 19 nt, Artificial Sequence
  Description of Artificial Sequence: Synthetic oligonucleotide
  Antisense strand to SEQ ID NO: 1627139
gauaggcucacuaaagccc

SEQ ID NO: 1627141 - RNA, 19 nt, Artificial Sequence
  Description of Artificial Sequence: Synthetic oligonucleotide
  Sense strand starting at position 2666 of SEQ ID NO: 1560825
accucagugucuucucaga

SEQ ID NO: 1627142 - RNA, 19 nt, Artificial Sequence
  Description of Artificial Sequence: Synthetic oligonucleotide
  Antisense strand to SEQ ID NO: 1627141
ucugagaagacacugaggu

SEQ ID NO: 1627143 - RNA, 19 nt, Artificial Sequence
  Description of Artificial Sequence: Synthetic oligonucleotide
  Sense strand starting at position 2668 of SEQ ID NO: 1560825
cucagugucuucucagauc

SEQ ID NO: 1627144 - RNA, 19 nt, Artificial Sequence
  Description of Artificial Sequence: Synthetic oligonucleotide
  Antisense strand to SEQ ID NO: 1627143
gaucugagaagacacugag

SEQ ID NO: 1627145 - RNA, 19 nt, Artificial Sequence
  Description of Artificial Sequence: Synthetic oligonucleotide
  Sense strand starting at position 2712 of SEQ ID NO: 1560825
gggcucacucccugcuaaa

SEQ ID NO: 1627146 - RNA, 19 nt, Artificial Sequence
  Description of Artificial Sequence: Synthetic oligonucleotide
  Antisense strand to SEQ ID NO: 1627145
uuuagcagggagugagccc

SEQ ID NO: 1627147 - RNA, 19 nt, Artificial Sequence
  Description of Artificial Sequence: Synthetic oligonucleotide
  Sense strand starting at position 2766 of SEQ ID NO: 1560825
gggaccuucccauguauuc

SEQ ID NO: 1627148 - RNA, 19 nt, Artificial Sequence
  Description of Artificial Sequence: Synthetic oligonucleotide
  Antisense strand to SEQ ID NO: 1627147
gaauacaugggaagguccc

SEQ ID NO: 1627149 - RNA, 19 nt, Artificial Sequence
  Description of Artificial Sequence: Synthetic oligonucleotide
  Sense strand starting at position 2783 of SEQ ID NO: 1560825
ucauuccuucgagguggau

SEQ ID NO: 1627150 - RNA, 19 nt, Artificial Sequence
  Description of Artificial Sequence: Synthetic oligonucleotide
  Antisense strand to SEQ ID NO: 1627149
auccaccucgaaggaauga

SEQ ID NO: 1627151 - RNA, 19 nt, Artificial Sequence
  Description of Artificial Sequence: Synthetic oligonucleotide
  Sense strand starting at position 2799 of SEQ ID NO: 1560825
gauugauacugagacagag

SEQ ID NO: 1627152 - RNA, 19 nt, Artificial Sequence
  Description of Artificial Sequence: Synthetic oligonucleotide
  Antisense strand to SEQ ID NO: 1627151
cucugucucaguaucaauc

SEQ ID NO: 1627153 - RNA, 19 nt, Artificial Sequence
  Description of Artificial Sequence: Synthetic oligonucleotide
  Sense strand starting at position 2811 of SEQ ID NO: 1560825
gacagagaugaguguuauu

SEQ ID NO: 1627154 - RNA, 19 nt, Artificial Sequence
  Description of Artificial Sequence: Synthetic oligonucleotide
  Antisense strand to SEQ ID NO: 1627153
aauaacacucaucucuguc

SEQ ID NO: 1627155 - RNA, 19 nt, Artificial Sequence
  Description of Artificial Sequence: Synthetic oligonucleotide
  Sense strand starting at position 2889 of SEQ ID NO: 1560825
uccacaagugcuugcugaa

SEQ ID NO: 1627156 - RNA, 19 nt, Artificial Sequence
  Description of Artificial Sequence: Synthetic oligonucleotide
  Antisense strand to SEQ ID NO: 1627155
uucagcaagcacuugugga

SEQ ID NO: 1627157 - RNA, 19 nt, Artificial Sequence
  Description of Artificial Sequence: Synthetic oligonucleotide
  Sense strand starting at position 2899 of SEQ ID NO: 1560825
cuugcugaaugaguaguaa

SEQ ID NO: 1627158 - RNA, 19 nt, Artificial Sequence
  Description of Artificial Sequence: Synthetic oligonucleotide
  Antisense strand to SEQ ID NO: 1627157
uuacuacucauucagcaag

SEQ ID NO: 1627159 - RNA, 19 nt, Artificial Sequence
  Description of Artificial Sequence: Synthetic oligonucleotide
  Sense strand starting at position 2911 of SEQ ID NO: 1560825
guaguaaaugaguggguca

SEQ ID NO: 1627160 - RNA, 19 nt, Artificial Sequence
  Description of Artificial Sequence: Synthetic oligonucleotide
  Antisense strand to SEQ ID NO: 1627159
ugacccacucauuuacuac

SEQ ID NO: 1627161 - RNA, 19 nt, Artificial Sequence
  Description of Artificial Sequence: Synthetic oligonucleotide
  Sense strand starting at position 2942 of SEQ ID NO: 1560825
gucccaauguguuuaggga

SEQ ID NO: 1627162 - RNA, 19 nt, Artificial Sequence
  Description of Artificial Sequence: Synthetic oligonucleotide
  Antisense strand to SEQ ID NO: 1627161
ucccuaaacacauugggac

SEQ ID NO: 1627163 - RNA, 19 nt, Artificial Sequence
  Description of Artificial Sequence: Synthetic oligonucleotide
  Sense strand starting at position 2989 of SEQ ID NO: 1560825
ugucaaaguuguguuugag

SEQ ID NO: 1627164 - RNA, 19 nt, Artificial Sequence
  Description of Artificial Sequence: Synthetic oligonucleotide
  Antisense strand to SEQ ID NO: 1627163
cucaaacacaacuuugaca

SEQ ID NO: 1627165 - RNA, 19 nt, Artificial Sequence
  Description of Artificial Sequence: Synthetic oligonucleotide
  Sense strand starting at position 2992 of SEQ ID NO: 1560825
caaaguuguguuugaggga

SEQ ID NO: 1627166 - RNA, 19 nt, Artificial Sequence
  Description of Artificial Sequence: Synthetic oligonucleotide
  Antisense strand to SEQ ID NO: 1627165
ucccucaaacacaacuuug

SEQ ID NO: 1627167 - RNA, 19 nt, Artificial Sequence
  Description of Artificial Sequence: Synthetic oligonucleotide
  Sense strand starting at position 2996 of SEQ ID NO: 1560825
guuguguuugagggagaga

SEQ ID NO: 1627168 - RNA, 19 nt, Artificial Sequence
  Description of Artificial Sequence: Synthetic oligonucleotide
  Antisense strand to SEQ ID NO: 1627167
ucucucccucaaacacaac

SEQ ID NO: 1627169 - RNA, 19 nt, Artificial Sequence
  Description of Artificial Sequence: Synthetic oligonucleotide
  Sense strand starting at position 3046 of SEQ ID NO: 1560825
cucugaggacuauggguuu

SEQ ID NO: 1627170 - RNA, 19 nt, Artificial Sequence
  Description of Artificial Sequence: Synthetic oligonucleotide
  Antisense strand to SEQ ID NO: 1627169
aaacccauaguccucagag

SEQ ID NO: 1627171 - RNA, 19 nt, Artificial Sequence
  Description of Artificial Sequence: Synthetic oligonucleotide
  Sense strand starting at position 3053 of SEQ ID NO: 1560825
gacuauggguuuccuagga

SEQ ID NO: 1627172 - RNA, 19 nt, Artificial Sequence
  Description of Artificial Sequence: Synthetic oligonucleotide
  Antisense strand to SEQ ID NO: 1627171
uccuaggaaacccauaguc

SEQ ID NO: 1627173 - RNA, 19 nt, Artificial Sequence
  Description of Artificial Sequence: Synthetic oligonucleotide
  Sense strand starting at position 3057 of SEQ ID NO: 1560825
auggguuuccuaggaguag

SEQ ID NO: 1627174 - RNA, 19 nt, Artificial Sequence
  Description of Artificial Sequence: Synthetic oligonucleotide
  Antisense strand to SEQ ID NO: 1627173
cuacuccuaggaaacccau

SEQ ID NO: 1627175 - RNA, 19 nt, Artificial Sequence
  Description of Artificial Sequence: Synthetic oligonucleotide
  Sense strand starting at position 3079 of SEQ ID NO: 1560825
cucagcugggucugaaaga

SEQ ID NO: 1627176 - RNA, 19 nt, Artificial Sequence
  Description of Artificial Sequence: Synthetic oligonucleotide
  Antisense strand to SEQ ID NO: 1627175
ucuuucagacccagcugag

SEQ ID NO: 1627177 - RNA, 19 nt, Artificial Sequence
  Description of Artificial Sequence: Synthetic oligonucleotide
  Sense strand starting at position 3137 of SEQ ID NO: 1560825
aucacuuucuuauuagguu

SEQ ID NO: 1627178 - RNA, 19 nt, Artificial Sequence
  Description of Artificial Sequence: Synthetic oligonucleotide
  Antisense strand to SEQ ID NO: 1627177
aaccuaauaagaaagugau

SEQ ID NO: 1627179 - RNA, 19 nt, Artificial Sequence
  Description of Artificial Sequence: Synthetic oligonucleotide
  Sense strand starting at position 3387 of SEQ ID NO: 1560825
aggacaauugcuugagucu

SEQ ID NO: 1627180 - RNA, 19 nt, Artificial Sequence
  Description of Artificial Sequence: Synthetic oligonucleotide
  Antisense strand to SEQ ID NO: 1627179
agacucaagcaauuguccu

SEQ ID NO: 1627181 - RNA, 19 nt, Artificial Sequence
  Description of Artificial Sequence: Synthetic oligonucleotide
  Sense strand starting at position 467 of SEQ ID NO: 1560826
ugccuagagucucucacuu

SEQ ID NO: 1627182 - RNA, 19 nt, Artificial Sequence
  Description of Artificial Sequence: Synthetic oligonucleotide
  Antisense strand to SEQ ID NO: 1627181
aagugagagacucuaggca

SEQ ID NO: 1627183 - RNA, 19 nt, Artificial Sequence
  Description of Artificial Sequence: Synthetic oligonucleotide
  Sense strand starting at position 831 of SEQ ID NO: 1560826
gucugcuugagccaugcau

SEQ ID NO: 1627184 - RNA, 19 nt, Artificial Sequence
  Description of Artificial Sequence: Synthetic oligonucleotide
  Antisense strand to SEQ ID NO: 1627183
augcauggcucaagcagac

SEQ ID NO: 1627185 - RNA, 19 nt, Artificial Sequence
  Description of Artificial Sequence: Synthetic oligonucleotide
  Sense strand starting at position 835 of SEQ ID NO: 1560826
gcuugagccaugcauugaa

SEQ ID NO: 1627186 - RNA, 19 nt, Artificial Sequence
  Description of Artificial Sequence: Synthetic oligonucleotide
  Antisense strand to SEQ ID NO: 1627185
uucaaugcauggcucaagc

SEQ ID NO: 1627187 - RNA, 19 nt, Artificial Sequence
  Description of Artificial Sequence: Synthetic oligonucleotide
  Sense strand starting at position 838 of SEQ ID NO: 1560826
ugagccaugcauugaauca

SEQ ID NO: 1627188 - RNA, 19 nt, Artificial Sequence
  Description of Artificial Sequence: Synthetic oligonucleotide
  Antisense strand to SEQ ID NO: 1627187
ugauucaaugcauggcuca

SEQ ID NO: 1627189 - RNA, 19 nt, Artificial Sequence
  Description of Artificial Sequence: Synthetic oligonucleotide
  Sense strand starting at position 859 of SEQ ID NO: 1560826
ggcauuacaguugaaacuu

SEQ ID NO: 1627190 - RNA, 19 nt, Artificial Sequence
  Description of Artificial Sequence: Synthetic oligonucleotide
  Antisense strand to SEQ ID NO: 1627189
aaguuucaacuguaaugcc

SEQ ID NO: 1627191 - RNA, 19 nt, Artificial Sequence
  Description of Artificial Sequence: Synthetic oligonucleotide
  Sense strand starting at position 900 of SEQ ID NO: 1560826
uuggacaugcuuuguggaa

SEQ ID NO: 1627192 - RNA, 19 nt, Artificial Sequence
  Description of Artificial Sequence: Synthetic oligonucleotide
  Antisense strand to SEQ ID NO: 1627191
uuccacaaagcauguccaa

SEQ ID NO: 1627193 - RNA, 19 nt, Artificial Sequence
  Description of Artificial Sequence: Synthetic oligonucleotide
  Sense strand starting at position 901 of SEQ ID NO: 1560826
uggacaugcuuuguggaaa

SEQ ID NO: 1627194 - RNA, 19 nt, Artificial Sequence
  Description of Artificial Sequence: Synthetic oligonucleotide
  Antisense strand to SEQ ID NO: 1627193
uuuccacaaagcaugucca

SEQ ID NO: 1627195 - RNA, 19 nt, Artificial Sequence
  Description of Artificial Sequence: Synthetic oligonucleotide
  Sense strand starting at position 904 of SEQ ID NO: 1560826
acaugcuuuguggaaagau

SEQ ID NO: 1627196 - RNA, 19 nt, Artificial Sequence
  Description of Artificial Sequence: Synthetic oligonucleotide
  Antisense strand to SEQ ID NO: 1627195
aucuuuccacaaagcaugu

SEQ ID NO: 1627197 - RNA, 19 nt, Artificial Sequence
  Description of Artificial Sequence: Synthetic oligonucleotide
  Sense strand starting at position 913 of SEQ ID NO: 1560826
guggaaagauauuauuaug

SEQ ID NO: 1627198 - RNA, 19 nt, Artificial Sequence
  Description of Artificial Sequence: Synthetic oligonucleotide
  Antisense strand to SEQ ID NO: 1627197
cauaauaauaucuuuccac

SEQ ID NO: 1627199 - RNA, 19 nt, Artificial Sequence
  Description of Artificial Sequence: Synthetic oligonucleotide
  Sense strand starting at position 929 of SEQ ID NO: 1560826
augauugaguccucuuugu

SEQ ID NO: 1627200 - RNA, 19 nt, Artificial Sequence
  Description of Artificial Sequence: Synthetic oligonucleotide
  Antisense strand to SEQ ID NO: 1627199
acaaagaggacucaaucau

SEQ ID NO: 1627201 - RNA, 19 nt, Artificial Sequence
  Description of Artificial Sequence: Synthetic oligonucleotide
  Sense strand starting at position 985 of SEQ ID NO: 1560826
ugacuauagcuuuguguaa

SEQ ID NO: 1627202 - RNA, 19 nt, Artificial Sequence
  Description of Artificial Sequence: Synthetic oligonucleotide
  Antisense strand to SEQ ID NO: 1627201
uuacacaaagcuauaguca

SEQ ID NO: 1627203 - RNA, 19 nt, Artificial Sequence
  Description of Artificial Sequence: Synthetic oligonucleotide
  Sense strand starting at position 986 of SEQ ID NO: 1560826
gacuauagcuuuguguaaa

SEQ ID NO: 1627204 - RNA, 19 nt, Artificial Sequence
  Description of Artificial Sequence: Synthetic oligonucleotide
  Antisense strand to SEQ ID NO: 1627203
uuuacacaaagcuauaguc

SEQ ID NO: 1627205 - RNA, 19 nt, Artificial Sequence
  Description of Artificial Sequence: Synthetic oligonucleotide
  Sense strand starting at position 1237 of SEQ ID NO: 1560826
gguucugguccagaugugu

SEQ ID NO: 1627206 - RNA, 19 nt, Artificial Sequence
  Description of Artificial Sequence: Synthetic oligonucleotide
  Antisense strand to SEQ ID NO: 1627205
acacaucuggaccagaacc

SEQ ID NO: 1627207 - RNA, 19 nt, Artificial Sequence
  Description of Artificial Sequence: Synthetic oligonucleotide
  Sense strand starting at position 1246 of SEQ ID NO: 1560826
ccagaugugucagcaugga

SEQ ID NO: 1627208 - RNA, 19 nt, Artificial Sequence
  Description of Artificial Sequence: Synthetic oligonucleotide
  Antisense strand to SEQ ID NO: 1627207
uccaugcugacacaucugg

SEQ ID NO: 1627209 - RNA, 19 nt, Artificial Sequence
  Description of Artificial Sequence: Synthetic oligonucleotide
  Sense strand starting at position 2045 of SEQ ID NO: 1560826
ggcgaacuaccugaagagu

SEQ ID NO: 1627210 - RNA, 19 nt, Artificial Sequence
  Description of Artificial Sequence: Synthetic oligonucleotide
  Antisense strand to SEQ ID NO: 1627209
acucuucagguaguucgcc

SEQ ID NO: 1627211 - RNA, 19 nt, Artificial Sequence
  Description of Artificial Sequence: Synthetic oligonucleotide
  Sense strand starting at position 2119 of SEQ ID NO: 1560826
ugcuguacagagugaaaug

SEQ ID NO: 1627212 - RNA, 19 nt, Artificial Sequence
  Description of Artificial Sequence: Synthetic oligonucleotide
  Antisense strand to SEQ ID NO: 1627211
cauuucacucuguacagca

SEQ ID NO: 1627213 - RNA, 19 nt, Artificial Sequence
  Description of Artificial Sequence: Synthetic oligonucleotide
  Sense strand starting at position 2120 of SEQ ID NO: 1560826
gcuguacagagugaaaugu

SEQ ID NO: 1627214 - RNA, 19 nt, Artificial Sequence
  Description of Artificial Sequence: Synthetic oligonucleotide
  Antisense strand to SEQ ID NO: 1627213
acauuucacucuguacagc

SEQ ID NO: 1627215 - RNA, 19 nt, Artificial Sequence
  Description of Artificial Sequence: Synthetic oligonucleotide
  Sense strand starting at position 2130 of SEQ ID NO: 1560826
gugaaaugugcggaaggga

SEQ ID NO: 1627216 - RNA, 19 nt, Artificial Sequence
  Description of Artificial Sequence: Synthetic oligonucleotide
  Antisense strand to SEQ ID NO: 1627215
ucccuuccgcacauuucac

SEQ ID NO: 1627217 - RNA, 19 nt, Artificial Sequence
  Description of Artificial Sequence: Synthetic oligonucleotide
  Sense strand starting at position 2326 of SEQ ID NO: 1560826
auucgaggcucccuucuaa

SEQ ID NO: 1627218 - RNA, 19 nt, Artificial Sequence
  Description of Artificial Sequence: Synthetic oligonucleotide
  Antisense strand to SEQ ID NO: 1627217
uuagaagggagccucgaau

SEQ ID NO: 1627219 - RNA, 19 nt, Artificial Sequence
  Description of Artificial Sequence: Synthetic oligonucleotide
  Sense strand starting at position 2368 of SEQ ID NO: 1560826
gggcuuuagugagccuauc

SEQ ID NO: 1627220 - RNA, 19 nt, Artificial Sequence
  Description of Artificial Sequence: Synthetic oligonucleotide
  Antisense strand to SEQ ID NO: 1627219
gauaggcucacuaaagccc

SEQ ID NO: 1627221 - RNA, 19 nt, Artificial Sequence
  Description of Artificial Sequence: Synthetic oligonucleotide
  Sense strand starting at position 2822 of SEQ ID NO: 1560826
accucagugucuucucaga

SEQ ID NO: 1627222 - RNA, 19 nt, Artificial Sequence
  Description of Artificial Sequence: Synthetic oligonucleotide
  Antisense strand to SEQ ID NO: 1627221
ucugagaagacacugaggu

SEQ ID NO: 1627223 - RNA, 19 nt, Artificial Sequence
  Description of Artificial Sequence: Synthetic oligonucleotide
  Sense strand starting at position 2824 of SEQ ID NO: 1560826
cucagugucuucucagauc

SEQ ID NO: 1627224 - RNA, 19 nt, Artificial Sequence
  Description of Artificial Sequence: Synthetic oligonucleotide
  Antisense strand to SEQ ID NO: 1627223
gaucugagaagacacugag

SEQ ID NO: 1627225 - RNA, 19 nt, Artificial Sequence
  Description of Artificial Sequence: Synthetic oligonucleotide
  Sense strand starting at position 2868 of SEQ ID NO: 1560826
gggcucacucccugcuaaa

SEQ ID NO: 1627226 - RNA, 19 nt, Artificial Sequence
  Description of Artificial Sequence: Synthetic oligonucleotide
  Antisense strand to SEQ ID NO: 1627225
uuuagcagggagugagccc

SEQ ID NO: 1627227 - RNA, 19 nt, Artificial Sequence
  Description of Artificial Sequence: Synthetic oligonucleotide
  Sense strand starting at position 2922 of SEQ ID NO: 1560826
gggaccuucccauguauuc

SEQ ID NO: 1627228 - RNA, 19 nt, Artificial Sequence
  Description of Artificial Sequence: Synthetic oligonucleotide
  Antisense strand to SEQ ID NO: 1627227
gaauacaugggaagguccc

SEQ ID NO: 1627229 - RNA, 19 nt, Artificial Sequence
  Description of Artificial Sequence: Synthetic oligonucleotide
  Sense strand starting at position 2939 of SEQ ID NO: 1560826
ucauuccuucgagguggau

SEQ ID NO: 1627230 - RNA, 19 nt, Artificial Sequence
  Description of Artificial Sequence: Synthetic oligonucleotide
  Antisense strand to SEQ ID NO: 1627229
auccaccucgaaggaauga

SEQ ID NO: 1627231 - RNA, 19 nt, Artificial Sequence
  Description of Artificial Sequence: Synthetic oligonucleotide
  Sense strand starting at position 2955 of SEQ ID NO: 1560826
gauugauacugagacagag

SEQ ID NO: 1627232 - RNA, 19 nt, Artificial Sequence
  Description of Artificial Sequence: Synthetic oligonucleotide
  Antisense strand to SEQ ID NO: 1627231
cucugucucaguaucaauc

SEQ ID NO: 1627233 - RNA, 19 nt, Artificial Sequence
  Description of Artificial Sequence: Synthetic oligonucleotide
  Sense strand starting at position 2967 of SEQ ID NO: 1560826
gacagagaugaguguuauu

SEQ ID NO: 1627234 - RNA, 19 nt, Artificial Sequence
  Description of Artificial Sequence: Synthetic oligonucleotide
  Antisense strand to SEQ ID NO: 1627233
aauaacacucaucucuguc

SEQ ID NO: 1627235 - RNA, 19 nt, Artificial Sequence
  Description of Artificial Sequence: Synthetic oligonucleotide
  Sense strand starting at position 3045 of SEQ ID NO: 1560826
uccacaagugcuugcugaa

SEQ ID NO: 1627236 - RNA, 19 nt, Artificial Sequence
  Description of Artificial Sequence: Synthetic oligonucleotide
  Antisense strand to SEQ ID NO: 1627235
uucagcaagcacuugugga

SEQ ID NO: 1627237 - RNA, 19 nt, Artificial Sequence
  Description of Artificial Sequence: Synthetic oligonucleotide
  Sense strand starting at position 3055 of SEQ ID NO: 1560826
cuugcugaaugaguaguaa

SEQ ID NO: 1627238 - RNA, 19 nt, Artificial Sequence
  Description of Artificial Sequence: Synthetic oligonucleotide
  Antisense strand to SEQ ID NO: 1627237
uuacuacucauucagcaag

SEQ ID NO: 1627239 - RNA, 19 nt, Artificial Sequence
  Description of Artificial Sequence: Synthetic oligonucleotide
  Sense strand starting at position 3067 of SEQ ID NO: 1560826
guaguaaaugaguggguca

SEQ ID NO: 1627240 - RNA, 19 nt, Artificial Sequence
  Description of Artificial Sequence: Synthetic oligonucleotide
  Antisense strand to SEQ ID NO: 1627239
ugacccacucauuuacuac

SEQ ID NO: 1627241 - RNA, 19 nt, Artificial Sequence
  Description of Artificial Sequence: Synthetic oligonucleotide
  Sense strand starting at position 3098 of SEQ ID NO: 1560826
gucccaauguguuuaggga

SEQ ID NO: 1627242 - RNA, 19 nt, Artificial Sequence
  Description of Artificial Sequence: Synthetic oligonucleotide
  Antisense strand to SEQ ID NO: 1627241
ucccuaaacacauugggac

SEQ ID NO: 1627243 - RNA, 19 nt, Artificial Sequence
  Description of Artificial Sequence: Synthetic oligonucleotide
  Sense strand starting at position 3145 of SEQ ID NO: 1560826
ugucaaaguuguguuugag

SEQ ID NO: 1627244 - RNA, 19 nt, Artificial Sequence
  Description of Artificial Sequence: Synthetic oligonucleotide
  Antisense strand to SEQ ID NO: 1627243
cucaaacacaacuuugaca

SEQ ID NO: 1627245 - RNA, 19 nt, Artificial Sequence
  Description of Artificial Sequence: Synthetic oligonucleotide
  Sense strand starting at position 3148 of SEQ ID NO: 1560826
caaaguuguguuugaggga

SEQ ID NO: 1627246 - RNA, 19 nt, Artificial Sequence
  Description of Artificial Sequence: Synthetic oligonucleotide
  Antisense strand to SEQ ID NO: 1627245
ucccucaaacacaacuuug

SEQ ID NO: 1627247 - RNA, 19 nt, Artificial Sequence
  Description of Artificial Sequence: Synthetic oligonucleotide
  Sense strand starting at position 3152 of SEQ ID NO: 1560826
guuguguuugagggagaga

SEQ ID NO: 1627248 - RNA, 19 nt, Artificial Sequence
  Description of Artificial Sequence: Synthetic oligonucleotide
  Antisense strand to SEQ ID NO: 1627247
ucucucccucaaacacaac

SEQ ID NO: 1627249 - RNA, 19 nt, Artificial Sequence
  Description of Artificial Sequence: Synthetic oligonucleotide
  Sense strand starting at position 3202 of SEQ ID NO: 1560826
cucugaggacuauggguuu

SEQ ID NO: 1627250 - RNA, 19 nt, Artificial Sequence
  Description of Artificial Sequence: Synthetic oligonucleotide
  Antisense strand to SEQ ID NO: 1627249
aaacccauaguccucagag

SEQ ID NO: 1627251 - RNA, 19 nt, Artificial Sequence
  Description of Artificial Sequence: Synthetic oligonucleotide
  Sense strand starting at position 3209 of SEQ ID NO: 1560826
gacuauggguuuccuagga

SEQ ID NO: 1627252 - RNA, 19 nt, Artificial Sequence
  Description of Artificial Sequence: Synthetic oligonucleotide
  Antisense strand to SEQ ID NO: 1627251
uccuaggaaacccauaguc

SEQ ID NO: 1627253 - RNA, 19 nt, Artificial Sequence
  Description of Artificial Sequence: Synthetic oligonucleotide
  Sense strand starting at position 3213 of SEQ ID NO: 1560826
auggguuuccuaggaguag

SEQ ID NO: 1627254 - RNA, 19 nt, Artificial Sequence
  Description of Artificial Sequence: Synthetic oligonucleotide
  Antisense strand to SEQ ID NO: 1627253
cuacuccuaggaaacccau

SEQ ID NO: 1627255 - RNA, 19 nt, Artificial Sequence
  Description of Artificial Sequence: Synthetic oligonucleotide
  Sense strand starting at position 3235 of SEQ ID NO: 1560826
cucagcugggucugaaaga

SEQ ID NO: 1627256 - RNA, 19 nt, Artificial Sequence
  Description of Artificial Sequence: Synthetic oligonucleotide
  Antisense strand to SEQ ID NO: 1627255
ucuuucagacccagcugag

SEQ ID NO: 1627257 - RNA, 19 nt, Artificial Sequence
  Description of Artificial Sequence: Synthetic oligonucleotide
  Sense strand starting at position 3293 of SEQ ID NO: 1560826
aucacuuucuuauuagguu

SEQ ID NO: 1627258 - RNA, 19 nt, Artificial Sequence
  Description of Artificial Sequence: Synthetic oligonucleotide
  Antisense strand to SEQ ID NO: 1627257
aaccuaauaagaaagugau

SEQ ID NO: 1627259 - RNA, 19 nt, Artificial Sequence
  Description of Artificial Sequence: Synthetic oligonucleotide
  Sense strand starting at position 3543 of SEQ ID NO: 1560826
aggacaauugcuugagucu

SEQ ID NO: 1627260 - RNA, 19 nt, Artificial Sequence
  Description of Artificial Sequence: Synthetic oligonucleotide
  Antisense strand to SEQ ID NO: 1627259
agacucaagcaauuguccu

SEQ ID NO: 1627261 - RNA, 19 nt, Artificial Sequence
  Description of Artificial Sequence: Synthetic oligonucleotide
  Sense strand starting at position 306 of SEQ ID NO: 1560827
gagguaagggcuggucaga

SEQ ID NO: 1627262 - RNA, 19 nt, Artificial Sequence
  Description of Artificial Sequence: Synthetic oligonucleotide
  Antisense strand to SEQ ID NO: 1627261
ucugaccagcccuuaccuc

SEQ ID NO: 1627263 - RNA, 19 nt, Artificial Sequence
  Description of Artificial Sequence: Synthetic oligonucleotide
  Sense strand starting at position 311 of SEQ ID NO: 1560827
aagggcuggucagaugaga

SEQ ID NO: 1627264 - RNA, 19 nt, Artificial Sequence
  Description of Artificial Sequence: Synthetic oligonucleotide
  Antisense strand to SEQ ID NO: 1627263
ucucaucugaccagcccuu

SEQ ID NO: 1627265 - RNA, 19 nt, Artificial Sequence
  Description of Artificial Sequence: Synthetic oligonucleotide
  Sense strand starting at position 696 of SEQ ID NO: 1560827
acaggaaucuucccugcca

SEQ ID NO: 1627266 - RNA, 19 nt, Artificial Sequence
  Description of Artificial Sequence: Synthetic oligonucleotide
  Antisense strand to SEQ ID NO: 1627265
uggcagggaagauuccugu

SEQ ID NO: 1627267 - RNA, 19 nt, Artificial Sequence
  Description of Artificial Sequence: Synthetic oligonucleotide
  Sense strand starting at position 698 of SEQ ID NO: 1560827
aggaaucuucccugccaga

SEQ ID NO: 1627268 - RNA, 19 nt, Artificial Sequence
  Description of Artificial Sequence: Synthetic oligonucleotide
  Antisense strand to SEQ ID NO: 1627267
ucuggcagggaagauuccu

SEQ ID NO: 1627269 - RNA, 19 nt, Artificial Sequence
  Description of Artificial Sequence: Synthetic oligonucleotide
  Sense strand starting at position 920 of SEQ ID NO: 1560827
gucuguaaaguagguucau

SEQ ID NO: 1627270 - RNA, 19 nt, Artificial Sequence
  Description of Artificial Sequence: Synthetic oligonucleotide
  Antisense strand to SEQ ID NO: 1627269
augaaccuacuuuacagac

SEQ ID NO: 1627271 - RNA, 19 nt, Artificial Sequence
  Description of Artificial Sequence: Synthetic oligonucleotide
  Sense strand starting at position 955 of SEQ ID NO: 1560827
acaagauugcagcaggagu

SEQ ID NO: 1627272 - RNA, 19 nt, Artificial Sequence
  Description of Artificial Sequence: Synthetic oligonucleotide
  Antisense strand to SEQ ID NO: 1627271
acuccugcugcaaucuugu

SEQ ID NO: 1627273 - RNA, 19 nt, Artificial Sequence
  Description of Artificial Sequence: Synthetic oligonucleotide
  Sense strand starting at position 1010 of SEQ ID NO: 1560827
gugagcccucauuaaacau

SEQ ID NO: 1627274 - RNA, 19 nt, Artificial Sequence
  Description of Artificial Sequence: Synthetic oligonucleotide
  Antisense strand to SEQ ID NO: 1627273
auguuuaaugagggcucac

SEQ ID NO: 1627275 - RNA, 19 nt, Artificial Sequence
  Description of Artificial Sequence: Synthetic oligonucleotide
  Sense strand starting at position 1032 of SEQ ID NO: 1560827
ccgacauuaugaugauuug

SEQ ID NO: 1627276 - RNA, 19 nt, Artificial Sequence
  Description of Artificial Sequence: Synthetic oligonucleotide
  Antisense strand to SEQ ID NO: 1627275
caaaucaucauaaugucgg

SEQ ID NO: 1627277 - RNA, 19 nt, Artificial Sequence
  Description of Artificial Sequence: Synthetic oligonucleotide
  Sense strand starting at position 1080 of SEQ ID NO: 1560827
gccagaacuccggaguuag

SEQ ID NO: 1627278 - RNA, 19 nt, Artificial Sequence
  Description of Artificial Sequence: Synthetic oligonucleotide
  Antisense strand to SEQ ID NO: 1627277
cuaacuccggaguucuggc

SEQ ID NO: 1627279 - RNA, 19 nt, Artificial Sequence
  Description of Artificial Sequence: Synthetic oligonucleotide
  Sense strand starting at position 1111 of SEQ ID NO: 1560827
caacuuaugcaucggguga

SEQ ID NO: 1627280 - RNA, 19 nt, Artificial Sequence
  Description of Artificial Sequence: Synthetic oligonucleotide
  Antisense strand to SEQ ID NO: 1627279
ucacccgaugcauaaguug

SEQ ID NO: 1627281 - RNA, 19 nt, Artificial Sequence
  Description of Artificial Sequence: Synthetic oligonucleotide
  Sense strand starting at position 1124 of SEQ ID NO: 1560827
gggugaccuugugcaaauc

SEQ ID NO: 1627282 - RNA, 19 nt, Artificial Sequence
  Description of Artificial Sequence: Synthetic oligonucleotide
  Antisense strand to SEQ ID NO: 1627281
gauuugcacaaggucaccc

SEQ ID NO: 1627283 - RNA, 19 nt, Artificial Sequence
  Description of Artificial Sequence: Synthetic oligonucleotide
  Sense strand starting at position 1150 of SEQ ID NO: 1560827
cucuuaauaccagguuaag

SEQ ID NO: 1627284 - RNA, 19 nt, Artificial Sequence
  Description of Artificial Sequence: Synthetic oligonucleotide
  Antisense strand to SEQ ID NO: 1627283
cuuaaccugguauuaagag

SEQ ID NO: 1627285 - RNA, 19 nt, Artificial Sequence
  Description of Artificial Sequence: Synthetic oligonucleotide
  Sense strand starting at position 1177 of SEQ ID NO: 1560827
agacuauagugaggacuga

SEQ ID NO: 1627286 - RNA, 19 nt, Artificial Sequence
  Description of Artificial Sequence: Synthetic oligonucleotide
  Antisense strand to SEQ ID NO: 1627285
ucaguccucacuauagucu

SEQ ID NO: 1627287 - RNA, 19 nt, Artificial Sequence
  Description of Artificial Sequence: Synthetic oligonucleotide
  Sense strand starting at position 1227 of SEQ ID NO: 1560827
gggucuagcccauaguguu

SEQ ID NO: 1627288 - RNA, 19 nt, Artificial Sequence
  Description of Artificial Sequence: Synthetic oligonucleotide
  Antisense strand to SEQ ID NO: 1627287
aacacuaugggcuagaccc

SEQ ID NO: 1627289 - RNA, 19 nt, Artificial Sequence
  Description of Artificial Sequence: Synthetic oligonucleotide
  Sense strand starting at position 1246 of SEQ ID NO: 1560827
ucaugaguguuugccauua

SEQ ID NO: 1627290 - RNA, 19 nt, Artificial Sequence
  Description of Artificial Sequence: Synthetic oligonucleotide
  Antisense strand to SEQ ID NO: 1627289
uaauggcaaacacucauga

SEQ ID NO: 1627291 - RNA, 19 nt, Artificial Sequence
  Description of Artificial Sequence: Synthetic oligonucleotide
  Sense strand starting at position 1263 of SEQ ID NO: 1560827
uauuauuugugggaggguu

SEQ ID NO: 1627292 - RNA, 19 nt, Artificial Sequence
  Description of Artificial Sequence: Synthetic oligonucleotide
  Antisense strand to SEQ ID NO: 1627291
aacccucccacaaauaaua

SEQ ID NO: 1627293 - RNA, 19 nt, Artificial Sequence
  Description of Artificial Sequence: Synthetic oligonucleotide
  Sense strand starting at position 1396 of SEQ ID NO: 1560827
gcugucagauucucaccuu

SEQ ID NO: 1627294 - RNA, 19 nt, Artificial Sequence
  Description of Artificial Sequence: Synthetic oligonucleotide
  Antisense strand to SEQ ID NO: 1627293
aaggugagaaucugacagc

SEQ ID NO: 1627295 - RNA, 19 nt, Artificial Sequence
  Description of Artificial Sequence: Synthetic oligonucleotide
  Sense strand starting at position 1399 of SEQ ID NO: 1560827
gucagauucucaccuuugu

SEQ ID NO: 1627296 - RNA, 19 nt, Artificial Sequence
  Description of Artificial Sequence: Synthetic oligonucleotide
  Antisense strand to SEQ ID NO: 1627295
acaaaggugagaaucugac

SEQ ID NO: 1627297 - RNA, 19 nt, Artificial Sequence
  Description of Artificial Sequence: Synthetic oligonucleotide
  Sense strand starting at position 2300 of SEQ ID NO: 1560827
augaguuaaugggcagaaa

SEQ ID NO: 1627298 - RNA, 19 nt, Artificial Sequence
  Description of Artificial Sequence: Synthetic oligonucleotide
  Antisense strand to SEQ ID NO: 1627297
uuucugcccauuaacucau

SEQ ID NO: 1627299 - RNA, 19 nt, Artificial Sequence
  Description of Artificial Sequence: Synthetic oligonucleotide
  Sense strand starting at position 2441 of SEQ ID NO: 1560827
agguucagagggugaaaua

SEQ ID NO: 1627300 - RNA, 19 nt, Artificial Sequence
  Description of Artificial Sequence: Synthetic oligonucleotide
  Antisense strand to SEQ ID NO: 1627299
uauuucacccucugaaccu

SEQ ID NO: 1627301 - RNA, 19 nt, Artificial Sequence
  Description of Artificial Sequence: Synthetic oligonucleotide
  Sense strand starting at position 2450 of SEQ ID NO: 1560827
gggugaaauagcuggcuua

SEQ ID NO: 1627302 - RNA, 19 nt, Artificial Sequence
  Description of Artificial Sequence: Synthetic oligonucleotide
  Antisense strand to SEQ ID NO: 1627301
uaagccagcuauuucaccc

SEQ ID NO: 1627303 - RNA, 19 nt, Artificial Sequence
  Description of Artificial Sequence: Synthetic oligonucleotide
  Sense strand starting at position 2451 of SEQ ID NO: 1560827
ggugaaauagcuggcuuag

SEQ ID NO: 1627304 - RNA, 19 nt, Artificial Sequence
  Description of Artificial Sequence: Synthetic oligonucleotide
  Antisense strand to SEQ ID NO: 1627303
cuaagccagcuauuucacc

SEQ ID NO: 1627305 - RNA, 19 nt, Artificial Sequence
  Description of Artificial Sequence: Synthetic oligonucleotide
  Sense strand starting at position 2453 of SEQ ID NO: 1560827
ugaaauagcuggcuuagca

SEQ ID NO: 1627306 - RNA, 19 nt, Artificial Sequence
  Description of Artificial Sequence: Synthetic oligonucleotide
  Antisense strand to SEQ ID NO: 1627305
ugcuaagccagcuauuuca

SEQ ID NO: 1627307 - RNA, 19 nt, Artificial Sequence
  Description of Artificial Sequence: Synthetic oligonucleotide
  Sense strand starting at position 2461 of SEQ ID NO: 1560827
cuggcuuagcaucauagaa

SEQ ID NO: 1627308 - RNA, 19 nt, Artificial Sequence
  Description of Artificial Sequence: Synthetic oligonucleotide
  Antisense strand to SEQ ID NO: 1627307
uucuaugaugcuaagccag

SEQ ID NO: 1627309 - RNA, 19 nt, Artificial Sequence
  Description of Artificial Sequence: Synthetic oligonucleotide
  Sense strand starting at position 2561 of SEQ ID NO: 1560827
uuacgaaguaauuggucaa

SEQ ID NO: 1627310 - RNA, 19 nt, Artificial Sequence
  Description of Artificial Sequence: Synthetic oligonucleotide
  Antisense strand to SEQ ID NO: 1627309
uugaccaauuacuucguaa

SEQ ID NO: 1627311 - RNA, 19 nt, Artificial Sequence
  Description of Artificial Sequence: Synthetic oligonucleotide
  Sense strand starting at position 2646 of SEQ ID NO: 1560827
uuugucuugagauagaguu

SEQ ID NO: 1627312 - RNA, 19 nt, Artificial Sequence
  Description of Artificial Sequence: Synthetic oligonucleotide
  Antisense strand to SEQ ID NO: 1627311
aacucuaucucaagacaaa

SEQ ID NO: 1627313 - RNA, 19 nt, Artificial Sequence
  Description of Artificial Sequence: Synthetic oligonucleotide
  Sense strand starting at position 3165 of SEQ ID NO: 1560827
guuccucugccuggaacau

SEQ ID NO: 1627314 - RNA, 19 nt, Artificial Sequence
  Description of Artificial Sequence: Synthetic oligonucleotide
  Antisense strand to SEQ ID NO: 1627313
auguuccaggcagaggaac

SEQ ID NO: 1627315 - RNA, 19 nt, Artificial Sequence
  Description of Artificial Sequence: Synthetic oligonucleotide
  Sense strand starting at position 3226 of SEQ ID NO: 1560827
gggcuuuacacagauguca

SEQ ID NO: 1627316 - RNA, 19 nt, Artificial Sequence
  Description of Artificial Sequence: Synthetic oligonucleotide
  Antisense strand to SEQ ID NO: 1627315
ugacaucuguguaaagccc

SEQ ID NO: 1627317 - RNA, 19 nt, Artificial Sequence
  Description of Artificial Sequence: Synthetic oligonucleotide
  Sense strand starting at position 3238 of SEQ ID NO: 1560827
gaugucacuuucucuguga

SEQ ID NO: 1627318 - RNA, 19 nt, Artificial Sequence
  Description of Artificial Sequence: Synthetic oligonucleotide
  Antisense strand to SEQ ID NO: 1627317
ucacagagaaagugacauc

SEQ ID NO: 1627319 - RNA, 19 nt, Artificial Sequence
  Description of Artificial Sequence: Synthetic oligonucleotide
  Sense strand starting at position 3240 of SEQ ID NO: 1560827
ugucacuuucucugugaac

SEQ ID NO: 1627320 - RNA, 19 nt, Artificial Sequence
  Description of Artificial Sequence: Synthetic oligonucleotide
  Antisense strand to SEQ ID NO: 1627319
guucacagagaaagugaca

SEQ ID NO: 1627321 - RNA, 19 nt, Artificial Sequence
  Description of Artificial Sequence: Synthetic oligonucleotide
  Sense strand starting at position 3241 of SEQ ID NO: 1560827
gucacuuucucugugaacu

SEQ ID NO: 1627322 - RNA, 19 nt, Artificial Sequence
  Description of Artificial Sequence: Synthetic oligonucleotide
  Antisense strand to SEQ ID NO: 1627321
aguucacagagaaagugac

SEQ ID NO: 1627323 - RNA, 19 nt, Artificial Sequence
  Description of Artificial Sequence: Synthetic oligonucleotide
  Sense strand starting at position 3406 of SEQ ID NO: 1560827
auggauuucugucuuuguu

SEQ ID NO: 1627324 - RNA, 19 nt, Artificial Sequence
  Description of Artificial Sequence: Synthetic oligonucleotide
  Antisense strand to SEQ ID NO: 1627323
aacaaagacagaaauccau

SEQ ID NO: 1627325 - RNA, 19 nt, Artificial Sequence
  Description of Artificial Sequence: Synthetic oligonucleotide
  Sense strand starting at position 3458 of SEQ ID NO: 1560827
gcauguagaugcucaguaa

SEQ ID NO: 1627326 - RNA, 19 nt, Artificial Sequence
  Description of Artificial Sequence: Synthetic oligonucleotide
  Antisense strand to SEQ ID NO: 1627325
uuacugagcaucuacaugc

SEQ ID NO: 1627327 - RNA, 19 nt, Artificial Sequence
  Description of Artificial Sequence: Synthetic oligonucleotide
  Sense strand starting at position 3459 of SEQ ID NO: 1560827
cauguagaugcucaguaaa

SEQ ID NO: 1627328 - RNA, 19 nt, Artificial Sequence
  Description of Artificial Sequence: Synthetic oligonucleotide
  Antisense strand to SEQ ID NO: 1627327
uuuacugagcaucuacaug

SEQ ID NO: 1627329 - RNA, 19 nt, Artificial Sequence
  Description of Artificial Sequence: Synthetic oligonucleotide
  Sense strand starting at position 3461 of SEQ ID NO: 1560827
uguagaugcucaguaaaca

SEQ ID NO: 1627330 - RNA, 19 nt, Artificial Sequence
  Description of Artificial Sequence: Synthetic oligonucleotide
  Antisense strand to SEQ ID NO: 1627329
uguuuacugagcaucuaca

SEQ ID NO: 1627331 - RNA, 19 nt, Artificial Sequence
  Description of Artificial Sequence: Synthetic oligonucleotide
  Sense strand starting at position 3492 of SEQ ID NO: 1560827
cuguuugaaugcgugguaa

SEQ ID NO: 1627332 - RNA, 19 nt, Artificial Sequence
  Description of Artificial Sequence: Synthetic oligonucleotide
  Antisense strand to SEQ ID NO: 1627331
uuaccacgcauucaaacag

SEQ ID NO: 1627333 - RNA, 19 nt, Artificial Sequence
  Description of Artificial Sequence: Synthetic oligonucleotide
  Sense strand starting at position 3568 of SEQ ID NO: 1560827
gccacauaguaggcauuua

SEQ ID NO: 1627334 - RNA, 19 nt, Artificial Sequence
  Description of Artificial Sequence: Synthetic oligonucleotide
  Antisense strand to SEQ ID NO: 1627333
uaaaugccuacuauguggc

SEQ ID NO: 1627335 - RNA, 19 nt, Artificial Sequence
  Description of Artificial Sequence: Synthetic oligonucleotide
  Sense strand starting at position 3595 of SEQ ID NO: 1560827
cuacuaaugucgguggcaa

SEQ ID NO: 1627336 - RNA, 19 nt, Artificial Sequence
  Description of Artificial Sequence: Synthetic oligonucleotide
  Antisense strand to SEQ ID NO: 1627335
uugccaccgacauuaguag

SEQ ID NO: 1627337 - RNA, 19 nt, Artificial Sequence
  Description of Artificial Sequence: Synthetic oligonucleotide
  Sense strand starting at position 3596 of SEQ ID NO: 1560827
uacuaaugucgguggcaac

SEQ ID NO: 1627338 - RNA, 19 nt, Artificial Sequence
  Description of Artificial Sequence: Synthetic oligonucleotide
  Antisense strand to SEQ ID NO: 1627337
guugccaccgacauuagua

SEQ ID NO: 1627339 - RNA, 19 nt, Artificial Sequence
  Description of Artificial Sequence: Synthetic oligonucleotide
  Sense strand starting at position 3765 of SEQ ID NO: 1560827
gggauugcagucugaaacu

SEQ ID NO: 1627340 - RNA, 19 nt, Artificial Sequence
  Description of Artificial Sequence: Synthetic oligonucleotide
  Antisense strand to SEQ ID NO: 1627339
aguuucagacugcaauccc

SEQ ID NO: 1627341 - RNA, 19 nt, Artificial Sequence
  Description of Artificial Sequence: Synthetic oligonucleotide
  Sense strand starting at position 93 of SEQ ID NO: 1560828
gggagagagucguccucga

SEQ ID NO: 1627342 - RNA, 19 nt, Artificial Sequence
  Description of Artificial Sequence: Synthetic oligonucleotide
  Antisense strand to SEQ ID NO: 1627341
ucgaggacgacucucuccc

SEQ ID NO: 1627343 - RNA, 19 nt, Artificial Sequence
  Description of Artificial Sequence: Synthetic oligonucleotide
  Sense strand starting at position 377 of SEQ ID NO: 1560828
cccggaguguucgcugaca

SEQ ID NO: 1627344 - RNA, 19 nt, Artificial Sequence
  Description of Artificial Sequence: Synthetic oligonucleotide
  Antisense strand to SEQ ID NO: 1627343
ugucagcgaacacuccggg

SEQ ID NO: 1627345 - RNA, 19 nt, Artificial Sequence
  Description of Artificial Sequence: Synthetic oligonucleotide
  Sense strand starting at position 981 of SEQ ID NO: 1560828
ggaccgguguccgaaauga

SEQ ID NO: 1627346 - RNA, 19 nt, Artificial Sequence
  Description of Artificial Sequence: Synthetic oligonucleotide
  Antisense strand to SEQ ID NO: 1627345
ucauuucggacaccggucc

SEQ ID NO: 1627347 - RNA, 19 nt, Artificial Sequence
  Description of Artificial Sequence: Synthetic oligonucleotide
  Sense strand starting at position 2301 of SEQ ID NO: 1560828
ggccuuucucgagagccca

SEQ ID NO: 1627348 - RNA, 19 nt, Artificial Sequence
  Description of Artificial Sequence: Synthetic oligonucleotide
  Antisense strand to SEQ ID NO: 1627347
ugggcucucgagaaaggcc

SEQ ID NO: 1627349 - RNA, 19 nt, Artificial Sequence
  Description of Artificial Sequence: Synthetic oligonucleotide
  Sense strand starting at position 2436 of SEQ ID NO: 1560828
gccuccuuugccggaguau

SEQ ID NO: 1627350 - RNA, 19 nt, Artificial Sequence
  Description of Artificial Sequence: Synthetic oligonucleotide
  Antisense strand to SEQ ID NO: 1627349
auacuccggcaaaggaggc

SEQ ID NO: 1627351 - RNA, 19 nt, Artificial Sequence
  Description of Artificial Sequence: Synthetic oligonucleotide
  Sense strand starting at position 2665 of SEQ ID NO: 1560828
aggcuuuguccucagagca

SEQ ID NO: 1627352 - RNA, 19 nt, Artificial Sequence
  Description of Artificial Sequence: Synthetic oligonucleotide
  Antisense strand to SEQ ID NO: 1627351
ugcucugaggacaaagccu

SEQ ID NO: 1627353 - RNA, 19 nt, Artificial Sequence
  Description of Artificial Sequence: Synthetic oligonucleotide
  Sense strand starting at position 2751 of SEQ ID NO: 1560828
ccugguuucccgugagaac

SEQ ID NO: 1627354 - RNA, 19 nt, Artificial Sequence
  Description of Artificial Sequence: Synthetic oligonucleotide
  Antisense strand to SEQ ID NO: 1627353
guucucacgggaaaccagg

SEQ ID NO: 1627355 - RNA, 19 nt, Artificial Sequence
  Description of Artificial Sequence: Synthetic oligonucleotide
  Sense strand starting at position 2752 of SEQ ID NO: 1560828
cugguuucccgugagaaca

SEQ ID NO: 1627356 - RNA, 19 nt, Artificial Sequence
  Description of Artificial Sequence: Synthetic oligonucleotide
  Antisense strand to SEQ ID NO: 1627355
uguucucacgggaaaccag

SEQ ID NO: 1627357 - RNA, 19 nt, Artificial Sequence
  Description of Artificial Sequence: Synthetic oligonucleotide
  Sense strand starting at position 2916 of SEQ ID NO: 1560828
ccggaugagcuguggagaa

SEQ ID NO: 1627358 - RNA, 19 nt, Artificial Sequence
  Description of Artificial Sequence: Synthetic oligonucleotide
  Antisense strand to SEQ ID NO: 1627357
uucuccacagcucauccgg

SEQ ID NO: 1627359 - RNA, 19 nt, Artificial Sequence
  Description of Artificial Sequence: Synthetic oligonucleotide
  Sense strand starting at position 3099 of SEQ ID NO: 1560828
cugucugauucccagcuca

SEQ ID NO: 1627360 - RNA, 19 nt, Artificial Sequence
  Description of Artificial Sequence: Synthetic oligonucleotide
  Antisense strand to SEQ ID NO: 1627359
ugagcugggaaucagacag

SEQ ID NO: 1627361 - RNA, 19 nt, Artificial Sequence
  Description of Artificial Sequence: Synthetic oligonucleotide
  Sense strand starting at position 3409 of SEQ ID NO: 1560828
auggcucugugcccauaaa

SEQ ID NO: 1627362 - RNA, 19 nt, Artificial Sequence
  Description of Artificial Sequence: Synthetic oligonucleotide
  Antisense strand to SEQ ID NO: 1627361
uuuaugggcacagagccau

SEQ ID NO: 1627363 - RNA, 19 nt, Artificial Sequence
  Description of Artificial Sequence: Synthetic oligonucleotide
  Sense strand starting at position 3602 of SEQ ID NO: 1560828
gugagucguuucuucacuu

SEQ ID NO: 1627364 - RNA, 19 nt, Artificial Sequence
  Description of Artificial Sequence: Synthetic oligonucleotide
  Antisense strand to SEQ ID NO: 1627363
aagugaagaaacgacucac

SEQ ID NO: 1627365 - RNA, 19 nt, Artificial Sequence
  Description of Artificial Sequence: Synthetic oligonucleotide
  Sense strand starting at position 3683 of SEQ ID NO: 1560828
caccguuagucaccuguga

SEQ ID NO: 1627366 - RNA, 19 nt, Artificial Sequence
  Description of Artificial Sequence: Synthetic oligonucleotide
  Antisense strand to SEQ ID NO: 1627365
ucacaggugacuaacggug

SEQ ID NO: 1627367 - RNA, 19 nt, Artificial Sequence
  Description of Artificial Sequence: Synthetic oligonucleotide
  Sense strand starting at position 3685 of SEQ ID NO: 1560828
ccguuagucaccugugaug

SEQ ID NO: 1627368 - RNA, 19 nt, Artificial Sequence
  Description of Artificial Sequence: Synthetic oligonucleotide
  Antisense strand to SEQ ID NO: 1627367
caucacaggugacuaacgg

SEQ ID NO: 1627369 - RNA, 19 nt, Artificial Sequence
  Description of Artificial Sequence: Synthetic oligonucleotide
  Sense strand starting at position 3687 of SEQ ID NO: 1560828
guuagucaccugugaugca

SEQ ID NO: 1627370 - RNA, 19 nt, Artificial Sequence
  Description of Artificial Sequence: Synthetic oligonucleotide
  Antisense strand to SEQ ID NO: 1627369
ugcaucacaggugacuaac

SEQ ID NO: 1627371 - RNA, 19 nt, Artificial Sequence
  Description of Artificial Sequence: Synthetic oligonucleotide
  Sense strand starting at position 3690 of SEQ ID NO: 1560828
agucaccugugaugcagaa

SEQ ID NO: 1627372 - RNA, 19 nt, Artificial Sequence
  Description of Artificial Sequence: Synthetic oligonucleotide
  Antisense strand to SEQ ID NO: 1627371
uucugcaucacaggugacu

SEQ ID NO: 1627373 - RNA, 19 nt, Artificial Sequence
  Description of Artificial Sequence: Synthetic oligonucleotide
  Sense strand starting at position 3692 of SEQ ID NO: 1560828
ucaccugugaugcagaagu

SEQ ID NO: 1627374 - RNA, 19 nt, Artificial Sequence
  Description of Artificial Sequence: Synthetic oligonucleotide
  Antisense strand to SEQ ID NO: 1627373
acuucugcaucacagguga

SEQ ID NO: 1627375 - RNA, 19 nt, Artificial Sequence
  Description of Artificial Sequence: Synthetic oligonucleotide
  Sense strand starting at position 208 of SEQ ID NO: 1560829
cggaguuucuccuccucca

SEQ ID NO: 1627376 - RNA, 19 nt, Artificial Sequence
  Description of Artificial Sequence: Synthetic oligonucleotide
  Antisense strand to SEQ ID NO: 1627375
uggaggaggagaaacuccg

SEQ ID NO: 1627377 - RNA, 19 nt, Artificial Sequence
  Description of Artificial Sequence: Synthetic oligonucleotide
  Sense strand starting at position 628 of SEQ ID NO: 1560829
auacgagguuaagagaaau

SEQ ID NO: 1627378 - RNA, 19 nt, Artificial Sequence
  Description of Artificial Sequence: Synthetic oligonucleotide
  Antisense strand to SEQ ID NO: 1627377
auuucucuuaaccucguau

SEQ ID NO: 1627379 - RNA, 19 nt, Artificial Sequence
  Description of Artificial Sequence: Synthetic oligonucleotide
  Sense strand starting at position 1018 of SEQ ID NO: 1560829
cccagaguaauggagugua

SEQ ID NO: 1627380 - RNA, 19 nt, Artificial Sequence
  Description of Artificial Sequence: Synthetic oligonucleotide
  Antisense strand to SEQ ID NO: 1627379
uacacuccauuacucuggg

SEQ ID NO: 1627381 - RNA, 19 nt, Artificial Sequence
  Description of Artificial Sequence: Synthetic oligonucleotide
  Sense strand starting at position 1021 of SEQ ID NO: 1560829
agaguaauggaguguagac

SEQ ID NO: 1627382 - RNA, 19 nt, Artificial Sequence
  Description of Artificial Sequence: Synthetic oligonucleotide
  Antisense strand to SEQ ID NO: 1627381
gucuacacuccauuacucu

SEQ ID NO: 1627383 - RNA, 19 nt, Artificial Sequence
  Description of Artificial Sequence: Synthetic oligonucleotide
  Sense strand starting at position 1023 of SEQ ID NO: 1560829
aguaauggaguguagacau

SEQ ID NO: 1627384 - RNA, 19 nt, Artificial Sequence
  Description of Artificial Sequence: Synthetic oligonucleotide
  Antisense strand to SEQ ID NO: 1627383
augucuacacuccauuacu

SEQ ID NO: 1627385 - RNA, 19 nt, Artificial Sequence
  Description of Artificial Sequence: Synthetic oligonucleotide
  Sense strand starting at position 1030 of SEQ ID NO: 1560829
gaguguagacauggaaucu

SEQ ID NO: 1627386 - RNA, 19 nt, Artificial Sequence
  Description of Artificial Sequence: Synthetic oligonucleotide
  Antisense strand to SEQ ID NO: 1627385
agauuccaugucuacacuc

SEQ ID NO: 1627387 - RNA, 19 nt, Artificial Sequence
  Description of Artificial Sequence: Synthetic oligonucleotide
  Sense strand starting at position 1146 of SEQ ID NO: 1560829
uauagaaguugagugcgaa

SEQ ID NO: 1627388 - RNA, 19 nt, Artificial Sequence
  Description of Artificial Sequence: Synthetic oligonucleotide
  Antisense strand to SEQ ID NO: 1627387
uucgcacucaacuucuaua

SEQ ID NO: 1627389 - RNA, 19 nt, Artificial Sequence
  Description of Artificial Sequence: Synthetic oligonucleotide
  Sense strand starting at position 1325 of SEQ ID NO: 1560829
gaggaugcuagugaguagu

SEQ ID NO: 1627390 - RNA, 19 nt, Artificial Sequence
  Description of Artificial Sequence: Synthetic oligonucleotide
  Antisense strand to SEQ ID NO: 1627389
acuacucacuagcauccuc

SEQ ID NO: 1627391 - RNA, 19 nt, Artificial Sequence
  Description of Artificial Sequence: Synthetic oligonucleotide
  Sense strand starting at position 1327 of SEQ ID NO: 1560829
ggaugcuagugaguaguga

SEQ ID NO: 1627392 - RNA, 19 nt, Artificial Sequence
  Description of Artificial Sequence: Synthetic oligonucleotide
  Antisense strand to SEQ ID NO: 1627391
ucacuacucacuagcaucc

SEQ ID NO: 1627393 - RNA, 19 nt, Artificial Sequence
  Description of Artificial Sequence: Synthetic oligonucleotide
  Sense strand starting at position 1336 of SEQ ID NO: 1560829
ugaguagugagaugggagu

SEQ ID NO: 1627394 - RNA, 19 nt, Artificial Sequence
  Description of Artificial Sequence: Synthetic oligonucleotide
  Antisense strand to SEQ ID NO: 1627393
acucccaucucacuacuca

SEQ ID NO: 1627395 - RNA, 19 nt, Artificial Sequence
  Description of Artificial Sequence: Synthetic oligonucleotide
  Sense strand starting at position 1371 of SEQ ID NO: 1560829
gagauacugagguguagag

SEQ ID NO: 1627396 - RNA, 19 nt, Artificial Sequence
  Description of Artificial Sequence: Synthetic oligonucleotide
  Antisense strand to SEQ ID NO: 1627395
cucuacaccucaguaucuc

SEQ ID NO: 1627397 - RNA, 19 nt, Artificial Sequence
  Description of Artificial Sequence: Synthetic oligonucleotide
  Sense strand starting at position 1532 of SEQ ID NO: 1560829
auaggaucagagugguaga

SEQ ID NO: 1627398 - RNA, 19 nt, Artificial Sequence
  Description of Artificial Sequence: Synthetic oligonucleotide
  Antisense strand to SEQ ID NO: 1627397
ucuaccacucugauccuau

SEQ ID NO: 1627399 - RNA, 19 nt, Artificial Sequence
  Description of Artificial Sequence: Synthetic oligonucleotide
  Sense strand starting at position 1592 of SEQ ID NO: 1560829
gaugaaaguucccaaggaa

SEQ ID NO: 1627400 - RNA, 19 nt, Artificial Sequence
  Description of Artificial Sequence: Synthetic oligonucleotide
  Antisense strand to SEQ ID NO: 1627399
uuccuugggaacuuucauc

SEQ ID NO: 1627401 - RNA, 19 nt, Artificial Sequence
  Description of Artificial Sequence: Synthetic oligonucleotide
  Sense strand starting at position 1646 of SEQ ID NO: 1560829
uugagagauagcggucuga

SEQ ID NO: 1627402 - RNA, 19 nt, Artificial Sequence
  Description of Artificial Sequence: Synthetic oligonucleotide
  Antisense strand to SEQ ID NO: 1627401
ucagaccgcuaucucucaa

SEQ ID NO: 1627403 - RNA, 19 nt, Artificial Sequence
  Description of Artificial Sequence: Synthetic oligonucleotide
  Sense strand starting at position 1650 of SEQ ID NO: 1560829
gagauagcggucugauaaa

SEQ ID NO: 1627404 - RNA, 19 nt, Artificial Sequence
  Description of Artificial Sequence: Synthetic oligonucleotide
  Antisense strand to SEQ ID NO: 1627403
uuuaucagaccgcuaucuc

SEQ ID NO: 1627405 - RNA, 19 nt, Artificial Sequence
  Description of Artificial Sequence: Synthetic oligonucleotide
  Sense strand starting at position 1867 of SEQ ID NO: 1560829
ggcgcucuccgcagagaug

SEQ ID NO: 1627406 - RNA, 19 nt, Artificial Sequence
  Description of Artificial Sequence: Synthetic oligonucleotide
  Antisense strand to SEQ ID NO: 1627405
caucucugcggagagcgcc

SEQ ID NO: 1627407 - RNA, 19 nt, Artificial Sequence
  Description of Artificial Sequence: Synthetic oligonucleotide
  Sense strand starting at position 1902 of SEQ ID NO: 1560829
ggagcaugguggaaaguuu

SEQ ID NO: 1627408 - RNA, 19 nt, Artificial Sequence
  Description of Artificial Sequence: Synthetic oligonucleotide
  Antisense strand to SEQ ID NO: 1627407
aaacuuuccaccaugcucc

SEQ ID NO: 1627409 - RNA, 19 nt, Artificial Sequence
  Description of Artificial Sequence: Synthetic oligonucleotide
  Sense strand starting at position 1947 of SEQ ID NO: 1560829
gucacuuacagcgaugacu

SEQ ID NO: 1627410 - RNA, 19 nt, Artificial Sequence
  Description of Artificial Sequence: Synthetic oligonucleotide
  Antisense strand to SEQ ID NO: 1627409
agucaucgcuguaagugac

SEQ ID NO: 1627411 - RNA, 19 nt, Artificial Sequence
  Description of Artificial Sequence: Synthetic oligonucleotide
  Sense strand starting at position 2063 of SEQ ID NO: 1560829
caagaucccugagcaguau

SEQ ID NO: 1627412 - RNA, 19 nt, Artificial Sequence
  Description of Artificial Sequence: Synthetic oligonucleotide
  Antisense strand to SEQ ID NO: 1627411
auacugcucagggaucuug

SEQ ID NO: 1627413 - RNA, 19 nt, Artificial Sequence
  Description of Artificial Sequence: Synthetic oligonucleotide
  Sense strand starting at position 2067 of SEQ ID NO: 1560829
aucccugagcaguauggaa

SEQ ID NO: 1627414 - RNA, 19 nt, Artificial Sequence
  Description of Artificial Sequence: Synthetic oligonucleotide
  Antisense strand to SEQ ID NO: 1627413
uuccauacugcucagggau

SEQ ID NO: 1627415 - RNA, 19 nt, Artificial Sequence
  Description of Artificial Sequence: Synthetic oligonucleotide
  Sense strand starting at position 2069 of SEQ ID NO: 1560829
cccugagcaguauggaaau

SEQ ID NO: 1627416 - RNA, 19 nt, Artificial Sequence
  Description of Artificial Sequence: Synthetic oligonucleotide
  Antisense strand to SEQ ID NO: 1627415
auuuccauacugcucaggg

SEQ ID NO: 1627417 - RNA, 19 nt, Artificial Sequence
  Description of Artificial Sequence: Synthetic oligonucleotide
  Sense strand starting at position 2366 of SEQ ID NO: 1560829
agucccauuguuuaugaau

SEQ ID NO: 1627418 - RNA, 19 nt, Artificial Sequence
  Description of Artificial Sequence: Synthetic oligonucleotide
  Antisense strand to SEQ ID NO: 1627417
auucauaaacaaugggacu

SEQ ID NO: 1627419 - RNA, 19 nt, Artificial Sequence
  Description of Artificial Sequence: Synthetic oligonucleotide
  Sense strand starting at position 2656 of SEQ ID NO: 1560829
caaggaucacugggucacu

SEQ ID NO: 1627420 - RNA, 19 nt, Artificial Sequence
  Description of Artificial Sequence: Synthetic oligonucleotide
  Antisense strand to SEQ ID NO: 1627419
agugacccagugauccuug

SEQ ID NO: 1627421 - RNA, 19 nt, Artificial Sequence
  Description of Artificial Sequence: Synthetic oligonucleotide
  Sense strand starting at position 2722 of SEQ ID NO: 1560829
aagguuuaacucgagauuc

SEQ ID NO: 1627422 - RNA, 19 nt, Artificial Sequence
  Description of Artificial Sequence: Synthetic oligonucleotide
  Antisense strand to SEQ ID NO: 1627421
gaaucucgaguuaaaccuu

SEQ ID NO: 1627423 - RNA, 19 nt, Artificial Sequence
  Description of Artificial Sequence: Synthetic oligonucleotide
  Sense strand starting at position 2743 of SEQ ID NO: 1560829
cugucauugucuuccucaa

SEQ ID NO: 1627424 - RNA, 19 nt, Artificial Sequence
  Description of Artificial Sequence: Synthetic oligonucleotide
  Antisense strand to SEQ ID NO: 1627423
uugaggaagacaaugacag

SEQ ID NO: 1627425 - RNA, 19 nt, Artificial Sequence
  Description of Artificial Sequence: Synthetic oligonucleotide
  Sense strand starting at position 2834 of SEQ ID NO: 1560829
ugucauacugcaggaugau

SEQ ID NO: 1627426 - RNA, 19 nt, Artificial Sequence
  Description of Artificial Sequence: Synthetic oligonucleotide
  Antisense strand to SEQ ID NO: 1627425
aucauccugcaguaugaca

SEQ ID NO: 1627427 - RNA, 19 nt, Artificial Sequence
  Description of Artificial Sequence: Synthetic oligonucleotide
  Sense strand starting at position 2835 of SEQ ID NO: 1560829
gucauacugcaggaugauu

SEQ ID NO: 1627428 - RNA, 19 nt, Artificial Sequence
  Description of Artificial Sequence: Synthetic oligonucleotide
  Antisense strand to SEQ ID NO: 1627427
aaucauccugcaguaugac

SEQ ID NO: 1627429 - RNA, 19 nt, Artificial Sequence
  Description of Artificial Sequence: Synthetic oligonucleotide
  Sense strand starting at position 2949 of SEQ ID NO: 1560829
ucuagaaagcgaugucucu

SEQ ID NO: 1627430 - RNA, 19 nt, Artificial Sequence
  Description of Artificial Sequence: Synthetic oligonucleotide
  Antisense strand to SEQ ID NO: 1627429
agagacaucgcuuucuaga

SEQ ID NO: 1627431 - RNA, 19 nt, Artificial Sequence
  Description of Artificial Sequence: Synthetic oligonucleotide
  Sense strand starting at position 3160 of SEQ ID NO: 1560829
agcauauaguguucuaagu

SEQ ID NO: 1627432 - RNA, 19 nt, Artificial Sequence
  Description of Artificial Sequence: Synthetic oligonucleotide
  Antisense strand to SEQ ID NO: 1627431
acuuagaacacuauaugcu

SEQ ID NO: 1627433 - RNA, 19 nt, Artificial Sequence
  Description of Artificial Sequence: Synthetic oligonucleotide
  Sense strand starting at position 3251 of SEQ ID NO: 1560829
ggagucaacucuuugcuga

SEQ ID NO: 1627434 - RNA, 19 nt, Artificial Sequence
  Description of Artificial Sequence: Synthetic oligonucleotide
  Antisense strand to SEQ ID NO: 1627433
ucagcaaagaguugacucc

SEQ ID NO: 1627435 - RNA, 19 nt, Artificial Sequence
  Description of Artificial Sequence: Synthetic oligonucleotide
  Sense strand starting at position 3252 of SEQ ID NO: 1560829
gagucaacucuuugcugag

SEQ ID NO: 1627436 - RNA, 19 nt, Artificial Sequence
  Description of Artificial Sequence: Synthetic oligonucleotide
  Antisense strand to SEQ ID NO: 1627435
cucagcaaagaguugacuc

SEQ ID NO: 1627437 - RNA, 19 nt, Artificial Sequence
  Description of Artificial Sequence: Synthetic oligonucleotide
  Sense strand starting at position 3253 of SEQ ID NO: 1560829
agucaacucuuugcugagu

SEQ ID NO: 1627438 - RNA, 19 nt, Artificial Sequence
  Description of Artificial Sequence: Synthetic oligonucleotide
  Antisense strand to SEQ ID NO: 1627437
acucagcaaagaguugacu

SEQ ID NO: 1627439 - RNA, 19 nt, Artificial Sequence
  Description of Artificial Sequence: Synthetic oligonucleotide
  Sense strand starting at position 3256 of SEQ ID NO: 1560829
caacucuuugcugaguuga

SEQ ID NO: 1627440 - RNA, 19 nt, Artificial Sequence
  Description of Artificial Sequence: Synthetic oligonucleotide
  Antisense strand to SEQ ID NO: 1627439
ucaacucagcaaagaguug

SEQ ID NO: 1627441 - RNA, 19 nt, Artificial Sequence
  Description of Artificial Sequence: Synthetic oligonucleotide
  Sense strand starting at position 3258 of SEQ ID NO: 1560829
acucuuugcugaguugaca

SEQ ID NO: 1627442 - RNA, 19 nt, Artificial Sequence
  Description of Artificial Sequence: Synthetic oligonucleotide
  Antisense strand to SEQ ID NO: 1627441
ugucaacucagcaaagagu

SEQ ID NO: 1627443 - RNA, 19 nt, Artificial Sequence
  Description of Artificial Sequence: Synthetic oligonucleotide
  Sense strand starting at position 3370 of SEQ ID NO: 1560829
agguaagcuauaugaaugu

SEQ ID NO: 1627444 - RNA, 19 nt, Artificial Sequence
  Description of Artificial Sequence: Synthetic oligonucleotide
  Antisense strand to SEQ ID NO: 1627443
acauucauauagcuuaccu

SEQ ID NO: 1627445 - RNA, 19 nt, Artificial Sequence
  Description of Artificial Sequence: Synthetic oligonucleotide
  Sense strand starting at position 3377 of SEQ ID NO: 1560829
cuauaugaauguguccauu

SEQ ID NO: 1627446 - RNA, 19 nt, Artificial Sequence
  Description of Artificial Sequence: Synthetic oligonucleotide
  Antisense strand to SEQ ID NO: 1627445
aauggacacauucauauag

SEQ ID NO: 1627447 - RNA, 19 nt, Artificial Sequence
  Description of Artificial Sequence: Synthetic oligonucleotide
  Sense strand starting at position 3904 of SEQ ID NO: 1560829
gaagucaugcuuugcaaga

SEQ ID NO: 1627448 - RNA, 19 nt, Artificial Sequence
  Description of Artificial Sequence: Synthetic oligonucleotide
  Antisense strand to SEQ ID NO: 1627447
ucuugcaaagcaugacuuc

SEQ ID NO: 1627449 - RNA, 19 nt, Artificial Sequence
  Description of Artificial Sequence: Synthetic oligonucleotide
  Sense strand starting at position 3905 of SEQ ID NO: 1560829
aagucaugcuuugcaagau

SEQ ID NO: 1627450 - RNA, 19 nt, Artificial Sequence
  Description of Artificial Sequence: Synthetic oligonucleotide
  Antisense strand to SEQ ID NO: 1627449
aucuugcaaagcaugacuu

SEQ ID NO: 1627451 - RNA, 19 nt, Artificial Sequence
  Description of Artificial Sequence: Synthetic oligonucleotide
  Sense strand starting at position 3937 of SEQ ID NO: 1560829
cccagauucugugcuuaua

SEQ ID NO: 1627452 - RNA, 19 nt, Artificial Sequence
  Description of Artificial Sequence: Synthetic oligonucleotide
  Antisense strand to SEQ ID NO: 1627451
uauaagcacagaaucuggg

SEQ ID NO: 1627453 - RNA, 19 nt, Artificial Sequence
  Description of Artificial Sequence: Synthetic oligonucleotide
  Sense strand starting at position 3940 of SEQ ID NO: 1560829
agauucugugcuuauaggu

SEQ ID NO: 1627454 - RNA, 19 nt, Artificial Sequence
  Description of Artificial Sequence: Synthetic oligonucleotide
  Antisense strand to SEQ ID NO: 1627453
accuauaagcacagaaucu

SEQ ID NO: 1627455 - RNA, 19 nt, Artificial Sequence
  Description of Artificial Sequence: Synthetic oligonucleotide
  Sense strand starting at position 11 of SEQ ID NO: 1560830
gaguguaguggccaaucau

SEQ ID NO: 1627456 - RNA, 19 nt, Artificial Sequence
  Description of Artificial Sequence: Synthetic oligonucleotide
  Antisense strand to SEQ ID NO: 1627455
augauuggccacuacacuc

SEQ ID NO: 1627457 - RNA, 19 nt, Artificial Sequence
  Description of Artificial Sequence: Synthetic oligonucleotide
  Sense strand starting at position 304 of SEQ ID NO: 1560830
ucaccaugagguuguacua

SEQ ID NO: 1627458 - RNA, 19 nt, Artificial Sequence
  Description of Artificial Sequence: Synthetic oligonucleotide
  Antisense strand to SEQ ID NO: 1627457
uaguacaaccucaugguga

SEQ ID NO: 1627459 - RNA, 19 nt, Artificial Sequence
  Description of Artificial Sequence: Synthetic oligonucleotide
  Sense strand starting at position 472 of SEQ ID NO: 1560830
guggaaggauccuaaucaa

SEQ ID NO: 1627460 - RNA, 19 nt, Artificial Sequence
  Description of Artificial Sequence: Synthetic oligonucleotide
  Antisense strand to SEQ ID NO: 1627459
uugauuaggauccuuccac

SEQ ID NO: 1627461 - RNA, 19 nt, Artificial Sequence
  Description of Artificial Sequence: Synthetic oligonucleotide
  Sense strand starting at position 715 of SEQ ID NO: 1560830
ggcugagcaccaugaucau

SEQ ID NO: 1627462 - RNA, 19 nt, Artificial Sequence
  Description of Artificial Sequence: Synthetic oligonucleotide
  Antisense strand to SEQ ID NO: 1627461
augaucauggugcucagcc

SEQ ID NO: 1627463 - RNA, 19 nt, Artificial Sequence
  Description of Artificial Sequence: Synthetic oligonucleotide
  Sense strand starting at position 766 of SEQ ID NO: 1560830
cuuccuauuccacagaggu

SEQ ID NO: 1627464 - RNA, 19 nt, Artificial Sequence
  Description of Artificial Sequence: Synthetic oligonucleotide
  Antisense strand to SEQ ID NO: 1627463
accucuguggaauaggaag

SEQ ID NO: 1627465 - RNA, 19 nt, Artificial Sequence
  Description of Artificial Sequence: Synthetic oligonucleotide
  Sense strand starting at position 905 of SEQ ID NO: 1560830
gggacacuuaccuggguaa

SEQ ID NO: 1627466 - RNA, 19 nt, Artificial Sequence
  Description of Artificial Sequence: Synthetic oligonucleotide
  Antisense strand to SEQ ID NO: 1627465
uuacccagguaaguguccc

SEQ ID NO: 1627467 - RNA, 19 nt, Artificial Sequence
  Description of Artificial Sequence: Synthetic oligonucleotide
  Sense strand starting at position 907 of SEQ ID NO: 1560830
gacacuuaccuggguaaga

SEQ ID NO: 1627468 - RNA, 19 nt, Artificial Sequence
  Description of Artificial Sequence: Synthetic oligonucleotide
  Antisense strand to SEQ ID NO: 1627467
ucuuacccagguaaguguc

SEQ ID NO: 1627469 - RNA, 19 nt, Artificial Sequence
  Description of Artificial Sequence: Synthetic oligonucleotide
  Sense strand starting at position 1285 of SEQ ID NO: 1560830
gugccaaccgcuugacaua

SEQ ID NO: 1627470 - RNA, 19 nt, Artificial Sequence
  Description of Artificial Sequence: Synthetic oligonucleotide
  Antisense strand to SEQ ID NO: 1627469
uaugucaagcgguuggcac

SEQ ID NO: 1627471 - RNA, 19 nt, Artificial Sequence
  Description of Artificial Sequence: Synthetic oligonucleotide
  Sense strand starting at position 1322 of SEQ ID NO: 1560830
ucacgacauugcuaugaag

SEQ ID NO: 1627472 - RNA, 19 nt, Artificial Sequence
  Description of Artificial Sequence: Synthetic oligonucleotide
  Antisense strand to SEQ ID NO: 1627471
cuucauagcaaugucguga

SEQ ID NO: 1627473 - RNA, 19 nt, Artificial Sequence
  Description of Artificial Sequence: Synthetic oligonucleotide
  Sense strand starting at position 1324 of SEQ ID NO: 1560830
acgacauugcuaugaagug

SEQ ID NO: 1627474 - RNA, 19 nt, Artificial Sequence
  Description of Artificial Sequence: Synthetic oligonucleotide
  Antisense strand to SEQ ID NO: 1627473
cacuucauagcaaugucgu

SEQ ID NO: 1627475 - RNA, 19 nt, Artificial Sequence
  Description of Artificial Sequence: Synthetic oligonucleotide
  Sense strand starting at position 1345 of SEQ ID NO: 1560830
ggcugugagcauugucauc

SEQ ID NO: 1627476 - RNA, 19 nt, Artificial Sequence
  Description of Artificial Sequence: Synthetic oligonucleotide
  Antisense strand to SEQ ID NO: 1627475
gaugacaaugcucacagcc

SEQ ID NO: 1627477 - RNA, 19 nt, Artificial Sequence
  Description of Artificial Sequence: Synthetic oligonucleotide
  Sense strand starting at position 1386 of SEQ ID NO: 1560830
cgagcagcugagugauuca

SEQ ID NO: 1627478 - RNA, 19 nt, Artificial Sequence
  Description of Artificial Sequence: Synthetic oligonucleotide
  Antisense strand to SEQ ID NO: 1627477
ugaaucacucagcugcucg

SEQ ID NO: 1627479 - RNA, 19 nt, Artificial Sequence
  Description of Artificial Sequence: Synthetic oligonucleotide
  Sense strand starting at position 2488 of SEQ ID NO: 1560830
gugcgaccuaggugaguua

SEQ ID NO: 1627480 - RNA, 19 nt, Artificial Sequence
  Description of Artificial Sequence: Synthetic oligonucleotide
  Antisense strand to SEQ ID NO: 1627479
uaacucaccuaggucgcac

SEQ ID NO: 1627481 - RNA, 19 nt, Artificial Sequence
  Description of Artificial Sequence: Synthetic oligonucleotide
  Sense strand starting at position 2547 of SEQ ID NO: 1560830
ggaggugaugcucguauau

SEQ ID NO: 1627482 - RNA, 19 nt, Artificial Sequence
  Description of Artificial Sequence: Synthetic oligonucleotide
  Antisense strand to SEQ ID NO: 1627481
auauacgagcaucaccucc

SEQ ID NO: 1627483 - RNA, 19 nt, Artificial Sequence
  Description of Artificial Sequence: Synthetic oligonucleotide
  Sense strand starting at position 2586 of SEQ ID NO: 1560830
gaguaaacgaguugcugca

SEQ ID NO: 1627484 - RNA, 19 nt, Artificial Sequence
  Description of Artificial Sequence: Synthetic oligonucleotide
  Antisense strand to SEQ ID NO: 1627483
ugcagcaacucguuuacuc

SEQ ID NO: 1627485 - RNA, 19 nt, Artificial Sequence
  Description of Artificial Sequence: Synthetic oligonucleotide
  Sense strand starting at position 2593 of SEQ ID NO: 1560830
cgaguugcugcaugaaauu

SEQ ID NO: 1627486 - RNA, 19 nt, Artificial Sequence
  Description of Artificial Sequence: Synthetic oligonucleotide
  Antisense strand to SEQ ID NO: 1627485
aauuucaugcagcaacucg

SEQ ID NO: 1627487 - RNA, 19 nt, Artificial Sequence
  Description of Artificial Sequence: Synthetic oligonucleotide
  Sense strand starting at position 2636 of SEQ ID NO: 1560830
cagaguaagggcuggauaa

SEQ ID NO: 1627488 - RNA, 19 nt, Artificial Sequence
  Description of Artificial Sequence: Synthetic oligonucleotide
  Antisense strand to SEQ ID NO: 1627487
uuauccagcccuuacucug

SEQ ID NO: 1627489 - RNA, 19 nt, Artificial Sequence
  Description of Artificial Sequence: Synthetic oligonucleotide
  Sense strand starting at position 2649 of SEQ ID NO: 1560830
ggauaagaaucagcuguuc

SEQ ID NO: 1627490 - RNA, 19 nt, Artificial Sequence
  Description of Artificial Sequence: Synthetic oligonucleotide
  Antisense strand to SEQ ID NO: 1627489
gaacagcugauucuuaucc

SEQ ID NO: 1627491 - RNA, 19 nt, Artificial Sequence
  Description of Artificial Sequence: Synthetic oligonucleotide
  Sense strand starting at position 2743 of SEQ ID NO: 1560830
uugcaaucuguuugaacgu

SEQ ID NO: 1627492 - RNA, 19 nt, Artificial Sequence
  Description of Artificial Sequence: Synthetic oligonucleotide
  Antisense strand to SEQ ID NO: 1627491
acguucaaacagauugcaa

SEQ ID NO: 1627493 - RNA, 19 nt, Artificial Sequence
  Description of Artificial Sequence: Synthetic oligonucleotide
  Sense strand starting at position 2859 of SEQ ID NO: 1560830
accacuuggcuuuguaaau

SEQ ID NO: 1627494 - RNA, 19 nt, Artificial Sequence
  Description of Artificial Sequence: Synthetic oligonucleotide
  Antisense strand to SEQ ID NO: 1627493
auuuacaaagccaaguggu

SEQ ID NO: 1627495 - RNA, 19 nt, Artificial Sequence
  Description of Artificial Sequence: Synthetic oligonucleotide
  Sense strand starting at position 2860 of SEQ ID NO: 1560830
ccacuuggcuuuguaaauu

SEQ ID NO: 1627496 - RNA, 19 nt, Artificial Sequence
  Description of Artificial Sequence: Synthetic oligonucleotide
  Antisense strand to SEQ ID NO: 1627495
aauuuacaaagccaagugg

SEQ ID NO: 1627497 - RNA, 19 nt, Artificial Sequence
  Description of Artificial Sequence: Synthetic oligonucleotide
  Sense strand starting at position 2890 of SEQ ID NO: 1560830
ggcuucuacugauugugga

SEQ ID NO: 1627498 - RNA, 19 nt, Artificial Sequence
  Description of Artificial Sequence: Synthetic oligonucleotide
  Antisense strand to SEQ ID NO: 1627497
uccacaaucaguagaagcc

SEQ ID NO: 1627499 - RNA, 19 nt, Artificial Sequence
  Description of Artificial Sequence: Synthetic oligonucleotide
  Sense strand starting at position 2927 of SEQ ID NO: 1560830
gcacuaggagugugggaaa

SEQ ID NO: 1627500 - RNA, 19 nt, Artificial Sequence
  Description of Artificial Sequence: Synthetic oligonucleotide
  Antisense strand to SEQ ID NO: 1627499
uuucccacacuccuagugc

SEQ ID NO: 1627501 - RNA, 19 nt, Artificial Sequence
  Description of Artificial Sequence: Synthetic oligonucleotide
  Sense strand starting at position 2955 of SEQ ID NO: 1560830
agcccuuugcacuguuuga

SEQ ID NO: 1627502 - RNA, 19 nt, Artificial Sequence
  Description of Artificial Sequence: Synthetic oligonucleotide
  Antisense strand to SEQ ID NO: 1627501
ucaaacagugcaaagggcu

SEQ ID NO: 1627503 - RNA, 19 nt, Artificial Sequence
  Description of Artificial Sequence: Synthetic oligonucleotide
  Sense strand starting at position 2959 of SEQ ID NO: 1560830
cuuugcacuguuugaguuu

SEQ ID NO: 1627504 - RNA, 19 nt, Artificial Sequence
  Description of Artificial Sequence: Synthetic oligonucleotide
  Antisense strand to SEQ ID NO: 1627503
aaacucaaacagugcaaag

SEQ ID NO: 1627505 - RNA, 19 nt, Artificial Sequence
  Description of Artificial Sequence: Synthetic oligonucleotide
  Sense strand starting at position 3096 of SEQ ID NO: 1560830
uauucuuaguucguccaga

SEQ ID NO: 1627506 - RNA, 19 nt, Artificial Sequence
  Description of Artificial Sequence: Synthetic oligonucleotide
  Antisense strand to SEQ ID NO: 1627505
ucuggacgaacuaagaaua

SEQ ID NO: 1627507 - RNA, 19 nt, Artificial Sequence
  Description of Artificial Sequence: Synthetic oligonucleotide
  Sense strand starting at position 3097 of SEQ ID NO: 1560830
auucuuaguucguccagaa

SEQ ID NO: 1627508 - RNA, 19 nt, Artificial Sequence
  Description of Artificial Sequence: Synthetic oligonucleotide
  Antisense strand to SEQ ID NO: 1627507
uucuggacgaacuaagaau

SEQ ID NO: 1627509 - RNA, 19 nt, Artificial Sequence
  Description of Artificial Sequence: Synthetic oligonucleotide
  Sense strand starting at position 3140 of SEQ ID NO: 1560830
gcuaaagaugccuauggca

SEQ ID NO: 1627510 - RNA, 19 nt, Artificial Sequence
  Description of Artificial Sequence: Synthetic oligonucleotide
  Antisense strand to SEQ ID NO: 1627509
ugccauaggcaucuuuagc

SEQ ID NO: 1627511 - RNA, 19 nt, Artificial Sequence
  Description of Artificial Sequence: Synthetic oligonucleotide
  Sense strand starting at position 3142 of SEQ ID NO: 1560830
uaaagaugccuauggcaag

SEQ ID NO: 1627512 - RNA, 19 nt, Artificial Sequence
  Description of Artificial Sequence: Synthetic oligonucleotide
  Antisense strand to SEQ ID NO: 1627511
cuugccauaggcaucuuua

SEQ ID NO: 1627513 - RNA, 19 nt, Artificial Sequence
  Description of Artificial Sequence: Synthetic oligonucleotide
  Sense strand starting at position 3178 of SEQ ID NO: 1560830
aggaucaugucguuacaug

SEQ ID NO: 1627514 - RNA, 19 nt, Artificial Sequence
  Description of Artificial Sequence: Synthetic oligonucleotide
  Antisense strand to SEQ ID NO: 1627513
cauguaacgacaugauccu

SEQ ID NO: 1627515 - RNA, 19 nt, Artificial Sequence
  Description of Artificial Sequence: Synthetic oligonucleotide
  Sense strand starting at position 3187 of SEQ ID NO: 1560830
ucguuacaugcauaauaua

SEQ ID NO: 1627516 - RNA, 19 nt, Artificial Sequence
  Description of Artificial Sequence: Synthetic oligonucleotide
  Antisense strand to SEQ ID NO: 1627515
uauauuaugcauguaacga

SEQ ID NO: 1627517 - RNA, 19 nt, Artificial Sequence
  Description of Artificial Sequence: Synthetic oligonucleotide
  Sense strand starting at position 3376 of SEQ ID NO: 1560830
acacgaucuuggcucauua

SEQ ID NO: 1627518 - RNA, 19 nt, Artificial Sequence
  Description of Artificial Sequence: Synthetic oligonucleotide
  Antisense strand to SEQ ID NO: 1627517
uaaugagccaagaucgugu

SEQ ID NO: 1627519 - RNA, 19 nt, Artificial Sequence
  Description of Artificial Sequence: Synthetic oligonucleotide
  Sense strand starting at position 3527 of SEQ ID NO: 1560830
ccaucagagugaugacauu

SEQ ID NO: 1627520 - RNA, 19 nt, Artificial Sequence
  Description of Artificial Sequence: Synthetic oligonucleotide
  Antisense strand to SEQ ID NO: 1627519
aaugucaucacucugaugg

SEQ ID NO: 1627521 - RNA, 19 nt, Artificial Sequence
  Description of Artificial Sequence: Synthetic oligonucleotide
  Sense strand starting at position 3538 of SEQ ID NO: 1560830
augacauuaucacagguca

SEQ ID NO: 1627522 - RNA, 19 nt, Artificial Sequence
  Description of Artificial Sequence: Synthetic oligonucleotide
  Antisense strand to SEQ ID NO: 1627521
ugaccugugauaaugucau

SEQ ID NO: 1627523 - RNA, 19 nt, Artificial Sequence
  Description of Artificial Sequence: Synthetic oligonucleotide
  Sense strand starting at position 3554 of SEQ ID NO: 1560830
ucagguagucucuggagaa

SEQ ID NO: 1627524 - RNA, 19 nt, Artificial Sequence
  Description of Artificial Sequence: Synthetic oligonucleotide
  Antisense strand to SEQ ID NO: 1627523
uucuccagagacuaccuga

SEQ ID NO: 1627525 - RNA, 19 nt, Artificial Sequence
  Description of Artificial Sequence: Synthetic oligonucleotide
  Sense strand starting at position 3579 of SEQ ID NO: 1560830
ggacaaacgucuuaauauc

SEQ ID NO: 1627526 - RNA, 19 nt, Artificial Sequence
  Description of Artificial Sequence: Synthetic oligonucleotide
  Antisense strand to SEQ ID NO: 1627525
gauauuaagacguuugucc

SEQ ID NO: 1627527 - RNA, 19 nt, Artificial Sequence
  Description of Artificial Sequence: Synthetic oligonucleotide
  Sense strand starting at position 3682 of SEQ ID NO: 1560830
gcuagauuaaaguguagua

SEQ ID NO: 1627528 - RNA, 19 nt, Artificial Sequence
  Description of Artificial Sequence: Synthetic oligonucleotide
  Antisense strand to SEQ ID NO: 1627527
uacuacacuuuaaucuagc

SEQ ID NO: 1627529 - RNA, 19 nt, Artificial Sequence
  Description of Artificial Sequence: Synthetic oligonucleotide
  Sense strand starting at position 3823 of SEQ ID NO: 1560830
gggcuuauagcucagguau

SEQ ID NO: 1627530 - RNA, 19 nt, Artificial Sequence
  Description of Artificial Sequence: Synthetic oligonucleotide
  Antisense strand to SEQ ID NO: 1627529
auaccugagcuauaagccc

SEQ ID NO: 1627531 - RNA, 19 nt, Artificial Sequence
  Description of Artificial Sequence: Synthetic oligonucleotide
  Sense strand starting at position 3877 of SEQ ID NO: 1560830
gcuagauggccugguuaua

SEQ ID NO: 1627532 - RNA, 19 nt, Artificial Sequence
  Description of Artificial Sequence: Synthetic oligonucleotide
  Antisense strand to SEQ ID NO: 1627531
uauaaccaggccaucuagc

SEQ ID NO: 1627533 - RNA, 19 nt, Artificial Sequence
  Description of Artificial Sequence: Synthetic oligonucleotide
  Sense strand starting at position 3911 of SEQ ID NO: 1560830
cugacuaacuuagacaagu

SEQ ID NO: 1627534 - RNA, 19 nt, Artificial Sequence
  Description of Artificial Sequence: Synthetic oligonucleotide
  Antisense strand to SEQ ID NO: 1627533
acuugucuaaguuagucag

SEQ ID NO: 1627535 - RNA, 19 nt, Artificial Sequence
  Description of Artificial Sequence: Synthetic oligonucleotide
  Sense strand starting at position 173 of SEQ ID NO: 1560831
ugcuguccucuccaaagau

SEQ ID NO: 1627536 - RNA, 19 nt, Artificial Sequence
  Description of Artificial Sequence: Synthetic oligonucleotide
  Antisense strand to SEQ ID NO: 1627535
aucuuuggagaggacagca

SEQ ID NO: 1627537 - RNA, 19 nt, Artificial Sequence
  Description of Artificial Sequence: Synthetic oligonucleotide
  Sense strand starting at position 284 of SEQ ID NO: 1560831
acaggauggucucacuaug

SEQ ID NO: 1627538 - RNA, 19 nt, Artificial Sequence
  Description of Artificial Sequence: Synthetic oligonucleotide
  Antisense strand to SEQ ID NO: 1627537
cauagugagaccauccugu

SEQ ID NO: 1627539 - RNA, 19 nt, Artificial Sequence
  Description of Artificial Sequence: Synthetic oligonucleotide
  Sense strand starting at position 453 of SEQ ID NO: 1560831
uggcuugauucggcucacu

SEQ ID NO: 1627540 - RNA, 19 nt, Artificial Sequence
  Description of Artificial Sequence: Synthetic oligonucleotide
  Antisense strand to SEQ ID NO: 1627539
agugagccgaaucaagcca

SEQ ID NO: 1627541 - RNA, 19 nt, Artificial Sequence
  Description of Artificial Sequence: Synthetic oligonucleotide
  Sense strand starting at position 700 of SEQ ID NO: 1560831
aaucauguacucgagagca

SEQ ID NO: 1627542 - RNA, 19 nt, Artificial Sequence
  Description of Artificial Sequence: Synthetic oligonucleotide
  Antisense strand to SEQ ID NO: 1627541
ugcucucgaguacaugauu

SEQ ID NO: 1627543 - RNA, 19 nt, Artificial Sequence
  Description of Artificial Sequence: Synthetic oligonucleotide
  Sense strand starting at position 900 of SEQ ID NO: 1560831
agacauuccugagucccau

SEQ ID NO: 1627544 - RNA, 19 nt, Artificial Sequence
  Description of Artificial Sequence: Synthetic oligonucleotide
  Antisense strand to SEQ ID NO: 1627543
augggacucaggaaugucu

SEQ ID NO: 1627545 - RNA, 19 nt, Artificial Sequence
  Description of Artificial Sequence: Synthetic oligonucleotide
  Sense strand starting at position 939 of SEQ ID NO: 1560831
ucaucugcccuggaaacuu

SEQ ID NO: 1627546 - RNA, 19 nt, Artificial Sequence
  Description of Artificial Sequence: Synthetic oligonucleotide
  Antisense strand to SEQ ID NO: 1627545
aaguuuccagggcagauga

SEQ ID NO: 1627547 - RNA, 19 nt, Artificial Sequence
  Description of Artificial Sequence: Synthetic oligonucleotide
  Sense strand starting at position 1022 of SEQ ID NO: 1560831
gaaugagugcuugaaccca

SEQ ID NO: 1627548 - RNA, 19 nt, Artificial Sequence
  Description of Artificial Sequence: Synthetic oligonucleotide
  Antisense strand to SEQ ID NO: 1627547
uggguucaagcacucauuc

SEQ ID NO: 1627549 - RNA, 19 nt, Artificial Sequence
  Description of Artificial Sequence: Synthetic oligonucleotide
  Sense strand starting at position 1038 of SEQ ID NO: 1560831
ccaggaguuuaagcaacua

SEQ ID NO: 1627550 - RNA, 19 nt, Artificial Sequence
  Description of Artificial Sequence: Synthetic oligonucleotide
  Antisense strand to SEQ ID NO: 1627549
uaguugcuuaaacuccugg

SEQ ID NO: 1627551 - RNA, 19 nt, Artificial Sequence
  Description of Artificial Sequence: Synthetic oligonucleotide
  Sense strand starting at position 1230 of SEQ ID NO: 1560831
gcaagaccgugucaaacaa

SEQ ID NO: 1627552 - RNA, 19 nt, Artificial Sequence
  Description of Artificial Sequence: Synthetic oligonucleotide
  Antisense strand to SEQ ID NO: 1627551
uuguuugacacggucuugc

SEQ ID NO: 1627553 - RNA, 19 nt, Artificial Sequence
  Description of Artificial Sequence: Synthetic oligonucleotide
  Sense strand starting at position 1862 of SEQ ID NO: 1560831
guguauugcaccgccuaca

SEQ ID NO: 1627554 - RNA, 19 nt, Artificial Sequence
  Description of Artificial Sequence: Synthetic oligonucleotide
  Antisense strand to SEQ ID NO: 1627553
uguaggcggugcaauacac

SEQ ID NO: 1627555 - RNA, 19 nt, Artificial Sequence
  Description of Artificial Sequence: Synthetic oligonucleotide
  Sense strand starting at position 2105 of SEQ ID NO: 1560831
cucgcaucuccucagaguu

SEQ ID NO: 1627556 - RNA, 19 nt, Artificial Sequence
  Description of Artificial Sequence: Synthetic oligonucleotide
  Antisense strand to SEQ ID NO: 1627555
aacucugaggagaugcgag

SEQ ID NO: 1627557 - RNA, 19 nt, Artificial Sequence
  Description of Artificial Sequence: Synthetic oligonucleotide
  Sense strand starting at position 2239 of SEQ ID NO: 1560831
ccucuuauagcuugaucga

SEQ ID NO: 1627558 - RNA, 19 nt, Artificial Sequence
  Description of Artificial Sequence: Synthetic oligonucleotide
  Antisense strand to SEQ ID NO: 1627557
ucgaucaagcuauaagagg

SEQ ID NO: 1627559 - RNA, 19 nt, Artificial Sequence
  Description of Artificial Sequence: Synthetic oligonucleotide
  Sense strand starting at position 2240 of SEQ ID NO: 1560831
cucuuauagcuugaucgac

SEQ ID NO: 1627560 - RNA, 19 nt, Artificial Sequence
  Description of Artificial Sequence: Synthetic oligonucleotide
  Antisense strand to SEQ ID NO: 1627559
gucgaucaagcuauaagag

SEQ ID NO: 1627561 - RNA, 19 nt, Artificial Sequence
  Description of Artificial Sequence: Synthetic oligonucleotide
  Sense strand starting at position 2362 of SEQ ID NO: 1560831
gcucuuccucuagagcuuu

SEQ ID NO: 1627562 - RNA, 19 nt, Artificial Sequence
  Description of Artificial Sequence: Synthetic oligonucleotide
  Antisense strand to SEQ ID NO: 1627561
aaagcucuagaggaagagc

SEQ ID NO: 1627563 - RNA, 19 nt, Artificial Sequence
  Description of Artificial Sequence: Synthetic oligonucleotide
  Sense strand starting at position 2510 of SEQ ID NO: 1560831
agugaccucgcuuguuuau

SEQ ID NO: 1627564 - RNA, 19 nt, Artificial Sequence
  Description of Artificial Sequence: Synthetic oligonucleotide
  Antisense strand to SEQ ID NO: 1627563
auaaacaagcgaggucacu

SEQ ID NO: 1627565 - RNA, 19 nt, Artificial Sequence
  Description of Artificial Sequence: Synthetic oligonucleotide
  Sense strand starting at position 2511 of SEQ ID NO: 1560831
gugaccucgcuuguuuauu

SEQ ID NO: 1627566 - RNA, 19 nt, Artificial Sequence
  Description of Artificial Sequence: Synthetic oligonucleotide
  Antisense strand to SEQ ID NO: 1627565
aauaaacaagcgaggucac

SEQ ID NO: 1627567 - RNA, 19 nt, Artificial Sequence
  Description of Artificial Sequence: Synthetic oligonucleotide
  Sense strand starting at position 2539 of SEQ ID NO: 1560831
agauuacaguucugggcau

SEQ ID NO: 1627568 - RNA, 19 nt, Artificial Sequence
  Description of Artificial Sequence: Synthetic oligonucleotide
  Antisense strand to SEQ ID NO: 1627567
augcccagaacuguaaucu

SEQ ID NO: 1627569 - RNA, 19 nt, Artificial Sequence
  Description of Artificial Sequence: Synthetic oligonucleotide
  Sense strand starting at position 2540 of SEQ ID NO: 1560831
gauuacaguucugggcaua

SEQ ID NO: 1627570 - RNA, 19 nt, Artificial Sequence
  Description of Artificial Sequence: Synthetic oligonucleotide
  Antisense strand to SEQ ID NO: 1627569
uaugcccagaacuguaauc

SEQ ID NO: 1627571 - RNA, 19 nt, Artificial Sequence
  Description of Artificial Sequence: Synthetic oligonucleotide
  Sense strand starting at position 2543 of SEQ ID NO: 1560831
uacaguucugggcauagaa

SEQ ID NO: 1627572 - RNA, 19 nt, Artificial Sequence
  Description of Artificial Sequence: Synthetic oligonucleotide
  Antisense strand to SEQ ID NO: 1627571
uucuaugcccagaacugua

SEQ ID NO: 1627573 - RNA, 19 nt, Artificial Sequence
  Description of Artificial Sequence: Synthetic oligonucleotide
  Sense strand starting at position 2569 of SEQ ID NO: 1560831
ccacgugguuaccgaauga

SEQ ID NO: 1627574 - RNA, 19 nt, Artificial Sequence
  Description of Artificial Sequence: Synthetic oligonucleotide
  Antisense strand to SEQ ID NO: 1627573
ucauucgguaaccacgugg

SEQ ID NO: 1627575 - RNA, 19 nt, Artificial Sequence
  Description of Artificial Sequence: Synthetic oligonucleotide
  Sense strand starting at position 2573 of SEQ ID NO: 1560831
gugguuaccgaaugaagga

SEQ ID NO: 1627576 - RNA, 19 nt, Artificial Sequence
  Description of Artificial Sequence: Synthetic oligonucleotide
  Antisense strand to SEQ ID NO: 1627575
uccuucauucgguaaccac

SEQ ID NO: 1627577 - RNA, 19 nt, Artificial Sequence
  Description of Artificial Sequence: Synthetic oligonucleotide
  Sense strand starting at position 2591 of SEQ ID NO: 1560831
aaggauguuuacugagaga

SEQ ID NO: 1627578 - RNA, 19 nt, Artificial Sequence
  Description of Artificial Sequence: Synthetic oligonucleotide
  Antisense strand to SEQ ID NO: 1627577
ucucucaguaaacauccuu

SEQ ID NO: 1627579 - RNA, 19 nt, Artificial Sequence
  Description of Artificial Sequence: Synthetic oligonucleotide
  Sense strand starting at position 2594 of SEQ ID NO: 1560831
gauguuuacugagagacuc

SEQ ID NO: 1627580 - RNA, 19 nt, Artificial Sequence
  Description of Artificial Sequence: Synthetic oligonucleotide
  Antisense strand to SEQ ID NO: 1627579
gagucucucaguaaacauc

SEQ ID NO: 1627581 - RNA, 19 nt, Artificial Sequence
  Description of Artificial Sequence: Synthetic oligonucleotide
  Sense strand starting at position 2636 of SEQ ID NO: 1560831
agcgaauccucacaucuuu

SEQ ID NO: 1627582 - RNA, 19 nt, Artificial Sequence
  Description of Artificial Sequence: Synthetic oligonucleotide
  Antisense strand to SEQ ID NO: 1627581
aaagaugugaggauucgcu

SEQ ID NO: 1627583 - RNA, 19 nt, Artificial Sequence
  Description of Artificial Sequence: Synthetic oligonucleotide
  Sense strand starting at position 2655 of SEQ ID NO: 1560831
guuucuaguccuuaggaca

SEQ ID NO: 1627584 - RNA, 19 nt, Artificial Sequence
  Description of Artificial Sequence: Synthetic oligonucleotide
  Antisense strand to SEQ ID NO: 1627583
uguccuaaggacuagaaac

SEQ ID NO: 1627585 - RNA, 19 nt, Artificial Sequence
  Description of Artificial Sequence: Synthetic oligonucleotide
  Sense strand starting at position 2685 of SEQ ID NO: 1560831
gcuccuagugcacaagaaa

SEQ ID NO: 1627586 - RNA, 19 nt, Artificial Sequence
  Description of Artificial Sequence: Synthetic oligonucleotide
  Antisense strand to SEQ ID NO: 1627585
uuucuugugcacuaggagc

SEQ ID NO: 1627587 - RNA, 19 nt, Artificial Sequence
  Description of Artificial Sequence: Synthetic oligonucleotide
  Sense strand starting at position 2838 of SEQ ID NO: 1560831
ccagcuauuugggacuuga

SEQ ID NO: 1627588 - RNA, 19 nt, Artificial Sequence
  Description of Artificial Sequence: Synthetic oligonucleotide
  Antisense strand to SEQ ID NO: 1627587
ucaagucccaaauagcugg

SEQ ID NO: 1627589 - RNA, 19 nt, Artificial Sequence
  Description of Artificial Sequence: Synthetic oligonucleotide
  Sense strand starting at position 2978 of SEQ ID NO: 1560831
aaaguaauggccuggacau

SEQ ID NO: 1627590 - RNA, 19 nt, Artificial Sequence
  Description of Artificial Sequence: Synthetic oligonucleotide
  Antisense strand to SEQ ID NO: 1627589
auguccaggccauuacuuu

SEQ ID NO: 1627591 - RNA, 19 nt, Artificial Sequence
  Description of Artificial Sequence: Synthetic oligonucleotide
  Sense strand starting at position 2979 of SEQ ID NO: 1560831
aaguaauggccuggacaug

SEQ ID NO: 1627592 - RNA, 19 nt, Artificial Sequence
  Description of Artificial Sequence: Synthetic oligonucleotide
  Antisense strand to SEQ ID NO: 1627591
cauguccaggccauuacuu

SEQ ID NO: 1627593 - RNA, 19 nt, Artificial Sequence
  Description of Artificial Sequence: Synthetic oligonucleotide
  Sense strand starting at position 3032 of SEQ ID NO: 1560831
ccuauuugcuaugaggaca

SEQ ID NO: 1627594 - RNA, 19 nt, Artificial Sequence
  Description of Artificial Sequence: Synthetic oligonucleotide
  Antisense strand to SEQ ID NO: 1627593
uguccucauagcaaauagg

SEQ ID NO: 1627595 - RNA, 19 nt, Artificial Sequence
  Description of Artificial Sequence: Synthetic oligonucleotide
  Sense strand starting at position 3233 of SEQ ID NO: 1560831
gaccgagugucuggacaau

SEQ ID NO: 1627596 - RNA, 19 nt, Artificial Sequence
  Description of Artificial Sequence: Synthetic oligonucleotide
  Antisense strand to SEQ ID NO: 1627595
auuguccagacacucgguc

SEQ ID NO: 1627597 - RNA, 19 nt, Artificial Sequence
  Description of Artificial Sequence: Synthetic oligonucleotide
  Sense strand starting at position 3252 of SEQ ID NO: 1560831
agggaaagcucucugauga

SEQ ID NO: 1627598 - RNA, 19 nt, Artificial Sequence
  Description of Artificial Sequence: Synthetic oligonucleotide
  Antisense strand to SEQ ID NO: 1627597
ucaucagagagcuuucccu

SEQ ID NO: 1627599 - RNA, 19 nt, Artificial Sequence
  Description of Artificial Sequence: Synthetic oligonucleotide
  Sense strand starting at position 3253 of SEQ ID NO: 1560831
gggaaagcucucugaugaa

SEQ ID NO: 1627600 - RNA, 19 nt, Artificial Sequence
  Description of Artificial Sequence: Synthetic oligonucleotide
  Antisense strand to SEQ ID NO: 1627599
uucaucagagagcuuuccc

SEQ ID NO: 1627601 - RNA, 19 nt, Artificial Sequence
  Description of Artificial Sequence: Synthetic oligonucleotide
  Sense strand starting at position 3256 of SEQ ID NO: 1560831
aaagcucucugaugaagga

SEQ ID NO: 1627602 - RNA, 19 nt, Artificial Sequence
  Description of Artificial Sequence: Synthetic oligonucleotide
  Antisense strand to SEQ ID NO: 1627601
uccuucaucagagagcuuu

SEQ ID NO: 1627603 - RNA, 19 nt, Artificial Sequence
  Description of Artificial Sequence: Synthetic oligonucleotide
  Sense strand starting at position 3302 of SEQ ID NO: 1560831
aguaauagauugcauggga

SEQ ID NO: 1627604 - RNA, 19 nt, Artificial Sequence
  Description of Artificial Sequence: Synthetic oligonucleotide
  Antisense strand to SEQ ID NO: 1627603
ucccaugcaaucuauuacu

SEQ ID NO: 1627605 - RNA, 19 nt, Artificial Sequence
  Description of Artificial Sequence: Synthetic oligonucleotide
  Sense strand starting at position 3541 of SEQ ID NO: 1560831
gcuaaauuagcuggucaug

SEQ ID NO: 1627606 - RNA, 19 nt, Artificial Sequence
  Description of Artificial Sequence: Synthetic oligonucleotide
  Antisense strand to SEQ ID NO: 1627605
caugaccagcuaauuuagc

SEQ ID NO: 1627607 - RNA, 19 nt, Artificial Sequence
  Description of Artificial Sequence: Synthetic oligonucleotide
  Sense strand starting at position 3794 of SEQ ID NO: 1560831
aggaaauggucucgaagga

SEQ ID NO: 1627608 - RNA, 19 nt, Artificial Sequence
  Description of Artificial Sequence: Synthetic oligonucleotide
  Antisense strand to SEQ ID NO: 1627607
uccuucgagaccauuuccu

SEQ ID NO: 1627609 - RNA, 19 nt, Artificial Sequence
  Description of Artificial Sequence: Synthetic oligonucleotide
  Sense strand starting at position 900 of SEQ ID NO: 1560832
cauugugagcacuggucua

SEQ ID NO: 1627610 - RNA, 19 nt, Artificial Sequence
  Description of Artificial Sequence: Synthetic oligonucleotide
  Antisense strand to SEQ ID NO: 1627609
uagaccagugcucacaaug

SEQ ID NO: 1627611 - RNA, 19 nt, Artificial Sequence
  Description of Artificial Sequence: Synthetic oligonucleotide
  Sense strand starting at position 905 of SEQ ID NO: 1560832
ugagcacuggucuauguuu

SEQ ID NO: 1627612 - RNA, 19 nt, Artificial Sequence
  Description of Artificial Sequence: Synthetic oligonucleotide
  Antisense strand to SEQ ID NO: 1627611
aaacauagaccagugcuca

SEQ ID NO: 1627613 - RNA, 19 nt, Artificial Sequence
  Description of Artificial Sequence: Synthetic oligonucleotide
  Sense strand starting at position 913 of SEQ ID NO: 1560832
ggucuauguuuacccucaa

SEQ ID NO: 1627614 - RNA, 19 nt, Artificial Sequence
  Description of Artificial Sequence: Synthetic oligonucleotide
  Antisense strand to SEQ ID NO: 1627613
uugaggguaaacauagacc

SEQ ID NO: 1627615 - RNA, 19 nt, Artificial Sequence
  Description of Artificial Sequence: Synthetic oligonucleotide
  Sense strand starting at position 914 of SEQ ID NO: 1560832
gucuauguuuacccucaau

SEQ ID NO: 1627616 - RNA, 19 nt, Artificial Sequence
  Description of Artificial Sequence: Synthetic oligonucleotide
  Antisense strand to SEQ ID NO: 1627615
auugaggguaaacauagac

SEQ ID NO: 1627617 - RNA, 19 nt, Artificial Sequence
  Description of Artificial Sequence: Synthetic oligonucleotide
  Sense strand starting at position 990 of SEQ ID NO: 1560832
ggaucuugaucagaaccca

SEQ ID NO: 1627618 - RNA, 19 nt, Artificial Sequence
  Description of Artificial Sequence: Synthetic oligonucleotide
  Antisense strand to SEQ ID NO: 1627617
uggguucugaucaagaucc

SEQ ID NO: 1627619 - RNA, 19 nt, Artificial Sequence
  Description of Artificial Sequence: Synthetic oligonucleotide
  Sense strand starting at position 1002 of SEQ ID NO: 1560832
gaacccaagcuucguguau

SEQ ID NO: 1627620 - RNA, 19 nt, Artificial Sequence
  Description of Artificial Sequence: Synthetic oligonucleotide
  Antisense strand to SEQ ID NO: 1627619
auacacgaagcuuggguuc

SEQ ID NO: 1627621 - RNA, 19 nt, Artificial Sequence
  Description of Artificial Sequence: Synthetic oligonucleotide
  Sense strand starting at position 1006 of SEQ ID NO: 1560832
ccaagcuucguguaugugu

SEQ ID NO: 1627622 - RNA, 19 nt, Artificial Sequence
  Description of Artificial Sequence: Synthetic oligonucleotide
  Antisense strand to SEQ ID NO: 1627621
acacauacacgaagcuugg

SEQ ID NO: 1627623 - RNA, 19 nt, Artificial Sequence
  Description of Artificial Sequence: Synthetic oligonucleotide
  Sense strand starting at position 1021 of SEQ ID NO: 1560832
gugugaagucaacagaugu

SEQ ID NO: 1627624 - RNA, 19 nt, Artificial Sequence
  Description of Artificial Sequence: Synthetic oligonucleotide
  Antisense strand to SEQ ID NO: 1627623
acaucuguugacuucacac

SEQ ID NO: 1627625 - RNA, 19 nt, Artificial Sequence
  Description of Artificial Sequence: Synthetic oligonucleotide
  Sense strand starting at position 1025 of SEQ ID NO: 1560832
gaagucaacagaugugagu

SEQ ID NO: 1627626 - RNA, 19 nt, Artificial Sequence
  Description of Artificial Sequence: Synthetic oligonucleotide
  Antisense strand to SEQ ID NO: 1627625
acucacaucuguugacuuc

SEQ ID NO: 1627627 - RNA, 19 nt, Artificial Sequence
  Description of Artificial Sequence: Synthetic oligonucleotide
  Sense strand starting at position 1027 of SEQ ID NO: 1560832
agucaacagaugugaguau

SEQ ID NO: 1627628 - RNA, 19 nt, Artificial Sequence
  Description of Artificial Sequence: Synthetic oligonucleotide
  Antisense strand to SEQ ID NO: 1627627
auacucacaucuguugacu

SEQ ID NO: 1627629 - RNA, 19 nt, Artificial Sequence
  Description of Artificial Sequence: Synthetic oligonucleotide
  Sense strand starting at position 1048 of SEQ ID NO: 1560832
agauguauauauccuaugu

SEQ ID NO: 1627630 - RNA, 19 nt, Artificial Sequence
  Description of Artificial Sequence: Synthetic oligonucleotide
  Antisense strand to SEQ ID NO: 1627629
acauaggauauauacaucu

SEQ ID NO: 1627631 - RNA, 19 nt, Artificial Sequence
  Description of Artificial Sequence: Synthetic oligonucleotide
  Sense strand starting at position 1052 of SEQ ID NO: 1560832
guauauauccuauguguga

SEQ ID NO: 1627632 - RNA, 19 nt, Artificial Sequence
  Description of Artificial Sequence: Synthetic oligonucleotide
  Antisense strand to SEQ ID NO: 1627631
ucacacauaggauauauac

SEQ ID NO: 1627633 - RNA, 19 nt, Artificial Sequence
  Description of Artificial Sequence: Synthetic oligonucleotide
  Sense strand starting at position 1053 of SEQ ID NO: 1560832
uauauauccuaugugugag

SEQ ID NO: 1627634 - RNA, 19 nt, Artificial Sequence
  Description of Artificial Sequence: Synthetic oligonucleotide
  Antisense strand to SEQ ID NO: 1627633
cucacacauaggauauaua

SEQ ID NO: 1627635 - RNA, 19 nt, Artificial Sequence
  Description of Artificial Sequence: Synthetic oligonucleotide
  Sense strand starting at position 1056 of SEQ ID NO: 1560832
auauccuaugugugagcuu

SEQ ID NO: 1627636 - RNA, 19 nt, Artificial Sequence
  Description of Artificial Sequence: Synthetic oligonucleotide
  Antisense strand to SEQ ID NO: 1627635
aagcucacacauaggauau

SEQ ID NO: 1627637 - RNA, 19 nt, Artificial Sequence
  Description of Artificial Sequence: Synthetic oligonucleotide
  Sense strand starting at position 1065 of SEQ ID NO: 1560832
gugugagcuuacgugacuu

SEQ ID NO: 1627638 - RNA, 19 nt, Artificial Sequence
  Description of Artificial Sequence: Synthetic oligonucleotide
  Antisense strand to SEQ ID NO: 1627637
aagucacguaagcucacac

SEQ ID NO: 1627639 - RNA, 19 nt, Artificial Sequence
  Description of Artificial Sequence: Synthetic oligonucleotide
  Sense strand starting at position 1077 of SEQ ID NO: 1560832
gugacuuccucccugggau

SEQ ID NO: 1627640 - RNA, 19 nt, Artificial Sequence
  Description of Artificial Sequence: Synthetic oligonucleotide
  Antisense strand to SEQ ID NO: 1627639
aucccagggaggaagucac

SEQ ID NO: 1627641 - RNA, 19 nt, Artificial Sequence
  Description of Artificial Sequence: Synthetic oligonucleotide
  Sense strand starting at position 1078 of SEQ ID NO: 1560832
ugacuuccucccugggaua

SEQ ID NO: 1627642 - RNA, 19 nt, Artificial Sequence
  Description of Artificial Sequence: Synthetic oligonucleotide
  Antisense strand to SEQ ID NO: 1627641
uaucccagggaggaaguca

SEQ ID NO: 1627643 - RNA, 19 nt, Artificial Sequence
  Description of Artificial Sequence: Synthetic oligonucleotide
  Sense strand starting at position 1089 of SEQ ID NO: 1560832
cugggauacuuuccuagga

SEQ ID NO: 1627644 - RNA, 19 nt, Artificial Sequence
  Description of Artificial Sequence: Synthetic oligonucleotide
  Antisense strand to SEQ ID NO: 1627643
uccuaggaaaguaucccag

SEQ ID NO: 1627645 - RNA, 19 nt, Artificial Sequence
  Description of Artificial Sequence: Synthetic oligonucleotide
  Sense strand starting at position 1091 of SEQ ID NO: 1560832
gggauacuuuccuaggaag

SEQ ID NO: 1627646 - RNA, 19 nt, Artificial Sequence
  Description of Artificial Sequence: Synthetic oligonucleotide
  Antisense strand to SEQ ID NO: 1627645
cuuccuaggaaaguauccc

SEQ ID NO: 1627647 - RNA, 19 nt, Artificial Sequence
  Description of Artificial Sequence: Synthetic oligonucleotide
  Sense strand starting at position 1344 of SEQ ID NO: 1560832
gcggguuucuccucgacau

SEQ ID NO: 1627648 - RNA, 19 nt, Artificial Sequence
  Description of Artificial Sequence: Synthetic oligonucleotide
  Antisense strand to SEQ ID NO: 1627647
augucgaggagaaacccgc

SEQ ID NO: 1627649 - RNA, 19 nt, Artificial Sequence
  Description of Artificial Sequence: Synthetic oligonucleotide
  Sense strand starting at position 1345 of SEQ ID NO: 1560832
cggguuucuccucgacauc

SEQ ID NO: 1627650 - RNA, 19 nt, Artificial Sequence
  Description of Artificial Sequence: Synthetic oligonucleotide
  Antisense strand to SEQ ID NO: 1627649
gaugucgaggagaaacccg

SEQ ID NO: 1627651 - RNA, 19 nt, Artificial Sequence
  Description of Artificial Sequence: Synthetic oligonucleotide
  Sense strand starting at position 1770 of SEQ ID NO: 1560832
gcacguggcucagcagauu

SEQ ID NO: 1627652 - RNA, 19 nt, Artificial Sequence
  Description of Artificial Sequence: Synthetic oligonucleotide
  Antisense strand to SEQ ID NO: 1627651
aaucugcugagccacgugc

SEQ ID NO: 1627653 - RNA, 19 nt, Artificial Sequence
  Description of Artificial Sequence: Synthetic oligonucleotide
  Sense strand starting at position 1776 of SEQ ID NO: 1560832
ggcucagcagauugaagaa

SEQ ID NO: 1627654 - RNA, 19 nt, Artificial Sequence
  Description of Artificial Sequence: Synthetic oligonucleotide
  Antisense strand to SEQ ID NO: 1627653
uucuucaaucugcugagcc

SEQ ID NO: 1627655 - RNA, 19 nt, Artificial Sequence
  Description of Artificial Sequence: Synthetic oligonucleotide
  Sense strand starting at position 1968 of SEQ ID NO: 1560832
agcuguucugaaugagaca

SEQ ID NO: 1627656 - RNA, 19 nt, Artificial Sequence
  Description of Artificial Sequence: Synthetic oligonucleotide
  Antisense strand to SEQ ID NO: 1627655
ugucucauucagaacagcu

SEQ ID NO: 1627657 - RNA, 19 nt, Artificial Sequence
  Description of Artificial Sequence: Synthetic oligonucleotide
  Sense strand starting at position 1969 of SEQ ID NO: 1560832
gcuguucugaaugagacau

SEQ ID NO: 1627658 - RNA, 19 nt, Artificial Sequence
  Description of Artificial Sequence: Synthetic oligonucleotide
  Antisense strand to SEQ ID NO: 1627657
augucucauucagaacagc

SEQ ID NO: 1627659 - RNA, 19 nt, Artificial Sequence
  Description of Artificial Sequence: Synthetic oligonucleotide
  Sense strand starting at position 1975 of SEQ ID NO: 1560832
cugaaugagacaugagucu

SEQ ID NO: 1627660 - RNA, 19 nt, Artificial Sequence
  Description of Artificial Sequence: Synthetic oligonucleotide
  Antisense strand to SEQ ID NO: 1627659
agacucaugucucauucag

SEQ ID NO: 1627661 - RNA, 19 nt, Artificial Sequence
  Description of Artificial Sequence: Synthetic oligonucleotide
  Sense strand starting at position 2292 of SEQ ID NO: 1560832
cuaggagacucacucguua

SEQ ID NO: 1627662 - RNA, 19 nt, Artificial Sequence
  Description of Artificial Sequence: Synthetic oligonucleotide
  Antisense strand to SEQ ID NO: 1627661
uaacgagugagucuccuag

SEQ ID NO: 1627663 - RNA, 19 nt, Artificial Sequence
  Description of Artificial Sequence: Synthetic oligonucleotide
  Sense strand starting at position 2294 of SEQ ID NO: 1560832
aggagacucacucguuaau

SEQ ID NO: 1627664 - RNA, 19 nt, Artificial Sequence
  Description of Artificial Sequence: Synthetic oligonucleotide
  Antisense strand to SEQ ID NO: 1627663
auuaacgagugagucuccu

SEQ ID NO: 1627665 - RNA, 19 nt, Artificial Sequence
  Description of Artificial Sequence: Synthetic oligonucleotide
  Sense strand starting at position 2296 of SEQ ID NO: 1560832
gagacucacucguuaauua

SEQ ID NO: 1627666 - RNA, 19 nt, Artificial Sequence
  Description of Artificial Sequence: Synthetic oligonucleotide
  Antisense strand to SEQ ID NO: 1627665
uaauuaacgagugagucuc

SEQ ID NO: 1627667 - RNA, 19 nt, Artificial Sequence
  Description of Artificial Sequence: Synthetic oligonucleotide
  Sense strand starting at position 2297 of SEQ ID NO: 1560832
agacucacucguuaauuag

SEQ ID NO: 1627668 - RNA, 19 nt, Artificial Sequence
  Description of Artificial Sequence: Synthetic oligonucleotide
  Antisense strand to SEQ ID NO: 1627667
cuaauuaacgagugagucu

SEQ ID NO: 1627669 - RNA, 19 nt, Artificial Sequence
  Description of Artificial Sequence: Synthetic oligonucleotide
  Sense strand starting at position 2305 of SEQ ID NO: 1560832
ucguuaauuaggugcccua

SEQ ID NO: 1627670 - RNA, 19 nt, Artificial Sequence
  Description of Artificial Sequence: Synthetic oligonucleotide
  Antisense strand to SEQ ID NO: 1627669
uagggcaccuaauuaacga

SEQ ID NO: 1627671 - RNA, 19 nt, Artificial Sequence
  Description of Artificial Sequence: Synthetic oligonucleotide
  Sense strand starting at position 2308 of SEQ ID NO: 1560832
uuaauuaggugcccuacaa

SEQ ID NO: 1627672 - RNA, 19 nt, Artificial Sequence
  Description of Artificial Sequence: Synthetic oligonucleotide
  Antisense strand to SEQ ID NO: 1627671
uuguagggcaccuaauuaa

SEQ ID NO: 1627673 - RNA, 19 nt, Artificial Sequence
  Description of Artificial Sequence: Synthetic oligonucleotide
  Sense strand starting at position 2609 of SEQ ID NO: 1560832
ccagauaauuguuugccca

SEQ ID NO: 1627674 - RNA, 19 nt, Artificial Sequence
  Description of Artificial Sequence: Synthetic oligonucleotide
  Antisense strand to SEQ ID NO: 1627673
ugggcaaacaauuaucugg

SEQ ID NO: 1627675 - RNA, 19 nt, Artificial Sequence
  Description of Artificial Sequence: Synthetic oligonucleotide
  Sense strand starting at position 2611 of SEQ ID NO: 1560832
agauaauuguuugcccaca

SEQ ID NO: 1627676 - RNA, 19 nt, Artificial Sequence
  Description of Artificial Sequence: Synthetic oligonucleotide
  Antisense strand to SEQ ID NO: 1627675
ugugggcaaacaauuaucu

SEQ ID NO: 1627677 - RNA, 19 nt, Artificial Sequence
  Description of Artificial Sequence: Synthetic oligonucleotide
  Sense strand starting at position 2616 of SEQ ID NO: 1560832
auuguuugcccacaacgau

SEQ ID NO: 1627678 - RNA, 19 nt, Artificial Sequence
  Description of Artificial Sequence: Synthetic oligonucleotide
  Antisense strand to SEQ ID NO: 1627677
aucguugugggcaaacaau

SEQ ID NO: 1627679 - RNA, 19 nt, Artificial Sequence
  Description of Artificial Sequence: Synthetic oligonucleotide
  Sense strand starting at position 2716 of SEQ ID NO: 1560832
gggacucucaggugugaug

SEQ ID NO: 1627680 - RNA, 19 nt, Artificial Sequence
  Description of Artificial Sequence: Synthetic oligonucleotide
  Antisense strand to SEQ ID NO: 1627679
caucacaccugagaguccc

SEQ ID NO: 1627681 - RNA, 19 nt, Artificial Sequence
  Description of Artificial Sequence: Synthetic oligonucleotide
  Sense strand starting at position 3339 of SEQ ID NO: 1560832
gaaugaaugggcugcacua

SEQ ID NO: 1627682 - RNA, 19 nt, Artificial Sequence
  Description of Artificial Sequence: Synthetic oligonucleotide
  Antisense strand to SEQ ID NO: 1627681
uagugcagcccauucauuc

SEQ ID NO: 1627683 - RNA, 19 nt, Artificial Sequence
  Description of Artificial Sequence: Synthetic oligonucleotide
  Sense strand starting at position 3415 of SEQ ID NO: 1560832
ccucuaugccaaugaagug

SEQ ID NO: 1627684 - RNA, 19 nt, Artificial Sequence
  Description of Artificial Sequence: Synthetic oligonucleotide
  Antisense strand to SEQ ID NO: 1627683
cacuucauuggcauagagg

SEQ ID NO: 1627685 - RNA, 19 nt, Artificial Sequence
  Description of Artificial Sequence: Synthetic oligonucleotide
  Sense strand starting at position 3474 of SEQ ID NO: 1560832
agaacaaagugucauagac

SEQ ID NO: 1627686 - RNA, 19 nt, Artificial Sequence
  Description of Artificial Sequence: Synthetic oligonucleotide
  Antisense strand to SEQ ID NO: 1627685
gucuaugacacuuuguucu

SEQ ID NO: 1627687 - RNA, 19 nt, Artificial Sequence
  Description of Artificial Sequence: Synthetic oligonucleotide
  Sense strand starting at position 3956 of SEQ ID NO: 1560832
caaggacaccagugauauu

SEQ ID NO: 1627688 - RNA, 19 nt, Artificial Sequence
  Description of Artificial Sequence: Synthetic oligonucleotide
  Antisense strand to SEQ ID NO: 1627687
aauaucacugguguccuug

SEQ ID NO: 1627689 - RNA, 19 nt, Artificial Sequence
  Description of Artificial Sequence: Synthetic oligonucleotide
  Sense strand starting at position 164 of SEQ ID NO: 1560833
cauugugagcacuggucua

SEQ ID NO: 1627690 - RNA, 19 nt, Artificial Sequence
  Description of Artificial Sequence: Synthetic oligonucleotide
  Antisense strand to SEQ ID NO: 1627689
uagaccagugcucacaaug

SEQ ID NO: 1627691 - RNA, 19 nt, Artificial Sequence
  Description of Artificial Sequence: Synthetic oligonucleotide
  Sense strand starting at position 169 of SEQ ID NO: 1560833
ugagcacuggucuauguuu

SEQ ID NO: 1627692 - RNA, 19 nt, Artificial Sequence
  Description of Artificial Sequence: Synthetic oligonucleotide
  Antisense strand to SEQ ID NO: 1627691
aaacauagaccagugcuca

SEQ ID NO: 1627693 - RNA, 19 nt, Artificial Sequence
  Description of Artificial Sequence: Synthetic oligonucleotide
  Sense strand starting at position 177 of SEQ ID NO: 1560833
ggucuauguuuacccucaa

SEQ ID NO: 1627694 - RNA, 19 nt, Artificial Sequence
  Description of Artificial Sequence: Synthetic oligonucleotide
  Antisense strand to SEQ ID NO: 1627693
uugaggguaaacauagacc

SEQ ID NO: 1627695 - RNA, 19 nt, Artificial Sequence
  Description of Artificial Sequence: Synthetic oligonucleotide
  Sense strand starting at position 178 of SEQ ID NO: 1560833
gucuauguuuacccucaau

SEQ ID NO: 1627696 - RNA, 19 nt, Artificial Sequence
  Description of Artificial Sequence: Synthetic oligonucleotide
  Antisense strand to SEQ ID NO: 1627695
auugaggguaaacauagac

SEQ ID NO: 1627697 - RNA, 19 nt, Artificial Sequence
  Description of Artificial Sequence: Synthetic oligonucleotide
  Sense strand starting at position 254 of SEQ ID NO: 1560833
ggaucuugaucagaaccca

SEQ ID NO: 1627698 - RNA, 19 nt, Artificial Sequence
  Description of Artificial Sequence: Synthetic oligonucleotide
  Antisense strand to SEQ ID NO: 1627697
uggguucugaucaagaucc

SEQ ID NO: 1627699 - RNA, 19 nt, Artificial Sequence
  Description of Artificial Sequence: Synthetic oligonucleotide
  Sense strand starting at position 266 of SEQ ID NO: 1560833
gaacccaagcuucguguau

SEQ ID NO: 1627700 - RNA, 19 nt, Artificial Sequence
  Description of Artificial Sequence: Synthetic oligonucleotide
  Antisense strand to SEQ ID NO: 1627699
auacacgaagcuuggguuc

SEQ ID NO: 1627701 - RNA, 19 nt, Artificial Sequence
  Description of Artificial Sequence: Synthetic oligonucleotide
  Sense strand starting at position 285 of SEQ ID NO: 1560833
gugugaagucaacagaugu

SEQ ID NO: 1627702 - RNA, 19 nt, Artificial Sequence
  Description of Artificial Sequence: Synthetic oligonucleotide
  Antisense strand to SEQ ID NO: 1627701
acaucuguugacuucacac

SEQ ID NO: 1627703 - RNA, 19 nt, Artificial Sequence
  Description of Artificial Sequence: Synthetic oligonucleotide
  Sense strand starting at position 289 of SEQ ID NO: 1560833
gaagucaacagaugugagu

SEQ ID NO: 1627704 - RNA, 19 nt, Artificial Sequence
  Description of Artificial Sequence: Synthetic oligonucleotide
  Antisense strand to SEQ ID NO: 1627703
acucacaucuguugacuuc

SEQ ID NO: 1627705 - RNA, 19 nt, Artificial Sequence
  Description of Artificial Sequence: Synthetic oligonucleotide
  Sense strand starting at position 291 of SEQ ID NO: 1560833
agucaacagaugugaguau

SEQ ID NO: 1627706 - RNA, 19 nt, Artificial Sequence
  Description of Artificial Sequence: Synthetic oligonucleotide
  Antisense strand to SEQ ID NO: 1627705
auacucacaucuguugacu

SEQ ID NO: 1627707 - RNA, 19 nt, Artificial Sequence
  Description of Artificial Sequence: Synthetic oligonucleotide
  Sense strand starting at position 312 of SEQ ID NO: 1560833
agauguauauauccuaugu

SEQ ID NO: 1627708 - RNA, 19 nt, Artificial Sequence
  Description of Artificial Sequence: Synthetic oligonucleotide
  Antisense strand to SEQ ID NO: 1627707
acauaggauauauacaucu

SEQ ID NO: 1627709 - RNA, 19 nt, Artificial Sequence
  Description of Artificial Sequence: Synthetic oligonucleotide
  Sense strand starting at position 316 of SEQ ID NO: 1560833
guauauauccuauguguga

SEQ ID NO: 1627710 - RNA, 19 nt, Artificial Sequence
  Description of Artificial Sequence: Synthetic oligonucleotide
  Antisense strand to SEQ ID NO: 1627709
ucacacauaggauauauac

SEQ ID NO: 1627711 - RNA, 19 nt, Artificial Sequence
  Description of Artificial Sequence: Synthetic oligonucleotide
  Sense strand starting at position 317 of SEQ ID NO: 1560833
uauauauccuaugugugag

SEQ ID NO: 1627712 - RNA, 19 nt, Artificial Sequence
  Description of Artificial Sequence: Synthetic oligonucleotide
  Antisense strand to SEQ ID NO: 1627711
cucacacauaggauauaua

SEQ ID NO: 1627713 - RNA, 19 nt, Artificial Sequence
  Description of Artificial Sequence: Synthetic oligonucleotide
  Sense strand starting at position 320 of SEQ ID NO: 1560833
auauccuaugugugagcuu

SEQ ID NO: 1627714 - RNA, 19 nt, Artificial Sequence
  Description of Artificial Sequence: Synthetic oligonucleotide
  Antisense strand to SEQ ID NO: 1627713
aagcucacacauaggauau

SEQ ID NO: 1627715 - RNA, 19 nt, Artificial Sequence
  Description of Artificial Sequence: Synthetic oligonucleotide
  Sense strand starting at position 341 of SEQ ID NO: 1560833
gugacuuccucccugggau

SEQ ID NO: 1627716 - RNA, 19 nt, Artificial Sequence
  Description of Artificial Sequence: Synthetic oligonucleotide
  Antisense strand to SEQ ID NO: 1627715
aucccagggaggaagucac

SEQ ID NO: 1627717 - RNA, 19 nt, Artificial Sequence
  Description of Artificial Sequence: Synthetic oligonucleotide
  Sense strand starting at position 342 of SEQ ID NO: 1560833
ugacuuccucccugggaua

SEQ ID NO: 1627718 - RNA, 19 nt, Artificial Sequence
  Description of Artificial Sequence: Synthetic oligonucleotide
  Antisense strand to SEQ ID NO: 1627717
uaucccagggaggaaguca

SEQ ID NO: 1627719 - RNA, 19 nt, Artificial Sequence
  Description of Artificial Sequence: Synthetic oligonucleotide
  Sense strand starting at position 353 of SEQ ID NO: 1560833
cugggauacuuuccuagga

SEQ ID NO: 1627720 - RNA, 19 nt, Artificial Sequence
  Description of Artificial Sequence: Synthetic oligonucleotide
  Antisense strand to SEQ ID NO: 1627719
uccuaggaaaguaucccag

SEQ ID NO: 1627721 - RNA, 19 nt, Artificial Sequence
  Description of Artificial Sequence: Synthetic oligonucleotide
  Sense strand starting at position 355 of SEQ ID NO: 1560833
gggauacuuuccuaggaag

SEQ ID NO: 1627722 - RNA, 19 nt, Artificial Sequence
  Description of Artificial Sequence: Synthetic oligonucleotide
  Antisense strand to SEQ ID NO: 1627721
cuuccuaggaaaguauccc

SEQ ID NO: 1627723 - RNA, 19 nt, Artificial Sequence
  Description of Artificial Sequence: Synthetic oligonucleotide
  Sense strand starting at position 609 of SEQ ID NO: 1560833
cggguuucuccucgacauc

SEQ ID NO: 1627724 - RNA, 19 nt, Artificial Sequence
  Description of Artificial Sequence: Synthetic oligonucleotide
  Antisense strand to SEQ ID NO: 1627723
gaugucgaggagaaacccg

SEQ ID NO: 1627725 - RNA, 19 nt, Artificial Sequence
  Description of Artificial Sequence: Synthetic oligonucleotide
  Sense strand starting at position 1040 of SEQ ID NO: 1560833
ggcucagcagauugaagaa

SEQ ID NO: 1627726 - RNA, 19 nt, Artificial Sequence
  Description of Artificial Sequence: Synthetic oligonucleotide
  Antisense strand to SEQ ID NO: 1627725
uucuucaaucugcugagcc

SEQ ID NO: 1627727 - RNA, 19 nt, Artificial Sequence
  Description of Artificial Sequence: Synthetic oligonucleotide
  Sense strand starting at position 1232 of SEQ ID NO: 1560833
agcuguucugaaugagaca

SEQ ID NO: 1627728 - RNA, 19 nt, Artificial Sequence
  Description of Artificial Sequence: Synthetic oligonucleotide
  Antisense strand to SEQ ID NO: 1627727
ugucucauucagaacagcu

SEQ ID NO: 1627729 - RNA, 19 nt, Artificial Sequence
  Description of Artificial Sequence: Synthetic oligonucleotide
  Sense strand starting at position 1233 of SEQ ID NO: 1560833
gcuguucugaaugagacau

SEQ ID NO: 1627730 - RNA, 19 nt, Artificial Sequence
  Description of Artificial Sequence: Synthetic oligonucleotide
  Antisense strand to SEQ ID NO: 1627729
augucucauucagaacagc

SEQ ID NO: 1627731 - RNA, 19 nt, Artificial Sequence
  Description of Artificial Sequence: Synthetic oligonucleotide
  Sense strand starting at position 1239 of SEQ ID NO: 1560833
cugaaugagacaugagucu

SEQ ID NO: 1627732 - RNA, 19 nt, Artificial Sequence
  Description of Artificial Sequence: Synthetic oligonucleotide
  Antisense strand to SEQ ID NO: 1627731
agacucaugucucauucag

SEQ ID NO: 1627733 - RNA, 19 nt, Artificial Sequence
  Description of Artificial Sequence: Synthetic oligonucleotide
  Sense strand starting at position 1556 of SEQ ID NO: 1560833
cuaggagacucacucguua

SEQ ID NO: 1627734 - RNA, 19 nt, Artificial Sequence
  Description of Artificial Sequence: Synthetic oligonucleotide
  Antisense strand to SEQ ID NO: 1627733
uaacgagugagucuccuag

SEQ ID NO: 1627735 - RNA, 19 nt, Artificial Sequence
  Description of Artificial Sequence: Synthetic oligonucleotide
  Sense strand starting at position 1558 of SEQ ID NO: 1560833
aggagacucacucguuaau

SEQ ID NO: 1627736 - RNA, 19 nt, Artificial Sequence
  Description of Artificial Sequence: Synthetic oligonucleotide
  Antisense strand to SEQ ID NO: 1627735
auuaacgagugagucuccu

SEQ ID NO: 1627737 - RNA, 19 nt, Artificial Sequence
  Description of Artificial Sequence: Synthetic oligonucleotide
  Sense strand starting at position 1560 of SEQ ID NO: 1560833
gagacucacucguuaauua

SEQ ID NO: 1627738 - RNA, 19 nt, Artificial Sequence
  Description of Artificial Sequence: Synthetic oligonucleotide
  Antisense strand to SEQ ID NO: 1627737
uaauuaacgagugagucuc

SEQ ID NO: 1627739 - RNA, 19 nt, Artificial Sequence
  Description of Artificial Sequence: Synthetic oligonucleotide
  Sense strand starting at position 1561 of SEQ ID NO: 1560833
agacucacucguuaauuag

SEQ ID NO: 1627740 - RNA, 19 nt, Artificial Sequence
  Description of Artificial Sequence: Synthetic oligonucleotide
  Antisense strand to SEQ ID NO: 1627739
cuaauuaacgagugagucu

SEQ ID NO: 1627741 - RNA, 19 nt, Artificial Sequence
  Description of Artificial Sequence: Synthetic oligonucleotide
  Sense strand starting at position 1572 of SEQ ID NO: 1560833
uuaauuaggugcccuacaa

SEQ ID NO: 1627742 - RNA, 19 nt, Artificial Sequence
  Description of Artificial Sequence: Synthetic oligonucleotide
  Antisense strand to SEQ ID NO: 1627741
uuguagggcaccuaauuaa

SEQ ID NO: 1627743 - RNA, 19 nt, Artificial Sequence
  Description of Artificial Sequence: Synthetic oligonucleotide
  Sense strand starting at position 1873 of SEQ ID NO: 1560833
ccagauaauuguuugccca

SEQ ID NO: 1627744 - RNA, 19 nt, Artificial Sequence
  Description of Artificial Sequence: Synthetic oligonucleotide
  Antisense strand to SEQ ID NO: 1627743
ugggcaaacaauuaucugg

SEQ ID NO: 1627745 - RNA, 19 nt, Artificial Sequence
  Description of Artificial Sequence: Synthetic oligonucleotide
  Sense strand starting at position 1875 of SEQ ID NO: 1560833
agauaauuguuugcccaca

SEQ ID NO: 1627746 - RNA, 19 nt, Artificial Sequence
  Description of Artificial Sequence: Synthetic oligonucleotide
  Antisense strand to SEQ ID NO: 1627745
ugugggcaaacaauuaucu

SEQ ID NO: 1627747 - RNA, 19 nt, Artificial Sequence
  Description of Artificial Sequence: Synthetic oligonucleotide
  Sense strand starting at position 1880 of SEQ ID NO: 1560833
auuguuugcccacaacgau

SEQ ID NO: 1627748 - RNA, 19 nt, Artificial Sequence
  Description of Artificial Sequence: Synthetic oligonucleotide
  Antisense strand to SEQ ID NO: 1627747
aucguugugggcaaacaau

SEQ ID NO: 1627749 - RNA, 19 nt, Artificial Sequence
  Description of Artificial Sequence: Synthetic oligonucleotide
  Sense strand starting at position 1980 of SEQ ID NO: 1560833
gggacucucaggugugaug

SEQ ID NO: 1627750 - RNA, 19 nt, Artificial Sequence
  Description of Artificial Sequence: Synthetic oligonucleotide
  Antisense strand to SEQ ID NO: 1627749
caucacaccugagaguccc

SEQ ID NO: 1627751 - RNA, 19 nt, Artificial Sequence
  Description of Artificial Sequence: Synthetic oligonucleotide
  Sense strand starting at position 2603 of SEQ ID NO: 1560833
gaaugaaugggcugcacua

SEQ ID NO: 1627752 - RNA, 19 nt, Artificial Sequence
  Description of Artificial Sequence: Synthetic oligonucleotide
  Antisense strand to SEQ ID NO: 1627751
uagugcagcccauucauuc

SEQ ID NO: 1627753 - RNA, 19 nt, Artificial Sequence
  Description of Artificial Sequence: Synthetic oligonucleotide
  Sense strand starting at position 2679 of SEQ ID NO: 1560833
ccucuaugccaaugaagug

SEQ ID NO: 1627754 - RNA, 19 nt, Artificial Sequence
  Description of Artificial Sequence: Synthetic oligonucleotide
  Antisense strand to SEQ ID NO: 1627753
cacuucauuggcauagagg

SEQ ID NO: 1627755 - RNA, 19 nt, Artificial Sequence
  Description of Artificial Sequence: Synthetic oligonucleotide
  Sense strand starting at position 2738 of SEQ ID NO: 1560833
agaacaaagugucauagac

SEQ ID NO: 1627756 - RNA, 19 nt, Artificial Sequence
  Description of Artificial Sequence: Synthetic oligonucleotide
  Antisense strand to SEQ ID NO: 1627755
gucuaugacacuuuguucu

SEQ ID NO: 1627757 - RNA, 19 nt, Artificial Sequence
  Description of Artificial Sequence: Synthetic oligonucleotide
  Sense strand starting at position 3220 of SEQ ID NO: 1560833
caaggacaccagugauauu

SEQ ID NO: 1627758 - RNA, 19 nt, Artificial Sequence
  Description of Artificial Sequence: Synthetic oligonucleotide
  Antisense strand to SEQ ID NO: 1627757
aauaucacugguguccuug

SEQ ID NO: 1627759 - RNA, 19 nt, Artificial Sequence
  Description of Artificial Sequence: Synthetic oligonucleotide
  Sense strand starting at position 3539 of SEQ ID NO: 1560833
aauggauugugguaaugga

SEQ ID NO: 1627760 - RNA, 19 nt, Artificial Sequence
  Description of Artificial Sequence: Synthetic oligonucleotide
  Antisense strand to SEQ ID NO: 1627759
uccauuaccacaauccauu

SEQ ID NO: 1627761 - RNA, 19 nt, Artificial Sequence
  Description of Artificial Sequence: Synthetic oligonucleotide
  Sense strand starting at position 3543 of SEQ ID NO: 1560833
gauugugguaauggacaca

SEQ ID NO: 1627762 - RNA, 19 nt, Artificial Sequence
  Description of Artificial Sequence: Synthetic oligonucleotide
  Antisense strand to SEQ ID NO: 1627761
uguguccauuaccacaauc

SEQ ID NO: 1627763 - RNA, 19 nt, Artificial Sequence
  Description of Artificial Sequence: Synthetic oligonucleotide
  Sense strand starting at position 3575 of SEQ ID NO: 1560833
acugaaagccauugacuua

SEQ ID NO: 1627764 - RNA, 19 nt, Artificial Sequence
  Description of Artificial Sequence: Synthetic oligonucleotide
  Antisense strand to SEQ ID NO: 1627763
uaagucaauggcuuucagu

SEQ ID NO: 1627765 - RNA, 19 nt, Artificial Sequence
  Description of Artificial Sequence: Synthetic oligonucleotide
  Sense strand starting at position 3606 of SEQ ID NO: 1560833
cagcgaguuguaugguaug

SEQ ID NO: 1627766 - RNA, 19 nt, Artificial Sequence
  Description of Artificial Sequence: Synthetic oligonucleotide
  Antisense strand to SEQ ID NO: 1627765
cauaccauacaacucgcug

SEQ ID NO: 1627767 - RNA, 19 nt, Artificial Sequence
  Description of Artificial Sequence: Synthetic oligonucleotide
  Sense strand starting at position 3936 of SEQ ID NO: 1560833
agacccgucucuuuacaaa

SEQ ID NO: 1627768 - RNA, 19 nt, Artificial Sequence
  Description of Artificial Sequence: Synthetic oligonucleotide
  Antisense strand to SEQ ID NO: 1627767
uuuguaaagagacgggucu

SEQ ID NO: 1627769 - RNA, 19 nt, Artificial Sequence
  Description of Artificial Sequence: Synthetic oligonucleotide
  Sense strand starting at position 92 of SEQ ID NO: 1560834
uguucuagauccuucuauc

SEQ ID NO: 1627770 - RNA, 19 nt, Artificial Sequence
  Description of Artificial Sequence: Synthetic oligonucleotide
  Antisense strand to SEQ ID NO: 1627769
gauagaaggaucuagaaca

SEQ ID NO: 1627771 - RNA, 19 nt, Artificial Sequence
  Description of Artificial Sequence: Synthetic oligonucleotide
  Sense strand starting at position 429 of SEQ ID NO: 1560834
ccuggcuucucucuugcaa

SEQ ID NO: 1627772 - RNA, 19 nt, Artificial Sequence
  Description of Artificial Sequence: Synthetic oligonucleotide
  Antisense strand to SEQ ID NO: 1627771
uugcaagagagaagccagg

SEQ ID NO: 1627773 - RNA, 19 nt, Artificial Sequence
  Description of Artificial Sequence: Synthetic oligonucleotide
  Sense strand starting at position 431 of SEQ ID NO: 1560834
uggcuucucucuugcaaac

SEQ ID NO: 1627774 - RNA, 19 nt, Artificial Sequence
  Description of Artificial Sequence: Synthetic oligonucleotide
  Antisense strand to SEQ ID NO: 1627773
guuugcaagagagaagcca

SEQ ID NO: 1627775 - RNA, 19 nt, Artificial Sequence
  Description of Artificial Sequence: Synthetic oligonucleotide
  Sense strand starting at position 880 of SEQ ID NO: 1560834
caccguguucgcuaggauc

SEQ ID NO: 1627776 - RNA, 19 nt, Artificial Sequence
  Description of Artificial Sequence: Synthetic oligonucleotide
  Antisense strand to SEQ ID NO: 1627775
gauccuagcgaacacggug

SEQ ID NO: 1627777 - RNA, 19 nt, Artificial Sequence
  Description of Artificial Sequence: Synthetic oligonucleotide
  Sense strand starting at position 1002 of SEQ ID NO: 1560834
aacccauuacggugucgua

SEQ ID NO: 1627778 - RNA, 19 nt, Artificial Sequence
  Description of Artificial Sequence: Synthetic oligonucleotide
  Antisense strand to SEQ ID NO: 1627777
uacgacaccguaauggguu

SEQ ID NO: 1627779 - RNA, 19 nt, Artificial Sequence
  Description of Artificial Sequence: Synthetic oligonucleotide
  Sense strand starting at position 1157 of SEQ ID NO: 1560834
cgccaugauuuccguaucu

SEQ ID NO: 1627780 - RNA, 19 nt, Artificial Sequence
  Description of Artificial Sequence: Synthetic oligonucleotide
  Antisense strand to SEQ ID NO: 1627779
agauacggaaaucauggcg

SEQ ID NO: 1627781 - RNA, 19 nt, Artificial Sequence
  Description of Artificial Sequence: Synthetic oligonucleotide
  Sense strand starting at position 1543 of SEQ ID NO: 1560834
gcaggugcucucugggagu

SEQ ID NO: 1627782 - RNA, 19 nt, Artificial Sequence
  Description of Artificial Sequence: Synthetic oligonucleotide
  Antisense strand to SEQ ID NO: 1627781
acucccagagagcaccugc

SEQ ID NO: 1627783 - RNA, 19 nt, Artificial Sequence
  Description of Artificial Sequence: Synthetic oligonucleotide
  Sense strand starting at position 2161 of SEQ ID NO: 1560834
gcggguucacuguugcgau

SEQ ID NO: 1627784 - RNA, 19 nt, Artificial Sequence
  Description of Artificial Sequence: Synthetic oligonucleotide
  Antisense strand to SEQ ID NO: 1627783
aucgcaacagugaacccgc

SEQ ID NO: 1627785 - RNA, 19 nt, Artificial Sequence
  Description of Artificial Sequence: Synthetic oligonucleotide
  Sense strand starting at position 2162 of SEQ ID NO: 1560834
cggguucacuguugcgaua

SEQ ID NO: 1627786 - RNA, 19 nt, Artificial Sequence
  Description of Artificial Sequence: Synthetic oligonucleotide
  Antisense strand to SEQ ID NO: 1627785
uaucgcaacagugaacccg

SEQ ID NO: 1627787 - RNA, 19 nt, Artificial Sequence
  Description of Artificial Sequence: Synthetic oligonucleotide
  Sense strand starting at position 2164 of SEQ ID NO: 1560834
gguucacuguugcgauaac

SEQ ID NO: 1627788 - RNA, 19 nt, Artificial Sequence
  Description of Artificial Sequence: Synthetic oligonucleotide
  Antisense strand to SEQ ID NO: 1627787
guuaucgcaacagugaacc

SEQ ID NO: 1627789 - RNA, 19 nt, Artificial Sequence
  Description of Artificial Sequence: Synthetic oligonucleotide
  Sense strand starting at position 2184 of SEQ ID NO: 1560834
cguccuacccuuuguuuga

SEQ ID NO: 1627790 - RNA, 19 nt, Artificial Sequence
  Description of Artificial Sequence: Synthetic oligonucleotide
  Antisense strand to SEQ ID NO: 1627789
ucaaacaaaggguaggacg

SEQ ID NO: 1627791 - RNA, 19 nt, Artificial Sequence
  Description of Artificial Sequence: Synthetic oligonucleotide
  Sense strand starting at position 2256 of SEQ ID NO: 1560834
ccggccuaaucagaaucau

SEQ ID NO: 1627792 - RNA, 19 nt, Artificial Sequence
  Description of Artificial Sequence: Synthetic oligonucleotide
  Antisense strand to SEQ ID NO: 1627791
augauucugauuaggccgg

SEQ ID NO: 1627793 - RNA, 19 nt, Artificial Sequence
  Description of Artificial Sequence: Synthetic oligonucleotide
  Sense strand starting at position 2379 of SEQ ID NO: 1560834
caaugaaucgcgucccguu

SEQ ID NO: 1627794 - RNA, 19 nt, Artificial Sequence
  Description of Artificial Sequence: Synthetic oligonucleotide
  Antisense strand to SEQ ID NO: 1627793
aacgggacgcgauucauug

SEQ ID NO: 1627795 - RNA, 19 nt, Artificial Sequence
  Description of Artificial Sequence: Synthetic oligonucleotide
  Sense strand starting at position 3446 of SEQ ID NO: 1560834
gagcguaaauguuuguuaa

SEQ ID NO: 1627796 - RNA, 19 nt, Artificial Sequence
  Description of Artificial Sequence: Synthetic oligonucleotide
  Antisense strand to SEQ ID NO: 1627795
uuaacaaacauuuacgcuc

SEQ ID NO: 1627797 - RNA, 19 nt, Artificial Sequence
  Description of Artificial Sequence: Synthetic oligonucleotide
  Sense strand starting at position 3447 of SEQ ID NO: 1560834
agcguaaauguuuguuaag

SEQ ID NO: 1627798 - RNA, 19 nt, Artificial Sequence
  Description of Artificial Sequence: Synthetic oligonucleotide
  Antisense strand to SEQ ID NO: 1627797
cuuaacaaacauuuacgcu

SEQ ID NO: 1627799 - RNA, 19 nt, Artificial Sequence
  Description of Artificial Sequence: Synthetic oligonucleotide
  Sense strand starting at position 3448 of SEQ ID NO: 1560834
gcguaaauguuuguuaaga

SEQ ID NO: 1627800 - RNA, 19 nt, Artificial Sequence
  Description of Artificial Sequence: Synthetic oligonucleotide
  Antisense strand to SEQ ID NO: 1627799
ucuuaacaaacauuuacgc

SEQ ID NO: 1627801 - RNA, 19 nt, Artificial Sequence
  Description of Artificial Sequence: Synthetic oligonucleotide
  Sense strand starting at position 3449 of SEQ ID NO: 1560834
cguaaauguuuguuaagac

SEQ ID NO: 1627802 - RNA, 19 nt, Artificial Sequence
  Description of Artificial Sequence: Synthetic oligonucleotide
  Antisense strand to SEQ ID NO: 1627801
gucuuaacaaacauuuacg

SEQ ID NO: 1627803 - RNA, 19 nt, Artificial Sequence
  Description of Artificial Sequence: Synthetic oligonucleotide
  Sense strand starting at position 3450 of SEQ ID NO: 1560834
guaaauguuuguuaagacg

SEQ ID NO: 1627804 - RNA, 19 nt, Artificial Sequence
  Description of Artificial Sequence: Synthetic oligonucleotide
  Antisense strand to SEQ ID NO: 1627803
cgucuuaacaaacauuuac

SEQ ID NO: 1627805 - RNA, 19 nt, Artificial Sequence
  Description of Artificial Sequence: Synthetic oligonucleotide
  Sense strand starting at position 3466 of SEQ ID NO: 1560834
acggaguuggguugucuga

SEQ ID NO: 1627806 - RNA, 19 nt, Artificial Sequence
  Description of Artificial Sequence: Synthetic oligonucleotide
  Antisense strand to SEQ ID NO: 1627805
ucagacaacccaacuccgu

SEQ ID NO: 1627807 - RNA, 19 nt, Artificial Sequence
  Description of Artificial Sequence: Synthetic oligonucleotide
  Sense strand starting at position 3545 of SEQ ID NO: 1560834
uugugacuccauuacaguu

SEQ ID NO: 1627808 - RNA, 19 nt, Artificial Sequence
  Description of Artificial Sequence: Synthetic oligonucleotide
  Antisense strand to SEQ ID NO: 1627807
aacuguaauggagucacaa

SEQ ID NO: 1627809 - RNA, 19 nt, Artificial Sequence
  Description of Artificial Sequence: Synthetic oligonucleotide
  Sense strand starting at position 3554 of SEQ ID NO: 1560834
cauuacaguucuuccguga

SEQ ID NO: 1627810 - RNA, 19 nt, Artificial Sequence
  Description of Artificial Sequence: Synthetic oligonucleotide
  Antisense strand to SEQ ID NO: 1627809
ucacggaagaacuguaaug

SEQ ID NO: 1627811 - RNA, 19 nt, Artificial Sequence
  Description of Artificial Sequence: Synthetic oligonucleotide
  Sense strand starting at position 3557 of SEQ ID NO: 1560834
uacaguucuuccgugacuu

SEQ ID NO: 1627812 - RNA, 19 nt, Artificial Sequence
  Description of Artificial Sequence: Synthetic oligonucleotide
  Antisense strand to SEQ ID NO: 1627811
aagucacggaagaacugua

SEQ ID NO: 1627813 - RNA, 19 nt, Artificial Sequence
  Description of Artificial Sequence: Synthetic oligonucleotide
  Sense strand starting at position 3558 of SEQ ID NO: 1560834
acaguucuuccgugacuuu

SEQ ID NO: 1627814 - RNA, 19 nt, Artificial Sequence
  Description of Artificial Sequence: Synthetic oligonucleotide
  Antisense strand to SEQ ID NO: 1627813
aaagucacggaagaacugu

SEQ ID NO: 1627815 - RNA, 19 nt, Artificial Sequence
  Description of Artificial Sequence: Synthetic oligonucleotide
  Sense strand starting at position 3619 of SEQ ID NO: 1560834
cuagcaagagcauguagua

SEQ ID NO: 1627816 - RNA, 19 nt, Artificial Sequence
  Description of Artificial Sequence: Synthetic oligonucleotide
  Antisense strand to SEQ ID NO: 1627815
uacuacaugcucuugcuag

SEQ ID NO: 1627817 - RNA, 19 nt, Artificial Sequence
  Description of Artificial Sequence: Synthetic oligonucleotide
  Sense strand starting at position 3846 of SEQ ID NO: 1560834
gccguucaacauggugaaa

SEQ ID NO: 1627818 - RNA, 19 nt, Artificial Sequence
  Description of Artificial Sequence: Synthetic oligonucleotide
  Antisense strand to SEQ ID NO: 1627817
uuucaccauguugaacggc

SEQ ID NO: 1627819 - RNA, 19 nt, Artificial Sequence
  Description of Artificial Sequence: Synthetic oligonucleotide
  Sense strand starting at position 10 of SEQ ID NO: 1560835
auaagaguauuguguaucu

SEQ ID NO: 1627820 - RNA, 19 nt, Artificial Sequence
  Description of Artificial Sequence: Synthetic oligonucleotide
  Antisense strand to SEQ ID NO: 1627819
agauacacaauacucuuau

SEQ ID NO: 1627821 - RNA, 19 nt, Artificial Sequence
  Description of Artificial Sequence: Synthetic oligonucleotide
  Sense strand starting at position 15 of SEQ ID NO: 1560835
aguauuguguaucuccaaa

SEQ ID NO: 1627822 - RNA, 19 nt, Artificial Sequence
  Description of Artificial Sequence: Synthetic oligonucleotide
  Antisense strand to SEQ ID NO: 1627821
uuuggagauacacaauacu

SEQ ID NO: 1627823 - RNA, 19 nt, Artificial Sequence
  Description of Artificial Sequence: Synthetic oligonucleotide
  Sense strand starting at position 26 of SEQ ID NO: 1560835
ucuccaaauugcuagagga

SEQ ID NO: 1627824 - RNA, 19 nt, Artificial Sequence
  Description of Artificial Sequence: Synthetic oligonucleotide
  Antisense strand to SEQ ID NO: 1627823
uccucuagcaauuuggaga

SEQ ID NO: 1627825 - RNA, 19 nt, Artificial Sequence
  Description of Artificial Sequence: Synthetic oligonucleotide
  Sense strand starting at position 53 of SEQ ID NO: 1560835
auguucucacaagauguua

SEQ ID NO: 1627826 - RNA, 19 nt, Artificial Sequence
  Description of Artificial Sequence: Synthetic oligonucleotide
  Antisense strand to SEQ ID NO: 1627825
uaacaucuugugagaacau

SEQ ID NO: 1627827 - RNA, 19 nt, Artificial Sequence
  Description of Artificial Sequence: Synthetic oligonucleotide
  Sense strand starting at position 58 of SEQ ID NO: 1560835
cucacaagauguuaaguau

SEQ ID NO: 1627828 - RNA, 19 nt, Artificial Sequence
  Description of Artificial Sequence: Synthetic oligonucleotide
  Antisense strand to SEQ ID NO: 1627827
auacuuaacaucuugugag

SEQ ID NO: 1627829 - RNA, 19 nt, Artificial Sequence
  Description of Artificial Sequence: Synthetic oligonucleotide
  Sense strand starting at position 78 of SEQ ID NO: 1560835
ugaggugaugaaugcauua

SEQ ID NO: 1627830 - RNA, 19 nt, Artificial Sequence
  Description of Artificial Sequence: Synthetic oligonucleotide
  Antisense strand to SEQ ID NO: 1627829
uaaugcauucaucaccuca

SEQ ID NO: 1627831 - RNA, 19 nt, Artificial Sequence
  Description of Artificial Sequence: Synthetic oligonucleotide
  Sense strand starting at position 2148 of SEQ ID NO: 1560835
cccggagucccaggcauua

SEQ ID NO: 1627832 - RNA, 19 nt, Artificial Sequence
  Description of Artificial Sequence: Synthetic oligonucleotide
  Antisense strand to SEQ ID NO: 1627831
uaaugccugggacuccggg

SEQ ID NO: 1627833 - RNA, 19 nt, Artificial Sequence
  Description of Artificial Sequence: Synthetic oligonucleotide
  Sense strand starting at position 2172 of SEQ ID NO: 1560835
cccuuaaugcgcugugaua

SEQ ID NO: 1627834 - RNA, 19 nt, Artificial Sequence
  Description of Artificial Sequence: Synthetic oligonucleotide
  Antisense strand to SEQ ID NO: 1627833
uaucacagcgcauuaaggg

SEQ ID NO: 1627835 - RNA, 19 nt, Artificial Sequence
  Description of Artificial Sequence: Synthetic oligonucleotide
  Sense strand starting at position 2179 of SEQ ID NO: 1560835
ugcgcugugauaggaagua

SEQ ID NO: 1627836 - RNA, 19 nt, Artificial Sequence
  Description of Artificial Sequence: Synthetic oligonucleotide
  Antisense strand to SEQ ID NO: 1627835
uacuuccuaucacagcgca

SEQ ID NO: 1627837 - RNA, 19 nt, Artificial Sequence
  Description of Artificial Sequence: Synthetic oligonucleotide
  Sense strand starting at position 2401 of SEQ ID NO: 1560835
gugggauaaugguauuauc

SEQ ID NO: 1627838 - RNA, 19 nt, Artificial Sequence
  Description of Artificial Sequence: Synthetic oligonucleotide
  Antisense strand to SEQ ID NO: 1627837
gauaauaccauuaucccac

SEQ ID NO: 1627839 - RNA, 19 nt, Artificial Sequence
  Description of Artificial Sequence: Synthetic oligonucleotide
  Sense strand starting at position 2409 of SEQ ID NO: 1560835
augguauuaucagucauua

SEQ ID NO: 1627840 - RNA, 19 nt, Artificial Sequence
  Description of Artificial Sequence: Synthetic oligonucleotide
  Antisense strand to SEQ ID NO: 1627839
uaaugacugauaauaccau

SEQ ID NO: 1627841 - RNA, 19 nt, Artificial Sequence
  Description of Artificial Sequence: Synthetic oligonucleotide
  Sense strand starting at position 2510 of SEQ ID NO: 1560835
ccgauuugcuacuacauaa

SEQ ID NO: 1627842 - RNA, 19 nt, Artificial Sequence
  Description of Artificial Sequence: Synthetic oligonucleotide
  Antisense strand to SEQ ID NO: 1627841
uuauguaguagcaaaucgg

SEQ ID NO: 1627843 - RNA, 19 nt, Artificial Sequence
  Description of Artificial Sequence: Synthetic oligonucleotide
  Sense strand starting at position 2542 of SEQ ID NO: 1560835
guguaaauacaguaagauu

SEQ ID NO: 1627844 - RNA, 19 nt, Artificial Sequence
  Description of Artificial Sequence: Synthetic oligonucleotide
  Antisense strand to SEQ ID NO: 1627843
aaucuuacuguauuuacac

SEQ ID NO: 1627845 - RNA, 19 nt, Artificial Sequence
  Description of Artificial Sequence: Synthetic oligonucleotide
  Sense strand starting at position 2554 of SEQ ID NO: 1560835
uaagauugaccaugaguug

SEQ ID NO: 1627846 - RNA, 19 nt, Artificial Sequence
  Description of Artificial Sequence: Synthetic oligonucleotide
  Antisense strand to SEQ ID NO: 1627845
caacucauggucaaucuua

SEQ ID NO: 1627847 - RNA, 19 nt, Artificial Sequence
  Description of Artificial Sequence: Synthetic oligonucleotide
  Sense strand starting at position 3179 of SEQ ID NO: 1560835
uuucgagcuccugaaauca

SEQ ID NO: 1627848 - RNA, 19 nt, Artificial Sequence
  Description of Artificial Sequence: Synthetic oligonucleotide
  Antisense strand to SEQ ID NO: 1627847
ugauuucaggagcucgaaa

SEQ ID NO: 1627849 - RNA, 19 nt, Artificial Sequence
  Description of Artificial Sequence: Synthetic oligonucleotide
  Sense strand starting at position 3360 of SEQ ID NO: 1560835
cgcagaacuucggagggaa

SEQ ID NO: 1627850 - RNA, 19 nt, Artificial Sequence
  Description of Artificial Sequence: Synthetic oligonucleotide
  Antisense strand to SEQ ID NO: 1627849
uucccuccgaaguucugcg

SEQ ID NO: 1627851 - RNA, 19 nt, Artificial Sequence
  Description of Artificial Sequence: Synthetic oligonucleotide
  Sense strand starting at position 3430 of SEQ ID NO: 1560835
ccacaagugucaggaacuu

SEQ ID NO: 1627852 - RNA, 19 nt, Artificial Sequence
  Description of Artificial Sequence: Synthetic oligonucleotide
  Antisense strand to SEQ ID NO: 1627851
aaguuccugacacuugugg

SEQ ID NO: 1627853 - RNA, 19 nt, Artificial Sequence
  Description of Artificial Sequence: Synthetic oligonucleotide
  Sense strand starting at position 3467 of SEQ ID NO: 1560835
cuguauaucucaucuguaa

SEQ ID NO: 1627854 - RNA, 19 nt, Artificial Sequence
  Description of Artificial Sequence: Synthetic oligonucleotide
  Antisense strand to SEQ ID NO: 1627853
uuacagaugagauauacag

SEQ ID NO: 1627855 - RNA, 19 nt, Artificial Sequence
  Description of Artificial Sequence: Synthetic oligonucleotide
  Sense strand starting at position 3471 of SEQ ID NO: 1560835
auaucucaucuguaauggu

SEQ ID NO: 1627856 - RNA, 19 nt, Artificial Sequence
  Description of Artificial Sequence: Synthetic oligonucleotide
  Antisense strand to SEQ ID NO: 1627855
accauuacagaugagauau

SEQ ID NO: 1627857 - RNA, 19 nt, Artificial Sequence
  Description of Artificial Sequence: Synthetic oligonucleotide
  Sense strand starting at position 3486 of SEQ ID NO: 1560835
ugguucuaagacuguauau

SEQ ID NO: 1627858 - RNA, 19 nt, Artificial Sequence
  Description of Artificial Sequence: Synthetic oligonucleotide
  Antisense strand to SEQ ID NO: 1627857
auauacagucuuagaacca

SEQ ID NO: 1627859 - RNA, 19 nt, Artificial Sequence
  Description of Artificial Sequence: Synthetic oligonucleotide
  Sense strand starting at position 3488 of SEQ ID NO: 1560835
guucuaagacuguauauac

SEQ ID NO: 1627860 - RNA, 19 nt, Artificial Sequence
  Description of Artificial Sequence: Synthetic oligonucleotide
  Antisense strand to SEQ ID NO: 1627859
guauauacagucuuagaac

SEQ ID NO: 1627861 - RNA, 19 nt, Artificial Sequence
  Description of Artificial Sequence: Synthetic oligonucleotide
  Sense strand starting at position 3540 of SEQ ID NO: 1560835
aggugaaucuuacuauaug

SEQ ID NO: 1627862 - RNA, 19 nt, Artificial Sequence
  Description of Artificial Sequence: Synthetic oligonucleotide
  Antisense strand to SEQ ID NO: 1627861
cauauaguaagauucaccu

SEQ ID NO: 1627863 - RNA, 19 nt, Artificial Sequence
  Description of Artificial Sequence: Synthetic oligonucleotide
  Sense strand starting at position 3541 of SEQ ID NO: 1560835
ggugaaucuuacuauaugu

SEQ ID NO: 1627864 - RNA, 19 nt, Artificial Sequence
  Description of Artificial Sequence: Synthetic oligonucleotide
  Antisense strand to SEQ ID NO: 1627863
acauauaguaagauucacc

SEQ ID NO: 1627865 - RNA, 19 nt, Artificial Sequence
  Description of Artificial Sequence: Synthetic oligonucleotide
  Sense strand starting at position 3713 of SEQ ID NO: 1560835
ccagcaaggaucuggagau

SEQ ID NO: 1627866 - RNA, 19 nt, Artificial Sequence
  Description of Artificial Sequence: Synthetic oligonucleotide
  Antisense strand to SEQ ID NO: 1627865
aucuccagauccuugcugg

SEQ ID NO: 1627867 - RNA, 19 nt, Artificial Sequence
  Description of Artificial Sequence: Synthetic oligonucleotide
  Sense strand starting at position 3928 of SEQ ID NO: 1560835
cguccagguucuuggaaua

SEQ ID NO: 1627868 - RNA, 19 nt, Artificial Sequence
  Description of Artificial Sequence: Synthetic oligonucleotide
  Antisense strand to SEQ ID NO: 1627867
uauuccaagaaccuggacg

SEQ ID NO: 1627869 - RNA, 19 nt, Artificial Sequence
  Description of Artificial Sequence: Synthetic oligonucleotide
  Sense strand starting at position 177 of SEQ ID NO: 1560836
agauguacacggcagaaau

SEQ ID NO: 1627870 - RNA, 19 nt, Artificial Sequence
  Description of Artificial Sequence: Synthetic oligonucleotide
  Antisense strand to SEQ ID NO: 1627869
auuucugccguguacaucu

SEQ ID NO: 1627871 - RNA, 19 nt, Artificial Sequence
  Description of Artificial Sequence: Synthetic oligonucleotide
  Sense strand starting at position 197 of SEQ ID NO: 1560836
aaugaaauuugcgucguuu

SEQ ID NO: 1627872 - RNA, 19 nt, Artificial Sequence
  Description of Artificial Sequence: Synthetic oligonucleotide
  Antisense strand to SEQ ID NO: 1627871
aaacgacgcaaauuucauu

SEQ ID NO: 1627873 - RNA, 19 nt, Artificial Sequence
  Description of Artificial Sequence: Synthetic oligonucleotide
  Sense strand starting at position 323 of SEQ ID NO: 1560836
auaaauauuugcuggagag

SEQ ID NO: 1627874 - RNA, 19 nt, Artificial Sequence
  Description of Artificial Sequence: Synthetic oligonucleotide
  Antisense strand to SEQ ID NO: 1627873
cucuccagcaaauauuuau

SEQ ID NO: 1627875 - RNA, 19 nt, Artificial Sequence
  Description of Artificial Sequence: Synthetic oligonucleotide
  Sense strand starting at position 368 of SEQ ID NO: 1560836
aauagagaauuguccagua

SEQ ID NO: 1627876 - RNA, 19 nt, Artificial Sequence
  Description of Artificial Sequence: Synthetic oligonucleotide
  Antisense strand to SEQ ID NO: 1627875
uacuggacaauucucuauu

SEQ ID NO: 1627877 - RNA, 19 nt, Artificial Sequence
  Description of Artificial Sequence: Synthetic oligonucleotide
  Sense strand starting at position 373 of SEQ ID NO: 1560836
agaauuguccaguagcuaa

SEQ ID NO: 1627878 - RNA, 19 nt, Artificial Sequence
  Description of Artificial Sequence: Synthetic oligonucleotide
  Antisense strand to SEQ ID NO: 1627877
uuagcuacuggacaauucu

SEQ ID NO: 1627879 - RNA, 19 nt, Artificial Sequence
  Description of Artificial Sequence: Synthetic oligonucleotide
  Sense strand starting at position 415 of SEQ ID NO: 1560836
aacauucuagagugugaac

SEQ ID NO: 1627880 - RNA, 19 nt, Artificial Sequence
  Description of Artificial Sequence: Synthetic oligonucleotide
  Antisense strand to SEQ ID NO: 1627879
guucacacucuagaauguu

SEQ ID NO: 1627881 - RNA, 19 nt, Artificial Sequence
  Description of Artificial Sequence: Synthetic oligonucleotide
  Sense strand starting at position 604 of SEQ ID NO: 1560836
aucagaauagcuuaccagu

SEQ ID NO: 1627882 - RNA, 19 nt, Artificial Sequence
  Description of Artificial Sequence: Synthetic oligonucleotide
  Antisense strand to SEQ ID NO: 1627881
acugguaagcuauucugau

SEQ ID NO: 1627883 - RNA, 19 nt, Artificial Sequence
  Description of Artificial Sequence: Synthetic oligonucleotide
  Sense strand starting at position 636 of SEQ ID NO: 1560836
gcacuuacuaagugaggca

SEQ ID NO: 1627884 - RNA, 19 nt, Artificial Sequence
  Description of Artificial Sequence: Synthetic oligonucleotide
  Antisense strand to SEQ ID NO: 1627883
ugccucacuuaguaagugc

SEQ ID NO: 1627885 - RNA, 19 nt, Artificial Sequence
  Description of Artificial Sequence: Synthetic oligonucleotide
  Sense strand starting at position 784 of SEQ ID NO: 1560836
cugcacacguguuuauuua

SEQ ID NO: 1627886 - RNA, 19 nt, Artificial Sequence
  Description of Artificial Sequence: Synthetic oligonucleotide
  Antisense strand to SEQ ID NO: 1627885
uaaauaaacacgugugcag

SEQ ID NO: 1627887 - RNA, 19 nt, Artificial Sequence
  Description of Artificial Sequence: Synthetic oligonucleotide
  Sense strand starting at position 785 of SEQ ID NO: 1560836
ugcacacguguuuauuuaa

SEQ ID NO: 1627888 - RNA, 19 nt, Artificial Sequence
  Description of Artificial Sequence: Synthetic oligonucleotide
  Antisense strand to SEQ ID NO: 1627887
uuaaauaaacacgugugca

SEQ ID NO: 1627889 - RNA, 19 nt, Artificial Sequence
  Description of Artificial Sequence: Synthetic oligonucleotide
  Sense strand starting at position 811 of SEQ ID NO: 1560836
gaagauacccugcggauga

SEQ ID NO: 1627890 - RNA, 19 nt, Artificial Sequence
  Description of Artificial Sequence: Synthetic oligonucleotide
  Antisense strand to SEQ ID NO: 1627889
ucauccgcaggguaucuuc

SEQ ID NO: 1627891 - RNA, 19 nt, Artificial Sequence
  Description of Artificial Sequence: Synthetic oligonucleotide
  Sense strand starting at position 903 of SEQ ID NO: 1560836
agaaauccauuuggugaaa

SEQ ID NO: 1627892 - RNA, 19 nt, Artificial Sequence
  Description of Artificial Sequence: Synthetic oligonucleotide
  Antisense strand to SEQ ID NO: 1627891
uuucaccaaauggauuucu

SEQ ID NO: 1627893 - RNA, 19 nt, Artificial Sequence
  Description of Artificial Sequence: Synthetic oligonucleotide
  Sense strand starting at position 1062 of SEQ ID NO: 1560836
uguuguuuccuauacauaa

SEQ ID NO: 1627894 - RNA, 19 nt, Artificial Sequence
  Description of Artificial Sequence: Synthetic oligonucleotide
  Antisense strand to SEQ ID NO: 1627893
uuauguauaggaaacaaca

SEQ ID NO: 1627895 - RNA, 19 nt, Artificial Sequence
  Description of Artificial Sequence: Synthetic oligonucleotide
  Sense strand starting at position 1191 of SEQ ID NO: 1560836
cucagaaggcuuuggaaua

SEQ ID NO: 1627896 - RNA, 19 nt, Artificial Sequence
  Description of Artificial Sequence: Synthetic oligonucleotide
  Antisense strand to SEQ ID NO: 1627895
uauuccaaagccuucugag

SEQ ID NO: 1627897 - RNA, 19 nt, Artificial Sequence
  Description of Artificial Sequence: Synthetic oligonucleotide
  Sense strand starting at position 1294 of SEQ ID NO: 1560836
cgguauuagggacaacgau

SEQ ID NO: 1627898 - RNA, 19 nt, Artificial Sequence
  Description of Artificial Sequence: Synthetic oligonucleotide
  Antisense strand to SEQ ID NO: 1627897
aucguugucccuaauaccg

SEQ ID NO: 1627899 - RNA, 19 nt, Artificial Sequence
  Description of Artificial Sequence: Synthetic oligonucleotide
  Sense strand starting at position 1345 of SEQ ID NO: 1560836
cccggucccuuaucagaaa

SEQ ID NO: 1627900 - RNA, 19 nt, Artificial Sequence
  Description of Artificial Sequence: Synthetic oligonucleotide
  Antisense strand to SEQ ID NO: 1627899
uuucugauaagggaccggg

SEQ ID NO: 1627901 - RNA, 19 nt, Artificial Sequence
  Description of Artificial Sequence: Synthetic oligonucleotide
  Sense strand starting at position 1373 of SEQ ID NO: 1560836
gggcgugugauccauccaa

SEQ ID NO: 1627902 - RNA, 19 nt, Artificial Sequence
  Description of Artificial Sequence: Synthetic oligonucleotide
  Antisense strand to SEQ ID NO: 1627901
uuggauggaucacacgccc

SEQ ID NO: 1627903 - RNA, 19 nt, Artificial Sequence
  Description of Artificial Sequence: Synthetic oligonucleotide
  Sense strand starting at position 1375 of SEQ ID NO: 1560836
gcgugugauccauccaagc

SEQ ID NO: 1627904 - RNA, 19 nt, Artificial Sequence
  Description of Artificial Sequence: Synthetic oligonucleotide
  Antisense strand to SEQ ID NO: 1627903
gcuuggauggaucacacgc

SEQ ID NO: 1627905 - RNA, 19 nt, Artificial Sequence
  Description of Artificial Sequence: Synthetic oligonucleotide
  Sense strand starting at position 1485 of SEQ ID NO: 1560836
auaccugucggcuaaacuu

SEQ ID NO: 1627906 - RNA, 19 nt, Artificial Sequence
  Description of Artificial Sequence: Synthetic oligonucleotide
  Antisense strand to SEQ ID NO: 1627905
aaguuuagccgacagguau

SEQ ID NO: 1627907 - RNA, 19 nt, Artificial Sequence
  Description of Artificial Sequence: Synthetic oligonucleotide
  Sense strand starting at position 1494 of SEQ ID NO: 1560836
ggcuaaacuugggucauaa

SEQ ID NO: 1627908 - RNA, 19 nt, Artificial Sequence
  Description of Artificial Sequence: Synthetic oligonucleotide
  Antisense strand to SEQ ID NO: 1627907
uuaugacccaaguuuagcc

SEQ ID NO: 1627909 - RNA, 19 nt, Artificial Sequence
  Description of Artificial Sequence: Synthetic oligonucleotide
  Sense strand starting at position 1563 of SEQ ID NO: 1560836
cugagauugugcuuggauc

SEQ ID NO: 1627910 - RNA, 19 nt, Artificial Sequence
  Description of Artificial Sequence: Synthetic oligonucleotide
  Antisense strand to SEQ ID NO: 1627909
gauccaagcacaaucucag

SEQ ID NO: 1627911 - RNA, 19 nt, Artificial Sequence
  Description of Artificial Sequence: Synthetic oligonucleotide
  Sense strand starting at position 1565 of SEQ ID NO: 1560836
gagauugugcuuggaucca

SEQ ID NO: 1627912 - RNA, 19 nt, Artificial Sequence
  Description of Artificial Sequence: Synthetic oligonucleotide
  Antisense strand to SEQ ID NO: 1627911
uggauccaagcacaaucuc

SEQ ID NO: 1627913 - RNA, 19 nt, Artificial Sequence
  Description of Artificial Sequence: Synthetic oligonucleotide
  Sense strand starting at position 2263 of SEQ ID NO: 1560836
aauaauuaugggugcaaug

SEQ ID NO: 1627914 - RNA, 19 nt, Artificial Sequence
  Description of Artificial Sequence: Synthetic oligonucleotide
  Antisense strand to SEQ ID NO: 1627913
cauugcacccauaauuauu

SEQ ID NO: 1627915 - RNA, 19 nt, Artificial Sequence
  Description of Artificial Sequence: Synthetic oligonucleotide
  Sense strand starting at position 2295 of SEQ ID NO: 1560836
gaggguuaggcguauauua

SEQ ID NO: 1627916 - RNA, 19 nt, Artificial Sequence
  Description of Artificial Sequence: Synthetic oligonucleotide
  Antisense strand to SEQ ID NO: 1627915
uaauauacgccuaacccuc

SEQ ID NO: 1627917 - RNA, 19 nt, Artificial Sequence
  Description of Artificial Sequence: Synthetic oligonucleotide
  Sense strand starting at position 2297 of SEQ ID NO: 1560836
ggguuaggcguauauuauc

SEQ ID NO: 1627918 - RNA, 19 nt, Artificial Sequence
  Description of Artificial Sequence: Synthetic oligonucleotide
  Antisense strand to SEQ ID NO: 1627917
gauaauauacgccuaaccc

SEQ ID NO: 1627919 - RNA, 19 nt, Artificial Sequence
  Description of Artificial Sequence: Synthetic oligonucleotide
  Sense strand starting at position 2518 of SEQ ID NO: 1560836
gcaagagccuaucucuacu

SEQ ID NO: 1627920 - RNA, 19 nt, Artificial Sequence
  Description of Artificial Sequence: Synthetic oligonucleotide
  Antisense strand to SEQ ID NO: 1627919
aguagagauaggcucuugc

SEQ ID NO: 1627921 - RNA, 19 nt, Artificial Sequence
  Description of Artificial Sequence: Synthetic oligonucleotide
  Sense strand starting at position 2812 of SEQ ID NO: 1560836
guguaaacucuuuggugga

SEQ ID NO: 1627922 - RNA, 19 nt, Artificial Sequence
  Description of Artificial Sequence: Synthetic oligonucleotide
  Antisense strand to SEQ ID NO: 1627921
uccaccaaagaguuuacac

SEQ ID NO: 1627923 - RNA, 19 nt, Artificial Sequence
  Description of Artificial Sequence: Synthetic oligonucleotide
  Sense strand starting at position 2886 of SEQ ID NO: 1560836
uaccuaaacgugugacuca

SEQ ID NO: 1627924 - RNA, 19 nt, Artificial Sequence
  Description of Artificial Sequence: Synthetic oligonucleotide
  Antisense strand to SEQ ID NO: 1627923
ugagucacacguuuaggua

SEQ ID NO: 1627925 - RNA, 19 nt, Artificial Sequence
  Description of Artificial Sequence: Synthetic oligonucleotide
  Sense strand starting at position 2905 of SEQ ID NO: 1560836
uacagauucuguuuguuug

SEQ ID NO: 1627926 - RNA, 19 nt, Artificial Sequence
  Description of Artificial Sequence: Synthetic oligonucleotide
  Antisense strand to SEQ ID NO: 1627925
caaacaaacagaaucugua

SEQ ID NO: 1627927 - RNA, 19 nt, Artificial Sequence
  Description of Artificial Sequence: Synthetic oligonucleotide
  Sense strand starting at position 3153 of SEQ ID NO: 1560836
agugguaugaaaugcauua

SEQ ID NO: 1627928 - RNA, 19 nt, Artificial Sequence
  Description of Artificial Sequence: Synthetic oligonucleotide
  Antisense strand to SEQ ID NO: 1627927
uaaugcauuucauaccacu

SEQ ID NO: 1627929 - RNA, 19 nt, Artificial Sequence
  Description of Artificial Sequence: Synthetic oligonucleotide
  Sense strand starting at position 3167 of SEQ ID NO: 1560836
cauuaucgugcaguuguca

SEQ ID NO: 1627930 - RNA, 19 nt, Artificial Sequence
  Description of Artificial Sequence: Synthetic oligonucleotide
  Antisense strand to SEQ ID NO: 1627929
ugacaacugcacgauaaug

SEQ ID NO: 1627931 - RNA, 19 nt, Artificial Sequence
  Description of Artificial Sequence: Synthetic oligonucleotide
  Sense strand starting at position 3462 of SEQ ID NO: 1560836
cuggaacucuacccaguaa

SEQ ID NO: 1627932 - RNA, 19 nt, Artificial Sequence
  Description of Artificial Sequence: Synthetic oligonucleotide
  Antisense strand to SEQ ID NO: 1627931
uuacuggguagaguuccag

SEQ ID NO: 1627933 - RNA, 19 nt, Artificial Sequence
  Description of Artificial Sequence: Synthetic oligonucleotide
  Sense strand starting at position 3570 of SEQ ID NO: 1560836
ucuaguuucuaugaauuug

SEQ ID NO: 1627934 - RNA, 19 nt, Artificial Sequence
  Description of Artificial Sequence: Synthetic oligonucleotide
  Antisense strand to SEQ ID NO: 1627933
caaauucauagaaacuaga

SEQ ID NO: 1627935 - RNA, 19 nt, Artificial Sequence
  Description of Artificial Sequence: Synthetic oligonucleotide
  Sense strand starting at position 3599 of SEQ ID NO: 1560836
guaucuuguauauguggaa

SEQ ID NO: 1627936 - RNA, 19 nt, Artificial Sequence
  Description of Artificial Sequence: Synthetic oligonucleotide
  Antisense strand to SEQ ID NO: 1627935
uuccacauauacaagauac

SEQ ID NO: 1627937 - RNA, 19 nt, Artificial Sequence
  Description of Artificial Sequence: Synthetic oligonucleotide
  Sense strand starting at position 3600 of SEQ ID NO: 1560836
uaucuuguauauguggaau

SEQ ID NO: 1627938 - RNA, 19 nt, Artificial Sequence
  Description of Artificial Sequence: Synthetic oligonucleotide
  Antisense strand to SEQ ID NO: 1627937
auuccacauauacaagaua

SEQ ID NO: 1627939 - RNA, 19 nt, Artificial Sequence
  Description of Artificial Sequence: Synthetic oligonucleotide
  Sense strand starting at position 3603 of SEQ ID NO: 1560836
cuuguauauguggaaucau

SEQ ID NO: 1627940 - RNA, 19 nt, Artificial Sequence
  Description of Artificial Sequence: Synthetic oligonucleotide
  Antisense strand to SEQ ID NO: 1627939
augauuccacauauacaag

SEQ ID NO: 1627941 - RNA, 19 nt, Artificial Sequence
  Description of Artificial Sequence: Synthetic oligonucleotide
  Sense strand starting at position 3656 of SEQ ID NO: 1560836
ccuagcauaugucuuaaag

SEQ ID NO: 1627942 - RNA, 19 nt, Artificial Sequence
  Description of Artificial Sequence: Synthetic oligonucleotide
  Antisense strand to SEQ ID NO: 1627941
cuuuaagacauaugcuagg

SEQ ID NO: 1627943 - RNA, 19 nt, Artificial Sequence
  Description of Artificial Sequence: Synthetic oligonucleotide
  Sense strand starting at position 3742 of SEQ ID NO: 1560836
ggauauaccuagcacauuu

SEQ ID NO: 1627944 - RNA, 19 nt, Artificial Sequence
  Description of Artificial Sequence: Synthetic oligonucleotide
  Antisense strand to SEQ ID NO: 1627943
aaaugugcuagguauaucc

SEQ ID NO: 1627945 - RNA, 19 nt, Artificial Sequence
  Description of Artificial Sequence: Synthetic oligonucleotide
  Sense strand starting at position 3915 of SEQ ID NO: 1560836
ugauaauucuguguugagg

SEQ ID NO: 1627946 - RNA, 19 nt, Artificial Sequence
  Description of Artificial Sequence: Synthetic oligonucleotide
  Antisense strand to SEQ ID NO: 1627945
ccucaacacagaauuauca

SEQ ID NO: 1627947 - RNA, 19 nt, Artificial Sequence
  Description of Artificial Sequence: Synthetic oligonucleotide
  Sense strand starting at position 3918 of SEQ ID NO: 1560836
uaauucuguguugaggaau

SEQ ID NO: 1627948 - RNA, 19 nt, Artificial Sequence
  Description of Artificial Sequence: Synthetic oligonucleotide
  Antisense strand to SEQ ID NO: 1627947
auuccucaacacagaauua

SEQ ID NO: 1627949 - RNA, 19 nt, Artificial Sequence
  Description of Artificial Sequence: Synthetic oligonucleotide
  Sense strand starting at position 44 of SEQ ID NO: 1560837
agaguagggcuacaucuua

SEQ ID NO: 1627950 - RNA, 19 nt, Artificial Sequence
  Description of Artificial Sequence: Synthetic oligonucleotide
  Antisense strand to SEQ ID NO: 1627949
uaagauguagcccuacucu

SEQ ID NO: 1627951 - RNA, 19 nt, Artificial Sequence
  Description of Artificial Sequence: Synthetic oligonucleotide
  Sense strand starting at position 97 of SEQ ID NO: 1560837
gcccaaaucugaccgucuu

SEQ ID NO: 1627952 - RNA, 19 nt, Artificial Sequence
  Description of Artificial Sequence: Synthetic oligonucleotide
  Antisense strand to SEQ ID NO: 1627951
aagacggucagauuugggc

SEQ ID NO: 1627953 - RNA, 19 nt, Artificial Sequence
  Description of Artificial Sequence: Synthetic oligonucleotide
  Sense strand starting at position 104 of SEQ ID NO: 1560837
ucugaccgucuuggugaua

SEQ ID NO: 1627954 - RNA, 19 nt, Artificial Sequence
  Description of Artificial Sequence: Synthetic oligonucleotide
  Antisense strand to SEQ ID NO: 1627953
uaucaccaagacggucaga

SEQ ID NO: 1627955 - RNA, 19 nt, Artificial Sequence
  Description of Artificial Sequence: Synthetic oligonucleotide
  Sense strand starting at position 105 of SEQ ID NO: 1560837
cugaccgucuuggugauau

SEQ ID NO: 1627956 - RNA, 19 nt, Artificial Sequence
  Description of Artificial Sequence: Synthetic oligonucleotide
  Antisense strand to SEQ ID NO: 1627955
auaucaccaagacggucag

SEQ ID NO: 1627957 - RNA, 19 nt, Artificial Sequence
  Description of Artificial Sequence: Synthetic oligonucleotide
  Sense strand starting at position 256 of SEQ ID NO: 1560837
ggacaccaguucuuaggau

SEQ ID NO: 1627958 - RNA, 19 nt, Artificial Sequence
  Description of Artificial Sequence: Synthetic oligonucleotide
  Antisense strand to SEQ ID NO: 1627957
auccuaagaacuggugucc

SEQ ID NO: 1627959 - RNA, 19 nt, Artificial Sequence
  Description of Artificial Sequence: Synthetic oligonucleotide
  Sense strand starting at position 257 of SEQ ID NO: 1560837
gacaccaguucuuaggaua

SEQ ID NO: 1627960 - RNA, 19 nt, Artificial Sequence
  Description of Artificial Sequence: Synthetic oligonucleotide
  Antisense strand to SEQ ID NO: 1627959
uauccuaagaacugguguc

SEQ ID NO: 1627961 - RNA, 19 nt, Artificial Sequence
  Description of Artificial Sequence: Synthetic oligonucleotide
  Sense strand starting at position 479 of SEQ ID NO: 1560837
ucacauugucccuagacca

SEQ ID NO: 1627962 - RNA, 19 nt, Artificial Sequence
  Description of Artificial Sequence: Synthetic oligonucleotide
  Antisense strand to SEQ ID NO: 1627961
uggucuagggacaauguga

SEQ ID NO: 1627963 - RNA, 19 nt, Artificial Sequence
  Description of Artificial Sequence: Synthetic oligonucleotide
  Sense strand starting at position 650 of SEQ ID NO: 1560837
gucacacuacccuggaaau

SEQ ID NO: 1627964 - RNA, 19 nt, Artificial Sequence
  Description of Artificial Sequence: Synthetic oligonucleotide
  Antisense strand to SEQ ID NO: 1627963
auuuccaggguagugugac

SEQ ID NO: 1627965 - RNA, 19 nt, Artificial Sequence
  Description of Artificial Sequence: Synthetic oligonucleotide
  Sense strand starting at position 718 of SEQ ID NO: 1560837
ucgugucaccaucacaaga

SEQ ID NO: 1627966 - RNA, 19 nt, Artificial Sequence
  Description of Artificial Sequence: Synthetic oligonucleotide
  Antisense strand to SEQ ID NO: 1627965
ucuugugauggugacacga

SEQ ID NO: 1627967 - RNA, 19 nt, Artificial Sequence
  Description of Artificial Sequence: Synthetic oligonucleotide
  Sense strand starting at position 808 of SEQ ID NO: 1560837
ggaggucaaucggagaaua

SEQ ID NO: 1627968 - RNA, 19 nt, Artificial Sequence
  Description of Artificial Sequence: Synthetic oligonucleotide
  Antisense strand to SEQ ID NO: 1627967
uauucuccgauugaccucc

SEQ ID NO: 1627969 - RNA, 19 nt, Artificial Sequence
  Description of Artificial Sequence: Synthetic oligonucleotide
  Sense strand starting at position 821 of SEQ ID NO: 1560837
agaauacccucagaggaga

SEQ ID NO: 1627970 - RNA, 19 nt, Artificial Sequence
  Description of Artificial Sequence: Synthetic oligonucleotide
  Antisense strand to SEQ ID NO: 1627969
ucuccucugaggguauucu

SEQ ID NO: 1627971 - RNA, 19 nt, Artificial Sequence
  Description of Artificial Sequence: Synthetic oligonucleotide
  Sense strand starting at position 929 of SEQ ID NO: 1560837
acuguuuccugccucugaa

SEQ ID NO: 1627972 - RNA, 19 nt, Artificial Sequence
  Description of Artificial Sequence: Synthetic oligonucleotide
  Antisense strand to SEQ ID NO: 1627971
uucagaggcaggaaacagu

SEQ ID NO: 1627973 - RNA, 19 nt, Artificial Sequence
  Description of Artificial Sequence: Synthetic oligonucleotide
  Sense strand starting at position 950 of SEQ ID NO: 1560837
gcuacuuaacgcuaacacu

SEQ ID NO: 1627974 - RNA, 19 nt, Artificial Sequence
  Description of Artificial Sequence: Synthetic oligonucleotide
  Antisense strand to SEQ ID NO: 1627973
aguguuagcguuaaguagc

SEQ ID NO: 1627975 - RNA, 19 nt, Artificial Sequence
  Description of Artificial Sequence: Synthetic oligonucleotide
  Sense strand starting at position 1137 of SEQ ID NO: 1560837
aguaaagauccugguccua

SEQ ID NO: 1627976 - RNA, 19 nt, Artificial Sequence
  Description of Artificial Sequence: Synthetic oligonucleotide
  Antisense strand to SEQ ID NO: 1627975
uaggaccaggaucuuuacu

SEQ ID NO: 1627977 - RNA, 19 nt, Artificial Sequence
  Description of Artificial Sequence: Synthetic oligonucleotide
  Sense strand starting at position 1169 of SEQ ID NO: 1560837
uauggagugcuccaagagu

SEQ ID NO: 1627978 - RNA, 19 nt, Artificial Sequence
  Description of Artificial Sequence: Synthetic oligonucleotide
  Antisense strand to SEQ ID NO: 1627977
acucuuggagcacuccaua

SEQ ID NO: 1627979 - RNA, 19 nt, Artificial Sequence
  Description of Artificial Sequence: Synthetic oligonucleotide
  Sense strand starting at position 1268 of SEQ ID NO: 1560837
ucugcacugucaccaagaa

SEQ ID NO: 1627980 - RNA, 19 nt, Artificial Sequence
  Description of Artificial Sequence: Synthetic oligonucleotide
  Antisense strand to SEQ ID NO: 1627979
uucuuggugacagugcaga

SEQ ID NO: 1627981 - RNA, 19 nt, Artificial Sequence
  Description of Artificial Sequence: Synthetic oligonucleotide
  Sense strand starting at position 1269 of SEQ ID NO: 1560837
cugcacugucaccaagaau

SEQ ID NO: 1627982 - RNA, 19 nt, Artificial Sequence
  Description of Artificial Sequence: Synthetic oligonucleotide
  Antisense strand to SEQ ID NO: 1627981
auucuuggugacagugcag

SEQ ID NO: 1627983 - RNA, 19 nt, Artificial Sequence
  Description of Artificial Sequence: Synthetic oligonucleotide
  Sense strand starting at position 2379 of SEQ ID NO: 1560837
gaaggaguuaaacgguuaa

SEQ ID NO: 1627984 - RNA, 19 nt, Artificial Sequence
  Description of Artificial Sequence: Synthetic oligonucleotide
  Antisense strand to SEQ ID NO: 1627983
uuaaccguuuaacuccuuc

SEQ ID NO: 1627985 - RNA, 19 nt, Artificial Sequence
  Description of Artificial Sequence: Synthetic oligonucleotide
  Sense strand starting at position 2732 of SEQ ID NO: 1560837
uggauuuggcuguguguau

SEQ ID NO: 1627986 - RNA, 19 nt, Artificial Sequence
  Description of Artificial Sequence: Synthetic oligonucleotide
  Antisense strand to SEQ ID NO: 1627985
auacacacagccaaaucca

SEQ ID NO: 1627987 - RNA, 19 nt, Artificial Sequence
  Description of Artificial Sequence: Synthetic oligonucleotide
  Sense strand starting at position 2733 of SEQ ID NO: 1560837
ggauuuggcuguguguaua

SEQ ID NO: 1627988 - RNA, 19 nt, Artificial Sequence
  Description of Artificial Sequence: Synthetic oligonucleotide
  Antisense strand to SEQ ID NO: 1627987
uauacacacagccaaaucc

SEQ ID NO: 1627989 - RNA, 19 nt, Artificial Sequence
  Description of Artificial Sequence: Synthetic oligonucleotide
  Sense strand starting at position 2759 of SEQ ID NO: 1560837
gugucugugggugaaggau

SEQ ID NO: 1627990 - RNA, 19 nt, Artificial Sequence
  Description of Artificial Sequence: Synthetic oligonucleotide
  Antisense strand to SEQ ID NO: 1627989
auccuucacccacagacac

SEQ ID NO: 1627991 - RNA, 19 nt, Artificial Sequence
  Description of Artificial Sequence: Synthetic oligonucleotide
  Sense strand starting at position 2771 of SEQ ID NO: 1560837
gaaggaugugugcgcacau

SEQ ID NO: 1627992 - RNA, 19 nt, Artificial Sequence
  Description of Artificial Sequence: Synthetic oligonucleotide
  Antisense strand to SEQ ID NO: 1627991
augugcgcacacauccuuc

SEQ ID NO: 1627993 - RNA, 19 nt, Artificial Sequence
  Description of Artificial Sequence: Synthetic oligonucleotide
  Sense strand starting at position 2847 of SEQ ID NO: 1560837
gacugugaauguguucuca

SEQ ID NO: 1627994 - RNA, 19 nt, Artificial Sequence
  Description of Artificial Sequence: Synthetic oligonucleotide
  Antisense strand to SEQ ID NO: 1627993
ugagaacacauucacaguc

SEQ ID NO: 1627995 - RNA, 19 nt, Artificial Sequence
  Description of Artificial Sequence: Synthetic oligonucleotide
  Sense strand starting at position 2849 of SEQ ID NO: 1560837
cugugaauguguucucaag

SEQ ID NO: 1627996 - RNA, 19 nt, Artificial Sequence
  Description of Artificial Sequence: Synthetic oligonucleotide
  Antisense strand to SEQ ID NO: 1627995
cuugagaacacauucacag

SEQ ID NO: 1627997 - RNA, 19 nt, Artificial Sequence
  Description of Artificial Sequence: Synthetic oligonucleotide
  Sense strand starting at position 2947 of SEQ ID NO: 1560837
ggaggacgucuauguaugu

SEQ ID NO: 1627998 - RNA, 19 nt, Artificial Sequence
  Description of Artificial Sequence: Synthetic oligonucleotide
  Antisense strand to SEQ ID NO: 1627997
acauacauagacguccucc

SEQ ID NO: 1627999 - RNA, 19 nt, Artificial Sequence
  Description of Artificial Sequence: Synthetic oligonucleotide
  Sense strand starting at position 2948 of SEQ ID NO: 1560837
gaggacgucuauguauguu

SEQ ID NO: 1628000 - RNA, 19 nt, Artificial Sequence
  Description of Artificial Sequence: Synthetic oligonucleotide
  Antisense strand to SEQ ID NO: 1627999
aacauacauagacguccuc

SEQ ID NO: 1628001 - RNA, 19 nt, Artificial Sequence
  Description of Artificial Sequence: Synthetic oligonucleotide
  Sense strand starting at position 2951 of SEQ ID NO: 1560837
gacgucuauguauguuagu

SEQ ID NO: 1628002 - RNA, 19 nt, Artificial Sequence
  Description of Artificial Sequence: Synthetic oligonucleotide
  Antisense strand to SEQ ID NO: 1628001
acuaacauacauagacguc

SEQ ID NO: 1628003 - RNA, 19 nt, Artificial Sequence
  Description of Artificial Sequence: Synthetic oligonucleotide
  Sense strand starting at position 2953 of SEQ ID NO: 1560837
cgucuauguauguuagugu

SEQ ID NO: 1628004 - RNA, 19 nt, Artificial Sequence
  Description of Artificial Sequence: Synthetic oligonucleotide
  Antisense strand to SEQ ID NO: 1628003
acacuaacauacauagacg

SEQ ID NO: 1628005 - RNA, 19 nt, Artificial Sequence
  Description of Artificial Sequence: Synthetic oligonucleotide
  Sense strand starting at position 3093 of SEQ ID NO: 1560837
ggcccaccgcucuauacau

SEQ ID NO: 1628006 - RNA, 19 nt, Artificial Sequence
  Description of Artificial Sequence: Synthetic oligonucleotide
  Antisense strand to SEQ ID NO: 1628005
auguauagagcggugggcc

SEQ ID NO: 1628007 - RNA, 19 nt, Artificial Sequence
  Description of Artificial Sequence: Synthetic oligonucleotide
  Sense strand starting at position 3128 of SEQ ID NO: 1560837
gcgcuucugccagagguaa

SEQ ID NO: 1628008 - RNA, 19 nt, Artificial Sequence
  Description of Artificial Sequence: Synthetic oligonucleotide
  Antisense strand to SEQ ID NO: 1628007
uuaccucuggcagaagcgc

SEQ ID NO: 1628009 - RNA, 19 nt, Artificial Sequence
  Description of Artificial Sequence: Synthetic oligonucleotide
  Sense strand starting at position 3130 of SEQ ID NO: 1560837
gcuucugccagagguaaac

SEQ ID NO: 1628010 - RNA, 19 nt, Artificial Sequence
  Description of Artificial Sequence: Synthetic oligonucleotide
  Antisense strand to SEQ ID NO: 1628009
guuuaccucuggcagaagc

SEQ ID NO: 1628011 - RNA, 19 nt, Artificial Sequence
  Description of Artificial Sequence: Synthetic oligonucleotide
  Sense strand starting at position 3560 of SEQ ID NO: 1560837
cgcccuucuccuuauuuga

SEQ ID NO: 1628012 - RNA, 19 nt, Artificial Sequence
  Description of Artificial Sequence: Synthetic oligonucleotide
  Antisense strand to SEQ ID NO: 1628011
ucaaauaaggagaagggcg

SEQ ID NO: 1628013 - RNA, 19 nt, Artificial Sequence
  Description of Artificial Sequence: Synthetic oligonucleotide
  Sense strand starting at position 3705 of SEQ ID NO: 1560837
cggguauuccaagggccaa

SEQ ID NO: 1628014 - RNA, 19 nt, Artificial Sequence
  Description of Artificial Sequence: Synthetic oligonucleotide
  Antisense strand to SEQ ID NO: 1628013
uuggcccuuggaauacccg

SEQ ID NO: 1628015 - RNA, 19 nt, Artificial Sequence
  Description of Artificial Sequence: Synthetic oligonucleotide
  Sense strand starting at position 3706 of SEQ ID NO: 1560837
ggguauuccaagggccaaa

SEQ ID NO: 1628016 - RNA, 19 nt, Artificial Sequence
  Description of Artificial Sequence: Synthetic oligonucleotide
  Antisense strand to SEQ ID NO: 1628015
uuuggcccuuggaauaccc

SEQ ID NO: 1628017 - RNA, 19 nt, Artificial Sequence
  Description of Artificial Sequence: Synthetic oligonucleotide
  Sense strand starting at position 3774 of SEQ ID NO: 1560837
aacggcuucuagggaauuu

SEQ ID NO: 1628018 - RNA, 19 nt, Artificial Sequence
  Description of Artificial Sequence: Synthetic oligonucleotide
  Antisense strand to SEQ ID NO: 1628017
aaauucccuagaagccguu

SEQ ID NO: 1628019 - RNA, 19 nt, Artificial Sequence
  Description of Artificial Sequence: Synthetic oligonucleotide
  Sense strand starting at position 3816 of SEQ ID NO: 1560837
gaucauauuugagaguccu

SEQ ID NO: 1628020 - RNA, 19 nt, Artificial Sequence
  Description of Artificial Sequence: Synthetic oligonucleotide
  Antisense strand to SEQ ID NO: 1628019
aggacucucaaauaugauc

SEQ ID NO: 1628021 - RNA, 19 nt, Artificial Sequence
  Description of Artificial Sequence: Synthetic oligonucleotide
  Sense strand starting at position 3862 of SEQ ID NO: 1560837
ugcuguaacguugguuaga

SEQ ID NO: 1628022 - RNA, 19 nt, Artificial Sequence
  Description of Artificial Sequence: Synthetic oligonucleotide
  Antisense strand to SEQ ID NO: 1628021
ucuaaccaacguuacagca

SEQ ID NO: 1628023 - RNA, 19 nt, Artificial Sequence
  Description of Artificial Sequence: Synthetic oligonucleotide
  Sense strand starting at position 3863 of SEQ ID NO: 1560837
gcuguaacguugguuagag

SEQ ID NO: 1628024 - RNA, 19 nt, Artificial Sequence
  Description of Artificial Sequence: Synthetic oligonucleotide
  Antisense strand to SEQ ID NO: 1628023
cucuaaccaacguuacagc

SEQ ID NO: 1628025 - RNA, 19 nt, Artificial Sequence
  Description of Artificial Sequence: Synthetic oligonucleotide
  Sense strand starting at position 3864 of SEQ ID NO: 1560837
cuguaacguugguuagaga

SEQ ID NO: 1628026 - RNA, 19 nt, Artificial Sequence
  Description of Artificial Sequence: Synthetic oligonucleotide
  Antisense strand to SEQ ID NO: 1628025
ucucuaaccaacguuacag

SEQ ID NO: 1628027 - RNA, 19 nt, Artificial Sequence
  Description of Artificial Sequence: Synthetic oligonucleotide
  Sense strand starting at position 3865 of SEQ ID NO: 1560837
uguaacguugguuagagau

SEQ ID NO: 1628028 - RNA, 19 nt, Artificial Sequence
  Description of Artificial Sequence: Synthetic oligonucleotide
  Antisense strand to SEQ ID NO: 1628027
aucucuaaccaacguuaca

SEQ ID NO: 1628029 - RNA, 19 nt, Artificial Sequence
  Description of Artificial Sequence: Synthetic oligonucleotide
  Sense strand starting at position 1 of SEQ ID NO: 1560838
gccagaagcucagguuuaa

SEQ ID NO: 1628030 - RNA, 19 nt, Artificial Sequence
  Description of Artificial Sequence: Synthetic oligonucleotide
  Antisense strand to SEQ ID NO: 1628029
uuaaaccugagcuucuggc

SEQ ID NO: 1628031 - RNA, 19 nt, Artificial Sequence
  Description of Artificial Sequence: Synthetic oligonucleotide
  Sense strand starting at position 121 of SEQ ID NO: 1560838
ggccuuuagagccaggaaa

SEQ ID NO: 1628032 - RNA, 19 nt, Artificial Sequence
  Description of Artificial Sequence: Synthetic oligonucleotide
  Antisense strand to SEQ ID NO: 1628031
uuuccuggcucuaaaggcc

SEQ ID NO: 1628033 - RNA, 19 nt, Artificial Sequence
  Description of Artificial Sequence: Synthetic oligonucleotide
  Sense strand starting at position 798 of SEQ ID NO: 1560838
cgaggucucugaucgcuga

SEQ ID NO: 1628034 - RNA, 19 nt, Artificial Sequence
  Description of Artificial Sequence: Synthetic oligonucleotide
  Antisense strand to SEQ ID NO: 1628033
ucagcgaucagagaccucg

SEQ ID NO: 1628035 - RNA, 19 nt, Artificial Sequence
  Description of Artificial Sequence: Synthetic oligonucleotide
  Sense strand starting at position 799 of SEQ ID NO: 1560838
gaggucucugaucgcugau

SEQ ID NO: 1628036 - RNA, 19 nt, Artificial Sequence
  Description of Artificial Sequence: Synthetic oligonucleotide
  Antisense strand to SEQ ID NO: 1628035
aucagcgaucagagaccuc

SEQ ID NO: 1628037 - RNA, 19 nt, Artificial Sequence
  Description of Artificial Sequence: Synthetic oligonucleotide
  Sense strand starting at position 1132 of SEQ ID NO: 1560838
gccucaauugcacguggaa

SEQ ID NO: 1628038 - RNA, 19 nt, Artificial Sequence
  Description of Artificial Sequence: Synthetic oligonucleotide
  Antisense strand to SEQ ID NO: 1628037
uuccacgugcaauugaggc

SEQ ID NO: 1628039 - RNA, 19 nt, Artificial Sequence
  Description of Artificial Sequence: Synthetic oligonucleotide
  Sense strand starting at position 1134 of SEQ ID NO: 1560838
cucaauugcacguggaaag

SEQ ID NO: 1628040 - RNA, 19 nt, Artificial Sequence
  Description of Artificial Sequence: Synthetic oligonucleotide
  Antisense strand to SEQ ID NO: 1628039
cuuuccacgugcaauugag

SEQ ID NO: 1628041 - RNA, 19 nt, Artificial Sequence
  Description of Artificial Sequence: Synthetic oligonucleotide
  Sense strand starting at position 1135 of SEQ ID NO: 1560838
ucaauugcacguggaaagu

SEQ ID NO: 1628042 - RNA, 19 nt, Artificial Sequence
  Description of Artificial Sequence: Synthetic oligonucleotide
  Antisense strand to SEQ ID NO: 1628041
acuuuccacgugcaauuga

SEQ ID NO: 1628043 - RNA, 19 nt, Artificial Sequence
  Description of Artificial Sequence: Synthetic oligonucleotide
  Sense strand starting at position 1228 of SEQ ID NO: 1560838
uucugccuccaggauauaa

SEQ ID NO: 1628044 - RNA, 19 nt, Artificial Sequence
  Description of Artificial Sequence: Synthetic oligonucleotide
  Antisense strand to SEQ ID NO: 1628043
uuauauccuggaggcagaa

SEQ ID NO: 1628045 - RNA, 19 nt, Artificial Sequence
  Description of Artificial Sequence: Synthetic oligonucleotide
  Sense strand starting at position 1282 of SEQ ID NO: 1560838
gccugucacucccagacuu

SEQ ID NO: 1628046 - RNA, 19 nt, Artificial Sequence
  Description of Artificial Sequence: Synthetic oligonucleotide
  Antisense strand to SEQ ID NO: 1628045
aagucugggagugacaggc

SEQ ID NO: 1628047 - RNA, 19 nt, Artificial Sequence
  Description of Artificial Sequence: Synthetic oligonucleotide
  Sense strand starting at position 1568 of SEQ ID NO: 1560838
uuauuaaacgucuacugca

SEQ ID NO: 1628048 - RNA, 19 nt, Artificial Sequence
  Description of Artificial Sequence: Synthetic oligonucleotide
  Antisense strand to SEQ ID NO: 1628047
ugcaguagacguuuaauaa

SEQ ID NO: 1628049 - RNA, 19 nt, Artificial Sequence
  Description of Artificial Sequence: Synthetic oligonucleotide
  Sense strand starting at position 1633 of SEQ ID NO: 1560838
uuugaucgcugcuauguga

SEQ ID NO: 1628050 - RNA, 19 nt, Artificial Sequence
  Description of Artificial Sequence: Synthetic oligonucleotide
  Antisense strand to SEQ ID NO: 1628049
ucacauagcagcgaucaaa

SEQ ID NO: 1628051 - RNA, 19 nt, Artificial Sequence
  Description of Artificial Sequence: Synthetic oligonucleotide
  Sense strand starting at position 1637 of SEQ ID NO: 1560838
aucgcugcuaugugacaga

SEQ ID NO: 1628052 - RNA, 19 nt, Artificial Sequence
  Description of Artificial Sequence: Synthetic oligonucleotide
  Antisense strand to SEQ ID NO: 1628051
ucugucacauagcagcgau

SEQ ID NO: 1628053 - RNA, 19 nt, Artificial Sequence
  Description of Artificial Sequence: Synthetic oligonucleotide
  Sense strand starting at position 1640 of SEQ ID NO: 1560838
gcugcuaugugacagaaga

SEQ ID NO: 1628054 - RNA, 19 nt, Artificial Sequence
  Description of Artificial Sequence: Synthetic oligonucleotide
  Antisense strand to SEQ ID NO: 1628053
ucuucugucacauagcagc

SEQ ID NO: 1628055 - RNA, 19 nt, Artificial Sequence
  Description of Artificial Sequence: Synthetic oligonucleotide
  Sense strand starting at position 2381 of SEQ ID NO: 1560838
ccucauugucccugagaca

SEQ ID NO: 1628056 - RNA, 19 nt, Artificial Sequence
  Description of Artificial Sequence: Synthetic oligonucleotide
  Antisense strand to SEQ ID NO: 1628055
ugucucagggacaaugagg

SEQ ID NO: 1628057 - RNA, 19 nt, Artificial Sequence
  Description of Artificial Sequence: Synthetic oligonucleotide
  Sense strand starting at position 2382 of SEQ ID NO: 1560838
cucauugucccugagacaa

SEQ ID NO: 1628058 - RNA, 19 nt, Artificial Sequence
  Description of Artificial Sequence: Synthetic oligonucleotide
  Antisense strand to SEQ ID NO: 1628057
uugucucagggacaaugag

SEQ ID NO: 1628059 - RNA, 19 nt, Artificial Sequence
  Description of Artificial Sequence: Synthetic oligonucleotide
  Sense strand starting at position 2441 of SEQ ID NO: 1560838
ggcuucucagcacaacuua

SEQ ID NO: 1628060 - RNA, 19 nt, Artificial Sequence
  Description of Artificial Sequence: Synthetic oligonucleotide
  Antisense strand to SEQ ID NO: 1628059
uaaguugugcugagaagcc

SEQ ID NO: 1628061 - RNA, 19 nt, Artificial Sequence
  Description of Artificial Sequence: Synthetic oligonucleotide
  Sense strand starting at position 2497 of SEQ ID NO: 1560838
ucucauagcucuccagaug

SEQ ID NO: 1628062 - RNA, 19 nt, Artificial Sequence
  Description of Artificial Sequence: Synthetic oligonucleotide
  Antisense strand to SEQ ID NO: 1628061
caucuggagagcuaugaga

SEQ ID NO: 1628063 - RNA, 19 nt, Artificial Sequence
  Description of Artificial Sequence: Synthetic oligonucleotide
  Sense strand starting at position 2530 of SEQ ID NO: 1560838
gcaguauucucacuguuuc

SEQ ID NO: 1628064 - RNA, 19 nt, Artificial Sequence
  Description of Artificial Sequence: Synthetic oligonucleotide
  Antisense strand to SEQ ID NO: 1628063
gaaacagugagaauacugc

SEQ ID NO: 1628065 - RNA, 19 nt, Artificial Sequence
  Description of Artificial Sequence: Synthetic oligonucleotide
  Sense strand starting at position 2537 of SEQ ID NO: 1560838
ucucacuguuucugggaca

SEQ ID NO: 1628066 - RNA, 19 nt, Artificial Sequence
  Description of Artificial Sequence: Synthetic oligonucleotide
  Antisense strand to SEQ ID NO: 1628065
ugucccagaaacagugaga

SEQ ID NO: 1628067 - RNA, 19 nt, Artificial Sequence
  Description of Artificial Sequence: Synthetic oligonucleotide
  Sense strand starting at position 2538 of SEQ ID NO: 1560838
cucacuguuucugggacau

SEQ ID NO: 1628068 - RNA, 19 nt, Artificial Sequence
  Description of Artificial Sequence: Synthetic oligonucleotide
  Antisense strand to SEQ ID NO: 1628067
augucccagaaacagugag

SEQ ID NO: 1628069 - RNA, 19 nt, Artificial Sequence
  Description of Artificial Sequence: Synthetic oligonucleotide
  Sense strand starting at position 2567 of SEQ ID NO: 1560838
ccaggagugcccugagaau

SEQ ID NO: 1628070 - RNA, 19 nt, Artificial Sequence
  Description of Artificial Sequence: Synthetic oligonucleotide
  Antisense strand to SEQ ID NO: 1628069
auucucagggcacuccugg

SEQ ID NO: 1628071 - RNA, 19 nt, Artificial Sequence
  Description of Artificial Sequence: Synthetic oligonucleotide
  Sense strand starting at position 2579 of SEQ ID NO: 1560838
ugagaaucccagggugcau

SEQ ID NO: 1628072 - RNA, 19 nt, Artificial Sequence
  Description of Artificial Sequence: Synthetic oligonucleotide
  Antisense strand to SEQ ID NO: 1628071
augcacccugggauucuca

SEQ ID NO: 1628073 - RNA, 19 nt, Artificial Sequence
  Description of Artificial Sequence: Synthetic oligonucleotide
  Sense strand starting at position 2859 of SEQ ID NO: 1560838
ccuagaguucuccacagac

SEQ ID NO: 1628074 - RNA, 19 nt, Artificial Sequence
  Description of Artificial Sequence: Synthetic oligonucleotide
  Antisense strand to SEQ ID NO: 1628073
gucuguggagaacucuagg

SEQ ID NO: 1628075 - RNA, 19 nt, Artificial Sequence
  Description of Artificial Sequence: Synthetic oligonucleotide
  Sense strand starting at position 2909 of SEQ ID NO: 1560838
cccuuaaucccugaauggu

SEQ ID NO: 1628076 - RNA, 19 nt, Artificial Sequence
  Description of Artificial Sequence: Synthetic oligonucleotide
  Antisense strand to SEQ ID NO: 1628075
accauucagggauuaaggg

SEQ ID NO: 1628077 - RNA, 19 nt, Artificial Sequence
  Description of Artificial Sequence: Synthetic oligonucleotide
  Sense strand starting at position 2918 of SEQ ID NO: 1560838
ccugaaugguucuacagca

SEQ ID NO: 1628078 - RNA, 19 nt, Artificial Sequence
  Description of Artificial Sequence: Synthetic oligonucleotide
  Antisense strand to SEQ ID NO: 1628077
ugcuguagaaccauucagg

SEQ ID NO: 1628079 - RNA, 19 nt, Artificial Sequence
  Description of Artificial Sequence: Synthetic oligonucleotide
  Sense strand starting at position 2968 of SEQ ID NO: 1560838
ccaagacaaccucgggaau

SEQ ID NO: 1628080 - RNA, 19 nt, Artificial Sequence
  Description of Artificial Sequence: Synthetic oligonucleotide
  Antisense strand to SEQ ID NO: 1628079
auucccgagguugucuugg

SEQ ID NO: 1628081 - RNA, 19 nt, Artificial Sequence
  Description of Artificial Sequence: Synthetic oligonucleotide
  Sense strand starting at position 3008 of SEQ ID NO: 1560838
ccuaguaaccauggagaug

SEQ ID NO: 1628082 - RNA, 19 nt, Artificial Sequence
  Description of Artificial Sequence: Synthetic oligonucleotide
  Antisense strand to SEQ ID NO: 1628081
caucuccaugguuacuagg

SEQ ID NO: 1628083 - RNA, 19 nt, Artificial Sequence
  Description of Artificial Sequence: Synthetic oligonucleotide
  Sense strand starting at position 3164 of SEQ ID NO: 1560838
cacagcuucugagaugugu

SEQ ID NO: 1628084 - RNA, 19 nt, Artificial Sequence
  Description of Artificial Sequence: Synthetic oligonucleotide
  Antisense strand to SEQ ID NO: 1628083
acacaucucagaagcugug

SEQ ID NO: 1628085 - RNA, 19 nt, Artificial Sequence
  Description of Artificial Sequence: Synthetic oligonucleotide
  Sense strand starting at position 3168 of SEQ ID NO: 1560838
gcuucugagaugugucuua

SEQ ID NO: 1628086 - RNA, 19 nt, Artificial Sequence
  Description of Artificial Sequence: Synthetic oligonucleotide
  Antisense strand to SEQ ID NO: 1628085
uaagacacaucucagaagc

SEQ ID NO: 1628087 - RNA, 19 nt, Artificial Sequence
  Description of Artificial Sequence: Synthetic oligonucleotide
  Sense strand starting at position 3173 of SEQ ID NO: 1560838
ugagaugugucuuacaacu

SEQ ID NO: 1628088 - RNA, 19 nt, Artificial Sequence
  Description of Artificial Sequence: Synthetic oligonucleotide
  Antisense strand to SEQ ID NO: 1628087
aguuguaagacacaucuca

SEQ ID NO: 1628089 - RNA, 19 nt, Artificial Sequence
  Description of Artificial Sequence: Synthetic oligonucleotide
  Sense strand starting at position 3175 of SEQ ID NO: 1560838
agaugugucuuacaacucu

SEQ ID NO: 1628090 - RNA, 19 nt, Artificial Sequence
  Description of Artificial Sequence: Synthetic oligonucleotide
  Antisense strand to SEQ ID NO: 1628089
agaguuguaagacacaucu

SEQ ID NO: 1628091 - RNA, 19 nt, Artificial Sequence
  Description of Artificial Sequence: Synthetic oligonucleotide
  Sense strand starting at position 3427 of SEQ ID NO: 1560838
guugcagugaguuaugaag

SEQ ID NO: 1628092 - RNA, 19 nt, Artificial Sequence
  Description of Artificial Sequence: Synthetic oligonucleotide
  Antisense strand to SEQ ID NO: 1628091
cuucauaacucacugcaac

SEQ ID NO: 1628093 - RNA, 19 nt, Artificial Sequence
  Description of Artificial Sequence: Synthetic oligonucleotide
  Sense strand starting at position 3429 of SEQ ID NO: 1560838
ugcagugaguuaugaaggu

SEQ ID NO: 1628094 - RNA, 19 nt, Artificial Sequence
  Description of Artificial Sequence: Synthetic oligonucleotide
  Antisense strand to SEQ ID NO: 1628093
accuucauaacucacugca

SEQ ID NO: 1628095 - RNA, 19 nt, Artificial Sequence
  Description of Artificial Sequence: Synthetic oligonucleotide
  Sense strand starting at position 3433 of SEQ ID NO: 1560838
gugaguuaugaaggugcca

SEQ ID NO: 1628096 - RNA, 19 nt, Artificial Sequence
  Description of Artificial Sequence: Synthetic oligonucleotide
  Antisense strand to SEQ ID NO: 1628095
uggcaccuucauaacucac

SEQ ID NO: 1628097 - RNA, 19 nt, Artificial Sequence
  Description of Artificial Sequence: Synthetic oligonucleotide
  Sense strand starting at position 3435 of SEQ ID NO: 1560838
gaguuaugaaggugccacu

SEQ ID NO: 1628098 - RNA, 19 nt, Artificial Sequence
  Description of Artificial Sequence: Synthetic oligonucleotide
  Antisense strand to SEQ ID NO: 1628097
aguggcaccuucauaacuc

SEQ ID NO: 1628099 - RNA, 19 nt, Artificial Sequence
  Description of Artificial Sequence: Synthetic oligonucleotide
  Sense strand starting at position 3438 of SEQ ID NO: 1560838
uuaugaaggugccacuaaa

SEQ ID NO: 1628100 - RNA, 19 nt, Artificial Sequence
  Description of Artificial Sequence: Synthetic oligonucleotide
  Antisense strand to SEQ ID NO: 1628099
uuuaguggcaccuucauaa

SEQ ID NO: 1628101 - RNA, 19 nt, Artificial Sequence
  Description of Artificial Sequence: Synthetic oligonucleotide
  Sense strand starting at position 3810 of SEQ ID NO: 1560838
gcuugcuagguucaaagga

SEQ ID NO: 1628102 - RNA, 19 nt, Artificial Sequence
  Description of Artificial Sequence: Synthetic oligonucleotide
  Antisense strand to SEQ ID NO: 1628101
uccuuugaaccuagcaagc

SEQ ID NO: 1628103 - RNA, 19 nt, Artificial Sequence
  Description of Artificial Sequence: Synthetic oligonucleotide
  Sense strand starting at position 3873 of SEQ ID NO: 1560838
gccacaauaccuggcaaau

SEQ ID NO: 1628104 - RNA, 19 nt, Artificial Sequence
  Description of Artificial Sequence: Synthetic oligonucleotide
  Antisense strand to SEQ ID NO: 1628103
auuugccagguauuguggc

SEQ ID NO: 1628105 - RNA, 19 nt, Artificial Sequence
  Description of Artificial Sequence: Synthetic oligonucleotide
  Sense strand starting at position 3961 of SEQ ID NO: 1560838
aagugauccacccguguga

SEQ ID NO: 1628106 - RNA, 19 nt, Artificial Sequence
  Description of Artificial Sequence: Synthetic oligonucleotide
  Antisense strand to SEQ ID NO: 1628105
ucacacggguggaucacuu

SEQ ID NO: 1628107 - RNA, 19 nt, Artificial Sequence
  Description of Artificial Sequence: Synthetic oligonucleotide
  Sense strand starting at position 309 of SEQ ID NO: 1560839
ggauaaauacuaugguuau

SEQ ID NO: 1628108 - RNA, 19 nt, Artificial Sequence
  Description of Artificial Sequence: Synthetic oligonucleotide
  Antisense strand to SEQ ID NO: 1628107
auaaccauaguauuuaucc

SEQ ID NO: 1628109 - RNA, 19 nt, Artificial Sequence
  Description of Artificial Sequence: Synthetic oligonucleotide
  Sense strand starting at position 315 of SEQ ID NO: 1560839
auacuaugguuauuaguag

SEQ ID NO: 1628110 - RNA, 19 nt, Artificial Sequence
  Description of Artificial Sequence: Synthetic oligonucleotide
  Antisense strand to SEQ ID NO: 1628109
cuacuaauaaccauaguau

SEQ ID NO: 1628111 - RNA, 19 nt, Artificial Sequence
  Description of Artificial Sequence: Synthetic oligonucleotide
  Sense strand starting at position 319 of SEQ ID NO: 1560839
uaugguuauuaguagcaga

SEQ ID NO: 1628112 - RNA, 19 nt, Artificial Sequence
  Description of Artificial Sequence: Synthetic oligonucleotide
  Antisense strand to SEQ ID NO: 1628111
ucugcuacuaauaaccaua

SEQ ID NO: 1628113 - RNA, 19 nt, Artificial Sequence
  Description of Artificial Sequence: Synthetic oligonucleotide
  Sense strand starting at position 322 of SEQ ID NO: 1560839
gguuauuaguagcagagca

SEQ ID NO: 1628114 - RNA, 19 nt, Artificial Sequence
  Description of Artificial Sequence: Synthetic oligonucleotide
  Antisense strand to SEQ ID NO: 1628113
ugcucugcuacuaauaacc

SEQ ID NO: 1628115 - RNA, 19 nt, Artificial Sequence
  Description of Artificial Sequence: Synthetic oligonucleotide
  Sense strand starting at position 625 of SEQ ID NO: 1560839
ccaggcagccuuuauggaa

SEQ ID NO: 1628116 - RNA, 19 nt, Artificial Sequence
  Description of Artificial Sequence: Synthetic oligonucleotide
  Antisense strand to SEQ ID NO: 1628115
uuccauaaaggcugccugg

SEQ ID NO: 1628117 - RNA, 19 nt, Artificial Sequence
  Description of Artificial Sequence: Synthetic oligonucleotide
  Sense strand starting at position 637 of SEQ ID NO: 1560839
uauggaaaggccuggcauu

SEQ ID NO: 1628118 - RNA, 19 nt, Artificial Sequence
  Description of Artificial Sequence: Synthetic oligonucleotide
  Antisense strand to SEQ ID NO: 1628117
aaugccaggccuuuccaua

SEQ ID NO: 1628119 - RNA, 19 nt, Artificial Sequence
  Description of Artificial Sequence: Synthetic oligonucleotide
  Sense strand starting at position 647 of SEQ ID NO: 1560839
ccuggcauuugcuuuguga

SEQ ID NO: 1628120 - RNA, 19 nt, Artificial Sequence
  Description of Artificial Sequence: Synthetic oligonucleotide
  Antisense strand to SEQ ID NO: 1628119
ucacaaagcaaaugccagg

SEQ ID NO: 1628121 - RNA, 19 nt, Artificial Sequence
  Description of Artificial Sequence: Synthetic oligonucleotide
  Sense strand starting at position 649 of SEQ ID NO: 1560839
uggcauuugcuuugugaag

SEQ ID NO: 1628122 - RNA, 19 nt, Artificial Sequence
  Description of Artificial Sequence: Synthetic oligonucleotide
  Antisense strand to SEQ ID NO: 1628121
cuucacaaagcaaaugcca

SEQ ID NO: 1628123 - RNA, 19 nt, Artificial Sequence
  Description of Artificial Sequence: Synthetic oligonucleotide
  Sense strand starting at position 651 of SEQ ID NO: 1560839
gcauuugcuuugugaaggu

SEQ ID NO: 1628124 - RNA, 19 nt, Artificial Sequence
  Description of Artificial Sequence: Synthetic oligonucleotide
  Antisense strand to SEQ ID NO: 1628123
accuucacaaagcaaaugc

SEQ ID NO: 1628125 - RNA, 19 nt, Artificial Sequence
  Description of Artificial Sequence: Synthetic oligonucleotide
  Sense strand starting at position 655 of SEQ ID NO: 1560839
uugcuuugugaaggucaca

SEQ ID NO: 1628126 - RNA, 19 nt, Artificial Sequence
  Description of Artificial Sequence: Synthetic oligonucleotide
  Antisense strand to SEQ ID NO: 1628125
ugugaccuucacaaagcaa

SEQ ID NO: 1628127 - RNA, 19 nt, Artificial Sequence
  Description of Artificial Sequence: Synthetic oligonucleotide
  Sense strand starting at position 805 of SEQ ID NO: 1560839
cauagacaucucuguggca

SEQ ID NO: 1628128 - RNA, 19 nt, Artificial Sequence
  Description of Artificial Sequence: Synthetic oligonucleotide
  Antisense strand to SEQ ID NO: 1628127
ugccacagagaugucuaug

SEQ ID NO: 1628129 - RNA, 19 nt, Artificial Sequence
  Description of Artificial Sequence: Synthetic oligonucleotide
  Sense strand starting at position 806 of SEQ ID NO: 1560839
auagacaucucuguggcau

SEQ ID NO: 1628130 - RNA, 19 nt, Artificial Sequence
  Description of Artificial Sequence: Synthetic oligonucleotide
  Antisense strand to SEQ ID NO: 1628129
augccacagagaugucuau

SEQ ID NO: 1628131 - RNA, 19 nt, Artificial Sequence
  Description of Artificial Sequence: Synthetic oligonucleotide
  Sense strand starting at position 807 of SEQ ID NO: 1560839
uagacaucucuguggcauc

SEQ ID NO: 1628132 - RNA, 19 nt, Artificial Sequence
  Description of Artificial Sequence: Synthetic oligonucleotide
  Antisense strand to SEQ ID NO: 1628131
gaugccacagagaugucua

SEQ ID NO: 1628133 - RNA, 19 nt, Artificial Sequence
  Description of Artificial Sequence: Synthetic oligonucleotide
  Sense strand starting at position 825 of SEQ ID NO: 1560839
cgcacaucugccuguguga

SEQ ID NO: 1628134 - RNA, 19 nt, Artificial Sequence
  Description of Artificial Sequence: Synthetic oligonucleotide
  Antisense strand to SEQ ID NO: 1628133
ucacacaggcagaugugcg

SEQ ID NO: 1628135 - RNA, 19 nt, Artificial Sequence
  Description of Artificial Sequence: Synthetic oligonucleotide
  Sense strand starting at position 872 of SEQ ID NO: 1560839
ugugcaucucugugucuuu

SEQ ID NO: 1628136 - RNA, 19 nt, Artificial Sequence
  Description of Artificial Sequence: Synthetic oligonucleotide
  Antisense strand to SEQ ID NO: 1628135
aaagacacagagaugcaca

SEQ ID NO: 1628137 - RNA, 19 nt, Artificial Sequence
  Description of Artificial Sequence: Synthetic oligonucleotide
  Sense strand starting at position 873 of SEQ ID NO: 1560839
gugcaucucugugucuuua

SEQ ID NO: 1628138 - RNA, 19 nt, Artificial Sequence
  Description of Artificial Sequence: Synthetic oligonucleotide
  Antisense strand to SEQ ID NO: 1628137
uaaagacacagagaugcac

SEQ ID NO: 1628139 - RNA, 19 nt, Artificial Sequence
  Description of Artificial Sequence: Synthetic oligonucleotide
  Sense strand starting at position 883 of SEQ ID NO: 1560839
gugucuuuaucuguguauu

SEQ ID NO: 1628140 - RNA, 19 nt, Artificial Sequence
  Description of Artificial Sequence: Synthetic oligonucleotide
  Antisense strand to SEQ ID NO: 1628139
aauacacagauaaagacac

SEQ ID NO: 1628141 - RNA, 19 nt, Artificial Sequence
  Description of Artificial Sequence: Synthetic oligonucleotide
  Sense strand starting at position 885 of SEQ ID NO: 1560839
gucuuuaucuguguauuuc

SEQ ID NO: 1628142 - RNA, 19 nt, Artificial Sequence
  Description of Artificial Sequence: Synthetic oligonucleotide
  Antisense strand to SEQ ID NO: 1628141
gaaauacacagauaaagac

SEQ ID NO: 1628143 - RNA, 19 nt, Artificial Sequence
  Description of Artificial Sequence: Synthetic oligonucleotide
  Sense strand starting at position 901 of SEQ ID NO: 1560839
uucugagucugggugacuu

SEQ ID NO: 1628144 - RNA, 19 nt, Artificial Sequence
  Description of Artificial Sequence: Synthetic oligonucleotide
  Antisense strand to SEQ ID NO: 1628143
aagucacccagacucagaa

SEQ ID NO: 1628145 - RNA, 19 nt, Artificial Sequence
  Description of Artificial Sequence: Synthetic oligonucleotide
  Sense strand starting at position 903 of SEQ ID NO: 1560839
cugagucugggugacuuua

SEQ ID NO: 1628146 - RNA, 19 nt, Artificial Sequence
  Description of Artificial Sequence: Synthetic oligonucleotide
  Antisense strand to SEQ ID NO: 1628145
uaaagucacccagacucag

SEQ ID NO: 1628147 - RNA, 19 nt, Artificial Sequence
  Description of Artificial Sequence: Synthetic oligonucleotide
  Sense strand starting at position 975 of SEQ ID NO: 1560839
gggugcguuccugugugua

SEQ ID NO: 1628148 - RNA, 19 nt, Artificial Sequence
  Description of Artificial Sequence: Synthetic oligonucleotide
  Antisense strand to SEQ ID NO: 1628147
uacacacaggaacgcaccc

SEQ ID NO: 1628149 - RNA, 19 nt, Artificial Sequence
  Description of Artificial Sequence: Synthetic oligonucleotide
  Sense strand starting at position 976 of SEQ ID NO: 1560839
ggugcguuccuguguguau

SEQ ID NO: 1628150 - RNA, 19 nt, Artificial Sequence
  Description of Artificial Sequence: Synthetic oligonucleotide
  Antisense strand to SEQ ID NO: 1628149
auacacacaggaacgcacc

SEQ ID NO: 1628151 - RNA, 19 nt, Artificial Sequence
  Description of Artificial Sequence: Synthetic oligonucleotide
  Sense strand starting at position 1140 of SEQ ID NO: 1560839
ugcuguggucuguguguca

SEQ ID NO: 1628152 - RNA, 19 nt, Artificial Sequence
  Description of Artificial Sequence: Synthetic oligonucleotide
  Antisense strand to SEQ ID NO: 1628151
ugacacacagaccacagca

SEQ ID NO: 1628153 - RNA, 19 nt, Artificial Sequence
  Description of Artificial Sequence: Synthetic oligonucleotide
  Sense strand starting at position 1162 of SEQ ID NO: 1560839
guguguggccaugagucaa

SEQ ID NO: 1628154 - RNA, 19 nt, Artificial Sequence
  Description of Artificial Sequence: Synthetic oligonucleotide
  Antisense strand to SEQ ID NO: 1628153
uugacucauggccacacac

SEQ ID NO: 1628155 - RNA, 19 nt, Artificial Sequence
  Description of Artificial Sequence: Synthetic oligonucleotide
  Sense strand starting at position 1323 of SEQ ID NO: 1560839
cccugagaauucugagaac

SEQ ID NO: 1628156 - RNA, 19 nt, Artificial Sequence
  Description of Artificial Sequence: Synthetic oligonucleotide
  Antisense strand to SEQ ID NO: 1628155
guucucagaauucucaggg

SEQ ID NO: 1628157 - RNA, 19 nt, Artificial Sequence
  Description of Artificial Sequence: Synthetic oligonucleotide
  Sense strand starting at position 1326 of SEQ ID NO: 1560839
ugagaauucugagaacuua

SEQ ID NO: 1628158 - RNA, 19 nt, Artificial Sequence
  Description of Artificial Sequence: Synthetic oligonucleotide
  Antisense strand to SEQ ID NO: 1628157
uaaguucucagaauucuca

SEQ ID NO: 1628159 - RNA, 19 nt, Artificial Sequence
  Description of Artificial Sequence: Synthetic oligonucleotide
  Sense strand starting at position 1591 of SEQ ID NO: 1560839
gccagaagcucagguuuaa

SEQ ID NO: 1628160 - RNA, 19 nt, Artificial Sequence
  Description of Artificial Sequence: Synthetic oligonucleotide
  Antisense strand to SEQ ID NO: 1628159
uuaaaccugagcuucuggc

SEQ ID NO: 1628161 - RNA, 19 nt, Artificial Sequence
  Description of Artificial Sequence: Synthetic oligonucleotide
  Sense strand starting at position 1711 of SEQ ID NO: 1560839
ggccuuuagagccaggaaa

SEQ ID NO: 1628162 - RNA, 19 nt, Artificial Sequence
  Description of Artificial Sequence: Synthetic oligonucleotide
  Antisense strand to SEQ ID NO: 1628161
uuuccuggcucuaaaggcc

SEQ ID NO: 1628163 - RNA, 19 nt, Artificial Sequence
  Description of Artificial Sequence: Synthetic oligonucleotide
  Sense strand starting at position 2388 of SEQ ID NO: 1560839
cgaggucucugaucgcuga

SEQ ID NO: 1628164 - RNA, 19 nt, Artificial Sequence
  Description of Artificial Sequence: Synthetic oligonucleotide
  Antisense strand to SEQ ID NO: 1628163
ucagcgaucagagaccucg

SEQ ID NO: 1628165 - RNA, 19 nt, Artificial Sequence
  Description of Artificial Sequence: Synthetic oligonucleotide
  Sense strand starting at position 2389 of SEQ ID NO: 1560839
gaggucucugaucgcugau

SEQ ID NO: 1628166 - RNA, 19 nt, Artificial Sequence
  Description of Artificial Sequence: Synthetic oligonucleotide
  Antisense strand to SEQ ID NO: 1628165
aucagcgaucagagaccuc

SEQ ID NO: 1628167 - RNA, 19 nt, Artificial Sequence
  Description of Artificial Sequence: Synthetic oligonucleotide
  Sense strand starting at position 2722 of SEQ ID NO: 1560839
gccucaauugcacguggaa

SEQ ID NO: 1628168 - RNA, 19 nt, Artificial Sequence
  Description of Artificial Sequence: Synthetic oligonucleotide
  Antisense strand to SEQ ID NO: 1628167
uuccacgugcaauugaggc

SEQ ID NO: 1628169 - RNA, 19 nt, Artificial Sequence
  Description of Artificial Sequence: Synthetic oligonucleotide
  Sense strand starting at position 2724 of SEQ ID NO: 1560839
cucaauugcacguggaaag

SEQ ID NO: 1628170 - RNA, 19 nt, Artificial Sequence
  Description of Artificial Sequence: Synthetic oligonucleotide
  Antisense strand to SEQ ID NO: 1628169
cuuuccacgugcaauugag

SEQ ID NO: 1628171 - RNA, 19 nt, Artificial Sequence
  Description of Artificial Sequence: Synthetic oligonucleotide
  Sense strand starting at position 2725 of SEQ ID NO: 1560839
ucaauugcacguggaaagu

SEQ ID NO: 1628172 - RNA, 19 nt, Artificial Sequence
  Description of Artificial Sequence: Synthetic oligonucleotide
  Antisense strand to SEQ ID NO: 1628171
acuuuccacgugcaauuga

SEQ ID NO: 1628173 - RNA, 19 nt, Artificial Sequence
  Description of Artificial Sequence: Synthetic oligonucleotide
  Sense strand starting at position 2818 of SEQ ID NO: 1560839
uucugccuccaggauauaa

SEQ ID NO: 1628174 - RNA, 19 nt, Artificial Sequence
  Description of Artificial Sequence: Synthetic oligonucleotide
  Antisense strand to SEQ ID NO: 1628173
uuauauccuggaggcagaa

SEQ ID NO: 1628175 - RNA, 19 nt, Artificial Sequence
  Description of Artificial Sequence: Synthetic oligonucleotide
  Sense strand starting at position 2872 of SEQ ID NO: 1560839
gccugucacucccagacuu

SEQ ID NO: 1628176 - RNA, 19 nt, Artificial Sequence
  Description of Artificial Sequence: Synthetic oligonucleotide
  Antisense strand to SEQ ID NO: 1628175
aagucugggagugacaggc

SEQ ID NO: 1628177 - RNA, 19 nt, Artificial Sequence
  Description of Artificial Sequence: Synthetic oligonucleotide
  Sense strand starting at position 3158 of SEQ ID NO: 1560839
uuauuaaacgucuacugca

SEQ ID NO: 1628178 - RNA, 19 nt, Artificial Sequence
  Description of Artificial Sequence: Synthetic oligonucleotide
  Antisense strand to SEQ ID NO: 1628177
ugcaguagacguuuaauaa

SEQ ID NO: 1628179 - RNA, 19 nt, Artificial Sequence
  Description of Artificial Sequence: Synthetic oligonucleotide
  Sense strand starting at position 3227 of SEQ ID NO: 1560839
aucgcugcuaugugacaga

SEQ ID NO: 1628180 - RNA, 19 nt, Artificial Sequence
  Description of Artificial Sequence: Synthetic oligonucleotide
  Antisense strand to SEQ ID NO: 1628179
ucugucacauagcagcgau

SEQ ID NO: 1628181 - RNA, 19 nt, Artificial Sequence
  Description of Artificial Sequence: Synthetic oligonucleotide
  Sense strand starting at position 3230 of SEQ ID NO: 1560839
gcugcuaugugacagaaga

SEQ ID NO: 1628182 - RNA, 19 nt, Artificial Sequence
  Description of Artificial Sequence: Synthetic oligonucleotide
  Antisense strand to SEQ ID NO: 1628181
ucuucugucacauagcagc

SEQ ID NO: 1628183 - RNA, 19 nt, Artificial Sequence
  Description of Artificial Sequence: Synthetic oligonucleotide
  Sense strand starting at position 3971 of SEQ ID NO: 1560839
ccucauugucccugagaca

SEQ ID NO: 1628184 - RNA, 19 nt, Artificial Sequence
  Description of Artificial Sequence: Synthetic oligonucleotide
  Antisense strand to SEQ ID NO: 1628183
ugucucagggacaaugagg

SEQ ID NO: 1628185 - RNA, 19 nt, Artificial Sequence
  Description of Artificial Sequence: Synthetic oligonucleotide
  Sense strand starting at position 3972 of SEQ ID NO: 1560839
cucauugucccugagacaa

SEQ ID NO: 1628186 - RNA, 19 nt, Artificial Sequence
  Description of Artificial Sequence: Synthetic oligonucleotide
  Antisense strand to SEQ ID NO: 1628185
uugucucagggacaaugag

SEQ ID NO: 1628187 - RNA, 19 nt, Artificial Sequence
  Description of Artificial Sequence: Synthetic oligonucleotide
  Sense strand starting at position 140 of SEQ ID NO: 1560840
cguggagagguauaauuaa

SEQ ID NO: 1628188 - RNA, 19 nt, Artificial Sequence
  Description of Artificial Sequence: Synthetic oligonucleotide
  Antisense strand to SEQ ID NO: 1628187
uuaauuauaccucuccacg

SEQ ID NO: 1628189 - RNA, 19 nt, Artificial Sequence
  Description of Artificial Sequence: Synthetic oligonucleotide
  Sense strand starting at position 365 of SEQ ID NO: 1560840
gcucauucuugagccaaga

SEQ ID NO: 1628190 - RNA, 19 nt, Artificial Sequence
  Description of Artificial Sequence: Synthetic oligonucleotide
  Antisense strand to SEQ ID NO: 1628189
ucuuggcucaagaaugagc

SEQ ID NO: 1628191 - RNA, 19 nt, Artificial Sequence
  Description of Artificial Sequence: Synthetic oligonucleotide
  Sense strand starting at position 388 of SEQ ID NO: 1560840
gguugaguacucugggaaa

SEQ ID NO: 1628192 - RNA, 19 nt, Artificial Sequence
  Description of Artificial Sequence: Synthetic oligonucleotide
  Antisense strand to SEQ ID NO: 1628191
uuucccagaguacucaacc

SEQ ID NO: 1628193 - RNA, 19 nt, Artificial Sequence
  Description of Artificial Sequence: Synthetic oligonucleotide
  Sense strand starting at position 390 of SEQ ID NO: 1560840
uugaguacucugggaaacu

SEQ ID NO: 1628194 - RNA, 19 nt, Artificial Sequence
  Description of Artificial Sequence: Synthetic oligonucleotide
  Antisense strand to SEQ ID NO: 1628193
aguuucccagaguacucaa

SEQ ID NO: 1628195 - RNA, 19 nt, Artificial Sequence
  Description of Artificial Sequence: Synthetic oligonucleotide
  Sense strand starting at position 391 of SEQ ID NO: 1560840
ugaguacucugggaaacug

SEQ ID NO: 1628196 - RNA, 19 nt, Artificial Sequence
  Description of Artificial Sequence: Synthetic oligonucleotide
  Antisense strand to SEQ ID NO: 1628195
caguuucccagaguacuca

SEQ ID NO: 1628197 - RNA, 19 nt, Artificial Sequence
  Description of Artificial Sequence: Synthetic oligonucleotide
  Sense strand starting at position 399 of SEQ ID NO: 1560840
cugggaaacugguugggua

SEQ ID NO: 1628198 - RNA, 19 nt, Artificial Sequence
  Description of Artificial Sequence: Synthetic oligonucleotide
  Antisense strand to SEQ ID NO: 1628197
uacccaaccaguuucccag

SEQ ID NO: 1628199 - RNA, 19 nt, Artificial Sequence
  Description of Artificial Sequence: Synthetic oligonucleotide
  Sense strand starting at position 1192 of SEQ ID NO: 1560840
cuagcugucuaagggagua

SEQ ID NO: 1628200 - RNA, 19 nt, Artificial Sequence
  Description of Artificial Sequence: Synthetic oligonucleotide
  Antisense strand to SEQ ID NO: 1628199
uacucccuuagacagcuag

SEQ ID NO: 1628201 - RNA, 19 nt, Artificial Sequence
  Description of Artificial Sequence: Synthetic oligonucleotide
  Sense strand starting at position 1197 of SEQ ID NO: 1560840
ugucuaagggaguaguuaa

SEQ ID NO: 1628202 - RNA, 19 nt, Artificial Sequence
  Description of Artificial Sequence: Synthetic oligonucleotide
  Antisense strand to SEQ ID NO: 1628201
uuaacuacucccuuagaca

SEQ ID NO: 1628203 - RNA, 19 nt, Artificial Sequence
  Description of Artificial Sequence: Synthetic oligonucleotide
  Sense strand starting at position 1205 of SEQ ID NO: 1560840
ggaguaguuaauggcggua

SEQ ID NO: 1628204 - RNA, 19 nt, Artificial Sequence
  Description of Artificial Sequence: Synthetic oligonucleotide
  Antisense strand to SEQ ID NO: 1628203
uaccgccauuaacuacucc

SEQ ID NO: 1628205 - RNA, 19 nt, Artificial Sequence
  Description of Artificial Sequence: Synthetic oligonucleotide
  Sense strand starting at position 1207 of SEQ ID NO: 1560840
aguaguuaauggcgguaua

SEQ ID NO: 1628206 - RNA, 19 nt, Artificial Sequence
  Description of Artificial Sequence: Synthetic oligonucleotide
  Antisense strand to SEQ ID NO: 1628205
uauaccgccauuaacuacu

SEQ ID NO: 1628207 - RNA, 19 nt, Artificial Sequence
  Description of Artificial Sequence: Synthetic oligonucleotide
  Sense strand starting at position 1282 of SEQ ID NO: 1560840
aucccuuaggucugagagu

SEQ ID NO: 1628208 - RNA, 19 nt, Artificial Sequence
  Description of Artificial Sequence: Synthetic oligonucleotide
  Antisense strand to SEQ ID NO: 1628207
acucucagaccuaagggau

SEQ ID NO: 1628209 - RNA, 19 nt, Artificial Sequence
  Description of Artificial Sequence: Synthetic oligonucleotide
  Sense strand starting at position 1370 of SEQ ID NO: 1560840
gacauucugucucaagugu

SEQ ID NO: 1628210 - RNA, 19 nt, Artificial Sequence
  Description of Artificial Sequence: Synthetic oligonucleotide
  Antisense strand to SEQ ID NO: 1628209
acacuugagacagaauguc

SEQ ID NO: 1628211 - RNA, 19 nt, Artificial Sequence
  Description of Artificial Sequence: Synthetic oligonucleotide
  Sense strand starting at position 1701 of SEQ ID NO: 1560840
ggaaauagccguggucacu

SEQ ID NO: 1628212 - RNA, 19 nt, Artificial Sequence
  Description of Artificial Sequence: Synthetic oligonucleotide
  Antisense strand to SEQ ID NO: 1628211
agugaccacggcuauuucc

SEQ ID NO: 1628213 - RNA, 19 nt, Artificial Sequence
  Description of Artificial Sequence: Synthetic oligonucleotide
  Sense strand starting at position 2463 of SEQ ID NO: 1560840
caccgauccuugucugaaa

SEQ ID NO: 1628214 - RNA, 19 nt, Artificial Sequence
  Description of Artificial Sequence: Synthetic oligonucleotide
  Antisense strand to SEQ ID NO: 1628213
uuucagacaaggaucggug

SEQ ID NO: 1628215 - RNA, 19 nt, Artificial Sequence
  Description of Artificial Sequence: Synthetic oligonucleotide
  Sense strand starting at position 2464 of SEQ ID NO: 1560840
accgauccuugucugaaau

SEQ ID NO: 1628216 - RNA, 19 nt, Artificial Sequence
  Description of Artificial Sequence: Synthetic oligonucleotide
  Antisense strand to SEQ ID NO: 1628215
auuucagacaaggaucggu

SEQ ID NO: 1628217 - RNA, 19 nt, Artificial Sequence
  Description of Artificial Sequence: Synthetic oligonucleotide
  Sense strand starting at position 2465 of SEQ ID NO: 1560840
ccgauccuugucugaaaug

SEQ ID NO: 1628218 - RNA, 19 nt, Artificial Sequence
  Description of Artificial Sequence: Synthetic oligonucleotide
  Antisense strand to SEQ ID NO: 1628217
cauuucagacaaggaucgg

SEQ ID NO: 1628219 - RNA, 19 nt, Artificial Sequence
  Description of Artificial Sequence: Synthetic oligonucleotide
  Sense strand starting at position 2493 of SEQ ID NO: 1560840
gggagaggcuggcuuacuu

SEQ ID NO: 1628220 - RNA, 19 nt, Artificial Sequence
  Description of Artificial Sequence: Synthetic oligonucleotide
  Antisense strand to SEQ ID NO: 1628219
aaguaagccagccucuccc

SEQ ID NO: 1628221 - RNA, 19 nt, Artificial Sequence
  Description of Artificial Sequence: Synthetic oligonucleotide
  Sense strand starting at position 2555 of SEQ ID NO: 1560840
gggucagugucuuaaacuc

SEQ ID NO: 1628222 - RNA, 19 nt, Artificial Sequence
  Description of Artificial Sequence: Synthetic oligonucleotide
  Antisense strand to SEQ ID NO: 1628221
gaguuuaagacacugaccc

SEQ ID NO: 1628223 - RNA, 19 nt, Artificial Sequence
  Description of Artificial Sequence: Synthetic oligonucleotide
  Sense strand starting at position 2564 of SEQ ID NO: 1560840
ucuuaaacucugugagccu

SEQ ID NO: 1628224 - RNA, 19 nt, Artificial Sequence
  Description of Artificial Sequence: Synthetic oligonucleotide
  Antisense strand to SEQ ID NO: 1628223
aggcucacagaguuuaaga

SEQ ID NO: 1628225 - RNA, 19 nt, Artificial Sequence
  Description of Artificial Sequence: Synthetic oligonucleotide
  Sense strand starting at position 2621 of SEQ ID NO: 1560840
ggguccaugugagaaugaa

SEQ ID NO: 1628226 - RNA, 19 nt, Artificial Sequence
  Description of Artificial Sequence: Synthetic oligonucleotide
  Antisense strand to SEQ ID NO: 1628225
uucauucucacauggaccc

SEQ ID NO: 1628227 - RNA, 19 nt, Artificial Sequence
  Description of Artificial Sequence: Synthetic oligonucleotide
  Sense strand starting at position 2661 of SEQ ID NO: 1560840
cagaauagugucuggcacu

SEQ ID NO: 1628228 - RNA, 19 nt, Artificial Sequence
  Description of Artificial Sequence: Synthetic oligonucleotide
  Antisense strand to SEQ ID NO: 1628227
agugccagacacuauucug

SEQ ID NO: 1628229 - RNA, 19 nt, Artificial Sequence
  Description of Artificial Sequence: Synthetic oligonucleotide
  Sense strand starting at position 2671 of SEQ ID NO: 1560840
ucuggcacucaguaaauau

SEQ ID NO: 1628230 - RNA, 19 nt, Artificial Sequence
  Description of Artificial Sequence: Synthetic oligonucleotide
  Antisense strand to SEQ ID NO: 1628229
auauuuacugagugccaga

SEQ ID NO: 1628231 - RNA, 19 nt, Artificial Sequence
  Description of Artificial Sequence: Synthetic oligonucleotide
  Sense strand starting at position 2715 of SEQ ID NO: 1560840
gugggagccuguuagaacu

SEQ ID NO: 1628232 - RNA, 19 nt, Artificial Sequence
  Description of Artificial Sequence: Synthetic oligonucleotide
  Antisense strand to SEQ ID NO: 1628231
aguucuaacaggcucccac

SEQ ID NO: 1628233 - RNA, 19 nt, Artificial Sequence
  Description of Artificial Sequence: Synthetic oligonucleotide
  Sense strand starting at position 2778 of SEQ ID NO: 1560840
uuaccucacucagaggaaa

SEQ ID NO: 1628234 - RNA, 19 nt, Artificial Sequence
  Description of Artificial Sequence: Synthetic oligonucleotide
  Antisense strand to SEQ ID NO: 1628233
uuuccucugagugagguaa

SEQ ID NO: 1628235 - RNA, 19 nt, Artificial Sequence
  Description of Artificial Sequence: Synthetic oligonucleotide
  Sense strand starting at position 2879 of SEQ ID NO: 1560840
cuagcuguuucuggacaca

SEQ ID NO: 1628236 - RNA, 19 nt, Artificial Sequence
  Description of Artificial Sequence: Synthetic oligonucleotide
  Antisense strand to SEQ ID NO: 1628235
uguguccagaaacagcuag

SEQ ID NO: 1628237 - RNA, 19 nt, Artificial Sequence
  Description of Artificial Sequence: Synthetic oligonucleotide
  Sense strand starting at position 3300 of SEQ ID NO: 1560840
uuaggucuuugcuuauauc

SEQ ID NO: 1628238 - RNA, 19 nt, Artificial Sequence
  Description of Artificial Sequence: Synthetic oligonucleotide
  Antisense strand to SEQ ID NO: 1628237
gauauaagcaaagaccuaa

SEQ ID NO: 1628239 - RNA, 19 nt, Artificial Sequence
  Description of Artificial Sequence: Synthetic oligonucleotide
  Sense strand starting at position 3303 of SEQ ID NO: 1560840
ggucuuugcuuauaucuca

SEQ ID NO: 1628240 - RNA, 19 nt, Artificial Sequence
  Description of Artificial Sequence: Synthetic oligonucleotide
  Antisense strand to SEQ ID NO: 1628239
ugagauauaagcaaagacc

SEQ ID NO: 1628241 - RNA, 19 nt, Artificial Sequence
  Description of Artificial Sequence: Synthetic oligonucleotide
  Sense strand starting at position 3448 of SEQ ID NO: 1560840
acauuuauugucugugucu

SEQ ID NO: 1628242 - RNA, 19 nt, Artificial Sequence
  Description of Artificial Sequence: Synthetic oligonucleotide
  Antisense strand to SEQ ID NO: 1628241
agacacagacaauaaaugu

SEQ ID NO: 1628243 - RNA, 19 nt, Artificial Sequence
  Description of Artificial Sequence: Synthetic oligonucleotide
  Sense strand starting at position 3457 of SEQ ID NO: 1560840
gucugugucuccucacacu

SEQ ID NO: 1628244 - RNA, 19 nt, Artificial Sequence
  Description of Artificial Sequence: Synthetic oligonucleotide
  Antisense strand to SEQ ID NO: 1628243
agugugaggagacacagac

SEQ ID NO: 1628245 - RNA, 19 nt, Artificial Sequence
  Description of Artificial Sequence: Synthetic oligonucleotide
  Sense strand starting at position 3463 of SEQ ID NO: 1560840
gucuccucacacuggaaua

SEQ ID NO: 1628246 - RNA, 19 nt, Artificial Sequence
  Description of Artificial Sequence: Synthetic oligonucleotide
  Antisense strand to SEQ ID NO: 1628245
uauuccagugugaggagac

SEQ ID NO: 1628247 - RNA, 19 nt, Artificial Sequence
  Description of Artificial Sequence: Synthetic oligonucleotide
  Sense strand starting at position 3475 of SEQ ID NO: 1560840
uggaauauuagcugcagga

SEQ ID NO: 1628248 - RNA, 19 nt, Artificial Sequence
  Description of Artificial Sequence: Synthetic oligonucleotide
  Antisense strand to SEQ ID NO: 1628247
uccugcagcuaauauucca

SEQ ID NO: 1628249 - RNA, 19 nt, Artificial Sequence
  Description of Artificial Sequence: Synthetic oligonucleotide
  Sense strand starting at position 3567 of SEQ ID NO: 1560840
ugaacagaauccggaacau

SEQ ID NO: 1628250 - RNA, 19 nt, Artificial Sequence
  Description of Artificial Sequence: Synthetic oligonucleotide
  Antisense strand to SEQ ID NO: 1628249
auguuccggauucuguuca

SEQ ID NO: 1628251 - RNA, 19 nt, Artificial Sequence
  Description of Artificial Sequence: Synthetic oligonucleotide
  Sense strand starting at position 3609 of SEQ ID NO: 1560840
aaugucagguuauuauuga

SEQ ID NO: 1628252 - RNA, 19 nt, Artificial Sequence
  Description of Artificial Sequence: Synthetic oligonucleotide
  Antisense strand to SEQ ID NO: 1628251
ucaauaauaaccugacauu

SEQ ID NO: 1628253 - RNA, 19 nt, Artificial Sequence
  Description of Artificial Sequence: Synthetic oligonucleotide
  Sense strand starting at position 3622 of SEQ ID NO: 1560840
uauugagagccugauagug

SEQ ID NO: 1628254 - RNA, 19 nt, Artificial Sequence
  Description of Artificial Sequence: Synthetic oligonucleotide
  Antisense strand to SEQ ID NO: 1628253
cacuaucaggcucucaaua

SEQ ID NO: 1628255 - RNA, 19 nt, Artificial Sequence
  Description of Artificial Sequence: Synthetic oligonucleotide
  Sense strand starting at position 3624 of SEQ ID NO: 1560840
uugagagccugauagugua

SEQ ID NO: 1628256 - RNA, 19 nt, Artificial Sequence
  Description of Artificial Sequence: Synthetic oligonucleotide
  Antisense strand to SEQ ID NO: 1628255
uacacuaucaggcucucaa

SEQ ID NO: 1628257 - RNA, 19 nt, Artificial Sequence
  Description of Artificial Sequence: Synthetic oligonucleotide
  Sense strand starting at position 3637 of SEQ ID NO: 1560840
aguguaauguuccuaacag

SEQ ID NO: 1628258 - RNA, 19 nt, Artificial Sequence
  Description of Artificial Sequence: Synthetic oligonucleotide
  Antisense strand to SEQ ID NO: 1628257
cuguuaggaacauuacacu

SEQ ID NO: 1628259 - RNA, 19 nt, Artificial Sequence
  Description of Artificial Sequence: Synthetic oligonucleotide
  Sense strand starting at position 3638 of SEQ ID NO: 1560840
guguaauguuccuaacagu

SEQ ID NO: 1628260 - RNA, 19 nt, Artificial Sequence
  Description of Artificial Sequence: Synthetic oligonucleotide
  Antisense strand to SEQ ID NO: 1628259
acuguuaggaacauuacac

SEQ ID NO: 1628261 - RNA, 19 nt, Artificial Sequence
  Description of Artificial Sequence: Synthetic oligonucleotide
  Sense strand starting at position 3652 of SEQ ID NO: 1560840
acaguucuacuguguacua

SEQ ID NO: 1628262 - RNA, 19 nt, Artificial Sequence
  Description of Artificial Sequence: Synthetic oligonucleotide
  Antisense strand to SEQ ID NO: 1628261
uaguacacaguagaacugu

SEQ ID NO: 1628263 - RNA, 19 nt, Artificial Sequence
  Description of Artificial Sequence: Synthetic oligonucleotide
  Sense strand starting at position 3661 of SEQ ID NO: 1560840
cuguguacuagcugguuua

SEQ ID NO: 1628264 - RNA, 19 nt, Artificial Sequence
  Description of Artificial Sequence: Synthetic oligonucleotide
  Antisense strand to SEQ ID NO: 1628263
uaaaccagcuaguacacag

SEQ ID NO: 1628265 - RNA, 19 nt, Artificial Sequence
  Description of Artificial Sequence: Synthetic oligonucleotide
  Sense strand starting at position 3662 of SEQ ID NO: 1560840
uguguacuagcugguuuau

SEQ ID NO: 1628266 - RNA, 19 nt, Artificial Sequence
  Description of Artificial Sequence: Synthetic oligonucleotide
  Antisense strand to SEQ ID NO: 1628265
auaaaccagcuaguacaca

SEQ ID NO: 1628267 - RNA, 19 nt, Artificial Sequence
  Description of Artificial Sequence: Synthetic oligonucleotide
  Sense strand starting at position 185 of SEQ ID NO: 1560841
gggugucaguccuucccaa

SEQ ID NO: 1628268 - RNA, 19 nt, Artificial Sequence
  Description of Artificial Sequence: Synthetic oligonucleotide
  Antisense strand to SEQ ID NO: 1628267
uugggaaggacugacaccc

SEQ ID NO: 1628269 - RNA, 19 nt, Artificial Sequence
  Description of Artificial Sequence: Synthetic oligonucleotide
  Sense strand starting at position 189 of SEQ ID NO: 1560841
gucaguccuucccaagaac

SEQ ID NO: 1628270 - RNA, 19 nt, Artificial Sequence
  Description of Artificial Sequence: Synthetic oligonucleotide
  Antisense strand to SEQ ID NO: 1628269
guucuugggaaggacugac

SEQ ID NO: 1628271 - RNA, 19 nt, Artificial Sequence
  Description of Artificial Sequence: Synthetic oligonucleotide
  Sense strand starting at position 332 of SEQ ID NO: 1560841
gggagucauggucagcaua

SEQ ID NO: 1628272 - RNA, 19 nt, Artificial Sequence
  Description of Artificial Sequence: Synthetic oligonucleotide
  Antisense strand to SEQ ID NO: 1628271
uaugcugaccaugacuccc

SEQ ID NO: 1628273 - RNA, 19 nt, Artificial Sequence
  Description of Artificial Sequence: Synthetic oligonucleotide
  Sense strand starting at position 334 of SEQ ID NO: 1560841
gagucauggucagcauaac

SEQ ID NO: 1628274 - RNA, 19 nt, Artificial Sequence
  Description of Artificial Sequence: Synthetic oligonucleotide
  Antisense strand to SEQ ID NO: 1628273
guuaugcugaccaugacuc

SEQ ID NO: 1628275 - RNA, 19 nt, Artificial Sequence
  Description of Artificial Sequence: Synthetic oligonucleotide
  Sense strand starting at position 466 of SEQ ID NO: 1560841
ggagaaucccgucgccaug

SEQ ID NO: 1628276 - RNA, 19 nt, Artificial Sequence
  Description of Artificial Sequence: Synthetic oligonucleotide
  Antisense strand to SEQ ID NO: 1628275
cauggcgacgggauucucc

SEQ ID NO: 1628277 - RNA, 19 nt, Artificial Sequence
  Description of Artificial Sequence: Synthetic oligonucleotide
  Sense strand starting at position 488 of SEQ ID NO: 1560841
augggagucuccuuagcaa

SEQ ID NO: 1628278 - RNA, 19 nt, Artificial Sequence
  Description of Artificial Sequence: Synthetic oligonucleotide
  Antisense strand to SEQ ID NO: 1628277
uugcuaaggagacucccau

SEQ ID NO: 1628279 - RNA, 19 nt, Artificial Sequence
  Description of Artificial Sequence: Synthetic oligonucleotide
  Sense strand starting at position 592 of SEQ ID NO: 1560841
acccaaguguucccagaca

SEQ ID NO: 1628280 - RNA, 19 nt, Artificial Sequence
  Description of Artificial Sequence: Synthetic oligonucleotide
  Antisense strand to SEQ ID NO: 1628279
ugucugggaacacuugggu

SEQ ID NO: 1628281 - RNA, 19 nt, Artificial Sequence
  Description of Artificial Sequence: Synthetic oligonucleotide
  Sense strand starting at position 891 of SEQ ID NO: 1560841
aggccucugcugugacauu

SEQ ID NO: 1628282 - RNA, 19 nt, Artificial Sequence
  Description of Artificial Sequence: Synthetic oligonucleotide
  Antisense strand to SEQ ID NO: 1628281
aaugucacagcagaggccu

SEQ ID NO: 1628283 - RNA, 19 nt, Artificial Sequence
  Description of Artificial Sequence: Synthetic oligonucleotide
  Sense strand starting at position 1310 of SEQ ID NO: 1560841
gccagaugaucucagacag

SEQ ID NO: 1628284 - RNA, 19 nt, Artificial Sequence
  Description of Artificial Sequence: Synthetic oligonucleotide
  Antisense strand to SEQ ID NO: 1628283
cugucugagaucaucuggc

SEQ ID NO: 1628285 - RNA, 19 nt, Artificial Sequence
  Description of Artificial Sequence: Synthetic oligonucleotide
  Sense strand starting at position 2201 of SEQ ID NO: 1560841
acuuuacacucacagaugu

SEQ ID NO: 1628286 - RNA, 19 nt, Artificial Sequence
  Description of Artificial Sequence: Synthetic oligonucleotide
  Antisense strand to SEQ ID NO: 1628285
acaucugugaguguaaagu

SEQ ID NO: 1628287 - RNA, 19 nt, Artificial Sequence
  Description of Artificial Sequence: Synthetic oligonucleotide
  Sense strand starting at position 2296 of SEQ ID NO: 1560841
ucaaaugcuuucuguugua

SEQ ID NO: 1628288 - RNA, 19 nt, Artificial Sequence
  Description of Artificial Sequence: Synthetic oligonucleotide
  Antisense strand to SEQ ID NO: 1628287
uacaacagaaagcauuuga

SEQ ID NO: 1628289 - RNA, 19 nt, Artificial Sequence
  Description of Artificial Sequence: Synthetic oligonucleotide
  Sense strand starting at position 3026 of SEQ ID NO: 1560841
acugcuauguuccuauaca

SEQ ID NO: 1628290 - RNA, 19 nt, Artificial Sequence
  Description of Artificial Sequence: Synthetic oligonucleotide
  Antisense strand to SEQ ID NO: 1628289
uguauaggaacauagcagu

SEQ ID NO: 1628291 - RNA, 19 nt, Artificial Sequence
  Description of Artificial Sequence: Synthetic oligonucleotide
  Sense strand starting at position 3468 of SEQ ID NO: 1560841
gcaaaugcguagccaauaa

SEQ ID NO: 1628292 - RNA, 19 nt, Artificial Sequence
  Description of Artificial Sequence: Synthetic oligonucleotide
  Antisense strand to SEQ ID NO: 1628291
uuauuggcuacgcauuugc

SEQ ID NO: 1628293 - RNA, 19 nt, Artificial Sequence
  Description of Artificial Sequence: Synthetic oligonucleotide
  Sense strand starting at position 3561 of SEQ ID NO: 1560841
acggucaccuauugacaca

SEQ ID NO: 1628294 - RNA, 19 nt, Artificial Sequence
  Description of Artificial Sequence: Synthetic oligonucleotide
  Antisense strand to SEQ ID NO: 1628293
ugugucaauaggugaccgu

SEQ ID NO: 1628295 - RNA, 19 nt, Artificial Sequence
  Description of Artificial Sequence: Synthetic oligonucleotide
  Sense strand starting at position 435 of SEQ ID NO: 1560842
cgcugaguucuggccaggu

SEQ ID NO: 1628296 - RNA, 19 nt, Artificial Sequence
  Description of Artificial Sequence: Synthetic oligonucleotide
  Antisense strand to SEQ ID NO: 1628295
accuggccagaacucagcg

SEQ ID NO: 1628297 - RNA, 19 nt, Artificial Sequence
  Description of Artificial Sequence: Synthetic oligonucleotide
  Sense strand starting at position 437 of SEQ ID NO: 1560842
cugaguucuggccagguau

SEQ ID NO: 1628298 - RNA, 19 nt, Artificial Sequence
  Description of Artificial Sequence: Synthetic oligonucleotide
  Antisense strand to SEQ ID NO: 1628297
auaccuggccagaacucag

SEQ ID NO: 1628299 - RNA, 19 nt, Artificial Sequence
  Description of Artificial Sequence: Synthetic oligonucleotide
  Sense strand starting at position 591 of SEQ ID NO: 1560842
aaggcuugugccuguaacu

SEQ ID NO: 1628300 - RNA, 19 nt, Artificial Sequence
  Description of Artificial Sequence: Synthetic oligonucleotide
  Antisense strand to SEQ ID NO: 1628299
aguuacaggcacaagccuu

SEQ ID NO: 1628301 - RNA, 19 nt, Artificial Sequence
  Description of Artificial Sequence: Synthetic oligonucleotide
  Sense strand starting at position 786 of SEQ ID NO: 1560842
aggugaugggccugggauu

SEQ ID NO: 1628302 - RNA, 19 nt, Artificial Sequence
  Description of Artificial Sequence: Synthetic oligonucleotide
  Antisense strand to SEQ ID NO: 1628301
aaucccaggcccaucaccu

SEQ ID NO: 1628303 - RNA, 19 nt, Artificial Sequence
  Description of Artificial Sequence: Synthetic oligonucleotide
  Sense strand starting at position 834 of SEQ ID NO: 1560842
uggcucaguuucccagaau

SEQ ID NO: 1628304 - RNA, 19 nt, Artificial Sequence
  Description of Artificial Sequence: Synthetic oligonucleotide
  Antisense strand to SEQ ID NO: 1628303
auucugggaaacugagcca

SEQ ID NO: 1628305 - RNA, 19 nt, Artificial Sequence
  Description of Artificial Sequence: Synthetic oligonucleotide
  Sense strand starting at position 835 of SEQ ID NO: 1560842
ggcucaguuucccagaaug

SEQ ID NO: 1628306 - RNA, 19 nt, Artificial Sequence
  Description of Artificial Sequence: Synthetic oligonucleotide
  Antisense strand to SEQ ID NO: 1628305
cauucugggaaacugagcc

SEQ ID NO: 1628307 - RNA, 19 nt, Artificial Sequence
  Description of Artificial Sequence: Synthetic oligonucleotide
  Sense strand starting at position 860 of SEQ ID NO: 1560842
cuggcugugaucugaaguu

SEQ ID NO: 1628308 - RNA, 19 nt, Artificial Sequence
  Description of Artificial Sequence: Synthetic oligonucleotide
  Antisense strand to SEQ ID NO: 1628307
aacuucagaucacagccag

SEQ ID NO: 1628309 - RNA, 19 nt, Artificial Sequence
  Description of Artificial Sequence: Synthetic oligonucleotide
  Sense strand starting at position 963 of SEQ ID NO: 1560842
gggaucuccugcucccaaa

SEQ ID NO: 1628310 - RNA, 19 nt, Artificial Sequence
  Description of Artificial Sequence: Synthetic oligonucleotide
  Antisense strand to SEQ ID NO: 1628309
uuugggagcaggagauccc

SEQ ID NO: 1628311 - RNA, 19 nt, Artificial Sequence
  Description of Artificial Sequence: Synthetic oligonucleotide
  Sense strand starting at position 1266 of SEQ ID NO: 1560842
uugugugucuaguagagac

SEQ ID NO: 1628312 - RNA, 19 nt, Artificial Sequence
  Description of Artificial Sequence: Synthetic oligonucleotide
  Antisense strand to SEQ ID NO: 1628311
gucucuacuagacacacaa

SEQ ID NO: 1628313 - RNA, 19 nt, Artificial Sequence
  Description of Artificial Sequence: Synthetic oligonucleotide
  Sense strand starting at position 1391 of SEQ ID NO: 1560842
uggccagcucuggguauuu

SEQ ID NO: 1628314 - RNA, 19 nt, Artificial Sequence
  Description of Artificial Sequence: Synthetic oligonucleotide
  Antisense strand to SEQ ID NO: 1628313
aaauacccagagcuggcca

SEQ ID NO: 1628315 - RNA, 19 nt, Artificial Sequence
  Description of Artificial Sequence: Synthetic oligonucleotide
  Sense strand starting at position 1400 of SEQ ID NO: 1560842
cuggguauuucucaguaga

SEQ ID NO: 1628316 - RNA, 19 nt, Artificial Sequence
  Description of Artificial Sequence: Synthetic oligonucleotide
  Antisense strand to SEQ ID NO: 1628315
ucuacugagaaauacccag

SEQ ID NO: 1628317 - RNA, 19 nt, Artificial Sequence
  Description of Artificial Sequence: Synthetic oligonucleotide
  Sense strand starting at position 1413 of SEQ ID NO: 1560842
aguagagggucucugggau

SEQ ID NO: 1628318 - RNA, 19 nt, Artificial Sequence
  Description of Artificial Sequence: Synthetic oligonucleotide
  Antisense strand to SEQ ID NO: 1628317
aucccagagacccucuacu

SEQ ID NO: 1628319 - RNA, 19 nt, Artificial Sequence
  Description of Artificial Sequence: Synthetic oligonucleotide
  Sense strand starting at position 1488 of SEQ ID NO: 1560842
gagaguguuguccugcugu

SEQ ID NO: 1628320 - RNA, 19 nt, Artificial Sequence
  Description of Artificial Sequence: Synthetic oligonucleotide
  Antisense strand to SEQ ID NO: 1628319
acagcaggacaacacucuc

SEQ ID NO: 1628321 - RNA, 19 nt, Artificial Sequence
  Description of Artificial Sequence: Synthetic oligonucleotide
  Sense strand starting at position 1536 of SEQ ID NO: 1560842
cagaaaugguucugagacc

SEQ ID NO: 1628322 - RNA, 19 nt, Artificial Sequence
  Description of Artificial Sequence: Synthetic oligonucleotide
  Antisense strand to SEQ ID NO: 1628321
ggucucagaaccauuucug

SEQ ID NO: 1628323 - RNA, 19 nt, Artificial Sequence
  Description of Artificial Sequence: Synthetic oligonucleotide
  Sense strand starting at position 1537 of SEQ ID NO: 1560842
agaaaugguucugagaccu

SEQ ID NO: 1628324 - RNA, 19 nt, Artificial Sequence
  Description of Artificial Sequence: Synthetic oligonucleotide
  Antisense strand to SEQ ID NO: 1628323
aggucucagaaccauuucu

SEQ ID NO: 1628325 - RNA, 19 nt, Artificial Sequence
  Description of Artificial Sequence: Synthetic oligonucleotide
  Sense strand starting at position 1857 of SEQ ID NO: 1560842
cagaguggcucugaugguu

SEQ ID NO: 1628326 - RNA, 19 nt, Artificial Sequence
  Description of Artificial Sequence: Synthetic oligonucleotide
  Antisense strand to SEQ ID NO: 1628325
aaccaucagagccacucug

SEQ ID NO: 1628327 - RNA, 19 nt, Artificial Sequence
  Description of Artificial Sequence: Synthetic oligonucleotide
  Sense strand starting at position 1928 of SEQ ID NO: 1560842
gaauaagcuugcuccagga

SEQ ID NO: 1628328 - RNA, 19 nt, Artificial Sequence
  Description of Artificial Sequence: Synthetic oligonucleotide
  Antisense strand to SEQ ID NO: 1628327
uccuggagcaagcuuauuc

SEQ ID NO: 1628329 - RNA, 19 nt, Artificial Sequence
  Description of Artificial Sequence: Synthetic oligonucleotide
  Sense strand starting at position 2126 of SEQ ID NO: 1560842
acacacuuuccuuggguga

SEQ ID NO: 1628330 - RNA, 19 nt, Artificial Sequence
  Description of Artificial Sequence: Synthetic oligonucleotide
  Antisense strand to SEQ ID NO: 1628329
ucacccaaggaaagugugu

SEQ ID NO: 1628331 - RNA, 19 nt, Artificial Sequence
  Description of Artificial Sequence: Synthetic oligonucleotide
  Sense strand starting at position 2294 of SEQ ID NO: 1560842
cugggugagagguguuaag

SEQ ID NO: 1628332 - RNA, 19 nt, Artificial Sequence
  Description of Artificial Sequence: Synthetic oligonucleotide
  Antisense strand to SEQ ID NO: 1628331
cuuaacaccucucacccag

SEQ ID NO: 1628333 - RNA, 19 nt, Artificial Sequence
  Description of Artificial Sequence: Synthetic oligonucleotide
  Sense strand starting at position 2303 of SEQ ID NO: 1560842
agguguuaagauuaauugu

SEQ ID NO: 1628334 - RNA, 19 nt, Artificial Sequence
  Description of Artificial Sequence: Synthetic oligonucleotide
  Antisense strand to SEQ ID NO: 1628333
acaauuaaucuuaacaccu

SEQ ID NO: 1628335 - RNA, 19 nt, Artificial Sequence
  Description of Artificial Sequence: Synthetic oligonucleotide
  Sense strand starting at position 2325 of SEQ ID NO: 1560842
uguguuugcauaugauaga

SEQ ID NO: 1628336 - RNA, 19 nt, Artificial Sequence
  Description of Artificial Sequence: Synthetic oligonucleotide
  Antisense strand to SEQ ID NO: 1628335
ucuaucauaugcaaacaca

SEQ ID NO: 1628337 - RNA, 19 nt, Artificial Sequence
  Description of Artificial Sequence: Synthetic oligonucleotide
  Sense strand starting at position 2326 of SEQ ID NO: 1560842
guguuugcauaugauagag

SEQ ID NO: 1628338 - RNA, 19 nt, Artificial Sequence
  Description of Artificial Sequence: Synthetic oligonucleotide
  Antisense strand to SEQ ID NO: 1628337
cucuaucauaugcaaacac

SEQ ID NO: 1628339 - RNA, 19 nt, Artificial Sequence
  Description of Artificial Sequence: Synthetic oligonucleotide
  Sense strand starting at position 3673 of SEQ ID NO: 1560842
aagugagcuccugauucuu

SEQ ID NO: 1628340 - RNA, 19 nt, Artificial Sequence
  Description of Artificial Sequence: Synthetic oligonucleotide
  Antisense strand to SEQ ID NO: 1628339
aagaaucaggagcucacuu

SEQ ID NO: 1628341 - RNA, 19 nt, Artificial Sequence
  Description of Artificial Sequence: Synthetic oligonucleotide
  Sense strand starting at position 3675 of SEQ ID NO: 1560842
gugagcuccugauucuuau

SEQ ID NO: 1628342 - RNA, 19 nt, Artificial Sequence
  Description of Artificial Sequence: Synthetic oligonucleotide
  Antisense strand to SEQ ID NO: 1628341
auaagaaucaggagcucac

SEQ ID NO: 1628343 - RNA, 19 nt, Artificial Sequence
  Description of Artificial Sequence: Synthetic oligonucleotide
  Sense strand starting at position 3679 of SEQ ID NO: 1560842
gcuccugauucuuaucugu

SEQ ID NO: 1628344 - RNA, 19 nt, Artificial Sequence
  Description of Artificial Sequence: Synthetic oligonucleotide
  Antisense strand to SEQ ID NO: 1628343
acagauaagaaucaggagc

SEQ ID NO: 1628345 - RNA, 19 nt, Artificial Sequence
  Description of Artificial Sequence: Synthetic oligonucleotide
  Sense strand starting at position 3824 of SEQ ID NO: 1560842
acacgaggccuuggaugaa

SEQ ID NO: 1628346 - RNA, 19 nt, Artificial Sequence
  Description of Artificial Sequence: Synthetic oligonucleotide
  Antisense strand to SEQ ID NO: 1628345
uucauccaaggccucgugu

SEQ ID NO: 1628347 - RNA, 19 nt, Artificial Sequence
  Description of Artificial Sequence: Synthetic oligonucleotide
  Sense strand starting at position 3849 of SEQ ID NO: 1560842
gggcuuuauuuccucaggu

SEQ ID NO: 1628348 - RNA, 19 nt, Artificial Sequence
  Description of Artificial Sequence: Synthetic oligonucleotide
  Antisense strand to SEQ ID NO: 1628347
accugaggaaauaaagccc

SEQ ID NO: 1628349 - RNA, 19 nt, Artificial Sequence
  Description of Artificial Sequence: Synthetic oligonucleotide
  Sense strand starting at position 3850 of SEQ ID NO: 1560842
ggcuuuauuuccucagguu

SEQ ID NO: 1628350 - RNA, 19 nt, Artificial Sequence
  Description of Artificial Sequence: Synthetic oligonucleotide
  Antisense strand to SEQ ID NO: 1628349
aaccugaggaaauaaagcc

SEQ ID NO: 1628351 - RNA, 19 nt, Artificial Sequence
  Description of Artificial Sequence: Synthetic oligonucleotide
  Sense strand starting at position 3 of SEQ ID NO: 1560843
gucugaucacgucgaauug

SEQ ID NO: 1628352 - RNA, 19 nt, Artificial Sequence
  Description of Artificial Sequence: Synthetic oligonucleotide
  Antisense strand to SEQ ID NO: 1628351
caauucgacgugaucagac

SEQ ID NO: 1628353 - RNA, 19 nt, Artificial Sequence
  Description of Artificial Sequence: Synthetic oligonucleotide
  Sense strand starting at position 21 of SEQ ID NO: 1560843
ggacuuggucacgaagagu

SEQ ID NO: 1628354 - RNA, 19 nt, Artificial Sequence
  Description of Artificial Sequence: Synthetic oligonucleotide
  Antisense strand to SEQ ID NO: 1628353
acucuucgugaccaagucc

SEQ ID NO: 1628355 - RNA, 19 nt, Artificial Sequence
  Description of Artificial Sequence: Synthetic oligonucleotide
  Sense strand starting at position 29 of SEQ ID NO: 1560843
ucacgaagaguuuguucga

SEQ ID NO: 1628356 - RNA, 19 nt, Artificial Sequence
  Description of Artificial Sequence: Synthetic oligonucleotide
  Antisense strand to SEQ ID NO: 1628355
ucgaacaaacucuucguga

SEQ ID NO: 1628357 - RNA, 19 nt, Artificial Sequence
  Description of Artificial Sequence: Synthetic oligonucleotide
  Sense strand starting at position 30 of SEQ ID NO: 1560843
cacgaagaguuuguucgau

SEQ ID NO: 1628358 - RNA, 19 nt, Artificial Sequence
  Description of Artificial Sequence: Synthetic oligonucleotide
  Antisense strand to SEQ ID NO: 1628357
aucgaacaaacucuucgug

SEQ ID NO: 1628359 - RNA, 19 nt, Artificial Sequence
  Description of Artificial Sequence: Synthetic oligonucleotide
  Sense strand starting at position 32 of SEQ ID NO: 1560843
cgaagaguuuguucgauga

SEQ ID NO: 1628360 - RNA, 19 nt, Artificial Sequence
  Description of Artificial Sequence: Synthetic oligonucleotide
  Antisense strand to SEQ ID NO: 1628359
ucaucgaacaaacucuucg

SEQ ID NO: 1628361 - RNA, 19 nt, Artificial Sequence
  Description of Artificial Sequence: Synthetic oligonucleotide
  Sense strand starting at position 36 of SEQ ID NO: 1560843
gaguuuguucgaugaguuc

SEQ ID NO: 1628362 - RNA, 19 nt, Artificial Sequence
  Description of Artificial Sequence: Synthetic oligonucleotide
  Antisense strand to SEQ ID NO: 1628361
gaacucaucgaacaaacuc

SEQ ID NO: 1628363 - RNA, 19 nt, Artificial Sequence
  Description of Artificial Sequence: Synthetic oligonucleotide
  Sense strand starting at position 42 of SEQ ID NO: 1560843
guucgaugaguucgggaga

SEQ ID NO: 1628364 - RNA, 19 nt, Artificial Sequence
  Description of Artificial Sequence: Synthetic oligonucleotide
  Antisense strand to SEQ ID NO: 1628363
ucucccgaacucaucgaac

SEQ ID NO: 1628365 - RNA, 19 nt, Artificial Sequence
  Description of Artificial Sequence: Synthetic oligonucleotide
  Sense strand starting at position 45 of SEQ ID NO: 1560843
cgaugaguucgggagaauu

SEQ ID NO: 1628366 - RNA, 19 nt, Artificial Sequence
  Description of Artificial Sequence: Synthetic oligonucleotide
  Antisense strand to SEQ ID NO: 1628365
aauucucccgaacucaucg

SEQ ID NO: 1628367 - RNA, 19 nt, Artificial Sequence
  Description of Artificial Sequence: Synthetic oligonucleotide
  Sense strand starting at position 54 of SEQ ID NO: 1560843
cgggagaauucggcuacgu

SEQ ID NO: 1628368 - RNA, 19 nt, Artificial Sequence
  Description of Artificial Sequence: Synthetic oligonucleotide
  Antisense strand to SEQ ID NO: 1628367
acguagccgaauucucccg

SEQ ID NO: 1628369 - RNA, 19 nt, Artificial Sequence
  Description of Artificial Sequence: Synthetic oligonucleotide
  Sense strand starting at position 72 of SEQ ID NO: 1560843
uccgauugagcucgggaga

SEQ ID NO: 1628370 - RNA, 19 nt, Artificial Sequence
  Description of Artificial Sequence: Synthetic oligonucleotide
  Antisense strand to SEQ ID NO: 1628369
ucucccgagcucaaucgga

SEQ ID NO: 1628371 - RNA, 19 nt, Artificial Sequence
  Description of Artificial Sequence: Synthetic oligonucleotide
  Sense strand starting at position 75 of SEQ ID NO: 1560843
gauugagcucgggagacuu

SEQ ID NO: 1628372 - RNA, 19 nt, Artificial Sequence
  Description of Artificial Sequence: Synthetic oligonucleotide
  Antisense strand to SEQ ID NO: 1628371
aagucucccgagcucaauc

SEQ ID NO: 1628373 - RNA, 19 nt, Artificial Sequence
  Description of Artificial Sequence: Synthetic oligonucleotide
  Sense strand starting at position 86 of SEQ ID NO: 1560843
ggagacuucggauaaguuc

SEQ ID NO: 1628374 - RNA, 19 nt, Artificial Sequence
  Description of Artificial Sequence: Synthetic oligonucleotide
  Antisense strand to SEQ ID NO: 1628373
gaacuuauccgaagucucc

SEQ ID NO: 1628375 - RNA, 19 nt, Artificial Sequence
  Description of Artificial Sequence: Synthetic oligonucleotide
  Sense strand starting at position 92 of SEQ ID NO: 1560843
uucggauaaguucgagcuu

SEQ ID NO: 1628376 - RNA, 19 nt, Artificial Sequence
  Description of Artificial Sequence: Synthetic oligonucleotide
  Antisense strand to SEQ ID NO: 1628375
aagcucgaacuuauccgaa

SEQ ID NO: 1628377 - RNA, 19 nt, Artificial Sequence
  Description of Artificial Sequence: Synthetic oligonucleotide
  Sense strand starting at position 105 of SEQ ID NO: 1560843
gagcuuguucgccuaaguc

SEQ ID NO: 1628378 - RNA, 19 nt, Artificial Sequence
  Description of Artificial Sequence: Synthetic oligonucleotide
  Antisense strand to SEQ ID NO: 1628377
gacuuaggcgaacaagcuc

SEQ ID NO: 1628379 - RNA, 19 nt, Artificial Sequence
  Description of Artificial Sequence: Synthetic oligonucleotide
  Sense strand starting at position 132 of SEQ ID NO: 1560843
cucggucugcuucgaacaa

SEQ ID NO: 1628380 - RNA, 19 nt, Artificial Sequence
  Description of Artificial Sequence: Synthetic oligonucleotide
  Antisense strand to SEQ ID NO: 1628379
uuguucgaagcagaccgag

SEQ ID NO: 1628381 - RNA, 19 nt, Artificial Sequence
  Description of Artificial Sequence: Synthetic oligonucleotide
  Sense strand starting at position 494 of SEQ ID NO: 1560843
gcgcgucuguggacaaaua

SEQ ID NO: 1628382 - RNA, 19 nt, Artificial Sequence
  Description of Artificial Sequence: Synthetic oligonucleotide
  Antisense strand to SEQ ID NO: 1628381
uauuuguccacagacgcgc

SEQ ID NO: 1628383 - RNA, 19 nt, Artificial Sequence
  Description of Artificial Sequence: Synthetic oligonucleotide
  Sense strand starting at position 868 of SEQ ID NO: 1560843
aagggaaugugcuucgcua

SEQ ID NO: 1628384 - RNA, 19 nt, Artificial Sequence
  Description of Artificial Sequence: Synthetic oligonucleotide
  Antisense strand to SEQ ID NO: 1628383
uagcgaagcacauucccuu

SEQ ID NO: 1628385 - RNA, 19 nt, Artificial Sequence
  Description of Artificial Sequence: Synthetic oligonucleotide
  Sense strand starting at position 870 of SEQ ID NO: 1560843
gggaaugugcuucgcuagu

SEQ ID NO: 1628386 - RNA, 19 nt, Artificial Sequence
  Description of Artificial Sequence: Synthetic oligonucleotide
  Antisense strand to SEQ ID NO: 1628385
acuagcgaagcacauuccc

SEQ ID NO: 1628387 - RNA, 19 nt, Artificial Sequence
  Description of Artificial Sequence: Synthetic oligonucleotide
  Sense strand starting at position 935 of SEQ ID NO: 1560843
cccacucccugguugaaau

SEQ ID NO: 1628388 - RNA, 19 nt, Artificial Sequence
  Description of Artificial Sequence: Synthetic oligonucleotide
  Antisense strand to SEQ ID NO: 1628387
auuucaaccagggaguggg

SEQ ID NO: 1628389 - RNA, 19 nt, Artificial Sequence
  Description of Artificial Sequence: Synthetic oligonucleotide
  Sense strand starting at position 996 of SEQ ID NO: 1560843
cagcuaugaccuuggagag

SEQ ID NO: 1628390 - RNA, 19 nt, Artificial Sequence
  Description of Artificial Sequence: Synthetic oligonucleotide
  Antisense strand to SEQ ID NO: 1628389
cucuccaaggucauagcug

SEQ ID NO: 1628391 - RNA, 19 nt, Artificial Sequence
  Description of Artificial Sequence: Synthetic oligonucleotide
  Sense strand starting at position 1303 of SEQ ID NO: 1560843
aggucuuccuccguggaca

SEQ ID NO: 1628392 - RNA, 19 nt, Artificial Sequence
  Description of Artificial Sequence: Synthetic oligonucleotide
  Antisense strand to SEQ ID NO: 1628391
uguccacggaggaagaccu

SEQ ID NO: 1628393 - RNA, 19 nt, Artificial Sequence
  Description of Artificial Sequence: Synthetic oligonucleotide
  Sense strand starting at position 2514 of SEQ ID NO: 1560843
gcagcuugcugggccaaua

SEQ ID NO: 1628394 - RNA, 19 nt, Artificial Sequence
  Description of Artificial Sequence: Synthetic oligonucleotide
  Antisense strand to SEQ ID NO: 1628393
uauuggcccagcaagcugc

SEQ ID NO: 1628395 - RNA, 19 nt, Artificial Sequence
  Description of Artificial Sequence: Synthetic oligonucleotide
  Sense strand starting at position 2599 of SEQ ID NO: 1560843
uccauuauugagggcauca

SEQ ID NO: 1628396 - RNA, 19 nt, Artificial Sequence
  Description of Artificial Sequence: Synthetic oligonucleotide
  Antisense strand to SEQ ID NO: 1628395
ugaugcccucaauaaugga

SEQ ID NO: 1628397 - RNA, 19 nt, Artificial Sequence
  Description of Artificial Sequence: Synthetic oligonucleotide
  Sense strand starting at position 2608 of SEQ ID NO: 1560843
gagggcaucaccgagguau

SEQ ID NO: 1628398 - RNA, 19 nt, Artificial Sequence
  Description of Artificial Sequence: Synthetic oligonucleotide
  Antisense strand to SEQ ID NO: 1628397
auaccucggugaugcccuc

SEQ ID NO: 1628399 - RNA, 19 nt, Artificial Sequence
  Description of Artificial Sequence: Synthetic oligonucleotide
  Sense strand starting at position 2610 of SEQ ID NO: 1560843
gggcaucaccgagguauag

SEQ ID NO: 1628400 - RNA, 19 nt, Artificial Sequence
  Description of Artificial Sequence: Synthetic oligonucleotide
  Antisense strand to SEQ ID NO: 1628399
cuauaccucggugaugccc

SEQ ID NO: 1628401 - RNA, 19 nt, Artificial Sequence
  Description of Artificial Sequence: Synthetic oligonucleotide
  Sense strand starting at position 2621 of SEQ ID NO: 1560843
agguauagaguuugccaau

SEQ ID NO: 1628402 - RNA, 19 nt, Artificial Sequence
  Description of Artificial Sequence: Synthetic oligonucleotide
  Antisense strand to SEQ ID NO: 1628401
auuggcaaacucuauaccu

SEQ ID NO: 1628403 - RNA, 19 nt, Artificial Sequence
  Description of Artificial Sequence: Synthetic oligonucleotide
  Sense strand starting at position 2622 of SEQ ID NO: 1560843
gguauagaguuugccaaug

SEQ ID NO: 1628404 - RNA, 19 nt, Artificial Sequence
  Description of Artificial Sequence: Synthetic oligonucleotide
  Antisense strand to SEQ ID NO: 1628403
cauuggcaaacucuauacc

SEQ ID NO: 1628405 - RNA, 19 nt, Artificial Sequence
  Description of Artificial Sequence: Synthetic oligonucleotide
  Sense strand starting at position 2627 of SEQ ID NO: 1560843
agaguuugccaauguccga

SEQ ID NO: 1628406 - RNA, 19 nt, Artificial Sequence
  Description of Artificial Sequence: Synthetic oligonucleotide
  Antisense strand to SEQ ID NO: 1628405
ucggacauuggcaaacucu

SEQ ID NO: 1628407 - RNA, 19 nt, Artificial Sequence
  Description of Artificial Sequence: Synthetic oligonucleotide
  Sense strand starting at position 2927 of SEQ ID NO: 1560843
ccugcugucuccuccuaga

SEQ ID NO: 1628408 - RNA, 19 nt, Artificial Sequence
  Description of Artificial Sequence: Synthetic oligonucleotide
  Antisense strand to SEQ ID NO: 1628407
ucuaggaggagacagcagg

SEQ ID NO: 1628409 - RNA, 19 nt, Artificial Sequence
  Description of Artificial Sequence: Synthetic oligonucleotide
  Sense strand starting at position 3050 of SEQ ID NO: 1560843
ucuggugucugggaggauu

SEQ ID NO: 1628410 - RNA, 19 nt, Artificial Sequence
  Description of Artificial Sequence: Synthetic oligonucleotide
  Antisense strand to SEQ ID NO: 1628409
aauccucccagacaccaga

SEQ ID NO: 1628411 - RNA, 19 nt, Artificial Sequence
  Description of Artificial Sequence: Synthetic oligonucleotide
  Sense strand starting at position 3058 of SEQ ID NO: 1560843
cugggaggauucccagagu

SEQ ID NO: 1628412 - RNA, 19 nt, Artificial Sequence
  Description of Artificial Sequence: Synthetic oligonucleotide
  Antisense strand to SEQ ID NO: 1628411
acucugggaauccucccag

SEQ ID NO: 1628413 - RNA, 19 nt, Artificial Sequence
  Description of Artificial Sequence: Synthetic oligonucleotide
  Sense strand starting at position 3086 of SEQ ID NO: 1560843
gugcucuacccucagaaug

SEQ ID NO: 1628414 - RNA, 19 nt, Artificial Sequence
  Description of Artificial Sequence: Synthetic oligonucleotide
  Antisense strand to SEQ ID NO: 1628413
cauucugaggguagagcac

SEQ ID NO: 1628415 - RNA, 19 nt, Artificial Sequence
  Description of Artificial Sequence: Synthetic oligonucleotide
  Sense strand starting at position 3150 of SEQ ID NO: 1560843
aggcuuagcaugugucaca

SEQ ID NO: 1628416 - RNA, 19 nt, Artificial Sequence
  Description of Artificial Sequence: Synthetic oligonucleotide
  Antisense strand to SEQ ID NO: 1628415
ugugacacaugcuaagccu

SEQ ID NO: 1628417 - RNA, 19 nt, Artificial Sequence
  Description of Artificial Sequence: Synthetic oligonucleotide
  Sense strand starting at position 3354 of SEQ ID NO: 1560843
ggagaagcccauugaucag

SEQ ID NO: 1628418 - RNA, 19 nt, Artificial Sequence
  Description of Artificial Sequence: Synthetic oligonucleotide
  Antisense strand to SEQ ID NO: 1628417
cugaucaaugggcuucucc

SEQ ID NO: 1628419 - RNA, 19 nt, Artificial Sequence
  Description of Artificial Sequence: Synthetic oligonucleotide
  Sense strand starting at position 3401 of SEQ ID NO: 1560843
augcuaaggccagauacau

SEQ ID NO: 1628420 - RNA, 19 nt, Artificial Sequence
  Description of Artificial Sequence: Synthetic oligonucleotide
  Antisense strand to SEQ ID NO: 1628419
auguaucuggccuuagcau

SEQ ID NO: 1628421 - RNA, 19 nt, Artificial Sequence
  Description of Artificial Sequence: Synthetic oligonucleotide
  Sense strand starting at position 3407 of SEQ ID NO: 1560843
aggccagauacaugagagu

SEQ ID NO: 1628422 - RNA, 19 nt, Artificial Sequence
  Description of Artificial Sequence: Synthetic oligonucleotide
  Antisense strand to SEQ ID NO: 1628421
acucucauguaucuggccu

SEQ ID NO: 1628423 - RNA, 19 nt, Artificial Sequence
  Description of Artificial Sequence: Synthetic oligonucleotide
  Sense strand starting at position 3496 of SEQ ID NO: 1560843
ucagguaucuggccaggaa

SEQ ID NO: 1628424 - RNA, 19 nt, Artificial Sequence
  Description of Artificial Sequence: Synthetic oligonucleotide
  Antisense strand to SEQ ID NO: 1628423
uuccuggccagauaccuga

SEQ ID NO: 1628425 - RNA, 19 nt, Artificial Sequence
  Description of Artificial Sequence: Synthetic oligonucleotide
  Sense strand starting at position 3714 of SEQ ID NO: 1560843
cugugagagaagugacaau

SEQ ID NO: 1628426 - RNA, 19 nt, Artificial Sequence
  Description of Artificial Sequence: Synthetic oligonucleotide
  Antisense strand to SEQ ID NO: 1628425
auugucacuucucucacag

SEQ ID NO: 1628427 - RNA, 19 nt, Artificial Sequence
  Description of Artificial Sequence: Synthetic oligonucleotide
  Sense strand starting at position 3912 of SEQ ID NO: 1560843
caaaguguggacuacuauu

SEQ ID NO: 1628428 - RNA, 19 nt, Artificial Sequence
  Description of Artificial Sequence: Synthetic oligonucleotide
  Antisense strand to SEQ ID NO: 1628427
aauaguaguccacacuuug

SEQ ID NO: 1628429 - RNA, 19 nt, Artificial Sequence
  Description of Artificial Sequence: Synthetic oligonucleotide
  Sense strand starting at position 3918 of SEQ ID NO: 1560843
guggacuacuauucccauu

SEQ ID NO: 1628430 - RNA, 19 nt, Artificial Sequence
  Description of Artificial Sequence: Synthetic oligonucleotide
  Antisense strand to SEQ ID NO: 1628429
aaugggaauaguaguccac

SEQ ID NO: 1628431 - RNA, 19 nt, Artificial Sequence
  Description of Artificial Sequence: Synthetic oligonucleotide
  Sense strand starting at position 4 of SEQ ID NO: 1560844
uuuggucuuugagucuaca

SEQ ID NO: 1628432 - RNA, 19 nt, Artificial Sequence
  Description of Artificial Sequence: Synthetic oligonucleotide
  Antisense strand to SEQ ID NO: 1628431
uguagacucaaagaccaaa

SEQ ID NO: 1628433 - RNA, 19 nt, Artificial Sequence
  Description of Artificial Sequence: Synthetic oligonucleotide
  Sense strand starting at position 44 of SEQ ID NO: 1560844
ccagaucuuccucaaagug

SEQ ID NO: 1628434 - RNA, 19 nt, Artificial Sequence
  Description of Artificial Sequence: Synthetic oligonucleotide
  Antisense strand to SEQ ID NO: 1628433
cacuuugaggaagaucugg

SEQ ID NO: 1628435 - RNA, 19 nt, Artificial Sequence
  Description of Artificial Sequence: Synthetic oligonucleotide
  Sense strand starting at position 579 of SEQ ID NO: 1560844
ugcaguuauccaugcugga

SEQ ID NO: 1628436 - RNA, 19 nt, Artificial Sequence
  Description of Artificial Sequence: Synthetic oligonucleotide
  Antisense strand to SEQ ID NO: 1628435
uccagcauggauaacugca

SEQ ID NO: 1628437 - RNA, 19 nt, Artificial Sequence
  Description of Artificial Sequence: Synthetic oligonucleotide
  Sense strand starting at position 1157 of SEQ ID NO: 1560844
guuucuaacaugugcguga

SEQ ID NO: 1628438 - RNA, 19 nt, Artificial Sequence
  Description of Artificial Sequence: Synthetic oligonucleotide
  Antisense strand to SEQ ID NO: 1628437
ucacgcacauguuagaaac

SEQ ID NO: 1628439 - RNA, 19 nt, Artificial Sequence
  Description of Artificial Sequence: Synthetic oligonucleotide
  Sense strand starting at position 1158 of SEQ ID NO: 1560844
uuucuaacaugugcgugau

SEQ ID NO: 1628440 - RNA, 19 nt, Artificial Sequence
  Description of Artificial Sequence: Synthetic oligonucleotide
  Antisense strand to SEQ ID NO: 1628439
aucacgcacauguuagaaa

SEQ ID NO: 1628441 - RNA, 19 nt, Artificial Sequence
  Description of Artificial Sequence: Synthetic oligonucleotide
  Sense strand starting at position 1161 of SEQ ID NO: 1560844
cuaacaugugcgugaugua

SEQ ID NO: 1628442 - RNA, 19 nt, Artificial Sequence
  Description of Artificial Sequence: Synthetic oligonucleotide
  Antisense strand to SEQ ID NO: 1628441
uacaucacgcacauguuag

SEQ ID NO: 1628443 - RNA, 19 nt, Artificial Sequence
  Description of Artificial Sequence: Synthetic oligonucleotide
  Sense strand starting at position 1312 of SEQ ID NO: 1560844
ggcucuucuaccuggagga

SEQ ID NO: 1628444 - RNA, 19 nt, Artificial Sequence
  Description of Artificial Sequence: Synthetic oligonucleotide
  Antisense strand to SEQ ID NO: 1628443
uccuccagguagaagagcc

SEQ ID NO: 1628445 - RNA, 19 nt, Artificial Sequence
  Description of Artificial Sequence: Synthetic oligonucleotide
  Sense strand starting at position 1359 of SEQ ID NO: 1560844
cgccuuagucuagagagac

SEQ ID NO: 1628446 - RNA, 19 nt, Artificial Sequence
  Description of Artificial Sequence: Synthetic oligonucleotide
  Antisense strand to SEQ ID NO: 1628445
gucucucuagacuaaggcg

SEQ ID NO: 1628447 - RNA, 19 nt, Artificial Sequence
  Description of Artificial Sequence: Synthetic oligonucleotide
  Sense strand starting at position 1541 of SEQ ID NO: 1560844
cugaacguuccgccuguua

SEQ ID NO: 1628448 - RNA, 19 nt, Artificial Sequence
  Description of Artificial Sequence: Synthetic oligonucleotide
  Antisense strand to SEQ ID NO: 1628447
uaacaggcggaacguucag

SEQ ID NO: 1628449 - RNA, 19 nt, Artificial Sequence
  Description of Artificial Sequence: Synthetic oligonucleotide
  Sense strand starting at position 1543 of SEQ ID NO: 1560844
gaacguuccgccuguuauc

SEQ ID NO: 1628450 - RNA, 19 nt, Artificial Sequence
  Description of Artificial Sequence: Synthetic oligonucleotide
  Antisense strand to SEQ ID NO: 1628449
gauaacaggcggaacguuc

SEQ ID NO: 1628451 - RNA, 19 nt, Artificial Sequence
  Description of Artificial Sequence: Synthetic oligonucleotide
  Sense strand starting at position 1919 of SEQ ID NO: 1560844
cucagaucuggguagaggu

SEQ ID NO: 1628452 - RNA, 19 nt, Artificial Sequence
  Description of Artificial Sequence: Synthetic oligonucleotide
  Antisense strand to SEQ ID NO: 1628451
accucuacccagaucugag

SEQ ID NO: 1628453 - RNA, 19 nt, Artificial Sequence
  Description of Artificial Sequence: Synthetic oligonucleotide
  Sense strand starting at position 1949 of SEQ ID NO: 1560844
cagcauucgguccaaguau

SEQ ID NO: 1628454 - RNA, 19 nt, Artificial Sequence
  Description of Artificial Sequence: Synthetic oligonucleotide
  Antisense strand to SEQ ID NO: 1628453
auacuuggaccgaaugcug

SEQ ID NO: 1628455 - RNA, 19 nt, Artificial Sequence
  Description of Artificial Sequence: Synthetic oligonucleotide
  Sense strand starting at position 1961 of SEQ ID NO: 1560844
caaguaugaccgggucuga

SEQ ID NO: 1628456 - RNA, 19 nt, Artificial Sequence
  Description of Artificial Sequence: Synthetic oligonucleotide
  Antisense strand to SEQ ID NO: 1628455
ucagacccggucauacuug

SEQ ID NO: 1628457 - RNA, 19 nt, Artificial Sequence
  Description of Artificial Sequence: Synthetic oligonucleotide
  Sense strand starting at position 1985 of SEQ ID NO: 1560844
gucugaucacgucgaauug

SEQ ID NO: 1628458 - RNA, 19 nt, Artificial Sequence
  Description of Artificial Sequence: Synthetic oligonucleotide
  Antisense strand to SEQ ID NO: 1628457
caauucgacgugaucagac

SEQ ID NO: 1628459 - RNA, 19 nt, Artificial Sequence
  Description of Artificial Sequence: Synthetic oligonucleotide
  Sense strand starting at position 2003 of SEQ ID NO: 1560844
ggacuuggucacgaagagu

SEQ ID NO: 1628460 - RNA, 19 nt, Artificial Sequence
  Description of Artificial Sequence: Synthetic oligonucleotide
  Antisense strand to SEQ ID NO: 1628459
acucuucgugaccaagucc

SEQ ID NO: 1628461 - RNA, 19 nt, Artificial Sequence
  Description of Artificial Sequence: Synthetic oligonucleotide
  Sense strand starting at position 2011 of SEQ ID NO: 1560844
ucacgaagaguuuguucga

SEQ ID NO: 1628462 - RNA, 19 nt, Artificial Sequence
  Description of Artificial Sequence: Synthetic oligonucleotide
  Antisense strand to SEQ ID NO: 1628461
ucgaacaaacucuucguga

SEQ ID NO: 1628463 - RNA, 19 nt, Artificial Sequence
  Description of Artificial Sequence: Synthetic oligonucleotide
  Sense strand starting at position 2012 of SEQ ID NO: 1560844
cacgaagaguuuguucgau

SEQ ID NO: 1628464 - RNA, 19 nt, Artificial Sequence
  Description of Artificial Sequence: Synthetic oligonucleotide
  Antisense strand to SEQ ID NO: 1628463
aucgaacaaacucuucgug

SEQ ID NO: 1628465 - RNA, 19 nt, Artificial Sequence
  Description of Artificial Sequence: Synthetic oligonucleotide
  Sense strand starting at position 2014 of SEQ ID NO: 1560844
cgaagaguuuguucgauga

SEQ ID NO: 1628466 - RNA, 19 nt, Artificial Sequence
  Description of Artificial Sequence: Synthetic oligonucleotide
  Antisense strand to SEQ ID NO: 1628465
ucaucgaacaaacucuucg

SEQ ID NO: 1628467 - RNA, 19 nt, Artificial Sequence
  Description of Artificial Sequence: Synthetic oligonucleotide
  Sense strand starting at position 2016 of SEQ ID NO: 1560844
aagaguuuguucgaugagu

SEQ ID NO: 1628468 - RNA, 19 nt, Artificial Sequence
  Description of Artificial Sequence: Synthetic oligonucleotide
  Antisense strand to SEQ ID NO: 1628467
acucaucgaacaaacucuu

SEQ ID NO: 1628469 - RNA, 19 nt, Artificial Sequence
  Description of Artificial Sequence: Synthetic oligonucleotide
  Sense strand starting at position 2018 of SEQ ID NO: 1560844
gaguuuguucgaugaguuc

SEQ ID NO: 1628470 - RNA, 19 nt, Artificial Sequence
  Description of Artificial Sequence: Synthetic oligonucleotide
  Antisense strand to SEQ ID NO: 1628469
gaacucaucgaacaaacuc

SEQ ID NO: 1628471 - RNA, 19 nt, Artificial Sequence
  Description of Artificial Sequence: Synthetic oligonucleotide
  Sense strand starting at position 2024 of SEQ ID NO: 1560844
guucgaugaguucgggaga

SEQ ID NO: 1628472 - RNA, 19 nt, Artificial Sequence
  Description of Artificial Sequence: Synthetic oligonucleotide
  Antisense strand to SEQ ID NO: 1628471
ucucccgaacucaucgaac

SEQ ID NO: 1628473 - RNA, 19 nt, Artificial Sequence
  Description of Artificial Sequence: Synthetic oligonucleotide
  Sense strand starting at position 2025 of SEQ ID NO: 1560844
uucgaugaguucgggagaa

SEQ ID NO: 1628474 - RNA, 19 nt, Artificial Sequence
  Description of Artificial Sequence: Synthetic oligonucleotide
  Antisense strand to SEQ ID NO: 1628473
uucucccgaacucaucgaa

SEQ ID NO: 1628475 - RNA, 19 nt, Artificial Sequence
  Description of Artificial Sequence: Synthetic oligonucleotide
  Sense strand starting at position 2027 of SEQ ID NO: 1560844
cgaugaguucgggagaauu

SEQ ID NO: 1628476 - RNA, 19 nt, Artificial Sequence
  Description of Artificial Sequence: Synthetic oligonucleotide
  Antisense strand to SEQ ID NO: 1628475
aauucucccgaacucaucg

SEQ ID NO: 1628477 - RNA, 19 nt, Artificial Sequence
  Description of Artificial Sequence: Synthetic oligonucleotide
  Sense strand starting at position 2036 of SEQ ID NO: 1560844
cgggagaauucggcuacgu

SEQ ID NO: 1628478 - RNA, 19 nt, Artificial Sequence
  Description of Artificial Sequence: Synthetic oligonucleotide
  Antisense strand to SEQ ID NO: 1628477
acguagccgaauucucccg

SEQ ID NO: 1628479 - RNA, 19 nt, Artificial Sequence
  Description of Artificial Sequence: Synthetic oligonucleotide
  Sense strand starting at position 2054 of SEQ ID NO: 1560844
uccgauugagcucgggaga

SEQ ID NO: 1628480 - RNA, 19 nt, Artificial Sequence
  Description of Artificial Sequence: Synthetic oligonucleotide
  Antisense strand to SEQ ID NO: 1628479
ucucccgagcucaaucgga

SEQ ID NO: 1628481 - RNA, 19 nt, Artificial Sequence
  Description of Artificial Sequence: Synthetic oligonucleotide
  Sense strand starting at position 2057 of SEQ ID NO: 1560844
gauugagcucgggagacuu

SEQ ID NO: 1628482 - RNA, 19 nt, Artificial Sequence
  Description of Artificial Sequence: Synthetic oligonucleotide
  Antisense strand to SEQ ID NO: 1628481
aagucucccgagcucaauc

SEQ ID NO: 1628483 - RNA, 19 nt, Artificial Sequence
  Description of Artificial Sequence: Synthetic oligonucleotide
  Sense strand starting at position 2065 of SEQ ID NO: 1560844
ucgggagacuucggauaag

SEQ ID NO: 1628484 - RNA, 19 nt, Artificial Sequence
  Description of Artificial Sequence: Synthetic oligonucleotide
  Antisense strand to SEQ ID NO: 1628483
cuuauccgaagucucccga

SEQ ID NO: 1628485 - RNA, 19 nt, Artificial Sequence
  Description of Artificial Sequence: Synthetic oligonucleotide
  Sense strand starting at position 2068 of SEQ ID NO: 1560844
ggagacuucggauaaguuc

SEQ ID NO: 1628486 - RNA, 19 nt, Artificial Sequence
  Description of Artificial Sequence: Synthetic oligonucleotide
  Antisense strand to SEQ ID NO: 1628485
gaacuuauccgaagucucc

SEQ ID NO: 1628487 - RNA, 19 nt, Artificial Sequence
  Description of Artificial Sequence: Synthetic oligonucleotide
  Sense strand starting at position 2074 of SEQ ID NO: 1560844
uucggauaaguucgagcuu

SEQ ID NO: 1628488 - RNA, 19 nt, Artificial Sequence
  Description of Artificial Sequence: Synthetic oligonucleotide
  Antisense strand to SEQ ID NO: 1628487
aagcucgaacuuauccgaa

SEQ ID NO: 1628489 - RNA, 19 nt, Artificial Sequence
  Description of Artificial Sequence: Synthetic oligonucleotide
  Sense strand starting at position 2076 of SEQ ID NO: 1560844
cggauaaguucgagcuugu

SEQ ID NO: 1628490 - RNA, 19 nt, Artificial Sequence
  Description of Artificial Sequence: Synthetic oligonucleotide
  Antisense strand to SEQ ID NO: 1628489
acaagcucgaacuuauccg

SEQ ID NO: 1628491 - RNA, 19 nt, Artificial Sequence
  Description of Artificial Sequence: Synthetic oligonucleotide
  Sense strand starting at position 2086 of SEQ ID NO: 1560844
cgagcuuguucgccuaagu

SEQ ID NO: 1628492 - RNA, 19 nt, Artificial Sequence
  Description of Artificial Sequence: Synthetic oligonucleotide
  Antisense strand to SEQ ID NO: 1628491
acuuaggcgaacaagcucg

SEQ ID NO: 1628493 - RNA, 19 nt, Artificial Sequence
  Description of Artificial Sequence: Synthetic oligonucleotide
  Sense strand starting at position 2087 of SEQ ID NO: 1560844
gagcuuguucgccuaaguc

SEQ ID NO: 1628494 - RNA, 19 nt, Artificial Sequence
  Description of Artificial Sequence: Synthetic oligonucleotide
  Antisense strand to SEQ ID NO: 1628493
gacuuaggcgaacaagcuc

SEQ ID NO: 1628495 - RNA, 19 nt, Artificial Sequence
  Description of Artificial Sequence: Synthetic oligonucleotide
  Sense strand starting at position 2114 of SEQ ID NO: 1560844
cucggucugcuucgaacaa

SEQ ID NO: 1628496 - RNA, 19 nt, Artificial Sequence
  Description of Artificial Sequence: Synthetic oligonucleotide
  Antisense strand to SEQ ID NO: 1628495
uuguucgaagcagaccgag

SEQ ID NO: 1628497 - RNA, 19 nt, Artificial Sequence
  Description of Artificial Sequence: Synthetic oligonucleotide
  Sense strand starting at position 2476 of SEQ ID NO: 1560844
gcgcgucuguggacaaaua

SEQ ID NO: 1628498 - RNA, 19 nt, Artificial Sequence
  Description of Artificial Sequence: Synthetic oligonucleotide
  Antisense strand to SEQ ID NO: 1628497
uauuuguccacagacgcgc

SEQ ID NO: 1628499 - RNA, 19 nt, Artificial Sequence
  Description of Artificial Sequence: Synthetic oligonucleotide
  Sense strand starting at position 2850 of SEQ ID NO: 1560844
aagggaaugugcuucgcua

SEQ ID NO: 1628500 - RNA, 19 nt, Artificial Sequence
  Description of Artificial Sequence: Synthetic oligonucleotide
  Antisense strand to SEQ ID NO: 1628499
uagcgaagcacauucccuu

SEQ ID NO: 1628501 - RNA, 19 nt, Artificial Sequence
  Description of Artificial Sequence: Synthetic oligonucleotide
  Sense strand starting at position 2852 of SEQ ID NO: 1560844
gggaaugugcuucgcuagu

SEQ ID NO: 1628502 - RNA, 19 nt, Artificial Sequence
  Description of Artificial Sequence: Synthetic oligonucleotide
  Antisense strand to SEQ ID NO: 1628501
acuagcgaagcacauuccc

SEQ ID NO: 1628503 - RNA, 19 nt, Artificial Sequence
  Description of Artificial Sequence: Synthetic oligonucleotide
  Sense strand starting at position 2854 of SEQ ID NO: 1560844
gaaugugcuucgcuagugu

SEQ ID NO: 1628504 - RNA, 19 nt, Artificial Sequence
  Description of Artificial Sequence: Synthetic oligonucleotide
  Antisense strand to SEQ ID NO: 1628503
acacuagcgaagcacauuc

SEQ ID NO: 1628505 - RNA, 19 nt, Artificial Sequence
  Description of Artificial Sequence: Synthetic oligonucleotide
  Sense strand starting at position 2917 of SEQ ID NO: 1560844
cccacucccugguugaaau

SEQ ID NO: 1628506 - RNA, 19 nt, Artificial Sequence
  Description of Artificial Sequence: Synthetic oligonucleotide
  Antisense strand to SEQ ID NO: 1628505
auuucaaccagggaguggg

SEQ ID NO: 1628507 - RNA, 19 nt, Artificial Sequence
  Description of Artificial Sequence: Synthetic oligonucleotide
  Sense strand starting at position 2978 of SEQ ID NO: 1560844
cagcuaugaccuuggagag

SEQ ID NO: 1628508 - RNA, 19 nt, Artificial Sequence
  Description of Artificial Sequence: Synthetic oligonucleotide
  Antisense strand to SEQ ID NO: 1628507
cucuccaaggucauagcug

SEQ ID NO: 1628509 - RNA, 19 nt, Artificial Sequence
  Description of Artificial Sequence: Synthetic oligonucleotide
  Sense strand starting at position 3285 of SEQ ID NO: 1560844
aggucuuccuccguggaca

SEQ ID NO: 1628510 - RNA, 19 nt, Artificial Sequence
  Description of Artificial Sequence: Synthetic oligonucleotide
  Antisense strand to SEQ ID NO: 1628509
uguccacggaggaagaccu

SEQ ID NO: 1628511 - RNA, 19 nt, Artificial Sequence
  Description of Artificial Sequence: Synthetic oligonucleotide
  Sense strand starting at position 563 of SEQ ID NO: 1560845
gccugagcagaucgucaua

SEQ ID NO: 1628512 - RNA, 19 nt, Artificial Sequence
  Description of Artificial Sequence: Synthetic oligonucleotide
  Antisense strand to SEQ ID NO: 1628511
uaugacgaucugcucaggc

SEQ ID NO: 1628513 - RNA, 19 nt, Artificial Sequence
  Description of Artificial Sequence: Synthetic oligonucleotide
  Sense strand starting at position 568 of SEQ ID NO: 1560845
agcagaucgucauauccaa

SEQ ID NO: 1628514 - RNA, 19 nt, Artificial Sequence
  Description of Artificial Sequence: Synthetic oligonucleotide
  Antisense strand to SEQ ID NO: 1628513
uuggauaugacgaucugcu

SEQ ID NO: 1628515 - RNA, 19 nt, Artificial Sequence
  Description of Artificial Sequence: Synthetic oligonucleotide
  Sense strand starting at position 575 of SEQ ID NO: 1560845
cgucauauccaaugcuaca

SEQ ID NO: 1628516 - RNA, 19 nt, Artificial Sequence
  Description of Artificial Sequence: Synthetic oligonucleotide
  Antisense strand to SEQ ID NO: 1628515
uguagcauuggauaugacg

SEQ ID NO: 1628517 - RNA, 19 nt, Artificial Sequence
  Description of Artificial Sequence: Synthetic oligonucleotide
  Sense strand starting at position 701 of SEQ ID NO: 1560845
gccugaacagaucgucaca

SEQ ID NO: 1628518 - RNA, 19 nt, Artificial Sequence
  Description of Artificial Sequence: Synthetic oligonucleotide
  Antisense strand to SEQ ID NO: 1628517
ugugacgaucuguucaggc

SEQ ID NO: 1628519 - RNA, 19 nt, Artificial Sequence
  Description of Artificial Sequence: Synthetic oligonucleotide
  Sense strand starting at position 704 of SEQ ID NO: 1560845
ugaacagaucgucacaucu

SEQ ID NO: 1628520 - RNA, 19 nt, Artificial Sequence
  Description of Artificial Sequence: Synthetic oligonucleotide
  Antisense strand to SEQ ID NO: 1628519
agaugugacgaucuguuca

SEQ ID NO: 1628521 - RNA, 19 nt, Artificial Sequence
  Description of Artificial Sequence: Synthetic oligonucleotide
  Sense strand starting at position 811 of SEQ ID NO: 1560845
caucaaacauggcgucaaa

SEQ ID NO: 1628522 - RNA, 19 nt, Artificial Sequence
  Description of Artificial Sequence: Synthetic oligonucleotide
  Antisense strand to SEQ ID NO: 1628521
uuugacgccauguuugaug

SEQ ID NO: 1628523 - RNA, 19 nt, Artificial Sequence
  Description of Artificial Sequence: Synthetic oligonucleotide
  Sense strand starting at position 845 of SEQ ID NO: 1560845
guggauaguuacccaauca

SEQ ID NO: 1628524 - RNA, 19 nt, Artificial Sequence
  Description of Artificial Sequence: Synthetic oligonucleotide
  Antisense strand to SEQ ID NO: 1628523
ugauuggguaacuauccac

SEQ ID NO: 1628525 - RNA, 19 nt, Artificial Sequence
  Description of Artificial Sequence: Synthetic oligonucleotide
  Sense strand starting at position 2050 of SEQ ID NO: 1560845
gggcuucugugcuagccaa

SEQ ID NO: 1628526 - RNA, 19 nt, Artificial Sequence
  Description of Artificial Sequence: Synthetic oligonucleotide
  Antisense strand to SEQ ID NO: 1628525
uuggcuagcacagaagccc

SEQ ID NO: 1628527 - RNA, 19 nt, Artificial Sequence
  Description of Artificial Sequence: Synthetic oligonucleotide
  Sense strand starting at position 2931 of SEQ ID NO: 1560845
gcaagaaauuguugaugag

SEQ ID NO: 1628528 - RNA, 19 nt, Artificial Sequence
  Description of Artificial Sequence: Synthetic oligonucleotide
  Antisense strand to SEQ ID NO: 1628527
cucaucaacaauuucuugc

SEQ ID NO: 1628529 - RNA, 19 nt, Artificial Sequence
  Description of Artificial Sequence: Synthetic oligonucleotide
  Sense strand starting at position 2937 of SEQ ID NO: 1560845
aauuguugaugaguuacuu

SEQ ID NO: 1628530 - RNA, 19 nt, Artificial Sequence
  Description of Artificial Sequence: Synthetic oligonucleotide
  Antisense strand to SEQ ID NO: 1628529
aaguaacucaucaacaauu

SEQ ID NO: 1628531 - RNA, 19 nt, Artificial Sequence
  Description of Artificial Sequence: Synthetic oligonucleotide
  Sense strand starting at position 2945 of SEQ ID NO: 1560845
augaguuacuucuagggac

SEQ ID NO: 1628532 - RNA, 19 nt, Artificial Sequence
  Description of Artificial Sequence: Synthetic oligonucleotide
  Antisense strand to SEQ ID NO: 1628531
gucccuagaaguaacucau

SEQ ID NO: 1628533 - RNA, 19 nt, Artificial Sequence
  Description of Artificial Sequence: Synthetic oligonucleotide
  Sense strand starting at position 2947 of SEQ ID NO: 1560845
gaguuacuucuagggacaa

SEQ ID NO: 1628534 - RNA, 19 nt, Artificial Sequence
  Description of Artificial Sequence: Synthetic oligonucleotide
  Antisense strand to SEQ ID NO: 1628533
uugucccuagaaguaacuc

SEQ ID NO: 1628535 - RNA, 19 nt, Artificial Sequence
  Description of Artificial Sequence: Synthetic oligonucleotide
  Sense strand starting at position 2948 of SEQ ID NO: 1560845
aguuacuucuagggacaag

SEQ ID NO: 1628536 - RNA, 19 nt, Artificial Sequence
  Description of Artificial Sequence: Synthetic oligonucleotide
  Antisense strand to SEQ ID NO: 1628535
cuugucccuagaaguaacu

SEQ ID NO: 1628537 - RNA, 19 nt, Artificial Sequence
  Description of Artificial Sequence: Synthetic oligonucleotide
  Sense strand starting at position 2999 of SEQ ID NO: 1560845
ugccauccauacugugaau

SEQ ID NO: 1628538 - RNA, 19 nt, Artificial Sequence
  Description of Artificial Sequence: Synthetic oligonucleotide
  Antisense strand to SEQ ID NO: 1628537
auucacaguauggauggca

SEQ ID NO: 1628539 - RNA, 19 nt, Artificial Sequence
  Description of Artificial Sequence: Synthetic oligonucleotide
  Sense strand starting at position 3033 of SEQ ID NO: 1560845
acguauuucuucucuggca

SEQ ID NO: 1628540 - RNA, 19 nt, Artificial Sequence
  Description of Artificial Sequence: Synthetic oligonucleotide
  Antisense strand to SEQ ID NO: 1628539
ugccagagaagaaauacgu

SEQ ID NO: 1628541 - RNA, 19 nt, Artificial Sequence
  Description of Artificial Sequence: Synthetic oligonucleotide
  Sense strand starting at position 3035 of SEQ ID NO: 1560845
guauuucuucucuggcagu

SEQ ID NO: 1628542 - RNA, 19 nt, Artificial Sequence
  Description of Artificial Sequence: Synthetic oligonucleotide
  Antisense strand to SEQ ID NO: 1628541
acugccagagaagaaauac

SEQ ID NO: 1628543 - RNA, 19 nt, Artificial Sequence
  Description of Artificial Sequence: Synthetic oligonucleotide
  Sense strand starting at position 3038 of SEQ ID NO: 1560845
uuucuucucuggcaguaaa

SEQ ID NO: 1628544 - RNA, 19 nt, Artificial Sequence
  Description of Artificial Sequence: Synthetic oligonucleotide
  Antisense strand to SEQ ID NO: 1628543
uuuacugccagagaagaaa

SEQ ID NO: 1628545 - RNA, 19 nt, Artificial Sequence
  Description of Artificial Sequence: Synthetic oligonucleotide
  Sense strand starting at position 3165 of SEQ ID NO: 1560845
agggauauucacggagcau

SEQ ID NO: 1628546 - RNA, 19 nt, Artificial Sequence
  Description of Artificial Sequence: Synthetic oligonucleotide
  Antisense strand to SEQ ID NO: 1628545
augcuccgugaauaucccu

SEQ ID NO: 1628547 - RNA, 19 nt, Artificial Sequence
  Description of Artificial Sequence: Synthetic oligonucleotide
  Sense strand starting at position 3220 of SEQ ID NO: 1560845
auuaaacuguauucuggua

SEQ ID NO: 1628548 - RNA, 19 nt, Artificial Sequence
  Description of Artificial Sequence: Synthetic oligonucleotide
  Antisense strand to SEQ ID NO: 1628547
uaccagaauacaguuuaau

SEQ ID NO: 1628549 - RNA, 19 nt, Artificial Sequence
  Description of Artificial Sequence: Synthetic oligonucleotide
  Sense strand starting at position 3225 of SEQ ID NO: 1560845
acuguauucugguaaauuu

SEQ ID NO: 1628550 - RNA, 19 nt, Artificial Sequence
  Description of Artificial Sequence: Synthetic oligonucleotide
  Antisense strand to SEQ ID NO: 1628549
aaauuuaccagaauacagu

SEQ ID NO: 1628551 - RNA, 19 nt, Artificial Sequence
  Description of Artificial Sequence: Synthetic oligonucleotide
  Sense strand starting at position 3238 of SEQ ID NO: 1560845
aaauuuacacagcgcgauu

SEQ ID NO: 1628552 - RNA, 19 nt, Artificial Sequence
  Description of Artificial Sequence: Synthetic oligonucleotide
  Antisense strand to SEQ ID NO: 1628551
aaucgcgcuguguaaauuu

SEQ ID NO: 1628553 - RNA, 19 nt, Artificial Sequence
  Description of Artificial Sequence: Synthetic oligonucleotide
  Sense strand starting at position 3305 of SEQ ID NO: 1560845
aucuguaagaugugguuaa

SEQ ID NO: 1628554 - RNA, 19 nt, Artificial Sequence
  Description of Artificial Sequence: Synthetic oligonucleotide
  Antisense strand to SEQ ID NO: 1628553
uuaaccacaucuuacagau

SEQ ID NO: 1628555 - RNA, 19 nt, Artificial Sequence
  Description of Artificial Sequence: Synthetic oligonucleotide
  Sense strand starting at position 3306 of SEQ ID NO: 1560845
ucuguaagaugugguuaau

SEQ ID NO: 1628556 - RNA, 19 nt, Artificial Sequence
  Description of Artificial Sequence: Synthetic oligonucleotide
  Antisense strand to SEQ ID NO: 1628555
auuaaccacaucuuacaga

SEQ ID NO: 1628557 - RNA, 19 nt, Artificial Sequence
  Description of Artificial Sequence: Synthetic oligonucleotide
  Sense strand starting at position 3309 of SEQ ID NO: 1560845
guaagaugugguuaauuac

SEQ ID NO: 1628558 - RNA, 19 nt, Artificial Sequence
  Description of Artificial Sequence: Synthetic oligonucleotide
  Antisense strand to SEQ ID NO: 1628557
guaauuaaccacaucuuac

SEQ ID NO: 1628559 - RNA, 19 nt, Artificial Sequence
  Description of Artificial Sequence: Synthetic oligonucleotide
  Sense strand starting at position 3312 of SEQ ID NO: 1560845
agaugugguuaauuaccaa

SEQ ID NO: 1628560 - RNA, 19 nt, Artificial Sequence
  Description of Artificial Sequence: Synthetic oligonucleotide
  Antisense strand to SEQ ID NO: 1628559
uugguaauuaaccacaucu

SEQ ID NO: 1628561 - RNA, 19 nt, Artificial Sequence
  Description of Artificial Sequence: Synthetic oligonucleotide
  Sense strand starting at position 3330 of SEQ ID NO: 1560845
aaagguguuuaccuaagga

SEQ ID NO: 1628562 - RNA, 19 nt, Artificial Sequence
  Description of Artificial Sequence: Synthetic oligonucleotide
  Antisense strand to SEQ ID NO: 1628561
uccuuagguaaacaccuuu

SEQ ID NO: 1628563 - RNA, 19 nt, Artificial Sequence
  Description of Artificial Sequence: Synthetic oligonucleotide
  Sense strand starting at position 3395 of SEQ ID NO: 1560845
ggaguuaucagugguugcu

SEQ ID NO: 1628564 - RNA, 19 nt, Artificial Sequence
  Description of Artificial Sequence: Synthetic oligonucleotide
  Antisense strand to SEQ ID NO: 1628563
agcaaccacugauaacucc

SEQ ID NO: 1628565 - RNA, 19 nt, Artificial Sequence
  Description of Artificial Sequence: Synthetic oligonucleotide
  Sense strand starting at position 3570 of SEQ ID NO: 1560845
gaaggugaaugugguagua

SEQ ID NO: 1628566 - RNA, 19 nt, Artificial Sequence
  Description of Artificial Sequence: Synthetic oligonucleotide
  Antisense strand to SEQ ID NO: 1628565
uacuaccacauucaccuuc

SEQ ID NO: 1628567 - RNA, 19 nt, Artificial Sequence
  Description of Artificial Sequence: Synthetic oligonucleotide
  Sense strand starting at position 3580 of SEQ ID NO: 1560845
gugguaguacccugacuua

SEQ ID NO: 1628568 - RNA, 19 nt, Artificial Sequence
  Description of Artificial Sequence: Synthetic oligonucleotide
  Antisense strand to SEQ ID NO: 1628567
uaagucaggguacuaccac

SEQ ID NO: 1628569 - RNA, 19 nt, Artificial Sequence
  Description of Artificial Sequence: Synthetic oligonucleotide
  Sense strand starting at position 3592 of SEQ ID NO: 1560845
ugacuuagguuacagauuu

SEQ ID NO: 1628570 - RNA, 19 nt, Artificial Sequence
  Description of Artificial Sequence: Synthetic oligonucleotide
  Antisense strand to SEQ ID NO: 1628569
aaaucuguaaccuaaguca

SEQ ID NO: 1628571 - RNA, 19 nt, Artificial Sequence
  Description of Artificial Sequence: Synthetic oligonucleotide
  Sense strand starting at position 3647 of SEQ ID NO: 1560845
gcuguuaaacaaugcagau

SEQ ID NO: 1628572 - RNA, 19 nt, Artificial Sequence
  Description of Artificial Sequence: Synthetic oligonucleotide
  Antisense strand to SEQ ID NO: 1628571
aucugcauuguuuaacagc

SEQ ID NO: 1628573 - RNA, 19 nt, Artificial Sequence
  Description of Artificial Sequence: Synthetic oligonucleotide
  Sense strand starting at position 3660 of SEQ ID NO: 1560845
gcagauucccaguguccca

SEQ ID NO: 1628574 - RNA, 19 nt, Artificial Sequence
  Description of Artificial Sequence: Synthetic oligonucleotide
  Antisense strand to SEQ ID NO: 1628573
ugggacacugggaaucugc

SEQ ID NO: 1628575 - RNA, 19 nt, Artificial Sequence
  Description of Artificial Sequence: Synthetic oligonucleotide
  Sense strand starting at position 3667 of SEQ ID NO: 1560845
cccagugucccacagagau

SEQ ID NO: 1628576 - RNA, 19 nt, Artificial Sequence
  Description of Artificial Sequence: Synthetic oligonucleotide
  Antisense strand to SEQ ID NO: 1628575
aucucugugggacacuggg

SEQ ID NO: 1628577 - RNA, 19 nt, Artificial Sequence
  Description of Artificial Sequence: Synthetic oligonucleotide
  Sense strand starting at position 3705 of SEQ ID NO: 1560845
aagggauccuaaugucuag

SEQ ID NO: 1628578 - RNA, 19 nt, Artificial Sequence
  Description of Artificial Sequence: Synthetic oligonucleotide
  Antisense strand to SEQ ID NO: 1628577
cuagacauuaggaucccuu

SEQ ID NO: 1628579 - RNA, 19 nt, Artificial Sequence
  Description of Artificial Sequence: Synthetic oligonucleotide
  Sense strand starting at position 3708 of SEQ ID NO: 1560845
ggauccuaaugucuaguua

SEQ ID NO: 1628580 - RNA, 19 nt, Artificial Sequence
  Description of Artificial Sequence: Synthetic oligonucleotide
  Antisense strand to SEQ ID NO: 1628579
uaacuagacauuaggaucc

SEQ ID NO: 1628581 - RNA, 19 nt, Artificial Sequence
  Description of Artificial Sequence: Synthetic oligonucleotide
  Sense strand starting at position 3712 of SEQ ID NO: 1560845
ccuaaugucuaguuaaggu

SEQ ID NO: 1628582 - RNA, 19 nt, Artificial Sequence
  Description of Artificial Sequence: Synthetic oligonucleotide
  Antisense strand to SEQ ID NO: 1628581
accuuaacuagacauuagg

SEQ ID NO: 1628583 - RNA, 19 nt, Artificial Sequence
  Description of Artificial Sequence: Synthetic oligonucleotide
  Sense strand starting at position 3921 of SEQ ID NO: 1560845
agagcagucuacugucacu

SEQ ID NO: 1628584 - RNA, 19 nt, Artificial Sequence
  Description of Artificial Sequence: Synthetic oligonucleotide
  Antisense strand to SEQ ID NO: 1628583
agugacaguagacugcucu

SEQ ID NO: 1628585 - RNA, 19 nt, Artificial Sequence
  Description of Artificial Sequence: Synthetic oligonucleotide
  Sense strand starting at position 3927 of SEQ ID NO: 1560845
gucuacugucacuaacuca

SEQ ID NO: 1628586 - RNA, 19 nt, Artificial Sequence
  Description of Artificial Sequence: Synthetic oligonucleotide
  Antisense strand to SEQ ID NO: 1628585
ugaguuagugacaguagac

SEQ ID NO: 1628587 - RNA, 19 nt, Artificial Sequence
  Description of Artificial Sequence: Synthetic oligonucleotide
  Sense strand starting at position 274 of SEQ ID NO: 1560846
acugaagcaucuuuaauga

SEQ ID NO: 1628588 - RNA, 19 nt, Artificial Sequence
  Description of Artificial Sequence: Synthetic oligonucleotide
  Antisense strand to SEQ ID NO: 1628587
ucauuaaagaugcuucagu

SEQ ID NO: 1628589 - RNA, 19 nt, Artificial Sequence
  Description of Artificial Sequence: Synthetic oligonucleotide
  Sense strand starting at position 388 of SEQ ID NO: 1560846
uauuuaaggugucuguuua

SEQ ID NO: 1628590 - RNA, 19 nt, Artificial Sequence
  Description of Artificial Sequence: Synthetic oligonucleotide
  Antisense strand to SEQ ID NO: 1628589
uaaacagacaccuuaaaua

SEQ ID NO: 1628591 - RNA, 19 nt, Artificial Sequence
  Description of Artificial Sequence: Synthetic oligonucleotide
  Sense strand starting at position 389 of SEQ ID NO: 1560846
auuuaaggugucuguuuag

SEQ ID NO: 1628592 - RNA, 19 nt, Artificial Sequence
  Description of Artificial Sequence: Synthetic oligonucleotide
  Antisense strand to SEQ ID NO: 1628591
cuaaacagacaccuuaaau

SEQ ID NO: 1628593 - RNA, 19 nt, Artificial Sequence
  Description of Artificial Sequence: Synthetic oligonucleotide
  Sense strand starting at position 449 of SEQ ID NO: 1560846
uccucagaucucugaguga

SEQ ID NO: 1628594 - RNA, 19 nt, Artificial Sequence
  Description of Artificial Sequence: Synthetic oligonucleotide
  Antisense strand to SEQ ID NO: 1628593
ucacucagagaucugagga

SEQ ID NO: 1628595 - RNA, 19 nt, Artificial Sequence
  Description of Artificial Sequence: Synthetic oligonucleotide
  Sense strand starting at position 453 of SEQ ID NO: 1560846
cagaucucugagugaagcu

SEQ ID NO: 1628596 - RNA, 19 nt, Artificial Sequence
  Description of Artificial Sequence: Synthetic oligonucleotide
  Antisense strand to SEQ ID NO: 1628595
agcuucacucagagaucug

SEQ ID NO: 1628597 - RNA, 19 nt, Artificial Sequence
  Description of Artificial Sequence: Synthetic oligonucleotide
  Sense strand starting at position 575 of SEQ ID NO: 1560846
gguacucaccacugaaaga

SEQ ID NO: 1628598 - RNA, 19 nt, Artificial Sequence
  Description of Artificial Sequence: Synthetic oligonucleotide
  Antisense strand to SEQ ID NO: 1628597
ucuuucaguggugaguacc

SEQ ID NO: 1628599 - RNA, 19 nt, Artificial Sequence
  Description of Artificial Sequence: Synthetic oligonucleotide
  Sense strand starting at position 774 of SEQ ID NO: 1560846
guuggaaugaccugauccu

SEQ ID NO: 1628600 - RNA, 19 nt, Artificial Sequence
  Description of Artificial Sequence: Synthetic oligonucleotide
  Antisense strand to SEQ ID NO: 1628599
aggaucaggucauuccaac

SEQ ID NO: 1628601 - RNA, 19 nt, Artificial Sequence
  Description of Artificial Sequence: Synthetic oligonucleotide
  Sense strand starting at position 1150 of SEQ ID NO: 1560846
gacagagaguuauccaguc

SEQ ID NO: 1628602 - RNA, 19 nt, Artificial Sequence
  Description of Artificial Sequence: Synthetic oligonucleotide
  Antisense strand to SEQ ID NO: 1628601
gacuggauaacucucuguc

SEQ ID NO: 1628603 - RNA, 19 nt, Artificial Sequence
  Description of Artificial Sequence: Synthetic oligonucleotide
  Sense strand starting at position 1275 of SEQ ID NO: 1560846
cuuguaauucuccagcaga

SEQ ID NO: 1628604 - RNA, 19 nt, Artificial Sequence
  Description of Artificial Sequence: Synthetic oligonucleotide
  Antisense strand to SEQ ID NO: 1628603
ucugcuggagaauuacaag

SEQ ID NO: 1628605 - RNA, 19 nt, Artificial Sequence
  Description of Artificial Sequence: Synthetic oligonucleotide
  Sense strand starting at position 1352 of SEQ ID NO: 1560846
cagggaugauggucaggua

SEQ ID NO: 1628606 - RNA, 19 nt, Artificial Sequence
  Description of Artificial Sequence: Synthetic oligonucleotide
  Antisense strand to SEQ ID NO: 1628605
uaccugaccaucaucccug

SEQ ID NO: 1628607 - RNA, 19 nt, Artificial Sequence
  Description of Artificial Sequence: Synthetic oligonucleotide
  Sense strand starting at position 1379 of SEQ ID NO: 1560846
ggaccaagagcucgaugau

SEQ ID NO: 1628608 - RNA, 19 nt, Artificial Sequence
  Description of Artificial Sequence: Synthetic oligonucleotide
  Antisense strand to SEQ ID NO: 1628607
aucaucgagcucuuggucc

SEQ ID NO: 1628609 - RNA, 19 nt, Artificial Sequence
  Description of Artificial Sequence: Synthetic oligonucleotide
  Sense strand starting at position 1380 of SEQ ID NO: 1560846
gaccaagagcucgaugauc

SEQ ID NO: 1628610 - RNA, 19 nt, Artificial Sequence
  Description of Artificial Sequence: Synthetic oligonucleotide
  Antisense strand to SEQ ID NO: 1628609
gaucaucgagcucuugguc

SEQ ID NO: 1628611 - RNA, 19 nt, Artificial Sequence
  Description of Artificial Sequence: Synthetic oligonucleotide
  Sense strand starting at position 1382 of SEQ ID NO: 1560846
ccaagagcucgaugaucuc

SEQ ID NO: 1628612 - RNA, 19 nt, Artificial Sequence
  Description of Artificial Sequence: Synthetic oligonucleotide
  Antisense strand to SEQ ID NO: 1628611
gagaucaucgagcucuugg

SEQ ID NO: 1628613 - RNA, 19 nt, Artificial Sequence
  Description of Artificial Sequence: Synthetic oligonucleotide
  Sense strand starting at position 1498 of SEQ ID NO: 1560846
uuccgaaaccucugaugaa

SEQ ID NO: 1628614 - RNA, 19 nt, Artificial Sequence
  Description of Artificial Sequence: Synthetic oligonucleotide
  Antisense strand to SEQ ID NO: 1628613
uucaucagagguuucggaa

SEQ ID NO: 1628615 - RNA, 19 nt, Artificial Sequence
  Description of Artificial Sequence: Synthetic oligonucleotide
  Sense strand starting at position 1642 of SEQ ID NO: 1560846
ggcagcauuucucuaagua

SEQ ID NO: 1628616 - RNA, 19 nt, Artificial Sequence
  Description of Artificial Sequence: Synthetic oligonucleotide
  Antisense strand to SEQ ID NO: 1628615
uacuuagagaaaugcugcc

SEQ ID NO: 1628617 - RNA, 19 nt, Artificial Sequence
  Description of Artificial Sequence: Synthetic oligonucleotide
  Sense strand starting at position 1738 of SEQ ID NO: 1560846
guggaucguaaggagauau

SEQ ID NO: 1628618 - RNA, 19 nt, Artificial Sequence
  Description of Artificial Sequence: Synthetic oligonucleotide
  Antisense strand to SEQ ID NO: 1628617
auaucuccuuacgauccac

SEQ ID NO: 1628619 - RNA, 19 nt, Artificial Sequence
  Description of Artificial Sequence: Synthetic oligonucleotide
  Sense strand starting at position 1867 of SEQ ID NO: 1560846
caaaguuggccucagcaca

SEQ ID NO: 1628620 - RNA, 19 nt, Artificial Sequence
  Description of Artificial Sequence: Synthetic oligonucleotide
  Antisense strand to SEQ ID NO: 1628619
ugugcugaggccaacuuug

SEQ ID NO: 1628621 - RNA, 19 nt, Artificial Sequence
  Description of Artificial Sequence: Synthetic oligonucleotide
  Sense strand starting at position 1918 of SEQ ID NO: 1560846
agaccuacucgaggaguua

SEQ ID NO: 1628622 - RNA, 19 nt, Artificial Sequence
  Description of Artificial Sequence: Synthetic oligonucleotide
  Antisense strand to SEQ ID NO: 1628621
uaacuccucgaguaggucu

SEQ ID NO: 1628623 - RNA, 19 nt, Artificial Sequence
  Description of Artificial Sequence: Synthetic oligonucleotide
  Sense strand starting at position 1919 of SEQ ID NO: 1560846
gaccuacucgaggaguuag

SEQ ID NO: 1628624 - RNA, 19 nt, Artificial Sequence
  Description of Artificial Sequence: Synthetic oligonucleotide
  Antisense strand to SEQ ID NO: 1628623
cuaacuccucgaguagguc

SEQ ID NO: 1628625 - RNA, 19 nt, Artificial Sequence
  Description of Artificial Sequence: Synthetic oligonucleotide
  Sense strand starting at position 1982 of SEQ ID NO: 1560846
ugucuaaugcccuagaagu

SEQ ID NO: 1628626 - RNA, 19 nt, Artificial Sequence
  Description of Artificial Sequence: Synthetic oligonucleotide
  Antisense strand to SEQ ID NO: 1628625
acuucuagggcauuagaca

SEQ ID NO: 1628627 - RNA, 19 nt, Artificial Sequence
  Description of Artificial Sequence: Synthetic oligonucleotide
  Sense strand starting at position 1993 of SEQ ID NO: 1560846
cuagaagucucucuguaau

SEQ ID NO: 1628628 - RNA, 19 nt, Artificial Sequence
  Description of Artificial Sequence: Synthetic oligonucleotide
  Antisense strand to SEQ ID NO: 1628627
auuacagagagacuucuag

SEQ ID NO: 1628629 - RNA, 19 nt, Artificial Sequence
  Description of Artificial Sequence: Synthetic oligonucleotide
  Sense strand starting at position 1995 of SEQ ID NO: 1560846
agaagucucucuguaaucu

SEQ ID NO: 1628630 - RNA, 19 nt, Artificial Sequence
  Description of Artificial Sequence: Synthetic oligonucleotide
  Antisense strand to SEQ ID NO: 1628629
agauuacagagagacuucu

SEQ ID NO: 1628631 - RNA, 19 nt, Artificial Sequence
  Description of Artificial Sequence: Synthetic oligonucleotide
  Sense strand starting at position 1996 of SEQ ID NO: 1560846
gaagucucucuguaaucug

SEQ ID NO: 1628632 - RNA, 19 nt, Artificial Sequence
  Description of Artificial Sequence: Synthetic oligonucleotide
  Antisense strand to SEQ ID NO: 1628631
cagauuacagagagacuuc

SEQ ID NO: 1628633 - RNA, 19 nt, Artificial Sequence
  Description of Artificial Sequence: Synthetic oligonucleotide
  Sense strand starting at position 1999 of SEQ ID NO: 1560846
gucucucuguaaucugaga

SEQ ID NO: 1628634 - RNA, 19 nt, Artificial Sequence
  Description of Artificial Sequence: Synthetic oligonucleotide
  Antisense strand to SEQ ID NO: 1628633
ucucagauuacagagagac

SEQ ID NO: 1628635 - RNA, 19 nt, Artificial Sequence
  Description of Artificial Sequence: Synthetic oligonucleotide
  Sense strand starting at position 2126 of SEQ ID NO: 1560846
ggcccuagccaguacuaaa

SEQ ID NO: 1628636 - RNA, 19 nt, Artificial Sequence
  Description of Artificial Sequence: Synthetic oligonucleotide
  Antisense strand to SEQ ID NO: 1628635
uuuaguacuggcuagggcc

SEQ ID NO: 1628637 - RNA, 19 nt, Artificial Sequence
  Description of Artificial Sequence: Synthetic oligonucleotide
  Sense strand starting at position 2292 of SEQ ID NO: 1560846
aguacucaacucuagguaa

SEQ ID NO: 1628638 - RNA, 19 nt, Artificial Sequence
  Description of Artificial Sequence: Synthetic oligonucleotide
  Antisense strand to SEQ ID NO: 1628637
uuaccuagaguugaguacu

SEQ ID NO: 1628639 - RNA, 19 nt, Artificial Sequence
  Description of Artificial Sequence: Synthetic oligonucleotide
  Sense strand starting at position 2652 of SEQ ID NO: 1560846
gcacaucuggugcaacuaa

SEQ ID NO: 1628640 - RNA, 19 nt, Artificial Sequence
  Description of Artificial Sequence: Synthetic oligonucleotide
  Antisense strand to SEQ ID NO: 1628639
uuaguugcaccagaugugc

SEQ ID NO: 1628641 - RNA, 19 nt, Artificial Sequence
  Description of Artificial Sequence: Synthetic oligonucleotide
  Sense strand starting at position 2691 of SEQ ID NO: 1560846
aaucuaggucugggagcau

SEQ ID NO: 1628642 - RNA, 19 nt, Artificial Sequence
  Description of Artificial Sequence: Synthetic oligonucleotide
  Antisense strand to SEQ ID NO: 1628641
augcucccagaccuagauu

SEQ ID NO: 1628643 - RNA, 19 nt, Artificial Sequence
  Description of Artificial Sequence: Synthetic oligonucleotide
  Sense strand starting at position 2887 of SEQ ID NO: 1560846
caaugugguaaucacggua

SEQ ID NO: 1628644 - RNA, 19 nt, Artificial Sequence
  Description of Artificial Sequence: Synthetic oligonucleotide
  Antisense strand to SEQ ID NO: 1628643
uaccgugauuaccacauug

SEQ ID NO: 1628645 - RNA, 19 nt, Artificial Sequence
  Description of Artificial Sequence: Synthetic oligonucleotide
  Sense strand starting at position 2892 of SEQ ID NO: 1560846
ugguaaucacgguaaacuc

SEQ ID NO: 1628646 - RNA, 19 nt, Artificial Sequence
  Description of Artificial Sequence: Synthetic oligonucleotide
  Antisense strand to SEQ ID NO: 1628645
gaguuuaccgugauuacca

SEQ ID NO: 1628647 - RNA, 19 nt, Artificial Sequence
  Description of Artificial Sequence: Synthetic oligonucleotide
  Sense strand starting at position 2986 of SEQ ID NO: 1560846
uuaucaucccauggagcuu

SEQ ID NO: 1628648 - RNA, 19 nt, Artificial Sequence
  Description of Artificial Sequence: Synthetic oligonucleotide
  Antisense strand to SEQ ID NO: 1628647
aagcuccaugggaugauaa

SEQ ID NO: 1628649 - RNA, 19 nt, Artificial Sequence
  Description of Artificial Sequence: Synthetic oligonucleotide
  Sense strand starting at position 3006 of SEQ ID NO: 1560846
ggcaccauccaaugcaaau

SEQ ID NO: 1628650 - RNA, 19 nt, Artificial Sequence
  Description of Artificial Sequence: Synthetic oligonucleotide
  Antisense strand to SEQ ID NO: 1628649
auuugcauuggauggugcc

SEQ ID NO: 1628651 - RNA, 19 nt, Artificial Sequence
  Description of Artificial Sequence: Synthetic oligonucleotide
  Sense strand starting at position 3039 of SEQ ID NO: 1560846
gaccuuagcgacuggacua

SEQ ID NO: 1628652 - RNA, 19 nt, Artificial Sequence
  Description of Artificial Sequence: Synthetic oligonucleotide
  Antisense strand to SEQ ID NO: 1628651
uaguccagucgcuaagguc

SEQ ID NO: 1628653 - RNA, 19 nt, Artificial Sequence
  Description of Artificial Sequence: Synthetic oligonucleotide
  Sense strand starting at position 3118 of SEQ ID NO: 1560846
cucugcugggcagaagaau

SEQ ID NO: 1628654 - RNA, 19 nt, Artificial Sequence
  Description of Artificial Sequence: Synthetic oligonucleotide
  Antisense strand to SEQ ID NO: 1628653
auucuucugcccagcagag

SEQ ID NO: 1628655 - RNA, 19 nt, Artificial Sequence
  Description of Artificial Sequence: Synthetic oligonucleotide
  Sense strand starting at position 3179 of SEQ ID NO: 1560846
agaugauuggugugacauu

SEQ ID NO: 1628656 - RNA, 19 nt, Artificial Sequence
  Description of Artificial Sequence: Synthetic oligonucleotide
  Antisense strand to SEQ ID NO: 1628655
aaugucacaccaaucaucu

SEQ ID NO: 1628657 - RNA, 19 nt, Artificial Sequence
  Description of Artificial Sequence: Synthetic oligonucleotide
  Sense strand starting at position 3312 of SEQ ID NO: 1560846
acacucugguaccugaaau

SEQ ID NO: 1628658 - RNA, 19 nt, Artificial Sequence
  Description of Artificial Sequence: Synthetic oligonucleotide
  Antisense strand to SEQ ID NO: 1628657
auuucagguaccagagugu

SEQ ID NO: 1628659 - RNA, 19 nt, Artificial Sequence
  Description of Artificial Sequence: Synthetic oligonucleotide
  Sense strand starting at position 3374 of SEQ ID NO: 1560846
guaaucaccugucugggaa

SEQ ID NO: 1628660 - RNA, 19 nt, Artificial Sequence
  Description of Artificial Sequence: Synthetic oligonucleotide
  Antisense strand to SEQ ID NO: 1628659
uucccagacaggugauuac

SEQ ID NO: 1628661 - RNA, 19 nt, Artificial Sequence
  Description of Artificial Sequence: Synthetic oligonucleotide
  Sense strand starting at position 3451 of SEQ ID NO: 1560846
cagguaucugcagaaguuu

SEQ ID NO: 1628662 - RNA, 19 nt, Artificial Sequence
  Description of Artificial Sequence: Synthetic oligonucleotide
  Antisense strand to SEQ ID NO: 1628661
aaacuucugcagauaccug

SEQ ID NO: 1628663 - RNA, 19 nt, Artificial Sequence
  Description of Artificial Sequence: Synthetic oligonucleotide
  Sense strand starting at position 3921 of SEQ ID NO: 1560846
uaaaguacccuaggugaaa

SEQ ID NO: 1628664 - RNA, 19 nt, Artificial Sequence
  Description of Artificial Sequence: Synthetic oligonucleotide
  Antisense strand to SEQ ID NO: 1628663
uuucaccuaggguacuuua

SEQ ID NO: 1628665 - RNA, 19 nt, Artificial Sequence
  Description of Artificial Sequence: Synthetic oligonucleotide
  Sense strand starting at position 3947 of SEQ ID NO: 1560846
aucagaauggcaggcuuau

SEQ ID NO: 1628666 - RNA, 19 nt, Artificial Sequence
  Description of Artificial Sequence: Synthetic oligonucleotide
  Antisense strand to SEQ ID NO: 1628665
auaagccugccauucugau

SEQ ID NO: 1628667 - RNA, 19 nt, Artificial Sequence
  Description of Artificial Sequence: Synthetic oligonucleotide
  Sense strand starting at position 436 of SEQ ID NO: 1560847
gacccugaguuccuugaca

SEQ ID NO: 1628668 - RNA, 19 nt, Artificial Sequence
  Description of Artificial Sequence: Synthetic oligonucleotide
  Antisense strand to SEQ ID NO: 1628667
ugucaaggaacucaggguc

SEQ ID NO: 1628669 - RNA, 19 nt, Artificial Sequence
  Description of Artificial Sequence: Synthetic oligonucleotide
  Sense strand starting at position 460 of SEQ ID NO: 1560847
cugagacuuugucugcacu

SEQ ID NO: 1628670 - RNA, 19 nt, Artificial Sequence
  Description of Artificial Sequence: Synthetic oligonucleotide
  Antisense strand to SEQ ID NO: 1628669
agugcagacaaagucucag

SEQ ID NO: 1628671 - RNA, 19 nt, Artificial Sequence
  Description of Artificial Sequence: Synthetic oligonucleotide
  Sense strand starting at position 462 of SEQ ID NO: 1560847
gagacuuugucugcacugu

SEQ ID NO: 1628672 - RNA, 19 nt, Artificial Sequence
  Description of Artificial Sequence: Synthetic oligonucleotide
  Antisense strand to SEQ ID NO: 1628671
acagugcagacaaagucuc

SEQ ID NO: 1628673 - RNA, 19 nt, Artificial Sequence
  Description of Artificial Sequence: Synthetic oligonucleotide
  Sense strand starting at position 463 of SEQ ID NO: 1560847
agacuuugucugcacuguu

SEQ ID NO: 1628674 - RNA, 19 nt, Artificial Sequence
  Description of Artificial Sequence: Synthetic oligonucleotide
  Antisense strand to SEQ ID NO: 1628673
aacagugcagacaaagucu

SEQ ID NO: 1628675 - RNA, 19 nt, Artificial Sequence
  Description of Artificial Sequence: Synthetic oligonucleotide
  Sense strand starting at position 473 of SEQ ID NO: 1560847
ugcacuguucucuaccuga

SEQ ID NO: 1628676 - RNA, 19 nt, Artificial Sequence
  Description of Artificial Sequence: Synthetic oligonucleotide
  Antisense strand to SEQ ID NO: 1628675
ucagguagagaacagugca

SEQ ID NO: 1628677 - RNA, 19 nt, Artificial Sequence
  Description of Artificial Sequence: Synthetic oligonucleotide
  Sense strand starting at position 491 of SEQ ID NO: 1560847
aagggagucucauugcuga

SEQ ID NO: 1628678 - RNA, 19 nt, Artificial Sequence
  Description of Artificial Sequence: Synthetic oligonucleotide
  Antisense strand to SEQ ID NO: 1628677
ucagcaaugagacucccuu

SEQ ID NO: 1628679 - RNA, 19 nt, Artificial Sequence
  Description of Artificial Sequence: Synthetic oligonucleotide
  Sense strand starting at position 655 of SEQ ID NO: 1560847
cugugaguaccuuaaggga

SEQ ID NO: 1628680 - RNA, 19 nt, Artificial Sequence
  Description of Artificial Sequence: Synthetic oligonucleotide
  Antisense strand to SEQ ID NO: 1628679
ucccuuaagguacucacag

SEQ ID NO: 1628681 - RNA, 19 nt, Artificial Sequence
  Description of Artificial Sequence: Synthetic oligonucleotide
  Sense strand starting at position 680 of SEQ ID NO: 1560847
acugcuauuccuggaauau

SEQ ID NO: 1628682 - RNA, 19 nt, Artificial Sequence
  Description of Artificial Sequence: Synthetic oligonucleotide
  Antisense strand to SEQ ID NO: 1628681
auauuccaggaauagcagu

SEQ ID NO: 1628683 - RNA, 19 nt, Artificial Sequence
  Description of Artificial Sequence: Synthetic oligonucleotide
  Sense strand starting at position 681 of SEQ ID NO: 1560847
cugcuauuccuggaauaua

SEQ ID NO: 1628684 - RNA, 19 nt, Artificial Sequence
  Description of Artificial Sequence: Synthetic oligonucleotide
  Antisense strand to SEQ ID NO: 1628683
uauauuccaggaauagcag

SEQ ID NO: 1628685 - RNA, 19 nt, Artificial Sequence
  Description of Artificial Sequence: Synthetic oligonucleotide
  Sense strand starting at position 720 of SEQ ID NO: 1560847
ugauuuguaugcucuaagc

SEQ ID NO: 1628686 - RNA, 19 nt, Artificial Sequence
  Description of Artificial Sequence: Synthetic oligonucleotide
  Antisense strand to SEQ ID NO: 1628685
gcuuagagcauacaaauca

SEQ ID NO: 1628687 - RNA, 19 nt, Artificial Sequence
  Description of Artificial Sequence: Synthetic oligonucleotide
  Sense strand starting at position 977 of SEQ ID NO: 1560847
gaucaagcagcuuguaaca

SEQ ID NO: 1628688 - RNA, 19 nt, Artificial Sequence
  Description of Artificial Sequence: Synthetic oligonucleotide
  Antisense strand to SEQ ID NO: 1628687
uguuacaagcugcuugauc

SEQ ID NO: 1628689 - RNA, 19 nt, Artificial Sequence
  Description of Artificial Sequence: Synthetic oligonucleotide
  Sense strand starting at position 1133 of SEQ ID NO: 1560847
gcucccuaucugggagauu

SEQ ID NO: 1628690 - RNA, 19 nt, Artificial Sequence
  Description of Artificial Sequence: Synthetic oligonucleotide
  Antisense strand to SEQ ID NO: 1628689
aaucucccagauagggagc

SEQ ID NO: 1628691 - RNA, 19 nt, Artificial Sequence
  Description of Artificial Sequence: Synthetic oligonucleotide
  Sense strand starting at position 1334 of SEQ ID NO: 1560847
ugcucuauauaguuuauca

SEQ ID NO: 1628692 - RNA, 19 nt, Artificial Sequence
  Description of Artificial Sequence: Synthetic oligonucleotide
  Antisense strand to SEQ ID NO: 1628691
ugauaaacuauauagagca

SEQ ID NO: 1628693 - RNA, 19 nt, Artificial Sequence
  Description of Artificial Sequence: Synthetic oligonucleotide
  Sense strand starting at position 1344 of SEQ ID NO: 1560847
aguuuaucaggugaugaug

SEQ ID NO: 1628694 - RNA, 19 nt, Artificial Sequence
  Description of Artificial Sequence: Synthetic oligonucleotide
  Antisense strand to SEQ ID NO: 1628693
caucaucaccugauaaacu

SEQ ID NO: 1628695 - RNA, 19 nt, Artificial Sequence
  Description of Artificial Sequence: Synthetic oligonucleotide
  Sense strand starting at position 1545 of SEQ ID NO: 1560847
gggucuuggcagcgaacau

SEQ ID NO: 1628696 - RNA, 19 nt, Artificial Sequence
  Description of Artificial Sequence: Synthetic oligonucleotide
  Antisense strand to SEQ ID NO: 1628695
auguucgcugccaagaccc

SEQ ID NO: 1628697 - RNA, 19 nt, Artificial Sequence
  Description of Artificial Sequence: Synthetic oligonucleotide
  Sense strand starting at position 2079 of SEQ ID NO: 1560847
agagcucggccaggauaaa

SEQ ID NO: 1628698 - RNA, 19 nt, Artificial Sequence
  Description of Artificial Sequence: Synthetic oligonucleotide
  Antisense strand to SEQ ID NO: 1628697
uuuauccuggccgagcucu

SEQ ID NO: 1628699 - RNA, 19 nt, Artificial Sequence
  Description of Artificial Sequence: Synthetic oligonucleotide
  Sense strand starting at position 2080 of SEQ ID NO: 1560847
gagcucggccaggauaaau

SEQ ID NO: 1628700 - RNA, 19 nt, Artificial Sequence
  Description of Artificial Sequence: Synthetic oligonucleotide
  Antisense strand to SEQ ID NO: 1628699
auuuauccuggccgagcuc

SEQ ID NO: 1628701 - RNA, 19 nt, Artificial Sequence
  Description of Artificial Sequence: Synthetic oligonucleotide
  Sense strand starting at position 2334 of SEQ ID NO: 1560847
agggaaagggcuugagcaa

SEQ ID NO: 1628702 - RNA, 19 nt, Artificial Sequence
  Description of Artificial Sequence: Synthetic oligonucleotide
  Antisense strand to SEQ ID NO: 1628701
uugcucaagcccuuucccu

SEQ ID NO: 1628703 - RNA, 19 nt, Artificial Sequence
  Description of Artificial Sequence: Synthetic oligonucleotide
  Sense strand starting at position 2395 of SEQ ID NO: 1560847
ggagaaugugcgcgagaga

SEQ ID NO: 1628704 - RNA, 19 nt, Artificial Sequence
  Description of Artificial Sequence: Synthetic oligonucleotide
  Antisense strand to SEQ ID NO: 1628703
ucucucgcgcacauucucc

SEQ ID NO: 1628705 - RNA, 19 nt, Artificial Sequence
  Description of Artificial Sequence: Synthetic oligonucleotide
  Sense strand starting at position 2464 of SEQ ID NO: 1560847
gggccuaugaguuaagucu

SEQ ID NO: 1628706 - RNA, 19 nt, Artificial Sequence
  Description of Artificial Sequence: Synthetic oligonucleotide
  Antisense strand to SEQ ID NO: 1628705
agacuuaacucauaggccc

SEQ ID NO: 1628707 - RNA, 19 nt, Artificial Sequence
  Description of Artificial Sequence: Synthetic oligonucleotide
  Sense strand starting at position 2589 of SEQ ID NO: 1560847
gagggagagucugccagaa

SEQ ID NO: 1628708 - RNA, 19 nt, Artificial Sequence
  Description of Artificial Sequence: Synthetic oligonucleotide
  Antisense strand to SEQ ID NO: 1628707
uucuggcagacucucccuc

SEQ ID NO: 1628709 - RNA, 19 nt, Artificial Sequence
  Description of Artificial Sequence: Synthetic oligonucleotide
  Sense strand starting at position 2645 of SEQ ID NO: 1560847
ugcagaguccugcagagaa

SEQ ID NO: 1628710 - RNA, 19 nt, Artificial Sequence
  Description of Artificial Sequence: Synthetic oligonucleotide
  Antisense strand to SEQ ID NO: 1628709
uucucugcaggacucugca

SEQ ID NO: 1628711 - RNA, 19 nt, Artificial Sequence
  Description of Artificial Sequence: Synthetic oligonucleotide
  Sense strand starting at position 2730 of SEQ ID NO: 1560847
ggcccaaaugcguugcaca

SEQ ID NO: 1628712 - RNA, 19 nt, Artificial Sequence
  Description of Artificial Sequence: Synthetic oligonucleotide
  Antisense strand to SEQ ID NO: 1628711
ugugcaacgcauuugggcc

SEQ ID NO: 1628713 - RNA, 19 nt, Artificial Sequence
  Description of Artificial Sequence: Synthetic oligonucleotide
  Sense strand starting at position 2742 of SEQ ID NO: 1560847
uugcacaugugagcucaua

SEQ ID NO: 1628714 - RNA, 19 nt, Artificial Sequence
  Description of Artificial Sequence: Synthetic oligonucleotide
  Antisense strand to SEQ ID NO: 1628713
uaugagcucacaugugcaa

SEQ ID NO: 1628715 - RNA, 19 nt, Artificial Sequence
  Description of Artificial Sequence: Synthetic oligonucleotide
  Sense strand starting at position 2775 of SEQ ID NO: 1560847
gcccuaugaggucgagacu

SEQ ID NO: 1628716 - RNA, 19 nt, Artificial Sequence
  Description of Artificial Sequence: Synthetic oligonucleotide
  Antisense strand to SEQ ID NO: 1628715
agucucgaccucauagggc

SEQ ID NO: 1628717 - RNA, 19 nt, Artificial Sequence
  Description of Artificial Sequence: Synthetic oligonucleotide
  Sense strand starting at position 2776 of SEQ ID NO: 1560847
cccuaugaggucgagacua

SEQ ID NO: 1628718 - RNA, 19 nt, Artificial Sequence
  Description of Artificial Sequence: Synthetic oligonucleotide
  Antisense strand to SEQ ID NO: 1628717
uagucucgaccucauaggg

SEQ ID NO: 1628719 - RNA, 19 nt, Artificial Sequence
  Description of Artificial Sequence: Synthetic oligonucleotide
  Sense strand starting at position 2778 of SEQ ID NO: 1560847
cuaugaggucgagacuauc

SEQ ID NO: 1628720 - RNA, 19 nt, Artificial Sequence
  Description of Artificial Sequence: Synthetic oligonucleotide
  Antisense strand to SEQ ID NO: 1628719
gauagucucgaccucauag

SEQ ID NO: 1628721 - RNA, 19 nt, Artificial Sequence
  Description of Artificial Sequence: Synthetic oligonucleotide
  Sense strand starting at position 2781 of SEQ ID NO: 1560847
ugaggucgagacuaucuuu

SEQ ID NO: 1628722 - RNA, 19 nt, Artificial Sequence
  Description of Artificial Sequence: Synthetic oligonucleotide
  Antisense strand to SEQ ID NO: 1628721
aaagauagucucgaccuca

SEQ ID NO: 1628723 - RNA, 19 nt, Artificial Sequence
  Description of Artificial Sequence: Synthetic oligonucleotide
  Sense strand starting at position 2784 of SEQ ID NO: 1560847
ggucgagacuaucuuuaag

SEQ ID NO: 1628724 - RNA, 19 nt, Artificial Sequence
  Description of Artificial Sequence: Synthetic oligonucleotide
  Antisense strand to SEQ ID NO: 1628723
cuuaaagauagucucgacc

SEQ ID NO: 1628725 - RNA, 19 nt, Artificial Sequence
  Description of Artificial Sequence: Synthetic oligonucleotide
  Sense strand starting at position 2786 of SEQ ID NO: 1560847
ucgagacuaucuuuaaguc

SEQ ID NO: 1628726 - RNA, 19 nt, Artificial Sequence
  Description of Artificial Sequence: Synthetic oligonucleotide
  Antisense strand to SEQ ID NO: 1628725
gacuuaaagauagucucga

SEQ ID NO: 1628727 - RNA, 19 nt, Artificial Sequence
  Description of Artificial Sequence: Synthetic oligonucleotide
  Sense strand starting at position 2787 of SEQ ID NO: 1560847
cgagacuaucuuuaagucu

SEQ ID NO: 1628728 - RNA, 19 nt, Artificial Sequence
  Description of Artificial Sequence: Synthetic oligonucleotide
  Antisense strand to SEQ ID NO: 1628727
agacuuaaagauagucucg

SEQ ID NO: 1628729 - RNA, 19 nt, Artificial Sequence
  Description of Artificial Sequence: Synthetic oligonucleotide
  Sense strand starting at position 2829 of SEQ ID NO: 1560847
gccagagagugcucacaca

SEQ ID NO: 1628730 - RNA, 19 nt, Artificial Sequence
  Description of Artificial Sequence: Synthetic oligonucleotide
  Antisense strand to SEQ ID NO: 1628729
ugugugagcacucucuggc

SEQ ID NO: 1628731 - RNA, 19 nt, Artificial Sequence
  Description of Artificial Sequence: Synthetic oligonucleotide
  Sense strand starting at position 2863 of SEQ ID NO: 1560847
aagccauacccugaggagu

SEQ ID NO: 1628732 - RNA, 19 nt, Artificial Sequence
  Description of Artificial Sequence: Synthetic oligonucleotide
  Antisense strand to SEQ ID NO: 1628731
acuccucaggguauggcuu

SEQ ID NO: 1628733 - RNA, 19 nt, Artificial Sequence
  Description of Artificial Sequence: Synthetic oligonucleotide
  Sense strand starting at position 3057 of SEQ ID NO: 1560847
guggcuucugaucaaaggu

SEQ ID NO: 1628734 - RNA, 19 nt, Artificial Sequence
  Description of Artificial Sequence: Synthetic oligonucleotide
  Antisense strand to SEQ ID NO: 1628733
accuuugaucagaagccac

SEQ ID NO: 1628735 - RNA, 19 nt, Artificial Sequence
  Description of Artificial Sequence: Synthetic oligonucleotide
  Sense strand starting at position 3087 of SEQ ID NO: 1560847
ggaugcuucuuguuucuuu

SEQ ID NO: 1628736 - RNA, 19 nt, Artificial Sequence
  Description of Artificial Sequence: Synthetic oligonucleotide
  Antisense strand to SEQ ID NO: 1628735
aaagaaacaagaagcaucc

SEQ ID NO: 1628737 - RNA, 19 nt, Artificial Sequence
  Description of Artificial Sequence: Synthetic oligonucleotide
  Sense strand starting at position 3092 of SEQ ID NO: 1560847
cuucuuguuucuuuaucga

SEQ ID NO: 1628738 - RNA, 19 nt, Artificial Sequence
  Description of Artificial Sequence: Synthetic oligonucleotide
  Antisense strand to SEQ ID NO: 1628737
ucgauaaagaaacaagaag

SEQ ID NO: 1628739 - RNA, 19 nt, Artificial Sequence
  Description of Artificial Sequence: Synthetic oligonucleotide
  Sense strand starting at position 3095 of SEQ ID NO: 1560847
cuuguuucuuuaucgaaac

SEQ ID NO: 1628740 - RNA, 19 nt, Artificial Sequence
  Description of Artificial Sequence: Synthetic oligonucleotide
  Antisense strand to SEQ ID NO: 1628739
guuucgauaaagaaacaag

SEQ ID NO: 1628741 - RNA, 19 nt, Artificial Sequence
  Description of Artificial Sequence: Synthetic oligonucleotide
  Sense strand starting at position 3866 of SEQ ID NO: 1560847
agcucugagugcuuacuaa

SEQ ID NO: 1628742 - RNA, 19 nt, Artificial Sequence
  Description of Artificial Sequence: Synthetic oligonucleotide
  Antisense strand to SEQ ID NO: 1628741
uuaguaagcacucagagcu

SEQ ID NO: 1628743 - RNA, 19 nt, Artificial Sequence
  Description of Artificial Sequence: Synthetic oligonucleotide
  Sense strand starting at position 3956 of SEQ ID NO: 1560847
cuuguuuguggacaguaau

SEQ ID NO: 1628744 - RNA, 19 nt, Artificial Sequence
  Description of Artificial Sequence: Synthetic oligonucleotide
  Antisense strand to SEQ ID NO: 1628743
auuacuguccacaaacaag

SEQ ID NO: 1628745 - RNA, 19 nt, Artificial Sequence
  Description of Artificial Sequence: Synthetic oligonucleotide
  Sense strand starting at position 3959 of SEQ ID NO: 1560847
guuuguggacaguaauaug

SEQ ID NO: 1628746 - RNA, 19 nt, Artificial Sequence
  Description of Artificial Sequence: Synthetic oligonucleotide
  Antisense strand to SEQ ID NO: 1628745
cauauuacuguccacaaac

SEQ ID NO: 1628747 - RNA, 19 nt, Artificial Sequence
  Description of Artificial Sequence: Synthetic oligonucleotide
  Sense strand starting at position 544 of SEQ ID NO: 1560848
cuuacucauggcugagagu

SEQ ID NO: 1628748 - RNA, 19 nt, Artificial Sequence
  Description of Artificial Sequence: Synthetic oligonucleotide
  Antisense strand to SEQ ID NO: 1628747
acucucagccaugaguaag

SEQ ID NO: 1628749 - RNA, 19 nt, Artificial Sequence
  Description of Artificial Sequence: Synthetic oligonucleotide
  Sense strand starting at position 545 of SEQ ID NO: 1560848
uuacucauggcugagagua

SEQ ID NO: 1628750 - RNA, 19 nt, Artificial Sequence
  Description of Artificial Sequence: Synthetic oligonucleotide
  Antisense strand to SEQ ID NO: 1628749
uacucucagccaugaguaa

SEQ ID NO: 1628751 - RNA, 19 nt, Artificial Sequence
  Description of Artificial Sequence: Synthetic oligonucleotide
  Sense strand starting at position 815 of SEQ ID NO: 1560848
cucccaugcccugggauua

SEQ ID NO: 1628752 - RNA, 19 nt, Artificial Sequence
  Description of Artificial Sequence: Synthetic oligonucleotide
  Antisense strand to SEQ ID NO: 1628751
uaaucccagggcaugggag

SEQ ID NO: 1628753 - RNA, 19 nt, Artificial Sequence
  Description of Artificial Sequence: Synthetic oligonucleotide
  Sense strand starting at position 1201 of SEQ ID NO: 1560848
gguagauuaucaucuggaa

SEQ ID NO: 1628754 - RNA, 19 nt, Artificial Sequence
  Description of Artificial Sequence: Synthetic oligonucleotide
  Antisense strand to SEQ ID NO: 1628753
uuccagaugauaaucuacc

SEQ ID NO: 1628755 - RNA, 19 nt, Artificial Sequence
  Description of Artificial Sequence: Synthetic oligonucleotide
  Sense strand starting at position 1401 of SEQ ID NO: 1560848
ggccucauuccugaaaguu

SEQ ID NO: 1628756 - RNA, 19 nt, Artificial Sequence
  Description of Artificial Sequence: Synthetic oligonucleotide
  Antisense strand to SEQ ID NO: 1628755
aacuuucaggaaugaggcc

SEQ ID NO: 1628757 - RNA, 19 nt, Artificial Sequence
  Description of Artificial Sequence: Synthetic oligonucleotide
  Sense strand starting at position 1409 of SEQ ID NO: 1560848
uccugaaaguucccucuga

SEQ ID NO: 1628758 - RNA, 19 nt, Artificial Sequence
  Description of Artificial Sequence: Synthetic oligonucleotide
  Antisense strand to SEQ ID NO: 1628757
ucagagggaacuuucagga

SEQ ID NO: 1628759 - RNA, 19 nt, Artificial Sequence
  Description of Artificial Sequence: Synthetic oligonucleotide
  Sense strand starting at position 1410 of SEQ ID NO: 1560848
ccugaaaguucccucugag

SEQ ID NO: 1628760 - RNA, 19 nt, Artificial Sequence
  Description of Artificial Sequence: Synthetic oligonucleotide
  Antisense strand to SEQ ID NO: 1628759
cucagagggaacuuucagg

SEQ ID NO: 1628761 - RNA, 19 nt, Artificial Sequence
  Description of Artificial Sequence: Synthetic oligonucleotide
  Sense strand starting at position 1413 of SEQ ID NO: 1560848
gaaaguucccucugagcug

SEQ ID NO: 1628762 - RNA, 19 nt, Artificial Sequence
  Description of Artificial Sequence: Synthetic oligonucleotide
  Antisense strand to SEQ ID NO: 1628761
cagcucagagggaacuuuc

SEQ ID NO: 1628763 - RNA, 19 nt, Artificial Sequence
  Description of Artificial Sequence: Synthetic oligonucleotide
  Sense strand starting at position 1428 of SEQ ID NO: 1560848
gcuggagucuuccucucaa

SEQ ID NO: 1628764 - RNA, 19 nt, Artificial Sequence
  Description of Artificial Sequence: Synthetic oligonucleotide
  Antisense strand to SEQ ID NO: 1628763
uugagaggaagacuccagc

SEQ ID NO: 1628765 - RNA, 19 nt, Artificial Sequence
  Description of Artificial Sequence: Synthetic oligonucleotide
  Sense strand starting at position 1494 of SEQ ID NO: 1560848
ucgagaccucauuacccau

SEQ ID NO: 1628766 - RNA, 19 nt, Artificial Sequence
  Description of Artificial Sequence: Synthetic oligonucleotide
  Antisense strand to SEQ ID NO: 1628765
auggguaaugaggucucga

SEQ ID NO: 1628767 - RNA, 19 nt, Artificial Sequence
  Description of Artificial Sequence: Synthetic oligonucleotide
  Sense strand starting at position 1571 of SEQ ID NO: 1560848
cuucucgaagucuaggaau

SEQ ID NO: 1628768 - RNA, 19 nt, Artificial Sequence
  Description of Artificial Sequence: Synthetic oligonucleotide
  Antisense strand to SEQ ID NO: 1628767
auuccuagacuucgagaag

SEQ ID NO: 1628769 - RNA, 19 nt, Artificial Sequence
  Description of Artificial Sequence: Synthetic oligonucleotide
  Sense strand starting at position 1573 of SEQ ID NO: 1560848
ucucgaagucuaggaaucu

SEQ ID NO: 1628770 - RNA, 19 nt, Artificial Sequence
  Description of Artificial Sequence: Synthetic oligonucleotide
  Antisense strand to SEQ ID NO: 1628769
agauuccuagacuucgaga

SEQ ID NO: 1628771 - RNA, 19 nt, Artificial Sequence
  Description of Artificial Sequence: Synthetic oligonucleotide
  Sense strand starting at position 1582 of SEQ ID NO: 1560848
cuaggaaucucccugucau

SEQ ID NO: 1628772 - RNA, 19 nt, Artificial Sequence
  Description of Artificial Sequence: Synthetic oligonucleotide
  Antisense strand to SEQ ID NO: 1628771
augacagggagauuccuag

SEQ ID NO: 1628773 - RNA, 19 nt, Artificial Sequence
  Description of Artificial Sequence: Synthetic oligonucleotide
  Sense strand starting at position 1786 of SEQ ID NO: 1560848
ccagaaagguuccucucaa

SEQ ID NO: 1628774 - RNA, 19 nt, Artificial Sequence
  Description of Artificial Sequence: Synthetic oligonucleotide
  Antisense strand to SEQ ID NO: 1628773
uugagaggaaccuuucugg

SEQ ID NO: 1628775 - RNA, 19 nt, Artificial Sequence
  Description of Artificial Sequence: Synthetic oligonucleotide
  Sense strand starting at position 1916 of SEQ ID NO: 1560848
guccacugacccgaaauau

SEQ ID NO: 1628776 - RNA, 19 nt, Artificial Sequence
  Description of Artificial Sequence: Synthetic oligonucleotide
  Antisense strand to SEQ ID NO: 1628775
auauuucgggucaguggac

SEQ ID NO: 1628777 - RNA, 19 nt, Artificial Sequence
  Description of Artificial Sequence: Synthetic oligonucleotide
  Sense strand starting at position 2008 of SEQ ID NO: 1560848
acagaagcucacugguguu

SEQ ID NO: 1628778 - RNA, 19 nt, Artificial Sequence
  Description of Artificial Sequence: Synthetic oligonucleotide
  Antisense strand to SEQ ID NO: 1628777
aacaccagugagcuucugu

SEQ ID NO: 1628779 - RNA, 19 nt, Artificial Sequence
  Description of Artificial Sequence: Synthetic oligonucleotide
  Sense strand starting at position 2468 of SEQ ID NO: 1560848
ccgaacuguccaggaguaa

SEQ ID NO: 1628780 - RNA, 19 nt, Artificial Sequence
  Description of Artificial Sequence: Synthetic oligonucleotide
  Antisense strand to SEQ ID NO: 1628779
uuacuccuggacaguucgg

SEQ ID NO: 1628781 - RNA, 19 nt, Artificial Sequence
  Description of Artificial Sequence: Synthetic oligonucleotide
  Sense strand starting at position 2469 of SEQ ID NO: 1560848
cgaacuguccaggaguaaa

SEQ ID NO: 1628782 - RNA, 19 nt, Artificial Sequence
  Description of Artificial Sequence: Synthetic oligonucleotide
  Antisense strand to SEQ ID NO: 1628781
uuuacuccuggacaguucg

SEQ ID NO: 1628783 - RNA, 19 nt, Artificial Sequence
  Description of Artificial Sequence: Synthetic oligonucleotide
  Sense strand starting at position 2623 of SEQ ID NO: 1560848
ggugaagaucggugucuga

SEQ ID NO: 1628784 - RNA, 19 nt, Artificial Sequence
  Description of Artificial Sequence: Synthetic oligonucleotide
  Antisense strand to SEQ ID NO: 1628783
ucagacaccgaucuucacc

SEQ ID NO: 1628785 - RNA, 19 nt, Artificial Sequence
  Description of Artificial Sequence: Synthetic oligonucleotide
  Sense strand starting at position 2626 of SEQ ID NO: 1560848
gaagaucggugucugaagu

SEQ ID NO: 1628786 - RNA, 19 nt, Artificial Sequence
  Description of Artificial Sequence: Synthetic oligonucleotide
  Antisense strand to SEQ ID NO: 1628785
acuucagacaccgaucuuc

SEQ ID NO: 1628787 - RNA, 19 nt, Artificial Sequence
  Description of Artificial Sequence: Synthetic oligonucleotide
  Sense strand starting at position 2627 of SEQ ID NO: 1560848
aagaucggugucugaagua

SEQ ID NO: 1628788 - RNA, 19 nt, Artificial Sequence
  Description of Artificial Sequence: Synthetic oligonucleotide
  Antisense strand to SEQ ID NO: 1628787
uacuucagacaccgaucuu

SEQ ID NO: 1628789 - RNA, 19 nt, Artificial Sequence
  Description of Artificial Sequence: Synthetic oligonucleotide
  Sense strand starting at position 2640 of SEQ ID NO: 1560848
gaaguaaaggcuugcuuac

SEQ ID NO: 1628790 - RNA, 19 nt, Artificial Sequence
  Description of Artificial Sequence: Synthetic oligonucleotide
  Antisense strand to SEQ ID NO: 1628789
guaagcaagccuuuacuuc

SEQ ID NO: 1628791 - RNA, 19 nt, Artificial Sequence
  Description of Artificial Sequence: Synthetic oligonucleotide
  Sense strand starting at position 2666 of SEQ ID NO: 1560848
ggguucugguuucugggau

SEQ ID NO: 1628792 - RNA, 19 nt, Artificial Sequence
  Description of Artificial Sequence: Synthetic oligonucleotide
  Antisense strand to SEQ ID NO: 1628791
aucccagaaaccagaaccc

SEQ ID NO: 1628793 - RNA, 19 nt, Artificial Sequence
  Description of Artificial Sequence: Synthetic oligonucleotide
  Sense strand starting at position 2758 of SEQ ID NO: 1560848
cuagaagaacccuggugau

SEQ ID NO: 1628794 - RNA, 19 nt, Artificial Sequence
  Description of Artificial Sequence: Synthetic oligonucleotide
  Antisense strand to SEQ ID NO: 1628793
aucaccaggguucuucuag

SEQ ID NO: 1628795 - RNA, 19 nt, Artificial Sequence
  Description of Artificial Sequence: Synthetic oligonucleotide
  Sense strand starting at position 2790 of SEQ ID NO: 1560848
ggcgauggccagugaaaua

SEQ ID NO: 1628796 - RNA, 19 nt, Artificial Sequence
  Description of Artificial Sequence: Synthetic oligonucleotide
  Antisense strand to SEQ ID NO: 1628795
uauuucacuggccaucgcc

SEQ ID NO: 1628797 - RNA, 19 nt, Artificial Sequence
  Description of Artificial Sequence: Synthetic oligonucleotide
  Sense strand starting at position 2806 of SEQ ID NO: 1560848
auacuuacucucuggagua

SEQ ID NO: 1628798 - RNA, 19 nt, Artificial Sequence
  Description of Artificial Sequence: Synthetic oligonucleotide
  Antisense strand to SEQ ID NO: 1628797
uacuccagagaguaaguau

SEQ ID NO: 1628799 - RNA, 19 nt, Artificial Sequence
  Description of Artificial Sequence: Synthetic oligonucleotide
  Sense strand starting at position 2819 of SEQ ID NO: 1560848
ggaguagaggcgugacauc

SEQ ID NO: 1628800 - RNA, 19 nt, Artificial Sequence
  Description of Artificial Sequence: Synthetic oligonucleotide
  Antisense strand to SEQ ID NO: 1628799
gaugucacgccucuacucc

SEQ ID NO: 1628801 - RNA, 19 nt, Artificial Sequence
  Description of Artificial Sequence: Synthetic oligonucleotide
  Sense strand starting at position 2872 of SEQ ID NO: 1560848
uggcuucugguguauaacu

SEQ ID NO: 1628802 - RNA, 19 nt, Artificial Sequence
  Description of Artificial Sequence: Synthetic oligonucleotide
  Antisense strand to SEQ ID NO: 1628801
aguuauacaccagaagcca

SEQ ID NO: 1628803 - RNA, 19 nt, Artificial Sequence
  Description of Artificial Sequence: Synthetic oligonucleotide
  Sense strand starting at position 2899 of SEQ ID NO: 1560848
gagauaaaggccuagcuuu

SEQ ID NO: 1628804 - RNA, 19 nt, Artificial Sequence
  Description of Artificial Sequence: Synthetic oligonucleotide
  Antisense strand to SEQ ID NO: 1628803
aaagcuaggccuuuaucuc

SEQ ID NO: 1628805 - RNA, 19 nt, Artificial Sequence
  Description of Artificial Sequence: Synthetic oligonucleotide
  Sense strand starting at position 3158 of SEQ ID NO: 1560848
gggccuugguaucuaagga

SEQ ID NO: 1628806 - RNA, 19 nt, Artificial Sequence
  Description of Artificial Sequence: Synthetic oligonucleotide
  Antisense strand to SEQ ID NO: 1628805
uccuuagauaccaaggccc

SEQ ID NO: 1628807 - RNA, 19 nt, Artificial Sequence
  Description of Artificial Sequence: Synthetic oligonucleotide
  Sense strand starting at position 3168 of SEQ ID NO: 1560848
aucuaaggagucugaccau

SEQ ID NO: 1628808 - RNA, 19 nt, Artificial Sequence
  Description of Artificial Sequence: Synthetic oligonucleotide
  Antisense strand to SEQ ID NO: 1628807
auggucagacuccuuagau

SEQ ID NO: 1628809 - RNA, 19 nt, Artificial Sequence
  Description of Artificial Sequence: Synthetic oligonucleotide
  Sense strand starting at position 3202 of SEQ ID NO: 1560848
aguggugaugcggacucau

SEQ ID NO: 1628810 - RNA, 19 nt, Artificial Sequence
  Description of Artificial Sequence: Synthetic oligonucleotide
  Antisense strand to SEQ ID NO: 1628809
augaguccgcaucaccacu

SEQ ID NO: 1628811 - RNA, 19 nt, Artificial Sequence
  Description of Artificial Sequence: Synthetic oligonucleotide
  Sense strand starting at position 3231 of SEQ ID NO: 1560848
gagcccuaaugacugagaa

SEQ ID NO: 1628812 - RNA, 19 nt, Artificial Sequence
  Description of Artificial Sequence: Synthetic oligonucleotide
  Antisense strand to SEQ ID NO: 1628811
uucucagucauuagggcuc

SEQ ID NO: 1628813 - RNA, 19 nt, Artificial Sequence
  Description of Artificial Sequence: Synthetic oligonucleotide
  Sense strand starting at position 3233 of SEQ ID NO: 1560848
gcccuaaugacugagaagu

SEQ ID NO: 1628814 - RNA, 19 nt, Artificial Sequence
  Description of Artificial Sequence: Synthetic oligonucleotide
  Antisense strand to SEQ ID NO: 1628813
acuucucagucauuagggc

SEQ ID NO: 1628815 - RNA, 19 nt, Artificial Sequence
  Description of Artificial Sequence: Synthetic oligonucleotide
  Sense strand starting at position 3244 of SEQ ID NO: 1560848
ugagaagucugaugauuug

SEQ ID NO: 1628816 - RNA, 19 nt, Artificial Sequence
  Description of Artificial Sequence: Synthetic oligonucleotide
  Antisense strand to SEQ ID NO: 1628815
caaaucaucagacuucuca

SEQ ID NO: 1628817 - RNA, 19 nt, Artificial Sequence
  Description of Artificial Sequence: Synthetic oligonucleotide
  Sense strand starting at position 3372 of SEQ ID NO: 1560848
gguggugggaucuagguaa

SEQ ID NO: 1628818 - RNA, 19 nt, Artificial Sequence
  Description of Artificial Sequence: Synthetic oligonucleotide
  Antisense strand to SEQ ID NO: 1628817
uuaccuagaucccaccacc

SEQ ID NO: 1628819 - RNA, 19 nt, Artificial Sequence
  Description of Artificial Sequence: Synthetic oligonucleotide
  Sense strand starting at position 3525 of SEQ ID NO: 1560848
ggaaccaauucucugucaa

SEQ ID NO: 1628820 - RNA, 19 nt, Artificial Sequence
  Description of Artificial Sequence: Synthetic oligonucleotide
  Antisense strand to SEQ ID NO: 1628819
uugacagagaauugguucc

SEQ ID NO: 1628821 - RNA, 19 nt, Artificial Sequence
  Description of Artificial Sequence: Synthetic oligonucleotide
  Sense strand starting at position 3591 of SEQ ID NO: 1560848
ggcucaaucagcuauacga

SEQ ID NO: 1628822 - RNA, 19 nt, Artificial Sequence
  Description of Artificial Sequence: Synthetic oligonucleotide
  Antisense strand to SEQ ID NO: 1628821
ucguauagcugauugagcc

SEQ ID NO: 1628823 - RNA, 19 nt, Artificial Sequence
  Description of Artificial Sequence: Synthetic oligonucleotide
  Sense strand starting at position 3723 of SEQ ID NO: 1560848
cgggugauugcuucguguu

SEQ ID NO: 1628824 - RNA, 19 nt, Artificial Sequence
  Description of Artificial Sequence: Synthetic oligonucleotide
  Antisense strand to SEQ ID NO: 1628823
aacacgaagcaaucacccg

SEQ ID NO: 1628825 - RNA, 19 nt, Artificial Sequence
  Description of Artificial Sequence: Synthetic oligonucleotide
  Sense strand starting at position 3804 of SEQ ID NO: 1560848
ccugucauugcugagacau

SEQ ID NO: 1628826 - RNA, 19 nt, Artificial Sequence
  Description of Artificial Sequence: Synthetic oligonucleotide
  Antisense strand to SEQ ID NO: 1628825
augucucagcaaugacagg

SEQ ID NO: 1628827 - RNA, 19 nt, Artificial Sequence
  Description of Artificial Sequence: Synthetic oligonucleotide
  Sense strand starting at position 238 of SEQ ID NO: 1560849
gaccaaagccuuuggaugu

SEQ ID NO: 1628828 - RNA, 19 nt, Artificial Sequence
  Description of Artificial Sequence: Synthetic oligonucleotide
  Antisense strand to SEQ ID NO: 1628827
acauccaaaggcuuugguc

SEQ ID NO: 1628829 - RNA, 19 nt, Artificial Sequence
  Description of Artificial Sequence: Synthetic oligonucleotide
  Sense strand starting at position 283 of SEQ ID NO: 1560849
gccucaacccagugaacaa

SEQ ID NO: 1628830 - RNA, 19 nt, Artificial Sequence
  Description of Artificial Sequence: Synthetic oligonucleotide
  Antisense strand to SEQ ID NO: 1628829
uuguucacuggguugaggc

SEQ ID NO: 1628831 - RNA, 19 nt, Artificial Sequence
  Description of Artificial Sequence: Synthetic oligonucleotide
  Sense strand starting at position 301 of SEQ ID NO: 1560849
acaggauaauuugguagaa

SEQ ID NO: 1628832 - RNA, 19 nt, Artificial Sequence
  Description of Artificial Sequence: Synthetic oligonucleotide
  Antisense strand to SEQ ID NO: 1628831
uucuaccaaauuauccugu

SEQ ID NO: 1628833 - RNA, 19 nt, Artificial Sequence
  Description of Artificial Sequence: Synthetic oligonucleotide
  Sense strand starting at position 303 of SEQ ID NO: 1560849
aggauaauuugguagaauu

SEQ ID NO: 1628834 - RNA, 19 nt, Artificial Sequence
  Description of Artificial Sequence: Synthetic oligonucleotide
  Antisense strand to SEQ ID NO: 1628833
aauucuaccaaauuauccu

SEQ ID NO: 1628835 - RNA, 19 nt, Artificial Sequence
  Description of Artificial Sequence: Synthetic oligonucleotide
  Sense strand starting at position 316 of SEQ ID NO: 1560849
agaauuacuuuagagagaa

SEQ ID NO: 1628836 - RNA, 19 nt, Artificial Sequence
  Description of Artificial Sequence: Synthetic oligonucleotide
  Antisense strand to SEQ ID NO: 1628835
uucucucuaaaguaauucu

SEQ ID NO: 1628837 - RNA, 19 nt, Artificial Sequence
  Description of Artificial Sequence: Synthetic oligonucleotide
  Sense strand starting at position 712 of SEQ ID NO: 1560849
ucagaaauugcuuguuccu

SEQ ID NO: 1628838 - RNA, 19 nt, Artificial Sequence
  Description of Artificial Sequence: Synthetic oligonucleotide
  Antisense strand to SEQ ID NO: 1628837
aggaacaagcaauuucuga

SEQ ID NO: 1628839 - RNA, 19 nt, Artificial Sequence
  Description of Artificial Sequence: Synthetic oligonucleotide
  Sense strand starting at position 899 of SEQ ID NO: 1560849
cugaaugucuaccuauaag

SEQ ID NO: 1628840 - RNA, 19 nt, Artificial Sequence
  Description of Artificial Sequence: Synthetic oligonucleotide
  Antisense strand to SEQ ID NO: 1628839
cuuauagguagacauucag

SEQ ID NO: 1628841 - RNA, 19 nt, Artificial Sequence
  Description of Artificial Sequence: Synthetic oligonucleotide
  Sense strand starting at position 989 of SEQ ID NO: 1560849
gggacuugauuggaacuaa

SEQ ID NO: 1628842 - RNA, 19 nt, Artificial Sequence
  Description of Artificial Sequence: Synthetic oligonucleotide
  Antisense strand to SEQ ID NO: 1628841
uuaguuccaaucaaguccc

SEQ ID NO: 1628843 - RNA, 19 nt, Artificial Sequence
  Description of Artificial Sequence: Synthetic oligonucleotide
  Sense strand starting at position 1027 of SEQ ID NO: 1560849
agagucuugcaauauccua

SEQ ID NO: 1628844 - RNA, 19 nt, Artificial Sequence
  Description of Artificial Sequence: Synthetic oligonucleotide
  Antisense strand to SEQ ID NO: 1628843
uaggauauugcaagacucu

SEQ ID NO: 1628845 - RNA, 19 nt, Artificial Sequence
  Description of Artificial Sequence: Synthetic oligonucleotide
  Sense strand starting at position 1121 of SEQ ID NO: 1560849
augggaaucuguuugguau

SEQ ID NO: 1628846 - RNA, 19 nt, Artificial Sequence
  Description of Artificial Sequence: Synthetic oligonucleotide
  Antisense strand to SEQ ID NO: 1628845
auaccaaacagauucccau

SEQ ID NO: 1628847 - RNA, 19 nt, Artificial Sequence
  Description of Artificial Sequence: Synthetic oligonucleotide
  Sense strand starting at position 1122 of SEQ ID NO: 1560849
ugggaaucuguuugguaug

SEQ ID NO: 1628848 - RNA, 19 nt, Artificial Sequence
  Description of Artificial Sequence: Synthetic oligonucleotide
  Antisense strand to SEQ ID NO: 1628847
cauaccaaacagauuccca

SEQ ID NO: 1628849 - RNA, 19 nt, Artificial Sequence
  Description of Artificial Sequence: Synthetic oligonucleotide
  Sense strand starting at position 1124 of SEQ ID NO: 1560849
ggaaucuguuugguaugua

SEQ ID NO: 1628850 - RNA, 19 nt, Artificial Sequence
  Description of Artificial Sequence: Synthetic oligonucleotide
  Antisense strand to SEQ ID NO: 1628849
uacauaccaaacagauucc

SEQ ID NO: 1628851 - RNA, 19 nt, Artificial Sequence
  Description of Artificial Sequence: Synthetic oligonucleotide
  Sense strand starting at position 1127 of SEQ ID NO: 1560849
aucuguuugguauguaaac

SEQ ID NO: 1628852 - RNA, 19 nt, Artificial Sequence
  Description of Artificial Sequence: Synthetic oligonucleotide
  Antisense strand to SEQ ID NO: 1628851
guuuacauaccaaacagau

SEQ ID NO: 1628853 - RNA, 19 nt, Artificial Sequence
  Description of Artificial Sequence: Synthetic oligonucleotide
  Sense strand starting at position 1252 of SEQ ID NO: 1560849
uggucuagguuggcugaaa

SEQ ID NO: 1628854 - RNA, 19 nt, Artificial Sequence
  Description of Artificial Sequence: Synthetic oligonucleotide
  Antisense strand to SEQ ID NO: 1628853
uuucagccaaccuagacca

SEQ ID NO: 1628855 - RNA, 19 nt, Artificial Sequence
  Description of Artificial Sequence: Synthetic oligonucleotide
  Sense strand starting at position 1291 of SEQ ID NO: 1560849
agggaaucugguuggaagu

SEQ ID NO: 1628856 - RNA, 19 nt, Artificial Sequence
  Description of Artificial Sequence: Synthetic oligonucleotide
  Antisense strand to SEQ ID NO: 1628855
acuuccaaccagauucccu

SEQ ID NO: 1628857 - RNA, 19 nt, Artificial Sequence
  Description of Artificial Sequence: Synthetic oligonucleotide
  Sense strand starting at position 1427 of SEQ ID NO: 1560849
ugucaauguccagacaggu

SEQ ID NO: 1628858 - RNA, 19 nt, Artificial Sequence
  Description of Artificial Sequence: Synthetic oligonucleotide
  Antisense strand to SEQ ID NO: 1628857
accugucuggacauugaca

SEQ ID NO: 1628859 - RNA, 19 nt, Artificial Sequence
  Description of Artificial Sequence: Synthetic oligonucleotide
  Sense strand starting at position 2176 of SEQ ID NO: 1560849
ccuggaucauccucggagu

SEQ ID NO: 1628860 - RNA, 19 nt, Artificial Sequence
  Description of Artificial Sequence: Synthetic oligonucleotide
  Antisense strand to SEQ ID NO: 1628859
acuccgaggaugauccagg

SEQ ID NO: 1628861 - RNA, 19 nt, Artificial Sequence
  Description of Artificial Sequence: Synthetic oligonucleotide
  Sense strand starting at position 2177 of SEQ ID NO: 1560849
cuggaucauccucggaguu

SEQ ID NO: 1628862 - RNA, 19 nt, Artificial Sequence
  Description of Artificial Sequence: Synthetic oligonucleotide
  Antisense strand to SEQ ID NO: 1628861
aacuccgaggaugauccag

SEQ ID NO: 1628863 - RNA, 19 nt, Artificial Sequence
  Description of Artificial Sequence: Synthetic oligonucleotide
  Sense strand starting at position 2178 of SEQ ID NO: 1560849
uggaucauccucggaguuu

SEQ ID NO: 1628864 - RNA, 19 nt, Artificial Sequence
  Description of Artificial Sequence: Synthetic oligonucleotide
  Antisense strand to SEQ ID NO: 1628863
aaacuccgaggaugaucca

SEQ ID NO: 1628865 - RNA, 19 nt, Artificial Sequence
  Description of Artificial Sequence: Synthetic oligonucleotide
  Sense strand starting at position 2382 of SEQ ID NO: 1560849
gcccguagugagcaggaau

SEQ ID NO: 1628866 - RNA, 19 nt, Artificial Sequence
  Description of Artificial Sequence: Synthetic oligonucleotide
  Antisense strand to SEQ ID NO: 1628865
auuccugcucacuacgggc

SEQ ID NO: 1628867 - RNA, 19 nt, Artificial Sequence
  Description of Artificial Sequence: Synthetic oligonucleotide
  Sense strand starting at position 2397 of SEQ ID NO: 1560849
gaaugacugcuguaauauc

SEQ ID NO: 1628868 - RNA, 19 nt, Artificial Sequence
  Description of Artificial Sequence: Synthetic oligonucleotide
  Antisense strand to SEQ ID NO: 1628867
gauauuacagcagucauuc

SEQ ID NO: 1628869 - RNA, 19 nt, Artificial Sequence
  Description of Artificial Sequence: Synthetic oligonucleotide
  Sense strand starting at position 2426 of SEQ ID NO: 1560849
aucuuucgacguuaaggaa

SEQ ID NO: 1628870 - RNA, 19 nt, Artificial Sequence
  Description of Artificial Sequence: Synthetic oligonucleotide
  Antisense strand to SEQ ID NO: 1628869
uuccuuaacgucgaaagau

SEQ ID NO: 1628871 - RNA, 19 nt, Artificial Sequence
  Description of Artificial Sequence: Synthetic oligonucleotide
  Sense strand starting at position 2442 of SEQ ID NO: 1560849
gaaagacguuaucuuugga

SEQ ID NO: 1628872 - RNA, 19 nt, Artificial Sequence
  Description of Artificial Sequence: Synthetic oligonucleotide
  Antisense strand to SEQ ID NO: 1628871
uccaaagauaacgucuuuc

SEQ ID NO: 1628873 - RNA, 19 nt, Artificial Sequence
  Description of Artificial Sequence: Synthetic oligonucleotide
  Sense strand starting at position 2449 of SEQ ID NO: 1560849
guuaucuuuggacguuaag

SEQ ID NO: 1628874 - RNA, 19 nt, Artificial Sequence
  Description of Artificial Sequence: Synthetic oligonucleotide
  Antisense strand to SEQ ID NO: 1628873
cuuaacguccaaagauaac

SEQ ID NO: 1628875 - RNA, 19 nt, Artificial Sequence
  Description of Artificial Sequence: Synthetic oligonucleotide
  Sense strand starting at position 2452 of SEQ ID NO: 1560849
aucuuuggacguuaagaau

SEQ ID NO: 1628876 - RNA, 19 nt, Artificial Sequence
  Description of Artificial Sequence: Synthetic oligonucleotide
  Antisense strand to SEQ ID NO: 1628875
auucuuaacguccaaagau

SEQ ID NO: 1628877 - RNA, 19 nt, Artificial Sequence
  Description of Artificial Sequence: Synthetic oligonucleotide
  Sense strand starting at position 2461 of SEQ ID NO: 1560849
cguuaagaauuguucuaga

SEQ ID NO: 1628878 - RNA, 19 nt, Artificial Sequence
  Description of Artificial Sequence: Synthetic oligonucleotide
  Antisense strand to SEQ ID NO: 1628877
ucuagaacaauucuuaacg

SEQ ID NO: 1628879 - RNA, 19 nt, Artificial Sequence
  Description of Artificial Sequence: Synthetic oligonucleotide
  Sense strand starting at position 2528 of SEQ ID NO: 1560849
gcacauguuggacaaccau

SEQ ID NO: 1628880 - RNA, 19 nt, Artificial Sequence
  Description of Artificial Sequence: Synthetic oligonucleotide
  Antisense strand to SEQ ID NO: 1628879
augguuguccaacaugugc

SEQ ID NO: 1628881 - RNA, 19 nt, Artificial Sequence
  Description of Artificial Sequence: Synthetic oligonucleotide
  Sense strand starting at position 2629 of SEQ ID NO: 1560849
gcgaccuugguguaggauu

SEQ ID NO: 1628882 - RNA, 19 nt, Artificial Sequence
  Description of Artificial Sequence: Synthetic oligonucleotide
  Antisense strand to SEQ ID NO: 1628881
aauccuacaccaaggucgc

SEQ ID NO: 1628883 - RNA, 19 nt, Artificial Sequence
  Description of Artificial Sequence: Synthetic oligonucleotide
  Sense strand starting at position 2631 of SEQ ID NO: 1560849
gaccuugguguaggauuau

SEQ ID NO: 1628884 - RNA, 19 nt, Artificial Sequence
  Description of Artificial Sequence: Synthetic oligonucleotide
  Antisense strand to SEQ ID NO: 1628883
auaauccuacaccaagguc

SEQ ID NO: 1628885 - RNA, 19 nt, Artificial Sequence
  Description of Artificial Sequence: Synthetic oligonucleotide
  Sense strand starting at position 2654 of SEQ ID NO: 1560849
agcugagaucaaugaagcu

SEQ ID NO: 1628886 - RNA, 19 nt, Artificial Sequence
  Description of Artificial Sequence: Synthetic oligonucleotide
  Antisense strand to SEQ ID NO: 1628885
agcuucauugaucucagcu

SEQ ID NO: 1628887 - RNA, 19 nt, Artificial Sequence
  Description of Artificial Sequence: Synthetic oligonucleotide
  Sense strand starting at position 2688 of SEQ ID NO: 1560849
cucuguucuucccugauuu

SEQ ID NO: 1628888 - RNA, 19 nt, Artificial Sequence
  Description of Artificial Sequence: Synthetic oligonucleotide
  Antisense strand to SEQ ID NO: 1628887
aaaucagggaagaacagag

SEQ ID NO: 1628889 - RNA, 19 nt, Artificial Sequence
  Description of Artificial Sequence: Synthetic oligonucleotide
  Sense strand starting at position 2689 of SEQ ID NO: 1560849
ucuguucuucccugauuug

SEQ ID NO: 1628890 - RNA, 19 nt, Artificial Sequence
  Description of Artificial Sequence: Synthetic oligonucleotide
  Antisense strand to SEQ ID NO: 1628889
caaaucagggaagaacaga

SEQ ID NO: 1628891 - RNA, 19 nt, Artificial Sequence
  Description of Artificial Sequence: Synthetic oligonucleotide
  Sense strand starting at position 2791 of SEQ ID NO: 1560849
uuagacucuugucuggaga

SEQ ID NO: 1628892 - RNA, 19 nt, Artificial Sequence
  Description of Artificial Sequence: Synthetic oligonucleotide
  Antisense strand to SEQ ID NO: 1628891
ucuccagacaagagucuaa

SEQ ID NO: 1628893 - RNA, 19 nt, Artificial Sequence
  Description of Artificial Sequence: Synthetic oligonucleotide
  Sense strand starting at position 2794 of SEQ ID NO: 1560849
gacucuugucuggagacgu

SEQ ID NO: 1628894 - RNA, 19 nt, Artificial Sequence
  Description of Artificial Sequence: Synthetic oligonucleotide
  Antisense strand to SEQ ID NO: 1628893
acgucuccagacaagaguc

SEQ ID NO: 1628895 - RNA, 19 nt, Artificial Sequence
  Description of Artificial Sequence: Synthetic oligonucleotide
  Sense strand starting at position 3168 of SEQ ID NO: 1560849
auauguugaaggugcuaua

SEQ ID NO: 1628896 - RNA, 19 nt, Artificial Sequence
  Description of Artificial Sequence: Synthetic oligonucleotide
  Antisense strand to SEQ ID NO: 1628895
uauagcaccuucaacauau

SEQ ID NO: 1628897 - RNA, 19 nt, Artificial Sequence
  Description of Artificial Sequence: Synthetic oligonucleotide
  Sense strand starting at position 3179 of SEQ ID NO: 1560849
gugcuauauaagcaggagu

SEQ ID NO: 1628898 - RNA, 19 nt, Artificial Sequence
  Description of Artificial Sequence: Synthetic oligonucleotide
  Antisense strand to SEQ ID NO: 1628897
acuccugcuuauauagcac

SEQ ID NO: 1628899 - RNA, 19 nt, Artificial Sequence
  Description of Artificial Sequence: Synthetic oligonucleotide
  Sense strand starting at position 3182 of SEQ ID NO: 1560849
cuauauaagcaggaguuau

SEQ ID NO: 1628900 - RNA, 19 nt, Artificial Sequence
  Description of Artificial Sequence: Synthetic oligonucleotide
  Antisense strand to SEQ ID NO: 1628899
auaacuccugcuuauauag

SEQ ID NO: 1628901 - RNA, 19 nt, Artificial Sequence
  Description of Artificial Sequence: Synthetic oligonucleotide
  Sense strand starting at position 3190 of SEQ ID NO: 1560849
gcaggaguuauauaagcua

SEQ ID NO: 1628902 - RNA, 19 nt, Artificial Sequence
  Description of Artificial Sequence: Synthetic oligonucleotide
  Antisense strand to SEQ ID NO: 1628901
uagcuuauauaacuccugc

SEQ ID NO: 1628903 - RNA, 19 nt, Artificial Sequence
  Description of Artificial Sequence: Synthetic oligonucleotide
  Sense strand starting at position 3193 of SEQ ID NO: 1560849
ggaguuauauaagcuauau

SEQ ID NO: 1628904 - RNA, 19 nt, Artificial Sequence
  Description of Artificial Sequence: Synthetic oligonucleotide
  Antisense strand to SEQ ID NO: 1628903
auauagcuuauauaacucc

SEQ ID NO: 1628905 - RNA, 19 nt, Artificial Sequence
  Description of Artificial Sequence: Synthetic oligonucleotide
  Sense strand starting at position 3658 of SEQ ID NO: 1560849
gaaccaaauuuguagaugu

SEQ ID NO: 1628906 - RNA, 19 nt, Artificial Sequence
  Description of Artificial Sequence: Synthetic oligonucleotide
  Antisense strand to SEQ ID NO: 1628905
acaucuacaaauuugguuc

SEQ ID NO: 1628907 - RNA, 19 nt, Artificial Sequence
  Description of Artificial Sequence: Synthetic oligonucleotide
  Sense strand starting at position 350 of SEQ ID NO: 1560850
ucagaaauugcuuguuccu

SEQ ID NO: 1628908 - RNA, 19 nt, Artificial Sequence
  Description of Artificial Sequence: Synthetic oligonucleotide
  Antisense strand to SEQ ID NO: 1628907
aggaacaagcaauuucuga

SEQ ID NO: 1628909 - RNA, 19 nt, Artificial Sequence
  Description of Artificial Sequence: Synthetic oligonucleotide
  Sense strand starting at position 537 of SEQ ID NO: 1560850
cugaaugucuaccuauaag

SEQ ID NO: 1628910 - RNA, 19 nt, Artificial Sequence
  Description of Artificial Sequence: Synthetic oligonucleotide
  Antisense strand to SEQ ID NO: 1628909
cuuauagguagacauucag

SEQ ID NO: 1628911 - RNA, 19 nt, Artificial Sequence
  Description of Artificial Sequence: Synthetic oligonucleotide
  Sense strand starting at position 627 of SEQ ID NO: 1560850
gggacuugauuggaacuaa

SEQ ID NO: 1628912 - RNA, 19 nt, Artificial Sequence
  Description of Artificial Sequence: Synthetic oligonucleotide
  Antisense strand to SEQ ID NO: 1628911
uuaguuccaaucaaguccc

SEQ ID NO: 1628913 - RNA, 19 nt, Artificial Sequence
  Description of Artificial Sequence: Synthetic oligonucleotide
  Sense strand starting at position 665 of SEQ ID NO: 1560850
agagucuugcaauauccua

SEQ ID NO: 1628914 - RNA, 19 nt, Artificial Sequence
  Description of Artificial Sequence: Synthetic oligonucleotide
  Antisense strand to SEQ ID NO: 1628913
uaggauauugcaagacucu

SEQ ID NO: 1628915 - RNA, 19 nt, Artificial Sequence
  Description of Artificial Sequence: Synthetic oligonucleotide
  Sense strand starting at position 759 of SEQ ID NO: 1560850
augggaaucuguuugguau

SEQ ID NO: 1628916 - RNA, 19 nt, Artificial Sequence
  Description of Artificial Sequence: Synthetic oligonucleotide
  Antisense strand to SEQ ID NO: 1628915
auaccaaacagauucccau

SEQ ID NO: 1628917 - RNA, 19 nt, Artificial Sequence
  Description of Artificial Sequence: Synthetic oligonucleotide
  Sense strand starting at position 760 of SEQ ID NO: 1560850
ugggaaucuguuugguaug

SEQ ID NO: 1628918 - RNA, 19 nt, Artificial Sequence
  Description of Artificial Sequence: Synthetic oligonucleotide
  Antisense strand to SEQ ID NO: 1628917
cauaccaaacagauuccca

SEQ ID NO: 1628919 - RNA, 19 nt, Artificial Sequence
  Description of Artificial Sequence: Synthetic oligonucleotide
  Sense strand starting at position 762 of SEQ ID NO: 1560850
ggaaucuguuugguaugua

SEQ ID NO: 1628920 - RNA, 19 nt, Artificial Sequence
  Description of Artificial Sequence: Synthetic oligonucleotide
  Antisense strand to SEQ ID NO: 1628919
uacauaccaaacagauucc

SEQ ID NO: 1628921 - RNA, 19 nt, Artificial Sequence
  Description of Artificial Sequence: Synthetic oligonucleotide
  Sense strand starting at position 765 of SEQ ID NO: 1560850
aucuguuugguauguaaac

SEQ ID NO: 1628922 - RNA, 19 nt, Artificial Sequence
  Description of Artificial Sequence: Synthetic oligonucleotide
  Antisense strand to SEQ ID NO: 1628921
guuuacauaccaaacagau

SEQ ID NO: 1628923 - RNA, 19 nt, Artificial Sequence
  Description of Artificial Sequence: Synthetic oligonucleotide
  Sense strand starting at position 767 of SEQ ID NO: 1560850
cuguuugguauguaaacgu

SEQ ID NO: 1628924 - RNA, 19 nt, Artificial Sequence
  Description of Artificial Sequence: Synthetic oligonucleotide
  Antisense strand to SEQ ID NO: 1628923
acguuuacauaccaaacag

SEQ ID NO: 1628925 - RNA, 19 nt, Artificial Sequence
  Description of Artificial Sequence: Synthetic oligonucleotide
  Sense strand starting at position 890 of SEQ ID NO: 1560850
uggucuagguuggcugaaa

SEQ ID NO: 1628926 - RNA, 19 nt, Artificial Sequence
  Description of Artificial Sequence: Synthetic oligonucleotide
  Antisense strand to SEQ ID NO: 1628925
uuucagccaaccuagacca

SEQ ID NO: 1628927 - RNA, 19 nt, Artificial Sequence
  Description of Artificial Sequence: Synthetic oligonucleotide
  Sense strand starting at position 929 of SEQ ID NO: 1560850
agggaaucugguuggaagu

SEQ ID NO: 1628928 - RNA, 19 nt, Artificial Sequence
  Description of Artificial Sequence: Synthetic oligonucleotide
  Antisense strand to SEQ ID NO: 1628927
acuuccaaccagauucccu

SEQ ID NO: 1628929 - RNA, 19 nt, Artificial Sequence
  Description of Artificial Sequence: Synthetic oligonucleotide
  Sense strand starting at position 931 of SEQ ID NO: 1560850
ggaaucugguuggaaguga

SEQ ID NO: 1628930 - RNA, 19 nt, Artificial Sequence
  Description of Artificial Sequence: Synthetic oligonucleotide
  Antisense strand to SEQ ID NO: 1628929
ucacuuccaaccagauucc

SEQ ID NO: 1628931 - RNA, 19 nt, Artificial Sequence
  Description of Artificial Sequence: Synthetic oligonucleotide
  Sense strand starting at position 1062 of SEQ ID NO: 1560850
gugugucaauguccagaca

SEQ ID NO: 1628932 - RNA, 19 nt, Artificial Sequence
  Description of Artificial Sequence: Synthetic oligonucleotide
  Antisense strand to SEQ ID NO: 1628931
ugucuggacauugacacac

SEQ ID NO: 1628933 - RNA, 19 nt, Artificial Sequence
  Description of Artificial Sequence: Synthetic oligonucleotide
  Sense strand starting at position 1065 of SEQ ID NO: 1560850
ugucaauguccagacaggu

SEQ ID NO: 1628934 - RNA, 19 nt, Artificial Sequence
  Description of Artificial Sequence: Synthetic oligonucleotide
  Antisense strand to SEQ ID NO: 1628933
accugucuggacauugaca

SEQ ID NO: 1628935 - RNA, 19 nt, Artificial Sequence
  Description of Artificial Sequence: Synthetic oligonucleotide
  Sense strand starting at position 1814 of SEQ ID NO: 1560850
ccuggaucauccucggagu

SEQ ID NO: 1628936 - RNA, 19 nt, Artificial Sequence
  Description of Artificial Sequence: Synthetic oligonucleotide
  Antisense strand to SEQ ID NO: 1628935
acuccgaggaugauccagg

SEQ ID NO: 1628937 - RNA, 19 nt, Artificial Sequence
  Description of Artificial Sequence: Synthetic oligonucleotide
  Sense strand starting at position 1815 of SEQ ID NO: 1560850
cuggaucauccucggaguu

SEQ ID NO: 1628938 - RNA, 19 nt, Artificial Sequence
  Description of Artificial Sequence: Synthetic oligonucleotide
  Antisense strand to SEQ ID NO: 1628937
aacuccgaggaugauccag

SEQ ID NO: 1628939 - RNA, 19 nt, Artificial Sequence
  Description of Artificial Sequence: Synthetic oligonucleotide
  Sense strand starting at position 1816 of SEQ ID NO: 1560850
uggaucauccucggaguuu

SEQ ID NO: 1628940 - RNA, 19 nt, Artificial Sequence
  Description of Artificial Sequence: Synthetic oligonucleotide
  Antisense strand to SEQ ID NO: 1628939
aaacuccgaggaugaucca

SEQ ID NO: 1628941 - RNA, 19 nt, Artificial Sequence
  Description of Artificial Sequence: Synthetic oligonucleotide
  Sense strand starting at position 2020 of SEQ ID NO: 1560850
gcccguagugagcaggaau

SEQ ID NO: 1628942 - RNA, 19 nt, Artificial Sequence
  Description of Artificial Sequence: Synthetic oligonucleotide
  Antisense strand to SEQ ID NO: 1628941
auuccugcucacuacgggc

SEQ ID NO: 1628943 - RNA, 19 nt, Artificial Sequence
  Description of Artificial Sequence: Synthetic oligonucleotide
  Sense strand starting at position 2035 of SEQ ID NO: 1560850
gaaugacugcuguaauauc

SEQ ID NO: 1628944 - RNA, 19 nt, Artificial Sequence
  Description of Artificial Sequence: Synthetic oligonucleotide
  Antisense strand to SEQ ID NO: 1628943
gauauuacagcagucauuc

SEQ ID NO: 1628945 - RNA, 19 nt, Artificial Sequence
  Description of Artificial Sequence: Synthetic oligonucleotide
  Sense strand starting at position 2061 of SEQ ID NO: 1560850
ggcaucuuucgacguuaag

SEQ ID NO: 1628946 - RNA, 19 nt, Artificial Sequence
  Description of Artificial Sequence: Synthetic oligonucleotide
  Antisense strand to SEQ ID NO: 1628945
cuuaacgucgaaagaugcc

SEQ ID NO: 1628947 - RNA, 19 nt, Artificial Sequence
  Description of Artificial Sequence: Synthetic oligonucleotide
  Sense strand starting at position 2064 of SEQ ID NO: 1560850
aucuuucgacguuaaggaa

SEQ ID NO: 1628948 - RNA, 19 nt, Artificial Sequence
  Description of Artificial Sequence: Synthetic oligonucleotide
  Antisense strand to SEQ ID NO: 1628947
uuccuuaacgucgaaagau

SEQ ID NO: 1628949 - RNA, 19 nt, Artificial Sequence
  Description of Artificial Sequence: Synthetic oligonucleotide
  Sense strand starting at position 2080 of SEQ ID NO: 1560850
gaaagacguuaucuuugga

SEQ ID NO: 1628950 - RNA, 19 nt, Artificial Sequence
  Description of Artificial Sequence: Synthetic oligonucleotide
  Antisense strand to SEQ ID NO: 1628949
uccaaagauaacgucuuuc

SEQ ID NO: 1628951 - RNA, 19 nt, Artificial Sequence
  Description of Artificial Sequence: Synthetic oligonucleotide
  Sense strand starting at position 2083 of SEQ ID NO: 1560850
agacguuaucuuuggacgu

SEQ ID NO: 1628952 - RNA, 19 nt, Artificial Sequence
  Description of Artificial Sequence: Synthetic oligonucleotide
  Antisense strand to SEQ ID NO: 1628951
acguccaaagauaacgucu

SEQ ID NO: 1628953 - RNA, 19 nt, Artificial Sequence
  Description of Artificial Sequence: Synthetic oligonucleotide
  Sense strand starting at position 2087 of SEQ ID NO: 1560850
guuaucuuuggacguuaag

SEQ ID NO: 1628954 - RNA, 19 nt, Artificial Sequence
  Description of Artificial Sequence: Synthetic oligonucleotide
  Antisense strand to SEQ ID NO: 1628953
cuuaacguccaaagauaac

SEQ ID NO: 1628955 - RNA, 19 nt, Artificial Sequence
  Description of Artificial Sequence: Synthetic oligonucleotide
  Sense strand starting at position 2090 of SEQ ID NO: 1560850
aucuuuggacguuaagaau

SEQ ID NO: 1628956 - RNA, 19 nt, Artificial Sequence
  Description of Artificial Sequence: Synthetic oligonucleotide
  Antisense strand to SEQ ID NO: 1628955
auucuuaacguccaaagau

SEQ ID NO: 1628957 - RNA, 19 nt, Artificial Sequence
  Description of Artificial Sequence: Synthetic oligonucleotide
  Sense strand starting at position 2099 of SEQ ID NO: 1560850
cguuaagaauuguucuaga

SEQ ID NO: 1628958 - RNA, 19 nt, Artificial Sequence
  Description of Artificial Sequence: Synthetic oligonucleotide
  Antisense strand to SEQ ID NO: 1628957
ucuagaacaauucuuaacg

SEQ ID NO: 1628959 - RNA, 19 nt, Artificial Sequence
  Description of Artificial Sequence: Synthetic oligonucleotide
  Sense strand starting at position 2166 of SEQ ID NO: 1560850
gcacauguuggacaaccau

SEQ ID NO: 1628960 - RNA, 19 nt, Artificial Sequence
  Description of Artificial Sequence: Synthetic oligonucleotide
  Antisense strand to SEQ ID NO: 1628959
augguuguccaacaugugc

SEQ ID NO: 1628961 - RNA, 19 nt, Artificial Sequence
  Description of Artificial Sequence: Synthetic oligonucleotide
  Sense strand starting at position 2267 of SEQ ID NO: 1560850
gcgaccuugguguaggauu

SEQ ID NO: 1628962 - RNA, 19 nt, Artificial Sequence
  Description of Artificial Sequence: Synthetic oligonucleotide
  Antisense strand to SEQ ID NO: 1628961
aauccuacaccaaggucgc

SEQ ID NO: 1628963 - RNA, 19 nt, Artificial Sequence
  Description of Artificial Sequence: Synthetic oligonucleotide
  Sense strand starting at position 2269 of SEQ ID NO: 1560850
gaccuugguguaggauuau

SEQ ID NO: 1628964 - RNA, 19 nt, Artificial Sequence
  Description of Artificial Sequence: Synthetic oligonucleotide
  Antisense strand to SEQ ID NO: 1628963
auaauccuacaccaagguc

SEQ ID NO: 1628965 - RNA, 19 nt, Artificial Sequence
  Description of Artificial Sequence: Synthetic oligonucleotide
  Sense strand starting at position 2292 of SEQ ID NO: 1560850
agcugagaucaaugaagcu

SEQ ID NO: 1628966 - RNA, 19 nt, Artificial Sequence
  Description of Artificial Sequence: Synthetic oligonucleotide
  Antisense strand to SEQ ID NO: 1628965
agcuucauugaucucagcu

SEQ ID NO: 1628967 - RNA, 19 nt, Artificial Sequence
  Description of Artificial Sequence: Synthetic oligonucleotide
  Sense strand starting at position 2326 of SEQ ID NO: 1560850
cucuguucuucccugauuu

SEQ ID NO: 1628968 - RNA, 19 nt, Artificial Sequence
  Description of Artificial Sequence: Synthetic oligonucleotide
  Antisense strand to SEQ ID NO: 1628967
aaaucagggaagaacagag

SEQ ID NO: 1628969 - RNA, 19 nt, Artificial Sequence
  Description of Artificial Sequence: Synthetic oligonucleotide
  Sense strand starting at position 2327 of SEQ ID NO: 1560850
ucuguucuucccugauuug

SEQ ID NO: 1628970 - RNA, 19 nt, Artificial Sequence
  Description of Artificial Sequence: Synthetic oligonucleotide
  Antisense strand to SEQ ID NO: 1628969
caaaucagggaagaacaga

SEQ ID NO: 1628971 - RNA, 19 nt, Artificial Sequence
  Description of Artificial Sequence: Synthetic oligonucleotide
  Sense strand starting at position 2429 of SEQ ID NO: 1560850
uuagacucuugucuggaga

SEQ ID NO: 1628972 - RNA, 19 nt, Artificial Sequence
  Description of Artificial Sequence: Synthetic oligonucleotide
  Antisense strand to SEQ ID NO: 1628971
ucuccagacaagagucuaa

SEQ ID NO: 1628973 - RNA, 19 nt, Artificial Sequence
  Description of Artificial Sequence: Synthetic oligonucleotide
  Sense strand starting at position 2432 of SEQ ID NO: 1560850
gacucuugucuggagacgu

SEQ ID NO: 1628974 - RNA, 19 nt, Artificial Sequence
  Description of Artificial Sequence: Synthetic oligonucleotide
  Antisense strand to SEQ ID NO: 1628973
acgucuccagacaagaguc

SEQ ID NO: 1628975 - RNA, 19 nt, Artificial Sequence
  Description of Artificial Sequence: Synthetic oligonucleotide
  Sense strand starting at position 2806 of SEQ ID NO: 1560850
auauguugaaggugcuaua

SEQ ID NO: 1628976 - RNA, 19 nt, Artificial Sequence
  Description of Artificial Sequence: Synthetic oligonucleotide
  Antisense strand to SEQ ID NO: 1628975
uauagcaccuucaacauau

SEQ ID NO: 1628977 - RNA, 19 nt, Artificial Sequence
  Description of Artificial Sequence: Synthetic oligonucleotide
  Sense strand starting at position 2817 of SEQ ID NO: 1560850
gugcuauauaagcaggagu

SEQ ID NO: 1628978 - RNA, 19 nt, Artificial Sequence
  Description of Artificial Sequence: Synthetic oligonucleotide
  Antisense strand to SEQ ID NO: 1628977
acuccugcuuauauagcac

SEQ ID NO: 1628979 - RNA, 19 nt, Artificial Sequence
  Description of Artificial Sequence: Synthetic oligonucleotide
  Sense strand starting at position 2820 of SEQ ID NO: 1560850
cuauauaagcaggaguuau

SEQ ID NO: 1628980 - RNA, 19 nt, Artificial Sequence
  Description of Artificial Sequence: Synthetic oligonucleotide
  Antisense strand to SEQ ID NO: 1628979
auaacuccugcuuauauag

SEQ ID NO: 1628981 - RNA, 19 nt, Artificial Sequence
  Description of Artificial Sequence: Synthetic oligonucleotide
  Sense strand starting at position 2828 of SEQ ID NO: 1560850
gcaggaguuauauaagcua

SEQ ID NO: 1628982 - RNA, 19 nt, Artificial Sequence
  Description of Artificial Sequence: Synthetic oligonucleotide
  Antisense strand to SEQ ID NO: 1628981
uagcuuauauaacuccugc

SEQ ID NO: 1628983 - RNA, 19 nt, Artificial Sequence
  Description of Artificial Sequence: Synthetic oligonucleotide
  Sense strand starting at position 2831 of SEQ ID NO: 1560850
ggaguuauauaagcuauau

SEQ ID NO: 1628984 - RNA, 19 nt, Artificial Sequence
  Description of Artificial Sequence: Synthetic oligonucleotide
  Antisense strand to SEQ ID NO: 1628983
auauagcuuauauaacucc

SEQ ID NO: 1628985 - RNA, 19 nt, Artificial Sequence
  Description of Artificial Sequence: Synthetic oligonucleotide
  Sense strand starting at position 3296 of SEQ ID NO: 1560850
gaaccaaauuuguagaugu

SEQ ID NO: 1628986 - RNA, 19 nt, Artificial Sequence
  Description of Artificial Sequence: Synthetic oligonucleotide
  Antisense strand to SEQ ID NO: 1628985
acaucuacaaauuugguuc

SEQ ID NO: 1628987 - RNA, 19 nt, Artificial Sequence
  Description of Artificial Sequence: Synthetic oligonucleotide
  Sense strand starting at position 557 of SEQ ID NO: 1560851
gcggaaguuaaauguguac

SEQ ID NO: 1628988 - RNA, 19 nt, Artificial Sequence
  Description of Artificial Sequence: Synthetic oligonucleotide
  Antisense strand to SEQ ID NO: 1628987
guacacauuuaacuuccgc

SEQ ID NO: 1628989 - RNA, 19 nt, Artificial Sequence
  Description of Artificial Sequence: Synthetic oligonucleotide
  Sense strand starting at position 560 of SEQ ID NO: 1560851
gaaguuaaauguguaccca

SEQ ID NO: 1628990 - RNA, 19 nt, Artificial Sequence
  Description of Artificial Sequence: Synthetic oligonucleotide
  Antisense strand to SEQ ID NO: 1628989
uggguacacauuuaacuuc

SEQ ID NO: 1628991 - RNA, 19 nt, Artificial Sequence
  Description of Artificial Sequence: Synthetic oligonucleotide
  Sense strand starting at position 676 of SEQ ID NO: 1560851
ccaucugugaaaugagugu

SEQ ID NO: 1628992 - RNA, 19 nt, Artificial Sequence
  Description of Artificial Sequence: Synthetic oligonucleotide
  Antisense strand to SEQ ID NO: 1628991
acacucauuucacagaugg

SEQ ID NO: 1628993 - RNA, 19 nt, Artificial Sequence
  Description of Artificial Sequence: Synthetic oligonucleotide
  Sense strand starting at position 680 of SEQ ID NO: 1560851
cugugaaaugaguguaaca

SEQ ID NO: 1628994 - RNA, 19 nt, Artificial Sequence
  Description of Artificial Sequence: Synthetic oligonucleotide
  Antisense strand to SEQ ID NO: 1628993
uguuacacucauuucacag

SEQ ID NO: 1628995 - RNA, 19 nt, Artificial Sequence
  Description of Artificial Sequence: Synthetic oligonucleotide
  Sense strand starting at position 682 of SEQ ID NO: 1560851
gugaaaugaguguaacauc

SEQ ID NO: 1628996 - RNA, 19 nt, Artificial Sequence
  Description of Artificial Sequence: Synthetic oligonucleotide
  Antisense strand to SEQ ID NO: 1628995
gauguuacacucauuucac

SEQ ID NO: 1628997 - RNA, 19 nt, Artificial Sequence
  Description of Artificial Sequence: Synthetic oligonucleotide
  Sense strand starting at position 710 of SEQ ID NO: 1560851
gugguacggacucaugaau

SEQ ID NO: 1628998 - RNA, 19 nt, Artificial Sequence
  Description of Artificial Sequence: Synthetic oligonucleotide
  Antisense strand to SEQ ID NO: 1628997
auucaugaguccguaccac

SEQ ID NO: 1628999 - RNA, 19 nt, Artificial Sequence
  Description of Artificial Sequence: Synthetic oligonucleotide
  Sense strand starting at position 717 of SEQ ID NO: 1560851
ggacucaugaauugaugca

SEQ ID NO: 1629000 - RNA, 19 nt, Artificial Sequence
  Description of Artificial Sequence: Synthetic oligonucleotide
  Antisense strand to SEQ ID NO: 1628999
ugcaucaauucaugagucc

SEQ ID NO: 1629001 - RNA, 19 nt, Artificial Sequence
  Description of Artificial Sequence: Synthetic oligonucleotide
  Sense strand starting at position 794 of SEQ ID NO: 1560851
ucaagauucuaugcaaaga

SEQ ID NO: 1629002 - RNA, 19 nt, Artificial Sequence
  Description of Artificial Sequence: Synthetic oligonucleotide
  Antisense strand to SEQ ID NO: 1629001
ucuuugcauagaaucuuga

SEQ ID NO: 1629003 - RNA, 19 nt, Artificial Sequence
  Description of Artificial Sequence: Synthetic oligonucleotide
  Sense strand starting at position 856 of SEQ ID NO: 1560851
acucaagugacuugagguu

SEQ ID NO: 1629004 - RNA, 19 nt, Artificial Sequence
  Description of Artificial Sequence: Synthetic oligonucleotide
  Antisense strand to SEQ ID NO: 1629003
aaccucaagucacuugagu

SEQ ID NO: 1629005 - RNA, 19 nt, Artificial Sequence
  Description of Artificial Sequence: Synthetic oligonucleotide
  Sense strand starting at position 961 of SEQ ID NO: 1560851
gcgcuccucugauucuaua

SEQ ID NO: 1629006 - RNA, 19 nt, Artificial Sequence
  Description of Artificial Sequence: Synthetic oligonucleotide
  Antisense strand to SEQ ID NO: 1629005
uauagaaucagaggagcgc

SEQ ID NO: 1629007 - RNA, 19 nt, Artificial Sequence
  Description of Artificial Sequence: Synthetic oligonucleotide
  Sense strand starting at position 1139 of SEQ ID NO: 1560851
cugaguuaugggcaucguu

SEQ ID NO: 1629008 - RNA, 19 nt, Artificial Sequence
  Description of Artificial Sequence: Synthetic oligonucleotide
  Antisense strand to SEQ ID NO: 1629007
aacgaugcccauaacucag

SEQ ID NO: 1629009 - RNA, 19 nt, Artificial Sequence
  Description of Artificial Sequence: Synthetic oligonucleotide
  Sense strand starting at position 1653 of SEQ ID NO: 1560851
guagcucucacccgguaga

SEQ ID NO: 1629010 - RNA, 19 nt, Artificial Sequence
  Description of Artificial Sequence: Synthetic oligonucleotide
  Antisense strand to SEQ ID NO: 1629009
ucuaccgggugagagcuac

SEQ ID NO: 1629011 - RNA, 19 nt, Artificial Sequence
  Description of Artificial Sequence: Synthetic oligonucleotide
  Sense strand starting at position 2025 of SEQ ID NO: 1560851
ugccgcuugguuucgagua

SEQ ID NO: 1629012 - RNA, 19 nt, Artificial Sequence
  Description of Artificial Sequence: Synthetic oligonucleotide
  Antisense strand to SEQ ID NO: 1629011
uacucgaaaccaagcggca

SEQ ID NO: 1629013 - RNA, 19 nt, Artificial Sequence
  Description of Artificial Sequence: Synthetic oligonucleotide
  Sense strand starting at position 2030 of SEQ ID NO: 1560851
cuugguuucgaguacuuug

SEQ ID NO: 1629014 - RNA, 19 nt, Artificial Sequence
  Description of Artificial Sequence: Synthetic oligonucleotide
  Antisense strand to SEQ ID NO: 1629013
caaaguacucgaaaccaag

SEQ ID NO: 1629015 - RNA, 19 nt, Artificial Sequence
  Description of Artificial Sequence: Synthetic oligonucleotide
  Sense strand starting at position 2035 of SEQ ID NO: 1560851
uuucgaguacuuuggguga

SEQ ID NO: 1629016 - RNA, 19 nt, Artificial Sequence
  Description of Artificial Sequence: Synthetic oligonucleotide
  Antisense strand to SEQ ID NO: 1629015
ucacccaaaguacucgaaa

SEQ ID NO: 1629017 - RNA, 19 nt, Artificial Sequence
  Description of Artificial Sequence: Synthetic oligonucleotide
  Sense strand starting at position 2038 of SEQ ID NO: 1560851
cgaguacuuugggugauug

SEQ ID NO: 1629018 - RNA, 19 nt, Artificial Sequence
  Description of Artificial Sequence: Synthetic oligonucleotide
  Antisense strand to SEQ ID NO: 1629017
caaucacccaaaguacucg

SEQ ID NO: 1629019 - RNA, 19 nt, Artificial Sequence
  Description of Artificial Sequence: Synthetic oligonucleotide
  Sense strand starting at position 2039 of SEQ ID NO: 1560851
gaguacuuugggugauugu

SEQ ID NO: 1629020 - RNA, 19 nt, Artificial Sequence
  Description of Artificial Sequence: Synthetic oligonucleotide
  Antisense strand to SEQ ID NO: 1629019
acaaucacccaaaguacuc

SEQ ID NO: 1629021 - RNA, 19 nt, Artificial Sequence
  Description of Artificial Sequence: Synthetic oligonucleotide
  Sense strand starting at position 2048 of SEQ ID NO: 1560851
gggugauugucuuuggcac

SEQ ID NO: 1629022 - RNA, 19 nt, Artificial Sequence
  Description of Artificial Sequence: Synthetic oligonucleotide
  Antisense strand to SEQ ID NO: 1629021
gugccaaagacaaucaccc

SEQ ID NO: 1629023 - RNA, 19 nt, Artificial Sequence
  Description of Artificial Sequence: Synthetic oligonucleotide
  Sense strand starting at position 2049 of SEQ ID NO: 1560851
ggugauugucuuuggcaca

SEQ ID NO: 1629024 - RNA, 19 nt, Artificial Sequence
  Description of Artificial Sequence: Synthetic oligonucleotide
  Antisense strand to SEQ ID NO: 1629023
ugugccaaagacaaucacc

SEQ ID NO: 1629025 - RNA, 19 nt, Artificial Sequence
  Description of Artificial Sequence: Synthetic oligonucleotide
  Sense strand starting at position 2115 of SEQ ID NO: 1560851
ggcccuacccauugaaucu

SEQ ID NO: 1629026 - RNA, 19 nt, Artificial Sequence
  Description of Artificial Sequence: Synthetic oligonucleotide
  Antisense strand to SEQ ID NO: 1629025
agauucaauggguagggcc

SEQ ID NO: 1629027 - RNA, 19 nt, Artificial Sequence
  Description of Artificial Sequence: Synthetic oligonucleotide
  Sense strand starting at position 2155 of SEQ ID NO: 1560851
aagugaguucgggaagcca

SEQ ID NO: 1629028 - RNA, 19 nt, Artificial Sequence
  Description of Artificial Sequence: Synthetic oligonucleotide
  Antisense strand to SEQ ID NO: 1629027
uggcuucccgaacucacuu

SEQ ID NO: 1629029 - RNA, 19 nt, Artificial Sequence
  Description of Artificial Sequence: Synthetic oligonucleotide
  Sense strand starting at position 2157 of SEQ ID NO: 1560851
gugaguucgggaagccagu

SEQ ID NO: 1629030 - RNA, 19 nt, Artificial Sequence
  Description of Artificial Sequence: Synthetic oligonucleotide
  Antisense strand to SEQ ID NO: 1629029
acuggcuucccgaacucac

SEQ ID NO: 1629031 - RNA, 19 nt, Artificial Sequence
  Description of Artificial Sequence: Synthetic oligonucleotide
  Sense strand starting at position 2666 of SEQ ID NO: 1560851
cuauauggucuaggcugau

SEQ ID NO: 1629032 - RNA, 19 nt, Artificial Sequence
  Description of Artificial Sequence: Synthetic oligonucleotide
  Antisense strand to SEQ ID NO: 1629031
aucagccuagaccauauag

SEQ ID NO: 1629033 - RNA, 19 nt, Artificial Sequence
  Description of Artificial Sequence: Synthetic oligonucleotide
  Sense strand starting at position 2672 of SEQ ID NO: 1560851
ggucuaggcugaucuugaa

SEQ ID NO: 1629034 - RNA, 19 nt, Artificial Sequence
  Description of Artificial Sequence: Synthetic oligonucleotide
  Antisense strand to SEQ ID NO: 1629033
uucaagaucagccuagacc

SEQ ID NO: 1629035 - RNA, 19 nt, Artificial Sequence
  Description of Artificial Sequence: Synthetic oligonucleotide
  Sense strand starting at position 2762 of SEQ ID NO: 1560851
uggccaugcuuguugaauu

SEQ ID NO: 1629036 - RNA, 19 nt, Artificial Sequence
  Description of Artificial Sequence: Synthetic oligonucleotide
  Antisense strand to SEQ ID NO: 1629035
aauucaacaagcauggcca

SEQ ID NO: 1629037 - RNA, 19 nt, Artificial Sequence
  Description of Artificial Sequence: Synthetic oligonucleotide
  Sense strand starting at position 2814 of SEQ ID NO: 1560851
cccucugagugcccagaaa

SEQ ID NO: 1629038 - RNA, 19 nt, Artificial Sequence
  Description of Artificial Sequence: Synthetic oligonucleotide
  Antisense strand to SEQ ID NO: 1629037
uuucugggcacucagaggg

SEQ ID NO: 1629039 - RNA, 19 nt, Artificial Sequence
  Description of Artificial Sequence: Synthetic oligonucleotide
  Sense strand starting at position 2842 of SEQ ID NO: 1560851
ucgaguucuugccuggaca

SEQ ID NO: 1629040 - RNA, 19 nt, Artificial Sequence
  Description of Artificial Sequence: Synthetic oligonucleotide
  Antisense strand to SEQ ID NO: 1629039
uguccaggcaagaacucga

SEQ ID NO: 1629041 - RNA, 19 nt, Artificial Sequence
  Description of Artificial Sequence: Synthetic oligonucleotide
  Sense strand starting at position 2843 of SEQ ID NO: 1560851
cgaguucuugccuggacag

SEQ ID NO: 1629042 - RNA, 19 nt, Artificial Sequence
  Description of Artificial Sequence: Synthetic oligonucleotide
  Antisense strand to SEQ ID NO: 1629041
cuguccaggcaagaacucg

SEQ ID NO: 1629043 - RNA, 19 nt, Artificial Sequence
  Description of Artificial Sequence: Synthetic oligonucleotide
  Sense strand starting at position 2844 of SEQ ID NO: 1560851
gaguucuugccuggacaga

SEQ ID NO: 1629044 - RNA, 19 nt, Artificial Sequence
  Description of Artificial Sequence: Synthetic oligonucleotide
  Antisense strand to SEQ ID NO: 1629043
ucuguccaggcaagaacuc

SEQ ID NO: 1629045 - RNA, 19 nt, Artificial Sequence
  Description of Artificial Sequence: Synthetic oligonucleotide
  Sense strand starting at position 2908 of SEQ ID NO: 1560851
cacuucugagagugggaua

SEQ ID NO: 1629046 - RNA, 19 nt, Artificial Sequence
  Description of Artificial Sequence: Synthetic oligonucleotide
  Antisense strand to SEQ ID NO: 1629045
uaucccacucucagaagug

SEQ ID NO: 1629047 - RNA, 19 nt, Artificial Sequence
  Description of Artificial Sequence: Synthetic oligonucleotide
  Sense strand starting at position 2909 of SEQ ID NO: 1560851
acuucugagagugggauau

SEQ ID NO: 1629048 - RNA, 19 nt, Artificial Sequence
  Description of Artificial Sequence: Synthetic oligonucleotide
  Antisense strand to SEQ ID NO: 1629047
auaucccacucucagaagu

SEQ ID NO: 1629049 - RNA, 19 nt, Artificial Sequence
  Description of Artificial Sequence: Synthetic oligonucleotide
  Sense strand starting at position 2911 of SEQ ID NO: 1560851
uucugagagugggauauuu

SEQ ID NO: 1629050 - RNA, 19 nt, Artificial Sequence
  Description of Artificial Sequence: Synthetic oligonucleotide
  Antisense strand to SEQ ID NO: 1629049
aaauaucccacucucagaa

SEQ ID NO: 1629051 - RNA, 19 nt, Artificial Sequence
  Description of Artificial Sequence: Synthetic oligonucleotide
  Sense strand starting at position 2939 of SEQ ID NO: 1560851
guguaagcgcaguucaacu

SEQ ID NO: 1629052 - RNA, 19 nt, Artificial Sequence
  Description of Artificial Sequence: Synthetic oligonucleotide
  Antisense strand to SEQ ID NO: 1629051
aguugaacugcgcuuacac

SEQ ID NO: 1629053 - RNA, 19 nt, Artificial Sequence
  Description of Artificial Sequence: Synthetic oligonucleotide
  Sense strand starting at position 3027 of SEQ ID NO: 1560851
aguauaaaguaggcauaaa

SEQ ID NO: 1629054 - RNA, 19 nt, Artificial Sequence
  Description of Artificial Sequence: Synthetic oligonucleotide
  Antisense strand to SEQ ID NO: 1629053
uuuaugccuacuuuauacu

SEQ ID NO: 1629055 - RNA, 19 nt, Artificial Sequence
  Description of Artificial Sequence: Synthetic oligonucleotide
  Sense strand starting at position 3061 of SEQ ID NO: 1560851
acaagacuguacuucuuga

SEQ ID NO: 1629056 - RNA, 19 nt, Artificial Sequence
  Description of Artificial Sequence: Synthetic oligonucleotide
  Antisense strand to SEQ ID NO: 1629055
ucaagaaguacagucuugu

SEQ ID NO: 1629057 - RNA, 19 nt, Artificial Sequence
  Description of Artificial Sequence: Synthetic oligonucleotide
  Sense strand starting at position 3066 of SEQ ID NO: 1560851
acuguacuucuugagagcu

SEQ ID NO: 1629058 - RNA, 19 nt, Artificial Sequence
  Description of Artificial Sequence: Synthetic oligonucleotide
  Antisense strand to SEQ ID NO: 1629057
agcucucaagaaguacagu

SEQ ID NO: 1629059 - RNA, 19 nt, Artificial Sequence
  Description of Artificial Sequence: Synthetic oligonucleotide
  Sense strand starting at position 3335 of SEQ ID NO: 1560851
cuaaauaaaugguaagaca

SEQ ID NO: 1629060 - RNA, 19 nt, Artificial Sequence
  Description of Artificial Sequence: Synthetic oligonucleotide
  Antisense strand to SEQ ID NO: 1629059
ugucuuaccauuuauuuag

SEQ ID NO: 1629061 - RNA, 19 nt, Artificial Sequence
  Description of Artificial Sequence: Synthetic oligonucleotide
  Sense strand starting at position 3360 of SEQ ID NO: 1560851
guucauggauuggaaagua

SEQ ID NO: 1629062 - RNA, 19 nt, Artificial Sequence
  Description of Artificial Sequence: Synthetic oligonucleotide
  Antisense strand to SEQ ID NO: 1629061
uacuuuccaauccaugaac

SEQ ID NO: 1629063 - RNA, 19 nt, Artificial Sequence
  Description of Artificial Sequence: Synthetic oligonucleotide
  Sense strand starting at position 3404 of SEQ ID NO: 1560851
cacaaauuggucuacggau

SEQ ID NO: 1629064 - RNA, 19 nt, Artificial Sequence
  Description of Artificial Sequence: Synthetic oligonucleotide
  Antisense strand to SEQ ID NO: 1629063
auccguagaccaauuugug

SEQ ID NO: 1629065 - RNA, 19 nt, Artificial Sequence
  Description of Artificial Sequence: Synthetic oligonucleotide
  Sense strand starting at position 3656 of SEQ ID NO: 1560851
ugcauauauggucaacuca

SEQ ID NO: 1629066 - RNA, 19 nt, Artificial Sequence
  Description of Artificial Sequence: Synthetic oligonucleotide
  Antisense strand to SEQ ID NO: 1629065
ugaguugaccauauaugca

SEQ ID NO: 1629067 - RNA, 19 nt, Artificial Sequence
  Description of Artificial Sequence: Synthetic oligonucleotide
  Sense strand starting at position 27 of SEQ ID NO: 1560852
gggaauaccuuuggacacu

SEQ ID NO: 1629068 - RNA, 19 nt, Artificial Sequence
  Description of Artificial Sequence: Synthetic oligonucleotide
  Antisense strand to SEQ ID NO: 1629067
aguguccaaagguauuccc

SEQ ID NO: 1629069 - RNA, 19 nt, Artificial Sequence
  Description of Artificial Sequence: Synthetic oligonucleotide
  Sense strand starting at position 28 of SEQ ID NO: 1560852
ggaauaccuuuggacacuu

SEQ ID NO: 1629070 - RNA, 19 nt, Artificial Sequence
  Description of Artificial Sequence: Synthetic oligonucleotide
  Antisense strand to SEQ ID NO: 1629069
aaguguccaaagguauucc

SEQ ID NO: 1629071 - RNA, 19 nt, Artificial Sequence
  Description of Artificial Sequence: Synthetic oligonucleotide
  Sense strand starting at position 36 of SEQ ID NO: 1560852
uuuggacacuucuagacuu

SEQ ID NO: 1629072 - RNA, 19 nt, Artificial Sequence
  Description of Artificial Sequence: Synthetic oligonucleotide
  Antisense strand to SEQ ID NO: 1629071
aagucuagaaguguccaaa

SEQ ID NO: 1629073 - RNA, 19 nt, Artificial Sequence
  Description of Artificial Sequence: Synthetic oligonucleotide
  Sense strand starting at position 49 of SEQ ID NO: 1560852
agacuucucuggguggguu

SEQ ID NO: 1629074 - RNA, 19 nt, Artificial Sequence
  Description of Artificial Sequence: Synthetic oligonucleotide
  Antisense strand to SEQ ID NO: 1629073
aacccacccagagaagucu

SEQ ID NO: 1629075 - RNA, 19 nt, Artificial Sequence
  Description of Artificial Sequence: Synthetic oligonucleotide
  Sense strand starting at position 169 of SEQ ID NO: 1560852
uccaauaagcucugcagga

SEQ ID NO: 1629076 - RNA, 19 nt, Artificial Sequence
  Description of Artificial Sequence: Synthetic oligonucleotide
  Antisense strand to SEQ ID NO: 1629075
uccugcagagcuuauugga

SEQ ID NO: 1629077 - RNA, 19 nt, Artificial Sequence
  Description of Artificial Sequence: Synthetic oligonucleotide
  Sense strand starting at position 171 of SEQ ID NO: 1560852
caauaagcucugcaggaga

SEQ ID NO: 1629078 - RNA, 19 nt, Artificial Sequence
  Description of Artificial Sequence: Synthetic oligonucleotide
  Antisense strand to SEQ ID NO: 1629077
ucuccugcagagcuuauug

SEQ ID NO: 1629079 - RNA, 19 nt, Artificial Sequence
  Description of Artificial Sequence: Synthetic oligonucleotide
  Sense strand starting at position 173 of SEQ ID NO: 1560852
auaagcucugcaggagauu

SEQ ID NO: 1629080 - RNA, 19 nt, Artificial Sequence
  Description of Artificial Sequence: Synthetic oligonucleotide
  Antisense strand to SEQ ID NO: 1629079
aaucuccugcagagcuuau

SEQ ID NO: 1629081 - RNA, 19 nt, Artificial Sequence
  Description of Artificial Sequence: Synthetic oligonucleotide
  Sense strand starting at position 182 of SEQ ID NO: 1560852
gcaggagauucugaugcuu

SEQ ID NO: 1629082 - RNA, 19 nt, Artificial Sequence
  Description of Artificial Sequence: Synthetic oligonucleotide
  Antisense strand to SEQ ID NO: 1629081
aagcaucagaaucuccugc

SEQ ID NO: 1629083 - RNA, 19 nt, Artificial Sequence
  Description of Artificial Sequence: Synthetic oligonucleotide
  Sense strand starting at position 184 of SEQ ID NO: 1560852
aggagauucugaugcuuac

SEQ ID NO: 1629084 - RNA, 19 nt, Artificial Sequence
  Description of Artificial Sequence: Synthetic oligonucleotide
  Antisense strand to SEQ ID NO: 1629083
guaagcaucagaaucuccu

SEQ ID NO: 1629085 - RNA, 19 nt, Artificial Sequence
  Description of Artificial Sequence: Synthetic oligonucleotide
  Sense strand starting at position 194 of SEQ ID NO: 1560852
gaugcuuaccugggucuga

SEQ ID NO: 1629086 - RNA, 19 nt, Artificial Sequence
  Description of Artificial Sequence: Synthetic oligonucleotide
  Antisense strand to SEQ ID NO: 1629085
ucagacccagguaagcauc

SEQ ID NO: 1629087 - RNA, 19 nt, Artificial Sequence
  Description of Artificial Sequence: Synthetic oligonucleotide
  Sense strand starting at position 429 of SEQ ID NO: 1560852
gcucccaucucggaguaaa

SEQ ID NO: 1629088 - RNA, 19 nt, Artificial Sequence
  Description of Artificial Sequence: Synthetic oligonucleotide
  Antisense strand to SEQ ID NO: 1629087
uuuacuccgagaugggagc

SEQ ID NO: 1629089 - RNA, 19 nt, Artificial Sequence
  Description of Artificial Sequence: Synthetic oligonucleotide
  Sense strand starting at position 883 of SEQ ID NO: 1560852
gguaauagcccguggcuuu

SEQ ID NO: 1629090 - RNA, 19 nt, Artificial Sequence
  Description of Artificial Sequence: Synthetic oligonucleotide
  Antisense strand to SEQ ID NO: 1629089
aaagccacgggcuauuacc

SEQ ID NO: 1629091 - RNA, 19 nt, Artificial Sequence
  Description of Artificial Sequence: Synthetic oligonucleotide
  Sense strand starting at position 937 of SEQ ID NO: 1560852
uugccuguauuggcucaua

SEQ ID NO: 1629092 - RNA, 19 nt, Artificial Sequence
  Description of Artificial Sequence: Synthetic oligonucleotide
  Antisense strand to SEQ ID NO: 1629091
uaugagccaauacaggcaa

SEQ ID NO: 1629093 - RNA, 19 nt, Artificial Sequence
  Description of Artificial Sequence: Synthetic oligonucleotide
  Sense strand starting at position 940 of SEQ ID NO: 1560852
ccuguauuggcucauauaa

SEQ ID NO: 1629094 - RNA, 19 nt, Artificial Sequence
  Description of Artificial Sequence: Synthetic oligonucleotide
  Antisense strand to SEQ ID NO: 1629093
uuauaugagccaauacagg

SEQ ID NO: 1629095 - RNA, 19 nt, Artificial Sequence
  Description of Artificial Sequence: Synthetic oligonucleotide
  Sense strand starting at position 971 of SEQ ID NO: 1560852
ccgcgauuccauugacuuu

SEQ ID NO: 1629096 - RNA, 19 nt, Artificial Sequence
  Description of Artificial Sequence: Synthetic oligonucleotide
  Antisense strand to SEQ ID NO: 1629095
aaagucaauggaaucgcgg

SEQ ID NO: 1629097 - RNA, 19 nt, Artificial Sequence
  Description of Artificial Sequence: Synthetic oligonucleotide
  Sense strand starting at position 983 of SEQ ID NO: 1560852
ugacuuugccgaggaggaa

SEQ ID NO: 1629098 - RNA, 19 nt, Artificial Sequence
  Description of Artificial Sequence: Synthetic oligonucleotide
  Antisense strand to SEQ ID NO: 1629097
uuccuccucggcaaaguca

SEQ ID NO: 1629099 - RNA, 19 nt, Artificial Sequence
  Description of Artificial Sequence: Synthetic oligonucleotide
  Sense strand starting at position 1296 of SEQ ID NO: 1560852
ccuugugagguucaguaag

SEQ ID NO: 1629100 - RNA, 19 nt, Artificial Sequence
  Description of Artificial Sequence: Synthetic oligonucleotide
  Antisense strand to SEQ ID NO: 1629099
cuuacugaaccucacaagg

SEQ ID NO: 1629101 - RNA, 19 nt, Artificial Sequence
  Description of Artificial Sequence: Synthetic oligonucleotide
  Sense strand starting at position 1298 of SEQ ID NO: 1560852
uugugagguucaguaagcu

SEQ ID NO: 1629102 - RNA, 19 nt, Artificial Sequence
  Description of Artificial Sequence: Synthetic oligonucleotide
  Antisense strand to SEQ ID NO: 1629101
agcuuacugaaccucacaa

SEQ ID NO: 1629103 - RNA, 19 nt, Artificial Sequence
  Description of Artificial Sequence: Synthetic oligonucleotide
  Sense strand starting at position 1471 of SEQ ID NO: 1560852
ugugguagugcugcacauu

SEQ ID NO: 1629104 - RNA, 19 nt, Artificial Sequence
  Description of Artificial Sequence: Synthetic oligonucleotide
  Antisense strand to SEQ ID NO: 1629103
aaugugcagcacuaccaca

SEQ ID NO: 1629105 - RNA, 19 nt, Artificial Sequence
  Description of Artificial Sequence: Synthetic oligonucleotide
  Sense strand starting at position 2042 of SEQ ID NO: 1560852
cuccucucaguggaacauu

SEQ ID NO: 1629106 - RNA, 19 nt, Artificial Sequence
  Description of Artificial Sequence: Synthetic oligonucleotide
  Antisense strand to SEQ ID NO: 1629105
aauguuccacugagaggag

SEQ ID NO: 1629107 - RNA, 19 nt, Artificial Sequence
  Description of Artificial Sequence: Synthetic oligonucleotide
  Sense strand starting at position 2338 of SEQ ID NO: 1560852
cuggauaugcaguguguga

SEQ ID NO: 1629108 - RNA, 19 nt, Artificial Sequence
  Description of Artificial Sequence: Synthetic oligonucleotide
  Antisense strand to SEQ ID NO: 1629107
ucacacacugcauauccag

SEQ ID NO: 1629109 - RNA, 19 nt, Artificial Sequence
  Description of Artificial Sequence: Synthetic oligonucleotide
  Sense strand starting at position 2340 of SEQ ID NO: 1560852
ggauaugcagugugugaga

SEQ ID NO: 1629110 - RNA, 19 nt, Artificial Sequence
  Description of Artificial Sequence: Synthetic oligonucleotide
  Antisense strand to SEQ ID NO: 1629109
ucucacacacugcauaucc

SEQ ID NO: 1629111 - RNA, 19 nt, Artificial Sequence
  Description of Artificial Sequence: Synthetic oligonucleotide
  Sense strand starting at position 2684 of SEQ ID NO: 1560852
gccaguguuccagagugcu

SEQ ID NO: 1629112 - RNA, 19 nt, Artificial Sequence
  Description of Artificial Sequence: Synthetic oligonucleotide
  Antisense strand to SEQ ID NO: 1629111
agcacucuggaacacuggc

SEQ ID NO: 1629113 - RNA, 19 nt, Artificial Sequence
  Description of Artificial Sequence: Synthetic oligonucleotide
  Sense strand starting at position 2696 of SEQ ID NO: 1560852
gagugcugggauuacuaua

SEQ ID NO: 1629114 - RNA, 19 nt, Artificial Sequence
  Description of Artificial Sequence: Synthetic oligonucleotide
  Antisense strand to SEQ ID NO: 1629113
uauaguaaucccagcacuc

SEQ ID NO: 1629115 - RNA, 19 nt, Artificial Sequence
  Description of Artificial Sequence: Synthetic oligonucleotide
  Sense strand starting at position 2759 of SEQ ID NO: 1560852
cuguguucugccuucucau

SEQ ID NO: 1629116 - RNA, 19 nt, Artificial Sequence
  Description of Artificial Sequence: Synthetic oligonucleotide
  Antisense strand to SEQ ID NO: 1629115
augagaaggcagaacacag

SEQ ID NO: 1629117 - RNA, 19 nt, Artificial Sequence
  Description of Artificial Sequence: Synthetic oligonucleotide
  Sense strand starting at position 2762 of SEQ ID NO: 1560852
uguucugccuucucauaua

SEQ ID NO: 1629118 - RNA, 19 nt, Artificial Sequence
  Description of Artificial Sequence: Synthetic oligonucleotide
  Antisense strand to SEQ ID NO: 1629117
uauaugagaaggcagaaca

SEQ ID NO: 1629119 - RNA, 19 nt, Artificial Sequence
  Description of Artificial Sequence: Synthetic oligonucleotide
  Sense strand starting at position 2801 of SEQ ID NO: 1560852
ugaauugugcaccaggcau

SEQ ID NO: 1629120 - RNA, 19 nt, Artificial Sequence
  Description of Artificial Sequence: Synthetic oligonucleotide
  Antisense strand to SEQ ID NO: 1629119
augccuggugcacaauuca

SEQ ID NO: 1629121 - RNA, 19 nt, Artificial Sequence
  Description of Artificial Sequence: Synthetic oligonucleotide
  Sense strand starting at position 2856 of SEQ ID NO: 1560852
acaagcuugccagauccau

SEQ ID NO: 1629122 - RNA, 19 nt, Artificial Sequence
  Description of Artificial Sequence: Synthetic oligonucleotide
  Antisense strand to SEQ ID NO: 1629121
auggaucuggcaagcuugu

SEQ ID NO: 1629123 - RNA, 19 nt, Artificial Sequence
  Description of Artificial Sequence: Synthetic oligonucleotide
  Sense strand starting at position 2862 of SEQ ID NO: 1560852
uugccagauccauguuauu

SEQ ID NO: 1629124 - RNA, 19 nt, Artificial Sequence
  Description of Artificial Sequence: Synthetic oligonucleotide
  Antisense strand to SEQ ID NO: 1629123
aauaacauggaucuggcaa

SEQ ID NO: 1629125 - RNA, 19 nt, Artificial Sequence
  Description of Artificial Sequence: Synthetic oligonucleotide
  Sense strand starting at position 2865 of SEQ ID NO: 1560852
ccagauccauguuauuauu

SEQ ID NO: 1629126 - RNA, 19 nt, Artificial Sequence
  Description of Artificial Sequence: Synthetic oligonucleotide
  Antisense strand to SEQ ID NO: 1629125
aauaauaacauggaucugg

SEQ ID NO: 1629127 - RNA, 19 nt, Artificial Sequence
  Description of Artificial Sequence: Synthetic oligonucleotide
  Sense strand starting at position 2964 of SEQ ID NO: 1560852
ggcuuucugccugcagagu

SEQ ID NO: 1629128 - RNA, 19 nt, Artificial Sequence
  Description of Artificial Sequence: Synthetic oligonucleotide
  Antisense strand to SEQ ID NO: 1629127
acucugcaggcagaaagcc

SEQ ID NO: 1629129 - RNA, 19 nt, Artificial Sequence
  Description of Artificial Sequence: Synthetic oligonucleotide
  Sense strand starting at position 2965 of SEQ ID NO: 1560852
gcuuucugccugcagaguu

SEQ ID NO: 1629130 - RNA, 19 nt, Artificial Sequence
  Description of Artificial Sequence: Synthetic oligonucleotide
  Antisense strand to SEQ ID NO: 1629129
aacucugcaggcagaaagc

SEQ ID NO: 1629131 - RNA, 19 nt, Artificial Sequence
  Description of Artificial Sequence: Synthetic oligonucleotide
  Sense strand starting at position 3127 of SEQ ID NO: 1560852
auaauaguugcacaauaug

SEQ ID NO: 1629132 - RNA, 19 nt, Artificial Sequence
  Description of Artificial Sequence: Synthetic oligonucleotide
  Antisense strand to SEQ ID NO: 1629131
cauauugugcaacuauuau

SEQ ID NO: 1629133 - RNA, 19 nt, Artificial Sequence
  Description of Artificial Sequence: Synthetic oligonucleotide
  Sense strand starting at position 3135 of SEQ ID NO: 1560852
ugcacaauaugcuauagua

SEQ ID NO: 1629134 - RNA, 19 nt, Artificial Sequence
  Description of Artificial Sequence: Synthetic oligonucleotide
  Antisense strand to SEQ ID NO: 1629133
uacuauagcauauugugca

SEQ ID NO: 1629135 - RNA, 19 nt, Artificial Sequence
  Description of Artificial Sequence: Synthetic oligonucleotide
  Sense strand starting at position 3276 of SEQ ID NO: 1560852
cagaguuauuaggucaaug

SEQ ID NO: 1629136 - RNA, 19 nt, Artificial Sequence
  Description of Artificial Sequence: Synthetic oligonucleotide
  Antisense strand to SEQ ID NO: 1629135
cauugaccuaauaacucug

SEQ ID NO: 1629137 - RNA, 19 nt, Artificial Sequence
  Description of Artificial Sequence: Synthetic oligonucleotide
  Sense strand starting at position 3281 of SEQ ID NO: 1560852
uuauuaggucaaugaguau

SEQ ID NO: 1629138 - RNA, 19 nt, Artificial Sequence
  Description of Artificial Sequence: Synthetic oligonucleotide
  Antisense strand to SEQ ID NO: 1629137
auacucauugaccuaauaa

SEQ ID NO: 1629139 - RNA, 19 nt, Artificial Sequence
  Description of Artificial Sequence: Synthetic oligonucleotide
  Sense strand starting at position 3284 of SEQ ID NO: 1560852
uuaggucaaugaguauaca

SEQ ID NO: 1629140 - RNA, 19 nt, Artificial Sequence
  Description of Artificial Sequence: Synthetic oligonucleotide
  Antisense strand to SEQ ID NO: 1629139
uguauacucauugaccuaa

SEQ ID NO: 1629141 - RNA, 19 nt, Artificial Sequence
  Description of Artificial Sequence: Synthetic oligonucleotide
  Sense strand starting at position 3399 of SEQ ID NO: 1560852
agaaguggguguuaucacu

SEQ ID NO: 1629142 - RNA, 19 nt, Artificial Sequence
  Description of Artificial Sequence: Synthetic oligonucleotide
  Antisense strand to SEQ ID NO: 1629141
agugauaacacccacuucu

SEQ ID NO: 1629143 - RNA, 19 nt, Artificial Sequence
  Description of Artificial Sequence: Synthetic oligonucleotide
  Sense strand starting at position 3803 of SEQ ID NO: 1560852
uguauuugcugucuauauu

SEQ ID NO: 1629144 - RNA, 19 nt, Artificial Sequence
  Description of Artificial Sequence: Synthetic oligonucleotide
  Antisense strand to SEQ ID NO: 1629143
aauauagacagcaaauaca

SEQ ID NO: 1629145 - RNA, 19 nt, Artificial Sequence
  Description of Artificial Sequence: Synthetic oligonucleotide
  Sense strand starting at position 3940 of SEQ ID NO: 1560852
uugacuucuugggugugua

SEQ ID NO: 1629146 - RNA, 19 nt, Artificial Sequence
  Description of Artificial Sequence: Synthetic oligonucleotide
  Antisense strand to SEQ ID NO: 1629145
uacacacccaagaagucaa

SEQ ID NO: 1629147 - RNA, 19 nt, Artificial Sequence
  Description of Artificial Sequence: Synthetic oligonucleotide
  Sense strand starting at position 11 of SEQ ID NO: 1560853
uggcgagacuccgucacua

SEQ ID NO: 1629148 - RNA, 19 nt, Artificial Sequence
  Description of Artificial Sequence: Synthetic oligonucleotide
  Antisense strand to SEQ ID NO: 1629147
uagugacggagucucgcca

SEQ ID NO: 1629149 - RNA, 19 nt, Artificial Sequence
  Description of Artificial Sequence: Synthetic oligonucleotide
  Sense strand starting at position 13 of SEQ ID NO: 1560853
gcgagacuccgucacuacu

SEQ ID NO: 1629150 - RNA, 19 nt, Artificial Sequence
  Description of Artificial Sequence: Synthetic oligonucleotide
  Antisense strand to SEQ ID NO: 1629149
aguagugacggagucucgc

SEQ ID NO: 1629151 - RNA, 19 nt, Artificial Sequence
  Description of Artificial Sequence: Synthetic oligonucleotide
  Sense strand starting at position 295 of SEQ ID NO: 1560853
gggaaaugucaguggcuga

SEQ ID NO: 1629152 - RNA, 19 nt, Artificial Sequence
  Description of Artificial Sequence: Synthetic oligonucleotide
  Antisense strand to SEQ ID NO: 1629151
ucagccacugacauuuccc

SEQ ID NO: 1629153 - RNA, 19 nt, Artificial Sequence
  Description of Artificial Sequence: Synthetic oligonucleotide
  Sense strand starting at position 296 of SEQ ID NO: 1560853
ggaaaugucaguggcugaa

SEQ ID NO: 1629154 - RNA, 19 nt, Artificial Sequence
  Description of Artificial Sequence: Synthetic oligonucleotide
  Antisense strand to SEQ ID NO: 1629153
uucagccacugacauuucc

SEQ ID NO: 1629155 - RNA, 19 nt, Artificial Sequence
  Description of Artificial Sequence: Synthetic oligonucleotide
  Sense strand starting at position 410 of SEQ ID NO: 1560853
gcuacuagucuaggugacu

SEQ ID NO: 1629156 - RNA, 19 nt, Artificial Sequence
  Description of Artificial Sequence: Synthetic oligonucleotide
  Antisense strand to SEQ ID NO: 1629155
agucaccuagacuaguagc

SEQ ID NO: 1629157 - RNA, 19 nt, Artificial Sequence
  Description of Artificial Sequence: Synthetic oligonucleotide
  Sense strand starting at position 411 of SEQ ID NO: 1560853
cuacuagucuaggugacuu

SEQ ID NO: 1629158 - RNA, 19 nt, Artificial Sequence
  Description of Artificial Sequence: Synthetic oligonucleotide
  Antisense strand to SEQ ID NO: 1629157
aagucaccuagacuaguag

SEQ ID NO: 1629159 - RNA, 19 nt, Artificial Sequence
  Description of Artificial Sequence: Synthetic oligonucleotide
  Sense strand starting at position 413 of SEQ ID NO: 1560853
acuagucuaggugacuuau

SEQ ID NO: 1629160 - RNA, 19 nt, Artificial Sequence
  Description of Artificial Sequence: Synthetic oligonucleotide
  Antisense strand to SEQ ID NO: 1629159
auaagucaccuagacuagu

SEQ ID NO: 1629161 - RNA, 19 nt, Artificial Sequence
  Description of Artificial Sequence: Synthetic oligonucleotide
  Sense strand starting at position 415 of SEQ ID NO: 1560853
uagucuaggugacuuauau

SEQ ID NO: 1629162 - RNA, 19 nt, Artificial Sequence
  Description of Artificial Sequence: Synthetic oligonucleotide
  Antisense strand to SEQ ID NO: 1629161
auauaagucaccuagacua

SEQ ID NO: 1629163 - RNA, 19 nt, Artificial Sequence
  Description of Artificial Sequence: Synthetic oligonucleotide
  Sense strand starting at position 516 of SEQ ID NO: 1560853
auaacagaucucugagguu

SEQ ID NO: 1629164 - RNA, 19 nt, Artificial Sequence
  Description of Artificial Sequence: Synthetic oligonucleotide
  Antisense strand to SEQ ID NO: 1629163
aaccucagagaucuguuau

SEQ ID NO: 1629165 - RNA, 19 nt, Artificial Sequence
  Description of Artificial Sequence: Synthetic oligonucleotide
  Sense strand starting at position 522 of SEQ ID NO: 1560853
gaucucugagguuggguaa

SEQ ID NO: 1629166 - RNA, 19 nt, Artificial Sequence
  Description of Artificial Sequence: Synthetic oligonucleotide
  Antisense strand to SEQ ID NO: 1629165
uuacccaaccucagagauc

SEQ ID NO: 1629167 - RNA, 19 nt, Artificial Sequence
  Description of Artificial Sequence: Synthetic oligonucleotide
  Sense strand starting at position 523 of SEQ ID NO: 1560853
aucucugagguuggguaau

SEQ ID NO: 1629168 - RNA, 19 nt, Artificial Sequence
  Description of Artificial Sequence: Synthetic oligonucleotide
  Antisense strand to SEQ ID NO: 1629167
auuacccaaccucagagau

SEQ ID NO: 1629169 - RNA, 19 nt, Artificial Sequence
  Description of Artificial Sequence: Synthetic oligonucleotide
  Sense strand starting at position 937 of SEQ ID NO: 1560853
gcagaacugcaagaaagua

SEQ ID NO: 1629170 - RNA, 19 nt, Artificial Sequence
  Description of Artificial Sequence: Synthetic oligonucleotide
  Antisense strand to SEQ ID NO: 1629169
uacuuucuugcaguucugc

SEQ ID NO: 1629171 - RNA, 19 nt, Artificial Sequence
  Description of Artificial Sequence: Synthetic oligonucleotide
  Sense strand starting at position 1021 of SEQ ID NO: 1560853
cuaagauggugucccuuua

SEQ ID NO: 1629172 - RNA, 19 nt, Artificial Sequence
  Description of Artificial Sequence: Synthetic oligonucleotide
  Antisense strand to SEQ ID NO: 1629171
uaaagggacaccaucuuag

SEQ ID NO: 1629173 - RNA, 19 nt, Artificial Sequence
  Description of Artificial Sequence: Synthetic oligonucleotide
  Sense strand starting at position 1041 of SEQ ID NO: 1560853
agaugaggcaucugaagca

SEQ ID NO: 1629174 - RNA, 19 nt, Artificial Sequence
  Description of Artificial Sequence: Synthetic oligonucleotide
  Antisense strand to SEQ ID NO: 1629173
ugcuucagaugccucaucu

SEQ ID NO: 1629175 - RNA, 19 nt, Artificial Sequence
  Description of Artificial Sequence: Synthetic oligonucleotide
  Sense strand starting at position 1405 of SEQ ID NO: 1560853
guaguagaauuugaaucca

SEQ ID NO: 1629176 - RNA, 19 nt, Artificial Sequence
  Description of Artificial Sequence: Synthetic oligonucleotide
  Antisense strand to SEQ ID NO: 1629175
uggauucaaauucuacuac

SEQ ID NO: 1629177 - RNA, 19 nt, Artificial Sequence
  Description of Artificial Sequence: Synthetic oligonucleotide
  Sense strand starting at position 1422 of SEQ ID NO: 1560853
caggaagucuuacucgaca

SEQ ID NO: 1629178 - RNA, 19 nt, Artificial Sequence
  Description of Artificial Sequence: Synthetic oligonucleotide
  Antisense strand to SEQ ID NO: 1629177
ugucgaguaagacuuccug

SEQ ID NO: 1629179 - RNA, 19 nt, Artificial Sequence
  Description of Artificial Sequence: Synthetic oligonucleotide
  Sense strand starting at position 1424 of SEQ ID NO: 1560853
ggaagucuuacucgacaca

SEQ ID NO: 1629180 - RNA, 19 nt, Artificial Sequence
  Description of Artificial Sequence: Synthetic oligonucleotide
  Antisense strand to SEQ ID NO: 1629179
ugugucgaguaagacuucc

SEQ ID NO: 1629181 - RNA, 19 nt, Artificial Sequence
  Description of Artificial Sequence: Synthetic oligonucleotide
  Sense strand starting at position 1440 of SEQ ID NO: 1560853
acacucuccuggucuagaa

SEQ ID NO: 1629182 - RNA, 19 nt, Artificial Sequence
  Description of Artificial Sequence: Synthetic oligonucleotide
  Antisense strand to SEQ ID NO: 1629181
uucuagaccaggagagugu

SEQ ID NO: 1629183 - RNA, 19 nt, Artificial Sequence
  Description of Artificial Sequence: Synthetic oligonucleotide
  Sense strand starting at position 1444 of SEQ ID NO: 1560853
ucuccuggucuagaaucua

SEQ ID NO: 1629184 - RNA, 19 nt, Artificial Sequence
  Description of Artificial Sequence: Synthetic oligonucleotide
  Antisense strand to SEQ ID NO: 1629183
uagauucuagaccaggaga

SEQ ID NO: 1629185 - RNA, 19 nt, Artificial Sequence
  Description of Artificial Sequence: Synthetic oligonucleotide
  Sense strand starting at position 1681 of SEQ ID NO: 1560853
gcuggagcuucuuugagag

SEQ ID NO: 1629186 - RNA, 19 nt, Artificial Sequence
  Description of Artificial Sequence: Synthetic oligonucleotide
  Antisense strand to SEQ ID NO: 1629185
cucucaaagaagcuccagc

SEQ ID NO: 1629187 - RNA, 19 nt, Artificial Sequence
  Description of Artificial Sequence: Synthetic oligonucleotide
  Sense strand starting at position 1829 of SEQ ID NO: 1560853
uagcaauccgaguaggauc

SEQ ID NO: 1629188 - RNA, 19 nt, Artificial Sequence
  Description of Artificial Sequence: Synthetic oligonucleotide
  Antisense strand to SEQ ID NO: 1629187
gauccuacucggauugcua

SEQ ID NO: 1629189 - RNA, 19 nt, Artificial Sequence
  Description of Artificial Sequence: Synthetic oligonucleotide
  Sense strand starting at position 1892 of SEQ ID NO: 1560853
ggguauuucugguuggccu

SEQ ID NO: 1629190 - RNA, 19 nt, Artificial Sequence
  Description of Artificial Sequence: Synthetic oligonucleotide
  Antisense strand to SEQ ID NO: 1629189
aggccaaccagaaauaccc

SEQ ID NO: 1629191 - RNA, 19 nt, Artificial Sequence
  Description of Artificial Sequence: Synthetic oligonucleotide
  Sense strand starting at position 1965 of SEQ ID NO: 1560853
gccuuugaccacugucaaa

SEQ ID NO: 1629192 - RNA, 19 nt, Artificial Sequence
  Description of Artificial Sequence: Synthetic oligonucleotide
  Antisense strand to SEQ ID NO: 1629191
uuugacaguggucaaaggc

SEQ ID NO: 1629193 - RNA, 19 nt, Artificial Sequence
  Description of Artificial Sequence: Synthetic oligonucleotide
  Sense strand starting at position 2118 of SEQ ID NO: 1560853
ugaggucaguggucaguaa

SEQ ID NO: 1629194 - RNA, 19 nt, Artificial Sequence
  Description of Artificial Sequence: Synthetic oligonucleotide
  Antisense strand to SEQ ID NO: 1629193
uuacugaccacugaccuca

SEQ ID NO: 1629195 - RNA, 19 nt, Artificial Sequence
  Description of Artificial Sequence: Synthetic oligonucleotide
  Sense strand starting at position 2122 of SEQ ID NO: 1560853
gucaguggucaguaagcca

SEQ ID NO: 1629196 - RNA, 19 nt, Artificial Sequence
  Description of Artificial Sequence: Synthetic oligonucleotide
  Antisense strand to SEQ ID NO: 1629195
uggcuuacugaccacugac

SEQ ID NO: 1629197 - RNA, 19 nt, Artificial Sequence
  Description of Artificial Sequence: Synthetic oligonucleotide
  Sense strand starting at position 2344 of SEQ ID NO: 1560853
gaagcagaggccugaaguu

SEQ ID NO: 1629198 - RNA, 19 nt, Artificial Sequence
  Description of Artificial Sequence: Synthetic oligonucleotide
  Antisense strand to SEQ ID NO: 1629197
aacuucaggccucugcuuc

SEQ ID NO: 1629199 - RNA, 19 nt, Artificial Sequence
  Description of Artificial Sequence: Synthetic oligonucleotide
  Sense strand starting at position 2440 of SEQ ID NO: 1560853
uuugcugaggccugaaguu

SEQ ID NO: 1629200 - RNA, 19 nt, Artificial Sequence
  Description of Artificial Sequence: Synthetic oligonucleotide
  Antisense strand to SEQ ID NO: 1629199
aacuucaggccucagcaaa

SEQ ID NO: 1629201 - RNA, 19 nt, Artificial Sequence
  Description of Artificial Sequence: Synthetic oligonucleotide
  Sense strand starting at position 2636 of SEQ ID NO: 1560853
gguugagcuugaguguuca

SEQ ID NO: 1629202 - RNA, 19 nt, Artificial Sequence
  Description of Artificial Sequence: Synthetic oligonucleotide
  Antisense strand to SEQ ID NO: 1629201
ugaacacucaagcucaacc

SEQ ID NO: 1629203 - RNA, 19 nt, Artificial Sequence
  Description of Artificial Sequence: Synthetic oligonucleotide
  Sense strand starting at position 2662 of SEQ ID NO: 1560853
ggcauuguuccaggagcug

SEQ ID NO: 1629204 - RNA, 19 nt, Artificial Sequence
  Description of Artificial Sequence: Synthetic oligonucleotide
  Antisense strand to SEQ ID NO: 1629203
cagcuccuggaacaaugcc

SEQ ID NO: 1629205 - RNA, 19 nt, Artificial Sequence
  Description of Artificial Sequence: Synthetic oligonucleotide
  Sense strand starting at position 2705 of SEQ ID NO: 1560853
agugaaauguccuuccucu

SEQ ID NO: 1629206 - RNA, 19 nt, Artificial Sequence
  Description of Artificial Sequence: Synthetic oligonucleotide
  Antisense strand to SEQ ID NO: 1629205
agaggaaggacauuucacu

SEQ ID NO: 1629207 - RNA, 19 nt, Artificial Sequence
  Description of Artificial Sequence: Synthetic oligonucleotide
  Sense strand starting at position 2807 of SEQ ID NO: 1560853
ugggcuguuguguauguaa

SEQ ID NO: 1629208 - RNA, 19 nt, Artificial Sequence
  Description of Artificial Sequence: Synthetic oligonucleotide
  Antisense strand to SEQ ID NO: 1629207
uuacauacacaacagccca

SEQ ID NO: 1629209 - RNA, 19 nt, Artificial Sequence
  Description of Artificial Sequence: Synthetic oligonucleotide
  Sense strand starting at position 3037 of SEQ ID NO: 1560853
uagggugcuaagugauaga

SEQ ID NO: 1629210 - RNA, 19 nt, Artificial Sequence
  Description of Artificial Sequence: Synthetic oligonucleotide
  Antisense strand to SEQ ID NO: 1629209
ucuaucacuuagcacccua

SEQ ID NO: 1629211 - RNA, 19 nt, Artificial Sequence
  Description of Artificial Sequence: Synthetic oligonucleotide
  Sense strand starting at position 3042 of SEQ ID NO: 1560853
ugcuaagugauagagugaa

SEQ ID NO: 1629212 - RNA, 19 nt, Artificial Sequence
  Description of Artificial Sequence: Synthetic oligonucleotide
  Antisense strand to SEQ ID NO: 1629211
uucacucuaucacuuagca

SEQ ID NO: 1629213 - RNA, 19 nt, Artificial Sequence
  Description of Artificial Sequence: Synthetic oligonucleotide
  Sense strand starting at position 3065 of SEQ ID NO: 1560853
ggacacuucccaugggagu

SEQ ID NO: 1629214 - RNA, 19 nt, Artificial Sequence
  Description of Artificial Sequence: Synthetic oligonucleotide
  Antisense strand to SEQ ID NO: 1629213
acucccaugggaagugucc

SEQ ID NO: 1629215 - RNA, 19 nt, Artificial Sequence
  Description of Artificial Sequence: Synthetic oligonucleotide
  Sense strand starting at position 3066 of SEQ ID NO: 1560853
gacacuucccaugggagua

SEQ ID NO: 1629216 - RNA, 19 nt, Artificial Sequence
  Description of Artificial Sequence: Synthetic oligonucleotide
  Antisense strand to SEQ ID NO: 1629215
uacucccaugggaaguguc

SEQ ID NO: 1629217 - RNA, 19 nt, Artificial Sequence
  Description of Artificial Sequence: Synthetic oligonucleotide
  Sense strand starting at position 3106 of SEQ ID NO: 1560853
gcucguuucccaggauuug

SEQ ID NO: 1629218 - RNA, 19 nt, Artificial Sequence
  Description of Artificial Sequence: Synthetic oligonucleotide
  Antisense strand to SEQ ID NO: 1629217
caaauccugggaaacgagc

SEQ ID NO: 1629219 - RNA, 19 nt, Artificial Sequence
  Description of Artificial Sequence: Synthetic oligonucleotide
  Sense strand starting at position 3130 of SEQ ID NO: 1560853
aggagcuuugccugguaga

SEQ ID NO: 1629220 - RNA, 19 nt, Artificial Sequence
  Description of Artificial Sequence: Synthetic oligonucleotide
  Antisense strand to SEQ ID NO: 1629219
ucuaccaggcaaagcuccu

SEQ ID NO: 1629221 - RNA, 19 nt, Artificial Sequence
  Description of Artificial Sequence: Synthetic oligonucleotide
  Sense strand starting at position 3131 of SEQ ID NO: 1560853
ggagcuuugccugguagaa

SEQ ID NO: 1629222 - RNA, 19 nt, Artificial Sequence
  Description of Artificial Sequence: Synthetic oligonucleotide
  Antisense strand to SEQ ID NO: 1629221
uucuaccaggcaaagcucc

SEQ ID NO: 1629223 - RNA, 19 nt, Artificial Sequence
  Description of Artificial Sequence: Synthetic oligonucleotide
  Sense strand starting at position 3143 of SEQ ID NO: 1560853
gguagaaccauaugaaggu

SEQ ID NO: 1629224 - RNA, 19 nt, Artificial Sequence
  Description of Artificial Sequence: Synthetic oligonucleotide
  Antisense strand to SEQ ID NO: 1629223
accuucauaugguucuacc

SEQ ID NO: 1629225 - RNA, 19 nt, Artificial Sequence
  Description of Artificial Sequence: Synthetic oligonucleotide
  Sense strand starting at position 3613 of SEQ ID NO: 1560853
uugauaugcuggccagguu

SEQ ID NO: 1629226 - RNA, 19 nt, Artificial Sequence
  Description of Artificial Sequence: Synthetic oligonucleotide
  Antisense strand to SEQ ID NO: 1629225
aaccuggccagcauaucaa

SEQ ID NO: 1629227 - RNA, 19 nt, Artificial Sequence
  Description of Artificial Sequence: Synthetic oligonucleotide
  Sense strand starting at position 58 of SEQ ID NO: 1560854
cuacaauuauugugucacu

SEQ ID NO: 1629228 - RNA, 19 nt, Artificial Sequence
  Description of Artificial Sequence: Synthetic oligonucleotide
  Antisense strand to SEQ ID NO: 1629227
agugacacaauaauuguag

SEQ ID NO: 1629229 - RNA, 19 nt, Artificial Sequence
  Description of Artificial Sequence: Synthetic oligonucleotide
  Sense strand starting at position 118 of SEQ ID NO: 1560854
ccuccaggcugucuagauu

SEQ ID NO: 1629230 - RNA, 19 nt, Artificial Sequence
  Description of Artificial Sequence: Synthetic oligonucleotide
  Antisense strand to SEQ ID NO: 1629229
aaucuagacagccuggagg

SEQ ID NO: 1629231 - RNA, 19 nt, Artificial Sequence
  Description of Artificial Sequence: Synthetic oligonucleotide
  Sense strand starting at position 207 of SEQ ID NO: 1560854
ggcugugcuaagugaucuu

SEQ ID NO: 1629232 - RNA, 19 nt, Artificial Sequence
  Description of Artificial Sequence: Synthetic oligonucleotide
  Antisense strand to SEQ ID NO: 1629231
aagaucacuuagcacagcc

SEQ ID NO: 1629233 - RNA, 19 nt, Artificial Sequence
  Description of Artificial Sequence: Synthetic oligonucleotide
  Sense strand starting at position 216 of SEQ ID NO: 1560854
aagugaucuuccuggcauu

SEQ ID NO: 1629234 - RNA, 19 nt, Artificial Sequence
  Description of Artificial Sequence: Synthetic oligonucleotide
  Antisense strand to SEQ ID NO: 1629233
aaugccaggaagaucacuu

SEQ ID NO: 1629235 - RNA, 19 nt, Artificial Sequence
  Description of Artificial Sequence: Synthetic oligonucleotide
  Sense strand starting at position 217 of SEQ ID NO: 1560854
agugaucuuccuggcauua

SEQ ID NO: 1629236 - RNA, 19 nt, Artificial Sequence
  Description of Artificial Sequence: Synthetic oligonucleotide
  Antisense strand to SEQ ID NO: 1629235
uaaugccaggaagaucacu

SEQ ID NO: 1629237 - RNA, 19 nt, Artificial Sequence
  Description of Artificial Sequence: Synthetic oligonucleotide
  Sense strand starting at position 219 of SEQ ID NO: 1560854
ugaucuuccuggcauuaag

SEQ ID NO: 1629238 - RNA, 19 nt, Artificial Sequence
  Description of Artificial Sequence: Synthetic oligonucleotide
  Antisense strand to SEQ ID NO: 1629237
cuuaaugccaggaagauca

SEQ ID NO: 1629239 - RNA, 19 nt, Artificial Sequence
  Description of Artificial Sequence: Synthetic oligonucleotide
  Sense strand starting at position 525 of SEQ ID NO: 1560854
gggugaugcgugcccguaa

SEQ ID NO: 1629240 - RNA, 19 nt, Artificial Sequence
  Description of Artificial Sequence: Synthetic oligonucleotide
  Antisense strand to SEQ ID NO: 1629239
uuacgggcacgcaucaccc

SEQ ID NO: 1629241 - RNA, 19 nt, Artificial Sequence
  Description of Artificial Sequence: Synthetic oligonucleotide
  Sense strand starting at position 694 of SEQ ID NO: 1560854
agugaucccacaggauaug

SEQ ID NO: 1629242 - RNA, 19 nt, Artificial Sequence
  Description of Artificial Sequence: Synthetic oligonucleotide
  Antisense strand to SEQ ID NO: 1629241
cauauccugugggaucacu

SEQ ID NO: 1629243 - RNA, 19 nt, Artificial Sequence
  Description of Artificial Sequence: Synthetic oligonucleotide
  Sense strand starting at position 708 of SEQ ID NO: 1560854
auaugaaugcuaugcagag

SEQ ID NO: 1629244 - RNA, 19 nt, Artificial Sequence
  Description of Artificial Sequence: Synthetic oligonucleotide
  Antisense strand to SEQ ID NO: 1629243
cucugcauagcauucauau

SEQ ID NO: 1629245 - RNA, 19 nt, Artificial Sequence
  Description of Artificial Sequence: Synthetic oligonucleotide
  Sense strand starting at position 709 of SEQ ID NO: 1560854
uaugaaugcuaugcagaga

SEQ ID NO: 1629246 - RNA, 19 nt, Artificial Sequence
  Description of Artificial Sequence: Synthetic oligonucleotide
  Antisense strand to SEQ ID NO: 1629245
ucucugcauagcauucaua

SEQ ID NO: 1629247 - RNA, 19 nt, Artificial Sequence
  Description of Artificial Sequence: Synthetic oligonucleotide
  Sense strand starting at position 710 of SEQ ID NO: 1560854
augaaugcuaugcagagau

SEQ ID NO: 1629248 - RNA, 19 nt, Artificial Sequence
  Description of Artificial Sequence: Synthetic oligonucleotide
  Antisense strand to SEQ ID NO: 1629247
aucucugcauagcauucau

SEQ ID NO: 1629249 - RNA, 19 nt, Artificial Sequence
  Description of Artificial Sequence: Synthetic oligonucleotide
  Sense strand starting at position 726 of SEQ ID NO: 1560854
gaugcuguagccugggaua

SEQ ID NO: 1629250 - RNA, 19 nt, Artificial Sequence
  Description of Artificial Sequence: Synthetic oligonucleotide
  Antisense strand to SEQ ID NO: 1629249
uaucccaggcuacagcauc

SEQ ID NO: 1629251 - RNA, 19 nt, Artificial Sequence
  Description of Artificial Sequence: Synthetic oligonucleotide
  Sense strand starting at position 803 of SEQ ID NO: 1560854
aaguuugagucucagcuca

SEQ ID NO: 1629252 - RNA, 19 nt, Artificial Sequence
  Description of Artificial Sequence: Synthetic oligonucleotide
  Antisense strand to SEQ ID NO: 1629251
ugagcugagacucaaacuu

SEQ ID NO: 1629253 - RNA, 19 nt, Artificial Sequence
  Description of Artificial Sequence: Synthetic oligonucleotide
  Sense strand starting at position 836 of SEQ ID NO: 1560854
ggaugaccucugugagccu

SEQ ID NO: 1629254 - RNA, 19 nt, Artificial Sequence
  Description of Artificial Sequence: Synthetic oligonucleotide
  Antisense strand to SEQ ID NO: 1629253
aggcucacagaggucaucc

SEQ ID NO: 1629255 - RNA, 19 nt, Artificial Sequence
  Description of Artificial Sequence: Synthetic oligonucleotide
  Sense strand starting at position 889 of SEQ ID NO: 1560854
auguaaucagcucaugcaa

SEQ ID NO: 1629256 - RNA, 19 nt, Artificial Sequence
  Description of Artificial Sequence: Synthetic oligonucleotide
  Antisense strand to SEQ ID NO: 1629255
uugcaugagcugauuacau

SEQ ID NO: 1629257 - RNA, 19 nt, Artificial Sequence
  Description of Artificial Sequence: Synthetic oligonucleotide
  Sense strand starting at position 1018 of SEQ ID NO: 1560854
cccugaaucuccuggauca

SEQ ID NO: 1629258 - RNA, 19 nt, Artificial Sequence
  Description of Artificial Sequence: Synthetic oligonucleotide
  Antisense strand to SEQ ID NO: 1629257
ugauccaggagauucaggg

SEQ ID NO: 1629259 - RNA, 19 nt, Artificial Sequence
  Description of Artificial Sequence: Synthetic oligonucleotide
  Sense strand starting at position 1289 of SEQ ID NO: 1560854
aaagguuuccgcugaagac

SEQ ID NO: 1629260 - RNA, 19 nt, Artificial Sequence
  Description of Artificial Sequence: Synthetic oligonucleotide
  Antisense strand to SEQ ID NO: 1629259
gucuucagcggaaaccuuu

SEQ ID NO: 1629261 - RNA, 19 nt, Artificial Sequence
  Description of Artificial Sequence: Synthetic oligonucleotide
  Sense strand starting at position 1290 of SEQ ID NO: 1560854
aagguuuccgcugaagaca

SEQ ID NO: 1629262 - RNA, 19 nt, Artificial Sequence
  Description of Artificial Sequence: Synthetic oligonucleotide
  Antisense strand to SEQ ID NO: 1629261
ugucuucagcggaaaccuu

SEQ ID NO: 1629263 - RNA, 19 nt, Artificial Sequence
  Description of Artificial Sequence: Synthetic oligonucleotide
  Sense strand starting at position 1420 of SEQ ID NO: 1560854
auuugucacugggacacuu

SEQ ID NO: 1629264 - RNA, 19 nt, Artificial Sequence
  Description of Artificial Sequence: Synthetic oligonucleotide
  Antisense strand to SEQ ID NO: 1629263
aagugucccagugacaaau

SEQ ID NO: 1629265 - RNA, 19 nt, Artificial Sequence
  Description of Artificial Sequence: Synthetic oligonucleotide
  Sense strand starting at position 1761 of SEQ ID NO: 1560854
uuccaaaucugagaggacu

SEQ ID NO: 1629266 - RNA, 19 nt, Artificial Sequence
  Description of Artificial Sequence: Synthetic oligonucleotide
  Antisense strand to SEQ ID NO: 1629265
aguccucucagauuuggaa

SEQ ID NO: 1629267 - RNA, 19 nt, Artificial Sequence
  Description of Artificial Sequence: Synthetic oligonucleotide
  Sense strand starting at position 2141 of SEQ ID NO: 1560854
gggaacaucuuaugccgua

SEQ ID NO: 1629268 - RNA, 19 nt, Artificial Sequence
  Description of Artificial Sequence: Synthetic oligonucleotide
  Antisense strand to SEQ ID NO: 1629267
uacggcauaagauguuccc

SEQ ID NO: 1629269 - RNA, 19 nt, Artificial Sequence
  Description of Artificial Sequence: Synthetic oligonucleotide
  Sense strand starting at position 2208 of SEQ ID NO: 1560854
uccuuuauucugcaagggu

SEQ ID NO: 1629270 - RNA, 19 nt, Artificial Sequence
  Description of Artificial Sequence: Synthetic oligonucleotide
  Antisense strand to SEQ ID NO: 1629269
acccuugcagaauaaagga

SEQ ID NO: 1629271 - RNA, 19 nt, Artificial Sequence
  Description of Artificial Sequence: Synthetic oligonucleotide
  Sense strand starting at position 2248 of SEQ ID NO: 1560854
caugcauacugcgcagaau

SEQ ID NO: 1629272 - RNA, 19 nt, Artificial Sequence
  Description of Artificial Sequence: Synthetic oligonucleotide
  Antisense strand to SEQ ID NO: 1629271
auucugcgcaguaugcaug

SEQ ID NO: 1629273 - RNA, 19 nt, Artificial Sequence
  Description of Artificial Sequence: Synthetic oligonucleotide
  Sense strand starting at position 2249 of SEQ ID NO: 1560854
augcauacugcgcagaauu

SEQ ID NO: 1629274 - RNA, 19 nt, Artificial Sequence
  Description of Artificial Sequence: Synthetic oligonucleotide
  Antisense strand to SEQ ID NO: 1629273
aauucugcgcaguaugcau

SEQ ID NO: 1629275 - RNA, 19 nt, Artificial Sequence
  Description of Artificial Sequence: Synthetic oligonucleotide
  Sense strand starting at position 2436 of SEQ ID NO: 1560854
ccauauuuguguggugcca

SEQ ID NO: 1629276 - RNA, 19 nt, Artificial Sequence
  Description of Artificial Sequence: Synthetic oligonucleotide
  Antisense strand to SEQ ID NO: 1629275
uggcaccacacaaauaugg

SEQ ID NO: 1629277 - RNA, 19 nt, Artificial Sequence
  Description of Artificial Sequence: Synthetic oligonucleotide
  Sense strand starting at position 2438 of SEQ ID NO: 1560854
auauuuguguggugccaga

SEQ ID NO: 1629278 - RNA, 19 nt, Artificial Sequence
  Description of Artificial Sequence: Synthetic oligonucleotide
  Antisense strand to SEQ ID NO: 1629277
ucuggcaccacacaaauau

SEQ ID NO: 1629279 - RNA, 19 nt, Artificial Sequence
  Description of Artificial Sequence: Synthetic oligonucleotide
  Sense strand starting at position 2442 of SEQ ID NO: 1560854
uuguguggugccagaaguu

SEQ ID NO: 1629280 - RNA, 19 nt, Artificial Sequence
  Description of Artificial Sequence: Synthetic oligonucleotide
  Antisense strand to SEQ ID NO: 1629279
aacuucuggcaccacacaa

SEQ ID NO: 1629281 - RNA, 19 nt, Artificial Sequence
  Description of Artificial Sequence: Synthetic oligonucleotide
  Sense strand starting at position 2451 of SEQ ID NO: 1560854
gccagaaguuucucugcag

SEQ ID NO: 1629282 - RNA, 19 nt, Artificial Sequence
  Description of Artificial Sequence: Synthetic oligonucleotide
  Antisense strand to SEQ ID NO: 1629281
cugcagagaaacuucuggc

SEQ ID NO: 1629283 - RNA, 19 nt, Artificial Sequence
  Description of Artificial Sequence: Synthetic oligonucleotide
  Sense strand starting at position 2731 of SEQ ID NO: 1560854
cccuccuuggcugaaauga

SEQ ID NO: 1629284 - RNA, 19 nt, Artificial Sequence
  Description of Artificial Sequence: Synthetic oligonucleotide
  Antisense strand to SEQ ID NO: 1629283
ucauuucagccaaggaggg

SEQ ID NO: 1629285 - RNA, 19 nt, Artificial Sequence
  Description of Artificial Sequence: Synthetic oligonucleotide
  Sense strand starting at position 3242 of SEQ ID NO: 1560854
agguauuauuaagcagaaa

SEQ ID NO: 1629286 - RNA, 19 nt, Artificial Sequence
  Description of Artificial Sequence: Synthetic oligonucleotide
  Antisense strand to SEQ ID NO: 1629285
uuucugcuuaauaauaccu

SEQ ID NO: 1629287 - RNA, 19 nt, Artificial Sequence
  Description of Artificial Sequence: Synthetic oligonucleotide
  Sense strand starting at position 3590 of SEQ ID NO: 1560854
aucauuuaguauggucaca

SEQ ID NO: 1629288 - RNA, 19 nt, Artificial Sequence
  Description of Artificial Sequence: Synthetic oligonucleotide
  Antisense strand to SEQ ID NO: 1629287
ugugaccauacuaaaugau

SEQ ID NO: 1629289 - RNA, 19 nt, Artificial Sequence
  Description of Artificial Sequence: Synthetic oligonucleotide
  Sense strand starting at position 3663 of SEQ ID NO: 1560854
gaggaagcguuguucuguu

SEQ ID NO: 1629290 - RNA, 19 nt, Artificial Sequence
  Description of Artificial Sequence: Synthetic oligonucleotide
  Antisense strand to SEQ ID NO: 1629289
aacagaacaacgcuuccuc

SEQ ID NO: 1629291 - RNA, 19 nt, Artificial Sequence
  Description of Artificial Sequence: Synthetic oligonucleotide
  Sense strand starting at position 3667 of SEQ ID NO: 1560854
aagcguuguucuguuagag

SEQ ID NO: 1629292 - RNA, 19 nt, Artificial Sequence
  Description of Artificial Sequence: Synthetic oligonucleotide
  Antisense strand to SEQ ID NO: 1629291
cucuaacagaacaacgcuu

SEQ ID NO: 1629293 - RNA, 19 nt, Artificial Sequence
  Description of Artificial Sequence: Synthetic oligonucleotide
  Sense strand starting at position 3679 of SEQ ID NO: 1560854
guuagagcugcgucucaac

SEQ ID NO: 1629294 - RNA, 19 nt, Artificial Sequence
  Description of Artificial Sequence: Synthetic oligonucleotide
  Antisense strand to SEQ ID NO: 1629293
guugagacgcagcucuaac

SEQ ID NO: 1629295 - RNA, 19 nt, Artificial Sequence
  Description of Artificial Sequence: Synthetic oligonucleotide
  Sense strand starting at position 3714 of SEQ ID NO: 1560854
ggcacauucugccaacauu

SEQ ID NO: 1629296 - RNA, 19 nt, Artificial Sequence
  Description of Artificial Sequence: Synthetic oligonucleotide
  Antisense strand to SEQ ID NO: 1629295
aauguuggcagaaugugcc

SEQ ID NO: 1629297 - RNA, 19 nt, Artificial Sequence
  Description of Artificial Sequence: Synthetic oligonucleotide
  Sense strand starting at position 3777 of SEQ ID NO: 1560854
cugaguuucuggccacauc

SEQ ID NO: 1629298 - RNA, 19 nt, Artificial Sequence
  Description of Artificial Sequence: Synthetic oligonucleotide
  Antisense strand to SEQ ID NO: 1629297
gauguggccagaaacucag

SEQ ID NO: 1629299 - RNA, 19 nt, Artificial Sequence
  Description of Artificial Sequence: Synthetic oligonucleotide
  Sense strand starting at position 3778 of SEQ ID NO: 1560854
ugaguuucuggccacaucu

SEQ ID NO: 1629300 - RNA, 19 nt, Artificial Sequence
  Description of Artificial Sequence: Synthetic oligonucleotide
  Antisense strand to SEQ ID NO: 1629299
agauguggccagaaacuca

SEQ ID NO: 1629301 - RNA, 19 nt, Artificial Sequence
  Description of Artificial Sequence: Synthetic oligonucleotide
  Sense strand starting at position 3816 of SEQ ID NO: 1560854
uuggacuugggucacgaau

SEQ ID NO: 1629302 - RNA, 19 nt, Artificial Sequence
  Description of Artificial Sequence: Synthetic oligonucleotide
  Antisense strand to SEQ ID NO: 1629301
auucgugacccaaguccaa

SEQ ID NO: 1629303 - RNA, 19 nt, Artificial Sequence
  Description of Artificial Sequence: Synthetic oligonucleotide
  Sense strand starting at position 3818 of SEQ ID NO: 1560854
ggacuugggucacgaauuu

SEQ ID NO: 1629304 - RNA, 19 nt, Artificial Sequence
  Description of Artificial Sequence: Synthetic oligonucleotide
  Antisense strand to SEQ ID NO: 1629303
aaauucgugacccaagucc

SEQ ID NO: 1629305 - RNA, 19 nt, Artificial Sequence
  Description of Artificial Sequence: Synthetic oligonucleotide
  Sense strand starting at position 3888 of SEQ ID NO: 1560854
gagcaauggagcgaucaca

SEQ ID NO: 1629306 - RNA, 19 nt, Artificial Sequence
  Description of Artificial Sequence: Synthetic oligonucleotide
  Antisense strand to SEQ ID NO: 1629305
ugugaucgcuccauugcuc

SEQ ID NO: 1629307 - RNA, 19 nt, Artificial Sequence
  Description of Artificial Sequence: Synthetic oligonucleotide
  Sense strand starting at position 4 of SEQ ID NO: 1560855
gguaucuucugccuccgaa

SEQ ID NO: 1629308 - RNA, 19 nt, Artificial Sequence
  Description of Artificial Sequence: Synthetic oligonucleotide
  Antisense strand to SEQ ID NO: 1629307
uucggaggcagaagauacc

SEQ ID NO: 1629309 - RNA, 19 nt, Artificial Sequence
  Description of Artificial Sequence: Synthetic oligonucleotide
  Sense strand starting at position 69 of SEQ ID NO: 1560855
cuacaauuauugugucacu

SEQ ID NO: 1629310 - RNA, 19 nt, Artificial Sequence
  Description of Artificial Sequence: Synthetic oligonucleotide
  Antisense strand to SEQ ID NO: 1629309
agugacacaauaauuguag

SEQ ID NO: 1629311 - RNA, 19 nt, Artificial Sequence
  Description of Artificial Sequence: Synthetic oligonucleotide
  Sense strand starting at position 129 of SEQ ID NO: 1560855
ccuccaggcugucuagauu

SEQ ID NO: 1629312 - RNA, 19 nt, Artificial Sequence
  Description of Artificial Sequence: Synthetic oligonucleotide
  Antisense strand to SEQ ID NO: 1629311
aaucuagacagccuggagg

SEQ ID NO: 1629313 - RNA, 19 nt, Artificial Sequence
  Description of Artificial Sequence: Synthetic oligonucleotide
  Sense strand starting at position 218 of SEQ ID NO: 1560855
ggcugugcuaagugaucuu

SEQ ID NO: 1629314 - RNA, 19 nt, Artificial Sequence
  Description of Artificial Sequence: Synthetic oligonucleotide
  Antisense strand to SEQ ID NO: 1629313
aagaucacuuagcacagcc

SEQ ID NO: 1629315 - RNA, 19 nt, Artificial Sequence
  Description of Artificial Sequence: Synthetic oligonucleotide
  Sense strand starting at position 227 of SEQ ID NO: 1560855
aagugaucuuccuggcauu

SEQ ID NO: 1629316 - RNA, 19 nt, Artificial Sequence
  Description of Artificial Sequence: Synthetic oligonucleotide
  Antisense strand to SEQ ID NO: 1629315
aaugccaggaagaucacuu

SEQ ID NO: 1629317 - RNA, 19 nt, Artificial Sequence
  Description of Artificial Sequence: Synthetic oligonucleotide
  Sense strand starting at position 228 of SEQ ID NO: 1560855
agugaucuuccuggcauua

SEQ ID NO: 1629318 - RNA, 19 nt, Artificial Sequence
  Description of Artificial Sequence: Synthetic oligonucleotide
  Antisense strand to SEQ ID NO: 1629317
uaaugccaggaagaucacu

SEQ ID NO: 1629319 - RNA, 19 nt, Artificial Sequence
  Description of Artificial Sequence: Synthetic oligonucleotide
  Sense strand starting at position 230 of SEQ ID NO: 1560855
ugaucuuccuggcauuaag

SEQ ID NO: 1629320 - RNA, 19 nt, Artificial Sequence
  Description of Artificial Sequence: Synthetic oligonucleotide
  Antisense strand to SEQ ID NO: 1629319
cuuaaugccaggaagauca

SEQ ID NO: 1629321 - RNA, 19 nt, Artificial Sequence
  Description of Artificial Sequence: Synthetic oligonucleotide
  Sense strand starting at position 536 of SEQ ID NO: 1560855
gggugaugcgugcccguaa

SEQ ID NO: 1629322 - RNA, 19 nt, Artificial Sequence
  Description of Artificial Sequence: Synthetic oligonucleotide
  Antisense strand to SEQ ID NO: 1629321
uuacgggcacgcaucaccc

SEQ ID NO: 1629323 - RNA, 19 nt, Artificial Sequence
  Description of Artificial Sequence: Synthetic oligonucleotide
  Sense strand starting at position 705 of SEQ ID NO: 1560855
agugaucccacaggauaug

SEQ ID NO: 1629324 - RNA, 19 nt, Artificial Sequence
  Description of Artificial Sequence: Synthetic oligonucleotide
  Antisense strand to SEQ ID NO: 1629323
cauauccugugggaucacu

SEQ ID NO: 1629325 - RNA, 19 nt, Artificial Sequence
  Description of Artificial Sequence: Synthetic oligonucleotide
  Sense strand starting at position 719 of SEQ ID NO: 1560855
auaugaaugcuaugcagag

SEQ ID NO: 1629326 - RNA, 19 nt, Artificial Sequence
  Description of Artificial Sequence: Synthetic oligonucleotide
  Antisense strand to SEQ ID NO: 1629325
cucugcauagcauucauau

SEQ ID NO: 1629327 - RNA, 19 nt, Artificial Sequence
  Description of Artificial Sequence: Synthetic oligonucleotide
  Sense strand starting at position 720 of SEQ ID NO: 1560855
uaugaaugcuaugcagaga

SEQ ID NO: 1629328 - RNA, 19 nt, Artificial Sequence
  Description of Artificial Sequence: Synthetic oligonucleotide
  Antisense strand to SEQ ID NO: 1629327
ucucugcauagcauucaua

SEQ ID NO: 1629329 - RNA, 19 nt, Artificial Sequence
  Description of Artificial Sequence: Synthetic oligonucleotide
  Sense strand starting at position 721 of SEQ ID NO: 1560855
augaaugcuaugcagagau

SEQ ID NO: 1629330 - RNA, 19 nt, Artificial Sequence
  Description of Artificial Sequence: Synthetic oligonucleotide
  Antisense strand to SEQ ID NO: 1629329
aucucugcauagcauucau

SEQ ID NO: 1629331 - RNA, 19 nt, Artificial Sequence
  Description of Artificial Sequence: Synthetic oligonucleotide
  Sense strand starting at position 737 of SEQ ID NO: 1560855
gaugcuguagccugggaua

SEQ ID NO: 1629332 - RNA, 19 nt, Artificial Sequence
  Description of Artificial Sequence: Synthetic oligonucleotide
  Antisense strand to SEQ ID NO: 1629331
uaucccaggcuacagcauc

SEQ ID NO: 1629333 - RNA, 19 nt, Artificial Sequence
  Description of Artificial Sequence: Synthetic oligonucleotide
  Sense strand starting at position 814 of SEQ ID NO: 1560855
aaguuugagucucagcuca

SEQ ID NO: 1629334 - RNA, 19 nt, Artificial Sequence
  Description of Artificial Sequence: Synthetic oligonucleotide
  Antisense strand to SEQ ID NO: 1629333
ugagcugagacucaaacuu

SEQ ID NO: 1629335 - RNA, 19 nt, Artificial Sequence
  Description of Artificial Sequence: Synthetic oligonucleotide
  Sense strand starting at position 847 of SEQ ID NO: 1560855
ggaugaccucugugagccu

SEQ ID NO: 1629336 - RNA, 19 nt, Artificial Sequence
  Description of Artificial Sequence: Synthetic oligonucleotide
  Antisense strand to SEQ ID NO: 1629335
aggcucacagaggucaucc

SEQ ID NO: 1629337 - RNA, 19 nt, Artificial Sequence
  Description of Artificial Sequence: Synthetic oligonucleotide
  Sense strand starting at position 900 of SEQ ID NO: 1560855
auguaaucagcucaugcaa

SEQ ID NO: 1629338 - RNA, 19 nt, Artificial Sequence
  Description of Artificial Sequence: Synthetic oligonucleotide
  Antisense strand to SEQ ID NO: 1629337
uugcaugagcugauuacau

SEQ ID NO: 1629339 - RNA, 19 nt, Artificial Sequence
  Description of Artificial Sequence: Synthetic oligonucleotide
  Sense strand starting at position 1029 of SEQ ID NO: 1560855
cccugaaucuccuggauca

SEQ ID NO: 1629340 - RNA, 19 nt, Artificial Sequence
  Description of Artificial Sequence: Synthetic oligonucleotide
  Antisense strand to SEQ ID NO: 1629339
ugauccaggagauucaggg

SEQ ID NO: 1629341 - RNA, 19 nt, Artificial Sequence
  Description of Artificial Sequence: Synthetic oligonucleotide
  Sense strand starting at position 1300 of SEQ ID NO: 1560855
aaagguuuccgcugaagac

SEQ ID NO: 1629342 - RNA, 19 nt, Artificial Sequence
  Description of Artificial Sequence: Synthetic oligonucleotide
  Antisense strand to SEQ ID NO: 1629341
gucuucagcggaaaccuuu

SEQ ID NO: 1629343 - RNA, 19 nt, Artificial Sequence
  Description of Artificial Sequence: Synthetic oligonucleotide
  Sense strand starting at position 1301 of SEQ ID NO: 1560855
aagguuuccgcugaagaca

SEQ ID NO: 1629344 - RNA, 19 nt, Artificial Sequence
  Description of Artificial Sequence: Synthetic oligonucleotide
  Antisense strand to SEQ ID NO: 1629343
ugucuucagcggaaaccuu

SEQ ID NO: 1629345 - RNA, 19 nt, Artificial Sequence
  Description of Artificial Sequence: Synthetic oligonucleotide
  Sense strand starting at position 1431 of SEQ ID NO: 1560855
auuugucacugggacacuu

SEQ ID NO: 1629346 - RNA, 19 nt, Artificial Sequence
  Description of Artificial Sequence: Synthetic oligonucleotide
  Antisense strand to SEQ ID NO: 1629345
aagugucccagugacaaau

SEQ ID NO: 1629347 - RNA, 19 nt, Artificial Sequence
  Description of Artificial Sequence: Synthetic oligonucleotide
  Sense strand starting at position 1772 of SEQ ID NO: 1560855
uuccaaaucugagaggacu

SEQ ID NO: 1629348 - RNA, 19 nt, Artificial Sequence
  Description of Artificial Sequence: Synthetic oligonucleotide
  Antisense strand to SEQ ID NO: 1629347
aguccucucagauuuggaa

SEQ ID NO: 1629349 - RNA, 19 nt, Artificial Sequence
  Description of Artificial Sequence: Synthetic oligonucleotide
  Sense strand starting at position 2219 of SEQ ID NO: 1560855
uccuuuauucugcaagggu

SEQ ID NO: 1629350 - RNA, 19 nt, Artificial Sequence
  Description of Artificial Sequence: Synthetic oligonucleotide
  Antisense strand to SEQ ID NO: 1629349
acccuugcagaauaaagga

SEQ ID NO: 1629351 - RNA, 19 nt, Artificial Sequence
  Description of Artificial Sequence: Synthetic oligonucleotide
  Sense strand starting at position 2259 of SEQ ID NO: 1560855
caugcauacugcgcagaau

SEQ ID NO: 1629352 - RNA, 19 nt, Artificial Sequence
  Description of Artificial Sequence: Synthetic oligonucleotide
  Antisense strand to SEQ ID NO: 1629351
auucugcgcaguaugcaug

SEQ ID NO: 1629353 - RNA, 19 nt, Artificial Sequence
  Description of Artificial Sequence: Synthetic oligonucleotide
  Sense strand starting at position 2260 of SEQ ID NO: 1560855
augcauacugcgcagaauu

SEQ ID NO: 1629354 - RNA, 19 nt, Artificial Sequence
  Description of Artificial Sequence: Synthetic oligonucleotide
  Antisense strand to SEQ ID NO: 1629353
aauucugcgcaguaugcau

SEQ ID NO: 1629355 - RNA, 19 nt, Artificial Sequence
  Description of Artificial Sequence: Synthetic oligonucleotide
  Sense strand starting at position 2447 of SEQ ID NO: 1560855
ccauauuuguguggugcca

SEQ ID NO: 1629356 - RNA, 19 nt, Artificial Sequence
  Description of Artificial Sequence: Synthetic oligonucleotide
  Antisense strand to SEQ ID NO: 1629355
uggcaccacacaaauaugg

SEQ ID NO: 1629357 - RNA, 19 nt, Artificial Sequence
  Description of Artificial Sequence: Synthetic oligonucleotide
  Sense strand starting at position 2449 of SEQ ID NO: 1560855
auauuuguguggugccaga

SEQ ID NO: 1629358 - RNA, 19 nt, Artificial Sequence
  Description of Artificial Sequence: Synthetic oligonucleotide
  Antisense strand to SEQ ID NO: 1629357
ucuggcaccacacaaauau

SEQ ID NO: 1629359 - RNA, 19 nt, Artificial Sequence
  Description of Artificial Sequence: Synthetic oligonucleotide
  Sense strand starting at position 2453 of SEQ ID NO: 1560855
uuguguggugccagaaguu

SEQ ID NO: 1629360 - RNA, 19 nt, Artificial Sequence
  Description of Artificial Sequence: Synthetic oligonucleotide
  Antisense strand to SEQ ID NO: 1629359
aacuucuggcaccacacaa

SEQ ID NO: 1629361 - RNA, 19 nt, Artificial Sequence
  Description of Artificial Sequence: Synthetic oligonucleotide
  Sense strand starting at position 2462 of SEQ ID NO: 1560855
gccagaaguuucucugcag

SEQ ID NO: 1629362 - RNA, 19 nt, Artificial Sequence
  Description of Artificial Sequence: Synthetic oligonucleotide
  Antisense strand to SEQ ID NO: 1629361
cugcagagaaacuucuggc

SEQ ID NO: 1629363 - RNA, 19 nt, Artificial Sequence
  Description of Artificial Sequence: Synthetic oligonucleotide
  Sense strand starting at position 2742 of SEQ ID NO: 1560855
cccuccuuggcugaaauga

SEQ ID NO: 1629364 - RNA, 19 nt, Artificial Sequence
  Description of Artificial Sequence: Synthetic oligonucleotide
  Antisense strand to SEQ ID NO: 1629363
ucauuucagccaaggaggg

SEQ ID NO: 1629365 - RNA, 19 nt, Artificial Sequence
  Description of Artificial Sequence: Synthetic oligonucleotide
  Sense strand starting at position 3253 of SEQ ID NO: 1560855
agguauuauuaagcagaaa

SEQ ID NO: 1629366 - RNA, 19 nt, Artificial Sequence
  Description of Artificial Sequence: Synthetic oligonucleotide
  Antisense strand to SEQ ID NO: 1629365
uuucugcuuaauaauaccu

SEQ ID NO: 1629367 - RNA, 19 nt, Artificial Sequence
  Description of Artificial Sequence: Synthetic oligonucleotide
  Sense strand starting at position 3601 of SEQ ID NO: 1560855
aucauuuaguauggucaca

SEQ ID NO: 1629368 - RNA, 19 nt, Artificial Sequence
  Description of Artificial Sequence: Synthetic oligonucleotide
  Antisense strand to SEQ ID NO: 1629367
ugugaccauacuaaaugau

SEQ ID NO: 1629369 - RNA, 19 nt, Artificial Sequence
  Description of Artificial Sequence: Synthetic oligonucleotide
  Sense strand starting at position 3674 of SEQ ID NO: 1560855
gaggaagcguuguucuguu

SEQ ID NO: 1629370 - RNA, 19 nt, Artificial Sequence
  Description of Artificial Sequence: Synthetic oligonucleotide
  Antisense strand to SEQ ID NO: 1629369
aacagaacaacgcuuccuc

SEQ ID NO: 1629371 - RNA, 19 nt, Artificial Sequence
  Description of Artificial Sequence: Synthetic oligonucleotide
  Sense strand starting at position 3678 of SEQ ID NO: 1560855
aagcguuguucuguuagag

SEQ ID NO: 1629372 - RNA, 19 nt, Artificial Sequence
  Description of Artificial Sequence: Synthetic oligonucleotide
  Antisense strand to SEQ ID NO: 1629371
cucuaacagaacaacgcuu

SEQ ID NO: 1629373 - RNA, 19 nt, Artificial Sequence
  Description of Artificial Sequence: Synthetic oligonucleotide
  Sense strand starting at position 3690 of SEQ ID NO: 1560855
guuagagcugcgucucaac

SEQ ID NO: 1629374 - RNA, 19 nt, Artificial Sequence
  Description of Artificial Sequence: Synthetic oligonucleotide
  Antisense strand to SEQ ID NO: 1629373
guugagacgcagcucuaac

SEQ ID NO: 1629375 - RNA, 19 nt, Artificial Sequence
  Description of Artificial Sequence: Synthetic oligonucleotide
  Sense strand starting at position 3725 of SEQ ID NO: 1560855
ggcacauucugccaacauu

SEQ ID NO: 1629376 - RNA, 19 nt, Artificial Sequence
  Description of Artificial Sequence: Synthetic oligonucleotide
  Antisense strand to SEQ ID NO: 1629375
aauguuggcagaaugugcc

SEQ ID NO: 1629377 - RNA, 19 nt, Artificial Sequence
  Description of Artificial Sequence: Synthetic oligonucleotide
  Sense strand starting at position 3788 of SEQ ID NO: 1560855
cugaguuucuggccacauc

SEQ ID NO: 1629378 - RNA, 19 nt, Artificial Sequence
  Description of Artificial Sequence: Synthetic oligonucleotide
  Antisense strand to SEQ ID NO: 1629377
gauguggccagaaacucag

SEQ ID NO: 1629379 - RNA, 19 nt, Artificial Sequence
  Description of Artificial Sequence: Synthetic oligonucleotide
  Sense strand starting at position 3789 of SEQ ID NO: 1560855
ugaguuucuggccacaucu

SEQ ID NO: 1629380 - RNA, 19 nt, Artificial Sequence
  Description of Artificial Sequence: Synthetic oligonucleotide
  Antisense strand to SEQ ID NO: 1629379
agauguggccagaaacuca

SEQ ID NO: 1629381 - RNA, 19 nt, Artificial Sequence
  Description of Artificial Sequence: Synthetic oligonucleotide
  Sense strand starting at position 3827 of SEQ ID NO: 1560855
uuggacuugggucacgaau

SEQ ID NO: 1629382 - RNA, 19 nt, Artificial Sequence
  Description of Artificial Sequence: Synthetic oligonucleotide
  Antisense strand to SEQ ID NO: 1629381
auucgugacccaaguccaa

SEQ ID NO: 1629383 - RNA, 19 nt, Artificial Sequence
  Description of Artificial Sequence: Synthetic oligonucleotide
  Sense strand starting at position 3829 of SEQ ID NO: 1560855
ggacuugggucacgaauuu

SEQ ID NO: 1629384 - RNA, 19 nt, Artificial Sequence
  Description of Artificial Sequence: Synthetic oligonucleotide
  Antisense strand to SEQ ID NO: 1629383
aaauucgugacccaagucc

SEQ ID NO: 1629385 - RNA, 19 nt, Artificial Sequence
  Description of Artificial Sequence: Synthetic oligonucleotide
  Sense strand starting at position 3899 of SEQ ID NO: 1560855
gagcaauggagcgaucaca

SEQ ID NO: 1629386 - RNA, 19 nt, Artificial Sequence
  Description of Artificial Sequence: Synthetic oligonucleotide
  Antisense strand to SEQ ID NO: 1629385
ugugaucgcuccauugcuc

SEQ ID NO: 1629387 - RNA, 19 nt, Artificial Sequence
  Description of Artificial Sequence: Synthetic oligonucleotide
  Sense strand starting at position 25 of SEQ ID NO: 1560856
agguguaaagccgacuuau

SEQ ID NO: 1629388 - RNA, 19 nt, Artificial Sequence
  Description of Artificial Sequence: Synthetic oligonucleotide
  Antisense strand to SEQ ID NO: 1629387
auaagucggcuuuacaccu

SEQ ID NO: 1629389 - RNA, 19 nt, Artificial Sequence
  Description of Artificial Sequence: Synthetic oligonucleotide
  Sense strand starting at position 36 of SEQ ID NO: 1560856
cgacuuaugaaagguguuu

SEQ ID NO: 1629390 - RNA, 19 nt, Artificial Sequence
  Description of Artificial Sequence: Synthetic oligonucleotide
  Antisense strand to SEQ ID NO: 1629389
aaacaccuuucauaagucg

SEQ ID NO: 1629391 - RNA, 19 nt, Artificial Sequence
  Description of Artificial Sequence: Synthetic oligonucleotide
  Sense strand starting at position 148 of SEQ ID NO: 1560856
ucgguaucuguccacuaga

SEQ ID NO: 1629392 - RNA, 19 nt, Artificial Sequence
  Description of Artificial Sequence: Synthetic oligonucleotide
  Antisense strand to SEQ ID NO: 1629391
ucuaguggacagauaccga

SEQ ID NO: 1629393 - RNA, 19 nt, Artificial Sequence
  Description of Artificial Sequence: Synthetic oligonucleotide
  Sense strand starting at position 151 of SEQ ID NO: 1560856
guaucuguccacuagaucu

SEQ ID NO: 1629394 - RNA, 19 nt, Artificial Sequence
  Description of Artificial Sequence: Synthetic oligonucleotide
  Antisense strand to SEQ ID NO: 1629393
agaucuaguggacagauac

SEQ ID NO: 1629395 - RNA, 19 nt, Artificial Sequence
  Description of Artificial Sequence: Synthetic oligonucleotide
  Sense strand starting at position 187 of SEQ ID NO: 1560856
gaucuuucuuccucggagu

SEQ ID NO: 1629396 - RNA, 19 nt, Artificial Sequence
  Description of Artificial Sequence: Synthetic oligonucleotide
  Antisense strand to SEQ ID NO: 1629395
acuccgaggaagaaagauc

SEQ ID NO: 1629397 - RNA, 19 nt, Artificial Sequence
  Description of Artificial Sequence: Synthetic oligonucleotide
  Sense strand starting at position 188 of SEQ ID NO: 1560856
aucuuucuuccucggagua

SEQ ID NO: 1629398 - RNA, 19 nt, Artificial Sequence
  Description of Artificial Sequence: Synthetic oligonucleotide
  Antisense strand to SEQ ID NO: 1629397
uacuccgaggaagaaagau

SEQ ID NO: 1629399 - RNA, 19 nt, Artificial Sequence
  Description of Artificial Sequence: Synthetic oligonucleotide
  Sense strand starting at position 189 of SEQ ID NO: 1560856
ucuuucuuccucggaguau

SEQ ID NO: 1629400 - RNA, 19 nt, Artificial Sequence
  Description of Artificial Sequence: Synthetic oligonucleotide
  Antisense strand to SEQ ID NO: 1629399
auacuccgaggaagaaaga

SEQ ID NO: 1629401 - RNA, 19 nt, Artificial Sequence
  Description of Artificial Sequence: Synthetic oligonucleotide
  Sense strand starting at position 230 of SEQ ID NO: 1560856
cuauuuguuucucugagca

SEQ ID NO: 1629402 - RNA, 19 nt, Artificial Sequence
  Description of Artificial Sequence: Synthetic oligonucleotide
  Antisense strand to SEQ ID NO: 1629401
ugcucagagaaacaaauag

SEQ ID NO: 1629403 - RNA, 19 nt, Artificial Sequence
  Description of Artificial Sequence: Synthetic oligonucleotide
  Sense strand starting at position 232 of SEQ ID NO: 1560856
auuuguuucucugagcauc

SEQ ID NO: 1629404 - RNA, 19 nt, Artificial Sequence
  Description of Artificial Sequence: Synthetic oligonucleotide
  Antisense strand to SEQ ID NO: 1629403
gaugcucagagaaacaaau

SEQ ID NO: 1629405 - RNA, 19 nt, Artificial Sequence
  Description of Artificial Sequence: Synthetic oligonucleotide
  Sense strand starting at position 242 of SEQ ID NO: 1560856
cugagcaucucugccauuu

SEQ ID NO: 1629406 - RNA, 19 nt, Artificial Sequence
  Description of Artificial Sequence: Synthetic oligonucleotide
  Antisense strand to SEQ ID NO: 1629405
aaauggcagagaugcucag

SEQ ID NO: 1629407 - RNA, 19 nt, Artificial Sequence
  Description of Artificial Sequence: Synthetic oligonucleotide
  Sense strand starting at position 392 of SEQ ID NO: 1560856
aucucuuacucguuugguu

SEQ ID NO: 1629408 - RNA, 19 nt, Artificial Sequence
  Description of Artificial Sequence: Synthetic oligonucleotide
  Antisense strand to SEQ ID NO: 1629407
aaccaaacgaguaagagau

SEQ ID NO: 1629409 - RNA, 19 nt, Artificial Sequence
  Description of Artificial Sequence: Synthetic oligonucleotide
  Sense strand starting at position 491 of SEQ ID NO: 1560856
gagauagguucugcuuugu

SEQ ID NO: 1629410 - RNA, 19 nt, Artificial Sequence
  Description of Artificial Sequence: Synthetic oligonucleotide
  Antisense strand to SEQ ID NO: 1629409
acaaagcagaaccuaucuc

SEQ ID NO: 1629411 - RNA, 19 nt, Artificial Sequence
  Description of Artificial Sequence: Synthetic oligonucleotide
  Sense strand starting at position 762 of SEQ ID NO: 1560856
ccuaucugguuccucuaua

SEQ ID NO: 1629412 - RNA, 19 nt, Artificial Sequence
  Description of Artificial Sequence: Synthetic oligonucleotide
  Antisense strand to SEQ ID NO: 1629411
uauagaggaaccagauagg

SEQ ID NO: 1629413 - RNA, 19 nt, Artificial Sequence
  Description of Artificial Sequence: Synthetic oligonucleotide
  Sense strand starting at position 767 of SEQ ID NO: 1560856
cugguuccucuauacuagu

SEQ ID NO: 1629414 - RNA, 19 nt, Artificial Sequence
  Description of Artificial Sequence: Synthetic oligonucleotide
  Antisense strand to SEQ ID NO: 1629413
acuaguauagaggaaccag

SEQ ID NO: 1629415 - RNA, 19 nt, Artificial Sequence
  Description of Artificial Sequence: Synthetic oligonucleotide
  Sense strand starting at position 847 of SEQ ID NO: 1560856
ucugguuucugucucugua

SEQ ID NO: 1629416 - RNA, 19 nt, Artificial Sequence
  Description of Artificial Sequence: Synthetic oligonucleotide
  Antisense strand to SEQ ID NO: 1629415
uacagagacagaaaccaga

SEQ ID NO: 1629417 - RNA, 19 nt, Artificial Sequence
  Description of Artificial Sequence: Synthetic oligonucleotide
  Sense strand starting at position 926 of SEQ ID NO: 1560856
cucaguagucucugcuauc

SEQ ID NO: 1629418 - RNA, 19 nt, Artificial Sequence
  Description of Artificial Sequence: Synthetic oligonucleotide
  Antisense strand to SEQ ID NO: 1629417
gauagcagagacuacugag

SEQ ID NO: 1629419 - RNA, 19 nt, Artificial Sequence
  Description of Artificial Sequence: Synthetic oligonucleotide
  Sense strand starting at position 927 of SEQ ID NO: 1560856
ucaguagucucugcuauca

SEQ ID NO: 1629420 - RNA, 19 nt, Artificial Sequence
  Description of Artificial Sequence: Synthetic oligonucleotide
  Antisense strand to SEQ ID NO: 1629419
ugauagcagagacuacuga

SEQ ID NO: 1629421 - RNA, 19 nt, Artificial Sequence
  Description of Artificial Sequence: Synthetic oligonucleotide
  Sense strand starting at position 1569 of SEQ ID NO: 1560856
cccucaucucuagguguca

SEQ ID NO: 1629422 - RNA, 19 nt, Artificial Sequence
  Description of Artificial Sequence: Synthetic oligonucleotide
  Antisense strand to SEQ ID NO: 1629421
ugacaccuagagaugaggg

SEQ ID NO: 1629423 - RNA, 19 nt, Artificial Sequence
  Description of Artificial Sequence: Synthetic oligonucleotide
  Sense strand starting at position 1619 of SEQ ID NO: 1560856
ucucuuggauucgcuuaga

SEQ ID NO: 1629424 - RNA, 19 nt, Artificial Sequence
  Description of Artificial Sequence: Synthetic oligonucleotide
  Antisense strand to SEQ ID NO: 1629423
ucuaagcgaauccaagaga

SEQ ID NO: 1629425 - RNA, 19 nt, Artificial Sequence
  Description of Artificial Sequence: Synthetic oligonucleotide
  Sense strand starting at position 1775 of SEQ ID NO: 1560856
ggcucuccuucucugaaca

SEQ ID NO: 1629426 - RNA, 19 nt, Artificial Sequence
  Description of Artificial Sequence: Synthetic oligonucleotide
  Antisense strand to SEQ ID NO: 1629425
uguucagagaaggagagcc

SEQ ID NO: 1629427 - RNA, 19 nt, Artificial Sequence
  Description of Artificial Sequence: Synthetic oligonucleotide
  Sense strand starting at position 1802 of SEQ ID NO: 1560856
gucggaguccuugagauuc

SEQ ID NO: 1629428 - RNA, 19 nt, Artificial Sequence
  Description of Artificial Sequence: Synthetic oligonucleotide
  Antisense strand to SEQ ID NO: 1629427
gaaucucaaggacuccgac

SEQ ID NO: 1629429 - RNA, 19 nt, Artificial Sequence
  Description of Artificial Sequence: Synthetic oligonucleotide
  Sense strand starting at position 1905 of SEQ ID NO: 1560856
gccgcuucugccuaugaga

SEQ ID NO: 1629430 - RNA, 19 nt, Artificial Sequence
  Description of Artificial Sequence: Synthetic oligonucleotide
  Antisense strand to SEQ ID NO: 1629429
ucucauaggcagaagcggc

SEQ ID NO: 1629431 - RNA, 19 nt, Artificial Sequence
  Description of Artificial Sequence: Synthetic oligonucleotide
  Sense strand starting at position 1907 of SEQ ID NO: 1560856
cgcuucugccuaugagaca

SEQ ID NO: 1629432 - RNA, 19 nt, Artificial Sequence
  Description of Artificial Sequence: Synthetic oligonucleotide
  Antisense strand to SEQ ID NO: 1629431
ugucucauaggcagaagcg

SEQ ID NO: 1629433 - RNA, 19 nt, Artificial Sequence
  Description of Artificial Sequence: Synthetic oligonucleotide
  Sense strand starting at position 2187 of SEQ ID NO: 1560856
augggagccucucuaaugu

SEQ ID NO: 1629434 - RNA, 19 nt, Artificial Sequence
  Description of Artificial Sequence: Synthetic oligonucleotide
  Antisense strand to SEQ ID NO: 1629433
acauuagagaggcucccau

SEQ ID NO: 1629435 - RNA, 19 nt, Artificial Sequence
  Description of Artificial Sequence: Synthetic oligonucleotide
  Sense strand starting at position 2430 of SEQ ID NO: 1560856
cuuuccucucugggcgaaa

SEQ ID NO: 1629436 - RNA, 19 nt, Artificial Sequence
  Description of Artificial Sequence: Synthetic oligonucleotide
  Antisense strand to SEQ ID NO: 1629435
uuucgcccagagaggaaag

SEQ ID NO: 1629437 - RNA, 19 nt, Artificial Sequence
  Description of Artificial Sequence: Synthetic oligonucleotide
  Sense strand starting at position 2487 of SEQ ID NO: 1560856
aagggaugauuagaaguca

SEQ ID NO: 1629438 - RNA, 19 nt, Artificial Sequence
  Description of Artificial Sequence: Synthetic oligonucleotide
  Antisense strand to SEQ ID NO: 1629437
ugacuucuaaucaucccuu

SEQ ID NO: 1629439 - RNA, 19 nt, Artificial Sequence
  Description of Artificial Sequence: Synthetic oligonucleotide
  Sense strand starting at position 2499 of SEQ ID NO: 1560856
gaagucaagagcuguguga

SEQ ID NO: 1629440 - RNA, 19 nt, Artificial Sequence
  Description of Artificial Sequence: Synthetic oligonucleotide
  Antisense strand to SEQ ID NO: 1629439
ucacacagcucuugacuuc

SEQ ID NO: 1629441 - RNA, 19 nt, Artificial Sequence
  Description of Artificial Sequence: Synthetic oligonucleotide
  Sense strand starting at position 2501 of SEQ ID NO: 1560856
agucaagagcugugugaaa

SEQ ID NO: 1629442 - RNA, 19 nt, Artificial Sequence
  Description of Artificial Sequence: Synthetic oligonucleotide
  Antisense strand to SEQ ID NO: 1629441
uuucacacagcucuugacu

SEQ ID NO: 1629443 - RNA, 19 nt, Artificial Sequence
  Description of Artificial Sequence: Synthetic oligonucleotide
  Sense strand starting at position 2503 of SEQ ID NO: 1560856
ucaagagcugugugaaaca

SEQ ID NO: 1629444 - RNA, 19 nt, Artificial Sequence
  Description of Artificial Sequence: Synthetic oligonucleotide
  Antisense strand to SEQ ID NO: 1629443
uguuucacacagcucuuga

SEQ ID NO: 1629445 - RNA, 19 nt, Artificial Sequence
  Description of Artificial Sequence: Synthetic oligonucleotide
  Sense strand starting at position 2552 of SEQ ID NO: 1560856
aaagcuguccagcgagaaa

SEQ ID NO: 1629446 - RNA, 19 nt, Artificial Sequence
  Description of Artificial Sequence: Synthetic oligonucleotide
  Antisense strand to SEQ ID NO: 1629445
uuucucgcuggacagcuuu

SEQ ID NO: 1629447 - RNA, 19 nt, Artificial Sequence
  Description of Artificial Sequence: Synthetic oligonucleotide
  Sense strand starting at position 2563 of SEQ ID NO: 1560856
gcgagaaagugauuacuac

SEQ ID NO: 1629448 - RNA, 19 nt, Artificial Sequence
  Description of Artificial Sequence: Synthetic oligonucleotide
  Antisense strand to SEQ ID NO: 1629447
guaguaaucacuuucucgc

SEQ ID NO: 1629449 - RNA, 19 nt, Artificial Sequence
  Description of Artificial Sequence: Synthetic oligonucleotide
  Sense strand starting at position 2570 of SEQ ID NO: 1560856
agugauuacuaccuccauu

SEQ ID NO: 1629450 - RNA, 19 nt, Artificial Sequence
  Description of Artificial Sequence: Synthetic oligonucleotide
  Antisense strand to SEQ ID NO: 1629449
aauggagguaguaaucacu

SEQ ID NO: 1629451 - RNA, 19 nt, Artificial Sequence
  Description of Artificial Sequence: Synthetic oligonucleotide
  Sense strand starting at position 3004 of SEQ ID NO: 1560856
gugagucuugaaugugcca

SEQ ID NO: 1629452 - RNA, 19 nt, Artificial Sequence
  Description of Artificial Sequence: Synthetic oligonucleotide
  Antisense strand to SEQ ID NO: 1629451
uggcacauucaagacucac

SEQ ID NO: 1629453 - RNA, 19 nt, Artificial Sequence
  Description of Artificial Sequence: Synthetic oligonucleotide
  Sense strand starting at position 3095 of SEQ ID NO: 1560856
acauguuguaagugguaaa

SEQ ID NO: 1629454 - RNA, 19 nt, Artificial Sequence
  Description of Artificial Sequence: Synthetic oligonucleotide
  Antisense strand to SEQ ID NO: 1629453
uuuaccacuuacaacaugu

SEQ ID NO: 1629455 - RNA, 19 nt, Artificial Sequence
  Description of Artificial Sequence: Synthetic oligonucleotide
  Sense strand starting at position 3157 of SEQ ID NO: 1560856
cguauacugucacuacaag

SEQ ID NO: 1629456 - RNA, 19 nt, Artificial Sequence
  Description of Artificial Sequence: Synthetic oligonucleotide
  Antisense strand to SEQ ID NO: 1629455
cuuguagugacaguauacg

SEQ ID NO: 1629457 - RNA, 19 nt, Artificial Sequence
  Description of Artificial Sequence: Synthetic oligonucleotide
  Sense strand starting at position 3326 of SEQ ID NO: 1560856
ggccuagagaagugaagua

SEQ ID NO: 1629458 - RNA, 19 nt, Artificial Sequence
  Description of Artificial Sequence: Synthetic oligonucleotide
  Antisense strand to SEQ ID NO: 1629457
uacuucacuucucuaggcc

SEQ ID NO: 1629459 - RNA, 19 nt, Artificial Sequence
  Description of Artificial Sequence: Synthetic oligonucleotide
  Sense strand starting at position 3390 of SEQ ID NO: 1560856
guucuaauccaaggugaug

SEQ ID NO: 1629460 - RNA, 19 nt, Artificial Sequence
  Description of Artificial Sequence: Synthetic oligonucleotide
  Antisense strand to SEQ ID NO: 1629459
caucaccuuggauuagaac

SEQ ID NO: 1629461 - RNA, 19 nt, Artificial Sequence
  Description of Artificial Sequence: Synthetic oligonucleotide
  Sense strand starting at position 3441 of SEQ ID NO: 1560856
uugaucuugugaguuagaa

SEQ ID NO: 1629462 - RNA, 19 nt, Artificial Sequence
  Description of Artificial Sequence: Synthetic oligonucleotide
  Antisense strand to SEQ ID NO: 1629461
uucuaacucacaagaucaa

SEQ ID NO: 1629463 - RNA, 19 nt, Artificial Sequence
  Description of Artificial Sequence: Synthetic oligonucleotide
  Sense strand starting at position 3555 of SEQ ID NO: 1560856
agaucauauuggcuaacau

SEQ ID NO: 1629464 - RNA, 19 nt, Artificial Sequence
  Description of Artificial Sequence: Synthetic oligonucleotide
  Antisense strand to SEQ ID NO: 1629463
auguuagccaauaugaucu

SEQ ID NO: 1629465 - RNA, 19 nt, Artificial Sequence
  Description of Artificial Sequence: Synthetic oligonucleotide
  Sense strand starting at position 3875 of SEQ ID NO: 1560856
agaagucagacucacguua

SEQ ID NO: 1629466 - RNA, 19 nt, Artificial Sequence
  Description of Artificial Sequence: Synthetic oligonucleotide
  Antisense strand to SEQ ID NO: 1629465
uaacgugagucugacuucu

SEQ ID NO: 1629467 - RNA, 19 nt, Artificial Sequence
  Description of Artificial Sequence: Synthetic oligonucleotide
  Sense strand starting at position 126 of SEQ ID NO: 1560857
aggcucacgguuuagagaa

SEQ ID NO: 1629468 - RNA, 19 nt, Artificial Sequence
  Description of Artificial Sequence: Synthetic oligonucleotide
  Antisense strand to SEQ ID NO: 1629467
uucucuaaaccgugagccu

SEQ ID NO: 1629469 - RNA, 19 nt, Artificial Sequence
  Description of Artificial Sequence: Synthetic oligonucleotide
  Sense strand starting at position 475 of SEQ ID NO: 1560857
cgaagagagguauaugcua

SEQ ID NO: 1629470 - RNA, 19 nt, Artificial Sequence
  Description of Artificial Sequence: Synthetic oligonucleotide
  Antisense strand to SEQ ID NO: 1629469
uagcauauaccucucuucg

SEQ ID NO: 1629471 - RNA, 19 nt, Artificial Sequence
  Description of Artificial Sequence: Synthetic oligonucleotide
  Sense strand starting at position 480 of SEQ ID NO: 1560857
agagguauaugcuauaauc

SEQ ID NO: 1629472 - RNA, 19 nt, Artificial Sequence
  Description of Artificial Sequence: Synthetic oligonucleotide
  Antisense strand to SEQ ID NO: 1629471
gauuauagcauauaccucu

SEQ ID NO: 1629473 - RNA, 19 nt, Artificial Sequence
  Description of Artificial Sequence: Synthetic oligonucleotide
  Sense strand starting at position 723 of SEQ ID NO: 1560857
gggauacucugagcucaau

SEQ ID NO: 1629474 - RNA, 19 nt, Artificial Sequence
  Description of Artificial Sequence: Synthetic oligonucleotide
  Antisense strand to SEQ ID NO: 1629473
auugagcucagaguauccc

SEQ ID NO: 1629475 - RNA, 19 nt, Artificial Sequence
  Description of Artificial Sequence: Synthetic oligonucleotide
  Sense strand starting at position 734 of SEQ ID NO: 1560857
agcucaaucccaggaugau

SEQ ID NO: 1629476 - RNA, 19 nt, Artificial Sequence
  Description of Artificial Sequence: Synthetic oligonucleotide
  Antisense strand to SEQ ID NO: 1629475
aucauccugggauugagcu

SEQ ID NO: 1629477 - RNA, 19 nt, Artificial Sequence
  Description of Artificial Sequence: Synthetic oligonucleotide
  Sense strand starting at position 735 of SEQ ID NO: 1560857
gcucaaucccaggaugauu

SEQ ID NO: 1629478 - RNA, 19 nt, Artificial Sequence
  Description of Artificial Sequence: Synthetic oligonucleotide
  Antisense strand to SEQ ID NO: 1629477
aaucauccugggauugagc

SEQ ID NO: 1629479 - RNA, 19 nt, Artificial Sequence
  Description of Artificial Sequence: Synthetic oligonucleotide
  Sense strand starting at position 775 of SEQ ID NO: 1560857
gaugguaucuaugggacau

SEQ ID NO: 1629480 - RNA, 19 nt, Artificial Sequence
  Description of Artificial Sequence: Synthetic oligonucleotide
  Antisense strand to SEQ ID NO: 1629479
augucccauagauaccauc

SEQ ID NO: 1629481 - RNA, 19 nt, Artificial Sequence
  Description of Artificial Sequence: Synthetic oligonucleotide
  Sense strand starting at position 776 of SEQ ID NO: 1560857
augguaucuaugggacaug

SEQ ID NO: 1629482 - RNA, 19 nt, Artificial Sequence
  Description of Artificial Sequence: Synthetic oligonucleotide
  Antisense strand to SEQ ID NO: 1629481
caugucccauagauaccau

SEQ ID NO: 1629483 - RNA, 19 nt, Artificial Sequence
  Description of Artificial Sequence: Synthetic oligonucleotide
  Sense strand starting at position 973 of SEQ ID NO: 1560857
gugggugucugaccuaaga

SEQ ID NO: 1629484 - RNA, 19 nt, Artificial Sequence
  Description of Artificial Sequence: Synthetic oligonucleotide
  Antisense strand to SEQ ID NO: 1629483
ucuuaggucagacacccac

SEQ ID NO: 1629485 - RNA, 19 nt, Artificial Sequence
  Description of Artificial Sequence: Synthetic oligonucleotide
  Sense strand starting at position 990 of SEQ ID NO: 1560857
gaaguagacucgcucaaga

SEQ ID NO: 1629486 - RNA, 19 nt, Artificial Sequence
  Description of Artificial Sequence: Synthetic oligonucleotide
  Antisense strand to SEQ ID NO: 1629485
ucuugagcgagucuacuuc

SEQ ID NO: 1629487 - RNA, 19 nt, Artificial Sequence
  Description of Artificial Sequence: Synthetic oligonucleotide
  Sense strand starting at position 1041 of SEQ ID NO: 1560857
gacaguaucugaugcugca

SEQ ID NO: 1629488 - RNA, 19 nt, Artificial Sequence
  Description of Artificial Sequence: Synthetic oligonucleotide
  Antisense strand to SEQ ID NO: 1629487
ugcagcaucagauacuguc

SEQ ID NO: 1629489 - RNA, 19 nt, Artificial Sequence
  Description of Artificial Sequence: Synthetic oligonucleotide
  Sense strand starting at position 1099 of SEQ ID NO: 1560857
cucagauucugucccgaga

SEQ ID NO: 1629490 - RNA, 19 nt, Artificial Sequence
  Description of Artificial Sequence: Synthetic oligonucleotide
  Antisense strand to SEQ ID NO: 1629489
ucucgggacagaaucugag

SEQ ID NO: 1629491 - RNA, 19 nt, Artificial Sequence
  Description of Artificial Sequence: Synthetic oligonucleotide
  Sense strand starting at position 1102 of SEQ ID NO: 1560857
agauucugucccgagagga

SEQ ID NO: 1629492 - RNA, 19 nt, Artificial Sequence
  Description of Artificial Sequence: Synthetic oligonucleotide
  Antisense strand to SEQ ID NO: 1629491
uccucucgggacagaaucu

SEQ ID NO: 1629493 - RNA, 19 nt, Artificial Sequence
  Description of Artificial Sequence: Synthetic oligonucleotide
  Sense strand starting at position 1172 of SEQ ID NO: 1560857
uaaagaaggucugugacca

SEQ ID NO: 1629494 - RNA, 19 nt, Artificial Sequence
  Description of Artificial Sequence: Synthetic oligonucleotide
  Antisense strand to SEQ ID NO: 1629493
uggucacagaccuucuuua

SEQ ID NO: 1629495 - RNA, 19 nt, Artificial Sequence
  Description of Artificial Sequence: Synthetic oligonucleotide
  Sense strand starting at position 1173 of SEQ ID NO: 1560857
aaagaaggucugugaccaa

SEQ ID NO: 1629496 - RNA, 19 nt, Artificial Sequence
  Description of Artificial Sequence: Synthetic oligonucleotide
  Antisense strand to SEQ ID NO: 1629495
uuggucacagaccuucuuu

SEQ ID NO: 1629497 - RNA, 19 nt, Artificial Sequence
  Description of Artificial Sequence: Synthetic oligonucleotide
  Sense strand starting at position 1176 of SEQ ID NO: 1560857
gaaggucugugaccaagaa

SEQ ID NO: 1629498 - RNA, 19 nt, Artificial Sequence
  Description of Artificial Sequence: Synthetic oligonucleotide
  Antisense strand to SEQ ID NO: 1629497
uucuuggucacagaccuuc

SEQ ID NO: 1629499 - RNA, 19 nt, Artificial Sequence
  Description of Artificial Sequence: Synthetic oligonucleotide
  Sense strand starting at position 1180 of SEQ ID NO: 1560857
gucugugaccaagaagagu

SEQ ID NO: 1629500 - RNA, 19 nt, Artificial Sequence
  Description of Artificial Sequence: Synthetic oligonucleotide
  Antisense strand to SEQ ID NO: 1629499
acucuucuuggucacagac

SEQ ID NO: 1629501 - RNA, 19 nt, Artificial Sequence
  Description of Artificial Sequence: Synthetic oligonucleotide
  Sense strand starting at position 1189 of SEQ ID NO: 1560857
caagaagagugguccgaac

SEQ ID NO: 1629502 - RNA, 19 nt, Artificial Sequence
  Description of Artificial Sequence: Synthetic oligonucleotide
  Antisense strand to SEQ ID NO: 1629501
guucggaccacucuucuug

SEQ ID NO: 1629503 - RNA, 19 nt, Artificial Sequence
  Description of Artificial Sequence: Synthetic oligonucleotide
  Sense strand starting at position 1191 of SEQ ID NO: 1560857
agaagagugguccgaacuc

SEQ ID NO: 1629504 - RNA, 19 nt, Artificial Sequence
  Description of Artificial Sequence: Synthetic oligonucleotide
  Antisense strand to SEQ ID NO: 1629503
gaguucggaccacucuucu

SEQ ID NO: 1629505 - RNA, 19 nt, Artificial Sequence
  Description of Artificial Sequence: Synthetic oligonucleotide
  Sense strand starting at position 2234 of SEQ ID NO: 1560857
gcgccugacuccuuaaagu

SEQ ID NO: 1629506 - RNA, 19 nt, Artificial Sequence
  Description of Artificial Sequence: Synthetic oligonucleotide
  Antisense strand to SEQ ID NO: 1629505
acuuuaaggagucaggcgc

SEQ ID NO: 1629507 - RNA, 19 nt, Artificial Sequence
  Description of Artificial Sequence: Synthetic oligonucleotide
  Sense strand starting at position 2598 of SEQ ID NO: 1560857
cucccaaauuccuuggaga

SEQ ID NO: 1629508 - RNA, 19 nt, Artificial Sequence
  Description of Artificial Sequence: Synthetic oligonucleotide
  Antisense strand to SEQ ID NO: 1629507
ucuccaaggaauuugggag

SEQ ID NO: 1629509 - RNA, 19 nt, Artificial Sequence
  Description of Artificial Sequence: Synthetic oligonucleotide
  Sense strand starting at position 2599 of SEQ ID NO: 1560857
ucccaaauuccuuggagau

SEQ ID NO: 1629510 - RNA, 19 nt, Artificial Sequence
  Description of Artificial Sequence: Synthetic oligonucleotide
  Antisense strand to SEQ ID NO: 1629509
aucuccaaggaauuuggga

SEQ ID NO: 1629511 - RNA, 19 nt, Artificial Sequence
  Description of Artificial Sequence: Synthetic oligonucleotide
  Sense strand starting at position 2600 of SEQ ID NO: 1560857
cccaaauuccuuggagauc

SEQ ID NO: 1629512 - RNA, 19 nt, Artificial Sequence
  Description of Artificial Sequence: Synthetic oligonucleotide
  Antisense strand to SEQ ID NO: 1629511
gaucuccaaggaauuuggg

SEQ ID NO: 1629513 - RNA, 19 nt, Artificial Sequence
  Description of Artificial Sequence: Synthetic oligonucleotide
  Sense strand starting at position 2603 of SEQ ID NO: 1560857
aaauuccuuggagaucgua

SEQ ID NO: 1629514 - RNA, 19 nt, Artificial Sequence
  Description of Artificial Sequence: Synthetic oligonucleotide
  Antisense strand to SEQ ID NO: 1629513
uacgaucuccaaggaauuu

SEQ ID NO: 1629515 - RNA, 19 nt, Artificial Sequence
  Description of Artificial Sequence: Synthetic oligonucleotide
  Sense strand starting at position 2737 of SEQ ID NO: 1560857
guggcuucgugcccguaga

SEQ ID NO: 1629516 - RNA, 19 nt, Artificial Sequence
  Description of Artificial Sequence: Synthetic oligonucleotide
  Antisense strand to SEQ ID NO: 1629515
ucuacgggcacgaagccac

SEQ ID NO: 1629517 - RNA, 19 nt, Artificial Sequence
  Description of Artificial Sequence: Synthetic oligonucleotide
  Sense strand starting at position 2738 of SEQ ID NO: 1560857
uggcuucgugcccguagaa

SEQ ID NO: 1629518 - RNA, 19 nt, Artificial Sequence
  Description of Artificial Sequence: Synthetic oligonucleotide
  Antisense strand to SEQ ID NO: 1629517
uucuacgggcacgaagcca

SEQ ID NO: 1629519 - RNA, 19 nt, Artificial Sequence
  Description of Artificial Sequence: Synthetic oligonucleotide
  Sense strand starting at position 2825 of SEQ ID NO: 1560857
cgaggaucucauuauguua

SEQ ID NO: 1629520 - RNA, 19 nt, Artificial Sequence
  Description of Artificial Sequence: Synthetic oligonucleotide
  Antisense strand to SEQ ID NO: 1629519
uaacauaaugagauccucg

SEQ ID NO: 1629521 - RNA, 19 nt, Artificial Sequence
  Description of Artificial Sequence: Synthetic oligonucleotide
  Sense strand starting at position 2833 of SEQ ID NO: 1560857
ucauuauguuauccagggu

SEQ ID NO: 1629522 - RNA, 19 nt, Artificial Sequence
  Description of Artificial Sequence: Synthetic oligonucleotide
  Antisense strand to SEQ ID NO: 1629521
acccuggauaacauaauga

SEQ ID NO: 1629523 - RNA, 19 nt, Artificial Sequence
  Description of Artificial Sequence: Synthetic oligonucleotide
  Sense strand starting at position 2836 of SEQ ID NO: 1560857
uuauguuauccaggguggu

SEQ ID NO: 1629524 - RNA, 19 nt, Artificial Sequence
  Description of Artificial Sequence: Synthetic oligonucleotide
  Antisense strand to SEQ ID NO: 1629523
accacccuggauaacauaa

SEQ ID NO: 1629525 - RNA, 19 nt, Artificial Sequence
  Description of Artificial Sequence: Synthetic oligonucleotide
  Sense strand starting at position 2854 of SEQ ID NO: 1560857
ucucgaaugucugggcuua

SEQ ID NO: 1629526 - RNA, 19 nt, Artificial Sequence
  Description of Artificial Sequence: Synthetic oligonucleotide
  Antisense strand to SEQ ID NO: 1629525
uaagcccagacauucgaga

SEQ ID NO: 1629527 - RNA, 19 nt, Artificial Sequence
  Description of Artificial Sequence: Synthetic oligonucleotide
  Sense strand starting at position 2855 of SEQ ID NO: 1560857
cucgaaugucugggcuuaa

SEQ ID NO: 1629528 - RNA, 19 nt, Artificial Sequence
  Description of Artificial Sequence: Synthetic oligonucleotide
  Antisense strand to SEQ ID NO: 1629527
uuaagcccagacauucgag

SEQ ID NO: 1629529 - RNA, 19 nt, Artificial Sequence
  Description of Artificial Sequence: Synthetic oligonucleotide
  Sense strand starting at position 2856 of SEQ ID NO: 1560857
ucgaaugucugggcuuaaa

SEQ ID NO: 1629530 - RNA, 19 nt, Artificial Sequence
  Description of Artificial Sequence: Synthetic oligonucleotide
  Antisense strand to SEQ ID NO: 1629529
uuuaagcccagacauucga

SEQ ID NO: 1629531 - RNA, 19 nt, Artificial Sequence
  Description of Artificial Sequence: Synthetic oligonucleotide
  Sense strand starting at position 2859 of SEQ ID NO: 1560857
aaugucugggcuuaaauga

SEQ ID NO: 1629532 - RNA, 19 nt, Artificial Sequence
  Description of Artificial Sequence: Synthetic oligonucleotide
  Antisense strand to SEQ ID NO: 1629531
ucauuuaagcccagacauu

SEQ ID NO: 1629533 - RNA, 19 nt, Artificial Sequence
  Description of Artificial Sequence: Synthetic oligonucleotide
  Sense strand starting at position 2933 of SEQ ID NO: 1560857
uggcuaguccaacacuuua

SEQ ID NO: 1629534 - RNA, 19 nt, Artificial Sequence
  Description of Artificial Sequence: Synthetic oligonucleotide
  Antisense strand to SEQ ID NO: 1629533
uaaaguguuggacuagcca

SEQ ID NO: 1629535 - RNA, 19 nt, Artificial Sequence
  Description of Artificial Sequence: Synthetic oligonucleotide
  Sense strand starting at position 2973 of SEQ ID NO: 1560857
aagaguccaugauggauga

SEQ ID NO: 1629536 - RNA, 19 nt, Artificial Sequence
  Description of Artificial Sequence: Synthetic oligonucleotide
  Antisense strand to SEQ ID NO: 1629535
ucauccaucauggacucuu

SEQ ID NO: 1629537 - RNA, 19 nt, Artificial Sequence
  Description of Artificial Sequence: Synthetic oligonucleotide
  Sense strand starting at position 3660 of SEQ ID NO: 1560857
uggucagguuggucuauga

SEQ ID NO: 1629538 - RNA, 19 nt, Artificial Sequence
  Description of Artificial Sequence: Synthetic oligonucleotide
  Antisense strand to SEQ ID NO: 1629537
ucauagaccaaccugacca

SEQ ID NO: 1629539 - RNA, 19 nt, Artificial Sequence
  Description of Artificial Sequence: Synthetic oligonucleotide
  Sense strand starting at position 3935 of SEQ ID NO: 1560857
agacuaaacucuugugcua

SEQ ID NO: 1629540 - RNA, 19 nt, Artificial Sequence
  Description of Artificial Sequence: Synthetic oligonucleotide
  Antisense strand to SEQ ID NO: 1629539
uagcacaagaguuuagucu

SEQ ID NO: 1629541 - RNA, 19 nt, Artificial Sequence
  Description of Artificial Sequence: Synthetic oligonucleotide
  Sense strand starting at position 782 of SEQ ID NO: 1560858
cuuucuguccuaggaugau

SEQ ID NO: 1629542 - RNA, 19 nt, Artificial Sequence
  Description of Artificial Sequence: Synthetic oligonucleotide
  Antisense strand to SEQ ID NO: 1629541
aucauccuaggacagaaag

SEQ ID NO: 1629543 - RNA, 19 nt, Artificial Sequence
  Description of Artificial Sequence: Synthetic oligonucleotide
  Sense strand starting at position 792 of SEQ ID NO: 1560858
uaggaugaucucugugggu

SEQ ID NO: 1629544 - RNA, 19 nt, Artificial Sequence
  Description of Artificial Sequence: Synthetic oligonucleotide
  Antisense strand to SEQ ID NO: 1629543
acccacagagaucauccua

SEQ ID NO: 1629545 - RNA, 19 nt, Artificial Sequence
  Description of Artificial Sequence: Synthetic oligonucleotide
  Sense strand starting at position 794 of SEQ ID NO: 1560858
ggaugaucucugugggugu

SEQ ID NO: 1629546 - RNA, 19 nt, Artificial Sequence
  Description of Artificial Sequence: Synthetic oligonucleotide
  Antisense strand to SEQ ID NO: 1629545
acacccacagagaucaucc

SEQ ID NO: 1629547 - RNA, 19 nt, Artificial Sequence
  Description of Artificial Sequence: Synthetic oligonucleotide
  Sense strand starting at position 934 of SEQ ID NO: 1560858
cuggauuugugucgauucu

SEQ ID NO: 1629548 - RNA, 19 nt, Artificial Sequence
  Description of Artificial Sequence: Synthetic oligonucleotide
  Antisense strand to SEQ ID NO: 1629547
agaaucgacacaaauccag

SEQ ID NO: 1629549 - RNA, 19 nt, Artificial Sequence
  Description of Artificial Sequence: Synthetic oligonucleotide
  Sense strand starting at position 943 of SEQ ID NO: 1560858
ugucgauucuggucugguu

SEQ ID NO: 1629550 - RNA, 19 nt, Artificial Sequence
  Description of Artificial Sequence: Synthetic oligonucleotide
  Antisense strand to SEQ ID NO: 1629549
aaccagaccagaaucgaca

SEQ ID NO: 1629551 - RNA, 19 nt, Artificial Sequence
  Description of Artificial Sequence: Synthetic oligonucleotide
  Sense strand starting at position 980 of SEQ ID NO: 1560858
uccuucgaggccuguauaa

SEQ ID NO: 1629552 - RNA, 19 nt, Artificial Sequence
  Description of Artificial Sequence: Synthetic oligonucleotide
  Antisense strand to SEQ ID NO: 1629551
uuauacaggccucgaagga

SEQ ID NO: 1629553 - RNA, 19 nt, Artificial Sequence
  Description of Artificial Sequence: Synthetic oligonucleotide
  Sense strand starting at position 982 of SEQ ID NO: 1560858
cuucgaggccuguauaaag

SEQ ID NO: 1629554 - RNA, 19 nt, Artificial Sequence
  Description of Artificial Sequence: Synthetic oligonucleotide
  Antisense strand to SEQ ID NO: 1629553
cuuuauacaggccucgaag

SEQ ID NO: 1629555 - RNA, 19 nt, Artificial Sequence
  Description of Artificial Sequence: Synthetic oligonucleotide
  Sense strand starting at position 1058 of SEQ ID NO: 1560858
uggagcaauucuuaugcau

SEQ ID NO: 1629556 - RNA, 19 nt, Artificial Sequence
  Description of Artificial Sequence: Synthetic oligonucleotide
  Antisense strand to SEQ ID NO: 1629555
augcauaagaauugcucca

SEQ ID NO: 1629557 - RNA, 19 nt, Artificial Sequence
  Description of Artificial Sequence: Synthetic oligonucleotide
  Sense strand starting at position 1065 of SEQ ID NO: 1560858
auucuuaugcaugagagcu

SEQ ID NO: 1629558 - RNA, 19 nt, Artificial Sequence
  Description of Artificial Sequence: Synthetic oligonucleotide
  Antisense strand to SEQ ID NO: 1629557
agcucucaugcauaagaau

SEQ ID NO: 1629559 - RNA, 19 nt, Artificial Sequence
  Description of Artificial Sequence: Synthetic oligonucleotide
  Sense strand starting at position 1071 of SEQ ID NO: 1560858
augcaugagagcuguggau

SEQ ID NO: 1629560 - RNA, 19 nt, Artificial Sequence
  Description of Artificial Sequence: Synthetic oligonucleotide
  Antisense strand to SEQ ID NO: 1629559
auccacagcucucaugcau

SEQ ID NO: 1629561 - RNA, 19 nt, Artificial Sequence
  Description of Artificial Sequence: Synthetic oligonucleotide
  Sense strand starting at position 1073 of SEQ ID NO: 1560858
gcaugagagcuguggauaa

SEQ ID NO: 1629562 - RNA, 19 nt, Artificial Sequence
  Description of Artificial Sequence: Synthetic oligonucleotide
  Antisense strand to SEQ ID NO: 1629561
uuauccacagcucucaugc

SEQ ID NO: 1629563 - RNA, 19 nt, Artificial Sequence
  Description of Artificial Sequence: Synthetic oligonucleotide
  Sense strand starting at position 1083 of SEQ ID NO: 1560858
uguggauaacgcgagaaau

SEQ ID NO: 1629564 - RNA, 19 nt, Artificial Sequence
  Description of Artificial Sequence: Synthetic oligonucleotide
  Antisense strand to SEQ ID NO: 1629563
auuucucgcguuauccaca

SEQ ID NO: 1629565 - RNA, 19 nt, Artificial Sequence
  Description of Artificial Sequence: Synthetic oligonucleotide
  Sense strand starting at position 1085 of SEQ ID NO: 1560858
uggauaacgcgagaaauua

SEQ ID NO: 1629566 - RNA, 19 nt, Artificial Sequence
  Description of Artificial Sequence: Synthetic oligonucleotide
  Antisense strand to SEQ ID NO: 1629565
uaauuucucgcguuaucca

SEQ ID NO: 1629567 - RNA, 19 nt, Artificial Sequence
  Description of Artificial Sequence: Synthetic oligonucleotide
  Sense strand starting at position 1094 of SEQ ID NO: 1560858
cgagaaauuagacgguuua

SEQ ID NO: 1629568 - RNA, 19 nt, Artificial Sequence
  Description of Artificial Sequence: Synthetic oligonucleotide
  Antisense strand to SEQ ID NO: 1629567
uaaaccgucuaauuucucg

SEQ ID NO: 1629569 - RNA, 19 nt, Artificial Sequence
  Description of Artificial Sequence: Synthetic oligonucleotide
  Sense strand starting at position 1095 of SEQ ID NO: 1560858
gagaaauuagacgguuuag

SEQ ID NO: 1629570 - RNA, 19 nt, Artificial Sequence
  Description of Artificial Sequence: Synthetic oligonucleotide
  Antisense strand to SEQ ID NO: 1629569
cuaaaccgucuaauuucuc

SEQ ID NO: 1629571 - RNA, 19 nt, Artificial Sequence
  Description of Artificial Sequence: Synthetic oligonucleotide
  Sense strand starting at position 1590 of SEQ ID NO: 1560858
ccgaauacucaaggaucca

SEQ ID NO: 1629572 - RNA, 19 nt, Artificial Sequence
  Description of Artificial Sequence: Synthetic oligonucleotide
  Antisense strand to SEQ ID NO: 1629571
uggauccuugaguauucgg

SEQ ID NO: 1629573 - RNA, 19 nt, Artificial Sequence
  Description of Artificial Sequence: Synthetic oligonucleotide
  Sense strand starting at position 1640 of SEQ ID NO: 1560858
uccucaaaucgcgccgaau

SEQ ID NO: 1629574 - RNA, 19 nt, Artificial Sequence
  Description of Artificial Sequence: Synthetic oligonucleotide
  Antisense strand to SEQ ID NO: 1629573
auucggcgcgauuugagga

SEQ ID NO: 1629575 - RNA, 19 nt, Artificial Sequence
  Description of Artificial Sequence: Synthetic oligonucleotide
  Sense strand starting at position 1710 of SEQ ID NO: 1560858
ucgccauggcccugggaaa

SEQ ID NO: 1629576 - RNA, 19 nt, Artificial Sequence
  Description of Artificial Sequence: Synthetic oligonucleotide
  Antisense strand to SEQ ID NO: 1629575
uuucccagggccauggcga

SEQ ID NO: 1629577 - RNA, 19 nt, Artificial Sequence
  Description of Artificial Sequence: Synthetic oligonucleotide
  Sense strand starting at position 1760 of SEQ ID NO: 1560858
gggaaacuuugcccaggau

SEQ ID NO: 1629578 - RNA, 19 nt, Artificial Sequence
  Description of Artificial Sequence: Synthetic oligonucleotide
  Antisense strand to SEQ ID NO: 1629577
auccugggcaaaguuuccc

SEQ ID NO: 1629579 - RNA, 19 nt, Artificial Sequence
  Description of Artificial Sequence: Synthetic oligonucleotide
  Sense strand starting at position 1902 of SEQ ID NO: 1560858
gggaauaugugucucuaga

SEQ ID NO: 1629580 - RNA, 19 nt, Artificial Sequence
  Description of Artificial Sequence: Synthetic oligonucleotide
  Antisense strand to SEQ ID NO: 1629579
ucuagagacacauauuccc

SEQ ID NO: 1629581 - RNA, 19 nt, Artificial Sequence
  Description of Artificial Sequence: Synthetic oligonucleotide
  Sense strand starting at position 1904 of SEQ ID NO: 1560858
gaauaugugucucuagacg

SEQ ID NO: 1629582 - RNA, 19 nt, Artificial Sequence
  Description of Artificial Sequence: Synthetic oligonucleotide
  Antisense strand to SEQ ID NO: 1629581
cgucuagagacacauauuc

SEQ ID NO: 1629583 - RNA, 19 nt, Artificial Sequence
  Description of Artificial Sequence: Synthetic oligonucleotide
  Sense strand starting at position 1968 of SEQ ID NO: 1560858
uccggucuaucgguaaaca

SEQ ID NO: 1629584 - RNA, 19 nt, Artificial Sequence
  Description of Artificial Sequence: Synthetic oligonucleotide
  Antisense strand to SEQ ID NO: 1629583
uguuuaccgauagaccgga

SEQ ID NO: 1629585 - RNA, 19 nt, Artificial Sequence
  Description of Artificial Sequence: Synthetic oligonucleotide
  Sense strand starting at position 2036 of SEQ ID NO: 1560858
gcugguaucgcguuaucga

SEQ ID NO: 1629586 - RNA, 19 nt, Artificial Sequence
  Description of Artificial Sequence: Synthetic oligonucleotide
  Antisense strand to SEQ ID NO: 1629585
ucgauaacgcgauaccagc

SEQ ID NO: 1629587 - RNA, 19 nt, Artificial Sequence
  Description of Artificial Sequence: Synthetic oligonucleotide
  Sense strand starting at position 2037 of SEQ ID NO: 1560858
cugguaucgcguuaucgac

SEQ ID NO: 1629588 - RNA, 19 nt, Artificial Sequence
  Description of Artificial Sequence: Synthetic oligonucleotide
  Antisense strand to SEQ ID NO: 1629587
gucgauaacgcgauaccag

SEQ ID NO: 1629589 - RNA, 19 nt, Artificial Sequence
  Description of Artificial Sequence: Synthetic oligonucleotide
  Sense strand starting at position 2039 of SEQ ID NO: 1560858
gguaucgcguuaucgacaa

SEQ ID NO: 1629590 - RNA, 19 nt, Artificial Sequence
  Description of Artificial Sequence: Synthetic oligonucleotide
  Antisense strand to SEQ ID NO: 1629589
uugucgauaacgcgauacc

SEQ ID NO: 1629591 - RNA, 19 nt, Artificial Sequence
  Description of Artificial Sequence: Synthetic oligonucleotide
  Sense strand starting at position 2043 of SEQ ID NO: 1560858
ucgcguuaucgacaagcca

SEQ ID NO: 1629592 - RNA, 19 nt, Artificial Sequence
  Description of Artificial Sequence: Synthetic oligonucleotide
  Antisense strand to SEQ ID NO: 1629591
uggcuugucgauaacgcga

SEQ ID NO: 1629593 - RNA, 19 nt, Artificial Sequence
  Description of Artificial Sequence: Synthetic oligonucleotide
  Sense strand starting at position 2329 of SEQ ID NO: 1560858
cuuacuuugcagugaaggu

SEQ ID NO: 1629594 - RNA, 19 nt, Artificial Sequence
  Description of Artificial Sequence: Synthetic oligonucleotide
  Antisense strand to SEQ ID NO: 1629593
accuucacugcaaaguaag

SEQ ID NO: 1629595 - RNA, 19 nt, Artificial Sequence
  Description of Artificial Sequence: Synthetic oligonucleotide
  Sense strand starting at position 2330 of SEQ ID NO: 1560858
uuacuuugcagugaagguu

SEQ ID NO: 1629596 - RNA, 19 nt, Artificial Sequence
  Description of Artificial Sequence: Synthetic oligonucleotide
  Antisense strand to SEQ ID NO: 1629595
aaccuucacugcaaaguaa

SEQ ID NO: 1629597 - RNA, 19 nt, Artificial Sequence
  Description of Artificial Sequence: Synthetic oligonucleotide
  Sense strand starting at position 2336 of SEQ ID NO: 1560858
ugcagugaagguugcauuu

SEQ ID NO: 1629598 - RNA, 19 nt, Artificial Sequence
  Description of Artificial Sequence: Synthetic oligonucleotide
  Antisense strand to SEQ ID NO: 1629597
aaaugcaaccuucacugca

SEQ ID NO: 1629599 - RNA, 19 nt, Artificial Sequence
  Description of Artificial Sequence: Synthetic oligonucleotide
  Sense strand starting at position 2432 of SEQ ID NO: 1560858
uccuaauacguccagaucu

SEQ ID NO: 1629600 - RNA, 19 nt, Artificial Sequence
  Description of Artificial Sequence: Synthetic oligonucleotide
  Antisense strand to SEQ ID NO: 1629599
agaucuggacguauuagga

SEQ ID NO: 1629601 - RNA, 19 nt, Artificial Sequence
  Description of Artificial Sequence: Synthetic oligonucleotide
  Sense strand starting at position 2434 of SEQ ID NO: 1560858
cuaauacguccagaucuag

SEQ ID NO: 1629602 - RNA, 19 nt, Artificial Sequence
  Description of Artificial Sequence: Synthetic oligonucleotide
  Antisense strand to SEQ ID NO: 1629601
cuagaucuggacguauuag

SEQ ID NO: 1629603 - RNA, 19 nt, Artificial Sequence
  Description of Artificial Sequence: Synthetic oligonucleotide
  Sense strand starting at position 2711 of SEQ ID NO: 1560858
acaguaagccgugaucgga

SEQ ID NO: 1629604 - RNA, 19 nt, Artificial Sequence
  Description of Artificial Sequence: Synthetic oligonucleotide
  Antisense strand to SEQ ID NO: 1629603
uccgaucacggcuuacugu

SEQ ID NO: 1629605 - RNA, 19 nt, Artificial Sequence
  Description of Artificial Sequence: Synthetic oligonucleotide
  Sense strand starting at position 3023 of SEQ ID NO: 1560858
ucggcuaaugcuuguauuu

SEQ ID NO: 1629606 - RNA, 19 nt, Artificial Sequence
  Description of Artificial Sequence: Synthetic oligonucleotide
  Antisense strand to SEQ ID NO: 1629605
aaauacaagcauuagccga

SEQ ID NO: 1629607 - RNA, 19 nt, Artificial Sequence
  Description of Artificial Sequence: Synthetic oligonucleotide
  Sense strand starting at position 3191 of SEQ ID NO: 1560858
uccuaacuauucgcaaagu

SEQ ID NO: 1629608 - RNA, 19 nt, Artificial Sequence
  Description of Artificial Sequence: Synthetic oligonucleotide
  Antisense strand to SEQ ID NO: 1629607
acuuugcgaauaguuagga

SEQ ID NO: 1629609 - RNA, 19 nt, Artificial Sequence
  Description of Artificial Sequence: Synthetic oligonucleotide
  Sense strand starting at position 3192 of SEQ ID NO: 1560858
ccuaacuauucgcaaagua

SEQ ID NO: 1629610 - RNA, 19 nt, Artificial Sequence
  Description of Artificial Sequence: Synthetic oligonucleotide
  Antisense strand to SEQ ID NO: 1629609
uacuuugcgaauaguuagg

SEQ ID NO: 1629611 - RNA, 19 nt, Artificial Sequence
  Description of Artificial Sequence: Synthetic oligonucleotide
  Sense strand starting at position 3249 of SEQ ID NO: 1560858
gugcgcaugcuccuaaaua

SEQ ID NO: 1629612 - RNA, 19 nt, Artificial Sequence
  Description of Artificial Sequence: Synthetic oligonucleotide
  Antisense strand to SEQ ID NO: 1629611
uauuuaggagcaugcgcac

SEQ ID NO: 1629613 - RNA, 19 nt, Artificial Sequence
  Description of Artificial Sequence: Synthetic oligonucleotide
  Sense strand starting at position 3295 of SEQ ID NO: 1560858
gccaucggguccuaaggaa

SEQ ID NO: 1629614 - RNA, 19 nt, Artificial Sequence
  Description of Artificial Sequence: Synthetic oligonucleotide
  Antisense strand to SEQ ID NO: 1629613
uuccuuaggacccgauggc

SEQ ID NO: 1629615 - RNA, 19 nt, Artificial Sequence
  Description of Artificial Sequence: Synthetic oligonucleotide
  Sense strand starting at position 3846 of SEQ ID NO: 1560858
ucucgugauuccucagggu

SEQ ID NO: 1629616 - RNA, 19 nt, Artificial Sequence
  Description of Artificial Sequence: Synthetic oligonucleotide
  Antisense strand to SEQ ID NO: 1629615
acccugaggaaucacgaga

SEQ ID NO: 1629617 - RNA, 19 nt, Artificial Sequence
  Description of Artificial Sequence: Synthetic oligonucleotide
  Sense strand starting at position 3898 of SEQ ID NO: 1560858
uuaggauuccugugaggcu

SEQ ID NO: 1629618 - RNA, 19 nt, Artificial Sequence
  Description of Artificial Sequence: Synthetic oligonucleotide
  Antisense strand to SEQ ID NO: 1629617
agccucacaggaauccuaa

SEQ ID NO: 1629619 - RNA, 19 nt, Artificial Sequence
  Description of Artificial Sequence: Synthetic oligonucleotide
  Sense strand starting at position 3937 of SEQ ID NO: 1560858
uugucuuuccacgacucuu

SEQ ID NO: 1629620 - RNA, 19 nt, Artificial Sequence
  Description of Artificial Sequence: Synthetic oligonucleotide
  Antisense strand to SEQ ID NO: 1629619
aagagucguggaaagacaa

SEQ ID NO: 1629621 - RNA, 19 nt, Artificial Sequence
  Description of Artificial Sequence: Synthetic oligonucleotide
  Sense strand starting at position 877 of SEQ ID NO: 1560859
gcagcagggcauugauuau

SEQ ID NO: 1629622 - RNA, 19 nt, Artificial Sequence
  Description of Artificial Sequence: Synthetic oligonucleotide
  Antisense strand to SEQ ID NO: 1629621
auaaucaaugcccugcugc

SEQ ID NO: 1629623 - RNA, 19 nt, Artificial Sequence
  Description of Artificial Sequence: Synthetic oligonucleotide
  Sense strand starting at position 1002 of SEQ ID NO: 1560859
cgugcuguucuagagaaug

SEQ ID NO: 1629624 - RNA, 19 nt, Artificial Sequence
  Description of Artificial Sequence: Synthetic oligonucleotide
  Antisense strand to SEQ ID NO: 1629623
cauucucuagaacagcacg

SEQ ID NO: 1629625 - RNA, 19 nt, Artificial Sequence
  Description of Artificial Sequence: Synthetic oligonucleotide
  Sense strand starting at position 1004 of SEQ ID NO: 1560859
ugcuguucuagagaaugga

SEQ ID NO: 1629626 - RNA, 19 nt, Artificial Sequence
  Description of Artificial Sequence: Synthetic oligonucleotide
  Antisense strand to SEQ ID NO: 1629625
uccauucucuagaacagca

SEQ ID NO: 1629627 - RNA, 19 nt, Artificial Sequence
  Description of Artificial Sequence: Synthetic oligonucleotide
  Sense strand starting at position 1008 of SEQ ID NO: 1560859
guucuagagaauggaucau

SEQ ID NO: 1629628 - RNA, 19 nt, Artificial Sequence
  Description of Artificial Sequence: Synthetic oligonucleotide
  Antisense strand to SEQ ID NO: 1629627
augauccauucucuagaac

SEQ ID NO: 1629629 - RNA, 19 nt, Artificial Sequence
  Description of Artificial Sequence: Synthetic oligonucleotide
  Sense strand starting at position 1085 of SEQ ID NO: 1560859
uggguuaaguugcuuguca

SEQ ID NO: 1629630 - RNA, 19 nt, Artificial Sequence
  Description of Artificial Sequence: Synthetic oligonucleotide
  Antisense strand to SEQ ID NO: 1629629
ugacaagcaacuuaaccca

SEQ ID NO: 1629631 - RNA, 19 nt, Artificial Sequence
  Description of Artificial Sequence: Synthetic oligonucleotide
  Sense strand starting at position 1086 of SEQ ID NO: 1560859
ggguuaaguugcuugucaa

SEQ ID NO: 1629632 - RNA, 19 nt, Artificial Sequence
  Description of Artificial Sequence: Synthetic oligonucleotide
  Antisense strand to SEQ ID NO: 1629631
uugacaagcaacuuaaccc

SEQ ID NO: 1629633 - RNA, 19 nt, Artificial Sequence
  Description of Artificial Sequence: Synthetic oligonucleotide
  Sense strand starting at position 1087 of SEQ ID NO: 1560859
gguuaaguugcuugucaag

SEQ ID NO: 1629634 - RNA, 19 nt, Artificial Sequence
  Description of Artificial Sequence: Synthetic oligonucleotide
  Antisense strand to SEQ ID NO: 1629633
cuugacaagcaacuuaacc

SEQ ID NO: 1629635 - RNA, 19 nt, Artificial Sequence
  Description of Artificial Sequence: Synthetic oligonucleotide
  Sense strand starting at position 1089 of SEQ ID NO: 1560859
uuaaguugcuugucaagga

SEQ ID NO: 1629636 - RNA, 19 nt, Artificial Sequence
  Description of Artificial Sequence: Synthetic oligonucleotide
  Antisense strand to SEQ ID NO: 1629635
uccuugacaagcaacuuaa

SEQ ID NO: 1629637 - RNA, 19 nt, Artificial Sequence
  Description of Artificial Sequence: Synthetic oligonucleotide
  Sense strand starting at position 1090 of SEQ ID NO: 1560859
uaaguugcuugucaaggau

SEQ ID NO: 1629638 - RNA, 19 nt, Artificial Sequence
  Description of Artificial Sequence: Synthetic oligonucleotide
  Antisense strand to SEQ ID NO: 1629637
auccuugacaagcaacuua

SEQ ID NO: 1629639 - RNA, 19 nt, Artificial Sequence
  Description of Artificial Sequence: Synthetic oligonucleotide
  Sense strand starting at position 1104 of SEQ ID NO: 1560859
aggauucaggguggcuaua

SEQ ID NO: 1629640 - RNA, 19 nt, Artificial Sequence
  Description of Artificial Sequence: Synthetic oligonucleotide
  Antisense strand to SEQ ID NO: 1629639
uauagccacccugaauccu

SEQ ID NO: 1629641 - RNA, 19 nt, Artificial Sequence
  Description of Artificial Sequence: Synthetic oligonucleotide
  Sense strand starting at position 1117 of SEQ ID NO: 1560859
gcuauaaggauaggugcua

SEQ ID NO: 1629642 - RNA, 19 nt, Artificial Sequence
  Description of Artificial Sequence: Synthetic oligonucleotide
  Antisense strand to SEQ ID NO: 1629641
uagcaccuauccuuauagc

SEQ ID NO: 1629643 - RNA, 19 nt, Artificial Sequence
  Description of Artificial Sequence: Synthetic oligonucleotide
  Sense strand starting at position 2030 of SEQ ID NO: 1560859
cggaaaugcccgagcgcau

SEQ ID NO: 1629644 - RNA, 19 nt, Artificial Sequence
  Description of Artificial Sequence: Synthetic oligonucleotide
  Antisense strand to SEQ ID NO: 1629643
augcgcucgggcauuuccg

SEQ ID NO: 1629645 - RNA, 19 nt, Artificial Sequence
  Description of Artificial Sequence: Synthetic oligonucleotide
  Sense strand starting at position 2102 of SEQ ID NO: 1560859
ccgaguguuuccggaagua

SEQ ID NO: 1629646 - RNA, 19 nt, Artificial Sequence
  Description of Artificial Sequence: Synthetic oligonucleotide
  Antisense strand to SEQ ID NO: 1629645
uacuuccggaaacacucgg

SEQ ID NO: 1629647 - RNA, 19 nt, Artificial Sequence
  Description of Artificial Sequence: Synthetic oligonucleotide
  Sense strand starting at position 2103 of SEQ ID NO: 1560859
cgaguguuuccggaaguag

SEQ ID NO: 1629648 - RNA, 19 nt, Artificial Sequence
  Description of Artificial Sequence: Synthetic oligonucleotide
  Antisense strand to SEQ ID NO: 1629647
cuacuuccggaaacacucg

SEQ ID NO: 1629649 - RNA, 19 nt, Artificial Sequence
  Description of Artificial Sequence: Synthetic oligonucleotide
  Sense strand starting at position 2125 of SEQ ID NO: 1560859
aacguaaucccgcgggacu

SEQ ID NO: 1629650 - RNA, 19 nt, Artificial Sequence
  Description of Artificial Sequence: Synthetic oligonucleotide
  Antisense strand to SEQ ID NO: 1629649
agucccgcgggauuacguu

SEQ ID NO: 1629651 - RNA, 19 nt, Artificial Sequence
  Description of Artificial Sequence: Synthetic oligonucleotide
  Sense strand starting at position 2172 of SEQ ID NO: 1560859
ccgagcguuuccagaggua

SEQ ID NO: 1629652 - RNA, 19 nt, Artificial Sequence
  Description of Artificial Sequence: Synthetic oligonucleotide
  Antisense strand to SEQ ID NO: 1629651
uaccucuggaaacgcucgg

SEQ ID NO: 1629653 - RNA, 19 nt, Artificial Sequence
  Description of Artificial Sequence: Synthetic oligonucleotide
  Sense strand starting at position 2249 of SEQ ID NO: 1560859
gcccgagcgcuuucggaaa

SEQ ID NO: 1629654 - RNA, 19 nt, Artificial Sequence
  Description of Artificial Sequence: Synthetic oligonucleotide
  Antisense strand to SEQ ID NO: 1629653
uuuccgaaagcgcucgggc

SEQ ID NO: 1629655 - RNA, 19 nt, Artificial Sequence
  Description of Artificial Sequence: Synthetic oligonucleotide
  Sense strand starting at position 2321 of SEQ ID NO: 1560859
ccgcggagcguuucuggaa

SEQ ID NO: 1629656 - RNA, 19 nt, Artificial Sequence
  Description of Artificial Sequence: Synthetic oligonucleotide
  Antisense strand to SEQ ID NO: 1629655
uuccagaaacgcuccgcgg

SEQ ID NO: 1629657 - RNA, 19 nt, Artificial Sequence
  Description of Artificial Sequence: Synthetic oligonucleotide
  Sense strand starting at position 2322 of SEQ ID NO: 1560859
cgcggagcguuucuggaaa

SEQ ID NO: 1629658 - RNA, 19 nt, Artificial Sequence
  Description of Artificial Sequence: Synthetic oligonucleotide
  Antisense strand to SEQ ID NO: 1629657
uuuccagaaacgcuccgcg

SEQ ID NO: 1629659 - RNA, 19 nt, Artificial Sequence
  Description of Artificial Sequence: Synthetic oligonucleotide
  Sense strand starting at position 2324 of SEQ ID NO: 1560859
cggagcguuucuggaaaua

SEQ ID NO: 1629660 - RNA, 19 nt, Artificial Sequence
  Description of Artificial Sequence: Synthetic oligonucleotide
  Antisense strand to SEQ ID NO: 1629659
uauuuccagaaacgcuccg

SEQ ID NO: 1629661 - RNA, 19 nt, Artificial Sequence
  Description of Artificial Sequence: Synthetic oligonucleotide
  Sense strand starting at position 2346 of SEQ ID NO: 1560859
gaaugugcucagugcccaa

SEQ ID NO: 1629662 - RNA, 19 nt, Artificial Sequence
  Description of Artificial Sequence: Synthetic oligonucleotide
  Antisense strand to SEQ ID NO: 1629661
uugggcacugagcacauuc

SEQ ID NO: 1629663 - RNA, 19 nt, Artificial Sequence
  Description of Artificial Sequence: Synthetic oligonucleotide
  Sense strand starting at position 2397 of SEQ ID NO: 1560859
ccgccagcuuaugggaauu

SEQ ID NO: 1629664 - RNA, 19 nt, Artificial Sequence
  Description of Artificial Sequence: Synthetic oligonucleotide
  Antisense strand to SEQ ID NO: 1629663
aauucccauaagcuggcgg

SEQ ID NO: 1629665 - RNA, 19 nt, Artificial Sequence
  Description of Artificial Sequence: Synthetic oligonucleotide
  Sense strand starting at position 2450 of SEQ ID NO: 1560859
gcguucucaagcucagcaa

SEQ ID NO: 1629666 - RNA, 19 nt, Artificial Sequence
  Description of Artificial Sequence: Synthetic oligonucleotide
  Antisense strand to SEQ ID NO: 1629665
uugcugagcuugagaacgc

SEQ ID NO: 1629667 - RNA, 19 nt, Artificial Sequence
  Description of Artificial Sequence: Synthetic oligonucleotide
  Sense strand starting at position 2506 of SEQ ID NO: 1560859
aaagcagaagucggagaaa

SEQ ID NO: 1629668 - RNA, 19 nt, Artificial Sequence
  Description of Artificial Sequence: Synthetic oligonucleotide
  Antisense strand to SEQ ID NO: 1629667
uuucuccgacuucugcuuu

SEQ ID NO: 1629669 - RNA, 19 nt, Artificial Sequence
  Description of Artificial Sequence: Synthetic oligonucleotide
  Sense strand starting at position 2518 of SEQ ID NO: 1560859
ggagaaagccaggguugaa

SEQ ID NO: 1629670 - RNA, 19 nt, Artificial Sequence
  Description of Artificial Sequence: Synthetic oligonucleotide
  Antisense strand to SEQ ID NO: 1629669
uucaacccuggcuuucucc

SEQ ID NO: 1629671 - RNA, 19 nt, Artificial Sequence
  Description of Artificial Sequence: Synthetic oligonucleotide
  Sense strand starting at position 2597 of SEQ ID NO: 1560859
acuagaauuuagcggacuu

SEQ ID NO: 1629672 - RNA, 19 nt, Artificial Sequence
  Description of Artificial Sequence: Synthetic oligonucleotide
  Antisense strand to SEQ ID NO: 1629671
aaguccgcuaaauucuagu

SEQ ID NO: 1629673 - RNA, 19 nt, Artificial Sequence
  Description of Artificial Sequence: Synthetic oligonucleotide
  Sense strand starting at position 2626 of SEQ ID NO: 1560859
gccgacgguuuccggaaau

SEQ ID NO: 1629674 - RNA, 19 nt, Artificial Sequence
  Description of Artificial Sequence: Synthetic oligonucleotide
  Antisense strand to SEQ ID NO: 1629673
auuuccggaaaccgucggc

SEQ ID NO: 1629675 - RNA, 19 nt, Artificial Sequence
  Description of Artificial Sequence: Synthetic oligonucleotide
  Sense strand starting at position 2667 of SEQ ID NO: 1560859
ggcuguagccaagaguguu

SEQ ID NO: 1629676 - RNA, 19 nt, Artificial Sequence
  Description of Artificial Sequence: Synthetic oligonucleotide
  Antisense strand to SEQ ID NO: 1629675
aacacucuuggcuacagcc

SEQ ID NO: 1629677 - RNA, 19 nt, Artificial Sequence
  Description of Artificial Sequence: Synthetic oligonucleotide
  Sense strand starting at position 2673 of SEQ ID NO: 1560859
agccaagaguguuugcaug

SEQ ID NO: 1629678 - RNA, 19 nt, Artificial Sequence
  Description of Artificial Sequence: Synthetic oligonucleotide
  Antisense strand to SEQ ID NO: 1629677
caugcaaacacucuuggcu

SEQ ID NO: 1629679 - RNA, 19 nt, Artificial Sequence
  Description of Artificial Sequence: Synthetic oligonucleotide
  Sense strand starting at position 2708 of SEQ ID NO: 1560859
gaaguaacggauugcucua

SEQ ID NO: 1629680 - RNA, 19 nt, Artificial Sequence
  Description of Artificial Sequence: Synthetic oligonucleotide
  Antisense strand to SEQ ID NO: 1629679
uagagcaauccguuacuuc

SEQ ID NO: 1629681 - RNA, 19 nt, Artificial Sequence
  Description of Artificial Sequence: Synthetic oligonucleotide
  Sense strand starting at position 3155 of SEQ ID NO: 1560859
gcugcaaugugccgugauu

SEQ ID NO: 1629682 - RNA, 19 nt, Artificial Sequence
  Description of Artificial Sequence: Synthetic oligonucleotide
  Antisense strand to SEQ ID NO: 1629681
aaucacggcacauugcagc

SEQ ID NO: 1629683 - RNA, 19 nt, Artificial Sequence
  Description of Artificial Sequence: Synthetic oligonucleotide
  Sense strand starting at position 3254 of SEQ ID NO: 1560859
agaugucuggaggaagcuu

SEQ ID NO: 1629684 - RNA, 19 nt, Artificial Sequence
  Description of Artificial Sequence: Synthetic oligonucleotide
  Antisense strand to SEQ ID NO: 1629683
aagcuuccuccagacaucu

SEQ ID NO: 1629685 - RNA, 19 nt, Artificial Sequence
  Description of Artificial Sequence: Synthetic oligonucleotide
  Sense strand starting at position 3292 of SEQ ID NO: 1560859
ggaguacucgcagggagag

SEQ ID NO: 1629686 - RNA, 19 nt, Artificial Sequence
  Description of Artificial Sequence: Synthetic oligonucleotide
  Antisense strand to SEQ ID NO: 1629685
cucucccugcgaguacucc

SEQ ID NO: 1629687 - RNA, 19 nt, Artificial Sequence
  Description of Artificial Sequence: Synthetic oligonucleotide
  Sense strand starting at position 3390 of SEQ ID NO: 1560859
ugcaaugacuuugagccau

SEQ ID NO: 1629688 - RNA, 19 nt, Artificial Sequence
  Description of Artificial Sequence: Synthetic oligonucleotide
  Antisense strand to SEQ ID NO: 1629687
auggcucaaagucauugca

SEQ ID NO: 1629689 - RNA, 19 nt, Artificial Sequence
  Description of Artificial Sequence: Synthetic oligonucleotide
  Sense strand starting at position 3396 of SEQ ID NO: 1560859
gacuuugagccaugggucu

SEQ ID NO: 1629690 - RNA, 19 nt, Artificial Sequence
  Description of Artificial Sequence: Synthetic oligonucleotide
  Antisense strand to SEQ ID NO: 1629689
agacccauggcucaaaguc

SEQ ID NO: 1629691 - RNA, 19 nt, Artificial Sequence
  Description of Artificial Sequence: Synthetic oligonucleotide
  Sense strand starting at position 3398 of SEQ ID NO: 1560859
cuuugagccaugggucuau

SEQ ID NO: 1629692 - RNA, 19 nt, Artificial Sequence
  Description of Artificial Sequence: Synthetic oligonucleotide
  Antisense strand to SEQ ID NO: 1629691
auagacccauggcucaaag

SEQ ID NO: 1629693 - RNA, 19 nt, Artificial Sequence
  Description of Artificial Sequence: Synthetic oligonucleotide
  Sense strand starting at position 3482 of SEQ ID NO: 1560859
ggagcucaucuuuguaaau

SEQ ID NO: 1629694 - RNA, 19 nt, Artificial Sequence
  Description of Artificial Sequence: Synthetic oligonucleotide
  Antisense strand to SEQ ID NO: 1629693
auuuacaaagaugagcucc

SEQ ID NO: 1629695 - RNA, 19 nt, Artificial Sequence
  Description of Artificial Sequence: Synthetic oligonucleotide
  Sense strand starting at position 281 of SEQ ID NO: 1560860
ugggauagccuuuauuauc

SEQ ID NO: 1629696 - RNA, 19 nt, Artificial Sequence
  Description of Artificial Sequence: Synthetic oligonucleotide
  Antisense strand to SEQ ID NO: 1629695
gauaauaaaggcuauccca

SEQ ID NO: 1629697 - RNA, 19 nt, Artificial Sequence
  Description of Artificial Sequence: Synthetic oligonucleotide
  Sense strand starting at position 412 of SEQ ID NO: 1560860
caggaacuguacucaggua

SEQ ID NO: 1629698 - RNA, 19 nt, Artificial Sequence
  Description of Artificial Sequence: Synthetic oligonucleotide
  Antisense strand to SEQ ID NO: 1629697
uaccugaguacaguuccug

SEQ ID NO: 1629699 - RNA, 19 nt, Artificial Sequence
  Description of Artificial Sequence: Synthetic oligonucleotide
  Sense strand starting at position 437 of SEQ ID NO: 1560860
acccgaaagcucugcucuu

SEQ ID NO: 1629700 - RNA, 19 nt, Artificial Sequence
  Description of Artificial Sequence: Synthetic oligonucleotide
  Antisense strand to SEQ ID NO: 1629699
aagagcagagcuuucgggu

SEQ ID NO: 1629701 - RNA, 19 nt, Artificial Sequence
  Description of Artificial Sequence: Synthetic oligonucleotide
  Sense strand starting at position 438 of SEQ ID NO: 1560860
cccgaaagcucugcucuua

SEQ ID NO: 1629702 - RNA, 19 nt, Artificial Sequence
  Description of Artificial Sequence: Synthetic oligonucleotide
  Antisense strand to SEQ ID NO: 1629701
uaagagcagagcuuucggg

SEQ ID NO: 1629703 - RNA, 19 nt, Artificial Sequence
  Description of Artificial Sequence: Synthetic oligonucleotide
  Sense strand starting at position 512 of SEQ ID NO: 1560860
gauguuacccagggaguga

SEQ ID NO: 1629704 - RNA, 19 nt, Artificial Sequence
  Description of Artificial Sequence: Synthetic oligonucleotide
  Antisense strand to SEQ ID NO: 1629703
ucacucccuggguaacauc

SEQ ID NO: 1629705 - RNA, 19 nt, Artificial Sequence
  Description of Artificial Sequence: Synthetic oligonucleotide
  Sense strand starting at position 622 of SEQ ID NO: 1560860
cauggagugucacccauaa

SEQ ID NO: 1629706 - RNA, 19 nt, Artificial Sequence
  Description of Artificial Sequence: Synthetic oligonucleotide
  Antisense strand to SEQ ID NO: 1629705
uuaugggugacacuccaug

SEQ ID NO: 1629707 - RNA, 19 nt, Artificial Sequence
  Description of Artificial Sequence: Synthetic oligonucleotide
  Sense strand starting at position 762 of SEQ ID NO: 1560860
cgcggguuccaggugcaaa

SEQ ID NO: 1629708 - RNA, 19 nt, Artificial Sequence
  Description of Artificial Sequence: Synthetic oligonucleotide
  Antisense strand to SEQ ID NO: 1629707
uuugcaccuggaacccgcg

SEQ ID NO: 1629709 - RNA, 19 nt, Artificial Sequence
  Description of Artificial Sequence: Synthetic oligonucleotide
  Sense strand starting at position 763 of SEQ ID NO: 1560860
gcggguuccaggugcaaau

SEQ ID NO: 1629710 - RNA, 19 nt, Artificial Sequence
  Description of Artificial Sequence: Synthetic oligonucleotide
  Antisense strand to SEQ ID NO: 1629709
auuugcaccuggaacccgc

SEQ ID NO: 1629711 - RNA, 19 nt, Artificial Sequence
  Description of Artificial Sequence: Synthetic oligonucleotide
  Sense strand starting at position 943 of SEQ ID NO: 1560860
gcacucaaccaaggagaau

SEQ ID NO: 1629712 - RNA, 19 nt, Artificial Sequence
  Description of Artificial Sequence: Synthetic oligonucleotide
  Antisense strand to SEQ ID NO: 1629711
auucuccuugguugagugc

SEQ ID NO: 1629713 - RNA, 19 nt, Artificial Sequence
  Description of Artificial Sequence: Synthetic oligonucleotide
  Sense strand starting at position 968 of SEQ ID NO: 1560860
ugcaaaugcgauugcuaug

SEQ ID NO: 1629714 - RNA, 19 nt, Artificial Sequence
  Description of Artificial Sequence: Synthetic oligonucleotide
  Antisense strand to SEQ ID NO: 1629713
cauagcaaucgcauuugca

SEQ ID NO: 1629715 - RNA, 19 nt, Artificial Sequence
  Description of Artificial Sequence: Synthetic oligonucleotide
  Sense strand starting at position 1114 of SEQ ID NO: 1560860
cccugaaaugaaugaucuu

SEQ ID NO: 1629716 - RNA, 19 nt, Artificial Sequence
  Description of Artificial Sequence: Synthetic oligonucleotide
  Antisense strand to SEQ ID NO: 1629715
aagaucauucauuucaggg

SEQ ID NO: 1629717 - RNA, 19 nt, Artificial Sequence
  Description of Artificial Sequence: Synthetic oligonucleotide
  Sense strand starting at position 1159 of SEQ ID NO: 1560860
ucaguuuccuugcugguaa

SEQ ID NO: 1629718 - RNA, 19 nt, Artificial Sequence
  Description of Artificial Sequence: Synthetic oligonucleotide
  Antisense strand to SEQ ID NO: 1629717
uuaccagcaaggaaacuga

SEQ ID NO: 1629719 - RNA, 19 nt, Artificial Sequence
  Description of Artificial Sequence: Synthetic oligonucleotide
  Sense strand starting at position 1228 of SEQ ID NO: 1560860
acuuaaagcgcuugacaca

SEQ ID NO: 1629720 - RNA, 19 nt, Artificial Sequence
  Description of Artificial Sequence: Synthetic oligonucleotide
  Antisense strand to SEQ ID NO: 1629719
ugugucaagcgcuuuaagu

SEQ ID NO: 1629721 - RNA, 19 nt, Artificial Sequence
  Description of Artificial Sequence: Synthetic oligonucleotide
  Sense strand starting at position 1329 of SEQ ID NO: 1560860
gcagaaugucacgggcgau

SEQ ID NO: 1629722 - RNA, 19 nt, Artificial Sequence
  Description of Artificial Sequence: Synthetic oligonucleotide
  Antisense strand to SEQ ID NO: 1629721
aucgcccgugacauucugc

SEQ ID NO: 1629723 - RNA, 19 nt, Artificial Sequence
  Description of Artificial Sequence: Synthetic oligonucleotide
  Sense strand starting at position 1341 of SEQ ID NO: 1560860
gggcgaugucgcagacuca

SEQ ID NO: 1629724 - RNA, 19 nt, Artificial Sequence
  Description of Artificial Sequence: Synthetic oligonucleotide
  Antisense strand to SEQ ID NO: 1629723
ugagucugcgacaucgccc

SEQ ID NO: 1629725 - RNA, 19 nt, Artificial Sequence
  Description of Artificial Sequence: Synthetic oligonucleotide
  Sense strand starting at position 1360 of SEQ ID NO: 1560860
gcauuagguguacacagua

SEQ ID NO: 1629726 - RNA, 19 nt, Artificial Sequence
  Description of Artificial Sequence: Synthetic oligonucleotide
  Antisense strand to SEQ ID NO: 1629725
uacuguguacaccuaaugc

SEQ ID NO: 1629727 - RNA, 19 nt, Artificial Sequence
  Description of Artificial Sequence: Synthetic oligonucleotide
  Sense strand starting at position 1513 of SEQ ID NO: 1560860
gugcauuaggccgagaggu

SEQ ID NO: 1629728 - RNA, 19 nt, Artificial Sequence
  Description of Artificial Sequence: Synthetic oligonucleotide
  Antisense strand to SEQ ID NO: 1629727
accucucggccuaaugcac

SEQ ID NO: 1629729 - RNA, 19 nt, Artificial Sequence
  Description of Artificial Sequence: Synthetic oligonucleotide
  Sense strand starting at position 1515 of SEQ ID NO: 1560860
gcauuaggccgagagguau

SEQ ID NO: 1629730 - RNA, 19 nt, Artificial Sequence
  Description of Artificial Sequence: Synthetic oligonucleotide
  Antisense strand to SEQ ID NO: 1629729
auaccucucggccuaaugc

SEQ ID NO: 1629731 - RNA, 19 nt, Artificial Sequence
  Description of Artificial Sequence: Synthetic oligonucleotide
  Sense strand starting at position 2014 of SEQ ID NO: 1560860
uggccuucuauuggguaga

SEQ ID NO: 1629732 - RNA, 19 nt, Artificial Sequence
  Description of Artificial Sequence: Synthetic oligonucleotide
  Antisense strand to SEQ ID NO: 1629731
ucuacccaauagaaggcca

SEQ ID NO: 1629733 - RNA, 19 nt, Artificial Sequence
  Description of Artificial Sequence: Synthetic oligonucleotide
  Sense strand starting at position 2016 of SEQ ID NO: 1560860
gccuucuauuggguagaag

SEQ ID NO: 1629734 - RNA, 19 nt, Artificial Sequence
  Description of Artificial Sequence: Synthetic oligonucleotide
  Antisense strand to SEQ ID NO: 1629733
cuucuacccaauagaaggc

SEQ ID NO: 1629735 - RNA, 19 nt, Artificial Sequence
  Description of Artificial Sequence: Synthetic oligonucleotide
  Sense strand starting at position 2230 of SEQ ID NO: 1560860
cgggauagagcuuauggau

SEQ ID NO: 1629736 - RNA, 19 nt, Artificial Sequence
  Description of Artificial Sequence: Synthetic oligonucleotide
  Antisense strand to SEQ ID NO: 1629735
auccauaagcucuaucccg

SEQ ID NO: 1629737 - RNA, 19 nt, Artificial Sequence
  Description of Artificial Sequence: Synthetic oligonucleotide
  Sense strand starting at position 2237 of SEQ ID NO: 1560860
gagcuuauggauuggcuaa

SEQ ID NO: 1629738 - RNA, 19 nt, Artificial Sequence
  Description of Artificial Sequence: Synthetic oligonucleotide
  Antisense strand to SEQ ID NO: 1629737
uuagccaauccauaagcuc

SEQ ID NO: 1629739 - RNA, 19 nt, Artificial Sequence
  Description of Artificial Sequence: Synthetic oligonucleotide
  Sense strand starting at position 2238 of SEQ ID NO: 1560860
agcuuauggauuggcuaau

SEQ ID NO: 1629740 - RNA, 19 nt, Artificial Sequence
  Description of Artificial Sequence: Synthetic oligonucleotide
  Antisense strand to SEQ ID NO: 1629739
auuagccaauccauaagcu

SEQ ID NO: 1629741 - RNA, 19 nt, Artificial Sequence
  Description of Artificial Sequence: Synthetic oligonucleotide
  Sense strand starting at position 2406 of SEQ ID NO: 1560860
ugcaguugccuuggagaug

SEQ ID NO: 1629742 - RNA, 19 nt, Artificial Sequence
  Description of Artificial Sequence: Synthetic oligonucleotide
  Antisense strand to SEQ ID NO: 1629741
caucuccaaggcaacugca

SEQ ID NO: 1629743 - RNA, 19 nt, Artificial Sequence
  Description of Artificial Sequence: Synthetic oligonucleotide
  Sense strand starting at position 2430 of SEQ ID NO: 1560860
cuaaguacccgaugcuuaa

SEQ ID NO: 1629744 - RNA, 19 nt, Artificial Sequence
  Description of Artificial Sequence: Synthetic oligonucleotide
  Antisense strand to SEQ ID NO: 1629743
uuaagcaucggguacuuag

SEQ ID NO: 1629745 - RNA, 19 nt, Artificial Sequence
  Description of Artificial Sequence: Synthetic oligonucleotide
  Sense strand starting at position 2477 of SEQ ID NO: 1560860
accuguuucccacagaugu

SEQ ID NO: 1629746 - RNA, 19 nt, Artificial Sequence
  Description of Artificial Sequence: Synthetic oligonucleotide
  Antisense strand to SEQ ID NO: 1629745
acaucugugggaaacaggu

SEQ ID NO: 1629747 - RNA, 19 nt, Artificial Sequence
  Description of Artificial Sequence: Synthetic oligonucleotide
  Sense strand starting at position 2788 of SEQ ID NO: 1560860
ggguagauaugggaguuga

SEQ ID NO: 1629748 - RNA, 19 nt, Artificial Sequence
  Description of Artificial Sequence: Synthetic oligonucleotide
  Antisense strand to SEQ ID NO: 1629747
ucaacucccauaucuaccc

SEQ ID NO: 1629749 - RNA, 19 nt, Artificial Sequence
  Description of Artificial Sequence: Synthetic oligonucleotide
  Sense strand starting at position 2844 of SEQ ID NO: 1560860
agcauagaacccuauguga

SEQ ID NO: 1629750 - RNA, 19 nt, Artificial Sequence
  Description of Artificial Sequence: Synthetic oligonucleotide
  Antisense strand to SEQ ID NO: 1629749
ucacauaggguucuaugcu

SEQ ID NO: 1629751 - RNA, 19 nt, Artificial Sequence
  Description of Artificial Sequence: Synthetic oligonucleotide
  Sense strand starting at position 2851 of SEQ ID NO: 1560860
aacccuaugugaccguuaa

SEQ ID NO: 1629752 - RNA, 19 nt, Artificial Sequence
  Description of Artificial Sequence: Synthetic oligonucleotide
  Antisense strand to SEQ ID NO: 1629751
uuaacggucacauaggguu

SEQ ID NO: 1629753 - RNA, 19 nt, Artificial Sequence
  Description of Artificial Sequence: Synthetic oligonucleotide
  Sense strand starting at position 2852 of SEQ ID NO: 1560860
acccuaugugaccguuaaa

SEQ ID NO: 1629754 - RNA, 19 nt, Artificial Sequence
  Description of Artificial Sequence: Synthetic oligonucleotide
  Antisense strand to SEQ ID NO: 1629753
uuuaacggucacauagggu

SEQ ID NO: 1629755 - RNA, 19 nt, Artificial Sequence
  Description of Artificial Sequence: Synthetic oligonucleotide
  Sense strand starting at position 2873 of SEQ ID NO: 1560860
gaaugaggcucagugaagu

SEQ ID NO: 1629756 - RNA, 19 nt, Artificial Sequence
  Description of Artificial Sequence: Synthetic oligonucleotide
  Antisense strand to SEQ ID NO: 1629755
acuucacugagccucauuc

SEQ ID NO: 1629757 - RNA, 19 nt, Artificial Sequence
  Description of Artificial Sequence: Synthetic oligonucleotide
  Sense strand starting at position 2935 of SEQ ID NO: 1560860
gcaguagaaggcuaagaga

SEQ ID NO: 1629758 - RNA, 19 nt, Artificial Sequence
  Description of Artificial Sequence: Synthetic oligonucleotide
  Antisense strand to SEQ ID NO: 1629757
ucucuuagccuucuacugc

SEQ ID NO: 1629759 - RNA, 19 nt, Artificial Sequence
  Description of Artificial Sequence: Synthetic oligonucleotide
  Sense strand starting at position 2971 of SEQ ID NO: 1560860
ggguuuaaagccugggacu

SEQ ID NO: 1629760 - RNA, 19 nt, Artificial Sequence
  Description of Artificial Sequence: Synthetic oligonucleotide
  Antisense strand to SEQ ID NO: 1629759
agucccaggcuuuaaaccc

SEQ ID NO: 1629761 - RNA, 19 nt, Artificial Sequence
  Description of Artificial Sequence: Synthetic oligonucleotide
  Sense strand starting at position 2973 of SEQ ID NO: 1560860
guuuaaagccugggacuga

SEQ ID NO: 1629762 - RNA, 19 nt, Artificial Sequence
  Description of Artificial Sequence: Synthetic oligonucleotide
  Antisense strand to SEQ ID NO: 1629761
ucagucccaggcuuuaaac

SEQ ID NO: 1629763 - RNA, 19 nt, Artificial Sequence
  Description of Artificial Sequence: Synthetic oligonucleotide
  Sense strand starting at position 3009 of SEQ ID NO: 1560860
ugaacugauuacuuaacgu

SEQ ID NO: 1629764 - RNA, 19 nt, Artificial Sequence
  Description of Artificial Sequence: Synthetic oligonucleotide
  Antisense strand to SEQ ID NO: 1629763
acguuaaguaaucaguuca

SEQ ID NO: 1629765 - RNA, 19 nt, Artificial Sequence
  Description of Artificial Sequence: Synthetic oligonucleotide
  Sense strand starting at position 3075 of SEQ ID NO: 1560860
acauccuucuguuugaugu

SEQ ID NO: 1629766 - RNA, 19 nt, Artificial Sequence
  Description of Artificial Sequence: Synthetic oligonucleotide
  Antisense strand to SEQ ID NO: 1629765
acaucaaacagaaggaugu

SEQ ID NO: 1629767 - RNA, 19 nt, Artificial Sequence
  Description of Artificial Sequence: Synthetic oligonucleotide
  Sense strand starting at position 3611 of SEQ ID NO: 1560860
uuuguuucccaagggacau

SEQ ID NO: 1629768 - RNA, 19 nt, Artificial Sequence
  Description of Artificial Sequence: Synthetic oligonucleotide
  Antisense strand to SEQ ID NO: 1629767
augucccuugggaaacaaa

SEQ ID NO: 1629769 - RNA, 19 nt, Artificial Sequence
  Description of Artificial Sequence: Synthetic oligonucleotide
  Sense strand starting at position 3631 of SEQ ID NO: 1560860
uggcaacaucuugauacau

SEQ ID NO: 1629770 - RNA, 19 nt, Artificial Sequence
  Description of Artificial Sequence: Synthetic oligonucleotide
  Antisense strand to SEQ ID NO: 1629769
auguaucaagauguugcca

SEQ ID NO: 1629771 - RNA, 19 nt, Artificial Sequence
  Description of Artificial Sequence: Synthetic oligonucleotide
  Sense strand starting at position 3687 of SEQ ID NO: 1560860
ggagauacuacuggcuacu

SEQ ID NO: 1629772 - RNA, 19 nt, Artificial Sequence
  Description of Artificial Sequence: Synthetic oligonucleotide
  Antisense strand to SEQ ID NO: 1629771
aguagccaguaguaucucc

SEQ ID NO: 1629773 - RNA, 19 nt, Artificial Sequence
  Description of Artificial Sequence: Synthetic oligonucleotide
  Sense strand starting at position 3806 of SEQ ID NO: 1560860
accuguaauccagggcuuu

SEQ ID NO: 1629774 - RNA, 19 nt, Artificial Sequence
  Description of Artificial Sequence: Synthetic oligonucleotide
  Antisense strand to SEQ ID NO: 1629773
aaagcccuggauuacaggu

SEQ ID NO: 1629775 - RNA, 19 nt, Artificial Sequence
  Description of Artificial Sequence: Synthetic oligonucleotide
  Sense strand starting at position 262 of SEQ ID NO: 1560861
ggaccacgacuuugacuua

SEQ ID NO: 1629776 - RNA, 19 nt, Artificial Sequence
  Description of Artificial Sequence: Synthetic oligonucleotide
  Antisense strand to SEQ ID NO: 1629775
uaagucaaagucguggucc

SEQ ID NO: 1629777 - RNA, 19 nt, Artificial Sequence
  Description of Artificial Sequence: Synthetic oligonucleotide
  Sense strand starting at position 265 of SEQ ID NO: 1560861
ccacgacuuugacuuagga

SEQ ID NO: 1629778 - RNA, 19 nt, Artificial Sequence
  Description of Artificial Sequence: Synthetic oligonucleotide
  Antisense strand to SEQ ID NO: 1629777
uccuaagucaaagucgugg

SEQ ID NO: 1629779 - RNA, 19 nt, Artificial Sequence
  Description of Artificial Sequence: Synthetic oligonucleotide
  Sense strand starting at position 364 of SEQ ID NO: 1560861
uccagaguuggacgaagaa

SEQ ID NO: 1629780 - RNA, 19 nt, Artificial Sequence
  Description of Artificial Sequence: Synthetic oligonucleotide
  Antisense strand to SEQ ID NO: 1629779
uucuucguccaacucugga

SEQ ID NO: 1629781 - RNA, 19 nt, Artificial Sequence
  Description of Artificial Sequence: Synthetic oligonucleotide
  Sense strand starting at position 387 of SEQ ID NO: 1560861
uggugaugccagcaaagcu

SEQ ID NO: 1629782 - RNA, 19 nt, Artificial Sequence
  Description of Artificial Sequence: Synthetic oligonucleotide
  Antisense strand to SEQ ID NO: 1629781
agcuuugcuggcaucacca

SEQ ID NO: 1629783 - RNA, 19 nt, Artificial Sequence
  Description of Artificial Sequence: Synthetic oligonucleotide
  Sense strand starting at position 436 of SEQ ID NO: 1560861
gaagccuguuugccuaauu

SEQ ID NO: 1629784 - RNA, 19 nt, Artificial Sequence
  Description of Artificial Sequence: Synthetic oligonucleotide
  Antisense strand to SEQ ID NO: 1629783
aauuaggcaaacaggcuuc

SEQ ID NO: 1629785 - RNA, 19 nt, Artificial Sequence
  Description of Artificial Sequence: Synthetic oligonucleotide
  Sense strand starting at position 521 of SEQ ID NO: 1560861
ggagguuuccauggacuuu

SEQ ID NO: 1629786 - RNA, 19 nt, Artificial Sequence
  Description of Artificial Sequence: Synthetic oligonucleotide
  Antisense strand to SEQ ID NO: 1629785
aaaguccauggaaaccucc

SEQ ID NO: 1629787 - RNA, 19 nt, Artificial Sequence
  Description of Artificial Sequence: Synthetic oligonucleotide
  Sense strand starting at position 561 of SEQ ID NO: 1560861
gguucuugaaugugggauu

SEQ ID NO: 1629788 - RNA, 19 nt, Artificial Sequence
  Description of Artificial Sequence: Synthetic oligonucleotide
  Antisense strand to SEQ ID NO: 1629787
aaucccacauucaagaacc

SEQ ID NO: 1629789 - RNA, 19 nt, Artificial Sequence
  Description of Artificial Sequence: Synthetic oligonucleotide
  Sense strand starting at position 572 of SEQ ID NO: 1560861
gugggauucuccuccuuga

SEQ ID NO: 1629790 - RNA, 19 nt, Artificial Sequence
  Description of Artificial Sequence: Synthetic oligonucleotide
  Antisense strand to SEQ ID NO: 1629789
ucaaggaggagaaucccac

SEQ ID NO: 1629791 - RNA, 19 nt, Artificial Sequence
  Description of Artificial Sequence: Synthetic oligonucleotide
  Sense strand starting at position 576 of SEQ ID NO: 1560861
gauucuccuccuugaaggu

SEQ ID NO: 1629792 - RNA, 19 nt, Artificial Sequence
  Description of Artificial Sequence: Synthetic oligonucleotide
  Antisense strand to SEQ ID NO: 1629791
accuucaaggaggagaauc

SEQ ID NO: 1629793 - RNA, 19 nt, Artificial Sequence
  Description of Artificial Sequence: Synthetic oligonucleotide
  Sense strand starting at position 1253 of SEQ ID NO: 1560861
cuagaauugagauguguuu

SEQ ID NO: 1629794 - RNA, 19 nt, Artificial Sequence
  Description of Artificial Sequence: Synthetic oligonucleotide
  Antisense strand to SEQ ID NO: 1629793
aaacacaucucaauucuag

SEQ ID NO: 1629795 - RNA, 19 nt, Artificial Sequence
  Description of Artificial Sequence: Synthetic oligonucleotide
  Sense strand starting at position 1259 of SEQ ID NO: 1560861
uugagauguguuugggauc

SEQ ID NO: 1629796 - RNA, 19 nt, Artificial Sequence
  Description of Artificial Sequence: Synthetic oligonucleotide
  Antisense strand to SEQ ID NO: 1629795
gaucccaaacacaucucaa

SEQ ID NO: 1629797 - RNA, 19 nt, Artificial Sequence
  Description of Artificial Sequence: Synthetic oligonucleotide
  Sense strand starting at position 1272 of SEQ ID NO: 1560861
gggauccuuccuggaggau

SEQ ID NO: 1629798 - RNA, 19 nt, Artificial Sequence
  Description of Artificial Sequence: Synthetic oligonucleotide
  Antisense strand to SEQ ID NO: 1629797
auccuccaggaaggauccc

SEQ ID NO: 1629799 - RNA, 19 nt, Artificial Sequence
  Description of Artificial Sequence: Synthetic oligonucleotide
  Sense strand starting at position 1520 of SEQ ID NO: 1560861
ucaggucccuugucacuua

SEQ ID NO: 1629800 - RNA, 19 nt, Artificial Sequence
  Description of Artificial Sequence: Synthetic oligonucleotide
  Antisense strand to SEQ ID NO: 1629799
uaagugacaagggaccuga

SEQ ID NO: 1629801 - RNA, 19 nt, Artificial Sequence
  Description of Artificial Sequence: Synthetic oligonucleotide
  Sense strand starting at position 2205 of SEQ ID NO: 1560861
ggaugucugucggcaguca

SEQ ID NO: 1629802 - RNA, 19 nt, Artificial Sequence
  Description of Artificial Sequence: Synthetic oligonucleotide
  Antisense strand to SEQ ID NO: 1629801
ugacugccgacagacaucc

SEQ ID NO: 1629803 - RNA, 19 nt, Artificial Sequence
  Description of Artificial Sequence: Synthetic oligonucleotide
  Sense strand starting at position 2206 of SEQ ID NO: 1560861
gaugucugucggcagucau

SEQ ID NO: 1629804 - RNA, 19 nt, Artificial Sequence
  Description of Artificial Sequence: Synthetic oligonucleotide
  Antisense strand to SEQ ID NO: 1629803
augacugccgacagacauc

SEQ ID NO: 1629805 - RNA, 19 nt, Artificial Sequence
  Description of Artificial Sequence: Synthetic oligonucleotide
  Sense strand starting at position 2334 of SEQ ID NO: 1560861
gggcacaugcuuuguguua

SEQ ID NO: 1629806 - RNA, 19 nt, Artificial Sequence
  Description of Artificial Sequence: Synthetic oligonucleotide
  Antisense strand to SEQ ID NO: 1629805
uaacacaaagcaugugccc

SEQ ID NO: 1629807 - RNA, 19 nt, Artificial Sequence
  Description of Artificial Sequence: Synthetic oligonucleotide
  Sense strand starting at position 2335 of SEQ ID NO: 1560861
ggcacaugcuuuguguuau

SEQ ID NO: 1629808 - RNA, 19 nt, Artificial Sequence
  Description of Artificial Sequence: Synthetic oligonucleotide
  Antisense strand to SEQ ID NO: 1629807
auaacacaaagcaugugcc

SEQ ID NO: 1629809 - RNA, 19 nt, Artificial Sequence
  Description of Artificial Sequence: Synthetic oligonucleotide
  Sense strand starting at position 2386 of SEQ ID NO: 1560861
caggcauaaggcugaaaga

SEQ ID NO: 1629810 - RNA, 19 nt, Artificial Sequence
  Description of Artificial Sequence: Synthetic oligonucleotide
  Antisense strand to SEQ ID NO: 1629809
ucuuucagccuuaugccug

SEQ ID NO: 1629811 - RNA, 19 nt, Artificial Sequence
  Description of Artificial Sequence: Synthetic oligonucleotide
  Sense strand starting at position 2517 of SEQ ID NO: 1560861
agauccuguugcguagaau

SEQ ID NO: 1629812 - RNA, 19 nt, Artificial Sequence
  Description of Artificial Sequence: Synthetic oligonucleotide
  Antisense strand to SEQ ID NO: 1629811
auucuacgcaacaggaucu

SEQ ID NO: 1629813 - RNA, 19 nt, Artificial Sequence
  Description of Artificial Sequence: Synthetic oligonucleotide
  Sense strand starting at position 2518 of SEQ ID NO: 1560861
gauccuguugcguagaauc

SEQ ID NO: 1629814 - RNA, 19 nt, Artificial Sequence
  Description of Artificial Sequence: Synthetic oligonucleotide
  Antisense strand to SEQ ID NO: 1629813
gauucuacgcaacaggauc

SEQ ID NO: 1629815 - RNA, 19 nt, Artificial Sequence
  Description of Artificial Sequence: Synthetic oligonucleotide
  Sense strand starting at position 2520 of SEQ ID NO: 1560861
uccuguugcguagaaucca

SEQ ID NO: 1629816 - RNA, 19 nt, Artificial Sequence
  Description of Artificial Sequence: Synthetic oligonucleotide
  Antisense strand to SEQ ID NO: 1629815
uggauucuacgcaacagga

SEQ ID NO: 1629817 - RNA, 19 nt, Artificial Sequence
  Description of Artificial Sequence: Synthetic oligonucleotide
  Sense strand starting at position 2536 of SEQ ID NO: 1560861
ccagguucccuacgaaacu

SEQ ID NO: 1629818 - RNA, 19 nt, Artificial Sequence
  Description of Artificial Sequence: Synthetic oligonucleotide
  Antisense strand to SEQ ID NO: 1629817
aguuucguagggaaccugg

SEQ ID NO: 1629819 - RNA, 19 nt, Artificial Sequence
  Description of Artificial Sequence: Synthetic oligonucleotide
  Sense strand starting at position 2954 of SEQ ID NO: 1560861
gcgguaacuccaucgugca

SEQ ID NO: 1629820 - RNA, 19 nt, Artificial Sequence
  Description of Artificial Sequence: Synthetic oligonucleotide
  Antisense strand to SEQ ID NO: 1629819
ugcacgauggaguuaccgc

SEQ ID NO: 1629821 - RNA, 19 nt, Artificial Sequence
  Description of Artificial Sequence: Synthetic oligonucleotide
  Sense strand starting at position 2955 of SEQ ID NO: 1560861
cgguaacuccaucgugcaa

SEQ ID NO: 1629822 - RNA, 19 nt, Artificial Sequence
  Description of Artificial Sequence: Synthetic oligonucleotide
  Antisense strand to SEQ ID NO: 1629821
uugcacgauggaguuaccg

SEQ ID NO: 1629823 - RNA, 19 nt, Artificial Sequence
  Description of Artificial Sequence: Synthetic oligonucleotide
  Sense strand starting at position 2962 of SEQ ID NO: 1560861
uccaucgugcaaugagaaa

SEQ ID NO: 1629824 - RNA, 19 nt, Artificial Sequence
  Description of Artificial Sequence: Synthetic oligonucleotide
  Antisense strand to SEQ ID NO: 1629823
uuucucauugcacgaugga

SEQ ID NO: 1629825 - RNA, 19 nt, Artificial Sequence
  Description of Artificial Sequence: Synthetic oligonucleotide
  Sense strand starting at position 2982 of SEQ ID NO: 1560861
gcgaauuucuuccagacac

SEQ ID NO: 1629826 - RNA, 19 nt, Artificial Sequence
  Description of Artificial Sequence: Synthetic oligonucleotide
  Antisense strand to SEQ ID NO: 1629825
gugucuggaagaaauucgc

SEQ ID NO: 1629827 - RNA, 19 nt, Artificial Sequence
  Description of Artificial Sequence: Synthetic oligonucleotide
  Sense strand starting at position 3040 of SEQ ID NO: 1560861
gcaggguucggacgucauu

SEQ ID NO: 1629828 - RNA, 19 nt, Artificial Sequence
  Description of Artificial Sequence: Synthetic oligonucleotide
  Antisense strand to SEQ ID NO: 1629827
aaugacguccgaacccugc

SEQ ID NO: 1629829 - RNA, 19 nt, Artificial Sequence
  Description of Artificial Sequence: Synthetic oligonucleotide
  Sense strand starting at position 3108 of SEQ ID NO: 1560861
ggaggaaacgcucguugcu

SEQ ID NO: 1629830 - RNA, 19 nt, Artificial Sequence
  Description of Artificial Sequence: Synthetic oligonucleotide
  Antisense strand to SEQ ID NO: 1629829
agcaacgagcguuuccucc

SEQ ID NO: 1629831 - RNA, 19 nt, Artificial Sequence
  Description of Artificial Sequence: Synthetic oligonucleotide
  Sense strand starting at position 3110 of SEQ ID NO: 1560861
aggaaacgcucguugcuaa

SEQ ID NO: 1629832 - RNA, 19 nt, Artificial Sequence
  Description of Artificial Sequence: Synthetic oligonucleotide
  Antisense strand to SEQ ID NO: 1629831
uuagcaacgagcguuuccu

SEQ ID NO: 1629833 - RNA, 19 nt, Artificial Sequence
  Description of Artificial Sequence: Synthetic oligonucleotide
  Sense strand starting at position 3519 of SEQ ID NO: 1560861
agugaauuguggagagaug

SEQ ID NO: 1629834 - RNA, 19 nt, Artificial Sequence
  Description of Artificial Sequence: Synthetic oligonucleotide
  Antisense strand to SEQ ID NO: 1629833
caucucuccacaauucacu

SEQ ID NO: 1629835 - RNA, 19 nt, Artificial Sequence
  Description of Artificial Sequence: Synthetic oligonucleotide
  Sense strand starting at position 3520 of SEQ ID NO: 1560861
gugaauuguggagagaugu

SEQ ID NO: 1629836 - RNA, 19 nt, Artificial Sequence
  Description of Artificial Sequence: Synthetic oligonucleotide
  Antisense strand to SEQ ID NO: 1629835
acaucucuccacaauucac

SEQ ID NO: 1629837 - RNA, 19 nt, Artificial Sequence
  Description of Artificial Sequence: Synthetic oligonucleotide
  Sense strand starting at position 3562 of SEQ ID NO: 1560861
uagggaacuuccggagaga

SEQ ID NO: 1629838 - RNA, 19 nt, Artificial Sequence
  Description of Artificial Sequence: Synthetic oligonucleotide
  Antisense strand to SEQ ID NO: 1629837
ucucuccggaaguucccua

SEQ ID NO: 1629839 - RNA, 19 nt, Artificial Sequence
  Description of Artificial Sequence: Synthetic oligonucleotide
  Sense strand starting at position 3592 of SEQ ID NO: 1560861
agggaagcuuucuuggaga

SEQ ID NO: 1629840 - RNA, 19 nt, Artificial Sequence
  Description of Artificial Sequence: Synthetic oligonucleotide
  Antisense strand to SEQ ID NO: 1629839
ucuccaagaaagcuucccu

SEQ ID NO: 1629841 - RNA, 19 nt, Artificial Sequence
  Description of Artificial Sequence: Synthetic oligonucleotide
  Sense strand starting at position 3618 of SEQ ID NO: 1560861
ggugaacuuccacgggaaa

SEQ ID NO: 1629842 - RNA, 19 nt, Artificial Sequence
  Description of Artificial Sequence: Synthetic oligonucleotide
  Antisense strand to SEQ ID NO: 1629841
uuucccguggaaguucacc

SEQ ID NO: 1629843 - RNA, 19 nt, Artificial Sequence
  Description of Artificial Sequence: Synthetic oligonucleotide
  Sense strand starting at position 3620 of SEQ ID NO: 1560861
ugaacuuccacgggaaagu

SEQ ID NO: 1629844 - RNA, 19 nt, Artificial Sequence
  Description of Artificial Sequence: Synthetic oligonucleotide
  Antisense strand to SEQ ID NO: 1629843
acuuucccguggaaguuca

SEQ ID NO: 1629845 - RNA, 19 nt, Artificial Sequence
  Description of Artificial Sequence: Synthetic oligonucleotide
  Sense strand starting at position 3724 of SEQ ID NO: 1560861
aaggaaucaucugagagcu

SEQ ID NO: 1629846 - RNA, 19 nt, Artificial Sequence
  Description of Artificial Sequence: Synthetic oligonucleotide
  Antisense strand to SEQ ID NO: 1629845
agcucucagaugauuccuu

SEQ ID NO: 1629847 - RNA, 19 nt, Artificial Sequence
  Description of Artificial Sequence: Synthetic oligonucleotide
  Sense strand starting at position 3753 of SEQ ID NO: 1560861
cugucaucucugugcccua

SEQ ID NO: 1629848 - RNA, 19 nt, Artificial Sequence
  Description of Artificial Sequence: Synthetic oligonucleotide
  Antisense strand to SEQ ID NO: 1629847
uagggcacagagaugacag

SEQ ID NO: 1629849 - RNA, 19 nt, Artificial Sequence
  Description of Artificial Sequence: Synthetic oligonucleotide
  Sense strand starting at position 3754 of SEQ ID NO: 1560861
ugucaucucugugcccuaa

SEQ ID NO: 1629850 - RNA, 19 nt, Artificial Sequence
  Description of Artificial Sequence: Synthetic oligonucleotide
  Antisense strand to SEQ ID NO: 1629849
uuagggcacagagaugaca

SEQ ID NO: 1629851 - RNA, 19 nt, Artificial Sequence
  Description of Artificial Sequence: Synthetic oligonucleotide
  Sense strand starting at position 3796 of SEQ ID NO: 1560861
cagacucacugugcagaaa

SEQ ID NO: 1629852 - RNA, 19 nt, Artificial Sequence
  Description of Artificial Sequence: Synthetic oligonucleotide
  Antisense strand to SEQ ID NO: 1629851
uuucugcacagugagucug

SEQ ID NO: 1629853 - RNA, 19 nt, Artificial Sequence
  Description of Artificial Sequence: Synthetic oligonucleotide
  Sense strand starting at position 3972 of SEQ ID NO: 1560861
uggguuuagucacuuucuu

SEQ ID NO: 1629854 - RNA, 19 nt, Artificial Sequence
  Description of Artificial Sequence: Synthetic oligonucleotide
  Antisense strand to SEQ ID NO: 1629853
aagaaagugacuaaaccca

SEQ ID NO: 1629855 - RNA, 19 nt, Artificial Sequence
  Description of Artificial Sequence: Synthetic oligonucleotide
  Sense strand starting at position 438 of SEQ ID NO: 1560862
gacucaggcuugcucuauu

SEQ ID NO: 1629856 - RNA, 19 nt, Artificial Sequence
  Description of Artificial Sequence: Synthetic oligonucleotide
  Antisense strand to SEQ ID NO: 1629855
aauagagcaagccugaguc

SEQ ID NO: 1629857 - RNA, 19 nt, Artificial Sequence
  Description of Artificial Sequence: Synthetic oligonucleotide
  Sense strand starting at position 987 of SEQ ID NO: 1560862
ggaugaggaugaaguguaa

SEQ ID NO: 1629858 - RNA, 19 nt, Artificial Sequence
  Description of Artificial Sequence: Synthetic oligonucleotide
  Antisense strand to SEQ ID NO: 1629857
uuacacuucauccucaucc

SEQ ID NO: 1629859 - RNA, 19 nt, Artificial Sequence
  Description of Artificial Sequence: Synthetic oligonucleotide
  Sense strand starting at position 994 of SEQ ID NO: 1560862
gaugaaguguaaggugaau

SEQ ID NO: 1629860 - RNA, 19 nt, Artificial Sequence
  Description of Artificial Sequence: Synthetic oligonucleotide
  Antisense strand to SEQ ID NO: 1629859
auucaccuuacacuucauc

SEQ ID NO: 1629861 - RNA, 19 nt, Artificial Sequence
  Description of Artificial Sequence: Synthetic oligonucleotide
  Sense strand starting at position 996 of SEQ ID NO: 1560862
ugaaguguaaggugaauag

SEQ ID NO: 1629862 - RNA, 19 nt, Artificial Sequence
  Description of Artificial Sequence: Synthetic oligonucleotide
  Antisense strand to SEQ ID NO: 1629861
cuauucaccuuacacuuca

SEQ ID NO: 1629863 - RNA, 19 nt, Artificial Sequence
  Description of Artificial Sequence: Synthetic oligonucleotide
  Sense strand starting at position 1006 of SEQ ID NO: 1560862
ggugaauagggauguuuaa

SEQ ID NO: 1629864 - RNA, 19 nt, Artificial Sequence
  Description of Artificial Sequence: Synthetic oligonucleotide
  Antisense strand to SEQ ID NO: 1629863
uuaaacaucccuauucacc

SEQ ID NO: 1629865 - RNA, 19 nt, Artificial Sequence
  Description of Artificial Sequence: Synthetic oligonucleotide
  Sense strand starting at position 1168 of SEQ ID NO: 1560862
acgggcuucuuaccagaca

SEQ ID NO: 1629866 - RNA, 19 nt, Artificial Sequence
  Description of Artificial Sequence: Synthetic oligonucleotide
  Antisense strand to SEQ ID NO: 1629865
ugucugguaagaagcccgu

SEQ ID NO: 1629867 - RNA, 19 nt, Artificial Sequence
  Description of Artificial Sequence: Synthetic oligonucleotide
  Sense strand starting at position 1169 of SEQ ID NO: 1560862
cgggcuucuuaccagacaa

SEQ ID NO: 1629868 - RNA, 19 nt, Artificial Sequence
  Description of Artificial Sequence: Synthetic oligonucleotide
  Antisense strand to SEQ ID NO: 1629867
uugucugguaagaagcccg

SEQ ID NO: 1629869 - RNA, 19 nt, Artificial Sequence
  Description of Artificial Sequence: Synthetic oligonucleotide
  Sense strand starting at position 1393 of SEQ ID NO: 1560862
gccucaaggucuugccuaa

SEQ ID NO: 1629870 - RNA, 19 nt, Artificial Sequence
  Description of Artificial Sequence: Synthetic oligonucleotide
  Antisense strand to SEQ ID NO: 1629869
uuaggcaagaccuugaggc

SEQ ID NO: 1629871 - RNA, 19 nt, Artificial Sequence
  Description of Artificial Sequence: Synthetic oligonucleotide
  Sense strand starting at position 1440 of SEQ ID NO: 1560862
cugggauggucucuuucuu

SEQ ID NO: 1629872 - RNA, 19 nt, Artificial Sequence
  Description of Artificial Sequence: Synthetic oligonucleotide
  Antisense strand to SEQ ID NO: 1629871
aagaaagagaccaucccag

SEQ ID NO: 1629873 - RNA, 19 nt, Artificial Sequence
  Description of Artificial Sequence: Synthetic oligonucleotide
  Sense strand starting at position 1765 of SEQ ID NO: 1560862
gccaaaucugucuggugca

SEQ ID NO: 1629874 - RNA, 19 nt, Artificial Sequence
  Description of Artificial Sequence: Synthetic oligonucleotide
  Antisense strand to SEQ ID NO: 1629873
ugcaccagacagauuuggc

SEQ ID NO: 1629875 - RNA, 19 nt, Artificial Sequence
  Description of Artificial Sequence: Synthetic oligonucleotide
  Sense strand starting at position 1766 of SEQ ID NO: 1560862
ccaaaucugucuggugcau

SEQ ID NO: 1629876 - RNA, 19 nt, Artificial Sequence
  Description of Artificial Sequence: Synthetic oligonucleotide
  Antisense strand to SEQ ID NO: 1629875
augcaccagacagauuugg

SEQ ID NO: 1629877 - RNA, 19 nt, Artificial Sequence
  Description of Artificial Sequence: Synthetic oligonucleotide
  Sense strand starting at position 1789 of SEQ ID NO: 1560862
uggagugcuuucuuaggua

SEQ ID NO: 1629878 - RNA, 19 nt, Artificial Sequence
  Description of Artificial Sequence: Synthetic oligonucleotide
  Antisense strand to SEQ ID NO: 1629877
uaccuaagaaagcacucca

SEQ ID NO: 1629879 - RNA, 19 nt, Artificial Sequence
  Description of Artificial Sequence: Synthetic oligonucleotide
  Sense strand starting at position 1938 of SEQ ID NO: 1560862
cccuguccuuccgggauua

SEQ ID NO: 1629880 - RNA, 19 nt, Artificial Sequence
  Description of Artificial Sequence: Synthetic oligonucleotide
  Antisense strand to SEQ ID NO: 1629879
uaaucccggaaggacaggg

SEQ ID NO: 1629881 - RNA, 19 nt, Artificial Sequence
  Description of Artificial Sequence: Synthetic oligonucleotide
  Sense strand starting at position 1940 of SEQ ID NO: 1560862
cuguccuuccgggauuacu

SEQ ID NO: 1629882 - RNA, 19 nt, Artificial Sequence
  Description of Artificial Sequence: Synthetic oligonucleotide
  Antisense strand to SEQ ID NO: 1629881
aguaaucccggaaggacag

SEQ ID NO: 1629883 - RNA, 19 nt, Artificial Sequence
  Description of Artificial Sequence: Synthetic oligonucleotide
  Sense strand starting at position 1995 of SEQ ID NO: 1560862
gugaaauggucucuuccag

SEQ ID NO: 1629884 - RNA, 19 nt, Artificial Sequence
  Description of Artificial Sequence: Synthetic oligonucleotide
  Antisense strand to SEQ ID NO: 1629883
cuggaagagaccauuucac

SEQ ID NO: 1629885 - RNA, 19 nt, Artificial Sequence
  Description of Artificial Sequence: Synthetic oligonucleotide
  Sense strand starting at position 2045 of SEQ ID NO: 1560862
cccguagucucuuccaaug

SEQ ID NO: 1629886 - RNA, 19 nt, Artificial Sequence
  Description of Artificial Sequence: Synthetic oligonucleotide
  Antisense strand to SEQ ID NO: 1629885
cauuggaagagacuacggg

SEQ ID NO: 1629887 - RNA, 19 nt, Artificial Sequence
  Description of Artificial Sequence: Synthetic oligonucleotide
  Sense strand starting at position 2047 of SEQ ID NO: 1560862
cguagucucuuccaaugaa

SEQ ID NO: 1629888 - RNA, 19 nt, Artificial Sequence
  Description of Artificial Sequence: Synthetic oligonucleotide
  Antisense strand to SEQ ID NO: 1629887
uucauuggaagagacuacg

SEQ ID NO: 1629889 - RNA, 19 nt, Artificial Sequence
  Description of Artificial Sequence: Synthetic oligonucleotide
  Sense strand starting at position 2226 of SEQ ID NO: 1560862
guggucucuuccuacccaa

SEQ ID NO: 1629890 - RNA, 19 nt, Artificial Sequence
  Description of Artificial Sequence: Synthetic oligonucleotide
  Antisense strand to SEQ ID NO: 1629889
uuggguaggaagagaccac

SEQ ID NO: 1629891 - RNA, 19 nt, Artificial Sequence
  Description of Artificial Sequence: Synthetic oligonucleotide
  Sense strand starting at position 2306 of SEQ ID NO: 1560862
gggugcguuuccucuucua

SEQ ID NO: 1629892 - RNA, 19 nt, Artificial Sequence
  Description of Artificial Sequence: Synthetic oligonucleotide
  Antisense strand to SEQ ID NO: 1629891
uagaagaggaaacgcaccc

SEQ ID NO: 1629893 - RNA, 19 nt, Artificial Sequence
  Description of Artificial Sequence: Synthetic oligonucleotide
  Sense strand starting at position 2308 of SEQ ID NO: 1560862
gugcguuuccucuucuaug

SEQ ID NO: 1629894 - RNA, 19 nt, Artificial Sequence
  Description of Artificial Sequence: Synthetic oligonucleotide
  Antisense strand to SEQ ID NO: 1629893
cauagaagaggaaacgcac

SEQ ID NO: 1629895 - RNA, 19 nt, Artificial Sequence
  Description of Artificial Sequence: Synthetic oligonucleotide
  Sense strand starting at position 2484 of SEQ ID NO: 1560862
ucucuccuccugugauuga

SEQ ID NO: 1629896 - RNA, 19 nt, Artificial Sequence
  Description of Artificial Sequence: Synthetic oligonucleotide
  Antisense strand to SEQ ID NO: 1629895
ucaaucacaggaggagaga

SEQ ID NO: 1629897 - RNA, 19 nt, Artificial Sequence
  Description of Artificial Sequence: Synthetic oligonucleotide
  Sense strand starting at position 2485 of SEQ ID NO: 1560862
cucuccuccugugauugaa

SEQ ID NO: 1629898 - RNA, 19 nt, Artificial Sequence
  Description of Artificial Sequence: Synthetic oligonucleotide
  Antisense strand to SEQ ID NO: 1629897
uucaaucacaggaggagag

SEQ ID NO: 1629899 - RNA, 19 nt, Artificial Sequence
  Description of Artificial Sequence: Synthetic oligonucleotide
  Sense strand starting at position 2488 of SEQ ID NO: 1560862
uccuccugugauugaaagu

SEQ ID NO: 1629900 - RNA, 19 nt, Artificial Sequence
  Description of Artificial Sequence: Synthetic oligonucleotide
  Antisense strand to SEQ ID NO: 1629899
acuuucaaucacaggagga

SEQ ID NO: 1629901 - RNA, 19 nt, Artificial Sequence
  Description of Artificial Sequence: Synthetic oligonucleotide
  Sense strand starting at position 2971 of SEQ ID NO: 1560862
ugcuucuccucuuuacgau

SEQ ID NO: 1629902 - RNA, 19 nt, Artificial Sequence
  Description of Artificial Sequence: Synthetic oligonucleotide
  Antisense strand to SEQ ID NO: 1629901
aucguaaagaggagaagca

SEQ ID NO: 1629903 - RNA, 19 nt, Artificial Sequence
  Description of Artificial Sequence: Synthetic oligonucleotide
  Sense strand starting at position 2975 of SEQ ID NO: 1560862
ucuccucuuuacgaugauu

SEQ ID NO: 1629904 - RNA, 19 nt, Artificial Sequence
  Description of Artificial Sequence: Synthetic oligonucleotide
  Antisense strand to SEQ ID NO: 1629903
aaucaucguaaagaggaga

SEQ ID NO: 1629905 - RNA, 19 nt, Artificial Sequence
  Description of Artificial Sequence: Synthetic oligonucleotide
  Sense strand starting at position 3534 of SEQ ID NO: 1560862
cccacagugucuuuccuua

SEQ ID NO: 1629906 - RNA, 19 nt, Artificial Sequence
  Description of Artificial Sequence: Synthetic oligonucleotide
  Antisense strand to SEQ ID NO: 1629905
uaaggaaagacacuguggg

SEQ ID NO: 1629907 - RNA, 19 nt, Artificial Sequence
  Description of Artificial Sequence: Synthetic oligonucleotide
  Sense strand starting at position 3608 of SEQ ID NO: 1560862
ucuuuaggacagugucauu

SEQ ID NO: 1629908 - RNA, 19 nt, Artificial Sequence
  Description of Artificial Sequence: Synthetic oligonucleotide
  Antisense strand to SEQ ID NO: 1629907
aaugacacuguccuaaaga

SEQ ID NO: 1629909 - RNA, 19 nt, Artificial Sequence
  Description of Artificial Sequence: Synthetic oligonucleotide
  Sense strand starting at position 3628 of SEQ ID NO: 1560862
ucagaauucugugacaaua

SEQ ID NO: 1629910 - RNA, 19 nt, Artificial Sequence
  Description of Artificial Sequence: Synthetic oligonucleotide
  Antisense strand to SEQ ID NO: 1629909
uauugucacagaauucuga

SEQ ID NO: 1629911 - RNA, 19 nt, Artificial Sequence
  Description of Artificial Sequence: Synthetic oligonucleotide
  Sense strand starting at position 3630 of SEQ ID NO: 1560862
agaauucugugacaauaau

SEQ ID NO: 1629912 - RNA, 19 nt, Artificial Sequence
  Description of Artificial Sequence: Synthetic oligonucleotide
  Antisense strand to SEQ ID NO: 1629911
auuauugucacagaauucu

SEQ ID NO: 1629913 - RNA, 19 nt, Artificial Sequence
  Description of Artificial Sequence: Synthetic oligonucleotide
  Sense strand starting at position 3739 of SEQ ID NO: 1560862
cgucuugagaaccaugaug

SEQ ID NO: 1629914 - RNA, 19 nt, Artificial Sequence
  Description of Artificial Sequence: Synthetic oligonucleotide
  Antisense strand to SEQ ID NO: 1629913
caucaugguucucaagacg

SEQ ID NO: 1629915 - RNA, 19 nt, Artificial Sequence
  Description of Artificial Sequence: Synthetic oligonucleotide
  Sense strand starting at position 20 of SEQ ID NO: 1560863
gagucauaaacguguggca

SEQ ID NO: 1629916 - RNA, 19 nt, Artificial Sequence
  Description of Artificial Sequence: Synthetic oligonucleotide
  Antisense strand to SEQ ID NO: 1629915
ugccacacguuuaugacuc

SEQ ID NO: 1629917 - RNA, 19 nt, Artificial Sequence
  Description of Artificial Sequence: Synthetic oligonucleotide
  Sense strand starting at position 22 of SEQ ID NO: 1560863
gucauaaacguguggcauu

SEQ ID NO: 1629918 - RNA, 19 nt, Artificial Sequence
  Description of Artificial Sequence: Synthetic oligonucleotide
  Antisense strand to SEQ ID NO: 1629917
aaugccacacguuuaugac

SEQ ID NO: 1629919 - RNA, 19 nt, Artificial Sequence
  Description of Artificial Sequence: Synthetic oligonucleotide
  Sense strand starting at position 23 of SEQ ID NO: 1560863
ucauaaacguguggcauuu

SEQ ID NO: 1629920 - RNA, 19 nt, Artificial Sequence
  Description of Artificial Sequence: Synthetic oligonucleotide
  Antisense strand to SEQ ID NO: 1629919
aaaugccacacguuuauga

SEQ ID NO: 1629921 - RNA, 19 nt, Artificial Sequence
  Description of Artificial Sequence: Synthetic oligonucleotide
  Sense strand starting at position 88 of SEQ ID NO: 1560863
gucacuuguggcugucaca

SEQ ID NO: 1629922 - RNA, 19 nt, Artificial Sequence
  Description of Artificial Sequence: Synthetic oligonucleotide
  Antisense strand to SEQ ID NO: 1629921
ugugacagccacaagugac

SEQ ID NO: 1629923 - RNA, 19 nt, Artificial Sequence
  Description of Artificial Sequence: Synthetic oligonucleotide
  Sense strand starting at position 217 of SEQ ID NO: 1560863
augaaaccaucucggugaa

SEQ ID NO: 1629924 - RNA, 19 nt, Artificial Sequence
  Description of Artificial Sequence: Synthetic oligonucleotide
  Antisense strand to SEQ ID NO: 1629923
uucaccgagaugguuucau

SEQ ID NO: 1629925 - RNA, 19 nt, Artificial Sequence
  Description of Artificial Sequence: Synthetic oligonucleotide
  Sense strand starting at position 219 of SEQ ID NO: 1560863
gaaaccaucucggugaaga

SEQ ID NO: 1629926 - RNA, 19 nt, Artificial Sequence
  Description of Artificial Sequence: Synthetic oligonucleotide
  Antisense strand to SEQ ID NO: 1629925
ucuucaccgagaugguuuc

SEQ ID NO: 1629927 - RNA, 19 nt, Artificial Sequence
  Description of Artificial Sequence: Synthetic oligonucleotide
  Sense strand starting at position 220 of SEQ ID NO: 1560863
aaaccaucucggugaagaa

SEQ ID NO: 1629928 - RNA, 19 nt, Artificial Sequence
  Description of Artificial Sequence: Synthetic oligonucleotide
  Antisense strand to SEQ ID NO: 1629927
uucuucaccgagaugguuu

SEQ ID NO: 1629929 - RNA, 19 nt, Artificial Sequence
  Description of Artificial Sequence: Synthetic oligonucleotide
  Sense strand starting at position 384 of SEQ ID NO: 1560863
gggucagauuucuguggau

SEQ ID NO: 1629930 - RNA, 19 nt, Artificial Sequence
  Description of Artificial Sequence: Synthetic oligonucleotide
  Antisense strand to SEQ ID NO: 1629929
auccacagaaaucugaccc

SEQ ID NO: 1629931 - RNA, 19 nt, Artificial Sequence
  Description of Artificial Sequence: Synthetic oligonucleotide
  Sense strand starting at position 387 of SEQ ID NO: 1560863
ucagauuucuguggauuuc

SEQ ID NO: 1629932 - RNA, 19 nt, Artificial Sequence
  Description of Artificial Sequence: Synthetic oligonucleotide
  Antisense strand to SEQ ID NO: 1629931
gaaauccacagaaaucuga

SEQ ID NO: 1629933 - RNA, 19 nt, Artificial Sequence
  Description of Artificial Sequence: Synthetic oligonucleotide
  Sense strand starting at position 561 of SEQ ID NO: 1560863
gaauggucgcggugugguu

SEQ ID NO: 1629934 - RNA, 19 nt, Artificial Sequence
  Description of Artificial Sequence: Synthetic oligonucleotide
  Antisense strand to SEQ ID NO: 1629933
aaccacaccgcgaccauuc

SEQ ID NO: 1629935 - RNA, 19 nt, Artificial Sequence
  Description of Artificial Sequence: Synthetic oligonucleotide
  Sense strand starting at position 603 of SEQ ID NO: 1560863
gcuacuuugucucugacca

SEQ ID NO: 1629936 - RNA, 19 nt, Artificial Sequence
  Description of Artificial Sequence: Synthetic oligonucleotide
  Antisense strand to SEQ ID NO: 1629935
uggucagagacaaaguagc

SEQ ID NO: 1629937 - RNA, 19 nt, Artificial Sequence
  Description of Artificial Sequence: Synthetic oligonucleotide
  Sense strand starting at position 1006 of SEQ ID NO: 1560863
ccgugugggugucuacaga

SEQ ID NO: 1629938 - RNA, 19 nt, Artificial Sequence
  Description of Artificial Sequence: Synthetic oligonucleotide
  Antisense strand to SEQ ID NO: 1629937
ucuguagacacccacacgg

SEQ ID NO: 1629939 - RNA, 19 nt, Artificial Sequence
  Description of Artificial Sequence: Synthetic oligonucleotide
  Sense strand starting at position 1069 of SEQ ID NO: 1560863
uccggaaacuuccgauuug

SEQ ID NO: 1629940 - RNA, 19 nt, Artificial Sequence
  Description of Artificial Sequence: Synthetic oligonucleotide
  Antisense strand to SEQ ID NO: 1629939
caaaucggaaguuuccgga

SEQ ID NO: 1629941 - RNA, 19 nt, Artificial Sequence
  Description of Artificial Sequence: Synthetic oligonucleotide
  Sense strand starting at position 1332 of SEQ ID NO: 1560863
gaggcaucuugagauguaa

SEQ ID NO: 1629942 - RNA, 19 nt, Artificial Sequence
  Description of Artificial Sequence: Synthetic oligonucleotide
  Antisense strand to SEQ ID NO: 1629941
uuacaucucaagaugccuc

SEQ ID NO: 1629943 - RNA, 19 nt, Artificial Sequence
  Description of Artificial Sequence: Synthetic oligonucleotide
  Sense strand starting at position 2166 of SEQ ID NO: 1560863
cucgccauuccaucguauu

SEQ ID NO: 1629944 - RNA, 19 nt, Artificial Sequence
  Description of Artificial Sequence: Synthetic oligonucleotide
  Antisense strand to SEQ ID NO: 1629943
aauacgauggaauggcgag

SEQ ID NO: 1629945 - RNA, 19 nt, Artificial Sequence
  Description of Artificial Sequence: Synthetic oligonucleotide
  Sense strand starting at position 2167 of SEQ ID NO: 1560863
ucgccauuccaucguauua

SEQ ID NO: 1629946 - RNA, 19 nt, Artificial Sequence
  Description of Artificial Sequence: Synthetic oligonucleotide
  Antisense strand to SEQ ID NO: 1629945
uaauacgauggaauggcga

SEQ ID NO: 1629947 - RNA, 19 nt, Artificial Sequence
  Description of Artificial Sequence: Synthetic oligonucleotide
  Sense strand starting at position 2177 of SEQ ID NO: 1560863
aucguauuaggucaguaag

SEQ ID NO: 1629948 - RNA, 19 nt, Artificial Sequence
  Description of Artificial Sequence: Synthetic oligonucleotide
  Antisense strand to SEQ ID NO: 1629947
cuuacugaccuaauacgau

SEQ ID NO: 1629949 - RNA, 19 nt, Artificial Sequence
  Description of Artificial Sequence: Synthetic oligonucleotide
  Sense strand starting at position 2179 of SEQ ID NO: 1560863
cguauuaggucaguaagau

SEQ ID NO: 1629950 - RNA, 19 nt, Artificial Sequence
  Description of Artificial Sequence: Synthetic oligonucleotide
  Antisense strand to SEQ ID NO: 1629949
aucuuacugaccuaauacg

SEQ ID NO: 1629951 - RNA, 19 nt, Artificial Sequence
  Description of Artificial Sequence: Synthetic oligonucleotide
  Sense strand starting at position 2180 of SEQ ID NO: 1560863
guauuaggucaguaagauu

SEQ ID NO: 1629952 - RNA, 19 nt, Artificial Sequence
  Description of Artificial Sequence: Synthetic oligonucleotide
  Antisense strand to SEQ ID NO: 1629951
aaucuuacugaccuaauac

SEQ ID NO: 1629953 - RNA, 19 nt, Artificial Sequence
  Description of Artificial Sequence: Synthetic oligonucleotide
  Sense strand starting at position 2202 of SEQ ID NO: 1560863
aggcacgauacguaucaau

SEQ ID NO: 1629954 - RNA, 19 nt, Artificial Sequence
  Description of Artificial Sequence: Synthetic oligonucleotide
  Antisense strand to SEQ ID NO: 1629953
auugauacguaucgugccu

SEQ ID NO: 1629955 - RNA, 19 nt, Artificial Sequence
  Description of Artificial Sequence: Synthetic oligonucleotide
  Sense strand starting at position 2205 of SEQ ID NO: 1560863
cacgauacguaucaauaac

SEQ ID NO: 1629956 - RNA, 19 nt, Artificial Sequence
  Description of Artificial Sequence: Synthetic oligonucleotide
  Antisense strand to SEQ ID NO: 1629955
guuauugauacguaucgug

SEQ ID NO: 1629957 - RNA, 19 nt, Artificial Sequence
  Description of Artificial Sequence: Synthetic oligonucleotide
  Sense strand starting at position 2219 of SEQ ID NO: 1560863
auaacauugcugugcacaa

SEQ ID NO: 1629958 - RNA, 19 nt, Artificial Sequence
  Description of Artificial Sequence: Synthetic oligonucleotide
  Antisense strand to SEQ ID NO: 1629957
uugugcacagcaauguuau

SEQ ID NO: 1629959 - RNA, 19 nt, Artificial Sequence
  Description of Artificial Sequence: Synthetic oligonucleotide
  Sense strand starting at position 2270 of SEQ ID NO: 1560863
ugacaauaauauggaucua

SEQ ID NO: 1629960 - RNA, 19 nt, Artificial Sequence
  Description of Artificial Sequence: Synthetic oligonucleotide
  Antisense strand to SEQ ID NO: 1629959
uagauccauauuauuguca

SEQ ID NO: 1629961 - RNA, 19 nt, Artificial Sequence
  Description of Artificial Sequence: Synthetic oligonucleotide
  Sense strand starting at position 2298 of SEQ ID NO: 1560863
ugccaauaauauggaugua

SEQ ID NO: 1629962 - RNA, 19 nt, Artificial Sequence
  Description of Artificial Sequence: Synthetic oligonucleotide
  Antisense strand to SEQ ID NO: 1629961
uacauccauauuauuggca

SEQ ID NO: 1629963 - RNA, 19 nt, Artificial Sequence
  Description of Artificial Sequence: Synthetic oligonucleotide
  Sense strand starting at position 2326 of SEQ ID NO: 1560863
ugccaauaacauggaucua

SEQ ID NO: 1629964 - RNA, 19 nt, Artificial Sequence
  Description of Artificial Sequence: Synthetic oligonucleotide
  Antisense strand to SEQ ID NO: 1629963
uagauccauguuauuggca

SEQ ID NO: 1629965 - RNA, 19 nt, Artificial Sequence
  Description of Artificial Sequence: Synthetic oligonucleotide
  Sense strand starting at position 2419 of SEQ ID NO: 1560863
cgccuauauucccggcacu

SEQ ID NO: 1629966 - RNA, 19 nt, Artificial Sequence
  Description of Artificial Sequence: Synthetic oligonucleotide
  Antisense strand to SEQ ID NO: 1629965
agugccgggaauauaggcg

SEQ ID NO: 1629967 - RNA, 19 nt, Artificial Sequence
  Description of Artificial Sequence: Synthetic oligonucleotide
  Sense strand starting at position 2714 of SEQ ID NO: 1560863
ugccaauaacauggaguua

SEQ ID NO: 1629968 - RNA, 19 nt, Artificial Sequence
  Description of Artificial Sequence: Synthetic oligonucleotide
  Antisense strand to SEQ ID NO: 1629967
uaacuccauguuauuggca

SEQ ID NO: 1629969 - RNA, 19 nt, Artificial Sequence
  Description of Artificial Sequence: Synthetic oligonucleotide
  Sense strand starting at position 2742 of SEQ ID NO: 1560863
ugccaauaacauggauaua

SEQ ID NO: 1629970 - RNA, 19 nt, Artificial Sequence
  Description of Artificial Sequence: Synthetic oligonucleotide
  Antisense strand to SEQ ID NO: 1629969
uauauccauguuauuggca

SEQ ID NO: 1629971 - RNA, 19 nt, Artificial Sequence
  Description of Artificial Sequence: Synthetic oligonucleotide
  Sense strand starting at position 2847 of SEQ ID NO: 1560863
cuauaucauugacauggau

SEQ ID NO: 1629972 - RNA, 19 nt, Artificial Sequence
  Description of Artificial Sequence: Synthetic oligonucleotide
  Antisense strand to SEQ ID NO: 1629971
auccaugucaaugauauag

SEQ ID NO: 1629973 - RNA, 19 nt, Artificial Sequence
  Description of Artificial Sequence: Synthetic oligonucleotide
  Sense strand starting at position 2883 of SEQ ID NO: 1560863
auagcauugcuauaugcaa

SEQ ID NO: 1629974 - RNA, 19 nt, Artificial Sequence
  Description of Artificial Sequence: Synthetic oligonucleotide
  Antisense strand to SEQ ID NO: 1629973
uugcauauagcaaugcuau

SEQ ID NO: 1629975 - RNA, 19 nt, Artificial Sequence
  Description of Artificial Sequence: Synthetic oligonucleotide
  Sense strand starting at position 3541 of SEQ ID NO: 1560863
ugaucuacgcaauacauau

SEQ ID NO: 1629976 - RNA, 19 nt, Artificial Sequence
  Description of Artificial Sequence: Synthetic oligonucleotide
  Antisense strand to SEQ ID NO: 1629975
auauguauugcguagauca

SEQ ID NO: 1629977 - RNA, 19 nt, Artificial Sequence
  Description of Artificial Sequence: Synthetic oligonucleotide
  Sense strand starting at position 3610 of SEQ ID NO: 1560863
uuuauauuccaucguuugu

SEQ ID NO: 1629978 - RNA, 19 nt, Artificial Sequence
  Description of Artificial Sequence: Synthetic oligonucleotide
  Antisense strand to SEQ ID NO: 1629977
acaaacgauggaauauaaa

SEQ ID NO: 1629979 - RNA, 19 nt, Artificial Sequence
  Description of Artificial Sequence: Synthetic oligonucleotide
  Sense strand starting at position 3619 of SEQ ID NO: 1560863
caucguuuguauuacguaa

SEQ ID NO: 1629980 - RNA, 19 nt, Artificial Sequence
  Description of Artificial Sequence: Synthetic oligonucleotide
  Antisense strand to SEQ ID NO: 1629979
uuacguaauacaaacgaug

SEQ ID NO: 1629981 - RNA, 19 nt, Artificial Sequence
  Description of Artificial Sequence: Synthetic oligonucleotide
  Sense strand starting at position 3621 of SEQ ID NO: 1560863
ucguuuguauuacguaagu

SEQ ID NO: 1629982 - RNA, 19 nt, Artificial Sequence
  Description of Artificial Sequence: Synthetic oligonucleotide
  Antisense strand to SEQ ID NO: 1629981
acuuacguaauacaaacga

SEQ ID NO: 1629983 - RNA, 19 nt, Artificial Sequence
  Description of Artificial Sequence: Synthetic oligonucleotide
  Sense strand starting at position 3623 of SEQ ID NO: 1560863
guuuguauuacguaaguau

SEQ ID NO: 1629984 - RNA, 19 nt, Artificial Sequence
  Description of Artificial Sequence: Synthetic oligonucleotide
  Antisense strand to SEQ ID NO: 1629983
auacuuacguaauacaaac

SEQ ID NO: 1629985 - RNA, 19 nt, Artificial Sequence
  Description of Artificial Sequence: Synthetic oligonucleotide
  Sense strand starting at position 3626 of SEQ ID NO: 1560863
uguauuacguaaguauaga

SEQ ID NO: 1629986 - RNA, 19 nt, Artificial Sequence
  Description of Artificial Sequence: Synthetic oligonucleotide
  Antisense strand to SEQ ID NO: 1629985
ucuauacuuacguaauaca

SEQ ID NO: 1629987 - RNA, 19 nt, Artificial Sequence
  Description of Artificial Sequence: Synthetic oligonucleotide
  Sense strand starting at position 3627 of SEQ ID NO: 1560863
guauuacguaaguauagau

SEQ ID NO: 1629988 - RNA, 19 nt, Artificial Sequence
  Description of Artificial Sequence: Synthetic oligonucleotide
  Antisense strand to SEQ ID NO: 1629987
aucuauacuuacguaauac

SEQ ID NO: 1629989 - RNA, 19 nt, Artificial Sequence
  Description of Artificial Sequence: Synthetic oligonucleotide
  Sense strand starting at position 3685 of SEQ ID NO: 1560863
acaguuugcuauuauaaga

SEQ ID NO: 1629990 - RNA, 19 nt, Artificial Sequence
  Description of Artificial Sequence: Synthetic oligonucleotide
  Antisense strand to SEQ ID NO: 1629989
ucuuauaauagcaaacugu

SEQ ID NO: 1629991 - RNA, 19 nt, Artificial Sequence
  Description of Artificial Sequence: Synthetic oligonucleotide
  Sense strand starting at position 7 of SEQ ID NO: 1560864
gagucauaaacguguggca

SEQ ID NO: 1629992 - RNA, 19 nt, Artificial Sequence
  Description of Artificial Sequence: Synthetic oligonucleotide
  Antisense strand to SEQ ID NO: 1629991
ugccacacguuuaugacuc

SEQ ID NO: 1629993 - RNA, 19 nt, Artificial Sequence
  Description of Artificial Sequence: Synthetic oligonucleotide
  Sense strand starting at position 9 of SEQ ID NO: 1560864
gucauaaacguguggcauu

SEQ ID NO: 1629994 - RNA, 19 nt, Artificial Sequence
  Description of Artificial Sequence: Synthetic oligonucleotide
  Antisense strand to SEQ ID NO: 1629993
aaugccacacguuuaugac

SEQ ID NO: 1629995 - RNA, 19 nt, Artificial Sequence
  Description of Artificial Sequence: Synthetic oligonucleotide
  Sense strand starting at position 10 of SEQ ID NO: 1560864
ucauaaacguguggcauuu

SEQ ID NO: 1629996 - RNA, 19 nt, Artificial Sequence
  Description of Artificial Sequence: Synthetic oligonucleotide
  Antisense strand to SEQ ID NO: 1629995
aaaugccacacguuuauga

SEQ ID NO: 1629997 - RNA, 19 nt, Artificial Sequence
  Description of Artificial Sequence: Synthetic oligonucleotide
  Sense strand starting at position 75 of SEQ ID NO: 1560864
gucacuuguggcugucaca

SEQ ID NO: 1629998 - RNA, 19 nt, Artificial Sequence
  Description of Artificial Sequence: Synthetic oligonucleotide
  Antisense strand to SEQ ID NO: 1629997
ugugacagccacaagugac

SEQ ID NO: 1629999 - RNA, 19 nt, Artificial Sequence
  Description of Artificial Sequence: Synthetic oligonucleotide
  Sense strand starting at position 204 of SEQ ID NO: 1560864
augaaaccaucucggugaa

SEQ ID NO: 1630000 - RNA, 19 nt, Artificial Sequence
  Description of Artificial Sequence: Synthetic oligonucleotide
  Antisense strand to SEQ ID NO: 1629999
uucaccgagaugguuucau

SEQ ID NO: 1630001 - RNA, 19 nt, Artificial Sequence
  Description of Artificial Sequence: Synthetic oligonucleotide
  Sense strand starting at position 206 of SEQ ID NO: 1560864
gaaaccaucucggugaaga

SEQ ID NO: 1630002 - RNA, 19 nt, Artificial Sequence
  Description of Artificial Sequence: Synthetic oligonucleotide
  Antisense strand to SEQ ID NO: 1630001
ucuucaccgagaugguuuc

SEQ ID NO: 1630003 - RNA, 19 nt, Artificial Sequence
  Description of Artificial Sequence: Synthetic oligonucleotide
  Sense strand starting at position 207 of SEQ ID NO: 1560864
aaaccaucucggugaagaa

SEQ ID NO: 1630004 - RNA, 19 nt, Artificial Sequence
  Description of Artificial Sequence: Synthetic oligonucleotide
  Antisense strand to SEQ ID NO: 1630003
uucuucaccgagaugguuu

SEQ ID NO: 1630005 - RNA, 19 nt, Artificial Sequence
  Description of Artificial Sequence: Synthetic oligonucleotide
  Sense strand starting at position 371 of SEQ ID NO: 1560864
gggucagauuucuguggau

SEQ ID NO: 1630006 - RNA, 19 nt, Artificial Sequence
  Description of Artificial Sequence: Synthetic oligonucleotide
  Antisense strand to SEQ ID NO: 1630005
auccacagaaaucugaccc

SEQ ID NO: 1630007 - RNA, 19 nt, Artificial Sequence
  Description of Artificial Sequence: Synthetic oligonucleotide
  Sense strand starting at position 374 of SEQ ID NO: 1560864
ucagauuucuguggauuuc

SEQ ID NO: 1630008 - RNA, 19 nt, Artificial Sequence
  Description of Artificial Sequence: Synthetic oligonucleotide
  Antisense strand to SEQ ID NO: 1630007
gaaauccacagaaaucuga

SEQ ID NO: 1630009 - RNA, 19 nt, Artificial Sequence
  Description of Artificial Sequence: Synthetic oligonucleotide
  Sense strand starting at position 548 of SEQ ID NO: 1560864
gaauggucgcggugugguu

SEQ ID NO: 1630010 - RNA, 19 nt, Artificial Sequence
  Description of Artificial Sequence: Synthetic oligonucleotide
  Antisense strand to SEQ ID NO: 1630009
aaccacaccgcgaccauuc

SEQ ID NO: 1630011 - RNA, 19 nt, Artificial Sequence
  Description of Artificial Sequence: Synthetic oligonucleotide
  Sense strand starting at position 590 of SEQ ID NO: 1560864
gcuacuuugucucugacca

SEQ ID NO: 1630012 - RNA, 19 nt, Artificial Sequence
  Description of Artificial Sequence: Synthetic oligonucleotide
  Antisense strand to SEQ ID NO: 1630011
uggucagagacaaaguagc

SEQ ID NO: 1630013 - RNA, 19 nt, Artificial Sequence
  Description of Artificial Sequence: Synthetic oligonucleotide
  Sense strand starting at position 993 of SEQ ID NO: 1560864
ccgugugggugucuacaga

SEQ ID NO: 1630014 - RNA, 19 nt, Artificial Sequence
  Description of Artificial Sequence: Synthetic oligonucleotide
  Antisense strand to SEQ ID NO: 1630013
ucuguagacacccacacgg

SEQ ID NO: 1630015 - RNA, 19 nt, Artificial Sequence
  Description of Artificial Sequence: Synthetic oligonucleotide
  Sense strand starting at position 1056 of SEQ ID NO: 1560864
uccggaaacuuccgauuug

SEQ ID NO: 1630016 - RNA, 19 nt, Artificial Sequence
  Description of Artificial Sequence: Synthetic oligonucleotide
  Antisense strand to SEQ ID NO: 1630015
caaaucggaaguuuccgga

SEQ ID NO: 1630017 - RNA, 19 nt, Artificial Sequence
  Description of Artificial Sequence: Synthetic oligonucleotide
  Sense strand starting at position 1319 of SEQ ID NO: 1560864
gaggcaucuugagauguaa

SEQ ID NO: 1630018 - RNA, 19 nt, Artificial Sequence
  Description of Artificial Sequence: Synthetic oligonucleotide
  Antisense strand to SEQ ID NO: 1630017
uuacaucucaagaugccuc

SEQ ID NO: 1630019 - RNA, 19 nt, Artificial Sequence
  Description of Artificial Sequence: Synthetic oligonucleotide
  Sense strand starting at position 2153 of SEQ ID NO: 1560864
cucgccauuccaucguauu

SEQ ID NO: 1630020 - RNA, 19 nt, Artificial Sequence
  Description of Artificial Sequence: Synthetic oligonucleotide
  Antisense strand to SEQ ID NO: 1630019
aauacgauggaauggcgag

SEQ ID NO: 1630021 - RNA, 19 nt, Artificial Sequence
  Description of Artificial Sequence: Synthetic oligonucleotide
  Sense strand starting at position 2154 of SEQ ID NO: 1560864
ucgccauuccaucguauua

SEQ ID NO: 1630022 - RNA, 19 nt, Artificial Sequence
  Description of Artificial Sequence: Synthetic oligonucleotide
  Antisense strand to SEQ ID NO: 1630021
uaauacgauggaauggcga

SEQ ID NO: 1630023 - RNA, 19 nt, Artificial Sequence
  Description of Artificial Sequence: Synthetic oligonucleotide
  Sense strand starting at position 2164 of SEQ ID NO: 1560864
aucguauuaggucaguaag

SEQ ID NO: 1630024 - RNA, 19 nt, Artificial Sequence
  Description of Artificial Sequence: Synthetic oligonucleotide
  Antisense strand to SEQ ID NO: 1630023
cuuacugaccuaauacgau

SEQ ID NO: 1630025 - RNA, 19 nt, Artificial Sequence
  Description of Artificial Sequence: Synthetic oligonucleotide
  Sense strand starting at position 2166 of SEQ ID NO: 1560864
cguauuaggucaguaagau

SEQ ID NO: 1630026 - RNA, 19 nt, Artificial Sequence
  Description of Artificial Sequence: Synthetic oligonucleotide
  Antisense strand to SEQ ID NO: 1630025
aucuuacugaccuaauacg

SEQ ID NO: 1630027 - RNA, 19 nt, Artificial Sequence
  Description of Artificial Sequence: Synthetic oligonucleotide
  Sense strand starting at position 2167 of SEQ ID NO: 1560864
guauuaggucaguaagauu

SEQ ID NO: 1630028 - RNA, 19 nt, Artificial Sequence
  Description of Artificial Sequence: Synthetic oligonucleotide
  Antisense strand to SEQ ID NO: 1630027
aaucuuacugaccuaauac

SEQ ID NO: 1630029 - RNA, 19 nt, Artificial Sequence
  Description of Artificial Sequence: Synthetic oligonucleotide
  Sense strand starting at position 2189 of SEQ ID NO: 1560864
aggcacgauacguaucaau

SEQ ID NO: 1630030 - RNA, 19 nt, Artificial Sequence
  Description of Artificial Sequence: Synthetic oligonucleotide
  Antisense strand to SEQ ID NO: 1630029
auugauacguaucgugccu

SEQ ID NO: 1630031 - RNA, 19 nt, Artificial Sequence
  Description of Artificial Sequence: Synthetic oligonucleotide
  Sense strand starting at position 2192 of SEQ ID NO: 1560864
cacgauacguaucaauaac

SEQ ID NO: 1630032 - RNA, 19 nt, Artificial Sequence
  Description of Artificial Sequence: Synthetic oligonucleotide
  Antisense strand to SEQ ID NO: 1630031
guuauugauacguaucgug

SEQ ID NO: 1630033 - RNA, 19 nt, Artificial Sequence
  Description of Artificial Sequence: Synthetic oligonucleotide
  Sense strand starting at position 2206 of SEQ ID NO: 1560864
auaacauugcugugcacaa

SEQ ID NO: 1630034 - RNA, 19 nt, Artificial Sequence
  Description of Artificial Sequence: Synthetic oligonucleotide
  Antisense strand to SEQ ID NO: 1630033
uugugcacagcaauguuau

SEQ ID NO: 1630035 - RNA, 19 nt, Artificial Sequence
  Description of Artificial Sequence: Synthetic oligonucleotide
  Sense strand starting at position 2257 of SEQ ID NO: 1560864
ugacaauaauauggaucua

SEQ ID NO: 1630036 - RNA, 19 nt, Artificial Sequence
  Description of Artificial Sequence: Synthetic oligonucleotide
  Antisense strand to SEQ ID NO: 1630035
uagauccauauuauuguca

SEQ ID NO: 1630037 - RNA, 19 nt, Artificial Sequence
  Description of Artificial Sequence: Synthetic oligonucleotide
  Sense strand starting at position 2285 of SEQ ID NO: 1560864
ugccaauaauauggaugua

SEQ ID NO: 1630038 - RNA, 19 nt, Artificial Sequence
  Description of Artificial Sequence: Synthetic oligonucleotide
  Antisense strand to SEQ ID NO: 1630037
uacauccauauuauuggca

SEQ ID NO: 1630039 - RNA, 19 nt, Artificial Sequence
  Description of Artificial Sequence: Synthetic oligonucleotide
  Sense strand starting at position 2313 of SEQ ID NO: 1560864
ugccaauaacauggaucua

SEQ ID NO: 1630040 - RNA, 19 nt, Artificial Sequence
  Description of Artificial Sequence: Synthetic oligonucleotide
  Antisense strand to SEQ ID NO: 1630039
uagauccauguuauuggca

SEQ ID NO: 1630041 - RNA, 19 nt, Artificial Sequence
  Description of Artificial Sequence: Synthetic oligonucleotide
  Sense strand starting at position 2406 of SEQ ID NO: 1560864
cgccuauauucccggcacu

SEQ ID NO: 1630042 - RNA, 19 nt, Artificial Sequence
  Description of Artificial Sequence: Synthetic oligonucleotide
  Antisense strand to SEQ ID NO: 1630041
agugccgggaauauaggcg

SEQ ID NO: 1630043 - RNA, 19 nt, Artificial Sequence
  Description of Artificial Sequence: Synthetic oligonucleotide
  Sense strand starting at position 2701 of SEQ ID NO: 1560864
ugccaauaacauggaguua

SEQ ID NO: 1630044 - RNA, 19 nt, Artificial Sequence
  Description of Artificial Sequence: Synthetic oligonucleotide
  Antisense strand to SEQ ID NO: 1630043
uaacuccauguuauuggca

SEQ ID NO: 1630045 - RNA, 19 nt, Artificial Sequence
  Description of Artificial Sequence: Synthetic oligonucleotide
  Sense strand starting at position 2729 of SEQ ID NO: 1560864
ugccaauaacauggauaua

SEQ ID NO: 1630046 - RNA, 19 nt, Artificial Sequence
  Description of Artificial Sequence: Synthetic oligonucleotide
  Antisense strand to SEQ ID NO: 1630045
uauauccauguuauuggca

SEQ ID NO: 1630047 - RNA, 19 nt, Artificial Sequence
  Description of Artificial Sequence: Synthetic oligonucleotide
  Sense strand starting at position 2834 of SEQ ID NO: 1560864
cuauaucauugacauggau

SEQ ID NO: 1630048 - RNA, 19 nt, Artificial Sequence
  Description of Artificial Sequence: Synthetic oligonucleotide
  Antisense strand to SEQ ID NO: 1630047
auccaugucaaugauauag

SEQ ID NO: 1630049 - RNA, 19 nt, Artificial Sequence
  Description of Artificial Sequence: Synthetic oligonucleotide
  Sense strand starting at position 2870 of SEQ ID NO: 1560864
auagcauugcuauaugcaa

SEQ ID NO: 1630050 - RNA, 19 nt, Artificial Sequence
  Description of Artificial Sequence: Synthetic oligonucleotide
  Antisense strand to SEQ ID NO: 1630049
uugcauauagcaaugcuau

SEQ ID NO: 1630051 - RNA, 19 nt, Artificial Sequence
  Description of Artificial Sequence: Synthetic oligonucleotide
  Sense strand starting at position 3528 of SEQ ID NO: 1560864
ugaucuacgcaauacauau

SEQ ID NO: 1630052 - RNA, 19 nt, Artificial Sequence
  Description of Artificial Sequence: Synthetic oligonucleotide
  Antisense strand to SEQ ID NO: 1630051
auauguauugcguagauca

SEQ ID NO: 1630053 - RNA, 19 nt, Artificial Sequence
  Description of Artificial Sequence: Synthetic oligonucleotide
  Sense strand starting at position 3597 of SEQ ID NO: 1560864
uuuauauuccaucguuugu

SEQ ID NO: 1630054 - RNA, 19 nt, Artificial Sequence
  Description of Artificial Sequence: Synthetic oligonucleotide
  Antisense strand to SEQ ID NO: 1630053
acaaacgauggaauauaaa

SEQ ID NO: 1630055 - RNA, 19 nt, Artificial Sequence
  Description of Artificial Sequence: Synthetic oligonucleotide
  Sense strand starting at position 3606 of SEQ ID NO: 1560864
caucguuuguauuacguaa

SEQ ID NO: 1630056 - RNA, 19 nt, Artificial Sequence
  Description of Artificial Sequence: Synthetic oligonucleotide
  Antisense strand to SEQ ID NO: 1630055
uuacguaauacaaacgaug

SEQ ID NO: 1630057 - RNA, 19 nt, Artificial Sequence
  Description of Artificial Sequence: Synthetic oligonucleotide
  Sense strand starting at position 3608 of SEQ ID NO: 1560864
ucguuuguauuacguaagu

SEQ ID NO: 1630058 - RNA, 19 nt, Artificial Sequence
  Description of Artificial Sequence: Synthetic oligonucleotide
  Antisense strand to SEQ ID NO: 1630057
acuuacguaauacaaacga

SEQ ID NO: 1630059 - RNA, 19 nt, Artificial Sequence
  Description of Artificial Sequence: Synthetic oligonucleotide
  Sense strand starting at position 3610 of SEQ ID NO: 1560864
guuuguauuacguaaguau

SEQ ID NO: 1630060 - RNA, 19 nt, Artificial Sequence
  Description of Artificial Sequence: Synthetic oligonucleotide
  Antisense strand to SEQ ID NO: 1630059
auacuuacguaauacaaac

SEQ ID NO: 1630061 - RNA, 19 nt, Artificial Sequence
  Description of Artificial Sequence: Synthetic oligonucleotide
  Sense strand starting at position 3613 of SEQ ID NO: 1560864
uguauuacguaaguauaga

SEQ ID NO: 1630062 - RNA, 19 nt, Artificial Sequence
  Description of Artificial Sequence: Synthetic oligonucleotide
  Antisense strand to SEQ ID NO: 1630061
ucuauacuuacguaauaca

SEQ ID NO: 1630063 - RNA, 19 nt, Artificial Sequence
  Description of Artificial Sequence: Synthetic oligonucleotide
  Sense strand starting at position 3614 of SEQ ID NO: 1560864
guauuacguaaguauagau

SEQ ID NO: 1630064 - RNA, 19 nt, Artificial Sequence
  Description of Artificial Sequence: Synthetic oligonucleotide
  Antisense strand to SEQ ID NO: 1630063
aucuauacuuacguaauac

SEQ ID NO: 1630065 - RNA, 19 nt, Artificial Sequence
  Description of Artificial Sequence: Synthetic oligonucleotide
  Sense strand starting at position 3672 of SEQ ID NO: 1560864
acaguuugcuauuauaaga

SEQ ID NO: 1630066 - RNA, 19 nt, Artificial Sequence
  Description of Artificial Sequence: Synthetic oligonucleotide
  Antisense strand to SEQ ID NO: 1630065
ucuuauaauagcaaacugu

SEQ ID NO: 1630067 - RNA, 19 nt, Artificial Sequence
  Description of Artificial Sequence: Synthetic oligonucleotide
  Sense strand starting at position 100 of SEQ ID NO: 1560865
gcagcugaggucuguaaug

SEQ ID NO: 1630068 - RNA, 19 nt, Artificial Sequence
  Description of Artificial Sequence: Synthetic oligonucleotide
  Antisense strand to SEQ ID NO: 1630067
cauuacagaccucagcugc

SEQ ID NO: 1630069 - RNA, 19 nt, Artificial Sequence
  Description of Artificial Sequence: Synthetic oligonucleotide
  Sense strand starting at position 102 of SEQ ID NO: 1560865
agcugaggucuguaaugca

SEQ ID NO: 1630070 - RNA, 19 nt, Artificial Sequence
  Description of Artificial Sequence: Synthetic oligonucleotide
  Antisense strand to SEQ ID NO: 1630069
ugcauuacagaccucagcu

SEQ ID NO: 1630071 - RNA, 19 nt, Artificial Sequence
  Description of Artificial Sequence: Synthetic oligonucleotide
  Sense strand starting at position 237 of SEQ ID NO: 1560865
uggccuguccuauggagaa

SEQ ID NO: 1630072 - RNA, 19 nt, Artificial Sequence
  Description of Artificial Sequence: Synthetic oligonucleotide
  Antisense strand to SEQ ID NO: 1630071
uucuccauaggacaggcca

SEQ ID NO: 1630073 - RNA, 19 nt, Artificial Sequence
  Description of Artificial Sequence: Synthetic oligonucleotide
  Sense strand starting at position 685 of SEQ ID NO: 1560865
ggccuugaggucugaccuu

SEQ ID NO: 1630074 - RNA, 19 nt, Artificial Sequence
  Description of Artificial Sequence: Synthetic oligonucleotide
  Antisense strand to SEQ ID NO: 1630073
aaggucagaccucaaggcc

SEQ ID NO: 1630075 - RNA, 19 nt, Artificial Sequence
  Description of Artificial Sequence: Synthetic oligonucleotide
  Sense strand starting at position 691 of SEQ ID NO: 1560865
gaggucugaccuuguguga

SEQ ID NO: 1630076 - RNA, 19 nt, Artificial Sequence
  Description of Artificial Sequence: Synthetic oligonucleotide
  Antisense strand to SEQ ID NO: 1630075
ucacacaaggucagaccuc

SEQ ID NO: 1630077 - RNA, 19 nt, Artificial Sequence
  Description of Artificial Sequence: Synthetic oligonucleotide
  Sense strand starting at position 698 of SEQ ID NO: 1560865
gaccuugugugaucggcaa

SEQ ID NO: 1630078 - RNA, 19 nt, Artificial Sequence
  Description of Artificial Sequence: Synthetic oligonucleotide
  Antisense strand to SEQ ID NO: 1630077
uugccgaucacacaagguc

SEQ ID NO: 1630079 - RNA, 19 nt, Artificial Sequence
  Description of Artificial Sequence: Synthetic oligonucleotide
  Sense strand starting at position 700 of SEQ ID NO: 1560865
ccuugugugaucggcaaca

SEQ ID NO: 1630080 - RNA, 19 nt, Artificial Sequence
  Description of Artificial Sequence: Synthetic oligonucleotide
  Antisense strand to SEQ ID NO: 1630079
uguugccgaucacacaagg

SEQ ID NO: 1630081 - RNA, 19 nt, Artificial Sequence
  Description of Artificial Sequence: Synthetic oligonucleotide
  Sense strand starting at position 1146 of SEQ ID NO: 1560865
uggccuguugacugagaca

SEQ ID NO: 1630082 - RNA, 19 nt, Artificial Sequence
  Description of Artificial Sequence: Synthetic oligonucleotide
  Antisense strand to SEQ ID NO: 1630081
ugucucagucaacaggcca

SEQ ID NO: 1630083 - RNA, 19 nt, Artificial Sequence
  Description of Artificial Sequence: Synthetic oligonucleotide
  Sense strand starting at position 1175 of SEQ ID NO: 1560865
aggagaagguuccaccuga

SEQ ID NO: 1630084 - RNA, 19 nt, Artificial Sequence
  Description of Artificial Sequence: Synthetic oligonucleotide
  Antisense strand to SEQ ID NO: 1630083
ucagguggaaccuucuccu

SEQ ID NO: 1630085 - RNA, 19 nt, Artificial Sequence
  Description of Artificial Sequence: Synthetic oligonucleotide
  Sense strand starting at position 1237 of SEQ ID NO: 1560865
ugcagugacucggguacuu

SEQ ID NO: 1630086 - RNA, 19 nt, Artificial Sequence
  Description of Artificial Sequence: Synthetic oligonucleotide
  Antisense strand to SEQ ID NO: 1630085
aaguacccgagucacugca

SEQ ID NO: 1630087 - RNA, 19 nt, Artificial Sequence
  Description of Artificial Sequence: Synthetic oligonucleotide
  Sense strand starting at position 1279 of SEQ ID NO: 1560865
uggcgucuggaacaucaua

SEQ ID NO: 1630088 - RNA, 19 nt, Artificial Sequence
  Description of Artificial Sequence: Synthetic oligonucleotide
  Antisense strand to SEQ ID NO: 1630087
uaugauguuccagacgcca

SEQ ID NO: 1630089 - RNA, 19 nt, Artificial Sequence
  Description of Artificial Sequence: Synthetic oligonucleotide
  Sense strand starting at position 1528 of SEQ ID NO: 1560865
cuucuaguucuccaggaga

SEQ ID NO: 1630090 - RNA, 19 nt, Artificial Sequence
  Description of Artificial Sequence: Synthetic oligonucleotide
  Antisense strand to SEQ ID NO: 1630089
ucuccuggagaacuagaag

SEQ ID NO: 1630091 - RNA, 19 nt, Artificial Sequence
  Description of Artificial Sequence: Synthetic oligonucleotide
  Sense strand starting at position 1530 of SEQ ID NO: 1560865
ucuaguucuccaggagagg

SEQ ID NO: 1630092 - RNA, 19 nt, Artificial Sequence
  Description of Artificial Sequence: Synthetic oligonucleotide
  Antisense strand to SEQ ID NO: 1630091
ccucuccuggagaacuaga

SEQ ID NO: 1630093 - RNA, 19 nt, Artificial Sequence
  Description of Artificial Sequence: Synthetic oligonucleotide
  Sense strand starting at position 1550 of SEQ ID NO: 1560865
cgaguuugaggguguagca

SEQ ID NO: 1630094 - RNA, 19 nt, Artificial Sequence
  Description of Artificial Sequence: Synthetic oligonucleotide
  Antisense strand to SEQ ID NO: 1630093
ugcuacacccucaaacucg

SEQ ID NO: 1630095 - RNA, 19 nt, Artificial Sequence
  Description of Artificial Sequence: Synthetic oligonucleotide
  Sense strand starting at position 2473 of SEQ ID NO: 1560865
cgcuuuacgccuugaggga

SEQ ID NO: 1630096 - RNA, 19 nt, Artificial Sequence
  Description of Artificial Sequence: Synthetic oligonucleotide
  Antisense strand to SEQ ID NO: 1630095
ucccucaaggcguaaagcg

SEQ ID NO: 1630097 - RNA, 19 nt, Artificial Sequence
  Description of Artificial Sequence: Synthetic oligonucleotide
  Sense strand starting at position 2541 of SEQ ID NO: 1560865
ccuccucgguguugguaaa

SEQ ID NO: 1630098 - RNA, 19 nt, Artificial Sequence
  Description of Artificial Sequence: Synthetic oligonucleotide
  Antisense strand to SEQ ID NO: 1630097
uuuaccaacaccgaggagg

SEQ ID NO: 1630099 - RNA, 19 nt, Artificial Sequence
  Description of Artificial Sequence: Synthetic oligonucleotide
  Sense strand starting at position 2612 of SEQ ID NO: 1560865
aguguuagcugcugucacu

SEQ ID NO: 1630100 - RNA, 19 nt, Artificial Sequence
  Description of Artificial Sequence: Synthetic oligonucleotide
  Antisense strand to SEQ ID NO: 1630099
agugacagcagcuaacacu

SEQ ID NO: 1630101 - RNA, 19 nt, Artificial Sequence
  Description of Artificial Sequence: Synthetic oligonucleotide
  Sense strand starting at position 2613 of SEQ ID NO: 1560865
guguuagcugcugucacuu

SEQ ID NO: 1630102 - RNA, 19 nt, Artificial Sequence
  Description of Artificial Sequence: Synthetic oligonucleotide
  Antisense strand to SEQ ID NO: 1630101
aagugacagcagcuaacac

SEQ ID NO: 1630103 - RNA, 19 nt, Artificial Sequence
  Description of Artificial Sequence: Synthetic oligonucleotide
  Sense strand starting at position 2640 of SEQ ID NO: 1560865
aucguaauuguuuguuugu

SEQ ID NO: 1630104 - RNA, 19 nt, Artificial Sequence
  Description of Artificial Sequence: Synthetic oligonucleotide
  Antisense strand to SEQ ID NO: 1630103
acaaacaaacaauuacgau

SEQ ID NO: 1630105 - RNA, 19 nt, Artificial Sequence
  Description of Artificial Sequence: Synthetic oligonucleotide
  Sense strand starting at position 2641 of SEQ ID NO: 1560865
ucguaauuguuuguuuguu

SEQ ID NO: 1630106 - RNA, 19 nt, Artificial Sequence
  Description of Artificial Sequence: Synthetic oligonucleotide
  Antisense strand to SEQ ID NO: 1630105
aacaaacaaacaauuacga

SEQ ID NO: 1630107 - RNA, 19 nt, Artificial Sequence
  Description of Artificial Sequence: Synthetic oligonucleotide
  Sense strand starting at position 2953 of SEQ ID NO: 1560865
agccucuauuaucguuauu

SEQ ID NO: 1630108 - RNA, 19 nt, Artificial Sequence
  Description of Artificial Sequence: Synthetic oligonucleotide
  Antisense strand to SEQ ID NO: 1630107
aauaacgauaauagaggcu

SEQ ID NO: 1630109 - RNA, 19 nt, Artificial Sequence
  Description of Artificial Sequence: Synthetic oligonucleotide
  Sense strand starting at position 2955 of SEQ ID NO: 1560865
ccucuauuaucguuauugu

SEQ ID NO: 1630110 - RNA, 19 nt, Artificial Sequence
  Description of Artificial Sequence: Synthetic oligonucleotide
  Antisense strand to SEQ ID NO: 1630109
acaauaacgauaauagagg

SEQ ID NO: 1630111 - RNA, 19 nt, Artificial Sequence
  Description of Artificial Sequence: Synthetic oligonucleotide
  Sense strand starting at position 2956 of SEQ ID NO: 1560865
cucuauuaucguuauuguu

SEQ ID NO: 1630112 - RNA, 19 nt, Artificial Sequence
  Description of Artificial Sequence: Synthetic oligonucleotide
  Antisense strand to SEQ ID NO: 1630111
aacaauaacgauaauagag

SEQ ID NO: 1630113 - RNA, 19 nt, Artificial Sequence
  Description of Artificial Sequence: Synthetic oligonucleotide
  Sense strand starting at position 3136 of SEQ ID NO: 1560865
ggaggccucugcggaauuu

SEQ ID NO: 1630114 - RNA, 19 nt, Artificial Sequence
  Description of Artificial Sequence: Synthetic oligonucleotide
  Antisense strand to SEQ ID NO: 1630113
aaauuccgcagaggccucc

SEQ ID NO: 1630115 - RNA, 19 nt, Artificial Sequence
  Description of Artificial Sequence: Synthetic oligonucleotide
  Sense strand starting at position 3368 of SEQ ID NO: 1560865
ugguuucagucgucccaga

SEQ ID NO: 1630116 - RNA, 19 nt, Artificial Sequence
  Description of Artificial Sequence: Synthetic oligonucleotide
  Antisense strand to SEQ ID NO: 1630115
ucugggacgacugaaacca

SEQ ID NO: 1630117 - RNA, 19 nt, Artificial Sequence
  Description of Artificial Sequence: Synthetic oligonucleotide
  Sense strand starting at position 3424 of SEQ ID NO: 1560865
ugagcaacucuuugggaga

SEQ ID NO: 1630118 - RNA, 19 nt, Artificial Sequence
  Description of Artificial Sequence: Synthetic oligonucleotide
  Antisense strand to SEQ ID NO: 1630117
ucucccaaagaguugcuca

SEQ ID NO: 1630119 - RNA, 19 nt, Artificial Sequence
  Description of Artificial Sequence: Synthetic oligonucleotide
  Sense strand starting at position 3425 of SEQ ID NO: 1560865
gagcaacucuuugggagau

SEQ ID NO: 1630120 - RNA, 19 nt, Artificial Sequence
  Description of Artificial Sequence: Synthetic oligonucleotide
  Antisense strand to SEQ ID NO: 1630119
aucucccaaagaguugcuc

SEQ ID NO: 1630121 - RNA, 19 nt, Artificial Sequence
  Description of Artificial Sequence: Synthetic oligonucleotide
  Sense strand starting at position 3426 of SEQ ID NO: 1560865
agcaacucuuugggagaua

SEQ ID NO: 1630122 - RNA, 19 nt, Artificial Sequence
  Description of Artificial Sequence: Synthetic oligonucleotide
  Antisense strand to SEQ ID NO: 1630121
uaucucccaaagaguugcu

SEQ ID NO: 1630123 - RNA, 19 nt, Artificial Sequence
  Description of Artificial Sequence: Synthetic oligonucleotide
  Sense strand starting at position 3437 of SEQ ID NO: 1560865
gggagauacuaacaacaga

SEQ ID NO: 1630124 - RNA, 19 nt, Artificial Sequence
  Description of Artificial Sequence: Synthetic oligonucleotide
  Antisense strand to SEQ ID NO: 1630123
ucuguuguuaguaucuccc

SEQ ID NO: 1630125 - RNA, 19 nt, Artificial Sequence
  Description of Artificial Sequence: Synthetic oligonucleotide
  Sense strand starting at position 3465 of SEQ ID NO: 1560865
ggaggagaauuaugcugau

SEQ ID NO: 1630126 - RNA, 19 nt, Artificial Sequence
  Description of Artificial Sequence: Synthetic oligonucleotide
  Antisense strand to SEQ ID NO: 1630125
aucagcauaauucuccucc

SEQ ID NO: 1630127 - RNA, 19 nt, Artificial Sequence
  Description of Artificial Sequence: Synthetic oligonucleotide
  Sense strand starting at position 3468 of SEQ ID NO: 1560865
ggagaauuaugcugaucca

SEQ ID NO: 1630128 - RNA, 19 nt, Artificial Sequence
  Description of Artificial Sequence: Synthetic oligonucleotide
  Antisense strand to SEQ ID NO: 1630127
uggaucagcauaauucucc

SEQ ID NO: 1630129 - RNA, 19 nt, Artificial Sequence
  Description of Artificial Sequence: Synthetic oligonucleotide
  Sense strand starting at position 287 of SEQ ID NO: 1560866
ccaggaaauugaggcuaua

SEQ ID NO: 1630130 - RNA, 19 nt, Artificial Sequence
  Description of Artificial Sequence: Synthetic oligonucleotide
  Antisense strand to SEQ ID NO: 1630129
uauagccucaauuuccugg

SEQ ID NO: 1630131 - RNA, 19 nt, Artificial Sequence
  Description of Artificial Sequence: Synthetic oligonucleotide
  Sense strand starting at position 302 of SEQ ID NO: 1560866
uauagugagcuuugaucac

SEQ ID NO: 1630132 - RNA, 19 nt, Artificial Sequence
  Description of Artificial Sequence: Synthetic oligonucleotide
  Antisense strand to SEQ ID NO: 1630131
gugaucaaagcucacuaua

SEQ ID NO: 1630133 - RNA, 19 nt, Artificial Sequence
  Description of Artificial Sequence: Synthetic oligonucleotide
  Sense strand starting at position 379 of SEQ ID NO: 1560866
auaaacagucuuugguuau

SEQ ID NO: 1630134 - RNA, 19 nt, Artificial Sequence
  Description of Artificial Sequence: Synthetic oligonucleotide
  Antisense strand to SEQ ID NO: 1630133
auaaccaaagacuguuuau

SEQ ID NO: 1630135 - RNA, 19 nt, Artificial Sequence
  Description of Artificial Sequence: Synthetic oligonucleotide
  Sense strand starting at position 385 of SEQ ID NO: 1560866
agucuuugguuaucaucca

SEQ ID NO: 1630136 - RNA, 19 nt, Artificial Sequence
  Description of Artificial Sequence: Synthetic oligonucleotide
  Antisense strand to SEQ ID NO: 1630135
uggaugauaaccaaagacu

SEQ ID NO: 1630137 - RNA, 19 nt, Artificial Sequence
  Description of Artificial Sequence: Synthetic oligonucleotide
  Sense strand starting at position 386 of SEQ ID NO: 1560866
gucuuugguuaucauccau

SEQ ID NO: 1630138 - RNA, 19 nt, Artificial Sequence
  Description of Artificial Sequence: Synthetic oligonucleotide
  Antisense strand to SEQ ID NO: 1630137
auggaugauaaccaaagac

SEQ ID NO: 1630139 - RNA, 19 nt, Artificial Sequence
  Description of Artificial Sequence: Synthetic oligonucleotide
  Sense strand starting at position 392 of SEQ ID NO: 1560866
gguuaucauccauguaacu

SEQ ID NO: 1630140 - RNA, 19 nt, Artificial Sequence
  Description of Artificial Sequence: Synthetic oligonucleotide
  Antisense strand to SEQ ID NO: 1630139
aguuacauggaugauaacc

SEQ ID NO: 1630141 - RNA, 19 nt, Artificial Sequence
  Description of Artificial Sequence: Synthetic oligonucleotide
  Sense strand starting at position 401 of SEQ ID NO: 1560866
ccauguaacugugggaguu

SEQ ID NO: 1630142 - RNA, 19 nt, Artificial Sequence
  Description of Artificial Sequence: Synthetic oligonucleotide
  Antisense strand to SEQ ID NO: 1630141
aacucccacaguuacaugg

SEQ ID NO: 1630143 - RNA, 19 nt, Artificial Sequence
  Description of Artificial Sequence: Synthetic oligonucleotide
  Sense strand starting at position 402 of SEQ ID NO: 1560866
cauguaacugugggaguuu

SEQ ID NO: 1630144 - RNA, 19 nt, Artificial Sequence
  Description of Artificial Sequence: Synthetic oligonucleotide
  Antisense strand to SEQ ID NO: 1630143
aaacucccacaguuacaug

SEQ ID NO: 1630145 - RNA, 19 nt, Artificial Sequence
  Description of Artificial Sequence: Synthetic oligonucleotide
  Sense strand starting at position 411 of SEQ ID NO: 1560866
gugggaguuucuggguauu

SEQ ID NO: 1630146 - RNA, 19 nt, Artificial Sequence
  Description of Artificial Sequence: Synthetic oligonucleotide
  Antisense strand to SEQ ID NO: 1630145
aauacccagaaacucccac

SEQ ID NO: 1630147 - RNA, 19 nt, Artificial Sequence
  Description of Artificial Sequence: Synthetic oligonucleotide
  Sense strand starting at position 414 of SEQ ID NO: 1560866
ggaguuucuggguauucgu

SEQ ID NO: 1630148 - RNA, 19 nt, Artificial Sequence
  Description of Artificial Sequence: Synthetic oligonucleotide
  Antisense strand to SEQ ID NO: 1630147
acgaauacccagaaacucc

SEQ ID NO: 1630149 - RNA, 19 nt, Artificial Sequence
  Description of Artificial Sequence: Synthetic oligonucleotide
  Sense strand starting at position 422 of SEQ ID NO: 1560866
uggguauucgugugacagu

SEQ ID NO: 1630150 - RNA, 19 nt, Artificial Sequence
  Description of Artificial Sequence: Synthetic oligonucleotide
  Antisense strand to SEQ ID NO: 1630149
acugucacacgaauaccca

SEQ ID NO: 1630151 - RNA, 19 nt, Artificial Sequence
  Description of Artificial Sequence: Synthetic oligonucleotide
  Sense strand starting at position 440 of SEQ ID NO: 1560866
ugugcacauccuugagugu

SEQ ID NO: 1630152 - RNA, 19 nt, Artificial Sequence
  Description of Artificial Sequence: Synthetic oligonucleotide
  Antisense strand to SEQ ID NO: 1630151
acacucaaggaugugcaca

SEQ ID NO: 1630153 - RNA, 19 nt, Artificial Sequence
  Description of Artificial Sequence: Synthetic oligonucleotide
  Sense strand starting at position 441 of SEQ ID NO: 1560866
gugcacauccuugaguguu

SEQ ID NO: 1630154 - RNA, 19 nt, Artificial Sequence
  Description of Artificial Sequence: Synthetic oligonucleotide
  Antisense strand to SEQ ID NO: 1630153
aacacucaaggaugugcac

SEQ ID NO: 1630155 - RNA, 19 nt, Artificial Sequence
  Description of Artificial Sequence: Synthetic oligonucleotide
  Sense strand starting at position 477 of SEQ ID NO: 1560866
ggcugugucuggagguauu

SEQ ID NO: 1630156 - RNA, 19 nt, Artificial Sequence
  Description of Artificial Sequence: Synthetic oligonucleotide
  Antisense strand to SEQ ID NO: 1630155
aauaccuccagacacagcc

SEQ ID NO: 1630157 - RNA, 19 nt, Artificial Sequence
  Description of Artificial Sequence: Synthetic oligonucleotide
  Sense strand starting at position 484 of SEQ ID NO: 1560866
ucuggagguauucguguga

SEQ ID NO: 1630158 - RNA, 19 nt, Artificial Sequence
  Description of Artificial Sequence: Synthetic oligonucleotide
  Antisense strand to SEQ ID NO: 1630157
ucacacgaauaccuccaga

SEQ ID NO: 1630159 - RNA, 19 nt, Artificial Sequence
  Description of Artificial Sequence: Synthetic oligonucleotide
  Sense strand starting at position 488 of SEQ ID NO: 1560866
gagguauucgugugacagu

SEQ ID NO: 1630160 - RNA, 19 nt, Artificial Sequence
  Description of Artificial Sequence: Synthetic oligonucleotide
  Antisense strand to SEQ ID NO: 1630159
acugucacacgaauaccuc

SEQ ID NO: 1630161 - RNA, 19 nt, Artificial Sequence
  Description of Artificial Sequence: Synthetic oligonucleotide
  Sense strand starting at position 489 of SEQ ID NO: 1560866
agguauucgugugacagua

SEQ ID NO: 1630162 - RNA, 19 nt, Artificial Sequence
  Description of Artificial Sequence: Synthetic oligonucleotide
  Antisense strand to SEQ ID NO: 1630161
uacugucacacgaauaccu

SEQ ID NO: 1630163 - RNA, 19 nt, Artificial Sequence
  Description of Artificial Sequence: Synthetic oligonucleotide
  Sense strand starting at position 572 of SEQ ID NO: 1560866
augcacauccuugaauguu

SEQ ID NO: 1630164 - RNA, 19 nt, Artificial Sequence
  Description of Artificial Sequence: Synthetic oligonucleotide
  Antisense strand to SEQ ID NO: 1630163
aacauucaaggaugugcau

SEQ ID NO: 1630165 - RNA, 19 nt, Artificial Sequence
  Description of Artificial Sequence: Synthetic oligonucleotide
  Sense strand starting at position 605 of SEQ ID NO: 1560866
guggcugugucuagaggua

SEQ ID NO: 1630166 - RNA, 19 nt, Artificial Sequence
  Description of Artificial Sequence: Synthetic oligonucleotide
  Antisense strand to SEQ ID NO: 1630165
uaccucuagacacagccac

SEQ ID NO: 1630167 - RNA, 19 nt, Artificial Sequence
  Description of Artificial Sequence: Synthetic oligonucleotide
  Sense strand starting at position 1495 of SEQ ID NO: 1560866
cugucuucucucugcugua

SEQ ID NO: 1630168 - RNA, 19 nt, Artificial Sequence
  Description of Artificial Sequence: Synthetic oligonucleotide
  Antisense strand to SEQ ID NO: 1630167
uacagcagagagaagacag

SEQ ID NO: 1630169 - RNA, 19 nt, Artificial Sequence
  Description of Artificial Sequence: Synthetic oligonucleotide
  Sense strand starting at position 2120 of SEQ ID NO: 1560866
ccuguuccucuagaugaaa

SEQ ID NO: 1630170 - RNA, 19 nt, Artificial Sequence
  Description of Artificial Sequence: Synthetic oligonucleotide
  Antisense strand to SEQ ID NO: 1630169
uuucaucuagaggaacagg

SEQ ID NO: 1630171 - RNA, 19 nt, Artificial Sequence
  Description of Artificial Sequence: Synthetic oligonucleotide
  Sense strand starting at position 2155 of SEQ ID NO: 1560866
gcucccugucccuagagaa

SEQ ID NO: 1630172 - RNA, 19 nt, Artificial Sequence
  Description of Artificial Sequence: Synthetic oligonucleotide
  Antisense strand to SEQ ID NO: 1630171
uucucuagggacagggagc

SEQ ID NO: 1630173 - RNA, 19 nt, Artificial Sequence
  Description of Artificial Sequence: Synthetic oligonucleotide
  Sense strand starting at position 2205 of SEQ ID NO: 1560866
acacucaugguguauccau

SEQ ID NO: 1630174 - RNA, 19 nt, Artificial Sequence
  Description of Artificial Sequence: Synthetic oligonucleotide
  Antisense strand to SEQ ID NO: 1630173
auggauacaccaugagugu

SEQ ID NO: 1630175 - RNA, 19 nt, Artificial Sequence
  Description of Artificial Sequence: Synthetic oligonucleotide
  Sense strand starting at position 2247 of SEQ ID NO: 1560866
ugacuugagugugcacuaa

SEQ ID NO: 1630176 - RNA, 19 nt, Artificial Sequence
  Description of Artificial Sequence: Synthetic oligonucleotide
  Antisense strand to SEQ ID NO: 1630175
uuagugcacacucaaguca

SEQ ID NO: 1630177 - RNA, 19 nt, Artificial Sequence
  Description of Artificial Sequence: Synthetic oligonucleotide
  Sense strand starting at position 2251 of SEQ ID NO: 1560866
uugagugugcacuaacuuu

SEQ ID NO: 1630178 - RNA, 19 nt, Artificial Sequence
  Description of Artificial Sequence: Synthetic oligonucleotide
  Antisense strand to SEQ ID NO: 1630177
aaaguuagugcacacucaa

SEQ ID NO: 1630179 - RNA, 19 nt, Artificial Sequence
  Description of Artificial Sequence: Synthetic oligonucleotide
  Sense strand starting at position 2612 of SEQ ID NO: 1560866
cugggauuacuggacguga

SEQ ID NO: 1630180 - RNA, 19 nt, Artificial Sequence
  Description of Artificial Sequence: Synthetic oligonucleotide
  Antisense strand to SEQ ID NO: 1630179
ucacguccaguaaucccag

SEQ ID NO: 1630181 - RNA, 19 nt, Artificial Sequence
  Description of Artificial Sequence: Synthetic oligonucleotide
  Sense strand starting at position 2616 of SEQ ID NO: 1560866
gauuacuggacgugagcua

SEQ ID NO: 1630182 - RNA, 19 nt, Artificial Sequence
  Description of Artificial Sequence: Synthetic oligonucleotide
  Antisense strand to SEQ ID NO: 1630181
uagcucacguccaguaauc

SEQ ID NO: 1630183 - RNA, 19 nt, Artificial Sequence
  Description of Artificial Sequence: Synthetic oligonucleotide
  Sense strand starting at position 2770 of SEQ ID NO: 1560866
gcaggugugugccuggaaa

SEQ ID NO: 1630184 - RNA, 19 nt, Artificial Sequence
  Description of Artificial Sequence: Synthetic oligonucleotide
  Antisense strand to SEQ ID NO: 1630183
uuuccaggcacacaccugc

SEQ ID NO: 1630185 - RNA, 19 nt, Artificial Sequence
  Description of Artificial Sequence: Synthetic oligonucleotide
  Sense strand starting at position 2857 of SEQ ID NO: 1560866
uuaugagcuucccucuaga

SEQ ID NO: 1630186 - RNA, 19 nt, Artificial Sequence
  Description of Artificial Sequence: Synthetic oligonucleotide
  Antisense strand to SEQ ID NO: 1630185
ucuagagggaagcucauaa

SEQ ID NO: 1630187 - RNA, 19 nt, Artificial Sequence
  Description of Artificial Sequence: Synthetic oligonucleotide
  Sense strand starting at position 3019 of SEQ ID NO: 1560866
cugcauaugucccuccaga

SEQ ID NO: 1630188 - RNA, 19 nt, Artificial Sequence
  Description of Artificial Sequence: Synthetic oligonucleotide
  Antisense strand to SEQ ID NO: 1630187
ucuggagggacauaugcag

SEQ ID NO: 1630189 - RNA, 19 nt, Artificial Sequence
  Description of Artificial Sequence: Synthetic oligonucleotide
  Sense strand starting at position 3160 of SEQ ID NO: 1560866
gccaacuguuauugaccau

SEQ ID NO: 1630190 - RNA, 19 nt, Artificial Sequence
  Description of Artificial Sequence: Synthetic oligonucleotide
  Antisense strand to SEQ ID NO: 1630189
auggucaauaacaguuggc

SEQ ID NO: 1630191 - RNA, 19 nt, Artificial Sequence
  Description of Artificial Sequence: Synthetic oligonucleotide
  Sense strand starting at position 3164 of SEQ ID NO: 1560866
acuguuauugaccauagcu

SEQ ID NO: 1630192 - RNA, 19 nt, Artificial Sequence
  Description of Artificial Sequence: Synthetic oligonucleotide
  Antisense strand to SEQ ID NO: 1630191
agcuauggucaauaacagu

SEQ ID NO: 1630193 - RNA, 19 nt, Artificial Sequence
  Description of Artificial Sequence: Synthetic oligonucleotide
  Sense strand starting at position 3166 of SEQ ID NO: 1560866
uguuauugaccauagcuga

SEQ ID NO: 1630194 - RNA, 19 nt, Artificial Sequence
  Description of Artificial Sequence: Synthetic oligonucleotide
  Antisense strand to SEQ ID NO: 1630193
ucagcuauggucaauaaca

SEQ ID NO: 1630195 - RNA, 19 nt, Artificial Sequence
  Description of Artificial Sequence: Synthetic oligonucleotide
  Sense strand starting at position 3767 of SEQ ID NO: 1560866
ggaggcuaagcaugagaau

SEQ ID NO: 1630196 - RNA, 19 nt, Artificial Sequence
  Description of Artificial Sequence: Synthetic oligonucleotide
  Antisense strand to SEQ ID NO: 1630195
auucucaugcuuagccucc

SEQ ID NO: 1630197 - RNA, 19 nt, Artificial Sequence
  Description of Artificial Sequence: Synthetic oligonucleotide
  Sense strand starting at position 3952 of SEQ ID NO: 1560866
acaacuuaugauggcauua

SEQ ID NO: 1630198 - RNA, 19 nt, Artificial Sequence
  Description of Artificial Sequence: Synthetic oligonucleotide
  Antisense strand to SEQ ID NO: 1630197
uaaugccaucauaaguugu

SEQ ID NO: 1630199 - RNA, 19 nt, Artificial Sequence
  Description of Artificial Sequence: Synthetic oligonucleotide
  Sense strand starting at position 3963 of SEQ ID NO: 1560866
uggcauuacuuccugauaa

SEQ ID NO: 1630200 - RNA, 19 nt, Artificial Sequence
  Description of Artificial Sequence: Synthetic oligonucleotide
  Antisense strand to SEQ ID NO: 1630199
uuaucaggaaguaaugcca

SEQ ID NO: 1630201 - RNA, 19 nt, Artificial Sequence
  Description of Artificial Sequence: Synthetic oligonucleotide
  Sense strand starting at position 3964 of SEQ ID NO: 1560866
ggcauuacuuccugauaag

SEQ ID NO: 1630202 - RNA, 19 nt, Artificial Sequence
  Description of Artificial Sequence: Synthetic oligonucleotide
  Antisense strand to SEQ ID NO: 1630201
cuuaucaggaaguaaugcc

SEQ ID NO: 1630203 - RNA, 19 nt, Artificial Sequence
  Description of Artificial Sequence: Synthetic oligonucleotide
  Sense strand starting at position 3965 of SEQ ID NO: 1560866
gcauuacuuccugauaagc

SEQ ID NO: 1630204 - RNA, 19 nt, Artificial Sequence
  Description of Artificial Sequence: Synthetic oligonucleotide
  Antisense strand to SEQ ID NO: 1630203
gcuuaucaggaaguaaugc

SEQ ID NO: 1630205 - RNA, 19 nt, Artificial Sequence
  Description of Artificial Sequence: Synthetic oligonucleotide
  Sense strand starting at position 3975 of SEQ ID NO: 1560866
cugauaagcucaucauaag

SEQ ID NO: 1630206 - RNA, 19 nt, Artificial Sequence
  Description of Artificial Sequence: Synthetic oligonucleotide
  Antisense strand to SEQ ID NO: 1630205
cuuaugaugagcuuaucag

SEQ ID NO: 1630207 - RNA, 19 nt, Artificial Sequence
  Description of Artificial Sequence: Synthetic oligonucleotide
  Sense strand starting at position 3976 of SEQ ID NO: 1560866
ugauaagcucaucauaagu

SEQ ID NO: 1630208 - RNA, 19 nt, Artificial Sequence
  Description of Artificial Sequence: Synthetic oligonucleotide
  Antisense strand to SEQ ID NO: 1630207
acuuaugaugagcuuauca

SEQ ID NO: 1630209 - RNA, 19 nt, Artificial Sequence
  Description of Artificial Sequence: Synthetic oligonucleotide
  Sense strand starting at position 198 of SEQ ID NO: 1560867
uggccucugcacuagaaua

SEQ ID NO: 1630210 - RNA, 19 nt, Artificial Sequence
  Description of Artificial Sequence: Synthetic oligonucleotide
  Antisense strand to SEQ ID NO: 1630209
uauucuagugcagaggcca

SEQ ID NO: 1630211 - RNA, 19 nt, Artificial Sequence
  Description of Artificial Sequence: Synthetic oligonucleotide
  Sense strand starting at position 245 of SEQ ID NO: 1560867
gaaacaagauggucaguca

SEQ ID NO: 1630212 - RNA, 19 nt, Artificial Sequence
  Description of Artificial Sequence: Synthetic oligonucleotide
  Antisense strand to SEQ ID NO: 1630211
ugacugaccaucuuguuuc

SEQ ID NO: 1630213 - RNA, 19 nt, Artificial Sequence
  Description of Artificial Sequence: Synthetic oligonucleotide
  Sense strand starting at position 248 of SEQ ID NO: 1560867
acaagauggucagucaugu

SEQ ID NO: 1630214 - RNA, 19 nt, Artificial Sequence
  Description of Artificial Sequence: Synthetic oligonucleotide
  Antisense strand to SEQ ID NO: 1630213
acaugacugaccaucuugu

SEQ ID NO: 1630215 - RNA, 19 nt, Artificial Sequence
  Description of Artificial Sequence: Synthetic oligonucleotide
  Sense strand starting at position 263 of SEQ ID NO: 1560867
auguuagcuuucucucauu

SEQ ID NO: 1630216 - RNA, 19 nt, Artificial Sequence
  Description of Artificial Sequence: Synthetic oligonucleotide
  Antisense strand to SEQ ID NO: 1630215
aaugagagaaagcuaacau

SEQ ID NO: 1630217 - RNA, 19 nt, Artificial Sequence
  Description of Artificial Sequence: Synthetic oligonucleotide
  Sense strand starting at position 284 of SEQ ID NO: 1560867
uuacauuucugcgaaggca

SEQ ID NO: 1630218 - RNA, 19 nt, Artificial Sequence
  Description of Artificial Sequence: Synthetic oligonucleotide
  Antisense strand to SEQ ID NO: 1630217
ugccuucgcagaaauguaa

SEQ ID NO: 1630219 - RNA, 19 nt, Artificial Sequence
  Description of Artificial Sequence: Synthetic oligonucleotide
  Sense strand starting at position 696 of SEQ ID NO: 1560867
aggcaugagucaucgcacu

SEQ ID NO: 1630220 - RNA, 19 nt, Artificial Sequence
  Description of Artificial Sequence: Synthetic oligonucleotide
  Antisense strand to SEQ ID NO: 1630219
agugcgaugacucaugccu

SEQ ID NO: 1630221 - RNA, 19 nt, Artificial Sequence
  Description of Artificial Sequence: Synthetic oligonucleotide
  Sense strand starting at position 775 of SEQ ID NO: 1560867
ggaauuugguuugauuggu

SEQ ID NO: 1630222 - RNA, 19 nt, Artificial Sequence
  Description of Artificial Sequence: Synthetic oligonucleotide
  Antisense strand to SEQ ID NO: 1630221
accaaucaaaccaaauucc

SEQ ID NO: 1630223 - RNA, 19 nt, Artificial Sequence
  Description of Artificial Sequence: Synthetic oligonucleotide
  Sense strand starting at position 780 of SEQ ID NO: 1560867
uugguuugauugguuuauu

SEQ ID NO: 1630224 - RNA, 19 nt, Artificial Sequence
  Description of Artificial Sequence: Synthetic oligonucleotide
  Antisense strand to SEQ ID NO: 1630223
aauaaaccaaucaaaccaa

SEQ ID NO: 1630225 - RNA, 19 nt, Artificial Sequence
  Description of Artificial Sequence: Synthetic oligonucleotide
  Sense strand starting at position 1183 of SEQ ID NO: 1560867
agcuuccagaaguguuaga

SEQ ID NO: 1630226 - RNA, 19 nt, Artificial Sequence
  Description of Artificial Sequence: Synthetic oligonucleotide
  Antisense strand to SEQ ID NO: 1630225
ucuaacacuucuggaagcu

SEQ ID NO: 1630227 - RNA, 19 nt, Artificial Sequence
  Description of Artificial Sequence: Synthetic oligonucleotide
  Sense strand starting at position 1670 of SEQ ID NO: 1560867
uggagcuugugcuccggaa

SEQ ID NO: 1630228 - RNA, 19 nt, Artificial Sequence
  Description of Artificial Sequence: Synthetic oligonucleotide
  Antisense strand to SEQ ID NO: 1630227
uuccggagcacaagcucca

SEQ ID NO: 1630229 - RNA, 19 nt, Artificial Sequence
  Description of Artificial Sequence: Synthetic oligonucleotide
  Sense strand starting at position 1672 of SEQ ID NO: 1560867
gagcuugugcuccggaauc

SEQ ID NO: 1630230 - RNA, 19 nt, Artificial Sequence
  Description of Artificial Sequence: Synthetic oligonucleotide
  Antisense strand to SEQ ID NO: 1630229
gauuccggagcacaagcuc

SEQ ID NO: 1630231 - RNA, 19 nt, Artificial Sequence
  Description of Artificial Sequence: Synthetic oligonucleotide
  Sense strand starting at position 1751 of SEQ ID NO: 1560867
cggaaucuccgcgggugaa

SEQ ID NO: 1630232 - RNA, 19 nt, Artificial Sequence
  Description of Artificial Sequence: Synthetic oligonucleotide
  Antisense strand to SEQ ID NO: 1630231
uucacccgcggagauuccg

SEQ ID NO: 1630233 - RNA, 19 nt, Artificial Sequence
  Description of Artificial Sequence: Synthetic oligonucleotide
  Sense strand starting at position 1849 of SEQ ID NO: 1560867
ggagguguuuccuccuggu

SEQ ID NO: 1630234 - RNA, 19 nt, Artificial Sequence
  Description of Artificial Sequence: Synthetic oligonucleotide
  Antisense strand to SEQ ID NO: 1630233
accaggaggaaacaccucc

SEQ ID NO: 1630235 - RNA, 19 nt, Artificial Sequence
  Description of Artificial Sequence: Synthetic oligonucleotide
  Sense strand starting at position 1960 of SEQ ID NO: 1560867
ucagcuguuccagagcuca

SEQ ID NO: 1630236 - RNA, 19 nt, Artificial Sequence
  Description of Artificial Sequence: Synthetic oligonucleotide
  Antisense strand to SEQ ID NO: 1630235
ugagcucuggaacagcuga

SEQ ID NO: 1630237 - RNA, 19 nt, Artificial Sequence
  Description of Artificial Sequence: Synthetic oligonucleotide
  Sense strand starting at position 2027 of SEQ ID NO: 1560867
caggcuuccuuagugaugu

SEQ ID NO: 1630238 - RNA, 19 nt, Artificial Sequence
  Description of Artificial Sequence: Synthetic oligonucleotide
  Antisense strand to SEQ ID NO: 1630237
acaucacuaaggaagccug

SEQ ID NO: 1630239 - RNA, 19 nt, Artificial Sequence
  Description of Artificial Sequence: Synthetic oligonucleotide
  Sense strand starting at position 2029 of SEQ ID NO: 1560867
ggcuuccuuagugauguca

SEQ ID NO: 1630240 - RNA, 19 nt, Artificial Sequence
  Description of Artificial Sequence: Synthetic oligonucleotide
  Antisense strand to SEQ ID NO: 1630239
ugacaucacuaaggaagcc

SEQ ID NO: 1630241 - RNA, 19 nt, Artificial Sequence
  Description of Artificial Sequence: Synthetic oligonucleotide
  Sense strand starting at position 2089 of SEQ ID NO: 1560867
gaauguugucguuauauaa

SEQ ID NO: 1630242 - RNA, 19 nt, Artificial Sequence
  Description of Artificial Sequence: Synthetic oligonucleotide
  Antisense strand to SEQ ID NO: 1630241
uuauauaacgacaacauuc

SEQ ID NO: 1630243 - RNA, 19 nt, Artificial Sequence
  Description of Artificial Sequence: Synthetic oligonucleotide
  Sense strand starting at position 2093 of SEQ ID NO: 1560867
guugucguuauauaacuau

SEQ ID NO: 1630244 - RNA, 19 nt, Artificial Sequence
  Description of Artificial Sequence: Synthetic oligonucleotide
  Antisense strand to SEQ ID NO: 1630243
auaguuauauaacgacaac

SEQ ID NO: 1630245 - RNA, 19 nt, Artificial Sequence
  Description of Artificial Sequence: Synthetic oligonucleotide
  Sense strand starting at position 2115 of SEQ ID NO: 1560867
ggagauaaguauuccucaa

SEQ ID NO: 1630246 - RNA, 19 nt, Artificial Sequence
  Description of Artificial Sequence: Synthetic oligonucleotide
  Antisense strand to SEQ ID NO: 1630245
uugaggaauacuuaucucc

SEQ ID NO: 1630247 - RNA, 19 nt, Artificial Sequence
  Description of Artificial Sequence: Synthetic oligonucleotide
  Sense strand starting at position 2154 of SEQ ID NO: 1560867
uaugcaucuggcugucuaa

SEQ ID NO: 1630248 - RNA, 19 nt, Artificial Sequence
  Description of Artificial Sequence: Synthetic oligonucleotide
  Antisense strand to SEQ ID NO: 1630247
uuagacagccagaugcaua

SEQ ID NO: 1630249 - RNA, 19 nt, Artificial Sequence
  Description of Artificial Sequence: Synthetic oligonucleotide
  Sense strand starting at position 2157 of SEQ ID NO: 1560867
gcaucuggcugucuaauaa

SEQ ID NO: 1630250 - RNA, 19 nt, Artificial Sequence
  Description of Artificial Sequence: Synthetic oligonucleotide
  Antisense strand to SEQ ID NO: 1630249
uuauuagacagccagaugc

SEQ ID NO: 1630251 - RNA, 19 nt, Artificial Sequence
  Description of Artificial Sequence: Synthetic oligonucleotide
  Sense strand starting at position 2524 of SEQ ID NO: 1560867
agguuugaagcccagaagu

SEQ ID NO: 1630252 - RNA, 19 nt, Artificial Sequence
  Description of Artificial Sequence: Synthetic oligonucleotide
  Antisense strand to SEQ ID NO: 1630251
acuucugggcuucaaaccu

SEQ ID NO: 1630253 - RNA, 19 nt, Artificial Sequence
  Description of Artificial Sequence: Synthetic oligonucleotide
  Sense strand starting at position 2590 of SEQ ID NO: 1560867
guggucaugugagcgaguu

SEQ ID NO: 1630254 - RNA, 19 nt, Artificial Sequence
  Description of Artificial Sequence: Synthetic oligonucleotide
  Antisense strand to SEQ ID NO: 1630253
aacucgcucacaugaccac

SEQ ID NO: 1630255 - RNA, 19 nt, Artificial Sequence
  Description of Artificial Sequence: Synthetic oligonucleotide
  Sense strand starting at position 2591 of SEQ ID NO: 1560867
uggucaugugagcgaguua

SEQ ID NO: 1630256 - RNA, 19 nt, Artificial Sequence
  Description of Artificial Sequence: Synthetic oligonucleotide
  Antisense strand to SEQ ID NO: 1630255
uaacucgcucacaugacca

SEQ ID NO: 1630257 - RNA, 19 nt, Artificial Sequence
  Description of Artificial Sequence: Synthetic oligonucleotide
  Sense strand starting at position 2592 of SEQ ID NO: 1560867
ggucaugugagcgaguuau

SEQ ID NO: 1630258 - RNA, 19 nt, Artificial Sequence
  Description of Artificial Sequence: Synthetic oligonucleotide
  Antisense strand to SEQ ID NO: 1630257
auaacucgcucacaugacc

SEQ ID NO: 1630259 - RNA, 19 nt, Artificial Sequence
  Description of Artificial Sequence: Synthetic oligonucleotide
  Sense strand starting at position 2600 of SEQ ID NO: 1560867
gagcgaguuauguggucau

SEQ ID NO: 1630260 - RNA, 19 nt, Artificial Sequence
  Description of Artificial Sequence: Synthetic oligonucleotide
  Antisense strand to SEQ ID NO: 1630259
augaccacauaacucgcuc

SEQ ID NO: 1630261 - RNA, 19 nt, Artificial Sequence
  Description of Artificial Sequence: Synthetic oligonucleotide
  Sense strand starting at position 2602 of SEQ ID NO: 1560867
gcgaguuauguggucaugu

SEQ ID NO: 1630262 - RNA, 19 nt, Artificial Sequence
  Description of Artificial Sequence: Synthetic oligonucleotide
  Antisense strand to SEQ ID NO: 1630261
acaugaccacauaacucgc

SEQ ID NO: 1630263 - RNA, 19 nt, Artificial Sequence
  Description of Artificial Sequence: Synthetic oligonucleotide
  Sense strand starting at position 2603 of SEQ ID NO: 1560867
cgaguuauguggucaugug

SEQ ID NO: 1630264 - RNA, 19 nt, Artificial Sequence
  Description of Artificial Sequence: Synthetic oligonucleotide
  Antisense strand to SEQ ID NO: 1630263
cacaugaccacauaacucg

SEQ ID NO: 1630265 - RNA, 19 nt, Artificial Sequence
  Description of Artificial Sequence: Synthetic oligonucleotide
  Sense strand starting at position 2604 of SEQ ID NO: 1560867
gaguuauguggucauguga

SEQ ID NO: 1630266 - RNA, 19 nt, Artificial Sequence
  Description of Artificial Sequence: Synthetic oligonucleotide
  Antisense strand to SEQ ID NO: 1630265
ucacaugaccacauaacuc

SEQ ID NO: 1630267 - RNA, 19 nt, Artificial Sequence
  Description of Artificial Sequence: Synthetic oligonucleotide
  Sense strand starting at position 2625 of SEQ ID NO: 1560867
gaguuccagucagugcaau

SEQ ID NO: 1630268 - RNA, 19 nt, Artificial Sequence
  Description of Artificial Sequence: Synthetic oligonucleotide
  Antisense strand to SEQ ID NO: 1630267
auugcacugacuggaacuc

SEQ ID NO: 1630269 - RNA, 19 nt, Artificial Sequence
  Description of Artificial Sequence: Synthetic oligonucleotide
  Sense strand starting at position 2671 of SEQ ID NO: 1560867
aagaguggcuccuagaaac

SEQ ID NO: 1630270 - RNA, 19 nt, Artificial Sequence
  Description of Artificial Sequence: Synthetic oligonucleotide
  Antisense strand to SEQ ID NO: 1630269
guuucuaggagccacucuu

SEQ ID NO: 1630271 - RNA, 19 nt, Artificial Sequence
  Description of Artificial Sequence: Synthetic oligonucleotide
  Sense strand starting at position 3097 of SEQ ID NO: 1560867
aggccauaauccuagcacu

SEQ ID NO: 1630272 - RNA, 19 nt, Artificial Sequence
  Description of Artificial Sequence: Synthetic oligonucleotide
  Antisense strand to SEQ ID NO: 1630271
agugcuaggauuauggccu

SEQ ID NO: 1630273 - RNA, 19 nt, Artificial Sequence
  Description of Artificial Sequence: Synthetic oligonucleotide
  Sense strand starting at position 3285 of SEQ ID NO: 1560867
gggauaagguucuacaccu

SEQ ID NO: 1630274 - RNA, 19 nt, Artificial Sequence
  Description of Artificial Sequence: Synthetic oligonucleotide
  Antisense strand to SEQ ID NO: 1630273
agguguagaaccuuauccc

SEQ ID NO: 1630275 - RNA, 19 nt, Artificial Sequence
  Description of Artificial Sequence: Synthetic oligonucleotide
  Sense strand starting at position 3316 of SEQ ID NO: 1560867
ugaggcucuccacaguaua

SEQ ID NO: 1630276 - RNA, 19 nt, Artificial Sequence
  Description of Artificial Sequence: Synthetic oligonucleotide
  Antisense strand to SEQ ID NO: 1630275
uauacuguggagagccuca

SEQ ID NO: 1630277 - RNA, 19 nt, Artificial Sequence
  Description of Artificial Sequence: Synthetic oligonucleotide
  Sense strand starting at position 3319 of SEQ ID NO: 1560867
ggcucuccacaguauaguu

SEQ ID NO: 1630278 - RNA, 19 nt, Artificial Sequence
  Description of Artificial Sequence: Synthetic oligonucleotide
  Antisense strand to SEQ ID NO: 1630277
aacuauacuguggagagcc

SEQ ID NO: 1630279 - RNA, 19 nt, Artificial Sequence
  Description of Artificial Sequence: Synthetic oligonucleotide
  Sense strand starting at position 3327 of SEQ ID NO: 1560867
acaguauaguuaguaguua

SEQ ID NO: 1630280 - RNA, 19 nt, Artificial Sequence
  Description of Artificial Sequence: Synthetic oligonucleotide
  Antisense strand to SEQ ID NO: 1630279
uaacuacuaacuauacugu

SEQ ID NO: 1630281 - RNA, 19 nt, Artificial Sequence
  Description of Artificial Sequence: Synthetic oligonucleotide
  Sense strand starting at position 3342 of SEQ ID NO: 1560867
guuauagaugcagggucaa

SEQ ID NO: 1630282 - RNA, 19 nt, Artificial Sequence
  Description of Artificial Sequence: Synthetic oligonucleotide
  Antisense strand to SEQ ID NO: 1630281
uugacccugcaucuauaac

SEQ ID NO: 1630283 - RNA, 19 nt, Artificial Sequence
  Description of Artificial Sequence: Synthetic oligonucleotide
  Sense strand starting at position 3522 of SEQ ID NO: 1560867
ggaugacccugacuagcuu

SEQ ID NO: 1630284 - RNA, 19 nt, Artificial Sequence
  Description of Artificial Sequence: Synthetic oligonucleotide
  Antisense strand to SEQ ID NO: 1630283
aagcuagucagggucaucc

SEQ ID NO: 1630285 - RNA, 19 nt, Artificial Sequence
  Description of Artificial Sequence: Synthetic oligonucleotide
  Sense strand starting at position 3740 of SEQ ID NO: 1560867
uugccaguucuuuaaggca

SEQ ID NO: 1630286 - RNA, 19 nt, Artificial Sequence
  Description of Artificial Sequence: Synthetic oligonucleotide
  Antisense strand to SEQ ID NO: 1630285
ugccuuaaagaacuggcaa

SEQ ID NO: 1630287 - RNA, 19 nt, Artificial Sequence
  Description of Artificial Sequence: Synthetic oligonucleotide
  Sense strand starting at position 3773 of SEQ ID NO: 1560867
acucuuagcuaugagaaac

SEQ ID NO: 1630288 - RNA, 19 nt, Artificial Sequence
  Description of Artificial Sequence: Synthetic oligonucleotide
  Antisense strand to SEQ ID NO: 1630287
guuucucauagcuaagagu

SEQ ID NO: 1630289 - RNA, 19 nt, Artificial Sequence
  Description of Artificial Sequence: Synthetic oligonucleotide
  Sense strand starting at position 119 of SEQ ID NO: 1560868
ucuagcuccuccuugagau

SEQ ID NO: 1630290 - RNA, 19 nt, Artificial Sequence
  Description of Artificial Sequence: Synthetic oligonucleotide
  Antisense strand to SEQ ID NO: 1630289
aucucaaggaggagcuaga

SEQ ID NO: 1630291 - RNA, 19 nt, Artificial Sequence
  Description of Artificial Sequence: Synthetic oligonucleotide
  Sense strand starting at position 120 of SEQ ID NO: 1560868
cuagcuccuccuugagauu

SEQ ID NO: 1630292 - RNA, 19 nt, Artificial Sequence
  Description of Artificial Sequence: Synthetic oligonucleotide
  Antisense strand to SEQ ID NO: 1630291
aaucucaaggaggagcuag

SEQ ID NO: 1630293 - RNA, 19 nt, Artificial Sequence
  Description of Artificial Sequence: Synthetic oligonucleotide
  Sense strand starting at position 505 of SEQ ID NO: 1560868
gcucuuccucggucuguaa

SEQ ID NO: 1630294 - RNA, 19 nt, Artificial Sequence
  Description of Artificial Sequence: Synthetic oligonucleotide
  Antisense strand to SEQ ID NO: 1630293
uuacagaccgaggaagagc

SEQ ID NO: 1630295 - RNA, 19 nt, Artificial Sequence
  Description of Artificial Sequence: Synthetic oligonucleotide
  Sense strand starting at position 684 of SEQ ID NO: 1560868
ggaguaucccggagcuguu

SEQ ID NO: 1630296 - RNA, 19 nt, Artificial Sequence
  Description of Artificial Sequence: Synthetic oligonucleotide
  Antisense strand to SEQ ID NO: 1630295
aacagcuccgggauacucc

SEQ ID NO: 1630297 - RNA, 19 nt, Artificial Sequence
  Description of Artificial Sequence: Synthetic oligonucleotide
  Sense strand starting at position 731 of SEQ ID NO: 1560868
gcgcuuuccggguuauuca

SEQ ID NO: 1630298 - RNA, 19 nt, Artificial Sequence
  Description of Artificial Sequence: Synthetic oligonucleotide
  Antisense strand to SEQ ID NO: 1630297
ugaauaacccggaaagcgc

SEQ ID NO: 1630299 - RNA, 19 nt, Artificial Sequence
  Description of Artificial Sequence: Synthetic oligonucleotide
  Sense strand starting at position 1576 of SEQ ID NO: 1560868
ugcacaaagcacgagaauu

SEQ ID NO: 1630300 - RNA, 19 nt, Artificial Sequence
  Description of Artificial Sequence: Synthetic oligonucleotide
  Antisense strand to SEQ ID NO: 1630299
aauucucgugcuuugugca

SEQ ID NO: 1630301 - RNA, 19 nt, Artificial Sequence
  Description of Artificial Sequence: Synthetic oligonucleotide
  Sense strand starting at position 1584 of SEQ ID NO: 1560868
gcacgagaauuacuauuau

SEQ ID NO: 1630302 - RNA, 19 nt, Artificial Sequence
  Description of Artificial Sequence: Synthetic oligonucleotide
  Antisense strand to SEQ ID NO: 1630301
auaauaguaauucucgugc

SEQ ID NO: 1630303 - RNA, 19 nt, Artificial Sequence
  Description of Artificial Sequence: Synthetic oligonucleotide
  Sense strand starting at position 1598 of SEQ ID NO: 1560868
auuauuugauuagggagga

SEQ ID NO: 1630304 - RNA, 19 nt, Artificial Sequence
  Description of Artificial Sequence: Synthetic oligonucleotide
  Antisense strand to SEQ ID NO: 1630303
uccucccuaaucaaauaau

SEQ ID NO: 1630305 - RNA, 19 nt, Artificial Sequence
  Description of Artificial Sequence: Synthetic oligonucleotide
  Sense strand starting at position 1599 of SEQ ID NO: 1560868
uuauuugauuagggaggau

SEQ ID NO: 1630306 - RNA, 19 nt, Artificial Sequence
  Description of Artificial Sequence: Synthetic oligonucleotide
  Antisense strand to SEQ ID NO: 1630305
auccucccuaaucaaauaa

SEQ ID NO: 1630307 - RNA, 19 nt, Artificial Sequence
  Description of Artificial Sequence: Synthetic oligonucleotide
  Sense strand starting at position 1860 of SEQ ID NO: 1560868
ggacuccucccagacguuu

SEQ ID NO: 1630308 - RNA, 19 nt, Artificial Sequence
  Description of Artificial Sequence: Synthetic oligonucleotide
  Antisense strand to SEQ ID NO: 1630307
aaacgucugggaggagucc

SEQ ID NO: 1630309 - RNA, 19 nt, Artificial Sequence
  Description of Artificial Sequence: Synthetic oligonucleotide
  Sense strand starting at position 2000 of SEQ ID NO: 1560868
cccugacucauggaguugu

SEQ ID NO: 1630310 - RNA, 19 nt, Artificial Sequence
  Description of Artificial Sequence: Synthetic oligonucleotide
  Antisense strand to SEQ ID NO: 1630309
acaacuccaugagucaggg

SEQ ID NO: 1630311 - RNA, 19 nt, Artificial Sequence
  Description of Artificial Sequence: Synthetic oligonucleotide
  Sense strand starting at position 2004 of SEQ ID NO: 1560868
gacucauggaguugugauc

SEQ ID NO: 1630312 - RNA, 19 nt, Artificial Sequence
  Description of Artificial Sequence: Synthetic oligonucleotide
  Antisense strand to SEQ ID NO: 1630311
gaucacaacuccaugaguc

SEQ ID NO: 1630313 - RNA, 19 nt, Artificial Sequence
  Description of Artificial Sequence: Synthetic oligonucleotide
  Sense strand starting at position 2010 of SEQ ID NO: 1560868
uggaguugugaucacagcu

SEQ ID NO: 1630314 - RNA, 19 nt, Artificial Sequence
  Description of Artificial Sequence: Synthetic oligonucleotide
  Antisense strand to SEQ ID NO: 1630313
agcugugaucacaacucca

SEQ ID NO: 1630315 - RNA, 19 nt, Artificial Sequence
  Description of Artificial Sequence: Synthetic oligonucleotide
  Sense strand starting at position 2036 of SEQ ID NO: 1560868
cagauugccugggugcaaa

SEQ ID NO: 1630316 - RNA, 19 nt, Artificial Sequence
  Description of Artificial Sequence: Synthetic oligonucleotide
  Antisense strand to SEQ ID NO: 1630315
uuugcacccaggcaaucug

SEQ ID NO: 1630317 - RNA, 19 nt, Artificial Sequence
  Description of Artificial Sequence: Synthetic oligonucleotide
  Sense strand starting at position 2134 of SEQ ID NO: 1560868
gguaaauaugaauguggcu

SEQ ID NO: 1630318 - RNA, 19 nt, Artificial Sequence
  Description of Artificial Sequence: Synthetic oligonucleotide
  Antisense strand to SEQ ID NO: 1630317
agccacauucauauuuacc

SEQ ID NO: 1630319 - RNA, 19 nt, Artificial Sequence
  Description of Artificial Sequence: Synthetic oligonucleotide
  Sense strand starting at position 2139 of SEQ ID NO: 1560868
auaugaauguggcugauua

SEQ ID NO: 1630320 - RNA, 19 nt, Artificial Sequence
  Description of Artificial Sequence: Synthetic oligonucleotide
  Antisense strand to SEQ ID NO: 1630319
uaaucagccacauucauau

SEQ ID NO: 1630321 - RNA, 19 nt, Artificial Sequence
  Description of Artificial Sequence: Synthetic oligonucleotide
  Sense strand starting at position 2140 of SEQ ID NO: 1560868
uaugaauguggcugauuau

SEQ ID NO: 1630322 - RNA, 19 nt, Artificial Sequence
  Description of Artificial Sequence: Synthetic oligonucleotide
  Antisense strand to SEQ ID NO: 1630321
auaaucagccacauucaua

SEQ ID NO: 1630323 - RNA, 19 nt, Artificial Sequence
  Description of Artificial Sequence: Synthetic oligonucleotide
  Sense strand starting at position 2141 of SEQ ID NO: 1560868
augaauguggcugauuauu

SEQ ID NO: 1630324 - RNA, 19 nt, Artificial Sequence
  Description of Artificial Sequence: Synthetic oligonucleotide
  Antisense strand to SEQ ID NO: 1630323
aauaaucagccacauucau

SEQ ID NO: 1630325 - RNA, 19 nt, Artificial Sequence
  Description of Artificial Sequence: Synthetic oligonucleotide
  Sense strand starting at position 2155 of SEQ ID NO: 1560868
uuauuuggcuaacaggauu

SEQ ID NO: 1630326 - RNA, 19 nt, Artificial Sequence
  Description of Artificial Sequence: Synthetic oligonucleotide
  Antisense strand to SEQ ID NO: 1630325
aauccuguuagccaaauaa

SEQ ID NO: 1630327 - RNA, 19 nt, Artificial Sequence
  Description of Artificial Sequence: Synthetic oligonucleotide
  Sense strand starting at position 2325 of SEQ ID NO: 1560868
cgaaguagguccuugguaa

SEQ ID NO: 1630328 - RNA, 19 nt, Artificial Sequence
  Description of Artificial Sequence: Synthetic oligonucleotide
  Antisense strand to SEQ ID NO: 1630327
uuaccaaggaccuacuucg

SEQ ID NO: 1630329 - RNA, 19 nt, Artificial Sequence
  Description of Artificial Sequence: Synthetic oligonucleotide
  Sense strand starting at position 2326 of SEQ ID NO: 1560868
gaaguagguccuugguaaa

SEQ ID NO: 1630330 - RNA, 19 nt, Artificial Sequence
  Description of Artificial Sequence: Synthetic oligonucleotide
  Antisense strand to SEQ ID NO: 1630329
uuuaccaaggaccuacuuc

SEQ ID NO: 1630331 - RNA, 19 nt, Artificial Sequence
  Description of Artificial Sequence: Synthetic oligonucleotide
  Sense strand starting at position 2340 of SEQ ID NO: 1560868
guaaauguuaaaggaaugu

SEQ ID NO: 1630332 - RNA, 19 nt, Artificial Sequence
  Description of Artificial Sequence: Synthetic oligonucleotide
  Antisense strand to SEQ ID NO: 1630331
acauuccuuuaacauuuac

SEQ ID NO: 1630333 - RNA, 19 nt, Artificial Sequence
  Description of Artificial Sequence: Synthetic oligonucleotide
  Sense strand starting at position 2643 of SEQ ID NO: 1560868
aguagauaucacuguuacg

SEQ ID NO: 1630334 - RNA, 19 nt, Artificial Sequence
  Description of Artificial Sequence: Synthetic oligonucleotide
  Antisense strand to SEQ ID NO: 1630333
cguaacagugauaucuacu

SEQ ID NO: 1630335 - RNA, 19 nt, Artificial Sequence
  Description of Artificial Sequence: Synthetic oligonucleotide
  Sense strand starting at position 2713 of SEQ ID NO: 1560868
uuugcagaugcuuacuaga

SEQ ID NO: 1630336 - RNA, 19 nt, Artificial Sequence
  Description of Artificial Sequence: Synthetic oligonucleotide
  Antisense strand to SEQ ID NO: 1630335
ucuaguaagcaucugcaaa

SEQ ID NO: 1630337 - RNA, 19 nt, Artificial Sequence
  Description of Artificial Sequence: Synthetic oligonucleotide
  Sense strand starting at position 2718 of SEQ ID NO: 1560868
agaugcuuacuagaguauu

SEQ ID NO: 1630338 - RNA, 19 nt, Artificial Sequence
  Description of Artificial Sequence: Synthetic oligonucleotide
  Antisense strand to SEQ ID NO: 1630337
aauacucuaguaagcaucu

SEQ ID NO: 1630339 - RNA, 19 nt, Artificial Sequence
  Description of Artificial Sequence: Synthetic oligonucleotide
  Sense strand starting at position 2735 of SEQ ID NO: 1560868
uuuaguggugaauguuauu

SEQ ID NO: 1630340 - RNA, 19 nt, Artificial Sequence
  Description of Artificial Sequence: Synthetic oligonucleotide
  Antisense strand to SEQ ID NO: 1630339
aauaacauucaccacuaaa

SEQ ID NO: 1630341 - RNA, 19 nt, Artificial Sequence
  Description of Artificial Sequence: Synthetic oligonucleotide
  Sense strand starting at position 2740 of SEQ ID NO: 1560868
uggugaauguuauugaugu

SEQ ID NO: 1630342 - RNA, 19 nt, Artificial Sequence
  Description of Artificial Sequence: Synthetic oligonucleotide
  Antisense strand to SEQ ID NO: 1630341
acaucaauaacauucacca

SEQ ID NO: 1630343 - RNA, 19 nt, Artificial Sequence
  Description of Artificial Sequence: Synthetic oligonucleotide
  Sense strand starting at position 2742 of SEQ ID NO: 1560868
gugaauguuauugaugucu

SEQ ID NO: 1630344 - RNA, 19 nt, Artificial Sequence
  Description of Artificial Sequence: Synthetic oligonucleotide
  Antisense strand to SEQ ID NO: 1630343
agacaucaauaacauucac

SEQ ID NO: 1630345 - RNA, 19 nt, Artificial Sequence
  Description of Artificial Sequence: Synthetic oligonucleotide
  Sense strand starting at position 2748 of SEQ ID NO: 1560868
guuauugaugucugcauuu

SEQ ID NO: 1630346 - RNA, 19 nt, Artificial Sequence
  Description of Artificial Sequence: Synthetic oligonucleotide
  Antisense strand to SEQ ID NO: 1630345
aaaugcagacaucaauaac

SEQ ID NO: 1630347 - RNA, 19 nt, Artificial Sequence
  Description of Artificial Sequence: Synthetic oligonucleotide
  Sense strand starting at position 2889 of SEQ ID NO: 1560868
acaccaaugcuuugggaag

SEQ ID NO: 1630348 - RNA, 19 nt, Artificial Sequence
  Description of Artificial Sequence: Synthetic oligonucleotide
  Antisense strand to SEQ ID NO: 1630347
cuucccaaagcauuggugu

SEQ ID NO: 1630349 - RNA, 19 nt, Artificial Sequence
  Description of Artificial Sequence: Synthetic oligonucleotide
  Sense strand starting at position 3203 of SEQ ID NO: 1560868
uagccaaaugguuguauca

SEQ ID NO: 1630350 - RNA, 19 nt, Artificial Sequence
  Description of Artificial Sequence: Synthetic oligonucleotide
  Antisense strand to SEQ ID NO: 1630349
ugauacaaccauuuggcua

SEQ ID NO: 1630351 - RNA, 19 nt, Artificial Sequence
  Description of Artificial Sequence: Synthetic oligonucleotide
  Sense strand starting at position 3677 of SEQ ID NO: 1560868
cgucuuaggaugcaucuaa

SEQ ID NO: 1630352 - RNA, 19 nt, Artificial Sequence
  Description of Artificial Sequence: Synthetic oligonucleotide
  Antisense strand to SEQ ID NO: 1630351
uuagaugcauccuaagacg

SEQ ID NO: 1630353 - RNA, 19 nt, Artificial Sequence
  Description of Artificial Sequence: Synthetic oligonucleotide
  Sense strand starting at position 3684 of SEQ ID NO: 1560868
ggaugcaucuaacuaaaca

SEQ ID NO: 1630354 - RNA, 19 nt, Artificial Sequence
  Description of Artificial Sequence: Synthetic oligonucleotide
  Antisense strand to SEQ ID NO: 1630353
uguuuaguuagaugcaucc

SEQ ID NO: 1630355 - RNA, 19 nt, Artificial Sequence
  Description of Artificial Sequence: Synthetic oligonucleotide
  Sense strand starting at position 3717 of SEQ ID NO: 1560868
aggugcaaugccuggaaua

SEQ ID NO: 1630356 - RNA, 19 nt, Artificial Sequence
  Description of Artificial Sequence: Synthetic oligonucleotide
  Antisense strand to SEQ ID NO: 1630355
uauuccaggcauugcaccu

SEQ ID NO: 1630357 - RNA, 19 nt, Artificial Sequence
  Description of Artificial Sequence: Synthetic oligonucleotide
  Sense strand starting at position 3718 of SEQ ID NO: 1560868
ggugcaaugccuggaauag

SEQ ID NO: 1630358 - RNA, 19 nt, Artificial Sequence
  Description of Artificial Sequence: Synthetic oligonucleotide
  Antisense strand to SEQ ID NO: 1630357
cuauuccaggcauugcacc

SEQ ID NO: 1630359 - RNA, 19 nt, Artificial Sequence
  Description of Artificial Sequence: Synthetic oligonucleotide
  Sense strand starting at position 3874 of SEQ ID NO: 1560868
gggagcagauauguguuau

SEQ ID NO: 1630360 - RNA, 19 nt, Artificial Sequence
  Description of Artificial Sequence: Synthetic oligonucleotide
  Antisense strand to SEQ ID NO: 1630359
auaacacauaucugcuccc

SEQ ID NO: 1630361 - RNA, 19 nt, Artificial Sequence
  Description of Artificial Sequence: Synthetic oligonucleotide
  Sense strand starting at position 3875 of SEQ ID NO: 1560868
ggagcagauauguguuauc

SEQ ID NO: 1630362 - RNA, 19 nt, Artificial Sequence
  Description of Artificial Sequence: Synthetic oligonucleotide
  Antisense strand to SEQ ID NO: 1630361
gauaacacauaucugcucc

SEQ ID NO: 1630363 - RNA, 19 nt, Artificial Sequence
  Description of Artificial Sequence: Synthetic oligonucleotide
  Sense strand starting at position 3880 of SEQ ID NO: 1560868
agauauguguuaucuaauc

SEQ ID NO: 1630364 - RNA, 19 nt, Artificial Sequence
  Description of Artificial Sequence: Synthetic oligonucleotide
  Antisense strand to SEQ ID NO: 1630363
gauuagauaacacauaucu

SEQ ID NO: 1630365 - RNA, 19 nt, Artificial Sequence
  Description of Artificial Sequence: Synthetic oligonucleotide
  Sense strand starting at position 3950 of SEQ ID NO: 1560868
ggaaguaucugggugcaaa

SEQ ID NO: 1630366 - RNA, 19 nt, Artificial Sequence
  Description of Artificial Sequence: Synthetic oligonucleotide
  Antisense strand to SEQ ID NO: 1630365
uuugcacccagauacuucc

SEQ ID NO: 1630367 - RNA, 19 nt, Artificial Sequence
  Description of Artificial Sequence: Synthetic oligonucleotide
  Sense strand starting at position 3951 of SEQ ID NO: 1560868
gaaguaucugggugcaaau

SEQ ID NO: 1630368 - RNA, 19 nt, Artificial Sequence
  Description of Artificial Sequence: Synthetic oligonucleotide
  Antisense strand to SEQ ID NO: 1630367
auuugcacccagauacuuc

SEQ ID NO: 1630369 - RNA, 19 nt, Artificial Sequence
  Description of Artificial Sequence: Synthetic oligonucleotide
  Sense strand starting at position 9 of SEQ ID NO: 1560869
agcaguguugggcacauau

SEQ ID NO: 1630370 - RNA, 19 nt, Artificial Sequence
  Description of Artificial Sequence: Synthetic oligonucleotide
  Antisense strand to SEQ ID NO: 1630369
auaugugcccaacacugcu

SEQ ID NO: 1630371 - RNA, 19 nt, Artificial Sequence
  Description of Artificial Sequence: Synthetic oligonucleotide
  Sense strand starting at position 28 of SEQ ID NO: 1560869
auaguacaugcuuaagaau

SEQ ID NO: 1630372 - RNA, 19 nt, Artificial Sequence
  Description of Artificial Sequence: Synthetic oligonucleotide
  Antisense strand to SEQ ID NO: 1630371
auucuuaagcauguacuau

SEQ ID NO: 1630373 - RNA, 19 nt, Artificial Sequence
  Description of Artificial Sequence: Synthetic oligonucleotide
  Sense strand starting at position 116 of SEQ ID NO: 1560869
uuaaguuaguugcccaaga

SEQ ID NO: 1630374 - RNA, 19 nt, Artificial Sequence
  Description of Artificial Sequence: Synthetic oligonucleotide
  Antisense strand to SEQ ID NO: 1630373
ucuugggcaacuaacuuaa

SEQ ID NO: 1630375 - RNA, 19 nt, Artificial Sequence
  Description of Artificial Sequence: Synthetic oligonucleotide
  Sense strand starting at position 117 of SEQ ID NO: 1560869
uaaguuaguugcccaagau

SEQ ID NO: 1630376 - RNA, 19 nt, Artificial Sequence
  Description of Artificial Sequence: Synthetic oligonucleotide
  Antisense strand to SEQ ID NO: 1630375
aucuugggcaacuaacuua

SEQ ID NO: 1630377 - RNA, 19 nt, Artificial Sequence
  Description of Artificial Sequence: Synthetic oligonucleotide
  Sense strand starting at position 239 of SEQ ID NO: 1560869
cucagauucgaacgauucu

SEQ ID NO: 1630378 - RNA, 19 nt, Artificial Sequence
  Description of Artificial Sequence: Synthetic oligonucleotide
  Antisense strand to SEQ ID NO: 1630377
agaaucguucgaaucugag

SEQ ID NO: 1630379 - RNA, 19 nt, Artificial Sequence
  Description of Artificial Sequence: Synthetic oligonucleotide
  Sense strand starting at position 820 of SEQ ID NO: 1560869
cucacagaaucgucacacu

SEQ ID NO: 1630380 - RNA, 19 nt, Artificial Sequence
  Description of Artificial Sequence: Synthetic oligonucleotide
  Antisense strand to SEQ ID NO: 1630379
agugugacgauucugugag

SEQ ID NO: 1630381 - RNA, 19 nt, Artificial Sequence
  Description of Artificial Sequence: Synthetic oligonucleotide
  Sense strand starting at position 912 of SEQ ID NO: 1560869
aagguauccagagguguag

SEQ ID NO: 1630382 - RNA, 19 nt, Artificial Sequence
  Description of Artificial Sequence: Synthetic oligonucleotide
  Antisense strand to SEQ ID NO: 1630381
cuacaccucuggauaccuu

SEQ ID NO: 1630383 - RNA, 19 nt, Artificial Sequence
  Description of Artificial Sequence: Synthetic oligonucleotide
  Sense strand starting at position 984 of SEQ ID NO: 1560869
uguuaugugagaugugaca

SEQ ID NO: 1630384 - RNA, 19 nt, Artificial Sequence
  Description of Artificial Sequence: Synthetic oligonucleotide
  Antisense strand to SEQ ID NO: 1630383
ugucacaucucacauaaca

SEQ ID NO: 1630385 - RNA, 19 nt, Artificial Sequence
  Description of Artificial Sequence: Synthetic oligonucleotide
  Sense strand starting at position 1163 of SEQ ID NO: 1560869
uugcauuagcgcgauuuaa

SEQ ID NO: 1630386 - RNA, 19 nt, Artificial Sequence
  Description of Artificial Sequence: Synthetic oligonucleotide
  Antisense strand to SEQ ID NO: 1630385
uuaaaucgcgcuaaugcaa

SEQ ID NO: 1630387 - RNA, 19 nt, Artificial Sequence
  Description of Artificial Sequence: Synthetic oligonucleotide
  Sense strand starting at position 1222 of SEQ ID NO: 1560869
ggguaugaugaggguuuaa

SEQ ID NO: 1630388 - RNA, 19 nt, Artificial Sequence
  Description of Artificial Sequence: Synthetic oligonucleotide
  Antisense strand to SEQ ID NO: 1630387
uuaaacccucaucauaccc

SEQ ID NO: 1630389 - RNA, 19 nt, Artificial Sequence
  Description of Artificial Sequence: Synthetic oligonucleotide
  Sense strand starting at position 1281 of SEQ ID NO: 1560869
gcaggaugcagguaacaua

SEQ ID NO: 1630390 - RNA, 19 nt, Artificial Sequence
  Description of Artificial Sequence: Synthetic oligonucleotide
  Antisense strand to SEQ ID NO: 1630389
uauguuaccugcauccugc

SEQ ID NO: 1630391 - RNA, 19 nt, Artificial Sequence
  Description of Artificial Sequence: Synthetic oligonucleotide
  Sense strand starting at position 1294 of SEQ ID NO: 1560869
aacauauggcgaugacgaa

SEQ ID NO: 1630392 - RNA, 19 nt, Artificial Sequence
  Description of Artificial Sequence: Synthetic oligonucleotide
  Antisense strand to SEQ ID NO: 1630391
uucgucaucgccauauguu

SEQ ID NO: 1630393 - RNA, 19 nt, Artificial Sequence
  Description of Artificial Sequence: Synthetic oligonucleotide
  Sense strand starting at position 1295 of SEQ ID NO: 1560869
acauauggcgaugacgaau

SEQ ID NO: 1630394 - RNA, 19 nt, Artificial Sequence
  Description of Artificial Sequence: Synthetic oligonucleotide
  Antisense strand to SEQ ID NO: 1630393
auucgucaucgccauaugu

SEQ ID NO: 1630395 - RNA, 19 nt, Artificial Sequence
  Description of Artificial Sequence: Synthetic oligonucleotide
  Sense strand starting at position 1445 of SEQ ID NO: 1560869
ggauuuaagugggaugaga

SEQ ID NO: 1630396 - RNA, 19 nt, Artificial Sequence
  Description of Artificial Sequence: Synthetic oligonucleotide
  Antisense strand to SEQ ID NO: 1630395
ucucaucccacuuaaaucc

SEQ ID NO: 1630397 - RNA, 19 nt, Artificial Sequence
  Description of Artificial Sequence: Synthetic oligonucleotide
  Sense strand starting at position 1472 of SEQ ID NO: 1560869
gaggaauggugacauaaag

SEQ ID NO: 1630398 - RNA, 19 nt, Artificial Sequence
  Description of Artificial Sequence: Synthetic oligonucleotide
  Antisense strand to SEQ ID NO: 1630397
cuuuaugucaccauuccuc

SEQ ID NO: 1630399 - RNA, 19 nt, Artificial Sequence
  Description of Artificial Sequence: Synthetic oligonucleotide
  Sense strand starting at position 1506 of SEQ ID NO: 1560869
uaaauuauagcguggaaga

SEQ ID NO: 1630400 - RNA, 19 nt, Artificial Sequence
  Description of Artificial Sequence: Synthetic oligonucleotide
  Antisense strand to SEQ ID NO: 1630399
ucuuccacgcuauaauuua

SEQ ID NO: 1630401 - RNA, 19 nt, Artificial Sequence
  Description of Artificial Sequence: Synthetic oligonucleotide
  Sense strand starting at position 1507 of SEQ ID NO: 1560869
aaauuauagcguggaagac

SEQ ID NO: 1630402 - RNA, 19 nt, Artificial Sequence
  Description of Artificial Sequence: Synthetic oligonucleotide
  Antisense strand to SEQ ID NO: 1630401
gucuuccacgcuauaauuu

SEQ ID NO: 1630403 - RNA, 19 nt, Artificial Sequence
  Description of Artificial Sequence: Synthetic oligonucleotide
  Sense strand starting at position 1508 of SEQ ID NO: 1560869
aauuauagcguggaagaca

SEQ ID NO: 1630404 - RNA, 19 nt, Artificial Sequence
  Description of Artificial Sequence: Synthetic oligonucleotide
  Antisense strand to SEQ ID NO: 1630403
ugucuuccacgcuauaauu

SEQ ID NO: 1630405 - RNA, 19 nt, Artificial Sequence
  Description of Artificial Sequence: Synthetic oligonucleotide
  Sense strand starting at position 1592 of SEQ ID NO: 1560869
cauuauagcguggaagaca

SEQ ID NO: 1630406 - RNA, 19 nt, Artificial Sequence
  Description of Artificial Sequence: Synthetic oligonucleotide
  Antisense strand to SEQ ID NO: 1630405
ugucuuccacgcuauaaug

SEQ ID NO: 1630407 - RNA, 19 nt, Artificial Sequence
  Description of Artificial Sequence: Synthetic oligonucleotide
  Sense strand starting at position 2027 of SEQ ID NO: 1560869
gggaggagugucugacagu

SEQ ID NO: 1630408 - RNA, 19 nt, Artificial Sequence
  Description of Artificial Sequence: Synthetic oligonucleotide
  Antisense strand to SEQ ID NO: 1630407
acugucagacacuccuccc

SEQ ID NO: 1630409 - RNA, 19 nt, Artificial Sequence
  Description of Artificial Sequence: Synthetic oligonucleotide
  Sense strand starting at position 2255 of SEQ ID NO: 1560869
uuagaauccgacuguauca

SEQ ID NO: 1630410 - RNA, 19 nt, Artificial Sequence
  Description of Artificial Sequence: Synthetic oligonucleotide
  Antisense strand to SEQ ID NO: 1630409
ugauacagucggauucuaa

SEQ ID NO: 1630411 - RNA, 19 nt, Artificial Sequence
  Description of Artificial Sequence: Synthetic oligonucleotide
  Sense strand starting at position 2275 of SEQ ID NO: 1560869
cggcuuuauaaaugggagu

SEQ ID NO: 1630412 - RNA, 19 nt, Artificial Sequence
  Description of Artificial Sequence: Synthetic oligonucleotide
  Antisense strand to SEQ ID NO: 1630411
acucccauuuauaaagccg

SEQ ID NO: 1630413 - RNA, 19 nt, Artificial Sequence
  Description of Artificial Sequence: Synthetic oligonucleotide
  Sense strand starting at position 2277 of SEQ ID NO: 1560869
gcuuuauaaaugggaguga

SEQ ID NO: 1630414 - RNA, 19 nt, Artificial Sequence
  Description of Artificial Sequence: Synthetic oligonucleotide
  Antisense strand to SEQ ID NO: 1630413
ucacucccauuuauaaagc

SEQ ID NO: 1630415 - RNA, 19 nt, Artificial Sequence
  Description of Artificial Sequence: Synthetic oligonucleotide
  Sense strand starting at position 2380 of SEQ ID NO: 1560869
ugauguuugagcgcuuagu

SEQ ID NO: 1630416 - RNA, 19 nt, Artificial Sequence
  Description of Artificial Sequence: Synthetic oligonucleotide
  Antisense strand to SEQ ID NO: 1630415
acuaagcgcucaaacauca

SEQ ID NO: 1630417 - RNA, 19 nt, Artificial Sequence
  Description of Artificial Sequence: Synthetic oligonucleotide
  Sense strand starting at position 2382 of SEQ ID NO: 1560869
auguuugagcgcuuaguau

SEQ ID NO: 1630418 - RNA, 19 nt, Artificial Sequence
  Description of Artificial Sequence: Synthetic oligonucleotide
  Antisense strand to SEQ ID NO: 1630417
auacuaagcgcucaaacau

SEQ ID NO: 1630419 - RNA, 19 nt, Artificial Sequence
  Description of Artificial Sequence: Synthetic oligonucleotide
  Sense strand starting at position 2415 of SEQ ID NO: 1560869
uuuggaagccgucgaauuu

SEQ ID NO: 1630420 - RNA, 19 nt, Artificial Sequence
  Description of Artificial Sequence: Synthetic oligonucleotide
  Antisense strand to SEQ ID NO: 1630419
aaauucgacggcuuccaaa

SEQ ID NO: 1630421 - RNA, 19 nt, Artificial Sequence
  Description of Artificial Sequence: Synthetic oligonucleotide
  Sense strand starting at position 2471 of SEQ ID NO: 1560869
ugugucuucgcuuccuuga

SEQ ID NO: 1630422 - RNA, 19 nt, Artificial Sequence
  Description of Artificial Sequence: Synthetic oligonucleotide
  Antisense strand to SEQ ID NO: 1630421
ucaaggaagcgaagacaca

SEQ ID NO: 1630423 - RNA, 19 nt, Artificial Sequence
  Description of Artificial Sequence: Synthetic oligonucleotide
  Sense strand starting at position 2472 of SEQ ID NO: 1560869
gugucuucgcuuccuugaa

SEQ ID NO: 1630424 - RNA, 19 nt, Artificial Sequence
  Description of Artificial Sequence: Synthetic oligonucleotide
  Antisense strand to SEQ ID NO: 1630423
uucaaggaagcgaagacac

SEQ ID NO: 1630425 - RNA, 19 nt, Artificial Sequence
  Description of Artificial Sequence: Synthetic oligonucleotide
  Sense strand starting at position 2539 of SEQ ID NO: 1560869
uagggucgucuugaggauu

SEQ ID NO: 1630426 - RNA, 19 nt, Artificial Sequence
  Description of Artificial Sequence: Synthetic oligonucleotide
  Antisense strand to SEQ ID NO: 1630425
aauccucaagacgacccua

SEQ ID NO: 1630427 - RNA, 19 nt, Artificial Sequence
  Description of Artificial Sequence: Synthetic oligonucleotide
  Sense strand starting at position 2640 of SEQ ID NO: 1560869
gauucugagagucauuggu

SEQ ID NO: 1630428 - RNA, 19 nt, Artificial Sequence
  Description of Artificial Sequence: Synthetic oligonucleotide
  Antisense strand to SEQ ID NO: 1630427
accaaugacucucagaauc

SEQ ID NO: 1630429 - RNA, 19 nt, Artificial Sequence
  Description of Artificial Sequence: Synthetic oligonucleotide
  Sense strand starting at position 2644 of SEQ ID NO: 1560869
cugagagucauugguguag

SEQ ID NO: 1630430 - RNA, 19 nt, Artificial Sequence
  Description of Artificial Sequence: Synthetic oligonucleotide
  Antisense strand to SEQ ID NO: 1630429
cuacaccaaugacucucag

SEQ ID NO: 1630431 - RNA, 19 nt, Artificial Sequence
  Description of Artificial Sequence: Synthetic oligonucleotide
  Sense strand starting at position 2664 of SEQ ID NO: 1560869
ugggaauuccagggaagcu

SEQ ID NO: 1630432 - RNA, 19 nt, Artificial Sequence
  Description of Artificial Sequence: Synthetic oligonucleotide
  Antisense strand to SEQ ID NO: 1630431
agcuucccuggaauuccca

SEQ ID NO: 1630433 - RNA, 19 nt, Artificial Sequence
  Description of Artificial Sequence: Synthetic oligonucleotide
  Sense strand starting at position 2839 of SEQ ID NO: 1560869
aaguuaauuugagaaggca

SEQ ID NO: 1630434 - RNA, 19 nt, Artificial Sequence
  Description of Artificial Sequence: Synthetic oligonucleotide
  Antisense strand to SEQ ID NO: 1630433
ugccuucucaaauuaacuu

SEQ ID NO: 1630435 - RNA, 19 nt, Artificial Sequence
  Description of Artificial Sequence: Synthetic oligonucleotide
  Sense strand starting at position 3175 of SEQ ID NO: 1560869
ggcgcauugcugucuucaa

SEQ ID NO: 1630436 - RNA, 19 nt, Artificial Sequence
  Description of Artificial Sequence: Synthetic oligonucleotide
  Antisense strand to SEQ ID NO: 1630435
uugaagacagcaaugcgcc

SEQ ID NO: 1630437 - RNA, 19 nt, Artificial Sequence
  Description of Artificial Sequence: Synthetic oligonucleotide
  Sense strand starting at position 3203 of SEQ ID NO: 1560869
agcauugcuggccaugaga

SEQ ID NO: 1630438 - RNA, 19 nt, Artificial Sequence
  Description of Artificial Sequence: Synthetic oligonucleotide
  Antisense strand to SEQ ID NO: 1630437
ucucauggccagcaaugcu

SEQ ID NO: 1630439 - RNA, 19 nt, Artificial Sequence
  Description of Artificial Sequence: Synthetic oligonucleotide
  Sense strand starting at position 3311 of SEQ ID NO: 1560869
acguauucccuuugaauag

SEQ ID NO: 1630440 - RNA, 19 nt, Artificial Sequence
  Description of Artificial Sequence: Synthetic oligonucleotide
  Antisense strand to SEQ ID NO: 1630439
cuauucaaagggaauacgu

SEQ ID NO: 1630441 - RNA, 19 nt, Artificial Sequence
  Description of Artificial Sequence: Synthetic oligonucleotide
  Sense strand starting at position 3386 of SEQ ID NO: 1560869
ccauuaaguuguccuuaua

SEQ ID NO: 1630442 - RNA, 19 nt, Artificial Sequence
  Description of Artificial Sequence: Synthetic oligonucleotide
  Antisense strand to SEQ ID NO: 1630441
uauaaggacaacuuaaugg

SEQ ID NO: 1630443 - RNA, 19 nt, Artificial Sequence
  Description of Artificial Sequence: Synthetic oligonucleotide
  Sense strand starting at position 3389 of SEQ ID NO: 1560869
uuaaguuguccuuauacuu

SEQ ID NO: 1630444 - RNA, 19 nt, Artificial Sequence
  Description of Artificial Sequence: Synthetic oligonucleotide
  Antisense strand to SEQ ID NO: 1630443
aaguauaaggacaacuuaa

SEQ ID NO: 1630445 - RNA, 19 nt, Artificial Sequence
  Description of Artificial Sequence: Synthetic oligonucleotide
  Sense strand starting at position 3464 of SEQ ID NO: 1560869
uucccuagcuuacugaaga

SEQ ID NO: 1630446 - RNA, 19 nt, Artificial Sequence
  Description of Artificial Sequence: Synthetic oligonucleotide
  Antisense strand to SEQ ID NO: 1630445
ucuucaguaagcuagggaa

SEQ ID NO: 1630447 - RNA, 19 nt, Artificial Sequence
  Description of Artificial Sequence: Synthetic oligonucleotide
  Sense strand starting at position 3540 of SEQ ID NO: 1560869
uucuaaggacucuguuuau

SEQ ID NO: 1630448 - RNA, 19 nt, Artificial Sequence
  Description of Artificial Sequence: Synthetic oligonucleotide
  Antisense strand to SEQ ID NO: 1630447
auaaacagaguccuuagaa

SEQ ID NO: 1630449 - RNA, 19 nt, Artificial Sequence
  Description of Artificial Sequence: Synthetic oligonucleotide
  Sense strand starting at position 14 of SEQ ID NO: 1560870
ggaggaaugugccuggugu

SEQ ID NO: 1630450 - RNA, 19 nt, Artificial Sequence
  Description of Artificial Sequence: Synthetic oligonucleotide
  Antisense strand to SEQ ID NO: 1630449
acaccaggcacauuccucc

SEQ ID NO: 1630451 - RNA, 19 nt, Artificial Sequence
  Description of Artificial Sequence: Synthetic oligonucleotide
  Sense strand starting at position 97 of SEQ ID NO: 1560870
agaugucacagaggugaua

SEQ ID NO: 1630452 - RNA, 19 nt, Artificial Sequence
  Description of Artificial Sequence: Synthetic oligonucleotide
  Antisense strand to SEQ ID NO: 1630451
uaucaccucugugacaucu

SEQ ID NO: 1630453 - RNA, 19 nt, Artificial Sequence
  Description of Artificial Sequence: Synthetic oligonucleotide
  Sense strand starting at position 169 of SEQ ID NO: 1560870
guggguucccagcagggaa

SEQ ID NO: 1630454 - RNA, 19 nt, Artificial Sequence
  Description of Artificial Sequence: Synthetic oligonucleotide
  Antisense strand to SEQ ID NO: 1630453
uucccugcugggaacccac

SEQ ID NO: 1630455 - RNA, 19 nt, Artificial Sequence
  Description of Artificial Sequence: Synthetic oligonucleotide
  Sense strand starting at position 713 of SEQ ID NO: 1560870
ggaacuuacgugcauguga

SEQ ID NO: 1630456 - RNA, 19 nt, Artificial Sequence
  Description of Artificial Sequence: Synthetic oligonucleotide
  Antisense strand to SEQ ID NO: 1630455
ucacaugcacguaaguucc

SEQ ID NO: 1630457 - RNA, 19 nt, Artificial Sequence
  Description of Artificial Sequence: Synthetic oligonucleotide
  Sense strand starting at position 753 of SEQ ID NO: 1560870
uugcaauuguaaucagauu

SEQ ID NO: 1630458 - RNA, 19 nt, Artificial Sequence
  Description of Artificial Sequence: Synthetic oligonucleotide
  Antisense strand to SEQ ID NO: 1630457
aaucugauuacaauugcaa

SEQ ID NO: 1630459 - RNA, 19 nt, Artificial Sequence
  Description of Artificial Sequence: Synthetic oligonucleotide
  Sense strand starting at position 768 of SEQ ID NO: 1560870
gauuuaggaucuugagaug

SEQ ID NO: 1630460 - RNA, 19 nt, Artificial Sequence
  Description of Artificial Sequence: Synthetic oligonucleotide
  Antisense strand to SEQ ID NO: 1630459
caucucaagauccuaaauc

SEQ ID NO: 1630461 - RNA, 19 nt, Artificial Sequence
  Description of Artificial Sequence: Synthetic oligonucleotide
  Sense strand starting at position 771 of SEQ ID NO: 1560870
uuaggaucuugagaugaga

SEQ ID NO: 1630462 - RNA, 19 nt, Artificial Sequence
  Description of Artificial Sequence: Synthetic oligonucleotide
  Antisense strand to SEQ ID NO: 1630461
ucucaucucaagauccuaa

SEQ ID NO: 1630463 - RNA, 19 nt, Artificial Sequence
  Description of Artificial Sequence: Synthetic oligonucleotide
  Sense strand starting at position 825 of SEQ ID NO: 1560870
ucacaacuguccucagaga

SEQ ID NO: 1630464 - RNA, 19 nt, Artificial Sequence
  Description of Artificial Sequence: Synthetic oligonucleotide
  Antisense strand to SEQ ID NO: 1630463
ucucugaggacaguuguga

SEQ ID NO: 1630465 - RNA, 19 nt, Artificial Sequence
  Description of Artificial Sequence: Synthetic oligonucleotide
  Sense strand starting at position 886 of SEQ ID NO: 1560870
gggugauguggccauaaac

SEQ ID NO: 1630466 - RNA, 19 nt, Artificial Sequence
  Description of Artificial Sequence: Synthetic oligonucleotide
  Antisense strand to SEQ ID NO: 1630465
guuuauggccacaucaccc

SEQ ID NO: 1630467 - RNA, 19 nt, Artificial Sequence
  Description of Artificial Sequence: Synthetic oligonucleotide
  Sense strand starting at position 1373 of SEQ ID NO: 1560870
cagccaagugucgaagaaa

SEQ ID NO: 1630468 - RNA, 19 nt, Artificial Sequence
  Description of Artificial Sequence: Synthetic oligonucleotide
  Antisense strand to SEQ ID NO: 1630467
uuucuucgacacuuggcug

SEQ ID NO: 1630469 - RNA, 19 nt, Artificial Sequence
  Description of Artificial Sequence: Synthetic oligonucleotide
  Sense strand starting at position 1448 of SEQ ID NO: 1560870
uggguuugagagcaguaaa

SEQ ID NO: 1630470 - RNA, 19 nt, Artificial Sequence
  Description of Artificial Sequence: Synthetic oligonucleotide
  Antisense strand to SEQ ID NO: 1630469
uuuacugcucucaaaccca

SEQ ID NO: 1630471 - RNA, 19 nt, Artificial Sequence
  Description of Artificial Sequence: Synthetic oligonucleotide
  Sense strand starting at position 1451 of SEQ ID NO: 1560870
guuugagagcaguaaagga

SEQ ID NO: 1630472 - RNA, 19 nt, Artificial Sequence
  Description of Artificial Sequence: Synthetic oligonucleotide
  Antisense strand to SEQ ID NO: 1630471
uccuuuacugcucucaaac

SEQ ID NO: 1630473 - RNA, 19 nt, Artificial Sequence
  Description of Artificial Sequence: Synthetic oligonucleotide
  Sense strand starting at position 1505 of SEQ ID NO: 1560870
aaggauuggaggugucaac

SEQ ID NO: 1630474 - RNA, 19 nt, Artificial Sequence
  Description of Artificial Sequence: Synthetic oligonucleotide
  Antisense strand to SEQ ID NO: 1630473
guugacaccuccaauccuu

SEQ ID NO: 1630475 - RNA, 19 nt, Artificial Sequence
  Description of Artificial Sequence: Synthetic oligonucleotide
  Sense strand starting at position 1612 of SEQ ID NO: 1560870
cugacugacuccucugaau

SEQ ID NO: 1630476 - RNA, 19 nt, Artificial Sequence
  Description of Artificial Sequence: Synthetic oligonucleotide
  Antisense strand to SEQ ID NO: 1630475
auucagaggagucagucag

SEQ ID NO: 1630477 - RNA, 19 nt, Artificial Sequence
  Description of Artificial Sequence: Synthetic oligonucleotide
  Sense strand starting at position 1853 of SEQ ID NO: 1560870
acugucaagucuccuaaca

SEQ ID NO: 1630478 - RNA, 19 nt, Artificial Sequence
  Description of Artificial Sequence: Synthetic oligonucleotide
  Antisense strand to SEQ ID NO: 1630477
uguuaggagacuugacagu

SEQ ID NO: 1630479 - RNA, 19 nt, Artificial Sequence
  Description of Artificial Sequence: Synthetic oligonucleotide
  Sense strand starting at position 1932 of SEQ ID NO: 1560870
guaggucuuuacuuacauu

SEQ ID NO: 1630480 - RNA, 19 nt, Artificial Sequence
  Description of Artificial Sequence: Synthetic oligonucleotide
  Antisense strand to SEQ ID NO: 1630479
aauguaaguaaagaccuac

SEQ ID NO: 1630481 - RNA, 19 nt, Artificial Sequence
  Description of Artificial Sequence: Synthetic oligonucleotide
  Sense strand starting at position 2055 of SEQ ID NO: 1560870
uguggucucagcgggagaa

SEQ ID NO: 1630482 - RNA, 19 nt, Artificial Sequence
  Description of Artificial Sequence: Synthetic oligonucleotide
  Antisense strand to SEQ ID NO: 1630481
uucucccgcugagaccaca

SEQ ID NO: 1630483 - RNA, 19 nt, Artificial Sequence
  Description of Artificial Sequence: Synthetic oligonucleotide
  Sense strand starting at position 2093 of SEQ ID NO: 1560870
ugcucagauccuuguggga

SEQ ID NO: 1630484 - RNA, 19 nt, Artificial Sequence
  Description of Artificial Sequence: Synthetic oligonucleotide
  Antisense strand to SEQ ID NO: 1630483
ucccacaaggaucugagca

SEQ ID NO: 1630485 - RNA, 19 nt, Artificial Sequence
  Description of Artificial Sequence: Synthetic oligonucleotide
  Sense strand starting at position 2185 of SEQ ID NO: 1560870
cuguauucucaggacccua

SEQ ID NO: 1630486 - RNA, 19 nt, Artificial Sequence
  Description of Artificial Sequence: Synthetic oligonucleotide
  Antisense strand to SEQ ID NO: 1630485
uaggguccugagaauacag

SEQ ID NO: 1630487 - RNA, 19 nt, Artificial Sequence
  Description of Artificial Sequence: Synthetic oligonucleotide
  Sense strand starting at position 2264 of SEQ ID NO: 1560870
gcugguaugacaugagaug

SEQ ID NO: 1630488 - RNA, 19 nt, Artificial Sequence
  Description of Artificial Sequence: Synthetic oligonucleotide
  Antisense strand to SEQ ID NO: 1630487
caucucaugucauaccagc

SEQ ID NO: 1630489 - RNA, 19 nt, Artificial Sequence
  Description of Artificial Sequence: Synthetic oligonucleotide
  Sense strand starting at position 2605 of SEQ ID NO: 1560870
ucaggucucaucugggaga

SEQ ID NO: 1630490 - RNA, 19 nt, Artificial Sequence
  Description of Artificial Sequence: Synthetic oligonucleotide
  Antisense strand to SEQ ID NO: 1630489
ucucccagaugagaccuga

SEQ ID NO: 1630491 - RNA, 19 nt, Artificial Sequence
  Description of Artificial Sequence: Synthetic oligonucleotide
  Sense strand starting at position 2750 of SEQ ID NO: 1560870
ggucacagaucccugaaca

SEQ ID NO: 1630492 - RNA, 19 nt, Artificial Sequence
  Description of Artificial Sequence: Synthetic oligonucleotide
  Antisense strand to SEQ ID NO: 1630491
uguucagggaucugugacc

SEQ ID NO: 1630493 - RNA, 19 nt, Artificial Sequence
  Description of Artificial Sequence: Synthetic oligonucleotide
  Sense strand starting at position 2751 of SEQ ID NO: 1560870
gucacagaucccugaacac

SEQ ID NO: 1630494 - RNA, 19 nt, Artificial Sequence
  Description of Artificial Sequence: Synthetic oligonucleotide
  Antisense strand to SEQ ID NO: 1630493
guguucagggaucugugac

SEQ ID NO: 1630495 - RNA, 19 nt, Artificial Sequence
  Description of Artificial Sequence: Synthetic oligonucleotide
  Sense strand starting at position 3377 of SEQ ID NO: 1560870
aagauaauuggcuaggugu

SEQ ID NO: 1630496 - RNA, 19 nt, Artificial Sequence
  Description of Artificial Sequence: Synthetic oligonucleotide
  Antisense strand to SEQ ID NO: 1630495
acaccuagccaauuaucuu

SEQ ID NO: 1630497 - RNA, 19 nt, Artificial Sequence
  Description of Artificial Sequence: Synthetic oligonucleotide
  Sense strand starting at position 3593 of SEQ ID NO: 1560870
gggaucucugaaugguuaa

SEQ ID NO: 1630498 - RNA, 19 nt, Artificial Sequence
  Description of Artificial Sequence: Synthetic oligonucleotide
  Antisense strand to SEQ ID NO: 1630497
uuaaccauucagagauccc

SEQ ID NO: 1630499 - RNA, 19 nt, Artificial Sequence
  Description of Artificial Sequence: Synthetic oligonucleotide
  Sense strand starting at position 3594 of SEQ ID NO: 1560870
ggaucucugaaugguuaag

SEQ ID NO: 1630500 - RNA, 19 nt, Artificial Sequence
  Description of Artificial Sequence: Synthetic oligonucleotide
  Antisense strand to SEQ ID NO: 1630499
cuuaaccauucagagaucc

SEQ ID NO: 1630501 - RNA, 19 nt, Artificial Sequence
  Description of Artificial Sequence: Synthetic oligonucleotide
  Sense strand starting at position 3647 of SEQ ID NO: 1560870
agaucucagcucuguggaa

SEQ ID NO: 1630502 - RNA, 19 nt, Artificial Sequence
  Description of Artificial Sequence: Synthetic oligonucleotide
  Antisense strand to SEQ ID NO: 1630501
uuccacagagcugagaucu

SEQ ID NO: 1630503 - RNA, 19 nt, Artificial Sequence
  Description of Artificial Sequence: Synthetic oligonucleotide
  Sense strand starting at position 3649 of SEQ ID NO: 1560870
aucucagcucuguggaacu

SEQ ID NO: 1630504 - RNA, 19 nt, Artificial Sequence
  Description of Artificial Sequence: Synthetic oligonucleotide
  Antisense strand to SEQ ID NO: 1630503
aguuccacagagcugagau

SEQ ID NO: 1630505 - RNA, 19 nt, Artificial Sequence
  Description of Artificial Sequence: Synthetic oligonucleotide
  Sense strand starting at position 3719 of SEQ ID NO: 1560870
ggagauuaauaauaccaac

SEQ ID NO: 1630506 - RNA, 19 nt, Artificial Sequence
  Description of Artificial Sequence: Synthetic oligonucleotide
  Antisense strand to SEQ ID NO: 1630505
guugguauuauuaaucucc

SEQ ID NO: 1630507 - RNA, 19 nt, Artificial Sequence
  Description of Artificial Sequence: Synthetic oligonucleotide
  Sense strand starting at position 3740 of SEQ ID NO: 1560870
cacauuuguugggaaguca

SEQ ID NO: 1630508 - RNA, 19 nt, Artificial Sequence
  Description of Artificial Sequence: Synthetic oligonucleotide
  Antisense strand to SEQ ID NO: 1630507
ugacuucccaacaaaugug

SEQ ID NO: 1630509 - RNA, 19 nt, Artificial Sequence
  Description of Artificial Sequence: Synthetic oligonucleotide
  Sense strand starting at position 3787 of SEQ ID NO: 1560870
acaguaagcccuugaaaca

SEQ ID NO: 1630510 - RNA, 19 nt, Artificial Sequence
  Description of Artificial Sequence: Synthetic oligonucleotide
  Antisense strand to SEQ ID NO: 1630509
uguuucaagggcuuacugu

SEQ ID NO: 1630511 - RNA, 19 nt, Artificial Sequence
  Description of Artificial Sequence: Synthetic oligonucleotide
  Sense strand starting at position 3800 of SEQ ID NO: 1560870
gaaacaugcuaguugguga

SEQ ID NO: 1630512 - RNA, 19 nt, Artificial Sequence
  Description of Artificial Sequence: Synthetic oligonucleotide
  Antisense strand to SEQ ID NO: 1630511
ucaccaacuagcauguuuc

SEQ ID NO: 1630513 - RNA, 19 nt, Artificial Sequence
  Description of Artificial Sequence: Synthetic oligonucleotide
  Sense strand starting at position 3803 of SEQ ID NO: 1560870
acaugcuaguuggugagau

SEQ ID NO: 1630514 - RNA, 19 nt, Artificial Sequence
  Description of Artificial Sequence: Synthetic oligonucleotide
  Antisense strand to SEQ ID NO: 1630513
aucucaccaacuagcaugu

SEQ ID NO: 1630515 - RNA, 19 nt, Artificial Sequence
  Description of Artificial Sequence: Synthetic oligonucleotide
  Sense strand starting at position 3829 of SEQ ID NO: 1560870
cgcccucguaucuuguaua

SEQ ID NO: 1630516 - RNA, 19 nt, Artificial Sequence
  Description of Artificial Sequence: Synthetic oligonucleotide
  Antisense strand to SEQ ID NO: 1630515
uauacaagauacgagggcg

SEQ ID NO: 1630517 - RNA, 19 nt, Artificial Sequence
  Description of Artificial Sequence: Synthetic oligonucleotide
  Sense strand starting at position 3883 of SEQ ID NO: 1560870
ugcuauguccgugucugau

SEQ ID NO: 1630518 - RNA, 19 nt, Artificial Sequence
  Description of Artificial Sequence: Synthetic oligonucleotide
  Antisense strand to SEQ ID NO: 1630517
aucagacacggacauagca

SEQ ID NO: 1630519 - RNA, 19 nt, Artificial Sequence
  Description of Artificial Sequence: Synthetic oligonucleotide
  Sense strand starting at position 3885 of SEQ ID NO: 1560870
cuauguccgugucugauuu

SEQ ID NO: 1630520 - RNA, 19 nt, Artificial Sequence
  Description of Artificial Sequence: Synthetic oligonucleotide
  Antisense strand to SEQ ID NO: 1630519
aaaucagacacggacauag

SEQ ID NO: 1630521 - RNA, 19 nt, Artificial Sequence
  Description of Artificial Sequence: Synthetic oligonucleotide
  Sense strand starting at position 3886 of SEQ ID NO: 1560870
uauguccgugucugauuua

SEQ ID NO: 1630522 - RNA, 19 nt, Artificial Sequence
  Description of Artificial Sequence: Synthetic oligonucleotide
  Antisense strand to SEQ ID NO: 1630521
uaaaucagacacggacaua

SEQ ID NO: 1630523 - RNA, 19 nt, Artificial Sequence
  Description of Artificial Sequence: Synthetic oligonucleotide
  Sense strand starting at position 3889 of SEQ ID NO: 1560870
guccgugucugauuuauuc

SEQ ID NO: 1630524 - RNA, 19 nt, Artificial Sequence
  Description of Artificial Sequence: Synthetic oligonucleotide
  Antisense strand to SEQ ID NO: 1630523
gaauaaaucagacacggac

SEQ ID NO: 1630525 - RNA, 19 nt, Artificial Sequence
  Description of Artificial Sequence: Synthetic oligonucleotide
  Sense strand starting at position 3920 of SEQ ID NO: 1560870
ggcccagaccauuguaauu

SEQ ID NO: 1630526 - RNA, 19 nt, Artificial Sequence
  Description of Artificial Sequence: Synthetic oligonucleotide
  Antisense strand to SEQ ID NO: 1630525
aauuacaauggucugggcc

SEQ ID NO: 1630527 - RNA, 19 nt, Artificial Sequence
  Description of Artificial Sequence: Synthetic oligonucleotide
  Sense strand starting at position 3925 of SEQ ID NO: 1560870
agaccauuguaauugcuca

SEQ ID NO: 1630528 - RNA, 19 nt, Artificial Sequence
  Description of Artificial Sequence: Synthetic oligonucleotide
  Antisense strand to SEQ ID NO: 1630527
ugagcaauuacaauggucu

SEQ ID NO: 1630529 - RNA, 19 nt, Artificial Sequence
  Description of Artificial Sequence: Synthetic oligonucleotide
  Sense strand starting at position 104 of SEQ ID NO: 1560871
uguaguagguccuuuggga

SEQ ID NO: 1630530 - RNA, 19 nt, Artificial Sequence
  Description of Artificial Sequence: Synthetic oligonucleotide
  Antisense strand to SEQ ID NO: 1630529
ucccaaaggaccuacuaca

SEQ ID NO: 1630531 - RNA, 19 nt, Artificial Sequence
  Description of Artificial Sequence: Synthetic oligonucleotide
  Sense strand starting at position 177 of SEQ ID NO: 1560871
cugagucuccagugaauca

SEQ ID NO: 1630532 - RNA, 19 nt, Artificial Sequence
  Description of Artificial Sequence: Synthetic oligonucleotide
  Antisense strand to SEQ ID NO: 1630531
ugauucacuggagacucag

SEQ ID NO: 1630533 - RNA, 19 nt, Artificial Sequence
  Description of Artificial Sequence: Synthetic oligonucleotide
  Sense strand starting at position 293 of SEQ ID NO: 1560871
uccugaugcccacagauau

SEQ ID NO: 1630534 - RNA, 19 nt, Artificial Sequence
  Description of Artificial Sequence: Synthetic oligonucleotide
  Antisense strand to SEQ ID NO: 1630533
auaucugugggcaucagga

SEQ ID NO: 1630535 - RNA, 19 nt, Artificial Sequence
  Description of Artificial Sequence: Synthetic oligonucleotide
  Sense strand starting at position 324 of SEQ ID NO: 1560871
uagccaggucccgacaaua

SEQ ID NO: 1630536 - RNA, 19 nt, Artificial Sequence
  Description of Artificial Sequence: Synthetic oligonucleotide
  Antisense strand to SEQ ID NO: 1630535
uauugucgggaccuggcua

SEQ ID NO: 1630537 - RNA, 19 nt, Artificial Sequence
  Description of Artificial Sequence: Synthetic oligonucleotide
  Sense strand starting at position 393 of SEQ ID NO: 1560871
gggcucugaacuugagaaa

SEQ ID NO: 1630538 - RNA, 19 nt, Artificial Sequence
  Description of Artificial Sequence: Synthetic oligonucleotide
  Antisense strand to SEQ ID NO: 1630537
uuucucaaguucagagccc

SEQ ID NO: 1630539 - RNA, 19 nt, Artificial Sequence
  Description of Artificial Sequence: Synthetic oligonucleotide
  Sense strand starting at position 396 of SEQ ID NO: 1560871
cucugaacuugagaaacaa

SEQ ID NO: 1630540 - RNA, 19 nt, Artificial Sequence
  Description of Artificial Sequence: Synthetic oligonucleotide
  Antisense strand to SEQ ID NO: 1630539
uuguuucucaaguucagag

SEQ ID NO: 1630541 - RNA, 19 nt, Artificial Sequence
  Description of Artificial Sequence: Synthetic oligonucleotide
  Sense strand starting at position 440 of SEQ ID NO: 1560871
agaaaugagugucucccua

SEQ ID NO: 1630542 - RNA, 19 nt, Artificial Sequence
  Description of Artificial Sequence: Synthetic oligonucleotide
  Antisense strand to SEQ ID NO: 1630541
uagggagacacucauuucu

SEQ ID NO: 1630543 - RNA, 19 nt, Artificial Sequence
  Description of Artificial Sequence: Synthetic oligonucleotide
  Sense strand starting at position 442 of SEQ ID NO: 1560871
aaaugagugucucccuaag

SEQ ID NO: 1630544 - RNA, 19 nt, Artificial Sequence
  Description of Artificial Sequence: Synthetic oligonucleotide
  Antisense strand to SEQ ID NO: 1630543
cuuagggagacacucauuu

SEQ ID NO: 1630545 - RNA, 19 nt, Artificial Sequence
  Description of Artificial Sequence: Synthetic oligonucleotide
  Sense strand starting at position 475 of SEQ ID NO: 1560871
gccgauuugggaugcaagu

SEQ ID NO: 1630546 - RNA, 19 nt, Artificial Sequence
  Description of Artificial Sequence: Synthetic oligonucleotide
  Antisense strand to SEQ ID NO: 1630545
acuugcaucccaaaucggc

SEQ ID NO: 1630547 - RNA, 19 nt, Artificial Sequence
  Description of Artificial Sequence: Synthetic oligonucleotide
  Sense strand starting at position 508 of SEQ ID NO: 1560871
ugggucuuauugucagaga

SEQ ID NO: 1630548 - RNA, 19 nt, Artificial Sequence
  Description of Artificial Sequence: Synthetic oligonucleotide
  Antisense strand to SEQ ID NO: 1630547
ucucugacaauaagaccca

SEQ ID NO: 1630549 - RNA, 19 nt, Artificial Sequence
  Description of Artificial Sequence: Synthetic oligonucleotide
  Sense strand starting at position 513 of SEQ ID NO: 1560871
cuuauugucagagaagggu

SEQ ID NO: 1630550 - RNA, 19 nt, Artificial Sequence
  Description of Artificial Sequence: Synthetic oligonucleotide
  Antisense strand to SEQ ID NO: 1630549
acccuucucugacaauaag

SEQ ID NO: 1630551 - RNA, 19 nt, Artificial Sequence
  Description of Artificial Sequence: Synthetic oligonucleotide
  Sense strand starting at position 522 of SEQ ID NO: 1560871
agagaagggucucuccuua

SEQ ID NO: 1630552 - RNA, 19 nt, Artificial Sequence
  Description of Artificial Sequence: Synthetic oligonucleotide
  Antisense strand to SEQ ID NO: 1630551
uaaggagagacccuucucu

SEQ ID NO: 1630553 - RNA, 19 nt, Artificial Sequence
  Description of Artificial Sequence: Synthetic oligonucleotide
  Sense strand starting at position 557 of SEQ ID NO: 1560871
gguagauuggauggcgaga

SEQ ID NO: 1630554 - RNA, 19 nt, Artificial Sequence
  Description of Artificial Sequence: Synthetic oligonucleotide
  Antisense strand to SEQ ID NO: 1630553
ucucgccauccaaucuacc

SEQ ID NO: 1630555 - RNA, 19 nt, Artificial Sequence
  Description of Artificial Sequence: Synthetic oligonucleotide
  Sense strand starting at position 654 of SEQ ID NO: 1560871
ggcuuuaucuuagcaacca

SEQ ID NO: 1630556 - RNA, 19 nt, Artificial Sequence
  Description of Artificial Sequence: Synthetic oligonucleotide
  Antisense strand to SEQ ID NO: 1630555
ugguugcuaagauaaagcc

SEQ ID NO: 1630557 - RNA, 19 nt, Artificial Sequence
  Description of Artificial Sequence: Synthetic oligonucleotide
  Sense strand starting at position 681 of SEQ ID NO: 1560871
ggagguuguuacucugguu

SEQ ID NO: 1630558 - RNA, 19 nt, Artificial Sequence
  Description of Artificial Sequence: Synthetic oligonucleotide
  Antisense strand to SEQ ID NO: 1630557
aaccagaguaacaaccucc

SEQ ID NO: 1630559 - RNA, 19 nt, Artificial Sequence
  Description of Artificial Sequence: Synthetic oligonucleotide
  Sense strand starting at position 686 of SEQ ID NO: 1560871
uuguuacucugguuuagaa

SEQ ID NO: 1630560 - RNA, 19 nt, Artificial Sequence
  Description of Artificial Sequence: Synthetic oligonucleotide
  Antisense strand to SEQ ID NO: 1630559
uucuaaaccagaguaacaa

SEQ ID NO: 1630561 - RNA, 19 nt, Artificial Sequence
  Description of Artificial Sequence: Synthetic oligonucleotide
  Sense strand starting at position 688 of SEQ ID NO: 1560871
guuacucugguuuagaauu

SEQ ID NO: 1630562 - RNA, 19 nt, Artificial Sequence
  Description of Artificial Sequence: Synthetic oligonucleotide
  Antisense strand to SEQ ID NO: 1630561
aauucuaaaccagaguaac

SEQ ID NO: 1630563 - RNA, 19 nt, Artificial Sequence
  Description of Artificial Sequence: Synthetic oligonucleotide
  Sense strand starting at position 782 of SEQ ID NO: 1560871
ccuuacuaugucuggcaga

SEQ ID NO: 1630564 - RNA, 19 nt, Artificial Sequence
  Description of Artificial Sequence: Synthetic oligonucleotide
  Antisense strand to SEQ ID NO: 1630563
ucugccagacauaguaagg

SEQ ID NO: 1630565 - RNA, 19 nt, Artificial Sequence
  Description of Artificial Sequence: Synthetic oligonucleotide
  Sense strand starting at position 813 of SEQ ID NO: 1560871
ggaucuuuguccuuaacaa

SEQ ID NO: 1630566 - RNA, 19 nt, Artificial Sequence
  Description of Artificial Sequence: Synthetic oligonucleotide
  Antisense strand to SEQ ID NO: 1630565
uuguuaaggacaaagaucc

SEQ ID NO: 1630567 - RNA, 19 nt, Artificial Sequence
  Description of Artificial Sequence: Synthetic oligonucleotide
  Sense strand starting at position 1090 of SEQ ID NO: 1560871
agagaaagagccuguuguu

SEQ ID NO: 1630568 - RNA, 19 nt, Artificial Sequence
  Description of Artificial Sequence: Synthetic oligonucleotide
  Antisense strand to SEQ ID NO: 1630567
aacaacaggcucuuucucu

SEQ ID NO: 1630569 - RNA, 19 nt, Artificial Sequence
  Description of Artificial Sequence: Synthetic oligonucleotide
  Sense strand starting at position 1543 of SEQ ID NO: 1560871
agcugcugucucucauagu

SEQ ID NO: 1630570 - RNA, 19 nt, Artificial Sequence
  Description of Artificial Sequence: Synthetic oligonucleotide
  Antisense strand to SEQ ID NO: 1630569
acuaugagagacagcagcu

SEQ ID NO: 1630571 - RNA, 19 nt, Artificial Sequence
  Description of Artificial Sequence: Synthetic oligonucleotide
  Sense strand starting at position 1549 of SEQ ID NO: 1560871
ugucucucauaguucucaa

SEQ ID NO: 1630572 - RNA, 19 nt, Artificial Sequence
  Description of Artificial Sequence: Synthetic oligonucleotide
  Antisense strand to SEQ ID NO: 1630571
uugagaacuaugagagaca

SEQ ID NO: 1630573 - RNA, 19 nt, Artificial Sequence
  Description of Artificial Sequence: Synthetic oligonucleotide
  Sense strand starting at position 1752 of SEQ ID NO: 1560871
cuuucuguuucuguccaaa

SEQ ID NO: 1630574 - RNA, 19 nt, Artificial Sequence
  Description of Artificial Sequence: Synthetic oligonucleotide
  Antisense strand to SEQ ID NO: 1630573
uuuggacagaaacagaaag

SEQ ID NO: 1630575 - RNA, 19 nt, Artificial Sequence
  Description of Artificial Sequence: Synthetic oligonucleotide
  Sense strand starting at position 1790 of SEQ ID NO: 1560871
cagggucucuuccuuaagu

SEQ ID NO: 1630576 - RNA, 19 nt, Artificial Sequence
  Description of Artificial Sequence: Synthetic oligonucleotide
  Antisense strand to SEQ ID NO: 1630575
acuuaaggaagagacccug

SEQ ID NO: 1630577 - RNA, 19 nt, Artificial Sequence
  Description of Artificial Sequence: Synthetic oligonucleotide
  Sense strand starting at position 1792 of SEQ ID NO: 1560871
gggucucuuccuuaagucu

SEQ ID NO: 1630578 - RNA, 19 nt, Artificial Sequence
  Description of Artificial Sequence: Synthetic oligonucleotide
  Antisense strand to SEQ ID NO: 1630577
agacuuaaggaagagaccc

SEQ ID NO: 1630579 - RNA, 19 nt, Artificial Sequence
  Description of Artificial Sequence: Synthetic oligonucleotide
  Sense strand starting at position 2377 of SEQ ID NO: 1560871
ggacuccugagucgugaaa

SEQ ID NO: 1630580 - RNA, 19 nt, Artificial Sequence
  Description of Artificial Sequence: Synthetic oligonucleotide
  Antisense strand to SEQ ID NO: 1630579
uuucacgacucaggagucc

SEQ ID NO: 1630581 - RNA, 19 nt, Artificial Sequence
  Description of Artificial Sequence: Synthetic oligonucleotide
  Sense strand starting at position 2519 of SEQ ID NO: 1560871
accucagauccaggugaga

SEQ ID NO: 1630582 - RNA, 19 nt, Artificial Sequence
  Description of Artificial Sequence: Synthetic oligonucleotide
  Antisense strand to SEQ ID NO: 1630581
ucucaccuggaucugaggu

SEQ ID NO: 1630583 - RNA, 19 nt, Artificial Sequence
  Description of Artificial Sequence: Synthetic oligonucleotide
  Sense strand starting at position 2521 of SEQ ID NO: 1560871
cucagauccaggugagaau

SEQ ID NO: 1630584 - RNA, 19 nt, Artificial Sequence
  Description of Artificial Sequence: Synthetic oligonucleotide
  Antisense strand to SEQ ID NO: 1630583
auucucaccuggaucugag

SEQ ID NO: 1630585 - RNA, 19 nt, Artificial Sequence
  Description of Artificial Sequence: Synthetic oligonucleotide
  Sense strand starting at position 2530 of SEQ ID NO: 1560871
aggugagaauucucuucua

SEQ ID NO: 1630586 - RNA, 19 nt, Artificial Sequence
  Description of Artificial Sequence: Synthetic oligonucleotide
  Antisense strand to SEQ ID NO: 1630585
uagaagagaauucucaccu

SEQ ID NO: 1630587 - RNA, 19 nt, Artificial Sequence
  Description of Artificial Sequence: Synthetic oligonucleotide
  Sense strand starting at position 2533 of SEQ ID NO: 1560871
ugagaauucucuucuagac

SEQ ID NO: 1630588 - RNA, 19 nt, Artificial Sequence
  Description of Artificial Sequence: Synthetic oligonucleotide
  Antisense strand to SEQ ID NO: 1630587
gucuagaagagaauucuca

SEQ ID NO: 1630589 - RNA, 19 nt, Artificial Sequence
  Description of Artificial Sequence: Synthetic oligonucleotide
  Sense strand starting at position 2574 of SEQ ID NO: 1560871
gagacaugauuccuuggua

SEQ ID NO: 1630590 - RNA, 19 nt, Artificial Sequence
  Description of Artificial Sequence: Synthetic oligonucleotide
  Antisense strand to SEQ ID NO: 1630589
uaccaaggaaucaugucuc

SEQ ID NO: 1630591 - RNA, 19 nt, Artificial Sequence
  Description of Artificial Sequence: Synthetic oligonucleotide
  Sense strand starting at position 2575 of SEQ ID NO: 1560871
agacaugauuccuugguau

SEQ ID NO: 1630592 - RNA, 19 nt, Artificial Sequence
  Description of Artificial Sequence: Synthetic oligonucleotide
  Antisense strand to SEQ ID NO: 1630591
auaccaaggaaucaugucu

SEQ ID NO: 1630593 - RNA, 19 nt, Artificial Sequence
  Description of Artificial Sequence: Synthetic oligonucleotide
  Sense strand starting at position 2577 of SEQ ID NO: 1560871
acaugauuccuugguauau

SEQ ID NO: 1630594 - RNA, 19 nt, Artificial Sequence
  Description of Artificial Sequence: Synthetic oligonucleotide
  Antisense strand to SEQ ID NO: 1630593
auauaccaaggaaucaugu

SEQ ID NO: 1630595 - RNA, 19 nt, Artificial Sequence
  Description of Artificial Sequence: Synthetic oligonucleotide
  Sense strand starting at position 2579 of SEQ ID NO: 1560871
augauuccuugguauauuu

SEQ ID NO: 1630596 - RNA, 19 nt, Artificial Sequence
  Description of Artificial Sequence: Synthetic oligonucleotide
  Antisense strand to SEQ ID NO: 1630595
aaauauaccaaggaaucau

SEQ ID NO: 1630597 - RNA, 19 nt, Artificial Sequence
  Description of Artificial Sequence: Synthetic oligonucleotide
  Sense strand starting at position 2789 of SEQ ID NO: 1560871
gccugugaccgggaaggaa

SEQ ID NO: 1630598 - RNA, 19 nt, Artificial Sequence
  Description of Artificial Sequence: Synthetic oligonucleotide
  Antisense strand to SEQ ID NO: 1630597
uuccuucccggucacaggc

SEQ ID NO: 1630599 - RNA, 19 nt, Artificial Sequence
  Description of Artificial Sequence: Synthetic oligonucleotide
  Sense strand starting at position 2798 of SEQ ID NO: 1560871
cgggaaggaaucugagcuu

SEQ ID NO: 1630600 - RNA, 19 nt, Artificial Sequence
  Description of Artificial Sequence: Synthetic oligonucleotide
  Antisense strand to SEQ ID NO: 1630599
aagcucagauuccuucccg

SEQ ID NO: 1630601 - RNA, 19 nt, Artificial Sequence
  Description of Artificial Sequence: Synthetic oligonucleotide
  Sense strand starting at position 3548 of SEQ ID NO: 1560871
agcaaagugccugaucuca

SEQ ID NO: 1630602 - RNA, 19 nt, Artificial Sequence
  Description of Artificial Sequence: Synthetic oligonucleotide
  Antisense strand to SEQ ID NO: 1630601
ugagaucaggcacuuugcu

SEQ ID NO: 1630603 - RNA, 19 nt, Artificial Sequence
  Description of Artificial Sequence: Synthetic oligonucleotide
  Sense strand starting at position 3561 of SEQ ID NO: 1560871
aucucauagugcuuacauc

SEQ ID NO: 1630604 - RNA, 19 nt, Artificial Sequence
  Description of Artificial Sequence: Synthetic oligonucleotide
  Antisense strand to SEQ ID NO: 1630603
gauguaagcacuaugagau

SEQ ID NO: 1630605 - RNA, 19 nt, Artificial Sequence
  Description of Artificial Sequence: Synthetic oligonucleotide
  Sense strand starting at position 3614 of SEQ ID NO: 1560871
gugacuaucuuggucaagu

SEQ ID NO: 1630606 - RNA, 19 nt, Artificial Sequence
  Description of Artificial Sequence: Synthetic oligonucleotide
  Antisense strand to SEQ ID NO: 1630605
acuugaccaagauagucac

SEQ ID NO: 1630607 - RNA, 19 nt, Artificial Sequence
  Description of Artificial Sequence: Synthetic oligonucleotide
  Sense strand starting at position 3615 of SEQ ID NO: 1560871
ugacuaucuuggucaagug

SEQ ID NO: 1630608 - RNA, 19 nt, Artificial Sequence
  Description of Artificial Sequence: Synthetic oligonucleotide
  Antisense strand to SEQ ID NO: 1630607
cacuugaccaagauaguca

SEQ ID NO: 1630609 - RNA, 19 nt, Artificial Sequence
  Description of Artificial Sequence: Synthetic oligonucleotide
  Sense strand starting at position 30 of SEQ ID NO: 1560872
gacacugugcgagguuaca

SEQ ID NO: 1630610 - RNA, 19 nt, Artificial Sequence
  Description of Artificial Sequence: Synthetic oligonucleotide
  Antisense strand to SEQ ID NO: 1630609
uguaaccucgcacaguguc

SEQ ID NO: 1630611 - RNA, 19 nt, Artificial Sequence
  Description of Artificial Sequence: Synthetic oligonucleotide
  Sense strand starting at position 81 of SEQ ID NO: 1560872
gcacacuucuugccaguga

SEQ ID NO: 1630612 - RNA, 19 nt, Artificial Sequence
  Description of Artificial Sequence: Synthetic oligonucleotide
  Antisense strand to SEQ ID NO: 1630611
ucacuggcaagaagugugc

SEQ ID NO: 1630613 - RNA, 19 nt, Artificial Sequence
  Description of Artificial Sequence: Synthetic oligonucleotide
  Sense strand starting at position 139 of SEQ ID NO: 1560872
ugcuaaacacugugaagaa

SEQ ID NO: 1630614 - RNA, 19 nt, Artificial Sequence
  Description of Artificial Sequence: Synthetic oligonucleotide
  Antisense strand to SEQ ID NO: 1630613
uucuucacaguguuuagca

SEQ ID NO: 1630615 - RNA, 19 nt, Artificial Sequence
  Description of Artificial Sequence: Synthetic oligonucleotide
  Sense strand starting at position 140 of SEQ ID NO: 1560872
gcuaaacacugugaagaaa

SEQ ID NO: 1630616 - RNA, 19 nt, Artificial Sequence
  Description of Artificial Sequence: Synthetic oligonucleotide
  Antisense strand to SEQ ID NO: 1630615
uuucuucacaguguuuagc

SEQ ID NO: 1630617 - RNA, 19 nt, Artificial Sequence
  Description of Artificial Sequence: Synthetic oligonucleotide
  Sense strand starting at position 246 of SEQ ID NO: 1560872
ccugaagucagcugugcaa

SEQ ID NO: 1630618 - RNA, 19 nt, Artificial Sequence
  Description of Artificial Sequence: Synthetic oligonucleotide
  Antisense strand to SEQ ID NO: 1630617
uugcacagcugacuucagg

SEQ ID NO: 1630619 - RNA, 19 nt, Artificial Sequence
  Description of Artificial Sequence: Synthetic oligonucleotide
  Sense strand starting at position 305 of SEQ ID NO: 1560872
gguggaaugggugaaguca

SEQ ID NO: 1630620 - RNA, 19 nt, Artificial Sequence
  Description of Artificial Sequence: Synthetic oligonucleotide
  Antisense strand to SEQ ID NO: 1630619
ugacuucacccauuccacc

SEQ ID NO: 1630621 - RNA, 19 nt, Artificial Sequence
  Description of Artificial Sequence: Synthetic oligonucleotide
  Sense strand starting at position 428 of SEQ ID NO: 1560872
cuccaugugcauugagacu

SEQ ID NO: 1630622 - RNA, 19 nt, Artificial Sequence
  Description of Artificial Sequence: Synthetic oligonucleotide
  Antisense strand to SEQ ID NO: 1630621
agucucaaugcacauggag

SEQ ID NO: 1630623 - RNA, 19 nt, Artificial Sequence
  Description of Artificial Sequence: Synthetic oligonucleotide
  Sense strand starting at position 498 of SEQ ID NO: 1560872
ucuguccagcccugugauu

SEQ ID NO: 1630624 - RNA, 19 nt, Artificial Sequence
  Description of Artificial Sequence: Synthetic oligonucleotide
  Antisense strand to SEQ ID NO: 1630623
aaucacagggcuggacaga

SEQ ID NO: 1630625 - RNA, 19 nt, Artificial Sequence
  Description of Artificial Sequence: Synthetic oligonucleotide
  Sense strand starting at position 611 of SEQ ID NO: 1560872
gcacaaaguuaagcauauu

SEQ ID NO: 1630626 - RNA, 19 nt, Artificial Sequence
  Description of Artificial Sequence: Synthetic oligonucleotide
  Antisense strand to SEQ ID NO: 1630625
aauaugcuuaacuuugugc

SEQ ID NO: 1630627 - RNA, 19 nt, Artificial Sequence
  Description of Artificial Sequence: Synthetic oligonucleotide
  Sense strand starting at position 711 of SEQ ID NO: 1560872
ccugcugagugaucaggaa

SEQ ID NO: 1630628 - RNA, 19 nt, Artificial Sequence
  Description of Artificial Sequence: Synthetic oligonucleotide
  Antisense strand to SEQ ID NO: 1630627
uuccugaucacucagcagg

SEQ ID NO: 1630629 - RNA, 19 nt, Artificial Sequence
  Description of Artificial Sequence: Synthetic oligonucleotide
  Sense strand starting at position 743 of SEQ ID NO: 1560872
auaaccaugagcuguggaa

SEQ ID NO: 1630630 - RNA, 19 nt, Artificial Sequence
  Description of Artificial Sequence: Synthetic oligonucleotide
  Antisense strand to SEQ ID NO: 1630629
uuccacagcucaugguuau

SEQ ID NO: 1630631 - RNA, 19 nt, Artificial Sequence
  Description of Artificial Sequence: Synthetic oligonucleotide
  Sense strand starting at position 745 of SEQ ID NO: 1560872
aaccaugagcuguggaaag

SEQ ID NO: 1630632 - RNA, 19 nt, Artificial Sequence
  Description of Artificial Sequence: Synthetic oligonucleotide
  Antisense strand to SEQ ID NO: 1630631
cuuuccacagcucaugguu

SEQ ID NO: 1630633 - RNA, 19 nt, Artificial Sequence
  Description of Artificial Sequence: Synthetic oligonucleotide
  Sense strand starting at position 747 of SEQ ID NO: 1560872
ccaugagcuguggaaagcu

SEQ ID NO: 1630634 - RNA, 19 nt, Artificial Sequence
  Description of Artificial Sequence: Synthetic oligonucleotide
  Antisense strand to SEQ ID NO: 1630633
agcuuuccacagcucaugg

SEQ ID NO: 1630635 - RNA, 19 nt, Artificial Sequence
  Description of Artificial Sequence: Synthetic oligonucleotide
  Sense strand starting at position 1021 of SEQ ID NO: 1560872
gccgaagucagagagucau

SEQ ID NO: 1630636 - RNA, 19 nt, Artificial Sequence
  Description of Artificial Sequence: Synthetic oligonucleotide
  Antisense strand to SEQ ID NO: 1630635
augacucucugacuucggc

SEQ ID NO: 1630637 - RNA, 19 nt, Artificial Sequence
  Description of Artificial Sequence: Synthetic oligonucleotide
  Sense strand starting at position 1032 of SEQ ID NO: 1560872
agagucaucucagcucaca

SEQ ID NO: 1630638 - RNA, 19 nt, Artificial Sequence
  Description of Artificial Sequence: Synthetic oligonucleotide
  Antisense strand to SEQ ID NO: 1630637
ugugagcugagaugacucu

SEQ ID NO: 1630639 - RNA, 19 nt, Artificial Sequence
  Description of Artificial Sequence: Synthetic oligonucleotide
  Sense strand starting at position 1083 of SEQ ID NO: 1560872
ggacgaucccagcgcauua

SEQ ID NO: 1630640 - RNA, 19 nt, Artificial Sequence
  Description of Artificial Sequence: Synthetic oligonucleotide
  Antisense strand to SEQ ID NO: 1630639
uaaugcgcugggaucgucc

SEQ ID NO: 1630641 - RNA, 19 nt, Artificial Sequence
  Description of Artificial Sequence: Synthetic oligonucleotide
  Sense strand starting at position 1135 of SEQ ID NO: 1560872
ccucucuggccaggagaua

SEQ ID NO: 1630642 - RNA, 19 nt, Artificial Sequence
  Description of Artificial Sequence: Synthetic oligonucleotide
  Antisense strand to SEQ ID NO: 1630641
uaucuccuggccagagagg

SEQ ID NO: 1630643 - RNA, 19 nt, Artificial Sequence
  Description of Artificial Sequence: Synthetic oligonucleotide
  Sense strand starting at position 1191 of SEQ ID NO: 1560872
ggcugcagagaucaaguuu

SEQ ID NO: 1630644 - RNA, 19 nt, Artificial Sequence
  Description of Artificial Sequence: Synthetic oligonucleotide
  Antisense strand to SEQ ID NO: 1630643
aaacuugaucucugcagcc

SEQ ID NO: 1630645 - RNA, 19 nt, Artificial Sequence
  Description of Artificial Sequence: Synthetic oligonucleotide
  Sense strand starting at position 1346 of SEQ ID NO: 1560872
auaguuuccucucugagau

SEQ ID NO: 1630646 - RNA, 19 nt, Artificial Sequence
  Description of Artificial Sequence: Synthetic oligonucleotide
  Antisense strand to SEQ ID NO: 1630645
aucucagagaggaaacuau

SEQ ID NO: 1630647 - RNA, 19 nt, Artificial Sequence
  Description of Artificial Sequence: Synthetic oligonucleotide
  Sense strand starting at position 1347 of SEQ ID NO: 1560872
uaguuuccucucugagaug

SEQ ID NO: 1630648 - RNA, 19 nt, Artificial Sequence
  Description of Artificial Sequence: Synthetic oligonucleotide
  Antisense strand to SEQ ID NO: 1630647
caucucagagaggaaacua

SEQ ID NO: 1630649 - RNA, 19 nt, Artificial Sequence
  Description of Artificial Sequence: Synthetic oligonucleotide
  Sense strand starting at position 1393 of SEQ ID NO: 1560872
ggcagcucccaccaagaau

SEQ ID NO: 1630650 - RNA, 19 nt, Artificial Sequence
  Description of Artificial Sequence: Synthetic oligonucleotide
  Antisense strand to SEQ ID NO: 1630649
auucuuggugggagcugcc

SEQ ID NO: 1630651 - RNA, 19 nt, Artificial Sequence
  Description of Artificial Sequence: Synthetic oligonucleotide
  Sense strand starting at position 2352 of SEQ ID NO: 1560872
acccucagcggucaauaau

SEQ ID NO: 1630652 - RNA, 19 nt, Artificial Sequence
  Description of Artificial Sequence: Synthetic oligonucleotide
  Antisense strand to SEQ ID NO: 1630651
auuauugaccgcugagggu

SEQ ID NO: 1630653 - RNA, 19 nt, Artificial Sequence
  Description of Artificial Sequence: Synthetic oligonucleotide
  Sense strand starting at position 2358 of SEQ ID NO: 1560872
agcggucaauaaucguaau

SEQ ID NO: 1630654 - RNA, 19 nt, Artificial Sequence
  Description of Artificial Sequence: Synthetic oligonucleotide
  Antisense strand to SEQ ID NO: 1630653
auuacgauuauugaccgcu

SEQ ID NO: 1630655 - RNA, 19 nt, Artificial Sequence
  Description of Artificial Sequence: Synthetic oligonucleotide
  Sense strand starting at position 2359 of SEQ ID NO: 1560872
gcggucaauaaucguaaua

SEQ ID NO: 1630656 - RNA, 19 nt, Artificial Sequence
  Description of Artificial Sequence: Synthetic oligonucleotide
  Antisense strand to SEQ ID NO: 1630655
uauuacgauuauugaccgc

SEQ ID NO: 1630657 - RNA, 19 nt, Artificial Sequence
  Description of Artificial Sequence: Synthetic oligonucleotide
  Sense strand starting at position 2361 of SEQ ID NO: 1560872
ggucaauaaucguaauaug

SEQ ID NO: 1630658 - RNA, 19 nt, Artificial Sequence
  Description of Artificial Sequence: Synthetic oligonucleotide
  Antisense strand to SEQ ID NO: 1630657
cauauuacgauuauugacc

SEQ ID NO: 1630659 - RNA, 19 nt, Artificial Sequence
  Description of Artificial Sequence: Synthetic oligonucleotide
  Sense strand starting at position 2636 of SEQ ID NO: 1560872
ggauuucaguagugagcca

SEQ ID NO: 1630660 - RNA, 19 nt, Artificial Sequence
  Description of Artificial Sequence: Synthetic oligonucleotide
  Antisense strand to SEQ ID NO: 1630659
uggcucacuacugaaaucc

SEQ ID NO: 1630661 - RNA, 19 nt, Artificial Sequence
  Description of Artificial Sequence: Synthetic oligonucleotide
  Sense strand starting at position 2815 of SEQ ID NO: 1560872
aggaaauucccaggccuca

SEQ ID NO: 1630662 - RNA, 19 nt, Artificial Sequence
  Description of Artificial Sequence: Synthetic oligonucleotide
  Antisense strand to SEQ ID NO: 1630661
ugaggccugggaauuuccu

SEQ ID NO: 1630663 - RNA, 19 nt, Artificial Sequence
  Description of Artificial Sequence: Synthetic oligonucleotide
  Sense strand starting at position 3021 of SEQ ID NO: 1560872
agucacccguguuuguaau

SEQ ID NO: 1630664 - RNA, 19 nt, Artificial Sequence
  Description of Artificial Sequence: Synthetic oligonucleotide
  Antisense strand to SEQ ID NO: 1630663
auuacaaacacgggugacu

SEQ ID NO: 1630665 - RNA, 19 nt, Artificial Sequence
  Description of Artificial Sequence: Synthetic oligonucleotide
  Sense strand starting at position 3022 of SEQ ID NO: 1560872
gucacccguguuuguaauu

SEQ ID NO: 1630666 - RNA, 19 nt, Artificial Sequence
  Description of Artificial Sequence: Synthetic oligonucleotide
  Antisense strand to SEQ ID NO: 1630665
aauuacaaacacgggugac

SEQ ID NO: 1630667 - RNA, 19 nt, Artificial Sequence
  Description of Artificial Sequence: Synthetic oligonucleotide
  Sense strand starting at position 3115 of SEQ ID NO: 1560872
gcuucuguggaaugcucau

SEQ ID NO: 1630668 - RNA, 19 nt, Artificial Sequence
  Description of Artificial Sequence: Synthetic oligonucleotide
  Antisense strand to SEQ ID NO: 1630667
augagcauuccacagaagc

SEQ ID NO: 1630669 - RNA, 19 nt, Artificial Sequence
  Description of Artificial Sequence: Synthetic oligonucleotide
  Sense strand starting at position 3121 of SEQ ID NO: 1560872
guggaaugcucauaaacaa

SEQ ID NO: 1630670 - RNA, 19 nt, Artificial Sequence
  Description of Artificial Sequence: Synthetic oligonucleotide
  Antisense strand to SEQ ID NO: 1630669
uuguuuaugagcauuccac

SEQ ID NO: 1630671 - RNA, 19 nt, Artificial Sequence
  Description of Artificial Sequence: Synthetic oligonucleotide
  Sense strand starting at position 3189 of SEQ ID NO: 1560872
gacaguaauuucuucucgu

SEQ ID NO: 1630672 - RNA, 19 nt, Artificial Sequence
  Description of Artificial Sequence: Synthetic oligonucleotide
  Antisense strand to SEQ ID NO: 1630671
acgagaagaaauuacuguc

SEQ ID NO: 1630673 - RNA, 19 nt, Artificial Sequence
  Description of Artificial Sequence: Synthetic oligonucleotide
  Sense strand starting at position 3190 of SEQ ID NO: 1560872
acaguaauuucuucucgug

SEQ ID NO: 1630674 - RNA, 19 nt, Artificial Sequence
  Description of Artificial Sequence: Synthetic oligonucleotide
  Antisense strand to SEQ ID NO: 1630673
cacgagaagaaauuacugu

SEQ ID NO: 1630675 - RNA, 19 nt, Artificial Sequence
  Description of Artificial Sequence: Synthetic oligonucleotide
  Sense strand starting at position 3192 of SEQ ID NO: 1560872
aguaauuucuucucguguu

SEQ ID NO: 1630676 - RNA, 19 nt, Artificial Sequence
  Description of Artificial Sequence: Synthetic oligonucleotide
  Antisense strand to SEQ ID NO: 1630675
aacacgagaagaaauuacu

SEQ ID NO: 1630677 - RNA, 19 nt, Artificial Sequence
  Description of Artificial Sequence: Synthetic oligonucleotide
  Sense strand starting at position 3285 of SEQ ID NO: 1560872
cccuaccugucacauagau

SEQ ID NO: 1630678 - RNA, 19 nt, Artificial Sequence
  Description of Artificial Sequence: Synthetic oligonucleotide
  Antisense strand to SEQ ID NO: 1630677
aucuaugugacagguaggg

SEQ ID NO: 1630679 - RNA, 19 nt, Artificial Sequence
  Description of Artificial Sequence: Synthetic oligonucleotide
  Sense strand starting at position 3739 of SEQ ID NO: 1560872
cgaauaaugucuguuugcu

SEQ ID NO: 1630680 - RNA, 19 nt, Artificial Sequence
  Description of Artificial Sequence: Synthetic oligonucleotide
  Antisense strand to SEQ ID NO: 1630679
agcaaacagacauuauucg

SEQ ID NO: 1630681 - RNA, 19 nt, Artificial Sequence
  Description of Artificial Sequence: Synthetic oligonucleotide
  Sense strand starting at position 3782 of SEQ ID NO: 1560872
aaugcauugcugugaacau

SEQ ID NO: 1630682 - RNA, 19 nt, Artificial Sequence
  Description of Artificial Sequence: Synthetic oligonucleotide
  Antisense strand to SEQ ID NO: 1630681
auguucacagcaaugcauu

SEQ ID NO: 1630683 - RNA, 19 nt, Artificial Sequence
  Description of Artificial Sequence: Synthetic oligonucleotide
  Sense strand starting at position 3959 of SEQ ID NO: 1560872
uuugcaccuccagaugaau

SEQ ID NO: 1630684 - RNA, 19 nt, Artificial Sequence
  Description of Artificial Sequence: Synthetic oligonucleotide
  Antisense strand to SEQ ID NO: 1630683
auucaucuggaggugcaaa

SEQ ID NO: 1630685 - RNA, 19 nt, Artificial Sequence
  Description of Artificial Sequence: Synthetic oligonucleotide
  Sense strand starting at position 3973 of SEQ ID NO: 1560872
ugaauauacguuuggguuu

SEQ ID NO: 1630686 - RNA, 19 nt, Artificial Sequence
  Description of Artificial Sequence: Synthetic oligonucleotide
  Antisense strand to SEQ ID NO: 1630685
aaacccaaacguauauuca

SEQ ID NO: 1630687 - RNA, 19 nt, Artificial Sequence
  Description of Artificial Sequence: Synthetic oligonucleotide
  Sense strand starting at position 3979 of SEQ ID NO: 1560872
uacguuuggguuuacaagu

SEQ ID NO: 1630688 - RNA, 19 nt, Artificial Sequence
  Description of Artificial Sequence: Synthetic oligonucleotide
  Antisense strand to SEQ ID NO: 1630687
acuuguaaacccaaacgua

SEQ ID NO: 1630689 - RNA, 19 nt, Artificial Sequence
  Description of Artificial Sequence: Synthetic oligonucleotide
  Sense strand starting at position 334 of SEQ ID NO: 1560873
ccaugaaucagcuagguag

SEQ ID NO: 1630690 - RNA, 19 nt, Artificial Sequence
  Description of Artificial Sequence: Synthetic oligonucleotide
  Antisense strand to SEQ ID NO: 1630689
cuaccuagcugauucaugg

SEQ ID NO: 1630691 - RNA, 19 nt, Artificial Sequence
  Description of Artificial Sequence: Synthetic oligonucleotide
  Sense strand starting at position 337 of SEQ ID NO: 1560873
ugaaucagcuagguagaca

SEQ ID NO: 1630692 - RNA, 19 nt, Artificial Sequence
  Description of Artificial Sequence: Synthetic oligonucleotide
  Antisense strand to SEQ ID NO: 1630691
ugucuaccuagcugauuca

SEQ ID NO: 1630693 - RNA, 19 nt, Artificial Sequence
  Description of Artificial Sequence: Synthetic oligonucleotide
  Sense strand starting at position 363 of SEQ ID NO: 1560873
auuugucuaucugacugua

SEQ ID NO: 1630694 - RNA, 19 nt, Artificial Sequence
  Description of Artificial Sequence: Synthetic oligonucleotide
  Antisense strand to SEQ ID NO: 1630693
uacagucagauagacaaau

SEQ ID NO: 1630695 - RNA, 19 nt, Artificial Sequence
  Description of Artificial Sequence: Synthetic oligonucleotide
  Sense strand starting at position 365 of SEQ ID NO: 1560873
uugucuaucugacuguauu

SEQ ID NO: 1630696 - RNA, 19 nt, Artificial Sequence
  Description of Artificial Sequence: Synthetic oligonucleotide
  Antisense strand to SEQ ID NO: 1630695
aauacagucagauagacaa

SEQ ID NO: 1630697 - RNA, 19 nt, Artificial Sequence
  Description of Artificial Sequence: Synthetic oligonucleotide
  Sense strand starting at position 366 of SEQ ID NO: 1560873
ugucuaucugacuguauua

SEQ ID NO: 1630698 - RNA, 19 nt, Artificial Sequence
  Description of Artificial Sequence: Synthetic oligonucleotide
  Antisense strand to SEQ ID NO: 1630697
uaauacagucagauagaca

SEQ ID NO: 1630699 - RNA, 19 nt, Artificial Sequence
  Description of Artificial Sequence: Synthetic oligonucleotide
  Sense strand starting at position 380 of SEQ ID NO: 1560873
uauuacucccgugagugua

SEQ ID NO: 1630700 - RNA, 19 nt, Artificial Sequence
  Description of Artificial Sequence: Synthetic oligonucleotide
  Antisense strand to SEQ ID NO: 1630699
uacacucacgggaguaaua

SEQ ID NO: 1630701 - RNA, 19 nt, Artificial Sequence
  Description of Artificial Sequence: Synthetic oligonucleotide
  Sense strand starting at position 595 of SEQ ID NO: 1560873
cuguuccuugcauguagaa

SEQ ID NO: 1630702 - RNA, 19 nt, Artificial Sequence
  Description of Artificial Sequence: Synthetic oligonucleotide
  Antisense strand to SEQ ID NO: 1630701
uucuacaugcaaggaacag

SEQ ID NO: 1630703 - RNA, 19 nt, Artificial Sequence
  Description of Artificial Sequence: Synthetic oligonucleotide
  Sense strand starting at position 608 of SEQ ID NO: 1560873
guagaauacucuuccuugu

SEQ ID NO: 1630704 - RNA, 19 nt, Artificial Sequence
  Description of Artificial Sequence: Synthetic oligonucleotide
  Antisense strand to SEQ ID NO: 1630703
acaaggaagaguauucuac

SEQ ID NO: 1630705 - RNA, 19 nt, Artificial Sequence
  Description of Artificial Sequence: Synthetic oligonucleotide
  Sense strand starting at position 1038 of SEQ ID NO: 1560873
agcagaguccugcagaaag

SEQ ID NO: 1630706 - RNA, 19 nt, Artificial Sequence
  Description of Artificial Sequence: Synthetic oligonucleotide
  Antisense strand to SEQ ID NO: 1630705
cuuucugcaggacucugcu

SEQ ID NO: 1630707 - RNA, 19 nt, Artificial Sequence
  Description of Artificial Sequence: Synthetic oligonucleotide
  Sense strand starting at position 1123 of SEQ ID NO: 1560873
gaauuaggagcguggugua

SEQ ID NO: 1630708 - RNA, 19 nt, Artificial Sequence
  Description of Artificial Sequence: Synthetic oligonucleotide
  Antisense strand to SEQ ID NO: 1630707
uacaccacgcuccuaauuc

SEQ ID NO: 1630709 - RNA, 19 nt, Artificial Sequence
  Description of Artificial Sequence: Synthetic oligonucleotide
  Sense strand starting at position 2106 of SEQ ID NO: 1560873
cuuagaaguccggaucuca

SEQ ID NO: 1630710 - RNA, 19 nt, Artificial Sequence
  Description of Artificial Sequence: Synthetic oligonucleotide
  Antisense strand to SEQ ID NO: 1630709
ugagauccggacuucuaag

SEQ ID NO: 1630711 - RNA, 19 nt, Artificial Sequence
  Description of Artificial Sequence: Synthetic oligonucleotide
  Sense strand starting at position 2337 of SEQ ID NO: 1560873
caggaugcggugcagaaau

SEQ ID NO: 1630712 - RNA, 19 nt, Artificial Sequence
  Description of Artificial Sequence: Synthetic oligonucleotide
  Antisense strand to SEQ ID NO: 1630711
auuucugcaccgcauccug

SEQ ID NO: 1630713 - RNA, 19 nt, Artificial Sequence
  Description of Artificial Sequence: Synthetic oligonucleotide
  Sense strand starting at position 2795 of SEQ ID NO: 1560873
gaggucacguggcuaugaa

SEQ ID NO: 1630714 - RNA, 19 nt, Artificial Sequence
  Description of Artificial Sequence: Synthetic oligonucleotide
  Antisense strand to SEQ ID NO: 1630713
uucauagccacgugaccuc

SEQ ID NO: 1630715 - RNA, 19 nt, Artificial Sequence
  Description of Artificial Sequence: Synthetic oligonucleotide
  Sense strand starting at position 2877 of SEQ ID NO: 1560873
gcgguacuuauaugacagu

SEQ ID NO: 1630716 - RNA, 19 nt, Artificial Sequence
  Description of Artificial Sequence: Synthetic oligonucleotide
  Antisense strand to SEQ ID NO: 1630715
acugucauauaaguaccgc

SEQ ID NO: 1630717 - RNA, 19 nt, Artificial Sequence
  Description of Artificial Sequence: Synthetic oligonucleotide
  Sense strand starting at position 2902 of SEQ ID NO: 1560873
ggagcaaugccgagguugu

SEQ ID NO: 1630718 - RNA, 19 nt, Artificial Sequence
  Description of Artificial Sequence: Synthetic oligonucleotide
  Antisense strand to SEQ ID NO: 1630717
acaaccucggcauugcucc

SEQ ID NO: 1630719 - RNA, 19 nt, Artificial Sequence
  Description of Artificial Sequence: Synthetic oligonucleotide
  Sense strand starting at position 2911 of SEQ ID NO: 1560873
ccgagguugugaguucgau

SEQ ID NO: 1630720 - RNA, 19 nt, Artificial Sequence
  Description of Artificial Sequence: Synthetic oligonucleotide
  Antisense strand to SEQ ID NO: 1630719
aucgaacucacaaccucgg

SEQ ID NO: 1630721 - RNA, 19 nt, Artificial Sequence
  Description of Artificial Sequence: Synthetic oligonucleotide
  Sense strand starting at position 3016 of SEQ ID NO: 1560873
gaaugaacguuucuaucuu

SEQ ID NO: 1630722 - RNA, 19 nt, Artificial Sequence
  Description of Artificial Sequence: Synthetic oligonucleotide
  Antisense strand to SEQ ID NO: 1630721
aagauagaaacguucauuc

SEQ ID NO: 1630723 - RNA, 19 nt, Artificial Sequence
  Description of Artificial Sequence: Synthetic oligonucleotide
  Sense strand starting at position 3035 of SEQ ID NO: 1560873
uugaauuauugggcucaaa

SEQ ID NO: 1630724 - RNA, 19 nt, Artificial Sequence
  Description of Artificial Sequence: Synthetic oligonucleotide
  Antisense strand to SEQ ID NO: 1630723
uuugagcccaauaauucaa

SEQ ID NO: 1630725 - RNA, 19 nt, Artificial Sequence
  Description of Artificial Sequence: Synthetic oligonucleotide
  Sense strand starting at position 3078 of SEQ ID NO: 1560873
uccuuuggguguucuguau

SEQ ID NO: 1630726 - RNA, 19 nt, Artificial Sequence
  Description of Artificial Sequence: Synthetic oligonucleotide
  Antisense strand to SEQ ID NO: 1630725
auacagaacacccaaagga

SEQ ID NO: 1630727 - RNA, 19 nt, Artificial Sequence
  Description of Artificial Sequence: Synthetic oligonucleotide
  Sense strand starting at position 3082 of SEQ ID NO: 1560873
uuggguguucuguauugua

SEQ ID NO: 1630728 - RNA, 19 nt, Artificial Sequence
  Description of Artificial Sequence: Synthetic oligonucleotide
  Antisense strand to SEQ ID NO: 1630727
uacaauacagaacacccaa

SEQ ID NO: 1630729 - RNA, 19 nt, Artificial Sequence
  Description of Artificial Sequence: Synthetic oligonucleotide
  Sense strand starting at position 3138 of SEQ ID NO: 1560873
uaucgucucuuauuagaug

SEQ ID NO: 1630730 - RNA, 19 nt, Artificial Sequence
  Description of Artificial Sequence: Synthetic oligonucleotide
  Antisense strand to SEQ ID NO: 1630729
caucuaauaagagacgaua

SEQ ID NO: 1630731 - RNA, 19 nt, Artificial Sequence
  Description of Artificial Sequence: Synthetic oligonucleotide
  Sense strand starting at position 3164 of SEQ ID NO: 1560873
cauggaauugugugcaaac

SEQ ID NO: 1630732 - RNA, 19 nt, Artificial Sequence
  Description of Artificial Sequence: Synthetic oligonucleotide
  Antisense strand to SEQ ID NO: 1630731
guuugcacacaauuccaug

SEQ ID NO: 1630733 - RNA, 19 nt, Artificial Sequence
  Description of Artificial Sequence: Synthetic oligonucleotide
  Sense strand starting at position 3165 of SEQ ID NO: 1560873
auggaauugugugcaaaca

SEQ ID NO: 1630734 - RNA, 19 nt, Artificial Sequence
  Description of Artificial Sequence: Synthetic oligonucleotide
  Antisense strand to SEQ ID NO: 1630733
uguuugcacacaauuccau

SEQ ID NO: 1630735 - RNA, 19 nt, Artificial Sequence
  Description of Artificial Sequence: Synthetic oligonucleotide
  Sense strand starting at position 3166 of SEQ ID NO: 1560873
uggaauugugugcaaacag

SEQ ID NO: 1630736 - RNA, 19 nt, Artificial Sequence
  Description of Artificial Sequence: Synthetic oligonucleotide
  Antisense strand to SEQ ID NO: 1630735
cuguuugcacacaauucca

SEQ ID NO: 1630737 - RNA, 19 nt, Artificial Sequence
  Description of Artificial Sequence: Synthetic oligonucleotide
  Sense strand starting at position 3184 of SEQ ID NO: 1560873
guuugacuucuguagagau

SEQ ID NO: 1630738 - RNA, 19 nt, Artificial Sequence
  Description of Artificial Sequence: Synthetic oligonucleotide
  Antisense strand to SEQ ID NO: 1630737
aucucuacagaagucaaac

SEQ ID NO: 1630739 - RNA, 19 nt, Artificial Sequence
  Description of Artificial Sequence: Synthetic oligonucleotide
  Sense strand starting at position 3186 of SEQ ID NO: 1560873
uugacuucuguagagaugu

SEQ ID NO: 1630740 - RNA, 19 nt, Artificial Sequence
  Description of Artificial Sequence: Synthetic oligonucleotide
  Antisense strand to SEQ ID NO: 1630739
acaucucuacagaagucaa

SEQ ID NO: 1630741 - RNA, 19 nt, Artificial Sequence
  Description of Artificial Sequence: Synthetic oligonucleotide
  Sense strand starting at position 3199 of SEQ ID NO: 1560873
agauguggguccucggcaa

SEQ ID NO: 1630742 - RNA, 19 nt, Artificial Sequence
  Description of Artificial Sequence: Synthetic oligonucleotide
  Antisense strand to SEQ ID NO: 1630741
uugccgaggacccacaucu

SEQ ID NO: 1630743 - RNA, 19 nt, Artificial Sequence
  Description of Artificial Sequence: Synthetic oligonucleotide
  Sense strand starting at position 3212 of SEQ ID NO: 1560873
cggcaaacuguauaugacu

SEQ ID NO: 1630744 - RNA, 19 nt, Artificial Sequence
  Description of Artificial Sequence: Synthetic oligonucleotide
  Antisense strand to SEQ ID NO: 1630743
agucauauacaguuugccg

SEQ ID NO: 1630745 - RNA, 19 nt, Artificial Sequence
  Description of Artificial Sequence: Synthetic oligonucleotide
  Sense strand starting at position 3239 of SEQ ID NO: 1560873
ucuguauuucucugucuuu

SEQ ID NO: 1630746 - RNA, 19 nt, Artificial Sequence
  Description of Artificial Sequence: Synthetic oligonucleotide
  Antisense strand to SEQ ID NO: 1630745
aaagacagagaaauacaga

SEQ ID NO: 1630747 - RNA, 19 nt, Artificial Sequence
  Description of Artificial Sequence: Synthetic oligonucleotide
  Sense strand starting at position 3285 of SEQ ID NO: 1560873
gcuaucugucuuggaguuu

SEQ ID NO: 1630748 - RNA, 19 nt, Artificial Sequence
  Description of Artificial Sequence: Synthetic oligonucleotide
  Antisense strand to SEQ ID NO: 1630747
aaacuccaagacagauagc

SEQ ID NO: 1630749 - RNA, 19 nt, Artificial Sequence
  Description of Artificial Sequence: Synthetic oligonucleotide
  Sense strand starting at position 3384 of SEQ ID NO: 1560873
cuuccuuuagcugugugua

SEQ ID NO: 1630750 - RNA, 19 nt, Artificial Sequence
  Description of Artificial Sequence: Synthetic oligonucleotide
  Antisense strand to SEQ ID NO: 1630749
uacacacagcuaaaggaag

SEQ ID NO: 1630751 - RNA, 19 nt, Artificial Sequence
  Description of Artificial Sequence: Synthetic oligonucleotide
  Sense strand starting at position 3387 of SEQ ID NO: 1560873
ccuuuagcuguguguaaua

SEQ ID NO: 1630752 - RNA, 19 nt, Artificial Sequence
  Description of Artificial Sequence: Synthetic oligonucleotide
  Antisense strand to SEQ ID NO: 1630751
uauuacacacagcuaaagg

SEQ ID NO: 1630753 - RNA, 19 nt, Artificial Sequence
  Description of Artificial Sequence: Synthetic oligonucleotide
  Sense strand starting at position 3389 of SEQ ID NO: 1560873
uuuagcuguguguaauaca

SEQ ID NO: 1630754 - RNA, 19 nt, Artificial Sequence
  Description of Artificial Sequence: Synthetic oligonucleotide
  Antisense strand to SEQ ID NO: 1630753
uguauuacacacagcuaaa

SEQ ID NO: 1630755 - RNA, 19 nt, Artificial Sequence
  Description of Artificial Sequence: Synthetic oligonucleotide
  Sense strand starting at position 3397 of SEQ ID NO: 1560873
uguguaauacagcagugaa

SEQ ID NO: 1630756 - RNA, 19 nt, Artificial Sequence
  Description of Artificial Sequence: Synthetic oligonucleotide
  Antisense strand to SEQ ID NO: 1630755
uucacugcuguauuacaca

SEQ ID NO: 1630757 - RNA, 19 nt, Artificial Sequence
  Description of Artificial Sequence: Synthetic oligonucleotide
  Sense strand starting at position 3455 of SEQ ID NO: 1560873
ggaggcagauugcugucaa

SEQ ID NO: 1630758 - RNA, 19 nt, Artificial Sequence
  Description of Artificial Sequence: Synthetic oligonucleotide
  Antisense strand to SEQ ID NO: 1630757
uugacagcaaucugccucc

SEQ ID NO: 1630759 - RNA, 19 nt, Artificial Sequence
  Description of Artificial Sequence: Synthetic oligonucleotide
  Sense strand starting at position 3462 of SEQ ID NO: 1560873
gauugcugucaacauaaga

SEQ ID NO: 1630760 - RNA, 19 nt, Artificial Sequence
  Description of Artificial Sequence: Synthetic oligonucleotide
  Antisense strand to SEQ ID NO: 1630759
ucuuauguugacagcaauc

SEQ ID NO: 1630761 - RNA, 19 nt, Artificial Sequence
  Description of Artificial Sequence: Synthetic oligonucleotide
  Sense strand starting at position 3492 of SEQ ID NO: 1560873
uuuaauguuagguggugau

SEQ ID NO: 1630762 - RNA, 19 nt, Artificial Sequence
  Description of Artificial Sequence: Synthetic oligonucleotide
  Antisense strand to SEQ ID NO: 1630761
aucaccaccuaacauuaaa

SEQ ID NO: 1630763 - RNA, 19 nt, Artificial Sequence
  Description of Artificial Sequence: Synthetic oligonucleotide
  Sense strand starting at position 3496 of SEQ ID NO: 1560873
auguuagguggugaugaua

SEQ ID NO: 1630764 - RNA, 19 nt, Artificial Sequence
  Description of Artificial Sequence: Synthetic oligonucleotide
  Antisense strand to SEQ ID NO: 1630763
uaucaucaccaccuaacau

SEQ ID NO: 1630765 - RNA, 19 nt, Artificial Sequence
  Description of Artificial Sequence: Synthetic oligonucleotide
  Sense strand starting at position 3505 of SEQ ID NO: 1560873
ggugaugauaaaugucaug

SEQ ID NO: 1630766 - RNA, 19 nt, Artificial Sequence
  Description of Artificial Sequence: Synthetic oligonucleotide
  Antisense strand to SEQ ID NO: 1630765
caugacauuuaucaucacc

SEQ ID NO: 1630767 - RNA, 19 nt, Artificial Sequence
  Description of Artificial Sequence: Synthetic oligonucleotide
  Sense strand starting at position 3508 of SEQ ID NO: 1560873
gaugauaaaugucauggaa

SEQ ID NO: 1630768 - RNA, 19 nt, Artificial Sequence
  Description of Artificial Sequence: Synthetic oligonucleotide
  Antisense strand to SEQ ID NO: 1630767
uuccaugacauuuaucauc

SEQ ID NO: 1630769 - RNA, 19 nt, Artificial Sequence
  Description of Artificial Sequence: Synthetic oligonucleotide
  Sense strand starting at position 13 of SEQ ID NO: 1560874
ccaugaguauggcccugua

SEQ ID NO: 1630770 - RNA, 19 nt, Artificial Sequence
  Description of Artificial Sequence: Synthetic oligonucleotide
  Antisense strand to SEQ ID NO: 1630769
uacagggccauacucaugg

SEQ ID NO: 1630771 - RNA, 19 nt, Artificial Sequence
  Description of Artificial Sequence: Synthetic oligonucleotide
  Sense strand starting at position 16 of SEQ ID NO: 1560874
ugaguauggcccuguauau

SEQ ID NO: 1630772 - RNA, 19 nt, Artificial Sequence
  Description of Artificial Sequence: Synthetic oligonucleotide
  Antisense strand to SEQ ID NO: 1630771
auauacagggccauacuca

SEQ ID NO: 1630773 - RNA, 19 nt, Artificial Sequence
  Description of Artificial Sequence: Synthetic oligonucleotide
  Sense strand starting at position 34 of SEQ ID NO: 1560874
uaaacagggucuuugcaua

SEQ ID NO: 1630774 - RNA, 19 nt, Artificial Sequence
  Description of Artificial Sequence: Synthetic oligonucleotide
  Antisense strand to SEQ ID NO: 1630773
uaugcaaagacccuguuua

SEQ ID NO: 1630775 - RNA, 19 nt, Artificial Sequence
  Description of Artificial Sequence: Synthetic oligonucleotide
  Sense strand starting at position 39 of SEQ ID NO: 1560874
agggucuuugcauauaaac

SEQ ID NO: 1630776 - RNA, 19 nt, Artificial Sequence
  Description of Artificial Sequence: Synthetic oligonucleotide
  Antisense strand to SEQ ID NO: 1630775
guuuauaugcaaagacccu

SEQ ID NO: 1630777 - RNA, 19 nt, Artificial Sequence
  Description of Artificial Sequence: Synthetic oligonucleotide
  Sense strand starting at position 898 of SEQ ID NO: 1560874
uguagagaauguuucugau

SEQ ID NO: 1630778 - RNA, 19 nt, Artificial Sequence
  Description of Artificial Sequence: Synthetic oligonucleotide
  Antisense strand to SEQ ID NO: 1630777
aucagaaacauucucuaca

SEQ ID NO: 1630779 - RNA, 19 nt, Artificial Sequence
  Description of Artificial Sequence: Synthetic oligonucleotide
  Sense strand starting at position 900 of SEQ ID NO: 1560874
uagagaauguuucugauau

SEQ ID NO: 1630780 - RNA, 19 nt, Artificial Sequence
  Description of Artificial Sequence: Synthetic oligonucleotide
  Antisense strand to SEQ ID NO: 1630779
auaucagaaacauucucua

SEQ ID NO: 1630781 - RNA, 19 nt, Artificial Sequence
  Description of Artificial Sequence: Synthetic oligonucleotide
  Sense strand starting at position 901 of SEQ ID NO: 1560874
agagaauguuucugauauu

SEQ ID NO: 1630782 - RNA, 19 nt, Artificial Sequence
  Description of Artificial Sequence: Synthetic oligonucleotide
  Antisense strand to SEQ ID NO: 1630781
aauaucagaaacauucucu

SEQ ID NO: 1630783 - RNA, 19 nt, Artificial Sequence
  Description of Artificial Sequence: Synthetic oligonucleotide
  Sense strand starting at position 902 of SEQ ID NO: 1560874
gagaauguuucugauauuu

SEQ ID NO: 1630784 - RNA, 19 nt, Artificial Sequence
  Description of Artificial Sequence: Synthetic oligonucleotide
  Antisense strand to SEQ ID NO: 1630783
aaauaucagaaacauucuc

SEQ ID NO: 1630785 - RNA, 19 nt, Artificial Sequence
  Description of Artificial Sequence: Synthetic oligonucleotide
  Sense strand starting at position 1067 of SEQ ID NO: 1560874
gccauauaacaaugcuaga

SEQ ID NO: 1630786 - RNA, 19 nt, Artificial Sequence
  Description of Artificial Sequence: Synthetic oligonucleotide
  Antisense strand to SEQ ID NO: 1630785
ucuagcauuguuauauggc

SEQ ID NO: 1630787 - RNA, 19 nt, Artificial Sequence
  Description of Artificial Sequence: Synthetic oligonucleotide
  Sense strand starting at position 1270 of SEQ ID NO: 1560874
aaugcacucuuguguuuga

SEQ ID NO: 1630788 - RNA, 19 nt, Artificial Sequence
  Description of Artificial Sequence: Synthetic oligonucleotide
  Antisense strand to SEQ ID NO: 1630787
ucaaacacaagagugcauu

SEQ ID NO: 1630789 - RNA, 19 nt, Artificial Sequence
  Description of Artificial Sequence: Synthetic oligonucleotide
  Sense strand starting at position 1273 of SEQ ID NO: 1560874
gcacucuuguguuugagga

SEQ ID NO: 1630790 - RNA, 19 nt, Artificial Sequence
  Description of Artificial Sequence: Synthetic oligonucleotide
  Antisense strand to SEQ ID NO: 1630789
uccucaaacacaagagugc

SEQ ID NO: 1630791 - RNA, 19 nt, Artificial Sequence
  Description of Artificial Sequence: Synthetic oligonucleotide
  Sense strand starting at position 1274 of SEQ ID NO: 1560874
cacucuuguguuugaggag

SEQ ID NO: 1630792 - RNA, 19 nt, Artificial Sequence
  Description of Artificial Sequence: Synthetic oligonucleotide
  Antisense strand to SEQ ID NO: 1630791
cuccucaaacacaagagug

SEQ ID NO: 1630793 - RNA, 19 nt, Artificial Sequence
  Description of Artificial Sequence: Synthetic oligonucleotide
  Sense strand starting at position 1277 of SEQ ID NO: 1560874
ucuuguguuugaggagggu

SEQ ID NO: 1630794 - RNA, 19 nt, Artificial Sequence
  Description of Artificial Sequence: Synthetic oligonucleotide
  Antisense strand to SEQ ID NO: 1630793
acccuccucaaacacaaga

SEQ ID NO: 1630795 - RNA, 19 nt, Artificial Sequence
  Description of Artificial Sequence: Synthetic oligonucleotide
  Sense strand starting at position 1400 of SEQ ID NO: 1560874
cccacucacugauggagaa

SEQ ID NO: 1630796 - RNA, 19 nt, Artificial Sequence
  Description of Artificial Sequence: Synthetic oligonucleotide
  Antisense strand to SEQ ID NO: 1630795
uucuccaucagugaguggg

SEQ ID NO: 1630797 - RNA, 19 nt, Artificial Sequence
  Description of Artificial Sequence: Synthetic oligonucleotide
  Sense strand starting at position 1572 of SEQ ID NO: 1560874
cggccucgucuguccgaaa

SEQ ID NO: 1630798 - RNA, 19 nt, Artificial Sequence
  Description of Artificial Sequence: Synthetic oligonucleotide
  Antisense strand to SEQ ID NO: 1630797
uuucggacagacgaggccg

SEQ ID NO: 1630799 - RNA, 19 nt, Artificial Sequence
  Description of Artificial Sequence: Synthetic oligonucleotide
  Sense strand starting at position 1575 of SEQ ID NO: 1560874
ccucgucuguccgaaagua

SEQ ID NO: 1630800 - RNA, 19 nt, Artificial Sequence
  Description of Artificial Sequence: Synthetic oligonucleotide
  Antisense strand to SEQ ID NO: 1630799
uacuuucggacagacgagg

SEQ ID NO: 1630801 - RNA, 19 nt, Artificial Sequence
  Description of Artificial Sequence: Synthetic oligonucleotide
  Sense strand starting at position 2112 of SEQ ID NO: 1560874
gacggaccguuguuacaua

SEQ ID NO: 1630802 - RNA, 19 nt, Artificial Sequence
  Description of Artificial Sequence: Synthetic oligonucleotide
  Antisense strand to SEQ ID NO: 1630801
uauguaacaacgguccguc

SEQ ID NO: 1630803 - RNA, 19 nt, Artificial Sequence
  Description of Artificial Sequence: Synthetic oligonucleotide
  Sense strand starting at position 2120 of SEQ ID NO: 1560874
guuguuacauaaccauuaa

SEQ ID NO: 1630804 - RNA, 19 nt, Artificial Sequence
  Description of Artificial Sequence: Synthetic oligonucleotide
  Antisense strand to SEQ ID NO: 1630803
uuaaugguuauguaacaac

SEQ ID NO: 1630805 - RNA, 19 nt, Artificial Sequence
  Description of Artificial Sequence: Synthetic oligonucleotide
  Sense strand starting at position 2298 of SEQ ID NO: 1560874
gaccgaggguucguugaga

SEQ ID NO: 1630806 - RNA, 19 nt, Artificial Sequence
  Description of Artificial Sequence: Synthetic oligonucleotide
  Antisense strand to SEQ ID NO: 1630805
ucucaacgaacccucgguc

SEQ ID NO: 1630807 - RNA, 19 nt, Artificial Sequence
  Description of Artificial Sequence: Synthetic oligonucleotide
  Sense strand starting at position 2302 of SEQ ID NO: 1560874
gaggguucguugagagcgu

SEQ ID NO: 1630808 - RNA, 19 nt, Artificial Sequence
  Description of Artificial Sequence: Synthetic oligonucleotide
  Antisense strand to SEQ ID NO: 1630807
acgcucucaacgaacccuc

SEQ ID NO: 1630809 - RNA, 19 nt, Artificial Sequence
  Description of Artificial Sequence: Synthetic oligonucleotide
  Sense strand starting at position 2922 of SEQ ID NO: 1560874
gccaggaguggugguugua

SEQ ID NO: 1630810 - RNA, 19 nt, Artificial Sequence
  Description of Artificial Sequence: Synthetic oligonucleotide
  Antisense strand to SEQ ID NO: 1630809
uacaaccaccacuccuggc

SEQ ID NO: 1630811 - RNA, 19 nt, Artificial Sequence
  Description of Artificial Sequence: Synthetic oligonucleotide
  Sense strand starting at position 3177 of SEQ ID NO: 1560874
uugugauugugccguugca

SEQ ID NO: 1630812 - RNA, 19 nt, Artificial Sequence
  Description of Artificial Sequence: Synthetic oligonucleotide
  Antisense strand to SEQ ID NO: 1630811
ugcaacggcacaaucacaa

SEQ ID NO: 1630813 - RNA, 19 nt, Artificial Sequence
  Description of Artificial Sequence: Synthetic oligonucleotide
  Sense strand starting at position 3215 of SEQ ID NO: 1560874
gcaagacccuguuugacaa

SEQ ID NO: 1630814 - RNA, 19 nt, Artificial Sequence
  Description of Artificial Sequence: Synthetic oligonucleotide
  Antisense strand to SEQ ID NO: 1630813
uugucaaacagggucuugc

SEQ ID NO: 1630815 - RNA, 19 nt, Artificial Sequence
  Description of Artificial Sequence: Synthetic oligonucleotide
  Sense strand starting at position 3321 of SEQ ID NO: 1560874
gcuucuguaugcucaucua

SEQ ID NO: 1630816 - RNA, 19 nt, Artificial Sequence
  Description of Artificial Sequence: Synthetic oligonucleotide
  Antisense strand to SEQ ID NO: 1630815
uagaugagcauacagaagc

SEQ ID NO: 1630817 - RNA, 19 nt, Artificial Sequence
  Description of Artificial Sequence: Synthetic oligonucleotide
  Sense strand starting at position 3324 of SEQ ID NO: 1560874
ucuguaugcucaucuauac

SEQ ID NO: 1630818 - RNA, 19 nt, Artificial Sequence
  Description of Artificial Sequence: Synthetic oligonucleotide
  Antisense strand to SEQ ID NO: 1630817
guauagaugagcauacaga

SEQ ID NO: 1630819 - RNA, 19 nt, Artificial Sequence
  Description of Artificial Sequence: Synthetic oligonucleotide
  Sense strand starting at position 3335 of SEQ ID NO: 1560874
aucuauaccuguuaguuga

SEQ ID NO: 1630820 - RNA, 19 nt, Artificial Sequence
  Description of Artificial Sequence: Synthetic oligonucleotide
  Antisense strand to SEQ ID NO: 1630819
ucaacuaacagguauagau

SEQ ID NO: 1630821 - RNA, 19 nt, Artificial Sequence
  Description of Artificial Sequence: Synthetic oligonucleotide
  Sense strand starting at position 3365 of SEQ ID NO: 1560874
ugauguaauuccugugagc

SEQ ID NO: 1630822 - RNA, 19 nt, Artificial Sequence
  Description of Artificial Sequence: Synthetic oligonucleotide
  Antisense strand to SEQ ID NO: 1630821
gcucacaggaauuacauca

SEQ ID NO: 1630823 - RNA, 19 nt, Artificial Sequence
  Description of Artificial Sequence: Synthetic oligonucleotide
  Sense strand starting at position 3367 of SEQ ID NO: 1560874
auguaauuccugugagccu

SEQ ID NO: 1630824 - RNA, 19 nt, Artificial Sequence
  Description of Artificial Sequence: Synthetic oligonucleotide
  Antisense strand to SEQ ID NO: 1630823
aggcucacaggaauuacau

SEQ ID NO: 1630825 - RNA, 19 nt, Artificial Sequence
  Description of Artificial Sequence: Synthetic oligonucleotide
  Sense strand starting at position 3474 of SEQ ID NO: 1560874
cgcugugaccguuguucuu

SEQ ID NO: 1630826 - RNA, 19 nt, Artificial Sequence
  Description of Artificial Sequence: Synthetic oligonucleotide
  Antisense strand to SEQ ID NO: 1630825
aagaacaacggucacagcg

SEQ ID NO: 1630827 - RNA, 19 nt, Artificial Sequence
  Description of Artificial Sequence: Synthetic oligonucleotide
  Sense strand starting at position 3480 of SEQ ID NO: 1560874
gaccguuguucuuguguau

SEQ ID NO: 1630828 - RNA, 19 nt, Artificial Sequence
  Description of Artificial Sequence: Synthetic oligonucleotide
  Antisense strand to SEQ ID NO: 1630827
auacacaagaacaacgguc

SEQ ID NO: 1630829 - RNA, 19 nt, Artificial Sequence
  Description of Artificial Sequence: Synthetic oligonucleotide
  Sense strand starting at position 3484 of SEQ ID NO: 1560874
guuguucuuguguauccuu

SEQ ID NO: 1630830 - RNA, 19 nt, Artificial Sequence
  Description of Artificial Sequence: Synthetic oligonucleotide
  Antisense strand to SEQ ID NO: 1630829
aaggauacacaagaacaac

SEQ ID NO: 1630831 - RNA, 19 nt, Artificial Sequence
  Description of Artificial Sequence: Synthetic oligonucleotide
  Sense strand starting at position 3487 of SEQ ID NO: 1560874
guucuuguguauccuugga

SEQ ID NO: 1630832 - RNA, 19 nt, Artificial Sequence
  Description of Artificial Sequence: Synthetic oligonucleotide
  Antisense strand to SEQ ID NO: 1630831
uccaaggauacacaagaac

SEQ ID NO: 1630833 - RNA, 19 nt, Artificial Sequence
  Description of Artificial Sequence: Synthetic oligonucleotide
  Sense strand starting at position 3492 of SEQ ID NO: 1560874
uguguauccuuggacgaca

SEQ ID NO: 1630834 - RNA, 19 nt, Artificial Sequence
  Description of Artificial Sequence: Synthetic oligonucleotide
  Antisense strand to SEQ ID NO: 1630833
ugucguccaaggauacaca

SEQ ID NO: 1630835 - RNA, 19 nt, Artificial Sequence
  Description of Artificial Sequence: Synthetic oligonucleotide
  Sense strand starting at position 3539 of SEQ ID NO: 1560874
uagguuguuggcuagguua

SEQ ID NO: 1630836 - RNA, 19 nt, Artificial Sequence
  Description of Artificial Sequence: Synthetic oligonucleotide
  Antisense strand to SEQ ID NO: 1630835
uaaccuagccaacaaccua

SEQ ID NO: 1630837 - RNA, 19 nt, Artificial Sequence
  Description of Artificial Sequence: Synthetic oligonucleotide
  Sense strand starting at position 37 of SEQ ID NO: 1560875
ccaugaguauggcccugua

SEQ ID NO: 1630838 - RNA, 19 nt, Artificial Sequence
  Description of Artificial Sequence: Synthetic oligonucleotide
  Antisense strand to SEQ ID NO: 1630837
uacagggccauacucaugg

SEQ ID NO: 1630839 - RNA, 19 nt, Artificial Sequence
  Description of Artificial Sequence: Synthetic oligonucleotide
  Sense strand starting at position 40 of SEQ ID NO: 1560875
ugaguauggcccuguauau

SEQ ID NO: 1630840 - RNA, 19 nt, Artificial Sequence
  Description of Artificial Sequence: Synthetic oligonucleotide
  Antisense strand to SEQ ID NO: 1630839
auauacagggccauacuca

SEQ ID NO: 1630841 - RNA, 19 nt, Artificial Sequence
  Description of Artificial Sequence: Synthetic oligonucleotide
  Sense strand starting at position 58 of SEQ ID NO: 1560875
uaaacagggucuuugcaua

SEQ ID NO: 1630842 - RNA, 19 nt, Artificial Sequence
  Description of Artificial Sequence: Synthetic oligonucleotide
  Antisense strand to SEQ ID NO: 1630841
uaugcaaagacccuguuua

SEQ ID NO: 1630843 - RNA, 19 nt, Artificial Sequence
  Description of Artificial Sequence: Synthetic oligonucleotide
  Sense strand starting at position 63 of SEQ ID NO: 1560875
agggucuuugcauauaaac

SEQ ID NO: 1630844 - RNA, 19 nt, Artificial Sequence
  Description of Artificial Sequence: Synthetic oligonucleotide
  Antisense strand to SEQ ID NO: 1630843
guuuauaugcaaagacccu

SEQ ID NO: 1630845 - RNA, 19 nt, Artificial Sequence
  Description of Artificial Sequence: Synthetic oligonucleotide
  Sense strand starting at position 922 of SEQ ID NO: 1560875
uguagagaauguuucugau

SEQ ID NO: 1630846 - RNA, 19 nt, Artificial Sequence
  Description of Artificial Sequence: Synthetic oligonucleotide
  Antisense strand to SEQ ID NO: 1630845
aucagaaacauucucuaca

SEQ ID NO: 1630847 - RNA, 19 nt, Artificial Sequence
  Description of Artificial Sequence: Synthetic oligonucleotide
  Sense strand starting at position 924 of SEQ ID NO: 1560875
uagagaauguuucugauau

SEQ ID NO: 1630848 - RNA, 19 nt, Artificial Sequence
  Description of Artificial Sequence: Synthetic oligonucleotide
  Antisense strand to SEQ ID NO: 1630847
auaucagaaacauucucua

SEQ ID NO: 1630849 - RNA, 19 nt, Artificial Sequence
  Description of Artificial Sequence: Synthetic oligonucleotide
  Sense strand starting at position 925 of SEQ ID NO: 1560875
agagaauguuucugauauu

SEQ ID NO: 1630850 - RNA, 19 nt, Artificial Sequence
  Description of Artificial Sequence: Synthetic oligonucleotide
  Antisense strand to SEQ ID NO: 1630849
aauaucagaaacauucucu

SEQ ID NO: 1630851 - RNA, 19 nt, Artificial Sequence
  Description of Artificial Sequence: Synthetic oligonucleotide
  Sense strand starting at position 926 of SEQ ID NO: 1560875
gagaauguuucugauauuu

SEQ ID NO: 1630852 - RNA, 19 nt, Artificial Sequence
  Description of Artificial Sequence: Synthetic oligonucleotide
  Antisense strand to SEQ ID NO: 1630851
aaauaucagaaacauucuc

SEQ ID NO: 1630853 - RNA, 19 nt, Artificial Sequence
  Description of Artificial Sequence: Synthetic oligonucleotide
  Sense strand starting at position 1091 of SEQ ID NO: 1560875
gccauauaacaaugcuaga

SEQ ID NO: 1630854 - RNA, 19 nt, Artificial Sequence
  Description of Artificial Sequence: Synthetic oligonucleotide
  Antisense strand to SEQ ID NO: 1630853
ucuagcauuguuauauggc

SEQ ID NO: 1630855 - RNA, 19 nt, Artificial Sequence
  Description of Artificial Sequence: Synthetic oligonucleotide
  Sense strand starting at position 1294 of SEQ ID NO: 1560875
aaugcacucuuguguuuga

SEQ ID NO: 1630856 - RNA, 19 nt, Artificial Sequence
  Description of Artificial Sequence: Synthetic oligonucleotide
  Antisense strand to SEQ ID NO: 1630855
ucaaacacaagagugcauu

SEQ ID NO: 1630857 - RNA, 19 nt, Artificial Sequence
  Description of Artificial Sequence: Synthetic oligonucleotide
  Sense strand starting at position 1297 of SEQ ID NO: 1560875
gcacucuuguguuugagga

SEQ ID NO: 1630858 - RNA, 19 nt, Artificial Sequence
  Description of Artificial Sequence: Synthetic oligonucleotide
  Antisense strand to SEQ ID NO: 1630857
uccucaaacacaagagugc

SEQ ID NO: 1630859 - RNA, 19 nt, Artificial Sequence
  Description of Artificial Sequence: Synthetic oligonucleotide
  Sense strand starting at position 1298 of SEQ ID NO: 1560875
cacucuuguguuugaggag

SEQ ID NO: 1630860 - RNA, 19 nt, Artificial Sequence
  Description of Artificial Sequence: Synthetic oligonucleotide
  Antisense strand to SEQ ID NO: 1630859
cuccucaaacacaagagug

SEQ ID NO: 1630861 - RNA, 19 nt, Artificial Sequence
  Description of Artificial Sequence: Synthetic oligonucleotide
  Sense strand starting at position 1301 of SEQ ID NO: 1560875
ucuuguguuugaggagggu

SEQ ID NO: 1630862 - RNA, 19 nt, Artificial Sequence
  Description of Artificial Sequence: Synthetic oligonucleotide
  Antisense strand to SEQ ID NO: 1630861
acccuccucaaacacaaga

SEQ ID NO: 1630863 - RNA, 19 nt, Artificial Sequence
  Description of Artificial Sequence: Synthetic oligonucleotide
  Sense strand starting at position 1424 of SEQ ID NO: 1560875
cccacucacugauggagaa

SEQ ID NO: 1630864 - RNA, 19 nt, Artificial Sequence
  Description of Artificial Sequence: Synthetic oligonucleotide
  Antisense strand to SEQ ID NO: 1630863
uucuccaucagugaguggg

SEQ ID NO: 1630865 - RNA, 19 nt, Artificial Sequence
  Description of Artificial Sequence: Synthetic oligonucleotide
  Sense strand starting at position 1596 of SEQ ID NO: 1560875
cggccucgucuguccgaaa

SEQ ID NO: 1630866 - RNA, 19 nt, Artificial Sequence
  Description of Artificial Sequence: Synthetic oligonucleotide
  Antisense strand to SEQ ID NO: 1630865
uuucggacagacgaggccg

SEQ ID NO: 1630867 - RNA, 19 nt, Artificial Sequence
  Description of Artificial Sequence: Synthetic oligonucleotide
  Sense strand starting at position 1599 of SEQ ID NO: 1560875
ccucgucuguccgaaagua

SEQ ID NO: 1630868 - RNA, 19 nt, Artificial Sequence
  Description of Artificial Sequence: Synthetic oligonucleotide
  Antisense strand to SEQ ID NO: 1630867
uacuuucggacagacgagg

SEQ ID NO: 1630869 - RNA, 19 nt, Artificial Sequence
  Description of Artificial Sequence: Synthetic oligonucleotide
  Sense strand starting at position 2136 of SEQ ID NO: 1560875
gacggaccguuguuacaua

SEQ ID NO: 1630870 - RNA, 19 nt, Artificial Sequence
  Description of Artificial Sequence: Synthetic oligonucleotide
  Antisense strand to SEQ ID NO: 1630869
uauguaacaacgguccguc

SEQ ID NO: 1630871 - RNA, 19 nt, Artificial Sequence
  Description of Artificial Sequence: Synthetic oligonucleotide
  Sense strand starting at position 2144 of SEQ ID NO: 1560875
guuguuacauaaccauuaa

SEQ ID NO: 1630872 - RNA, 19 nt, Artificial Sequence
  Description of Artificial Sequence: Synthetic oligonucleotide
  Antisense strand to SEQ ID NO: 1630871
uuaaugguuauguaacaac

SEQ ID NO: 1630873 - RNA, 19 nt, Artificial Sequence
  Description of Artificial Sequence: Synthetic oligonucleotide
  Sense strand starting at position 2322 of SEQ ID NO: 1560875
gaccgaggguucguugaga

SEQ ID NO: 1630874 - RNA, 19 nt, Artificial Sequence
  Description of Artificial Sequence: Synthetic oligonucleotide
  Antisense strand to SEQ ID NO: 1630873
ucucaacgaacccucgguc

SEQ ID NO: 1630875 - RNA, 19 nt, Artificial Sequence
  Description of Artificial Sequence: Synthetic oligonucleotide
  Sense strand starting at position 2326 of SEQ ID NO: 1560875
gaggguucguugagagcgu

SEQ ID NO: 1630876 - RNA, 19 nt, Artificial Sequence
  Description of Artificial Sequence: Synthetic oligonucleotide
  Antisense strand to SEQ ID NO: 1630875
acgcucucaacgaacccuc

SEQ ID NO: 1630877 - RNA, 19 nt, Artificial Sequence
  Description of Artificial Sequence: Synthetic oligonucleotide
  Sense strand starting at position 2946 of SEQ ID NO: 1560875
gccaggaguggugguugua

SEQ ID NO: 1630878 - RNA, 19 nt, Artificial Sequence
  Description of Artificial Sequence: Synthetic oligonucleotide
  Antisense strand to SEQ ID NO: 1630877
uacaaccaccacuccuggc

SEQ ID NO: 1630879 - RNA, 19 nt, Artificial Sequence
  Description of Artificial Sequence: Synthetic oligonucleotide
  Sense strand starting at position 3201 of SEQ ID NO: 1560875
uugugauugugccguugca

SEQ ID NO: 1630880 - RNA, 19 nt, Artificial Sequence
  Description of Artificial Sequence: Synthetic oligonucleotide
  Antisense strand to SEQ ID NO: 1630879
ugcaacggcacaaucacaa

SEQ ID NO: 1630881 - RNA, 19 nt, Artificial Sequence
  Description of Artificial Sequence: Synthetic oligonucleotide
  Sense strand starting at position 3239 of SEQ ID NO: 1560875
gcaagacccuguuugacaa

SEQ ID NO: 1630882 - RNA, 19 nt, Artificial Sequence
  Description of Artificial Sequence: Synthetic oligonucleotide
  Antisense strand to SEQ ID NO: 1630881
uugucaaacagggucuugc

SEQ ID NO: 1630883 - RNA, 19 nt, Artificial Sequence
  Description of Artificial Sequence: Synthetic oligonucleotide
  Sense strand starting at position 3345 of SEQ ID NO: 1560875
gcuucuguaugcucaucua

SEQ ID NO: 1630884 - RNA, 19 nt, Artificial Sequence
  Description of Artificial Sequence: Synthetic oligonucleotide
  Antisense strand to SEQ ID NO: 1630883
uagaugagcauacagaagc

SEQ ID NO: 1630885 - RNA, 19 nt, Artificial Sequence
  Description of Artificial Sequence: Synthetic oligonucleotide
  Sense strand starting at position 3348 of SEQ ID NO: 1560875
ucuguaugcucaucuauac

SEQ ID NO: 1630886 - RNA, 19 nt, Artificial Sequence
  Description of Artificial Sequence: Synthetic oligonucleotide
  Antisense strand to SEQ ID NO: 1630885
guauagaugagcauacaga

SEQ ID NO: 1630887 - RNA, 19 nt, Artificial Sequence
  Description of Artificial Sequence: Synthetic oligonucleotide
  Sense strand starting at position 3359 of SEQ ID NO: 1560875
aucuauaccuguuaguuga

SEQ ID NO: 1630888 - RNA, 19 nt, Artificial Sequence
  Description of Artificial Sequence: Synthetic oligonucleotide
  Antisense strand to SEQ ID NO: 1630887
ucaacuaacagguauagau

SEQ ID NO: 1630889 - RNA, 19 nt, Artificial Sequence
  Description of Artificial Sequence: Synthetic oligonucleotide
  Sense strand starting at position 3389 of SEQ ID NO: 1560875
ugauguaauuccugugagc

SEQ ID NO: 1630890 - RNA, 19 nt, Artificial Sequence
  Description of Artificial Sequence: Synthetic oligonucleotide
  Antisense strand to SEQ ID NO: 1630889
gcucacaggaauuacauca

SEQ ID NO: 1630891 - RNA, 19 nt, Artificial Sequence
  Description of Artificial Sequence: Synthetic oligonucleotide
  Sense strand starting at position 3391 of SEQ ID NO: 1560875
auguaauuccugugagccu

SEQ ID NO: 1630892 - RNA, 19 nt, Artificial Sequence
  Description of Artificial Sequence: Synthetic oligonucleotide
  Antisense strand to SEQ ID NO: 1630891
aggcucacaggaauuacau

SEQ ID NO: 1630893 - RNA, 19 nt, Artificial Sequence
  Description of Artificial Sequence: Synthetic oligonucleotide
  Sense strand starting at position 3498 of SEQ ID NO: 1560875
cgcugugaccguuguucuu

SEQ ID NO: 1630894 - RNA, 19 nt, Artificial Sequence
  Description of Artificial Sequence: Synthetic oligonucleotide
  Antisense strand to SEQ ID NO: 1630893
aagaacaacggucacagcg

SEQ ID NO: 1630895 - RNA, 19 nt, Artificial Sequence
  Description of Artificial Sequence: Synthetic oligonucleotide
  Sense strand starting at position 3504 of SEQ ID NO: 1560875
gaccguuguucuuguguau

SEQ ID NO: 1630896 - RNA, 19 nt, Artificial Sequence
  Description of Artificial Sequence: Synthetic oligonucleotide
  Antisense strand to SEQ ID NO: 1630895
auacacaagaacaacgguc

SEQ ID NO: 1630897 - RNA, 19 nt, Artificial Sequence
  Description of Artificial Sequence: Synthetic oligonucleotide
  Sense strand starting at position 3508 of SEQ ID NO: 1560875
guuguucuuguguauccuu

SEQ ID NO: 1630898 - RNA, 19 nt, Artificial Sequence
  Description of Artificial Sequence: Synthetic oligonucleotide
  Antisense strand to SEQ ID NO: 1630897
aaggauacacaagaacaac

SEQ ID NO: 1630899 - RNA, 19 nt, Artificial Sequence
  Description of Artificial Sequence: Synthetic oligonucleotide
  Sense strand starting at position 3511 of SEQ ID NO: 1560875
guucuuguguauccuugga

SEQ ID NO: 1630900 - RNA, 19 nt, Artificial Sequence
  Description of Artificial Sequence: Synthetic oligonucleotide
  Antisense strand to SEQ ID NO: 1630899
uccaaggauacacaagaac

SEQ ID NO: 1630901 - RNA, 19 nt, Artificial Sequence
  Description of Artificial Sequence: Synthetic oligonucleotide
  Sense strand starting at position 3516 of SEQ ID NO: 1560875
uguguauccuuggacgaca

SEQ ID NO: 1630902 - RNA, 19 nt, Artificial Sequence
  Description of Artificial Sequence: Synthetic oligonucleotide
  Antisense strand to SEQ ID NO: 1630901
ugucguccaaggauacaca

SEQ ID NO: 1630903 - RNA, 19 nt, Artificial Sequence
  Description of Artificial Sequence: Synthetic oligonucleotide
  Sense strand starting at position 3563 of SEQ ID NO: 1560875
uagguuguuggcuagguua

SEQ ID NO: 1630904 - RNA, 19 nt, Artificial Sequence
  Description of Artificial Sequence: Synthetic oligonucleotide
  Antisense strand to SEQ ID NO: 1630903
uaaccuagccaacaaccua

SEQ ID NO: 1630905 - RNA, 19 nt, Artificial Sequence
  Description of Artificial Sequence: Synthetic oligonucleotide
  Sense strand starting at position 528 of SEQ ID NO: 1560876
gcgugagucauccugccca

SEQ ID NO: 1630906 - RNA, 19 nt, Artificial Sequence
  Description of Artificial Sequence: Synthetic oligonucleotide
  Antisense strand to SEQ ID NO: 1630905
ugggcaggaugacucacgc

SEQ ID NO: 1630907 - RNA, 19 nt, Artificial Sequence
  Description of Artificial Sequence: Synthetic oligonucleotide
  Sense strand starting at position 546 of SEQ ID NO: 1560876
agcccagaauggguucuaa

SEQ ID NO: 1630908 - RNA, 19 nt, Artificial Sequence
  Description of Artificial Sequence: Synthetic oligonucleotide
  Antisense strand to SEQ ID NO: 1630907
uuagaacccauucugggcu

SEQ ID NO: 1630909 - RNA, 19 nt, Artificial Sequence
  Description of Artificial Sequence: Synthetic oligonucleotide
  Sense strand starting at position 627 of SEQ ID NO: 1560876
cuugccacaucugugaaau

SEQ ID NO: 1630910 - RNA, 19 nt, Artificial Sequence
  Description of Artificial Sequence: Synthetic oligonucleotide
  Antisense strand to SEQ ID NO: 1630909
auuucacagauguggcaag

SEQ ID NO: 1630911 - RNA, 19 nt, Artificial Sequence
  Description of Artificial Sequence: Synthetic oligonucleotide
  Sense strand starting at position 628 of SEQ ID NO: 1560876
uugccacaucugugaaaug

SEQ ID NO: 1630912 - RNA, 19 nt, Artificial Sequence
  Description of Artificial Sequence: Synthetic oligonucleotide
  Antisense strand to SEQ ID NO: 1630911
cauuucacagauguggcaa

SEQ ID NO: 1630913 - RNA, 19 nt, Artificial Sequence
  Description of Artificial Sequence: Synthetic oligonucleotide
  Sense strand starting at position 633 of SEQ ID NO: 1560876
acaucugugaaauguguau

SEQ ID NO: 1630914 - RNA, 19 nt, Artificial Sequence
  Description of Artificial Sequence: Synthetic oligonucleotide
  Antisense strand to SEQ ID NO: 1630913
auacacauuucacagaugu

SEQ ID NO: 1630915 - RNA, 19 nt, Artificial Sequence
  Description of Artificial Sequence: Synthetic oligonucleotide
  Sense strand starting at position 637 of SEQ ID NO: 1560876
cugugaaauguguauaagu

SEQ ID NO: 1630916 - RNA, 19 nt, Artificial Sequence
  Description of Artificial Sequence: Synthetic oligonucleotide
  Antisense strand to SEQ ID NO: 1630915
acuuauacacauuucacag

SEQ ID NO: 1630917 - RNA, 19 nt, Artificial Sequence
  Description of Artificial Sequence: Synthetic oligonucleotide
  Sense strand starting at position 639 of SEQ ID NO: 1560876
gugaaauguguauaagugu

SEQ ID NO: 1630918 - RNA, 19 nt, Artificial Sequence
  Description of Artificial Sequence: Synthetic oligonucleotide
  Antisense strand to SEQ ID NO: 1630917
acacuuauacacauuucac

SEQ ID NO: 1630919 - RNA, 19 nt, Artificial Sequence
  Description of Artificial Sequence: Synthetic oligonucleotide
  Sense strand starting at position 734 of SEQ ID NO: 1560876
guaagugcuccauaaacua

SEQ ID NO: 1630920 - RNA, 19 nt, Artificial Sequence
  Description of Artificial Sequence: Synthetic oligonucleotide
  Antisense strand to SEQ ID NO: 1630919
uaguuuauggagcacuuac

SEQ ID NO: 1630921 - RNA, 19 nt, Artificial Sequence
  Description of Artificial Sequence: Synthetic oligonucleotide
  Sense strand starting at position 764 of SEQ ID NO: 1560876
ucuggcuuccacggacaaa

SEQ ID NO: 1630922 - RNA, 19 nt, Artificial Sequence
  Description of Artificial Sequence: Synthetic oligonucleotide
  Antisense strand to SEQ ID NO: 1630921
uuuguccguggaagccaga

SEQ ID NO: 1630923 - RNA, 19 nt, Artificial Sequence
  Description of Artificial Sequence: Synthetic oligonucleotide
  Sense strand starting at position 806 of SEQ ID NO: 1560876
gcuuccugcuagguacaaa

SEQ ID NO: 1630924 - RNA, 19 nt, Artificial Sequence
  Description of Artificial Sequence: Synthetic oligonucleotide
  Antisense strand to SEQ ID NO: 1630923
uuuguaccuagcaggaagc

SEQ ID NO: 1630925 - RNA, 19 nt, Artificial Sequence
  Description of Artificial Sequence: Synthetic oligonucleotide
  Sense strand starting at position 860 of SEQ ID NO: 1560876
ccuaccucccagugaucau

SEQ ID NO: 1630926 - RNA, 19 nt, Artificial Sequence
  Description of Artificial Sequence: Synthetic oligonucleotide
  Antisense strand to SEQ ID NO: 1630925
augaucacugggagguagg

SEQ ID NO: 1630927 - RNA, 19 nt, Artificial Sequence
  Description of Artificial Sequence: Synthetic oligonucleotide
  Sense strand starting at position 867 of SEQ ID NO: 1560876
cccagugaucauugccuaa

SEQ ID NO: 1630928 - RNA, 19 nt, Artificial Sequence
  Description of Artificial Sequence: Synthetic oligonucleotide
  Antisense strand to SEQ ID NO: 1630927
uuaggcaaugaucacuggg

SEQ ID NO: 1630929 - RNA, 19 nt, Artificial Sequence
  Description of Artificial Sequence: Synthetic oligonucleotide
  Sense strand starting at position 870 of SEQ ID NO: 1560876
agugaucauugccuaaauc

SEQ ID NO: 1630930 - RNA, 19 nt, Artificial Sequence
  Description of Artificial Sequence: Synthetic oligonucleotide
  Antisense strand to SEQ ID NO: 1630929
gauuuaggcaaugaucacu

SEQ ID NO: 1630931 - RNA, 19 nt, Artificial Sequence
  Description of Artificial Sequence: Synthetic oligonucleotide
  Sense strand starting at position 871 of SEQ ID NO: 1560876
gugaucauugccuaaaucu

SEQ ID NO: 1630932 - RNA, 19 nt, Artificial Sequence
  Description of Artificial Sequence: Synthetic oligonucleotide
  Antisense strand to SEQ ID NO: 1630931
agauuuaggcaaugaucac

SEQ ID NO: 1630933 - RNA, 19 nt, Artificial Sequence
  Description of Artificial Sequence: Synthetic oligonucleotide
  Sense strand starting at position 1027 of SEQ ID NO: 1560876
ccaugacuuccuggaacug

SEQ ID NO: 1630934 - RNA, 19 nt, Artificial Sequence
  Description of Artificial Sequence: Synthetic oligonucleotide
  Antisense strand to SEQ ID NO: 1630933
caguuccaggaagucaugg

SEQ ID NO: 1630935 - RNA, 19 nt, Artificial Sequence
  Description of Artificial Sequence: Synthetic oligonucleotide
  Sense strand starting at position 1037 of SEQ ID NO: 1560876
cuggaacugguuuaagcaa

SEQ ID NO: 1630936 - RNA, 19 nt, Artificial Sequence
  Description of Artificial Sequence: Synthetic oligonucleotide
  Antisense strand to SEQ ID NO: 1630935
uugcuuaaaccaguuccag

SEQ ID NO: 1630937 - RNA, 19 nt, Artificial Sequence
  Description of Artificial Sequence: Synthetic oligonucleotide
  Sense strand starting at position 1066 of SEQ ID NO: 1560876
ggcagaugucaacacccua

SEQ ID NO: 1630938 - RNA, 19 nt, Artificial Sequence
  Description of Artificial Sequence: Synthetic oligonucleotide
  Antisense strand to SEQ ID NO: 1630937
uaggguguugacaucugcc

SEQ ID NO: 1630939 - RNA, 19 nt, Artificial Sequence
  Description of Artificial Sequence: Synthetic oligonucleotide
  Sense strand starting at position 1462 of SEQ ID NO: 1560876
ggagauucugcccgcagga

SEQ ID NO: 1630940 - RNA, 19 nt, Artificial Sequence
  Description of Artificial Sequence: Synthetic oligonucleotide
  Antisense strand to SEQ ID NO: 1630939
uccugcgggcagaaucucc

SEQ ID NO: 1630941 - RNA, 19 nt, Artificial Sequence
  Description of Artificial Sequence: Synthetic oligonucleotide
  Sense strand starting at position 1478 of SEQ ID NO: 1560876
ggaggaaacuugccugcaa

SEQ ID NO: 1630942 - RNA, 19 nt, Artificial Sequence
  Description of Artificial Sequence: Synthetic oligonucleotide
  Antisense strand to SEQ ID NO: 1630941
uugcaggcaaguuuccucc

SEQ ID NO: 1630943 - RNA, 19 nt, Artificial Sequence
  Description of Artificial Sequence: Synthetic oligonucleotide
  Sense strand starting at position 2055 of SEQ ID NO: 1560876
ucaugaaguccgggaagga

SEQ ID NO: 1630944 - RNA, 19 nt, Artificial Sequence
  Description of Artificial Sequence: Synthetic oligonucleotide
  Antisense strand to SEQ ID NO: 1630943
uccuucccggacuucauga

SEQ ID NO: 1630945 - RNA, 19 nt, Artificial Sequence
  Description of Artificial Sequence: Synthetic oligonucleotide
  Sense strand starting at position 2258 of SEQ ID NO: 1560876
gcgagaacccugggagagu

SEQ ID NO: 1630946 - RNA, 19 nt, Artificial Sequence
  Description of Artificial Sequence: Synthetic oligonucleotide
  Antisense strand to SEQ ID NO: 1630945
acucucccaggguucucgc

SEQ ID NO: 1630947 - RNA, 19 nt, Artificial Sequence
  Description of Artificial Sequence: Synthetic oligonucleotide
  Sense strand starting at position 2669 of SEQ ID NO: 1560876
ccagcuauaugagugacuu

SEQ ID NO: 1630948 - RNA, 19 nt, Artificial Sequence
  Description of Artificial Sequence: Synthetic oligonucleotide
  Antisense strand to SEQ ID NO: 1630947
aagucacucauauagcugg

SEQ ID NO: 1630949 - RNA, 19 nt, Artificial Sequence
  Description of Artificial Sequence: Synthetic oligonucleotide
  Sense strand starting at position 2670 of SEQ ID NO: 1560876
cagcuauaugagugacuug

SEQ ID NO: 1630950 - RNA, 19 nt, Artificial Sequence
  Description of Artificial Sequence: Synthetic oligonucleotide
  Antisense strand to SEQ ID NO: 1630949
caagucacucauauagcug

SEQ ID NO: 1630951 - RNA, 19 nt, Artificial Sequence
  Description of Artificial Sequence: Synthetic oligonucleotide
  Sense strand starting at position 2671 of SEQ ID NO: 1560876
agcuauaugagugacuuga

SEQ ID NO: 1630952 - RNA, 19 nt, Artificial Sequence
  Description of Artificial Sequence: Synthetic oligonucleotide
  Antisense strand to SEQ ID NO: 1630951
ucaagucacucauauagcu

SEQ ID NO: 1630953 - RNA, 19 nt, Artificial Sequence
  Description of Artificial Sequence: Synthetic oligonucleotide
  Sense strand starting at position 2673 of SEQ ID NO: 1560876
cuauaugagugacuugaac

SEQ ID NO: 1630954 - RNA, 19 nt, Artificial Sequence
  Description of Artificial Sequence: Synthetic oligonucleotide
  Antisense strand to SEQ ID NO: 1630953
guucaagucacucauauag

SEQ ID NO: 1630955 - RNA, 19 nt, Artificial Sequence
  Description of Artificial Sequence: Synthetic oligonucleotide
  Sense strand starting at position 2718 of SEQ ID NO: 1560876
gccugaucugcccaacauc

SEQ ID NO: 1630956 - RNA, 19 nt, Artificial Sequence
  Description of Artificial Sequence: Synthetic oligonucleotide
  Antisense strand to SEQ ID NO: 1630955
gauguugggcagaucaggc

SEQ ID NO: 1630957 - RNA, 19 nt, Artificial Sequence
  Description of Artificial Sequence: Synthetic oligonucleotide
  Sense strand starting at position 2855 of SEQ ID NO: 1560876
cugugacugcuggaucaac

SEQ ID NO: 1630958 - RNA, 19 nt, Artificial Sequence
  Description of Artificial Sequence: Synthetic oligonucleotide
  Antisense strand to SEQ ID NO: 1630957
guugauccagcagucacag

SEQ ID NO: 1630959 - RNA, 19 nt, Artificial Sequence
  Description of Artificial Sequence: Synthetic oligonucleotide
  Sense strand starting at position 2933 of SEQ ID NO: 1560876
uuuauccucuuggucuaua

SEQ ID NO: 1630960 - RNA, 19 nt, Artificial Sequence
  Description of Artificial Sequence: Synthetic oligonucleotide
  Antisense strand to SEQ ID NO: 1630959
uauagaccaagaggauaaa

SEQ ID NO: 1630961 - RNA, 19 nt, Artificial Sequence
  Description of Artificial Sequence: Synthetic oligonucleotide
  Sense strand starting at position 2990 of SEQ ID NO: 1560876
gaauauuucugcugaggag

SEQ ID NO: 1630962 - RNA, 19 nt, Artificial Sequence
  Description of Artificial Sequence: Synthetic oligonucleotide
  Antisense strand to SEQ ID NO: 1630961
cuccucagcagaaauauuc

SEQ ID NO: 1630963 - RNA, 19 nt, Artificial Sequence
  Description of Artificial Sequence: Synthetic oligonucleotide
  Sense strand starting at position 3113 of SEQ ID NO: 1560876
cugccuguuagggaacaau

SEQ ID NO: 1630964 - RNA, 19 nt, Artificial Sequence
  Description of Artificial Sequence: Synthetic oligonucleotide
  Antisense strand to SEQ ID NO: 1630963
auuguucccuaacaggcag

SEQ ID NO: 1630965 - RNA, 19 nt, Artificial Sequence
  Description of Artificial Sequence: Synthetic oligonucleotide
  Sense strand starting at position 3194 of SEQ ID NO: 1560876
gccaaauuauuugaauaga

SEQ ID NO: 1630966 - RNA, 19 nt, Artificial Sequence
  Description of Artificial Sequence: Synthetic oligonucleotide
  Antisense strand to SEQ ID NO: 1630965
ucuauucaaauaauuuggc

SEQ ID NO: 1630967 - RNA, 19 nt, Artificial Sequence
  Description of Artificial Sequence: Synthetic oligonucleotide
  Sense strand starting at position 3305 of SEQ ID NO: 1560876
gcuagcacuguccaauaga

SEQ ID NO: 1630968 - RNA, 19 nt, Artificial Sequence
  Description of Artificial Sequence: Synthetic oligonucleotide
  Antisense strand to SEQ ID NO: 1630967
ucuauuggacagugcuagc

SEQ ID NO: 1630969 - RNA, 19 nt, Artificial Sequence
  Description of Artificial Sequence: Synthetic oligonucleotide
  Sense strand starting at position 3328 of SEQ ID NO: 1560876
ucugcaauucuagaauugu

SEQ ID NO: 1630970 - RNA, 19 nt, Artificial Sequence
  Description of Artificial Sequence: Synthetic oligonucleotide
  Antisense strand to SEQ ID NO: 1630969
acaauucuagaauugcaga

SEQ ID NO: 1630971 - RNA, 19 nt, Artificial Sequence
  Description of Artificial Sequence: Synthetic oligonucleotide
  Sense strand starting at position 3336 of SEQ ID NO: 1560876
ucuagaauugugugccauc

SEQ ID NO: 1630972 - RNA, 19 nt, Artificial Sequence
  Description of Artificial Sequence: Synthetic oligonucleotide
  Antisense strand to SEQ ID NO: 1630971
gauggcacacaauucuaga

SEQ ID NO: 1630973 - RNA, 19 nt, Artificial Sequence
  Description of Artificial Sequence: Synthetic oligonucleotide
  Sense strand starting at position 3346 of SEQ ID NO: 1560876
ugugccauccaacauugua

SEQ ID NO: 1630974 - RNA, 19 nt, Artificial Sequence
  Description of Artificial Sequence: Synthetic oligonucleotide
  Antisense strand to SEQ ID NO: 1630973
uacaauguuggauggcaca

SEQ ID NO: 1630975 - RNA, 19 nt, Artificial Sequence
  Description of Artificial Sequence: Synthetic oligonucleotide
  Sense strand starting at position 3391 of SEQ ID NO: 1560876
cagugagaagcugaauguu

SEQ ID NO: 1630976 - RNA, 19 nt, Artificial Sequence
  Description of Artificial Sequence: Synthetic oligonucleotide
  Antisense strand to SEQ ID NO: 1630975
aacauucagcuucucacug

SEQ ID NO: 1630977 - RNA, 19 nt, Artificial Sequence
  Description of Artificial Sequence: Synthetic oligonucleotide
  Sense strand starting at position 3394 of SEQ ID NO: 1560876
ugagaagcugaauguuuaa

SEQ ID NO: 1630978 - RNA, 19 nt, Artificial Sequence
  Description of Artificial Sequence: Synthetic oligonucleotide
  Antisense strand to SEQ ID NO: 1630977
uuaaacauucagcuucuca

SEQ ID NO: 1630979 - RNA, 19 nt, Artificial Sequence
  Description of Artificial Sequence: Synthetic oligonucleotide
  Sense strand starting at position 3707 of SEQ ID NO: 1560876
uggccugaauguuuaaauu

SEQ ID NO: 1630980 - RNA, 19 nt, Artificial Sequence
  Description of Artificial Sequence: Synthetic oligonucleotide
  Antisense strand to SEQ ID NO: 1630979
aauuuaaacauucaggcca

SEQ ID NO: 1630981 - RNA, 19 nt, Artificial Sequence
  Description of Artificial Sequence: Synthetic oligonucleotide
  Sense strand starting at position 3856 of SEQ ID NO: 1560876
cggugagcuaaacagauaa

SEQ ID NO: 1630982 - RNA, 19 nt, Artificial Sequence
  Description of Artificial Sequence: Synthetic oligonucleotide
  Antisense strand to SEQ ID NO: 1630981
uuaucuguuuagcucaccg

SEQ ID NO: 1630983 - RNA, 19 nt, Artificial Sequence
  Description of Artificial Sequence: Synthetic oligonucleotide
  Sense strand starting at position 3940 of SEQ ID NO: 1560876
agaacuuuacaauguguca

SEQ ID NO: 1630984 - RNA, 19 nt, Artificial Sequence
  Description of Artificial Sequence: Synthetic oligonucleotide
  Antisense strand to SEQ ID NO: 1630983
ugacacauuguaaaguucu

SEQ ID NO: 1630985 - RNA, 19 nt, Artificial Sequence
  Description of Artificial Sequence: Synthetic oligonucleotide
  Sense strand starting at position 75 of SEQ ID NO: 1560877
gguugagaagcccggaaau

SEQ ID NO: 1630986 - RNA, 19 nt, Artificial Sequence
  Description of Artificial Sequence: Synthetic oligonucleotide
  Antisense strand to SEQ ID NO: 1630985
auuuccgggcuucucaacc

SEQ ID NO: 1630987 - RNA, 19 nt, Artificial Sequence
  Description of Artificial Sequence: Synthetic oligonucleotide
  Sense strand starting at position 87 of SEQ ID NO: 1560877
cggaaauuguauucucaga

SEQ ID NO: 1630988 - RNA, 19 nt, Artificial Sequence
  Description of Artificial Sequence: Synthetic oligonucleotide
  Antisense strand to SEQ ID NO: 1630987
ucugagaauacaauuuccg

SEQ ID NO: 1630989 - RNA, 19 nt, Artificial Sequence
  Description of Artificial Sequence: Synthetic oligonucleotide
  Sense strand starting at position 233 of SEQ ID NO: 1560877
ugcccucucugagcuaaua

SEQ ID NO: 1630990 - RNA, 19 nt, Artificial Sequence
  Description of Artificial Sequence: Synthetic oligonucleotide
  Antisense strand to SEQ ID NO: 1630989
uauuagcucagagagggca

SEQ ID NO: 1630991 - RNA, 19 nt, Artificial Sequence
  Description of Artificial Sequence: Synthetic oligonucleotide
  Sense strand starting at position 439 of SEQ ID NO: 1560877
ggcggugagcacuuguagu

SEQ ID NO: 1630992 - RNA, 19 nt, Artificial Sequence
  Description of Artificial Sequence: Synthetic oligonucleotide
  Antisense strand to SEQ ID NO: 1630991
acuacaagugcucaccgcc

SEQ ID NO: 1630993 - RNA, 19 nt, Artificial Sequence
  Description of Artificial Sequence: Synthetic oligonucleotide
  Sense strand starting at position 593 of SEQ ID NO: 1560877
gaaauaaagugcuuacgcu

SEQ ID NO: 1630994 - RNA, 19 nt, Artificial Sequence
  Description of Artificial Sequence: Synthetic oligonucleotide
  Antisense strand to SEQ ID NO: 1630993
agcguaagcacuuuauuuc

SEQ ID NO: 1630995 - RNA, 19 nt, Artificial Sequence
  Description of Artificial Sequence: Synthetic oligonucleotide
  Sense strand starting at position 615 of SEQ ID NO: 1560877
gucgcuuuggucucaucuu

SEQ ID NO: 1630996 - RNA, 19 nt, Artificial Sequence
  Description of Artificial Sequence: Synthetic oligonucleotide
  Antisense strand to SEQ ID NO: 1630995
aagaugagaccaaagcgac

SEQ ID NO: 1630997 - RNA, 19 nt, Artificial Sequence
  Description of Artificial Sequence: Synthetic oligonucleotide
  Sense strand starting at position 655 of SEQ ID NO: 1560877
acuggaaccuuacgugauu

SEQ ID NO: 1630998 - RNA, 19 nt, Artificial Sequence
  Description of Artificial Sequence: Synthetic oligonucleotide
  Antisense strand to SEQ ID NO: 1630997
aaucacguaagguuccagu

SEQ ID NO: 1630999 - RNA, 19 nt, Artificial Sequence
  Description of Artificial Sequence: Synthetic oligonucleotide
  Sense strand starting at position 656 of SEQ ID NO: 1560877
cuggaaccuuacgugauua

SEQ ID NO: 1631000 - RNA, 19 nt, Artificial Sequence
  Description of Artificial Sequence: Synthetic oligonucleotide
  Antisense strand to SEQ ID NO: 1630999
uaaucacguaagguuccag

SEQ ID NO: 1631001 - RNA, 19 nt, Artificial Sequence
  Description of Artificial Sequence: Synthetic oligonucleotide
  Sense strand starting at position 660 of SEQ ID NO: 1560877
aaccuuacgugauuagagu

SEQ ID NO: 1631002 - RNA, 19 nt, Artificial Sequence
  Description of Artificial Sequence: Synthetic oligonucleotide
  Antisense strand to SEQ ID NO: 1631001
acucuaaucacguaagguu

SEQ ID NO: 1631003 - RNA, 19 nt, Artificial Sequence
  Description of Artificial Sequence: Synthetic oligonucleotide
  Sense strand starting at position 1180 of SEQ ID NO: 1560877
gccgcuguucccugaagua

SEQ ID NO: 1631004 - RNA, 19 nt, Artificial Sequence
  Description of Artificial Sequence: Synthetic oligonucleotide
  Antisense strand to SEQ ID NO: 1631003
uacuucagggaacagcggc

SEQ ID NO: 1631005 - RNA, 19 nt, Artificial Sequence
  Description of Artificial Sequence: Synthetic oligonucleotide
  Sense strand starting at position 1193 of SEQ ID NO: 1560877
gaaguagggcucuguggaa

SEQ ID NO: 1631006 - RNA, 19 nt, Artificial Sequence
  Description of Artificial Sequence: Synthetic oligonucleotide
  Antisense strand to SEQ ID NO: 1631005
uuccacagagcccuacuuc

SEQ ID NO: 1631007 - RNA, 19 nt, Artificial Sequence
  Description of Artificial Sequence: Synthetic oligonucleotide
  Sense strand starting at position 1635 of SEQ ID NO: 1560877
gagacaggcuggguugaaa

SEQ ID NO: 1631008 - RNA, 19 nt, Artificial Sequence
  Description of Artificial Sequence: Synthetic oligonucleotide
  Antisense strand to SEQ ID NO: 1631007
uuucaacccagccugucuc

SEQ ID NO: 1631009 - RNA, 19 nt, Artificial Sequence
  Description of Artificial Sequence: Synthetic oligonucleotide
  Sense strand starting at position 1676 of SEQ ID NO: 1560877
ccauauuuaugccucaguu

SEQ ID NO: 1631010 - RNA, 19 nt, Artificial Sequence
  Description of Artificial Sequence: Synthetic oligonucleotide
  Antisense strand to SEQ ID NO: 1631009
aacugaggcauaaauaugg

SEQ ID NO: 1631011 - RNA, 19 nt, Artificial Sequence
  Description of Artificial Sequence: Synthetic oligonucleotide
  Sense strand starting at position 1714 of SEQ ID NO: 1560877
guccuagugucugaugaga

SEQ ID NO: 1631012 - RNA, 19 nt, Artificial Sequence
  Description of Artificial Sequence: Synthetic oligonucleotide
  Antisense strand to SEQ ID NO: 1631011
ucucaucagacacuaggac

SEQ ID NO: 1631013 - RNA, 19 nt, Artificial Sequence
  Description of Artificial Sequence: Synthetic oligonucleotide
  Sense strand starting at position 1921 of SEQ ID NO: 1560877
gagcuaugugcguuggcca

SEQ ID NO: 1631014 - RNA, 19 nt, Artificial Sequence
  Description of Artificial Sequence: Synthetic oligonucleotide
  Antisense strand to SEQ ID NO: 1631013
uggccaacgcacauagcuc

SEQ ID NO: 1631015 - RNA, 19 nt, Artificial Sequence
  Description of Artificial Sequence: Synthetic oligonucleotide
  Sense strand starting at position 2062 of SEQ ID NO: 1560877
aucgauugaucagcccaau

SEQ ID NO: 1631016 - RNA, 19 nt, Artificial Sequence
  Description of Artificial Sequence: Synthetic oligonucleotide
  Antisense strand to SEQ ID NO: 1631015
auugggcugaucaaucgau

SEQ ID NO: 1631017 - RNA, 19 nt, Artificial Sequence
  Description of Artificial Sequence: Synthetic oligonucleotide
  Sense strand starting at position 3031 of SEQ ID NO: 1560877
guggguguaguucaaaucu

SEQ ID NO: 1631018 - RNA, 19 nt, Artificial Sequence
  Description of Artificial Sequence: Synthetic oligonucleotide
  Antisense strand to SEQ ID NO: 1631017
agauuugaacuacacccac

SEQ ID NO: 1631019 - RNA, 19 nt, Artificial Sequence
  Description of Artificial Sequence: Synthetic oligonucleotide
  Sense strand starting at position 3334 of SEQ ID NO: 1560877
gcauacauuuggcgcuuaa

SEQ ID NO: 1631020 - RNA, 19 nt, Artificial Sequence
  Description of Artificial Sequence: Synthetic oligonucleotide
  Antisense strand to SEQ ID NO: 1631019
uuaagcgccaaauguaugc

SEQ ID NO: 1631021 - RNA, 19 nt, Artificial Sequence
  Description of Artificial Sequence: Synthetic oligonucleotide
  Sense strand starting at position 3354 of SEQ ID NO: 1560877
acacguuuggcucaaugga

SEQ ID NO: 1631022 - RNA, 19 nt, Artificial Sequence
  Description of Artificial Sequence: Synthetic oligonucleotide
  Antisense strand to SEQ ID NO: 1631021
uccauugagccaaacgugu

SEQ ID NO: 1631023 - RNA, 19 nt, Artificial Sequence
  Description of Artificial Sequence: Synthetic oligonucleotide
  Sense strand starting at position 3389 of SEQ ID NO: 1560877
uugugagccucugugagau

SEQ ID NO: 1631024 - RNA, 19 nt, Artificial Sequence
  Description of Artificial Sequence: Synthetic oligonucleotide
  Antisense strand to SEQ ID NO: 1631023
aucucacagaggcucacaa

SEQ ID NO: 1631025 - RNA, 19 nt, Artificial Sequence
  Description of Artificial Sequence: Synthetic oligonucleotide
  Sense strand starting at position 3408 of SEQ ID NO: 1560877
gaggucaugcacugaacaa

SEQ ID NO: 1631026 - RNA, 19 nt, Artificial Sequence
  Description of Artificial Sequence: Synthetic oligonucleotide
  Antisense strand to SEQ ID NO: 1631025
uuguucagugcaugaccuc

SEQ ID NO: 1631027 - RNA, 19 nt, Artificial Sequence
  Description of Artificial Sequence: Synthetic oligonucleotide
  Sense strand starting at position 3425 of SEQ ID NO: 1560877
aaaugcugccuucgcguua

SEQ ID NO: 1631028 - RNA, 19 nt, Artificial Sequence
  Description of Artificial Sequence: Synthetic oligonucleotide
  Antisense strand to SEQ ID NO: 1631027
uaacgcgaaggcagcauuu

SEQ ID NO: 1631029 - RNA, 19 nt, Artificial Sequence
  Description of Artificial Sequence: Synthetic oligonucleotide
  Sense strand starting at position 3436 of SEQ ID NO: 1560877
ucgcguuacccaggcagaa

SEQ ID NO: 1631030 - RNA, 19 nt, Artificial Sequence
  Description of Artificial Sequence: Synthetic oligonucleotide
  Antisense strand to SEQ ID NO: 1631029
uucugccuggguaacgcga

SEQ ID NO: 1631031 - RNA, 19 nt, Artificial Sequence
  Description of Artificial Sequence: Synthetic oligonucleotide
  Sense strand starting at position 3641 of SEQ ID NO: 1560877
ggcguccuguuccagaagu

SEQ ID NO: 1631032 - RNA, 19 nt, Artificial Sequence
  Description of Artificial Sequence: Synthetic oligonucleotide
  Antisense strand to SEQ ID NO: 1631031
acuucuggaacaggacgcc

SEQ ID NO: 1631033 - RNA, 19 nt, Artificial Sequence
  Description of Artificial Sequence: Synthetic oligonucleotide
  Sense strand starting at position 3848 of SEQ ID NO: 1560877
gguuccuagcccuguguua

SEQ ID NO: 1631034 - RNA, 19 nt, Artificial Sequence
  Description of Artificial Sequence: Synthetic oligonucleotide
  Antisense strand to SEQ ID NO: 1631033
uaacacagggcuaggaacc

SEQ ID NO: 1631035 - RNA, 19 nt, Artificial Sequence
  Description of Artificial Sequence: Synthetic oligonucleotide
  Sense strand starting at position 3849 of SEQ ID NO: 1560877
guuccuagcccuguguuau

SEQ ID NO: 1631036 - RNA, 19 nt, Artificial Sequence
  Description of Artificial Sequence: Synthetic oligonucleotide
  Antisense strand to SEQ ID NO: 1631035
auaacacagggcuaggaac

SEQ ID NO: 1631037 - RNA, 19 nt, Artificial Sequence
  Description of Artificial Sequence: Synthetic oligonucleotide
  Sense strand starting at position 3850 of SEQ ID NO: 1560877
uuccuagcccuguguuauu

SEQ ID NO: 1631038 - RNA, 19 nt, Artificial Sequence
  Description of Artificial Sequence: Synthetic oligonucleotide
  Antisense strand to SEQ ID NO: 1631037
aauaacacagggcuaggaa

SEQ ID NO: 1631039 - RNA, 19 nt, Artificial Sequence
  Description of Artificial Sequence: Synthetic oligonucleotide
  Sense strand starting at position 3932 of SEQ ID NO: 1560877
gccacaggaucugaugauu

SEQ ID NO: 1631040 - RNA, 19 nt, Artificial Sequence
  Description of Artificial Sequence: Synthetic oligonucleotide
  Antisense strand to SEQ ID NO: 1631039
aaucaucagauccuguggc

SEQ ID NO: 1631041 - RNA, 19 nt, Artificial Sequence
  Description of Artificial Sequence: Synthetic oligonucleotide
  Sense strand starting at position 3976 of SEQ ID NO: 1560877
cgacacuguguuugccaaa

SEQ ID NO: 1631042 - RNA, 19 nt, Artificial Sequence
  Description of Artificial Sequence: Synthetic oligonucleotide
  Antisense strand to SEQ ID NO: 1631041
uuuggcaaacacagugucg

SEQ ID NO: 1631043 - RNA, 19 nt, Artificial Sequence
  Description of Artificial Sequence: Synthetic oligonucleotide
  Sense strand starting at position 240 of SEQ ID NO: 1560878
cugcgaucugucugcucga

SEQ ID NO: 1631044 - RNA, 19 nt, Artificial Sequence
  Description of Artificial Sequence: Synthetic oligonucleotide
  Antisense strand to SEQ ID NO: 1631043
ucgagcagacagaucgcag

SEQ ID NO: 1631045 - RNA, 19 nt, Artificial Sequence
  Description of Artificial Sequence: Synthetic oligonucleotide
  Sense strand starting at position 338 of SEQ ID NO: 1560878
ccugcaaguugugugaacu

SEQ ID NO: 1631046 - RNA, 19 nt, Artificial Sequence
  Description of Artificial Sequence: Synthetic oligonucleotide
  Antisense strand to SEQ ID NO: 1631045
aguucacacaacuugcagg

SEQ ID NO: 1631047 - RNA, 19 nt, Artificial Sequence
  Description of Artificial Sequence: Synthetic oligonucleotide
  Sense strand starting at position 339 of SEQ ID NO: 1560878
cugcaaguugugugaacuu

SEQ ID NO: 1631048 - RNA, 19 nt, Artificial Sequence
  Description of Artificial Sequence: Synthetic oligonucleotide
  Antisense strand to SEQ ID NO: 1631047
aaguucacacaacuugcag

SEQ ID NO: 1631049 - RNA, 19 nt, Artificial Sequence
  Description of Artificial Sequence: Synthetic oligonucleotide
  Sense strand starting at position 417 of SEQ ID NO: 1560878
gguugugauggguguucaa

SEQ ID NO: 1631050 - RNA, 19 nt, Artificial Sequence
  Description of Artificial Sequence: Synthetic oligonucleotide
  Antisense strand to SEQ ID NO: 1631049
uugaacacccaucacaacc

SEQ ID NO: 1631051 - RNA, 19 nt, Artificial Sequence
  Description of Artificial Sequence: Synthetic oligonucleotide
  Sense strand starting at position 420 of SEQ ID NO: 1560878
ugugauggguguucaagga

SEQ ID NO: 1631052 - RNA, 19 nt, Artificial Sequence
  Description of Artificial Sequence: Synthetic oligonucleotide
  Antisense strand to SEQ ID NO: 1631051
uccuugaacacccaucaca

SEQ ID NO: 1631053 - RNA, 19 nt, Artificial Sequence
  Description of Artificial Sequence: Synthetic oligonucleotide
  Sense strand starting at position 447 of SEQ ID NO: 1560878
acaugaaacgguuggaacu

SEQ ID NO: 1631054 - RNA, 19 nt, Artificial Sequence
  Description of Artificial Sequence: Synthetic oligonucleotide
  Antisense strand to SEQ ID NO: 1631053
aguuccaaccguuucaugu

SEQ ID NO: 1631055 - RNA, 19 nt, Artificial Sequence
  Description of Artificial Sequence: Synthetic oligonucleotide
  Sense strand starting at position 459 of SEQ ID NO: 1560878
uggaacugugacugauaca

SEQ ID NO: 1631056 - RNA, 19 nt, Artificial Sequence
  Description of Artificial Sequence: Synthetic oligonucleotide
  Antisense strand to SEQ ID NO: 1631055
uguaucagucacaguucca

SEQ ID NO: 1631057 - RNA, 19 nt, Artificial Sequence
  Description of Artificial Sequence: Synthetic oligonucleotide
  Sense strand starting at position 464 of SEQ ID NO: 1560878
cugugacugauacagugau

SEQ ID NO: 1631058 - RNA, 19 nt, Artificial Sequence
  Description of Artificial Sequence: Synthetic oligonucleotide
  Antisense strand to SEQ ID NO: 1631057
aucacuguaucagucacag

SEQ ID NO: 1631059 - RNA, 19 nt, Artificial Sequence
  Description of Artificial Sequence: Synthetic oligonucleotide
  Sense strand starting at position 477 of SEQ ID NO: 1560878
agugauugcugcucuuacu

SEQ ID NO: 1631060 - RNA, 19 nt, Artificial Sequence
  Description of Artificial Sequence: Synthetic oligonucleotide
  Antisense strand to SEQ ID NO: 1631059
aguaagagcagcaaucacu

SEQ ID NO: 1631061 - RNA, 19 nt, Artificial Sequence
  Description of Artificial Sequence: Synthetic oligonucleotide
  Sense strand starting at position 491 of SEQ ID NO: 1560878
uuacuauuguuguuacuga

SEQ ID NO: 1631062 - RNA, 19 nt, Artificial Sequence
  Description of Artificial Sequence: Synthetic oligonucleotide
  Antisense strand to SEQ ID NO: 1631061
ucaguaacaacaauaguaa

SEQ ID NO: 1631063 - RNA, 19 nt, Artificial Sequence
  Description of Artificial Sequence: Synthetic oligonucleotide
  Sense strand starting at position 607 of SEQ ID NO: 1560878
cugggugucuuugagagac

SEQ ID NO: 1631064 - RNA, 19 nt, Artificial Sequence
  Description of Artificial Sequence: Synthetic oligonucleotide
  Antisense strand to SEQ ID NO: 1631063
gucucucaaagacacccag

SEQ ID NO: 1631065 - RNA, 19 nt, Artificial Sequence
  Description of Artificial Sequence: Synthetic oligonucleotide
  Sense strand starting at position 609 of SEQ ID NO: 1560878
gggugucuuugagagacac

SEQ ID NO: 1631066 - RNA, 19 nt, Artificial Sequence
  Description of Artificial Sequence: Synthetic oligonucleotide
  Antisense strand to SEQ ID NO: 1631065
gugucucucaaagacaccc

SEQ ID NO: 1631067 - RNA, 19 nt, Artificial Sequence
  Description of Artificial Sequence: Synthetic oligonucleotide
  Sense strand starting at position 733 of SEQ ID NO: 1560878
cgggauaccuggccugaaa

SEQ ID NO: 1631068 - RNA, 19 nt, Artificial Sequence
  Description of Artificial Sequence: Synthetic oligonucleotide
  Antisense strand to SEQ ID NO: 1631067
uuucaggccagguaucccg

SEQ ID NO: 1631069 - RNA, 19 nt, Artificial Sequence
  Description of Artificial Sequence: Synthetic oligonucleotide
  Sense strand starting at position 872 of SEQ ID NO: 1560878
cagacaucgugcugcaaac

SEQ ID NO: 1631070 - RNA, 19 nt, Artificial Sequence
  Description of Artificial Sequence: Synthetic oligonucleotide
  Antisense strand to SEQ ID NO: 1631069
guuugcagcacgaugucug

SEQ ID NO: 1631071 - RNA, 19 nt, Artificial Sequence
  Description of Artificial Sequence: Synthetic oligonucleotide
  Sense strand starting at position 937 of SEQ ID NO: 1560878
ggcaucagauccugucaaa

SEQ ID NO: 1631072 - RNA, 19 nt, Artificial Sequence
  Description of Artificial Sequence: Synthetic oligonucleotide
  Antisense strand to SEQ ID NO: 1631071
uuugacaggaucugaugcc

SEQ ID NO: 1631073 - RNA, 19 nt, Artificial Sequence
  Description of Artificial Sequence: Synthetic oligonucleotide
  Sense strand starting at position 940 of SEQ ID NO: 1560878
aucagauccugucaaauug

SEQ ID NO: 1631074 - RNA, 19 nt, Artificial Sequence
  Description of Artificial Sequence: Synthetic oligonucleotide
  Antisense strand to SEQ ID NO: 1631073
caauuugacaggaucugau

SEQ ID NO: 1631075 - RNA, 19 nt, Artificial Sequence
  Description of Artificial Sequence: Synthetic oligonucleotide
  Sense strand starting at position 952 of SEQ ID NO: 1560878
caaauugggcucugugacu

SEQ ID NO: 1631076 - RNA, 19 nt, Artificial Sequence
  Description of Artificial Sequence: Synthetic oligonucleotide
  Antisense strand to SEQ ID NO: 1631075
agucacagagcccaauuug

SEQ ID NO: 1631077 - RNA, 19 nt, Artificial Sequence
  Description of Artificial Sequence: Synthetic oligonucleotide
  Sense strand starting at position 959 of SEQ ID NO: 1560878
ggcucugugacuugagcaa

SEQ ID NO: 1631078 - RNA, 19 nt, Artificial Sequence
  Description of Artificial Sequence: Synthetic oligonucleotide
  Antisense strand to SEQ ID NO: 1631077
uugcucaagucacagagcc

SEQ ID NO: 1631079 - RNA, 19 nt, Artificial Sequence
  Description of Artificial Sequence: Synthetic oligonucleotide
  Sense strand starting at position 1065 of SEQ ID NO: 1560878
cacagaggguguccaauaa

SEQ ID NO: 1631080 - RNA, 19 nt, Artificial Sequence
  Description of Artificial Sequence: Synthetic oligonucleotide
  Antisense strand to SEQ ID NO: 1631079
uuauuggacacccucugug

SEQ ID NO: 1631081 - RNA, 19 nt, Artificial Sequence
  Description of Artificial Sequence: Synthetic oligonucleotide
  Sense strand starting at position 1109 of SEQ ID NO: 1560878
cggagugacucgaagcaug

SEQ ID NO: 1631082 - RNA, 19 nt, Artificial Sequence
  Description of Artificial Sequence: Synthetic oligonucleotide
  Antisense strand to SEQ ID NO: 1631081
caugcuucgagucacuccg

SEQ ID NO: 1631083 - RNA, 19 nt, Artificial Sequence
  Description of Artificial Sequence: Synthetic oligonucleotide
  Sense strand starting at position 1120 of SEQ ID NO: 1560878
gaagcauggucucugaggu

SEQ ID NO: 1631084 - RNA, 19 nt, Artificial Sequence
  Description of Artificial Sequence: Synthetic oligonucleotide
  Antisense strand to SEQ ID NO: 1631083
accucagagaccaugcuuc

SEQ ID NO: 1631085 - RNA, 19 nt, Artificial Sequence
  Description of Artificial Sequence: Synthetic oligonucleotide
  Sense strand starting at position 1124 of SEQ ID NO: 1560878
cauggucucugaggugaga

SEQ ID NO: 1631086 - RNA, 19 nt, Artificial Sequence
  Description of Artificial Sequence: Synthetic oligonucleotide
  Antisense strand to SEQ ID NO: 1631085
ucucaccucagagaccaug

SEQ ID NO: 1631087 - RNA, 19 nt, Artificial Sequence
  Description of Artificial Sequence: Synthetic oligonucleotide
  Sense strand starting at position 1126 of SEQ ID NO: 1560878
uggucucugaggugagaaa

SEQ ID NO: 1631088 - RNA, 19 nt, Artificial Sequence
  Description of Artificial Sequence: Synthetic oligonucleotide
  Antisense strand to SEQ ID NO: 1631087
uuucucaccucagagacca

SEQ ID NO: 1631089 - RNA, 19 nt, Artificial Sequence
  Description of Artificial Sequence: Synthetic oligonucleotide
  Sense strand starting at position 1163 of SEQ ID NO: 1560878
accauuaauugcgguguua

SEQ ID NO: 1631090 - RNA, 19 nt, Artificial Sequence
  Description of Artificial Sequence: Synthetic oligonucleotide
  Antisense strand to SEQ ID NO: 1631089
uaacaccgcaauuaauggu

SEQ ID NO: 1631091 - RNA, 19 nt, Artificial Sequence
  Description of Artificial Sequence: Synthetic oligonucleotide
  Sense strand starting at position 1165 of SEQ ID NO: 1560878
cauuaauugcgguguuauu

SEQ ID NO: 1631092 - RNA, 19 nt, Artificial Sequence
  Description of Artificial Sequence: Synthetic oligonucleotide
  Antisense strand to SEQ ID NO: 1631091
aauaacaccgcaauuaaug

SEQ ID NO: 1631093 - RNA, 19 nt, Artificial Sequence
  Description of Artificial Sequence: Synthetic oligonucleotide
  Sense strand starting at position 1851 of SEQ ID NO: 1560878
ccugcucuggccggucaua

SEQ ID NO: 1631094 - RNA, 19 nt, Artificial Sequence
  Description of Artificial Sequence: Synthetic oligonucleotide
  Antisense strand to SEQ ID NO: 1631093
uaugaccggccagagcagg

SEQ ID NO: 1631095 - RNA, 19 nt, Artificial Sequence
  Description of Artificial Sequence: Synthetic oligonucleotide
  Sense strand starting at position 2196 of SEQ ID NO: 1560878
ucgggagcgcuagauucaa

SEQ ID NO: 1631096 - RNA, 19 nt, Artificial Sequence
  Description of Artificial Sequence: Synthetic oligonucleotide
  Antisense strand to SEQ ID NO: 1631095
uugaaucuagcgcucccga

SEQ ID NO: 1631097 - RNA, 19 nt, Artificial Sequence
  Description of Artificial Sequence: Synthetic oligonucleotide
  Sense strand starting at position 2263 of SEQ ID NO: 1560878
ccucacugcuguugccaua

SEQ ID NO: 1631098 - RNA, 19 nt, Artificial Sequence
  Description of Artificial Sequence: Synthetic oligonucleotide
  Antisense strand to SEQ ID NO: 1631097
uauggcaacagcagugagg

SEQ ID NO: 1631099 - RNA, 19 nt, Artificial Sequence
  Description of Artificial Sequence: Synthetic oligonucleotide
  Sense strand starting at position 2330 of SEQ ID NO: 1560878
ggccaacucgcugaugacu

SEQ ID NO: 1631100 - RNA, 19 nt, Artificial Sequence
  Description of Artificial Sequence: Synthetic oligonucleotide
  Antisense strand to SEQ ID NO: 1631099
agucaucagcgaguuggcc

SEQ ID NO: 1631101 - RNA, 19 nt, Artificial Sequence
  Description of Artificial Sequence: Synthetic oligonucleotide
  Sense strand starting at position 2553 of SEQ ID NO: 1560878
acgagaugucccuguguug

SEQ ID NO: 1631102 - RNA, 19 nt, Artificial Sequence
  Description of Artificial Sequence: Synthetic oligonucleotide
  Antisense strand to SEQ ID NO: 1631101
caacacagggacaucucgu

SEQ ID NO: 1631103 - RNA, 19 nt, Artificial Sequence
  Description of Artificial Sequence: Synthetic oligonucleotide
  Sense strand starting at position 3689 of SEQ ID NO: 1560878
cuucgaugaucucagguca

SEQ ID NO: 1631104 - RNA, 19 nt, Artificial Sequence
  Description of Artificial Sequence: Synthetic oligonucleotide
  Antisense strand to SEQ ID NO: 1631103
ugaccugagaucaucgaag

SEQ ID NO: 1631105 - RNA, 19 nt, Artificial Sequence
  Description of Artificial Sequence: Synthetic oligonucleotide
  Sense strand starting at position 3700 of SEQ ID NO: 1560878
ucaggucagcaugacaaau

SEQ ID NO: 1631106 - RNA, 19 nt, Artificial Sequence
  Description of Artificial Sequence: Synthetic oligonucleotide
  Antisense strand to SEQ ID NO: 1631105
auuugucaugcugaccuga

SEQ ID NO: 1631107 - RNA, 19 nt, Artificial Sequence
  Description of Artificial Sequence: Synthetic oligonucleotide
  Sense strand starting at position 3711 of SEQ ID NO: 1560878
ugacaaaucguuuggagac

SEQ ID NO: 1631108 - RNA, 19 nt, Artificial Sequence
  Description of Artificial Sequence: Synthetic oligonucleotide
  Antisense strand to SEQ ID NO: 1631107
gucuccaaacgauuuguca

SEQ ID NO: 1631109 - RNA, 19 nt, Artificial Sequence
  Description of Artificial Sequence: Synthetic oligonucleotide
  Sense strand starting at position 3731 of SEQ ID NO: 1560878
ugggcaaucugguuuaacu

SEQ ID NO: 1631110 - RNA, 19 nt, Artificial Sequence
  Description of Artificial Sequence: Synthetic oligonucleotide
  Antisense strand to SEQ ID NO: 1631109
aguuaaaccagauugccca

SEQ ID NO: 1631111 - RNA, 19 nt, Artificial Sequence
  Description of Artificial Sequence: Synthetic oligonucleotide
  Sense strand starting at position 3733 of SEQ ID NO: 1560878
ggcaaucugguuuaacuua

SEQ ID NO: 1631112 - RNA, 19 nt, Artificial Sequence
  Description of Artificial Sequence: Synthetic oligonucleotide
  Antisense strand to SEQ ID NO: 1631111
uaaguuaaaccagauugcc

SEQ ID NO: 1631113 - RNA, 19 nt, Artificial Sequence
  Description of Artificial Sequence: Synthetic oligonucleotide
  Sense strand starting at position 3778 of SEQ ID NO: 1560878
gcagaaauccacugguaaa

SEQ ID NO: 1631114 - RNA, 19 nt, Artificial Sequence
  Description of Artificial Sequence: Synthetic oligonucleotide
  Antisense strand to SEQ ID NO: 1631113
uuuaccaguggauuucugc

SEQ ID NO: 1631115 - RNA, 19 nt, Artificial Sequence
  Description of Artificial Sequence: Synthetic oligonucleotide
  Sense strand starting at position 3860 of SEQ ID NO: 1560878
ggagaagucacaggccauu

SEQ ID NO: 1631116 - RNA, 19 nt, Artificial Sequence
  Description of Artificial Sequence: Synthetic oligonucleotide
  Antisense strand to SEQ ID NO: 1631115
aauggccugugacuucucc

SEQ ID NO: 1631117 - RNA, 19 nt, Artificial Sequence
  Description of Artificial Sequence: Synthetic oligonucleotide
  Sense strand starting at position 3955 of SEQ ID NO: 1560878
ccuggaguccugggaaguu

SEQ ID NO: 1631118 - RNA, 19 nt, Artificial Sequence
  Description of Artificial Sequence: Synthetic oligonucleotide
  Antisense strand to SEQ ID NO: 1631117
aacuucccaggacuccagg

SEQ ID NO: 1631119 - RNA, 19 nt, Artificial Sequence
  Description of Artificial Sequence: Synthetic oligonucleotide
  Sense strand starting at position 3967 of SEQ ID NO: 1560878
ggaaguugauuugagaaga

SEQ ID NO: 1631120 - RNA, 19 nt, Artificial Sequence
  Description of Artificial Sequence: Synthetic oligonucleotide
  Antisense strand to SEQ ID NO: 1631119
ucuucucaaaucaacuucc

SEQ ID NO: 1631121 - RNA, 19 nt, Artificial Sequence
  Description of Artificial Sequence: Synthetic oligonucleotide
  Sense strand starting at position 227 of SEQ ID NO: 1560879
guaagaagcgcuggcgaau

SEQ ID NO: 1631122 - RNA, 19 nt, Artificial Sequence
  Description of Artificial Sequence: Synthetic oligonucleotide
  Antisense strand to SEQ ID NO: 1631121
auucgccagcgcuucuuac

SEQ ID NO: 1631123 - RNA, 19 nt, Artificial Sequence
  Description of Artificial Sequence: Synthetic oligonucleotide
  Sense strand starting at position 319 of SEQ ID NO: 1560879
gggcacagcugacaugaau

SEQ ID NO: 1631124 - RNA, 19 nt, Artificial Sequence
  Description of Artificial Sequence: Synthetic oligonucleotide
  Antisense strand to SEQ ID NO: 1631123
auucaugucagcugugccc

SEQ ID NO: 1631125 - RNA, 19 nt, Artificial Sequence
  Description of Artificial Sequence: Synthetic oligonucleotide
  Sense strand starting at position 2257 of SEQ ID NO: 1560879
cgcugauacgcccgcuuua

SEQ ID NO: 1631126 - RNA, 19 nt, Artificial Sequence
  Description of Artificial Sequence: Synthetic oligonucleotide
  Antisense strand to SEQ ID NO: 1631125
uaaagcgggcguaucagcg

SEQ ID NO: 1631127 - RNA, 19 nt, Artificial Sequence
  Description of Artificial Sequence: Synthetic oligonucleotide
  Sense strand starting at position 2269 of SEQ ID NO: 1560879
cgcuuuaccgagcgggaaa

SEQ ID NO: 1631128 - RNA, 19 nt, Artificial Sequence
  Description of Artificial Sequence: Synthetic oligonucleotide
  Antisense strand to SEQ ID NO: 1631127
uuucccgcucgguaaagcg

SEQ ID NO: 1631129 - RNA, 19 nt, Artificial Sequence
  Description of Artificial Sequence: Synthetic oligonucleotide
  Sense strand starting at position 2352 of SEQ ID NO: 1560879
agguaugagccucgacguu

SEQ ID NO: 1631130 - RNA, 19 nt, Artificial Sequence
  Description of Artificial Sequence: Synthetic oligonucleotide
  Antisense strand to SEQ ID NO: 1631129
aacgucgaggcucauaccu

SEQ ID NO: 1631131 - RNA, 19 nt, Artificial Sequence
  Description of Artificial Sequence: Synthetic oligonucleotide
  Sense strand starting at position 2369 of SEQ ID NO: 1560879
uucugaaugugugccauuu

SEQ ID NO: 1631132 - RNA, 19 nt, Artificial Sequence
  Description of Artificial Sequence: Synthetic oligonucleotide
  Antisense strand to SEQ ID NO: 1631131
aaauggcacacauucagaa

SEQ ID NO: 1631133 - RNA, 19 nt, Artificial Sequence
  Description of Artificial Sequence: Synthetic oligonucleotide
  Sense strand starting at position 2603 of SEQ ID NO: 1560879
ggaugucccauaugaggga

SEQ ID NO: 1631134 - RNA, 19 nt, Artificial Sequence
  Description of Artificial Sequence: Synthetic oligonucleotide
  Antisense strand to SEQ ID NO: 1631133
ucccucauaugggacaucc

SEQ ID NO: 1631135 - RNA, 19 nt, Artificial Sequence
  Description of Artificial Sequence: Synthetic oligonucleotide
  Sense strand starting at position 2619 of SEQ ID NO: 1560879
ggagcuucagcccggagaa

SEQ ID NO: 1631136 - RNA, 19 nt, Artificial Sequence
  Description of Artificial Sequence: Synthetic oligonucleotide
  Antisense strand to SEQ ID NO: 1631135
uucuccgggcugaagcucc

SEQ ID NO: 1631137 - RNA, 19 nt, Artificial Sequence
  Description of Artificial Sequence: Synthetic oligonucleotide
  Sense strand starting at position 2732 of SEQ ID NO: 1560879
ucagaaaccucagagaacu

SEQ ID NO: 1631138 - RNA, 19 nt, Artificial Sequence
  Description of Artificial Sequence: Synthetic oligonucleotide
  Antisense strand to SEQ ID NO: 1631137
aguucucugagguuucuga

SEQ ID NO: 1631139 - RNA, 19 nt, Artificial Sequence
  Description of Artificial Sequence: Synthetic oligonucleotide
  Sense strand starting at position 3010 of SEQ ID NO: 1560879
ggacgccugcgguauuaau

SEQ ID NO: 1631140 - RNA, 19 nt, Artificial Sequence
  Description of Artificial Sequence: Synthetic oligonucleotide
  Antisense strand to SEQ ID NO: 1631139
auuaauaccgcaggcgucc

SEQ ID NO: 1631141 - RNA, 19 nt, Artificial Sequence
  Description of Artificial Sequence: Synthetic oligonucleotide
  Sense strand starting at position 3097 of SEQ ID NO: 1560879
ggaccagauuucggaaucu

SEQ ID NO: 1631142 - RNA, 19 nt, Artificial Sequence
  Description of Artificial Sequence: Synthetic oligonucleotide
  Antisense strand to SEQ ID NO: 1631141
agauuccgaaaucuggucc

SEQ ID NO: 1631143 - RNA, 19 nt, Artificial Sequence
  Description of Artificial Sequence: Synthetic oligonucleotide
  Sense strand starting at position 3360 of SEQ ID NO: 1560879
ccgagugucugagcuguca

SEQ ID NO: 1631144 - RNA, 19 nt, Artificial Sequence
  Description of Artificial Sequence: Synthetic oligonucleotide
  Antisense strand to SEQ ID NO: 1631143
ugacagcucagacacucgg

SEQ ID NO: 1631145 - RNA, 19 nt, Artificial Sequence
  Description of Artificial Sequence: Synthetic oligonucleotide
  Sense strand starting at position 3362 of SEQ ID NO: 1560879
gagugucugagcugucaca

SEQ ID NO: 1631146 - RNA, 19 nt, Artificial Sequence
  Description of Artificial Sequence: Synthetic oligonucleotide
  Antisense strand to SEQ ID NO: 1631145
ugugacagcucagacacuc

SEQ ID NO: 1631147 - RNA, 19 nt, Artificial Sequence
  Description of Artificial Sequence: Synthetic oligonucleotide
  Sense strand starting at position 3747 of SEQ ID NO: 1560879
cgguuccuuccugauagca

SEQ ID NO: 1631148 - RNA, 19 nt, Artificial Sequence
  Description of Artificial Sequence: Synthetic oligonucleotide
  Antisense strand to SEQ ID NO: 1631147
ugcuaucaggaaggaaccg

SEQ ID NO: 1631149 - RNA, 19 nt, Artificial Sequence
  Description of Artificial Sequence: Synthetic oligonucleotide
  Sense strand starting at position 3852 of SEQ ID NO: 1560879
ccagcccuguccucguaaa

SEQ ID NO: 1631150 - RNA, 19 nt, Artificial Sequence
  Description of Artificial Sequence: Synthetic oligonucleotide
  Antisense strand to SEQ ID NO: 1631149
uuuacgaggacagggcugg

SEQ ID NO: 1631151 - RNA, 19 nt, Artificial Sequence
  Description of Artificial Sequence: Synthetic oligonucleotide
  Sense strand starting at position 3972 of SEQ ID NO: 1560879
ggcaguaacuugucccuga

SEQ ID NO: 1631152 - RNA, 19 nt, Artificial Sequence
  Description of Artificial Sequence: Synthetic oligonucleotide
  Antisense strand to SEQ ID NO: 1631151
ucagggacaaguuacugcc

SEQ ID NO: 1631153 - RNA, 19 nt, Artificial Sequence
  Description of Artificial Sequence: Synthetic oligonucleotide
  Sense strand starting at position 3976 of SEQ ID NO: 1560879
guaacuugucccugaggca

SEQ ID NO: 1631154 - RNA, 19 nt, Artificial Sequence
  Description of Artificial Sequence: Synthetic oligonucleotide
  Antisense strand to SEQ ID NO: 1631153
ugccucagggacaaguuac

SEQ ID NO: 1631155 - RNA, 19 nt, Artificial Sequence
  Description of Artificial Sequence: Synthetic oligonucleotide
  Sense strand starting at position 9 of SEQ ID NO: 1560880
aaguuaugggcucaggacu

SEQ ID NO: 1631156 - RNA, 19 nt, Artificial Sequence
  Description of Artificial Sequence: Synthetic oligonucleotide
  Antisense strand to SEQ ID NO: 1631155
aguccugagcccauaacuu

SEQ ID NO: 1631157 - RNA, 19 nt, Artificial Sequence
  Description of Artificial Sequence: Synthetic oligonucleotide
  Sense strand starting at position 115 of SEQ ID NO: 1560880
ggaauauacuuacaguuua

SEQ ID NO: 1631158 - RNA, 19 nt, Artificial Sequence
  Description of Artificial Sequence: Synthetic oligonucleotide
  Antisense strand to SEQ ID NO: 1631157
uaaacuguaaguauauucc

SEQ ID NO: 1631159 - RNA, 19 nt, Artificial Sequence
  Description of Artificial Sequence: Synthetic oligonucleotide
  Sense strand starting at position 138 of SEQ ID NO: 1560880
aaauguugcuggcugggaa

SEQ ID NO: 1631160 - RNA, 19 nt, Artificial Sequence
  Description of Artificial Sequence: Synthetic oligonucleotide
  Antisense strand to SEQ ID NO: 1631159
uucccagccagcaacauuu

SEQ ID NO: 1631161 - RNA, 19 nt, Artificial Sequence
  Description of Artificial Sequence: Synthetic oligonucleotide
  Sense strand starting at position 139 of SEQ ID NO: 1560880
aauguugcuggcugggaau

SEQ ID NO: 1631162 - RNA, 19 nt, Artificial Sequence
  Description of Artificial Sequence: Synthetic oligonucleotide
  Antisense strand to SEQ ID NO: 1631161
auucccagccagcaacauu

SEQ ID NO: 1631163 - RNA, 19 nt, Artificial Sequence
  Description of Artificial Sequence: Synthetic oligonucleotide
  Sense strand starting at position 220 of SEQ ID NO: 1560880
ucagcagcauagugagauu

SEQ ID NO: 1631164 - RNA, 19 nt, Artificial Sequence
  Description of Artificial Sequence: Synthetic oligonucleotide
  Antisense strand to SEQ ID NO: 1631163
aaucucacuaugcugcuga

SEQ ID NO: 1631165 - RNA, 19 nt, Artificial Sequence
  Description of Artificial Sequence: Synthetic oligonucleotide
  Sense strand starting at position 710 of SEQ ID NO: 1560880
ggcauaguggcauguccau

SEQ ID NO: 1631166 - RNA, 19 nt, Artificial Sequence
  Description of Artificial Sequence: Synthetic oligonucleotide
  Antisense strand to SEQ ID NO: 1631165
auggacaugccacuaugcc

SEQ ID NO: 1631167 - RNA, 19 nt, Artificial Sequence
  Description of Artificial Sequence: Synthetic oligonucleotide
  Sense strand starting at position 1318 of SEQ ID NO: 1560880
aaaugagccgguuaugaug

SEQ ID NO: 1631168 - RNA, 19 nt, Artificial Sequence
  Description of Artificial Sequence: Synthetic oligonucleotide
  Antisense strand to SEQ ID NO: 1631167
caucauaaccggcucauuu

SEQ ID NO: 1631169 - RNA, 19 nt, Artificial Sequence
  Description of Artificial Sequence: Synthetic oligonucleotide
  Sense strand starting at position 1481 of SEQ ID NO: 1560880
gagcauugguccugugauc

SEQ ID NO: 1631170 - RNA, 19 nt, Artificial Sequence
  Description of Artificial Sequence: Synthetic oligonucleotide
  Antisense strand to SEQ ID NO: 1631169
gaucacaggaccaaugcuc

SEQ ID NO: 1631171 - RNA, 19 nt, Artificial Sequence
  Description of Artificial Sequence: Synthetic oligonucleotide
  Sense strand starting at position 1504 of SEQ ID NO: 1560880
cccucucuuggaugaggaa

SEQ ID NO: 1631172 - RNA, 19 nt, Artificial Sequence
  Description of Artificial Sequence: Synthetic oligonucleotide
  Antisense strand to SEQ ID NO: 1631171
uuccucauccaagagaggg

SEQ ID NO: 1631173 - RNA, 19 nt, Artificial Sequence
  Description of Artificial Sequence: Synthetic oligonucleotide
  Sense strand starting at position 1693 of SEQ ID NO: 1560880
aguugagcuccuuggucaa

SEQ ID NO: 1631174 - RNA, 19 nt, Artificial Sequence
  Description of Artificial Sequence: Synthetic oligonucleotide
  Antisense strand to SEQ ID NO: 1631173
uugaccaaggagcucaacu

SEQ ID NO: 1631175 - RNA, 19 nt, Artificial Sequence
  Description of Artificial Sequence: Synthetic oligonucleotide
  Sense strand starting at position 1696 of SEQ ID NO: 1560880
ugagcuccuuggucaaguu

SEQ ID NO: 1631176 - RNA, 19 nt, Artificial Sequence
  Description of Artificial Sequence: Synthetic oligonucleotide
  Antisense strand to SEQ ID NO: 1631175
aacuugaccaaggagcuca

SEQ ID NO: 1631177 - RNA, 19 nt, Artificial Sequence
  Description of Artificial Sequence: Synthetic oligonucleotide
  Sense strand starting at position 1876 of SEQ ID NO: 1560880
agaaguagcgcagguaaua

SEQ ID NO: 1631178 - RNA, 19 nt, Artificial Sequence
  Description of Artificial Sequence: Synthetic oligonucleotide
  Antisense strand to SEQ ID NO: 1631177
uauuaccugcgcuacuucu

SEQ ID NO: 1631179 - RNA, 19 nt, Artificial Sequence
  Description of Artificial Sequence: Synthetic oligonucleotide
  Sense strand starting at position 2273 of SEQ ID NO: 1560880
gcgggugcuguucucagua

SEQ ID NO: 1631180 - RNA, 19 nt, Artificial Sequence
  Description of Artificial Sequence: Synthetic oligonucleotide
  Antisense strand to SEQ ID NO: 1631179
uacugagaacagcacccgc

SEQ ID NO: 1631181 - RNA, 19 nt, Artificial Sequence
  Description of Artificial Sequence: Synthetic oligonucleotide
  Sense strand starting at position 2296 of SEQ ID NO: 1560880
cugugauuaggucgcugaa

SEQ ID NO: 1631182 - RNA, 19 nt, Artificial Sequence
  Description of Artificial Sequence: Synthetic oligonucleotide
  Antisense strand to SEQ ID NO: 1631181
uucagcgaccuaaucacag

SEQ ID NO: 1631183 - RNA, 19 nt, Artificial Sequence
  Description of Artificial Sequence: Synthetic oligonucleotide
  Sense strand starting at position 2298 of SEQ ID NO: 1560880
gugauuaggucgcugaauc

SEQ ID NO: 1631184 - RNA, 19 nt, Artificial Sequence
  Description of Artificial Sequence: Synthetic oligonucleotide
  Antisense strand to SEQ ID NO: 1631183
gauucagcgaccuaaucac

SEQ ID NO: 1631185 - RNA, 19 nt, Artificial Sequence
  Description of Artificial Sequence: Synthetic oligonucleotide
  Sense strand starting at position 2299 of SEQ ID NO: 1560880
ugauuaggucgcugaauca

SEQ ID NO: 1631186 - RNA, 19 nt, Artificial Sequence
  Description of Artificial Sequence: Synthetic oligonucleotide
  Antisense strand to SEQ ID NO: 1631185
ugauucagcgaccuaauca

SEQ ID NO: 1631187 - RNA, 19 nt, Artificial Sequence
  Description of Artificial Sequence: Synthetic oligonucleotide
  Sense strand starting at position 2309 of SEQ ID NO: 1560880
gcugaaucaugccaggucu

SEQ ID NO: 1631188 - RNA, 19 nt, Artificial Sequence
  Description of Artificial Sequence: Synthetic oligonucleotide
  Antisense strand to SEQ ID NO: 1631187
agaccuggcaugauucagc

SEQ ID NO: 1631189 - RNA, 19 nt, Artificial Sequence
  Description of Artificial Sequence: Synthetic oligonucleotide
  Sense strand starting at position 2339 of SEQ ID NO: 1560880
ccuuguguggcggaggaaa

SEQ ID NO: 1631190 - RNA, 19 nt, Artificial Sequence
  Description of Artificial Sequence: Synthetic oligonucleotide
  Antisense strand to SEQ ID NO: 1631189
uuuccuccgccacacaagg

SEQ ID NO: 1631191 - RNA, 19 nt, Artificial Sequence
  Description of Artificial Sequence: Synthetic oligonucleotide
  Sense strand starting at position 2390 of SEQ ID NO: 1560880
gggucucacgcuguuaguu

SEQ ID NO: 1631192 - RNA, 19 nt, Artificial Sequence
  Description of Artificial Sequence: Synthetic oligonucleotide
  Antisense strand to SEQ ID NO: 1631191
aacuaacagcgugagaccc

SEQ ID NO: 1631193 - RNA, 19 nt, Artificial Sequence
  Description of Artificial Sequence: Synthetic oligonucleotide
  Sense strand starting at position 2399 of SEQ ID NO: 1560880
gcuguuaguucagcgaacu

SEQ ID NO: 1631194 - RNA, 19 nt, Artificial Sequence
  Description of Artificial Sequence: Synthetic oligonucleotide
  Antisense strand to SEQ ID NO: 1631193
aguucgcugaacuaacagc

SEQ ID NO: 1631195 - RNA, 19 nt, Artificial Sequence
  Description of Artificial Sequence: Synthetic oligonucleotide
  Sense strand starting at position 2592 of SEQ ID NO: 1560880
cccggucaccguggugaaa

SEQ ID NO: 1631196 - RNA, 19 nt, Artificial Sequence
  Description of Artificial Sequence: Synthetic oligonucleotide
  Antisense strand to SEQ ID NO: 1631195
uuucaccacggugaccggg

SEQ ID NO: 1631197 - RNA, 19 nt, Artificial Sequence
  Description of Artificial Sequence: Synthetic oligonucleotide
  Sense strand starting at position 2811 of SEQ ID NO: 1560880
gugugaaacucuuagcuag

SEQ ID NO: 1631198 - RNA, 19 nt, Artificial Sequence
  Description of Artificial Sequence: Synthetic oligonucleotide
  Antisense strand to SEQ ID NO: 1631197
cuagcuaagaguuucacac

SEQ ID NO: 1631199 - RNA, 19 nt, Artificial Sequence
  Description of Artificial Sequence: Synthetic oligonucleotide
  Sense strand starting at position 2844 of SEQ ID NO: 1560880
agcaguaggugauuaguaa

SEQ ID NO: 1631200 - RNA, 19 nt, Artificial Sequence
  Description of Artificial Sequence: Synthetic oligonucleotide
  Antisense strand to SEQ ID NO: 1631199
uuacuaaucaccuacugcu

SEQ ID NO: 1631201 - RNA, 19 nt, Artificial Sequence
  Description of Artificial Sequence: Synthetic oligonucleotide
  Sense strand starting at position 2845 of SEQ ID NO: 1560880
gcaguaggugauuaguaau

SEQ ID NO: 1631202 - RNA, 19 nt, Artificial Sequence
  Description of Artificial Sequence: Synthetic oligonucleotide
  Antisense strand to SEQ ID NO: 1631201
auuacuaaucaccuacugc

SEQ ID NO: 1631203 - RNA, 19 nt, Artificial Sequence
  Description of Artificial Sequence: Synthetic oligonucleotide
  Sense strand starting at position 2851 of SEQ ID NO: 1560880
ggugauuaguaauugcaua

SEQ ID NO: 1631204 - RNA, 19 nt, Artificial Sequence
  Description of Artificial Sequence: Synthetic oligonucleotide
  Antisense strand to SEQ ID NO: 1631203
uaugcaauuacuaaucacc

SEQ ID NO: 1631205 - RNA, 19 nt, Artificial Sequence
  Description of Artificial Sequence: Synthetic oligonucleotide
  Sense strand starting at position 2852 of SEQ ID NO: 1560880
gugauuaguaauugcauag

SEQ ID NO: 1631206 - RNA, 19 nt, Artificial Sequence
  Description of Artificial Sequence: Synthetic oligonucleotide
  Antisense strand to SEQ ID NO: 1631205
cuaugcaauuacuaaucac

SEQ ID NO: 1631207 - RNA, 19 nt, Artificial Sequence
  Description of Artificial Sequence: Synthetic oligonucleotide
  Sense strand starting at position 2950 of SEQ ID NO: 1560880
ucacuuagaugcucaguaa

SEQ ID NO: 1631208 - RNA, 19 nt, Artificial Sequence
  Description of Artificial Sequence: Synthetic oligonucleotide
  Antisense strand to SEQ ID NO: 1631207
uuacugagcaucuaaguga

SEQ ID NO: 1631209 - RNA, 19 nt, Artificial Sequence
  Description of Artificial Sequence: Synthetic oligonucleotide
  Sense strand starting at position 2953 of SEQ ID NO: 1560880
cuuagaugcucaguaaaug

SEQ ID NO: 1631210 - RNA, 19 nt, Artificial Sequence
  Description of Artificial Sequence: Synthetic oligonucleotide
  Antisense strand to SEQ ID NO: 1631209
cauuuacugagcaucuaag

SEQ ID NO: 1631211 - RNA, 19 nt, Artificial Sequence
  Description of Artificial Sequence: Synthetic oligonucleotide
  Sense strand starting at position 2965 of SEQ ID NO: 1560880
guaaaugcuccaggaaacu

SEQ ID NO: 1631212 - RNA, 19 nt, Artificial Sequence
  Description of Artificial Sequence: Synthetic oligonucleotide
  Antisense strand to SEQ ID NO: 1631211
aguuuccuggagcauuuac

SEQ ID NO: 1631213 - RNA, 19 nt, Artificial Sequence
  Description of Artificial Sequence: Synthetic oligonucleotide
  Sense strand starting at position 3119 of SEQ ID NO: 1560880
uguggcuguuguuaugauu

SEQ ID NO: 1631214 - RNA, 19 nt, Artificial Sequence
  Description of Artificial Sequence: Synthetic oligonucleotide
  Antisense strand to SEQ ID NO: 1631213
aaucauaacaacagccaca

SEQ ID NO: 1631215 - RNA, 19 nt, Artificial Sequence
  Description of Artificial Sequence: Synthetic oligonucleotide
  Sense strand starting at position 3125 of SEQ ID NO: 1560880
uguuguuaugauuaggauc

SEQ ID NO: 1631216 - RNA, 19 nt, Artificial Sequence
  Description of Artificial Sequence: Synthetic oligonucleotide
  Antisense strand to SEQ ID NO: 1631215
gauccuaaucauaacaaca

SEQ ID NO: 1631217 - RNA, 19 nt, Artificial Sequence
  Description of Artificial Sequence: Synthetic oligonucleotide
  Sense strand starting at position 3127 of SEQ ID NO: 1560880
uuguuaugauuaggaucau

SEQ ID NO: 1631218 - RNA, 19 nt, Artificial Sequence
  Description of Artificial Sequence: Synthetic oligonucleotide
  Antisense strand to SEQ ID NO: 1631217
augauccuaaucauaacaa

SEQ ID NO: 1631219 - RNA, 19 nt, Artificial Sequence
  Description of Artificial Sequence: Synthetic oligonucleotide
  Sense strand starting at position 3128 of SEQ ID NO: 1560880
uguuaugauuaggaucauu

SEQ ID NO: 1631220 - RNA, 19 nt, Artificial Sequence
  Description of Artificial Sequence: Synthetic oligonucleotide
  Antisense strand to SEQ ID NO: 1631219
aaugauccuaaucauaaca

SEQ ID NO: 1631221 - RNA, 19 nt, Artificial Sequence
  Description of Artificial Sequence: Synthetic oligonucleotide
  Sense strand starting at position 3138 of SEQ ID NO: 1560880
aggaucauuuccugcugga

SEQ ID NO: 1631222 - RNA, 19 nt, Artificial Sequence
  Description of Artificial Sequence: Synthetic oligonucleotide
  Antisense strand to SEQ ID NO: 1631221
uccagcaggaaaugauccu

SEQ ID NO: 1631223 - RNA, 19 nt, Artificial Sequence
  Description of Artificial Sequence: Synthetic oligonucleotide
  Sense strand starting at position 3196 of SEQ ID NO: 1560880
gguggauacgugggacuga

SEQ ID NO: 1631224 - RNA, 19 nt, Artificial Sequence
  Description of Artificial Sequence: Synthetic oligonucleotide
  Antisense strand to SEQ ID NO: 1631223
ucagucccacguauccacc

SEQ ID NO: 1631225 - RNA, 19 nt, Artificial Sequence
  Description of Artificial Sequence: Synthetic oligonucleotide
  Sense strand starting at position 3632 of SEQ ID NO: 1560880
aaaggauucuguguguccu

SEQ ID NO: 1631226 - RNA, 19 nt, Artificial Sequence
  Description of Artificial Sequence: Synthetic oligonucleotide
  Antisense strand to SEQ ID NO: 1631225
aggacacacagaauccuuu

SEQ ID NO: 1631227 - RNA, 19 nt, Artificial Sequence
  Description of Artificial Sequence: Synthetic oligonucleotide
  Sense strand starting at position 3774 of SEQ ID NO: 1560880
cucccagucuugggagaca

SEQ ID NO: 1631228 - RNA, 19 nt, Artificial Sequence
  Description of Artificial Sequence: Synthetic oligonucleotide
  Antisense strand to SEQ ID NO: 1631227
ugucucccaagacugggag

SEQ ID NO: 1631229 - RNA, 19 nt, Artificial Sequence
  Description of Artificial Sequence: Synthetic oligonucleotide
  Sense strand starting at position 3881 of SEQ ID NO: 1560880
aggugacaaucaugcaauu

SEQ ID NO: 1631230 - RNA, 19 nt, Artificial Sequence
  Description of Artificial Sequence: Synthetic oligonucleotide
  Antisense strand to SEQ ID NO: 1631229
aauugcaugauugucaccu

SEQ ID NO: 1631231 - RNA, 19 nt, Artificial Sequence
  Description of Artificial Sequence: Synthetic oligonucleotide
  Sense strand starting at position 3894 of SEQ ID NO: 1560880
gcaauugcuguccucugua

SEQ ID NO: 1631232 - RNA, 19 nt, Artificial Sequence
  Description of Artificial Sequence: Synthetic oligonucleotide
  Antisense strand to SEQ ID NO: 1631231
uacagaggacagcaauugc

SEQ ID NO: 1631233 - RNA, 19 nt, Artificial Sequence
  Description of Artificial Sequence: Synthetic oligonucleotide
  Sense strand starting at position 3949 of SEQ ID NO: 1560880
cccauuagccaggguaaca

SEQ ID NO: 1631234 - RNA, 19 nt, Artificial Sequence
  Description of Artificial Sequence: Synthetic oligonucleotide
  Antisense strand to SEQ ID NO: 1631233
uguuacccuggcuaauggg

SEQ ID NO: 1631235 - RNA, 19 nt, Artificial Sequence
  Description of Artificial Sequence: Synthetic oligonucleotide
  Sense strand starting at position 965 of SEQ ID NO: 1560881
uauagcauccagggaguaa

SEQ ID NO: 1631236 - RNA, 19 nt, Artificial Sequence
  Description of Artificial Sequence: Synthetic oligonucleotide
  Antisense strand to SEQ ID NO: 1631235
uuacucccuggaugcuaua

SEQ ID NO: 1631237 - RNA, 19 nt, Artificial Sequence
  Description of Artificial Sequence: Synthetic oligonucleotide
  Sense strand starting at position 976 of SEQ ID NO: 1560881
gggaguaagaggcaguuua

SEQ ID NO: 1631238 - RNA, 19 nt, Artificial Sequence
  Description of Artificial Sequence: Synthetic oligonucleotide
  Antisense strand to SEQ ID NO: 1631237
uaaacugccucuuacuccc

SEQ ID NO: 1631239 - RNA, 19 nt, Artificial Sequence
  Description of Artificial Sequence: Synthetic oligonucleotide
  Sense strand starting at position 1004 of SEQ ID NO: 1560881
gggauuggcuccuugacau

SEQ ID NO: 1631240 - RNA, 19 nt, Artificial Sequence
  Description of Artificial Sequence: Synthetic oligonucleotide
  Antisense strand to SEQ ID NO: 1631239
augucaaggagccaauccc

SEQ ID NO: 1631241 - RNA, 19 nt, Artificial Sequence
  Description of Artificial Sequence: Synthetic oligonucleotide
  Sense strand starting at position 1010 of SEQ ID NO: 1560881
ggcuccuugacaugcagua

SEQ ID NO: 1631242 - RNA, 19 nt, Artificial Sequence
  Description of Artificial Sequence: Synthetic oligonucleotide
  Antisense strand to SEQ ID NO: 1631241
uacugcaugucaaggagcc

SEQ ID NO: 1631243 - RNA, 19 nt, Artificial Sequence
  Description of Artificial Sequence: Synthetic oligonucleotide
  Sense strand starting at position 1040 of SEQ ID NO: 1560881
gcacuaggauugccugaca

SEQ ID NO: 1631244 - RNA, 19 nt, Artificial Sequence
  Description of Artificial Sequence: Synthetic oligonucleotide
  Antisense strand to SEQ ID NO: 1631243
ugucaggcaauccuagugc

SEQ ID NO: 1631245 - RNA, 19 nt, Artificial Sequence
  Description of Artificial Sequence: Synthetic oligonucleotide
  Sense strand starting at position 1043 of SEQ ID NO: 1560881
cuaggauugccugacacug

SEQ ID NO: 1631246 - RNA, 19 nt, Artificial Sequence
  Description of Artificial Sequence: Synthetic oligonucleotide
  Antisense strand to SEQ ID NO: 1631245
cagugucaggcaauccuag

SEQ ID NO: 1631247 - RNA, 19 nt, Artificial Sequence
  Description of Artificial Sequence: Synthetic oligonucleotide
  Sense strand starting at position 1101 of SEQ ID NO: 1560881
uugguuuccuccuugacaa

SEQ ID NO: 1631248 - RNA, 19 nt, Artificial Sequence
  Description of Artificial Sequence: Synthetic oligonucleotide
  Antisense strand to SEQ ID NO: 1631247
uugucaaggaggaaaccaa

SEQ ID NO: 1631249 - RNA, 19 nt, Artificial Sequence
  Description of Artificial Sequence: Synthetic oligonucleotide
  Sense strand starting at position 1102 of SEQ ID NO: 1560881
ugguuuccuccuugacaaa

SEQ ID NO: 1631250 - RNA, 19 nt, Artificial Sequence
  Description of Artificial Sequence: Synthetic oligonucleotide
  Antisense strand to SEQ ID NO: 1631249
uuugucaaggaggaaacca

SEQ ID NO: 1631251 - RNA, 19 nt, Artificial Sequence
  Description of Artificial Sequence: Synthetic oligonucleotide
  Sense strand starting at position 1488 of SEQ ID NO: 1560881
ccuugaguucuggagcacu

SEQ ID NO: 1631252 - RNA, 19 nt, Artificial Sequence
  Description of Artificial Sequence: Synthetic oligonucleotide
  Antisense strand to SEQ ID NO: 1631251
agugcuccagaacucaagg

SEQ ID NO: 1631253 - RNA, 19 nt, Artificial Sequence
  Description of Artificial Sequence: Synthetic oligonucleotide
  Sense strand starting at position 1745 of SEQ ID NO: 1560881
accauuaacugcuccggaa

SEQ ID NO: 1631254 - RNA, 19 nt, Artificial Sequence
  Description of Artificial Sequence: Synthetic oligonucleotide
  Antisense strand to SEQ ID NO: 1631253
uuccggagcaguuaauggu

SEQ ID NO: 1631255 - RNA, 19 nt, Artificial Sequence
  Description of Artificial Sequence: Synthetic oligonucleotide
  Sense strand starting at position 1747 of SEQ ID NO: 1560881
cauuaacugcuccggaagu

SEQ ID NO: 1631256 - RNA, 19 nt, Artificial Sequence
  Description of Artificial Sequence: Synthetic oligonucleotide
  Antisense strand to SEQ ID NO: 1631255
acuuccggagcaguuaaug

SEQ ID NO: 1631257 - RNA, 19 nt, Artificial Sequence
  Description of Artificial Sequence: Synthetic oligonucleotide
  Sense strand starting at position 1861 of SEQ ID NO: 1560881
ggcagagagccucgcacau

SEQ ID NO: 1631258 - RNA, 19 nt, Artificial Sequence
  Description of Artificial Sequence: Synthetic oligonucleotide
  Antisense strand to SEQ ID NO: 1631257
augugcgaggcucucugcc

SEQ ID NO: 1631259 - RNA, 19 nt, Artificial Sequence
  Description of Artificial Sequence: Synthetic oligonucleotide
  Sense strand starting at position 2156 of SEQ ID NO: 1560881
gggacuggauccuccguua

SEQ ID NO: 1631260 - RNA, 19 nt, Artificial Sequence
  Description of Artificial Sequence: Synthetic oligonucleotide
  Antisense strand to SEQ ID NO: 1631259
uaacggaggauccaguccc

SEQ ID NO: 1631261 - RNA, 19 nt, Artificial Sequence
  Description of Artificial Sequence: Synthetic oligonucleotide
  Sense strand starting at position 2163 of SEQ ID NO: 1560881
gauccuccguuagcagauu

SEQ ID NO: 1631262 - RNA, 19 nt, Artificial Sequence
  Description of Artificial Sequence: Synthetic oligonucleotide
  Antisense strand to SEQ ID NO: 1631261
aaucugcuaacggaggauc

SEQ ID NO: 1631263 - RNA, 19 nt, Artificial Sequence
  Description of Artificial Sequence: Synthetic oligonucleotide
  Sense strand starting at position 2233 of SEQ ID NO: 1560881
uucccaucugauggucauu

SEQ ID NO: 1631264 - RNA, 19 nt, Artificial Sequence
  Description of Artificial Sequence: Synthetic oligonucleotide
  Antisense strand to SEQ ID NO: 1631263
aaugaccaucagaugggaa

SEQ ID NO: 1631265 - RNA, 19 nt, Artificial Sequence
  Description of Artificial Sequence: Synthetic oligonucleotide
  Sense strand starting at position 2246 of SEQ ID NO: 1560881
gucauugucagucgaggaa

SEQ ID NO: 1631266 - RNA, 19 nt, Artificial Sequence
  Description of Artificial Sequence: Synthetic oligonucleotide
  Antisense strand to SEQ ID NO: 1631265
uuccucgacugacaaugac

SEQ ID NO: 1631267 - RNA, 19 nt, Artificial Sequence
  Description of Artificial Sequence: Synthetic oligonucleotide
  Sense strand starting at position 2316 of SEQ ID NO: 1560881
guucuaguuuccucaucua

SEQ ID NO: 1631268 - RNA, 19 nt, Artificial Sequence
  Description of Artificial Sequence: Synthetic oligonucleotide
  Antisense strand to SEQ ID NO: 1631267
uagaugaggaaacuagaac

SEQ ID NO: 1631269 - RNA, 19 nt, Artificial Sequence
  Description of Artificial Sequence: Synthetic oligonucleotide
  Sense strand starting at position 2383 of SEQ ID NO: 1560881
ggagcuaacacgugacaaa

SEQ ID NO: 1631270 - RNA, 19 nt, Artificial Sequence
  Description of Artificial Sequence: Synthetic oligonucleotide
  Antisense strand to SEQ ID NO: 1631269
uuugucacguguuagcucc

SEQ ID NO: 1631271 - RNA, 19 nt, Artificial Sequence
  Description of Artificial Sequence: Synthetic oligonucleotide
  Sense strand starting at position 2417 of SEQ ID NO: 1560881
gugguagugagcccuguuu

SEQ ID NO: 1631272 - RNA, 19 nt, Artificial Sequence
  Description of Artificial Sequence: Synthetic oligonucleotide
  Antisense strand to SEQ ID NO: 1631271
aaacagggcucacuaccac

SEQ ID NO: 1631273 - RNA, 19 nt, Artificial Sequence
  Description of Artificial Sequence: Synthetic oligonucleotide
  Sense strand starting at position 2419 of SEQ ID NO: 1560881
gguagugagcccuguuuaa

SEQ ID NO: 1631274 - RNA, 19 nt, Artificial Sequence
  Description of Artificial Sequence: Synthetic oligonucleotide
  Antisense strand to SEQ ID NO: 1631273
uuaaacagggcucacuacc

SEQ ID NO: 1631275 - RNA, 19 nt, Artificial Sequence
  Description of Artificial Sequence: Synthetic oligonucleotide
  Sense strand starting at position 2704 of SEQ ID NO: 1560881
agugcucagauccguuuaa

SEQ ID NO: 1631276 - RNA, 19 nt, Artificial Sequence
  Description of Artificial Sequence: Synthetic oligonucleotide
  Antisense strand to SEQ ID NO: 1631275
uuaaacggaucugagcacu

SEQ ID NO: 1631277 - RNA, 19 nt, Artificial Sequence
  Description of Artificial Sequence: Synthetic oligonucleotide
  Sense strand starting at position 2705 of SEQ ID NO: 1560881
gugcucagauccguuuaag

SEQ ID NO: 1631278 - RNA, 19 nt, Artificial Sequence
  Description of Artificial Sequence: Synthetic oligonucleotide
  Antisense strand to SEQ ID NO: 1631277
cuuaaacggaucugagcac

SEQ ID NO: 1631279 - RNA, 19 nt, Artificial Sequence
  Description of Artificial Sequence: Synthetic oligonucleotide
  Sense strand starting at position 2708 of SEQ ID NO: 1560881
cucagauccguuuaagucu

SEQ ID NO: 1631280 - RNA, 19 nt, Artificial Sequence
  Description of Artificial Sequence: Synthetic oligonucleotide
  Antisense strand to SEQ ID NO: 1631279
agacuuaaacggaucugag

SEQ ID NO: 1631281 - RNA, 19 nt, Artificial Sequence
  Description of Artificial Sequence: Synthetic oligonucleotide
  Sense strand starting at position 2717 of SEQ ID NO: 1560881
guuuaagucuuauuuagug

SEQ ID NO: 1631282 - RNA, 19 nt, Artificial Sequence
  Description of Artificial Sequence: Synthetic oligonucleotide
  Antisense strand to SEQ ID NO: 1631281
cacuaaauaagacuuaaac

SEQ ID NO: 1631283 - RNA, 19 nt, Artificial Sequence
  Description of Artificial Sequence: Synthetic oligonucleotide
  Sense strand starting at position 2739 of SEQ ID NO: 1560881
gcauucuuucgguaguggu

SEQ ID NO: 1631284 - RNA, 19 nt, Artificial Sequence
  Description of Artificial Sequence: Synthetic oligonucleotide
  Antisense strand to SEQ ID NO: 1631283
accacuaccgaaagaaugc

SEQ ID NO: 1631285 - RNA, 19 nt, Artificial Sequence
  Description of Artificial Sequence: Synthetic oligonucleotide
  Sense strand starting at position 2769 of SEQ ID NO: 1560881
acguuuaccuaguccuaau

SEQ ID NO: 1631286 - RNA, 19 nt, Artificial Sequence
  Description of Artificial Sequence: Synthetic oligonucleotide
  Antisense strand to SEQ ID NO: 1631285
auuaggacuagguaaacgu

SEQ ID NO: 1631287 - RNA, 19 nt, Artificial Sequence
  Description of Artificial Sequence: Synthetic oligonucleotide
  Sense strand starting at position 2782 of SEQ ID NO: 1560881
ccuaauuucggacgagguu

SEQ ID NO: 1631288 - RNA, 19 nt, Artificial Sequence
  Description of Artificial Sequence: Synthetic oligonucleotide
  Antisense strand to SEQ ID NO: 1631287
aaccucguccgaaauuagg

SEQ ID NO: 1631289 - RNA, 19 nt, Artificial Sequence
  Description of Artificial Sequence: Synthetic oligonucleotide
  Sense strand starting at position 2797 of SEQ ID NO: 1560881
gguuccaccugcuuucuaa

SEQ ID NO: 1631290 - RNA, 19 nt, Artificial Sequence
  Description of Artificial Sequence: Synthetic oligonucleotide
  Antisense strand to SEQ ID NO: 1631289
uuagaaagcagguggaacc

SEQ ID NO: 1631291 - RNA, 19 nt, Artificial Sequence
  Description of Artificial Sequence: Synthetic oligonucleotide
  Sense strand starting at position 2998 of SEQ ID NO: 1560881
ccuggcuuugcuggugaau

SEQ ID NO: 1631292 - RNA, 19 nt, Artificial Sequence
  Description of Artificial Sequence: Synthetic oligonucleotide
  Antisense strand to SEQ ID NO: 1631291
auucaccagcaaagccagg

SEQ ID NO: 1631293 - RNA, 19 nt, Artificial Sequence
  Description of Artificial Sequence: Synthetic oligonucleotide
  Sense strand starting at position 3001 of SEQ ID NO: 1560881
ggcuuugcuggugaauaug

SEQ ID NO: 1631294 - RNA, 19 nt, Artificial Sequence
  Description of Artificial Sequence: Synthetic oligonucleotide
  Antisense strand to SEQ ID NO: 1631293
cauauucaccagcaaagcc

SEQ ID NO: 1631295 - RNA, 19 nt, Artificial Sequence
  Description of Artificial Sequence: Synthetic oligonucleotide
  Sense strand starting at position 3011 of SEQ ID NO: 1560881
gugaauaugugggcucugu

SEQ ID NO: 1631296 - RNA, 19 nt, Artificial Sequence
  Description of Artificial Sequence: Synthetic oligonucleotide
  Antisense strand to SEQ ID NO: 1631295
acagagcccacauauucac

SEQ ID NO: 1631297 - RNA, 19 nt, Artificial Sequence
  Description of Artificial Sequence: Synthetic oligonucleotide
  Sense strand starting at position 3045 of SEQ ID NO: 1560881
ccucaagauuggguuccau

SEQ ID NO: 1631298 - RNA, 19 nt, Artificial Sequence
  Description of Artificial Sequence: Synthetic oligonucleotide
  Antisense strand to SEQ ID NO: 1631297
auggaacccaaucuugagg

SEQ ID NO: 1631299 - RNA, 19 nt, Artificial Sequence
  Description of Artificial Sequence: Synthetic oligonucleotide
  Sense strand starting at position 3054 of SEQ ID NO: 1560881
uggguuccauggucacaua

SEQ ID NO: 1631300 - RNA, 19 nt, Artificial Sequence
  Description of Artificial Sequence: Synthetic oligonucleotide
  Antisense strand to SEQ ID NO: 1631299
uaugugaccauggaaccca

SEQ ID NO: 1631301 - RNA, 19 nt, Artificial Sequence
  Description of Artificial Sequence: Synthetic oligonucleotide
  Sense strand starting at position 3055 of SEQ ID NO: 1560881
ggguuccauggucacauaa

SEQ ID NO: 1631302 - RNA, 19 nt, Artificial Sequence
  Description of Artificial Sequence: Synthetic oligonucleotide
  Antisense strand to SEQ ID NO: 1631301
uuaugugaccauggaaccc

SEQ ID NO: 1631303 - RNA, 19 nt, Artificial Sequence
  Description of Artificial Sequence: Synthetic oligonucleotide
  Sense strand starting at position 3469 of SEQ ID NO: 1560881
ucacauuuaucucagaggu

SEQ ID NO: 1631304 - RNA, 19 nt, Artificial Sequence
  Description of Artificial Sequence: Synthetic oligonucleotide
  Antisense strand to SEQ ID NO: 1631303
accucugagauaaauguga

SEQ ID NO: 1631305 - RNA, 19 nt, Artificial Sequence
  Description of Artificial Sequence: Synthetic oligonucleotide
  Sense strand starting at position 3471 of SEQ ID NO: 1560881
acauuuaucucagagguaa

SEQ ID NO: 1631306 - RNA, 19 nt, Artificial Sequence
  Description of Artificial Sequence: Synthetic oligonucleotide
  Antisense strand to SEQ ID NO: 1631305
uuaccucugagauaaaugu

SEQ ID NO: 1631307 - RNA, 19 nt, Artificial Sequence
  Description of Artificial Sequence: Synthetic oligonucleotide
  Sense strand starting at position 3813 of SEQ ID NO: 1560881
uaguguaaagaacguaaau

SEQ ID NO: 1631308 - RNA, 19 nt, Artificial Sequence
  Description of Artificial Sequence: Synthetic oligonucleotide
  Antisense strand to SEQ ID NO: 1631307
auuuacguucuuuacacua

SEQ ID NO: 1631309 - RNA, 19 nt, Artificial Sequence
  Description of Artificial Sequence: Synthetic oligonucleotide
  Sense strand starting at position 3815 of SEQ ID NO: 1560881
guguaaagaacguaaauug

SEQ ID NO: 1631310 - RNA, 19 nt, Artificial Sequence
  Description of Artificial Sequence: Synthetic oligonucleotide
  Antisense strand to SEQ ID NO: 1631309
caauuuacguucuuuacac

SEQ ID NO: 1631311 - RNA, 19 nt, Artificial Sequence
  Description of Artificial Sequence: Synthetic oligonucleotide
  Sense strand starting at position 3842 of SEQ ID NO: 1560881
gggccaauucugggaagag

SEQ ID NO: 1631312 - RNA, 19 nt, Artificial Sequence
  Description of Artificial Sequence: Synthetic oligonucleotide
  Antisense strand to SEQ ID NO: 1631311
cucuucccagaauuggccc

SEQ ID NO: 1631313 - RNA, 19 nt, Artificial Sequence
  Description of Artificial Sequence: Synthetic oligonucleotide
  Sense strand starting at position 3931 of SEQ ID NO: 1560881
cuauguagagacuggucaa

SEQ ID NO: 1631314 - RNA, 19 nt, Artificial Sequence
  Description of Artificial Sequence: Synthetic oligonucleotide
  Antisense strand to SEQ ID NO: 1631313
uugaccagucucuacauag

SEQ ID NO: 1631315 - RNA, 19 nt, Artificial Sequence
  Description of Artificial Sequence: Synthetic oligonucleotide
  Sense strand starting at position 144 of SEQ ID NO: 1560882
ccagucacuucugcuauca

SEQ ID NO: 1631316 - RNA, 19 nt, Artificial Sequence
  Description of Artificial Sequence: Synthetic oligonucleotide
  Antisense strand to SEQ ID NO: 1631315
ugauagcagaagugacugg

SEQ ID NO: 1631317 - RNA, 19 nt, Artificial Sequence
  Description of Artificial Sequence: Synthetic oligonucleotide
  Sense strand starting at position 454 of SEQ ID NO: 1560882
ccaccaucuuggucugacu

SEQ ID NO: 1631318 - RNA, 19 nt, Artificial Sequence
  Description of Artificial Sequence: Synthetic oligonucleotide
  Antisense strand to SEQ ID NO: 1631317
agucagaccaagauggugg

SEQ ID NO: 1631319 - RNA, 19 nt, Artificial Sequence
  Description of Artificial Sequence: Synthetic oligonucleotide
  Sense strand starting at position 606 of SEQ ID NO: 1560882
cuugaucggcucugagauc

SEQ ID NO: 1631320 - RNA, 19 nt, Artificial Sequence
  Description of Artificial Sequence: Synthetic oligonucleotide
  Antisense strand to SEQ ID NO: 1631319
gaucucagagccgaucaag

SEQ ID NO: 1631321 - RNA, 19 nt, Artificial Sequence
  Description of Artificial Sequence: Synthetic oligonucleotide
  Sense strand starting at position 615 of SEQ ID NO: 1560882
cucugagaucgccaugcuu

SEQ ID NO: 1631322 - RNA, 19 nt, Artificial Sequence
  Description of Artificial Sequence: Synthetic oligonucleotide
  Antisense strand to SEQ ID NO: 1631321
aagcauggcgaucucagag

SEQ ID NO: 1631323 - RNA, 19 nt, Artificial Sequence
  Description of Artificial Sequence: Synthetic oligonucleotide
  Sense strand starting at position 680 of SEQ ID NO: 1560882
aauugaugccuuuggguuu

SEQ ID NO: 1631324 - RNA, 19 nt, Artificial Sequence
  Description of Artificial Sequence: Synthetic oligonucleotide
  Antisense strand to SEQ ID NO: 1631323
aaacccaaaggcaucaauu

SEQ ID NO: 1631325 - RNA, 19 nt, Artificial Sequence
  Description of Artificial Sequence: Synthetic oligonucleotide
  Sense strand starting at position 722 of SEQ ID NO: 1560882
uggaguucuucuucugcuu

SEQ ID NO: 1631326 - RNA, 19 nt, Artificial Sequence
  Description of Artificial Sequence: Synthetic oligonucleotide
  Antisense strand to SEQ ID NO: 1631325
aagcagaagaagaacucca

SEQ ID NO: 1631327 - RNA, 19 nt, Artificial Sequence
  Description of Artificial Sequence: Synthetic oligonucleotide
  Sense strand starting at position 738 of SEQ ID NO: 1560882
cuucuuucuccuggagcga

SEQ ID NO: 1631328 - RNA, 19 nt, Artificial Sequence
  Description of Artificial Sequence: Synthetic oligonucleotide
  Antisense strand to SEQ ID NO: 1631327
ucgcuccaggagaaagaag

SEQ ID NO: 1631329 - RNA, 19 nt, Artificial Sequence
  Description of Artificial Sequence: Synthetic oligonucleotide
  Sense strand starting at position 914 of SEQ ID NO: 1560882
cugccaucuccucgaauuc

SEQ ID NO: 1631330 - RNA, 19 nt, Artificial Sequence
  Description of Artificial Sequence: Synthetic oligonucleotide
  Antisense strand to SEQ ID NO: 1631329
gaauucgaggagauggcag

SEQ ID NO: 1631331 - RNA, 19 nt, Artificial Sequence
  Description of Artificial Sequence: Synthetic oligonucleotide
  Sense strand starting at position 965 of SEQ ID NO: 1560882
ugcggaucucggcauccau

SEQ ID NO: 1631332 - RNA, 19 nt, Artificial Sequence
  Description of Artificial Sequence: Synthetic oligonucleotide
  Antisense strand to SEQ ID NO: 1631331
auggaugccgagauccgca

SEQ ID NO: 1631333 - RNA, 19 nt, Artificial Sequence
  Description of Artificial Sequence: Synthetic oligonucleotide
  Sense strand starting at position 973 of SEQ ID NO: 1560882
ucggcauccaugcagaaga

SEQ ID NO: 1631334 - RNA, 19 nt, Artificial Sequence
  Description of Artificial Sequence: Synthetic oligonucleotide
  Antisense strand to SEQ ID NO: 1631333
ucuucugcauggaugccga

SEQ ID NO: 1631335 - RNA, 19 nt, Artificial Sequence
  Description of Artificial Sequence: Synthetic oligonucleotide
  Sense strand starting at position 1168 of SEQ ID NO: 1560882
uggguagggucucuacaga

SEQ ID NO: 1631336 - RNA, 19 nt, Artificial Sequence
  Description of Artificial Sequence: Synthetic oligonucleotide
  Antisense strand to SEQ ID NO: 1631335
ucuguagagacccuaccca

SEQ ID NO: 1631337 - RNA, 19 nt, Artificial Sequence
  Description of Artificial Sequence: Synthetic oligonucleotide
  Sense strand starting at position 1379 of SEQ ID NO: 1560882
cugggaugccugugaccaa

SEQ ID NO: 1631338 - RNA, 19 nt, Artificial Sequence
  Description of Artificial Sequence: Synthetic oligonucleotide
  Antisense strand to SEQ ID NO: 1631337
uuggucacaggcaucccag

SEQ ID NO: 1631339 - RNA, 19 nt, Artificial Sequence
  Description of Artificial Sequence: Synthetic oligonucleotide
  Sense strand starting at position 1455 of SEQ ID NO: 1560882
cgccauggucuuggacauu

SEQ ID NO: 1631340 - RNA, 19 nt, Artificial Sequence
  Description of Artificial Sequence: Synthetic oligonucleotide
  Antisense strand to SEQ ID NO: 1631339
aauguccaagaccauggcg

SEQ ID NO: 1631341 - RNA, 19 nt, Artificial Sequence
  Description of Artificial Sequence: Synthetic oligonucleotide
  Sense strand starting at position 1486 of SEQ ID NO: 1560882
accuacuauguguaguaaa

SEQ ID NO: 1631342 - RNA, 19 nt, Artificial Sequence
  Description of Artificial Sequence: Synthetic oligonucleotide
  Antisense strand to SEQ ID NO: 1631341
uuuacuacacauaguaggu

SEQ ID NO: 1631343 - RNA, 19 nt, Artificial Sequence
  Description of Artificial Sequence: Synthetic oligonucleotide
  Sense strand starting at position 1493 of SEQ ID NO: 1560882
auguguaguaaauagucua

SEQ ID NO: 1631344 - RNA, 19 nt, Artificial Sequence
  Description of Artificial Sequence: Synthetic oligonucleotide
  Antisense strand to SEQ ID NO: 1631343
uagacuauuuacuacacau

SEQ ID NO: 1631345 - RNA, 19 nt, Artificial Sequence
  Description of Artificial Sequence: Synthetic oligonucleotide
  Sense strand starting at position 1496 of SEQ ID NO: 1560882
uguaguaaauagucuauca

SEQ ID NO: 1631346 - RNA, 19 nt, Artificial Sequence
  Description of Artificial Sequence: Synthetic oligonucleotide
  Antisense strand to SEQ ID NO: 1631345
ugauagacuauuuacuaca

SEQ ID NO: 1631347 - RNA, 19 nt, Artificial Sequence
  Description of Artificial Sequence: Synthetic oligonucleotide
  Sense strand starting at position 1532 of SEQ ID NO: 1560882
gcggucuccaaacaguaau

SEQ ID NO: 1631348 - RNA, 19 nt, Artificial Sequence
  Description of Artificial Sequence: Synthetic oligonucleotide
  Antisense strand to SEQ ID NO: 1631347
auuacuguuuggagaccgc

SEQ ID NO: 1631349 - RNA, 19 nt, Artificial Sequence
  Description of Artificial Sequence: Synthetic oligonucleotide
  Sense strand starting at position 1543 of SEQ ID NO: 1560882
acaguaauccugcaaggug

SEQ ID NO: 1631350 - RNA, 19 nt, Artificial Sequence
  Description of Artificial Sequence: Synthetic oligonucleotide
  Antisense strand to SEQ ID NO: 1631349
caccuugcaggauuacugu

SEQ ID NO: 1631351 - RNA, 19 nt, Artificial Sequence
  Description of Artificial Sequence: Synthetic oligonucleotide
  Sense strand starting at position 1576 of SEQ ID NO: 1560882
ucacguucccaggaagaug

SEQ ID NO: 1631352 - RNA, 19 nt, Artificial Sequence
  Description of Artificial Sequence: Synthetic oligonucleotide
  Antisense strand to SEQ ID NO: 1631351
caucuuccugggaacguga

SEQ ID NO: 1631353 - RNA, 19 nt, Artificial Sequence
  Description of Artificial Sequence: Synthetic oligonucleotide
  Sense strand starting at position 1764 of SEQ ID NO: 1560882
cgggacuuacuuggcagau

SEQ ID NO: 1631354 - RNA, 19 nt, Artificial Sequence
  Description of Artificial Sequence: Synthetic oligonucleotide
  Antisense strand to SEQ ID NO: 1631353
aucugccaaguaagucccg

SEQ ID NO: 1631355 - RNA, 19 nt, Artificial Sequence
  Description of Artificial Sequence: Synthetic oligonucleotide
  Sense strand starting at position 1765 of SEQ ID NO: 1560882
gggacuuacuuggcagauc

SEQ ID NO: 1631356 - RNA, 19 nt, Artificial Sequence
  Description of Artificial Sequence: Synthetic oligonucleotide
  Antisense strand to SEQ ID NO: 1631355
gaucugccaaguaaguccc

SEQ ID NO: 1631357 - RNA, 19 nt, Artificial Sequence
  Description of Artificial Sequence: Synthetic oligonucleotide
  Sense strand starting at position 2131 of SEQ ID NO: 1560882
gcaagaguggccuguucag

SEQ ID NO: 1631358 - RNA, 19 nt, Artificial Sequence
  Description of Artificial Sequence: Synthetic oligonucleotide
  Antisense strand to SEQ ID NO: 1631357
cugaacaggccacucuugc

SEQ ID NO: 1631359 - RNA, 19 nt, Artificial Sequence
  Description of Artificial Sequence: Synthetic oligonucleotide
  Sense strand starting at position 2233 of SEQ ID NO: 1560882
ggguuaggucgaugagaag

SEQ ID NO: 1631360 - RNA, 19 nt, Artificial Sequence
  Description of Artificial Sequence: Synthetic oligonucleotide
  Antisense strand to SEQ ID NO: 1631359
cuucucaucgaccuaaccc

SEQ ID NO: 1631361 - RNA, 19 nt, Artificial Sequence
  Description of Artificial Sequence: Synthetic oligonucleotide
  Sense strand starting at position 2269 of SEQ ID NO: 1560882
gcacccacugacuguauua

SEQ ID NO: 1631362 - RNA, 19 nt, Artificial Sequence
  Description of Artificial Sequence: Synthetic oligonucleotide
  Antisense strand to SEQ ID NO: 1631361
uaauacagucagugggugc

SEQ ID NO: 1631363 - RNA, 19 nt, Artificial Sequence
  Description of Artificial Sequence: Synthetic oligonucleotide
  Sense strand starting at position 2364 of SEQ ID NO: 1560882
gcuuuaaucuucuuggguu

SEQ ID NO: 1631364 - RNA, 19 nt, Artificial Sequence
  Description of Artificial Sequence: Synthetic oligonucleotide
  Antisense strand to SEQ ID NO: 1631363
aacccaagaagauuaaagc

SEQ ID NO: 1631365 - RNA, 19 nt, Artificial Sequence
  Description of Artificial Sequence: Synthetic oligonucleotide
  Sense strand starting at position 2497 of SEQ ID NO: 1560882
cccuucuagcaugaggaua

SEQ ID NO: 1631366 - RNA, 19 nt, Artificial Sequence
  Description of Artificial Sequence: Synthetic oligonucleotide
  Antisense strand to SEQ ID NO: 1631365
uauccucaugcuagaaggg

SEQ ID NO: 1631367 - RNA, 19 nt, Artificial Sequence
  Description of Artificial Sequence: Synthetic oligonucleotide
  Sense strand starting at position 2510 of SEQ ID NO: 1560882
aggauaaugccucgccuuu

SEQ ID NO: 1631368 - RNA, 19 nt, Artificial Sequence
  Description of Artificial Sequence: Synthetic oligonucleotide
  Antisense strand to SEQ ID NO: 1631367
aaaggcgaggcauuauccu

SEQ ID NO: 1631369 - RNA, 19 nt, Artificial Sequence
  Description of Artificial Sequence: Synthetic oligonucleotide
  Sense strand starting at position 2608 of SEQ ID NO: 1560882
ccuacagagaaguguuagu

SEQ ID NO: 1631370 - RNA, 19 nt, Artificial Sequence
  Description of Artificial Sequence: Synthetic oligonucleotide
  Antisense strand to SEQ ID NO: 1631369
acuaacacuucucuguagg

SEQ ID NO: 1631371 - RNA, 19 nt, Artificial Sequence
  Description of Artificial Sequence: Synthetic oligonucleotide
  Sense strand starting at position 2613 of SEQ ID NO: 1560882
agagaaguguuaguccaaa

SEQ ID NO: 1631372 - RNA, 19 nt, Artificial Sequence
  Description of Artificial Sequence: Synthetic oligonucleotide
  Antisense strand to SEQ ID NO: 1631371
uuuggacuaacacuucucu

SEQ ID NO: 1631373 - RNA, 19 nt, Artificial Sequence
  Description of Artificial Sequence: Synthetic oligonucleotide
  Sense strand starting at position 2642 of SEQ ID NO: 1560882
uuuguaagcccugacuauu

SEQ ID NO: 1631374 - RNA, 19 nt, Artificial Sequence
  Description of Artificial Sequence: Synthetic oligonucleotide
  Antisense strand to SEQ ID NO: 1631373
aauagucagggcuuacaaa

SEQ ID NO: 1631375 - RNA, 19 nt, Artificial Sequence
  Description of Artificial Sequence: Synthetic oligonucleotide
  Sense strand starting at position 3216 of SEQ ID NO: 1560882
gcaaauuggcaguaacuua

SEQ ID NO: 1631376 - RNA, 19 nt, Artificial Sequence
  Description of Artificial Sequence: Synthetic oligonucleotide
  Antisense strand to SEQ ID NO: 1631375
uaaguuacugccaauuugc

SEQ ID NO: 1631377 - RNA, 19 nt, Artificial Sequence
  Description of Artificial Sequence: Synthetic oligonucleotide
  Sense strand starting at position 3278 of SEQ ID NO: 1560882
gcaugucuuauggagagag

SEQ ID NO: 1631378 - RNA, 19 nt, Artificial Sequence
  Description of Artificial Sequence: Synthetic oligonucleotide
  Antisense strand to SEQ ID NO: 1631377
cucucuccauaagacaugc

SEQ ID NO: 1631379 - RNA, 19 nt, Artificial Sequence
  Description of Artificial Sequence: Synthetic oligonucleotide
  Sense strand starting at position 3282 of SEQ ID NO: 1560882
gucuuauggagagaggcuu

SEQ ID NO: 1631380 - RNA, 19 nt, Artificial Sequence
  Description of Artificial Sequence: Synthetic oligonucleotide
  Antisense strand to SEQ ID NO: 1631379
aagccucucuccauaagac

SEQ ID NO: 1631381 - RNA, 19 nt, Artificial Sequence
  Description of Artificial Sequence: Synthetic oligonucleotide
  Sense strand starting at position 3332 of SEQ ID NO: 1560882
caaugugauccucagugga

SEQ ID NO: 1631382 - RNA, 19 nt, Artificial Sequence
  Description of Artificial Sequence: Synthetic oligonucleotide
  Antisense strand to SEQ ID NO: 1631381
uccacugaggaucacauug

SEQ ID NO: 1631383 - RNA, 19 nt, Artificial Sequence
  Description of Artificial Sequence: Synthetic oligonucleotide
  Sense strand starting at position 3334 of SEQ ID NO: 1560882
augugauccucaguggagu

SEQ ID NO: 1631384 - RNA, 19 nt, Artificial Sequence
  Description of Artificial Sequence: Synthetic oligonucleotide
  Antisense strand to SEQ ID NO: 1631383
acuccacugaggaucacau

SEQ ID NO: 1631385 - RNA, 19 nt, Artificial Sequence
  Description of Artificial Sequence: Synthetic oligonucleotide
  Sense strand starting at position 3381 of SEQ ID NO: 1560882
gcccaugagcaagaacuuu

SEQ ID NO: 1631386 - RNA, 19 nt, Artificial Sequence
  Description of Artificial Sequence: Synthetic oligonucleotide
  Antisense strand to SEQ ID NO: 1631385
aaaguucuugcucaugggc

SEQ ID NO: 1631387 - RNA, 19 nt, Artificial Sequence
  Description of Artificial Sequence: Synthetic oligonucleotide
  Sense strand starting at position 3389 of SEQ ID NO: 1560882
gcaagaacuuuguuaauag

SEQ ID NO: 1631388 - RNA, 19 nt, Artificial Sequence
  Description of Artificial Sequence: Synthetic oligonucleotide
  Antisense strand to SEQ ID NO: 1631387
cuauuaacaaaguucuugc

SEQ ID NO: 1631389 - RNA, 19 nt, Artificial Sequence
  Description of Artificial Sequence: Synthetic oligonucleotide
  Sense strand starting at position 3835 of SEQ ID NO: 1560882
cuuccugauuuggaaguuu

SEQ ID NO: 1631390 - RNA, 19 nt, Artificial Sequence
  Description of Artificial Sequence: Synthetic oligonucleotide
  Antisense strand to SEQ ID NO: 1631389
aaacuuccaaaucaggaag

SEQ ID NO: 1631391 - RNA, 19 nt, Artificial Sequence
  Description of Artificial Sequence: Synthetic oligonucleotide
  Sense strand starting at position 3866 of SEQ ID NO: 1560882
gggaucucaucugaaagau

SEQ ID NO: 1631392 - RNA, 19 nt, Artificial Sequence
  Description of Artificial Sequence: Synthetic oligonucleotide
  Antisense strand to SEQ ID NO: 1631391
aucuuucagaugagauccc

SEQ ID NO: 1631393 - RNA, 19 nt, Artificial Sequence
  Description of Artificial Sequence: Synthetic oligonucleotide
  Sense strand starting at position 3876 of SEQ ID NO: 1560882
cugaaagaugcauggaagu

SEQ ID NO: 1631394 - RNA, 19 nt, Artificial Sequence
  Description of Artificial Sequence: Synthetic oligonucleotide
  Antisense strand to SEQ ID NO: 1631393
acuuccaugcaucuuucag

SEQ ID NO: 1631395 - RNA, 19 nt, Artificial Sequence
  Description of Artificial Sequence: Synthetic oligonucleotide
  Sense strand starting at position 400 of SEQ ID NO: 1560883
ccguuaguguccuuggaca

SEQ ID NO: 1631396 - RNA, 19 nt, Artificial Sequence
  Description of Artificial Sequence: Synthetic oligonucleotide
  Antisense strand to SEQ ID NO: 1631395
uguccaaggacacuaacgg

SEQ ID NO: 1631397 - RNA, 19 nt, Artificial Sequence
  Description of Artificial Sequence: Synthetic oligonucleotide
  Sense strand starting at position 402 of SEQ ID NO: 1560883
guuaguguccuuggacaug

SEQ ID NO: 1631398 - RNA, 19 nt, Artificial Sequence
  Description of Artificial Sequence: Synthetic oligonucleotide
  Antisense strand to SEQ ID NO: 1631397
cauguccaaggacacuaac

SEQ ID NO: 1631399 - RNA, 19 nt, Artificial Sequence
  Description of Artificial Sequence: Synthetic oligonucleotide
  Sense strand starting at position 708 of SEQ ID NO: 1560883
gguguucaagcggauggau

SEQ ID NO: 1631400 - RNA, 19 nt, Artificial Sequence
  Description of Artificial Sequence: Synthetic oligonucleotide
  Antisense strand to SEQ ID NO: 1631399
auccauccgcuugaacacc

SEQ ID NO: 1631401 - RNA, 19 nt, Artificial Sequence
  Description of Artificial Sequence: Synthetic oligonucleotide
  Sense strand starting at position 751 of SEQ ID NO: 1560883
gccucuucuuucuucgauu

SEQ ID NO: 1631402 - RNA, 19 nt, Artificial Sequence
  Description of Artificial Sequence: Synthetic oligonucleotide
  Antisense strand to SEQ ID NO: 1631401
aaucgaagaaagaagaggc

SEQ ID NO: 1631403 - RNA, 19 nt, Artificial Sequence
  Description of Artificial Sequence: Synthetic oligonucleotide
  Sense strand starting at position 754 of SEQ ID NO: 1560883
ucuucuuucuucgauuugu

SEQ ID NO: 1631404 - RNA, 19 nt, Artificial Sequence
  Description of Artificial Sequence: Synthetic oligonucleotide
  Antisense strand to SEQ ID NO: 1631403
acaaaucgaagaaagaaga

SEQ ID NO: 1631405 - RNA, 19 nt, Artificial Sequence
  Description of Artificial Sequence: Synthetic oligonucleotide
  Sense strand starting at position 760 of SEQ ID NO: 1560883
uucuucgauuugucgguga

SEQ ID NO: 1631406 - RNA, 19 nt, Artificial Sequence
  Description of Artificial Sequence: Synthetic oligonucleotide
  Antisense strand to SEQ ID NO: 1631405
ucaccgacaaaucgaagaa

SEQ ID NO: 1631407 - RNA, 19 nt, Artificial Sequence
  Description of Artificial Sequence: Synthetic oligonucleotide
  Sense strand starting at position 764 of SEQ ID NO: 1560883
ucgauuugucggugacggu

SEQ ID NO: 1631408 - RNA, 19 nt, Artificial Sequence
  Description of Artificial Sequence: Synthetic oligonucleotide
  Antisense strand to SEQ ID NO: 1631407
accgucaccgacaaaucga

SEQ ID NO: 1631409 - RNA, 19 nt, Artificial Sequence
  Description of Artificial Sequence: Synthetic oligonucleotide
  Sense strand starting at position 923 of SEQ ID NO: 1560883
ggucgaucuccucgaucac

SEQ ID NO: 1631410 - RNA, 19 nt, Artificial Sequence
  Description of Artificial Sequence: Synthetic oligonucleotide
  Antisense strand to SEQ ID NO: 1631409
gugaucgaggagaucgacc

SEQ ID NO: 1631411 - RNA, 19 nt, Artificial Sequence
  Description of Artificial Sequence: Synthetic oligonucleotide
  Sense strand starting at position 947 of SEQ ID NO: 1560883
ccaggcucucgucggaaga

SEQ ID NO: 1631412 - RNA, 19 nt, Artificial Sequence
  Description of Artificial Sequence: Synthetic oligonucleotide
  Antisense strand to SEQ ID NO: 1631411
ucuuccgacgagagccugg

SEQ ID NO: 1631413 - RNA, 19 nt, Artificial Sequence
  Description of Artificial Sequence: Synthetic oligonucleotide
  Sense strand starting at position 960 of SEQ ID NO: 1560883
ggaagaguccucggccuca

SEQ ID NO: 1631414 - RNA, 19 nt, Artificial Sequence
  Description of Artificial Sequence: Synthetic oligonucleotide
  Antisense strand to SEQ ID NO: 1631413
ugaggccgaggacucuucc

SEQ ID NO: 1631415 - RNA, 19 nt, Artificial Sequence
  Description of Artificial Sequence: Synthetic oligonucleotide
  Sense strand starting at position 1304 of SEQ ID NO: 1560883
cugggaucucccugggaau

SEQ ID NO: 1631416 - RNA, 19 nt, Artificial Sequence
  Description of Artificial Sequence: Synthetic oligonucleotide
  Antisense strand to SEQ ID NO: 1631415
auucccagggagaucccag

SEQ ID NO: 1631417 - RNA, 19 nt, Artificial Sequence
  Description of Artificial Sequence: Synthetic oligonucleotide
  Sense strand starting at position 1305 of SEQ ID NO: 1560883
ugggaucucccugggaaug

SEQ ID NO: 1631418 - RNA, 19 nt, Artificial Sequence
  Description of Artificial Sequence: Synthetic oligonucleotide
  Antisense strand to SEQ ID NO: 1631417
cauucccagggagauccca

SEQ ID NO: 1631419 - RNA, 19 nt, Artificial Sequence
  Description of Artificial Sequence: Synthetic oligonucleotide
  Sense strand starting at position 1316 of SEQ ID NO: 1560883
ugggaauggcagcgugauu

SEQ ID NO: 1631420 - RNA, 19 nt, Artificial Sequence
  Description of Artificial Sequence: Synthetic oligonucleotide
  Antisense strand to SEQ ID NO: 1631419
aaucacgcugccauuccca

SEQ ID NO: 1631421 - RNA, 19 nt, Artificial Sequence
  Description of Artificial Sequence: Synthetic oligonucleotide
  Sense strand starting at position 1327 of SEQ ID NO: 1560883
gcgugauugacguccucca

SEQ ID NO: 1631422 - RNA, 19 nt, Artificial Sequence
  Description of Artificial Sequence: Synthetic oligonucleotide
  Antisense strand to SEQ ID NO: 1631421
uggaggacgucaaucacgc

SEQ ID NO: 1631423 - RNA, 19 nt, Artificial Sequence
  Description of Artificial Sequence: Synthetic oligonucleotide
  Sense strand starting at position 1769 of SEQ ID NO: 1560883
uccagagcugucugaggau

SEQ ID NO: 1631424 - RNA, 19 nt, Artificial Sequence
  Description of Artificial Sequence: Synthetic oligonucleotide
  Antisense strand to SEQ ID NO: 1631423
auccucagacagcucugga

SEQ ID NO: 1631425 - RNA, 19 nt, Artificial Sequence
  Description of Artificial Sequence: Synthetic oligonucleotide
  Sense strand starting at position 1803 of SEQ ID NO: 1560883
gugucugcuuuccaggaca

SEQ ID NO: 1631426 - RNA, 19 nt, Artificial Sequence
  Description of Artificial Sequence: Synthetic oligonucleotide
  Antisense strand to SEQ ID NO: 1631425
uguccuggaaagcagacac

SEQ ID NO: 1631427 - RNA, 19 nt, Artificial Sequence
  Description of Artificial Sequence: Synthetic oligonucleotide
  Sense strand starting at position 1971 of SEQ ID NO: 1560883
gccugaaucucagcaguuc

SEQ ID NO: 1631428 - RNA, 19 nt, Artificial Sequence
  Description of Artificial Sequence: Synthetic oligonucleotide
  Antisense strand to SEQ ID NO: 1631427
gaacugcugagauucaggc

SEQ ID NO: 1631429 - RNA, 19 nt, Artificial Sequence
  Description of Artificial Sequence: Synthetic oligonucleotide
  Sense strand starting at position 2127 of SEQ ID NO: 1560883
cuuaaaggucccgaugaca

SEQ ID NO: 1631430 - RNA, 19 nt, Artificial Sequence
  Description of Artificial Sequence: Synthetic oligonucleotide
  Antisense strand to SEQ ID NO: 1631429
ugucaucgggaccuuuaag

SEQ ID NO: 1631431 - RNA, 19 nt, Artificial Sequence
  Description of Artificial Sequence: Synthetic oligonucleotide
  Sense strand starting at position 2373 of SEQ ID NO: 1560883
ccaggacuuacucgggaua

SEQ ID NO: 1631432 - RNA, 19 nt, Artificial Sequence
  Description of Artificial Sequence: Synthetic oligonucleotide
  Antisense strand to SEQ ID NO: 1631431
uaucccgaguaaguccugg

SEQ ID NO: 1631433 - RNA, 19 nt, Artificial Sequence
  Description of Artificial Sequence: Synthetic oligonucleotide
  Sense strand starting at position 2375 of SEQ ID NO: 1560883
aggacuuacucgggauacu

SEQ ID NO: 1631434 - RNA, 19 nt, Artificial Sequence
  Description of Artificial Sequence: Synthetic oligonucleotide
  Antisense strand to SEQ ID NO: 1631433
aguaucccgaguaaguccu

SEQ ID NO: 1631435 - RNA, 19 nt, Artificial Sequence
  Description of Artificial Sequence: Synthetic oligonucleotide
  Sense strand starting at position 2384 of SEQ ID NO: 1560883
ucgggauacuggccucauu

SEQ ID NO: 1631436 - RNA, 19 nt, Artificial Sequence
  Description of Artificial Sequence: Synthetic oligonucleotide
  Antisense strand to SEQ ID NO: 1631435
aaugaggccaguaucccga

SEQ ID NO: 1631437 - RNA, 19 nt, Artificial Sequence
  Description of Artificial Sequence: Synthetic oligonucleotide
  Sense strand starting at position 2407 of SEQ ID NO: 1560883
guauaugggucucaguauc

SEQ ID NO: 1631438 - RNA, 19 nt, Artificial Sequence
  Description of Artificial Sequence: Synthetic oligonucleotide
  Antisense strand to SEQ ID NO: 1631437
gauacugagacccauauac

SEQ ID NO: 1631439 - RNA, 19 nt, Artificial Sequence
  Description of Artificial Sequence: Synthetic oligonucleotide
  Sense strand starting at position 2529 of SEQ ID NO: 1560883
ccauacacguuccuguauu

SEQ ID NO: 1631440 - RNA, 19 nt, Artificial Sequence
  Description of Artificial Sequence: Synthetic oligonucleotide
  Antisense strand to SEQ ID NO: 1631439
aauacaggaacguguaugg

SEQ ID NO: 1631441 - RNA, 19 nt, Artificial Sequence
  Description of Artificial Sequence: Synthetic oligonucleotide
  Sense strand starting at position 2537 of SEQ ID NO: 1560883
guuccuguauucugaacua

SEQ ID NO: 1631442 - RNA, 19 nt, Artificial Sequence
  Description of Artificial Sequence: Synthetic oligonucleotide
  Antisense strand to SEQ ID NO: 1631441
uaguucagaauacaggaac

SEQ ID NO: 1631443 - RNA, 19 nt, Artificial Sequence
  Description of Artificial Sequence: Synthetic oligonucleotide
  Sense strand starting at position 2548 of SEQ ID NO: 1560883
cugaacuaugcaugcacaa

SEQ ID NO: 1631444 - RNA, 19 nt, Artificial Sequence
  Description of Artificial Sequence: Synthetic oligonucleotide
  Antisense strand to SEQ ID NO: 1631443
uugugcaugcauaguucag

SEQ ID NO: 1631445 - RNA, 19 nt, Artificial Sequence
  Description of Artificial Sequence: Synthetic oligonucleotide
  Sense strand starting at position 2587 of SEQ ID NO: 1560883
acgcuuugagcauauguau

SEQ ID NO: 1631446 - RNA, 19 nt, Artificial Sequence
  Description of Artificial Sequence: Synthetic oligonucleotide
  Antisense strand to SEQ ID NO: 1631445
auacauaugcucaaagcgu

SEQ ID NO: 1631447 - RNA, 19 nt, Artificial Sequence
  Description of Artificial Sequence: Synthetic oligonucleotide
  Sense strand starting at position 2590 of SEQ ID NO: 1560883
cuuugagcauauguaugau

SEQ ID NO: 1631448 - RNA, 19 nt, Artificial Sequence
  Description of Artificial Sequence: Synthetic oligonucleotide
  Antisense strand to SEQ ID NO: 1631447
aucauacauaugcucaaag

SEQ ID NO: 1631449 - RNA, 19 nt, Artificial Sequence
  Description of Artificial Sequence: Synthetic oligonucleotide
  Sense strand starting at position 2593 of SEQ ID NO: 1560883
ugagcauauguaugauugu

SEQ ID NO: 1631450 - RNA, 19 nt, Artificial Sequence
  Description of Artificial Sequence: Synthetic oligonucleotide
  Antisense strand to SEQ ID NO: 1631449
acaaucauacauaugcuca

SEQ ID NO: 1631451 - RNA, 19 nt, Artificial Sequence
  Description of Artificial Sequence: Synthetic oligonucleotide
  Sense strand starting at position 2596 of SEQ ID NO: 1560883
gcauauguaugauugugag

SEQ ID NO: 1631452 - RNA, 19 nt, Artificial Sequence
  Description of Artificial Sequence: Synthetic oligonucleotide
  Antisense strand to SEQ ID NO: 1631451
cucacaaucauacauaugc

SEQ ID NO: 1631453 - RNA, 19 nt, Artificial Sequence
  Description of Artificial Sequence: Synthetic oligonucleotide
  Sense strand starting at position 2600 of SEQ ID NO: 1560883
auguaugauugugagacca

SEQ ID NO: 1631454 - RNA, 19 nt, Artificial Sequence
  Description of Artificial Sequence: Synthetic oligonucleotide
  Antisense strand to SEQ ID NO: 1631453
uggucucacaaucauacau

SEQ ID NO: 1631455 - RNA, 19 nt, Artificial Sequence
  Description of Artificial Sequence: Synthetic oligonucleotide
  Sense strand starting at position 2670 of SEQ ID NO: 1560883
gcgugugaacgucagucau

SEQ ID NO: 1631456 - RNA, 19 nt, Artificial Sequence
  Description of Artificial Sequence: Synthetic oligonucleotide
  Antisense strand to SEQ ID NO: 1631455
augacugacguucacacgc

SEQ ID NO: 1631457 - RNA, 19 nt, Artificial Sequence
  Description of Artificial Sequence: Synthetic oligonucleotide
  Sense strand starting at position 2672 of SEQ ID NO: 1560883
gugugaacgucagucauag

SEQ ID NO: 1631458 - RNA, 19 nt, Artificial Sequence
  Description of Artificial Sequence: Synthetic oligonucleotide
  Antisense strand to SEQ ID NO: 1631457
cuaugacugacguucacac

SEQ ID NO: 1631459 - RNA, 19 nt, Artificial Sequence
  Description of Artificial Sequence: Synthetic oligonucleotide
  Sense strand starting at position 2680 of SEQ ID NO: 1560883
gucagucauagcuacugua

SEQ ID NO: 1631460 - RNA, 19 nt, Artificial Sequence
  Description of Artificial Sequence: Synthetic oligonucleotide
  Antisense strand to SEQ ID NO: 1631459
uacaguagcuaugacugac

SEQ ID NO: 1631461 - RNA, 19 nt, Artificial Sequence
  Description of Artificial Sequence: Synthetic oligonucleotide
  Sense strand starting at position 2683 of SEQ ID NO: 1560883
agucauagcuacuguaaac

SEQ ID NO: 1631462 - RNA, 19 nt, Artificial Sequence
  Description of Artificial Sequence: Synthetic oligonucleotide
  Antisense strand to SEQ ID NO: 1631461
guuuacaguagcuaugacu

SEQ ID NO: 1631463 - RNA, 19 nt, Artificial Sequence
  Description of Artificial Sequence: Synthetic oligonucleotide
  Sense strand starting at position 2752 of SEQ ID NO: 1560883
auaugaaucuggcucugua

SEQ ID NO: 1631464 - RNA, 19 nt, Artificial Sequence
  Description of Artificial Sequence: Synthetic oligonucleotide
  Antisense strand to SEQ ID NO: 1631463
uacagagccagauucauau

SEQ ID NO: 1631465 - RNA, 19 nt, Artificial Sequence
  Description of Artificial Sequence: Synthetic oligonucleotide
  Sense strand starting at position 2777 of SEQ ID NO: 1560883
cugguagguuuauaucuca

SEQ ID NO: 1631466 - RNA, 19 nt, Artificial Sequence
  Description of Artificial Sequence: Synthetic oligonucleotide
  Antisense strand to SEQ ID NO: 1631465
ugagauauaaaccuaccag

SEQ ID NO: 1631467 - RNA, 19 nt, Artificial Sequence
  Description of Artificial Sequence: Synthetic oligonucleotide
  Sense strand starting at position 3166 of SEQ ID NO: 1560883
ggguucucaugaggauuaa

SEQ ID NO: 1631468 - RNA, 19 nt, Artificial Sequence
  Description of Artificial Sequence: Synthetic oligonucleotide
  Antisense strand to SEQ ID NO: 1631467
uuaauccucaugagaaccc

SEQ ID NO: 1631469 - RNA, 19 nt, Artificial Sequence
  Description of Artificial Sequence: Synthetic oligonucleotide
  Sense strand starting at position 3229 of SEQ ID NO: 1560883
gcuggugcuccaugaaaga

SEQ ID NO: 1631470 - RNA, 19 nt, Artificial Sequence
  Description of Artificial Sequence: Synthetic oligonucleotide
  Antisense strand to SEQ ID NO: 1631469
ucuuucauggagcaccagc

SEQ ID NO: 1631471 - RNA, 19 nt, Artificial Sequence
  Description of Artificial Sequence: Synthetic oligonucleotide
  Sense strand starting at position 3259 of SEQ ID NO: 1560883
aguauuuguugagaacuua

SEQ ID NO: 1631472 - RNA, 19 nt, Artificial Sequence
  Description of Artificial Sequence: Synthetic oligonucleotide
  Antisense strand to SEQ ID NO: 1631471
uaaguucucaacaaauacu

SEQ ID NO: 1631473 - RNA, 19 nt, Artificial Sequence
  Description of Artificial Sequence: Synthetic oligonucleotide
  Sense strand starting at position 3672 of SEQ ID NO: 1560883
ugggcaaccuugucucaaa

SEQ ID NO: 1631474 - RNA, 19 nt, Artificial Sequence
  Description of Artificial Sequence: Synthetic oligonucleotide
  Antisense strand to SEQ ID NO: 1631473
uuugagacaagguugccca

SEQ ID NO: 1631475 - RNA, 19 nt, Artificial Sequence
  Description of Artificial Sequence: Synthetic oligonucleotide
  Sense strand starting at position 66 of SEQ ID NO: 1560884
ugggaagacuuccacaaca

SEQ ID NO: 1631476 - RNA, 19 nt, Artificial Sequence
  Description of Artificial Sequence: Synthetic oligonucleotide
  Antisense strand to SEQ ID NO: 1631475
uguuguggaagucuuccca

SEQ ID NO: 1631477 - RNA, 19 nt, Artificial Sequence
  Description of Artificial Sequence: Synthetic oligonucleotide
  Sense strand starting at position 89 of SEQ ID NO: 1560884
gguguaagcugauuacuca

SEQ ID NO: 1631478 - RNA, 19 nt, Artificial Sequence
  Description of Artificial Sequence: Synthetic oligonucleotide
  Antisense strand to SEQ ID NO: 1631477
ugaguaaucagcuuacacc

SEQ ID NO: 1631479 - RNA, 19 nt, Artificial Sequence
  Description of Artificial Sequence: Synthetic oligonucleotide
  Sense strand starting at position 90 of SEQ ID NO: 1560884
guguaagcugauuacucaa

SEQ ID NO: 1631480 - RNA, 19 nt, Artificial Sequence
  Description of Artificial Sequence: Synthetic oligonucleotide
  Antisense strand to SEQ ID NO: 1631479
uugaguaaucagcuuacac

SEQ ID NO: 1631481 - RNA, 19 nt, Artificial Sequence
  Description of Artificial Sequence: Synthetic oligonucleotide
  Sense strand starting at position 153 of SEQ ID NO: 1560884
gccuuacuucuuggcaaug

SEQ ID NO: 1631482 - RNA, 19 nt, Artificial Sequence
  Description of Artificial Sequence: Synthetic oligonucleotide
  Antisense strand to SEQ ID NO: 1631481
cauugccaagaaguaaggc

SEQ ID NO: 1631483 - RNA, 19 nt, Artificial Sequence
  Description of Artificial Sequence: Synthetic oligonucleotide
  Sense strand starting at position 247 of SEQ ID NO: 1560884
gauugugacaccugggaga

SEQ ID NO: 1631484 - RNA, 19 nt, Artificial Sequence
  Description of Artificial Sequence: Synthetic oligonucleotide
  Antisense strand to SEQ ID NO: 1631483
ucucccaggugucacaauc

SEQ ID NO: 1631485 - RNA, 19 nt, Artificial Sequence
  Description of Artificial Sequence: Synthetic oligonucleotide
  Sense strand starting at position 249 of SEQ ID NO: 1560884
uugugacaccugggagaau

SEQ ID NO: 1631486 - RNA, 19 nt, Artificial Sequence
  Description of Artificial Sequence: Synthetic oligonucleotide
  Antisense strand to SEQ ID NO: 1631485
auucucccaggugucacaa

SEQ ID NO: 1631487 - RNA, 19 nt, Artificial Sequence
  Description of Artificial Sequence: Synthetic oligonucleotide
  Sense strand starting at position 986 of SEQ ID NO: 1560884
gugcaugccgggaaacgua

SEQ ID NO: 1631488 - RNA, 19 nt, Artificial Sequence
  Description of Artificial Sequence: Synthetic oligonucleotide
  Antisense strand to SEQ ID NO: 1631487
uacguuucccggcaugcac

SEQ ID NO: 1631489 - RNA, 19 nt, Artificial Sequence
  Description of Artificial Sequence: Synthetic oligonucleotide
  Sense strand starting at position 1025 of SEQ ID NO: 1560884
gcgcguuaucgccagacca

SEQ ID NO: 1631490 - RNA, 19 nt, Artificial Sequence
  Description of Artificial Sequence: Synthetic oligonucleotide
  Antisense strand to SEQ ID NO: 1631489
uggucuggcgauaacgcgc

SEQ ID NO: 1631491 - RNA, 19 nt, Artificial Sequence
  Description of Artificial Sequence: Synthetic oligonucleotide
  Sense strand starting at position 1189 of SEQ ID NO: 1560884
cccggaguccugggaaauc

SEQ ID NO: 1631492 - RNA, 19 nt, Artificial Sequence
  Description of Artificial Sequence: Synthetic oligonucleotide
  Antisense strand to SEQ ID NO: 1631491
gauuucccaggacuccggg

SEQ ID NO: 1631493 - RNA, 19 nt, Artificial Sequence
  Description of Artificial Sequence: Synthetic oligonucleotide
  Sense strand starting at position 1224 of SEQ ID NO: 1560884
ccgugcaagucgucaaucu

SEQ ID NO: 1631494 - RNA, 19 nt, Artificial Sequence
  Description of Artificial Sequence: Synthetic oligonucleotide
  Antisense strand to SEQ ID NO: 1631493
agauugacgacuugcacgg

SEQ ID NO: 1631495 - RNA, 19 nt, Artificial Sequence
  Description of Artificial Sequence: Synthetic oligonucleotide
  Sense strand starting at position 1780 of SEQ ID NO: 1560884
ccgcggaaggcgucugaua

SEQ ID NO: 1631496 - RNA, 19 nt, Artificial Sequence
  Description of Artificial Sequence: Synthetic oligonucleotide
  Antisense strand to SEQ ID NO: 1631495
uaucagacgccuuccgcgg

SEQ ID NO: 1631497 - RNA, 19 nt, Artificial Sequence
  Description of Artificial Sequence: Synthetic oligonucleotide
  Sense strand starting at position 1789 of SEQ ID NO: 1560884
gcgucugauacccacguuu

SEQ ID NO: 1631498 - RNA, 19 nt, Artificial Sequence
  Description of Artificial Sequence: Synthetic oligonucleotide
  Antisense strand to SEQ ID NO: 1631497
aaacguggguaucagacgc

SEQ ID NO: 1631499 - RNA, 19 nt, Artificial Sequence
  Description of Artificial Sequence: Synthetic oligonucleotide
  Sense strand starting at position 2009 of SEQ ID NO: 1560884
cuggaaaguuacugagauu

SEQ ID NO: 1631500 - RNA, 19 nt, Artificial Sequence
  Description of Artificial Sequence: Synthetic oligonucleotide
  Antisense strand to SEQ ID NO: 1631499
aaucucaguaacuuuccag

SEQ ID NO: 1631501 - RNA, 19 nt, Artificial Sequence
  Description of Artificial Sequence: Synthetic oligonucleotide
  Sense strand starting at position 2012 of SEQ ID NO: 1560884
gaaaguuacugagauucug

SEQ ID NO: 1631502 - RNA, 19 nt, Artificial Sequence
  Description of Artificial Sequence: Synthetic oligonucleotide
  Antisense strand to SEQ ID NO: 1631501
cagaaucucaguaacuuuc

SEQ ID NO: 1631503 - RNA, 19 nt, Artificial Sequence
  Description of Artificial Sequence: Synthetic oligonucleotide
  Sense strand starting at position 2018 of SEQ ID NO: 1560884
uacugagauucugaggauu

SEQ ID NO: 1631504 - RNA, 19 nt, Artificial Sequence
  Description of Artificial Sequence: Synthetic oligonucleotide
  Antisense strand to SEQ ID NO: 1631503
aauccucagaaucucagua

SEQ ID NO: 1631505 - RNA, 19 nt, Artificial Sequence
  Description of Artificial Sequence: Synthetic oligonucleotide
  Sense strand starting at position 2020 of SEQ ID NO: 1560884
cugagauucugaggauuac

SEQ ID NO: 1631506 - RNA, 19 nt, Artificial Sequence
  Description of Artificial Sequence: Synthetic oligonucleotide
  Antisense strand to SEQ ID NO: 1631505
guaauccucagaaucucag

SEQ ID NO: 1631507 - RNA, 19 nt, Artificial Sequence
  Description of Artificial Sequence: Synthetic oligonucleotide
  Sense strand starting at position 2026 of SEQ ID NO: 1560884
uucugaggauuacaauacu

SEQ ID NO: 1631508 - RNA, 19 nt, Artificial Sequence
  Description of Artificial Sequence: Synthetic oligonucleotide
  Antisense strand to SEQ ID NO: 1631507
aguauuguaauccucagaa

SEQ ID NO: 1631509 - RNA, 19 nt, Artificial Sequence
  Description of Artificial Sequence: Synthetic oligonucleotide
  Sense strand starting at position 2117 of SEQ ID NO: 1560884
ccgggcuccuuggaagaua

SEQ ID NO: 1631510 - RNA, 19 nt, Artificial Sequence
  Description of Artificial Sequence: Synthetic oligonucleotide
  Antisense strand to SEQ ID NO: 1631509
uaucuuccaaggagcccgg

SEQ ID NO: 1631511 - RNA, 19 nt, Artificial Sequence
  Description of Artificial Sequence: Synthetic oligonucleotide
  Sense strand starting at position 2125 of SEQ ID NO: 1560884
cuuggaagauacugagaga

SEQ ID NO: 1631512 - RNA, 19 nt, Artificial Sequence
  Description of Artificial Sequence: Synthetic oligonucleotide
  Antisense strand to SEQ ID NO: 1631511
ucucucaguaucuuccaag

SEQ ID NO: 1631513 - RNA, 19 nt, Artificial Sequence
  Description of Artificial Sequence: Synthetic oligonucleotide
  Sense strand starting at position 2136 of SEQ ID NO: 1560884
cugagagaugcuggaauau

SEQ ID NO: 1631514 - RNA, 19 nt, Artificial Sequence
  Description of Artificial Sequence: Synthetic oligonucleotide
  Antisense strand to SEQ ID NO: 1631513
auauuccagcaucucucag

SEQ ID NO: 1631515 - RNA, 19 nt, Artificial Sequence
  Description of Artificial Sequence: Synthetic oligonucleotide
  Sense strand starting at position 2145 of SEQ ID NO: 1560884
gcuggaauauuacugggau

SEQ ID NO: 1631516 - RNA, 19 nt, Artificial Sequence
  Description of Artificial Sequence: Synthetic oligonucleotide
  Antisense strand to SEQ ID NO: 1631515
aucccaguaauauuccagc

SEQ ID NO: 1631517 - RNA, 19 nt, Artificial Sequence
  Description of Artificial Sequence: Synthetic oligonucleotide
  Sense strand starting at position 2146 of SEQ ID NO: 1560884
cuggaauauuacugggauu

SEQ ID NO: 1631518 - RNA, 19 nt, Artificial Sequence
  Description of Artificial Sequence: Synthetic oligonucleotide
  Antisense strand to SEQ ID NO: 1631517
aaucccaguaauauuccag

SEQ ID NO: 1631519 - RNA, 19 nt, Artificial Sequence
  Description of Artificial Sequence: Synthetic oligonucleotide
  Sense strand starting at position 2177 of SEQ ID NO: 1560884
ugaggauguuucugacauc

SEQ ID NO: 1631520 - RNA, 19 nt, Artificial Sequence
  Description of Artificial Sequence: Synthetic oligonucleotide
  Antisense strand to SEQ ID NO: 1631519
gaugucagaaacauccuca

SEQ ID NO: 1631521 - RNA, 19 nt, Artificial Sequence
  Description of Artificial Sequence: Synthetic oligonucleotide
  Sense strand starting at position 2183 of SEQ ID NO: 1560884
uguuucugacaucgcuaga

SEQ ID NO: 1631522 - RNA, 19 nt, Artificial Sequence
  Description of Artificial Sequence: Synthetic oligonucleotide
  Antisense strand to SEQ ID NO: 1631521
ucuagcgaugucagaaaca

SEQ ID NO: 1631523 - RNA, 19 nt, Artificial Sequence
  Description of Artificial Sequence: Synthetic oligonucleotide
  Sense strand starting at position 2186 of SEQ ID NO: 1560884
uucugacaucgcuagaaua

SEQ ID NO: 1631524 - RNA, 19 nt, Artificial Sequence
  Description of Artificial Sequence: Synthetic oligonucleotide
  Antisense strand to SEQ ID NO: 1631523
uauucuagcgaugucagaa

SEQ ID NO: 1631525 - RNA, 19 nt, Artificial Sequence
  Description of Artificial Sequence: Synthetic oligonucleotide
  Sense strand starting at position 2188 of SEQ ID NO: 1560884
cugacaucgcuagaauauu

SEQ ID NO: 1631526 - RNA, 19 nt, Artificial Sequence
  Description of Artificial Sequence: Synthetic oligonucleotide
  Antisense strand to SEQ ID NO: 1631525
aauauucuagcgaugucag

SEQ ID NO: 1631527 - RNA, 19 nt, Artificial Sequence
  Description of Artificial Sequence: Synthetic oligonucleotide
  Sense strand starting at position 2194 of SEQ ID NO: 1560884
ucgcuagaauauuaaugga

SEQ ID NO: 1631528 - RNA, 19 nt, Artificial Sequence
  Description of Artificial Sequence: Synthetic oligonucleotide
  Antisense strand to SEQ ID NO: 1631527
uccauuaauauucuagcga

SEQ ID NO: 1631529 - RNA, 19 nt, Artificial Sequence
  Description of Artificial Sequence: Synthetic oligonucleotide
  Sense strand starting at position 2248 of SEQ ID NO: 1560884
ccgagucguuacuuggaaa

SEQ ID NO: 1631530 - RNA, 19 nt, Artificial Sequence
  Description of Artificial Sequence: Synthetic oligonucleotide
  Antisense strand to SEQ ID NO: 1631529
uuuccaaguaacgacucgg

SEQ ID NO: 1631531 - RNA, 19 nt, Artificial Sequence
  Description of Artificial Sequence: Synthetic oligonucleotide
  Sense strand starting at position 3200 of SEQ ID NO: 1560884
ggaggcucagccugaaagu

SEQ ID NO: 1631532 - RNA, 19 nt, Artificial Sequence
  Description of Artificial Sequence: Synthetic oligonucleotide
  Antisense strand to SEQ ID NO: 1631531
acuuucaggcugagccucc

SEQ ID NO: 1631533 - RNA, 19 nt, Artificial Sequence
  Description of Artificial Sequence: Synthetic oligonucleotide
  Sense strand starting at position 3372 of SEQ ID NO: 1560884
ggauacaagcugugucuuu

SEQ ID NO: 1631534 - RNA, 19 nt, Artificial Sequence
  Description of Artificial Sequence: Synthetic oligonucleotide
  Antisense strand to SEQ ID NO: 1631533
aaagacacagcuuguaucc

SEQ ID NO: 1631535 - RNA, 19 nt, Artificial Sequence
  Description of Artificial Sequence: Synthetic oligonucleotide
  Sense strand starting at position 3456 of SEQ ID NO: 1560884
ugaccucgaugcucagaaa

SEQ ID NO: 1631536 - RNA, 19 nt, Artificial Sequence
  Description of Artificial Sequence: Synthetic oligonucleotide
  Antisense strand to SEQ ID NO: 1631535
uuucugagcaucgagguca

SEQ ID NO: 1631537 - RNA, 19 nt, Artificial Sequence
  Description of Artificial Sequence: Synthetic oligonucleotide
  Sense strand starting at position 3459 of SEQ ID NO: 1560884
ccucgaugcucagaaacca

SEQ ID NO: 1631538 - RNA, 19 nt, Artificial Sequence
  Description of Artificial Sequence: Synthetic oligonucleotide
  Antisense strand to SEQ ID NO: 1631537
ugguuucugagcaucgagg

SEQ ID NO: 1631539 - RNA, 19 nt, Artificial Sequence
  Description of Artificial Sequence: Synthetic oligonucleotide
  Sense strand starting at position 3471 of SEQ ID NO: 1560884
gaaaccaucuauugaguga

SEQ ID NO: 1631540 - RNA, 19 nt, Artificial Sequence
  Description of Artificial Sequence: Synthetic oligonucleotide
  Antisense strand to SEQ ID NO: 1631539
ucacucaauagaugguuuc

SEQ ID NO: 1631541 - RNA, 19 nt, Artificial Sequence
  Description of Artificial Sequence: Synthetic oligonucleotide
  Sense strand starting at position 3478 of SEQ ID NO: 1560884
ucuauugagugagcuggau

SEQ ID NO: 1631542 - RNA, 19 nt, Artificial Sequence
  Description of Artificial Sequence: Synthetic oligonucleotide
  Antisense strand to SEQ ID NO: 1631541
auccagcucacucaauaga

SEQ ID NO: 1631543 - RNA, 19 nt, Artificial Sequence
  Description of Artificial Sequence: Synthetic oligonucleotide
  Sense strand starting at position 3557 of SEQ ID NO: 1560884
gugugaugucuacgugcua

SEQ ID NO: 1631544 - RNA, 19 nt, Artificial Sequence
  Description of Artificial Sequence: Synthetic oligonucleotide
  Antisense strand to SEQ ID NO: 1631543
uagcacguagacaucacac

SEQ ID NO: 1631545 - RNA, 19 nt, Artificial Sequence
  Description of Artificial Sequence: Synthetic oligonucleotide
  Sense strand starting at position 3558 of SEQ ID NO: 1560884
ugugaugucuacgugcuaa

SEQ ID NO: 1631546 - RNA, 19 nt, Artificial Sequence
  Description of Artificial Sequence: Synthetic oligonucleotide
  Antisense strand to SEQ ID NO: 1631545
uuagcacguagacaucaca

SEQ ID NO: 1631547 - RNA, 19 nt, Artificial Sequence
  Description of Artificial Sequence: Synthetic oligonucleotide
  Sense strand starting at position 3607 of SEQ ID NO: 1560884
agucaaugugucuguggga

SEQ ID NO: 1631548 - RNA, 19 nt, Artificial Sequence
  Description of Artificial Sequence: Synthetic oligonucleotide
  Antisense strand to SEQ ID NO: 1631547
ucccacagacacauugacu

SEQ ID NO: 1631549 - RNA, 19 nt, Artificial Sequence
  Description of Artificial Sequence: Synthetic oligonucleotide
  Sense strand starting at position 3660 of SEQ ID NO: 1560884
cccaucugccggugacauu

SEQ ID NO: 1631550 - RNA, 19 nt, Artificial Sequence
  Description of Artificial Sequence: Synthetic oligonucleotide
  Antisense strand to SEQ ID NO: 1631549
aaugucaccggcagauggg

SEQ ID NO: 1631551 - RNA, 19 nt, Artificial Sequence
  Description of Artificial Sequence: Synthetic oligonucleotide
  Sense strand starting at position 3917 of SEQ ID NO: 1560884
gugcaagucagaggcuaaa

SEQ ID NO: 1631552 - RNA, 19 nt, Artificial Sequence
  Description of Artificial Sequence: Synthetic oligonucleotide
  Antisense strand to SEQ ID NO: 1631551
uuuagccucugacuugcac

SEQ ID NO: 1631553 - RNA, 19 nt, Artificial Sequence
  Description of Artificial Sequence: Synthetic oligonucleotide
  Sense strand starting at position 3928 of SEQ ID NO: 1560884
aggcuaaauuugcaauugu

SEQ ID NO: 1631554 - RNA, 19 nt, Artificial Sequence
  Description of Artificial Sequence: Synthetic oligonucleotide
  Antisense strand to SEQ ID NO: 1631553
acaauugcaaauuuagccu

SEQ ID NO: 1631555 - RNA, 19 nt, Artificial Sequence
  Description of Artificial Sequence: Synthetic oligonucleotide
  Sense strand starting at position 523 of SEQ ID NO: 1560885
gugcaugccgggaaacgua

SEQ ID NO: 1631556 - RNA, 19 nt, Artificial Sequence
  Description of Artificial Sequence: Synthetic oligonucleotide
  Antisense strand to SEQ ID NO: 1631555
uacguuucccggcaugcac

SEQ ID NO: 1631557 - RNA, 19 nt, Artificial Sequence
  Description of Artificial Sequence: Synthetic oligonucleotide
  Sense strand starting at position 562 of SEQ ID NO: 1560885
gcgcguuaucgccagacca

SEQ ID NO: 1631558 - RNA, 19 nt, Artificial Sequence
  Description of Artificial Sequence: Synthetic oligonucleotide
  Antisense strand to SEQ ID NO: 1631557
uggucuggcgauaacgcgc

SEQ ID NO: 1631559 - RNA, 19 nt, Artificial Sequence
  Description of Artificial Sequence: Synthetic oligonucleotide
  Sense strand starting at position 726 of SEQ ID NO: 1560885
cccggaguccugggaaauc

SEQ ID NO: 1631560 - RNA, 19 nt, Artificial Sequence
  Description of Artificial Sequence: Synthetic oligonucleotide
  Antisense strand to SEQ ID NO: 1631559
gauuucccaggacuccggg

SEQ ID NO: 1631561 - RNA, 19 nt, Artificial Sequence
  Description of Artificial Sequence: Synthetic oligonucleotide
  Sense strand starting at position 761 of SEQ ID NO: 1560885
ccgugcaagucgucaaucu

SEQ ID NO: 1631562 - RNA, 19 nt, Artificial Sequence
  Description of Artificial Sequence: Synthetic oligonucleotide
  Antisense strand to SEQ ID NO: 1631561
agauugacgacuugcacgg

SEQ ID NO: 1631563 - RNA, 19 nt, Artificial Sequence
  Description of Artificial Sequence: Synthetic oligonucleotide
  Sense strand starting at position 1317 of SEQ ID NO: 1560885
ccgcggaaggcgucugaua

SEQ ID NO: 1631564 - RNA, 19 nt, Artificial Sequence
  Description of Artificial Sequence: Synthetic oligonucleotide
  Antisense strand to SEQ ID NO: 1631563
uaucagacgccuuccgcgg

SEQ ID NO: 1631565 - RNA, 19 nt, Artificial Sequence
  Description of Artificial Sequence: Synthetic oligonucleotide
  Sense strand starting at position 1326 of SEQ ID NO: 1560885
gcgucugauacccacguuu

SEQ ID NO: 1631566 - RNA, 19 nt, Artificial Sequence
  Description of Artificial Sequence: Synthetic oligonucleotide
  Antisense strand to SEQ ID NO: 1631565
aaacguggguaucagacgc

SEQ ID NO: 1631567 - RNA, 19 nt, Artificial Sequence
  Description of Artificial Sequence: Synthetic oligonucleotide
  Sense strand starting at position 1546 of SEQ ID NO: 1560885
cuggaaaguuacugagauu

SEQ ID NO: 1631568 - RNA, 19 nt, Artificial Sequence
  Description of Artificial Sequence: Synthetic oligonucleotide
  Antisense strand to SEQ ID NO: 1631567
aaucucaguaacuuuccag

SEQ ID NO: 1631569 - RNA, 19 nt, Artificial Sequence
  Description of Artificial Sequence: Synthetic oligonucleotide
  Sense strand starting at position 1549 of SEQ ID NO: 1560885
gaaaguuacugagauucug

SEQ ID NO: 1631570 - RNA, 19 nt, Artificial Sequence
  Description of Artificial Sequence: Synthetic oligonucleotide
  Antisense strand to SEQ ID NO: 1631569
cagaaucucaguaacuuuc

SEQ ID NO: 1631571 - RNA, 19 nt, Artificial Sequence
  Description of Artificial Sequence: Synthetic oligonucleotide
  Sense strand starting at position 1555 of SEQ ID NO: 1560885
uacugagauucugaggauu

SEQ ID NO: 1631572 - RNA, 19 nt, Artificial Sequence
  Description of Artificial Sequence: Synthetic oligonucleotide
  Antisense strand to SEQ ID NO: 1631571
aauccucagaaucucagua

SEQ ID NO: 1631573 - RNA, 19 nt, Artificial Sequence
  Description of Artificial Sequence: Synthetic oligonucleotide
  Sense strand starting at position 1557 of SEQ ID NO: 1560885
cugagauucugaggauuac

SEQ ID NO: 1631574 - RNA, 19 nt, Artificial Sequence
  Description of Artificial Sequence: Synthetic oligonucleotide
  Antisense strand to SEQ ID NO: 1631573
guaauccucagaaucucag

SEQ ID NO: 1631575 - RNA, 19 nt, Artificial Sequence
  Description of Artificial Sequence: Synthetic oligonucleotide
  Sense strand starting at position 1563 of SEQ ID NO: 1560885
uucugaggauuacaauacu

SEQ ID NO: 1631576 - RNA, 19 nt, Artificial Sequence
  Description of Artificial Sequence: Synthetic oligonucleotide
  Antisense strand to SEQ ID NO: 1631575
aguauuguaauccucagaa

SEQ ID NO: 1631577 - RNA, 19 nt, Artificial Sequence
  Description of Artificial Sequence: Synthetic oligonucleotide
  Sense strand starting at position 1654 of SEQ ID NO: 1560885
ccgggcuccuuggaagaua

SEQ ID NO: 1631578 - RNA, 19 nt, Artificial Sequence
  Description of Artificial Sequence: Synthetic oligonucleotide
  Antisense strand to SEQ ID NO: 1631577
uaucuuccaaggagcccgg

SEQ ID NO: 1631579 - RNA, 19 nt, Artificial Sequence
  Description of Artificial Sequence: Synthetic oligonucleotide
  Sense strand starting at position 1662 of SEQ ID NO: 1560885
cuuggaagauacugagaga

SEQ ID NO: 1631580 - RNA, 19 nt, Artificial Sequence
  Description of Artificial Sequence: Synthetic oligonucleotide
  Antisense strand to SEQ ID NO: 1631579
ucucucaguaucuuccaag

SEQ ID NO: 1631581 - RNA, 19 nt, Artificial Sequence
  Description of Artificial Sequence: Synthetic oligonucleotide
  Sense strand starting at position 1673 of SEQ ID NO: 1560885
cugagagaugcuggaauau

SEQ ID NO: 1631582 - RNA, 19 nt, Artificial Sequence
  Description of Artificial Sequence: Synthetic oligonucleotide
  Antisense strand to SEQ ID NO: 1631581
auauuccagcaucucucag

SEQ ID NO: 1631583 - RNA, 19 nt, Artificial Sequence
  Description of Artificial Sequence: Synthetic oligonucleotide
  Sense strand starting at position 1682 of SEQ ID NO: 1560885
gcuggaauauuacugggau

SEQ ID NO: 1631584 - RNA, 19 nt, Artificial Sequence
  Description of Artificial Sequence: Synthetic oligonucleotide
  Antisense strand to SEQ ID NO: 1631583
aucccaguaauauuccagc

SEQ ID NO: 1631585 - RNA, 19 nt, Artificial Sequence
  Description of Artificial Sequence: Synthetic oligonucleotide
  Sense strand starting at position 1683 of SEQ ID NO: 1560885
cuggaauauuacugggauu

SEQ ID NO: 1631586 - RNA, 19 nt, Artificial Sequence
  Description of Artificial Sequence: Synthetic oligonucleotide
  Antisense strand to SEQ ID NO: 1631585
aaucccaguaauauuccag

SEQ ID NO: 1631587 - RNA, 19 nt, Artificial Sequence
  Description of Artificial Sequence: Synthetic oligonucleotide
  Sense strand starting at position 1714 of SEQ ID NO: 1560885
ugaggauguuucugacauc

SEQ ID NO: 1631588 - RNA, 19 nt, Artificial Sequence
  Description of Artificial Sequence: Synthetic oligonucleotide
  Antisense strand to SEQ ID NO: 1631587
gaugucagaaacauccuca

SEQ ID NO: 1631589 - RNA, 19 nt, Artificial Sequence
  Description of Artificial Sequence: Synthetic oligonucleotide
  Sense strand starting at position 1717 of SEQ ID NO: 1560885
ggauguuucugacaucgcu

SEQ ID NO: 1631590 - RNA, 19 nt, Artificial Sequence
  Description of Artificial Sequence: Synthetic oligonucleotide
  Antisense strand to SEQ ID NO: 1631589
agcgaugucagaaacaucc

SEQ ID NO: 1631591 - RNA, 19 nt, Artificial Sequence
  Description of Artificial Sequence: Synthetic oligonucleotide
  Sense strand starting at position 1720 of SEQ ID NO: 1560885
uguuucugacaucgcuaga

SEQ ID NO: 1631592 - RNA, 19 nt, Artificial Sequence
  Description of Artificial Sequence: Synthetic oligonucleotide
  Antisense strand to SEQ ID NO: 1631591
ucuagcgaugucagaaaca

SEQ ID NO: 1631593 - RNA, 19 nt, Artificial Sequence
  Description of Artificial Sequence: Synthetic oligonucleotide
  Sense strand starting at position 1723 of SEQ ID NO: 1560885
uucugacaucgcuagaaua

SEQ ID NO: 1631594 - RNA, 19 nt, Artificial Sequence
  Description of Artificial Sequence: Synthetic oligonucleotide
  Antisense strand to SEQ ID NO: 1631593
uauucuagcgaugucagaa

SEQ ID NO: 1631595 - RNA, 19 nt, Artificial Sequence
  Description of Artificial Sequence: Synthetic oligonucleotide
  Sense strand starting at position 1725 of SEQ ID NO: 1560885
cugacaucgcuagaauauu

SEQ ID NO: 1631596 - RNA, 19 nt, Artificial Sequence
  Description of Artificial Sequence: Synthetic oligonucleotide
  Antisense strand to SEQ ID NO: 1631595
aauauucuagcgaugucag

SEQ ID NO: 1631597 - RNA, 19 nt, Artificial Sequence
  Description of Artificial Sequence: Synthetic oligonucleotide
  Sense strand starting at position 1731 of SEQ ID NO: 1560885
ucgcuagaauauuaaugga

SEQ ID NO: 1631598 - RNA, 19 nt, Artificial Sequence
  Description of Artificial Sequence: Synthetic oligonucleotide
  Antisense strand to SEQ ID NO: 1631597
uccauuaauauucuagcga

SEQ ID NO: 1631599 - RNA, 19 nt, Artificial Sequence
  Description of Artificial Sequence: Synthetic oligonucleotide
  Sense strand starting at position 1785 of SEQ ID NO: 1560885
ccgagucguuacuuggaaa

SEQ ID NO: 1631600 - RNA, 19 nt, Artificial Sequence
  Description of Artificial Sequence: Synthetic oligonucleotide
  Antisense strand to SEQ ID NO: 1631599
uuuccaaguaacgacucgg

SEQ ID NO: 1631601 - RNA, 19 nt, Artificial Sequence
  Description of Artificial Sequence: Synthetic oligonucleotide
  Sense strand starting at position 2737 of SEQ ID NO: 1560885
ggaggcucagccugaaagu

SEQ ID NO: 1631602 - RNA, 19 nt, Artificial Sequence
  Description of Artificial Sequence: Synthetic oligonucleotide
  Antisense strand to SEQ ID NO: 1631601
acuuucaggcugagccucc

SEQ ID NO: 1631603 - RNA, 19 nt, Artificial Sequence
  Description of Artificial Sequence: Synthetic oligonucleotide
  Sense strand starting at position 2909 of SEQ ID NO: 1560885
ggauacaagcugugucuuu

SEQ ID NO: 1631604 - RNA, 19 nt, Artificial Sequence
  Description of Artificial Sequence: Synthetic oligonucleotide
  Antisense strand to SEQ ID NO: 1631603
aaagacacagcuuguaucc

SEQ ID NO: 1631605 - RNA, 19 nt, Artificial Sequence
  Description of Artificial Sequence: Synthetic oligonucleotide
  Sense strand starting at position 2993 of SEQ ID NO: 1560885
ugaccucgaugcucagaaa

SEQ ID NO: 1631606 - RNA, 19 nt, Artificial Sequence
  Description of Artificial Sequence: Synthetic oligonucleotide
  Antisense strand to SEQ ID NO: 1631605
uuucugagcaucgagguca

SEQ ID NO: 1631607 - RNA, 19 nt, Artificial Sequence
  Description of Artificial Sequence: Synthetic oligonucleotide
  Sense strand starting at position 2996 of SEQ ID NO: 1560885
ccucgaugcucagaaacca

SEQ ID NO: 1631608 - RNA, 19 nt, Artificial Sequence
  Description of Artificial Sequence: Synthetic oligonucleotide
  Antisense strand to SEQ ID NO: 1631607
ugguuucugagcaucgagg

SEQ ID NO: 1631609 - RNA, 19 nt, Artificial Sequence
  Description of Artificial Sequence: Synthetic oligonucleotide
  Sense strand starting at position 3008 of SEQ ID NO: 1560885
gaaaccaucuauugaguga

SEQ ID NO: 1631610 - RNA, 19 nt, Artificial Sequence
  Description of Artificial Sequence: Synthetic oligonucleotide
  Antisense strand to SEQ ID NO: 1631609
ucacucaauagaugguuuc

SEQ ID NO: 1631611 - RNA, 19 nt, Artificial Sequence
  Description of Artificial Sequence: Synthetic oligonucleotide
  Sense strand starting at position 3015 of SEQ ID NO: 1560885
ucuauugagugagcuggau

SEQ ID NO: 1631612 - RNA, 19 nt, Artificial Sequence
  Description of Artificial Sequence: Synthetic oligonucleotide
  Antisense strand to SEQ ID NO: 1631611
auccagcucacucaauaga

SEQ ID NO: 1631613 - RNA, 19 nt, Artificial Sequence
  Description of Artificial Sequence: Synthetic oligonucleotide
  Sense strand starting at position 3094 of SEQ ID NO: 1560885
gugugaugucuacgugcua

SEQ ID NO: 1631614 - RNA, 19 nt, Artificial Sequence
  Description of Artificial Sequence: Synthetic oligonucleotide
  Antisense strand to SEQ ID NO: 1631613
uagcacguagacaucacac

SEQ ID NO: 1631615 - RNA, 19 nt, Artificial Sequence
  Description of Artificial Sequence: Synthetic oligonucleotide
  Sense strand starting at position 3095 of SEQ ID NO: 1560885
ugugaugucuacgugcuaa

SEQ ID NO: 1631616 - RNA, 19 nt, Artificial Sequence
  Description of Artificial Sequence: Synthetic oligonucleotide
  Antisense strand to SEQ ID NO: 1631615
uuagcacguagacaucaca

SEQ ID NO: 1631617 - RNA, 19 nt, Artificial Sequence
  Description of Artificial Sequence: Synthetic oligonucleotide
  Sense strand starting at position 3144 of SEQ ID NO: 1560885
agucaaugugucuguggga

SEQ ID NO: 1631618 - RNA, 19 nt, Artificial Sequence
  Description of Artificial Sequence: Synthetic oligonucleotide
  Antisense strand to SEQ ID NO: 1631617
ucccacagacacauugacu

SEQ ID NO: 1631619 - RNA, 19 nt, Artificial Sequence
  Description of Artificial Sequence: Synthetic oligonucleotide
  Sense strand starting at position 3197 of SEQ ID NO: 1560885
cccaucugccggugacauu

SEQ ID NO: 1631620 - RNA, 19 nt, Artificial Sequence
  Description of Artificial Sequence: Synthetic oligonucleotide
  Antisense strand to SEQ ID NO: 1631619
aaugucaccggcagauggg

SEQ ID NO: 1631621 - RNA, 19 nt, Artificial Sequence
  Description of Artificial Sequence: Synthetic oligonucleotide
  Sense strand starting at position 3454 of SEQ ID NO: 1560885
gugcaagucagaggcuaaa

SEQ ID NO: 1631622 - RNA, 19 nt, Artificial Sequence
  Description of Artificial Sequence: Synthetic oligonucleotide
  Antisense strand to SEQ ID NO: 1631621
uuuagccucugacuugcac

SEQ ID NO: 1631623 - RNA, 19 nt, Artificial Sequence
  Description of Artificial Sequence: Synthetic oligonucleotide
  Sense strand starting at position 3465 of SEQ ID NO: 1560885
aggcuaaauuugcaauugu

SEQ ID NO: 1631624 - RNA, 19 nt, Artificial Sequence
  Description of Artificial Sequence: Synthetic oligonucleotide
  Antisense strand to SEQ ID NO: 1631623
acaauugcaaauuuagccu

SEQ ID NO: 1631625 - RNA, 19 nt, Artificial Sequence
  Description of Artificial Sequence: Synthetic oligonucleotide
  Sense strand starting at position 3852 of SEQ ID NO: 1560885
gcuagagacuagugaugga

SEQ ID NO: 1631626 - RNA, 19 nt, Artificial Sequence
  Description of Artificial Sequence: Synthetic oligonucleotide
  Antisense strand to SEQ ID NO: 1631625
uccaucacuagucucuagc

SEQ ID NO: 1631627 - RNA, 19 nt, Artificial Sequence
  Description of Artificial Sequence: Synthetic oligonucleotide
  Sense strand starting at position 3963 of SEQ ID NO: 1560885
acaaguaggucauugguca

SEQ ID NO: 1631628 - RNA, 19 nt, Artificial Sequence
  Description of Artificial Sequence: Synthetic oligonucleotide
  Antisense strand to SEQ ID NO: 1631627
ugaccaaugaccuacuugu

SEQ ID NO: 1631629 - RNA, 19 nt, Artificial Sequence
  Description of Artificial Sequence: Synthetic oligonucleotide
  Sense strand starting at position 3964 of SEQ ID NO: 1560885
caaguaggucauuggucau

SEQ ID NO: 1631630 - RNA, 19 nt, Artificial Sequence
  Description of Artificial Sequence: Synthetic oligonucleotide
  Antisense strand to SEQ ID NO: 1631629
augaccaaugaccuacuug

SEQ ID NO: 1631631 - RNA, 19 nt, Artificial Sequence
  Description of Artificial Sequence: Synthetic oligonucleotide
  Sense strand starting at position 3970 of SEQ ID NO: 1560885
ggucauuggucaugggaug

SEQ ID NO: 1631632 - RNA, 19 nt, Artificial Sequence
  Description of Artificial Sequence: Synthetic oligonucleotide
  Antisense strand to SEQ ID NO: 1631631
caucccaugaccaaugacc

SEQ ID NO: 1631633 - RNA, 19 nt, Artificial Sequence
  Description of Artificial Sequence: Synthetic oligonucleotide
  Sense strand starting at position 3971 of SEQ ID NO: 1560885
gucauuggucaugggaugu

SEQ ID NO: 1631634 - RNA, 19 nt, Artificial Sequence
  Description of Artificial Sequence: Synthetic oligonucleotide
  Antisense strand to SEQ ID NO: 1631633
acaucccaugaccaaugac

SEQ ID NO: 1631635 - RNA, 19 nt, Artificial Sequence
  Description of Artificial Sequence: Synthetic oligonucleotide
  Sense strand starting at position 111 of SEQ ID NO: 1560886
ugggaagacuuccacaaca

SEQ ID NO: 1631636 - RNA, 19 nt, Artificial Sequence
  Description of Artificial Sequence: Synthetic oligonucleotide
  Antisense strand to SEQ ID NO: 1631635
uguuguggaagucuuccca

SEQ ID NO: 1631637 - RNA, 19 nt, Artificial Sequence
  Description of Artificial Sequence: Synthetic oligonucleotide
  Sense strand starting at position 134 of SEQ ID NO: 1560886
gguguaagcugauuacuca

SEQ ID NO: 1631638 - RNA, 19 nt, Artificial Sequence
  Description of Artificial Sequence: Synthetic oligonucleotide
  Antisense strand to SEQ ID NO: 1631637
ugaguaaucagcuuacacc

SEQ ID NO: 1631639 - RNA, 19 nt, Artificial Sequence
  Description of Artificial Sequence: Synthetic oligonucleotide
  Sense strand starting at position 135 of SEQ ID NO: 1560886
guguaagcugauuacucaa

SEQ ID NO: 1631640 - RNA, 19 nt, Artificial Sequence
  Description of Artificial Sequence: Synthetic oligonucleotide
  Antisense strand to SEQ ID NO: 1631639
uugaguaaucagcuuacac

SEQ ID NO: 1631641 - RNA, 19 nt, Artificial Sequence
  Description of Artificial Sequence: Synthetic oligonucleotide
  Sense strand starting at position 198 of SEQ ID NO: 1560886
gccuuacuucuuggcaaug

SEQ ID NO: 1631642 - RNA, 19 nt, Artificial Sequence
  Description of Artificial Sequence: Synthetic oligonucleotide
  Antisense strand to SEQ ID NO: 1631641
cauugccaagaaguaaggc

SEQ ID NO: 1631643 - RNA, 19 nt, Artificial Sequence
  Description of Artificial Sequence: Synthetic oligonucleotide
  Sense strand starting at position 292 of SEQ ID NO: 1560886
gauugugacaccugggaga

SEQ ID NO: 1631644 - RNA, 19 nt, Artificial Sequence
  Description of Artificial Sequence: Synthetic oligonucleotide
  Antisense strand to SEQ ID NO: 1631643
ucucccaggugucacaauc

SEQ ID NO: 1631645 - RNA, 19 nt, Artificial Sequence
  Description of Artificial Sequence: Synthetic oligonucleotide
  Sense strand starting at position 294 of SEQ ID NO: 1560886
uugugacaccugggagaau

SEQ ID NO: 1631646 - RNA, 19 nt, Artificial Sequence
  Description of Artificial Sequence: Synthetic oligonucleotide
  Antisense strand to SEQ ID NO: 1631645
auucucccaggugucacaa

SEQ ID NO: 1631647 - RNA, 19 nt, Artificial Sequence
  Description of Artificial Sequence: Synthetic oligonucleotide
  Sense strand starting at position 1031 of SEQ ID NO: 1560886
gugcaugccgggaaacgua

SEQ ID NO: 1631648 - RNA, 19 nt, Artificial Sequence
  Description of Artificial Sequence: Synthetic oligonucleotide
  Antisense strand to SEQ ID NO: 1631647
uacguuucccggcaugcac

SEQ ID NO: 1631649 - RNA, 19 nt, Artificial Sequence
  Description of Artificial Sequence: Synthetic oligonucleotide
  Sense strand starting at position 1070 of SEQ ID NO: 1560886
gcgcguuaucgccagacca

SEQ ID NO: 1631650 - RNA, 19 nt, Artificial Sequence
  Description of Artificial Sequence: Synthetic oligonucleotide
  Antisense strand to SEQ ID NO: 1631649
uggucuggcgauaacgcgc

SEQ ID NO: 1631651 - RNA, 19 nt, Artificial Sequence
  Description of Artificial Sequence: Synthetic oligonucleotide
  Sense strand starting at position 1234 of SEQ ID NO: 1560886
cccggaguccugggaaauc

SEQ ID NO: 1631652 - RNA, 19 nt, Artificial Sequence
  Description of Artificial Sequence: Synthetic oligonucleotide
  Antisense strand to SEQ ID NO: 1631651
gauuucccaggacuccggg

SEQ ID NO: 1631653 - RNA, 19 nt, Artificial Sequence
  Description of Artificial Sequence: Synthetic oligonucleotide
  Sense strand starting at position 1269 of SEQ ID NO: 1560886
ccgugcaagucgucaaucu

SEQ ID NO: 1631654 - RNA, 19 nt, Artificial Sequence
  Description of Artificial Sequence: Synthetic oligonucleotide
  Antisense strand to SEQ ID NO: 1631653
agauugacgacuugcacgg

SEQ ID NO: 1631655 - RNA, 19 nt, Artificial Sequence
  Description of Artificial Sequence: Synthetic oligonucleotide
  Sense strand starting at position 1825 of SEQ ID NO: 1560886
ccgcggaaggcgucugaua

SEQ ID NO: 1631656 - RNA, 19 nt, Artificial Sequence
  Description of Artificial Sequence: Synthetic oligonucleotide
  Antisense strand to SEQ ID NO: 1631655
uaucagacgccuuccgcgg

SEQ ID NO: 1631657 - RNA, 19 nt, Artificial Sequence
  Description of Artificial Sequence: Synthetic oligonucleotide
  Sense strand starting at position 1834 of SEQ ID NO: 1560886
gcgucugauacccacguuu

SEQ ID NO: 1631658 - RNA, 19 nt, Artificial Sequence
  Description of Artificial Sequence: Synthetic oligonucleotide
  Antisense strand to SEQ ID NO: 1631657
aaacguggguaucagacgc

SEQ ID NO: 1631659 - RNA, 19 nt, Artificial Sequence
  Description of Artificial Sequence: Synthetic oligonucleotide
  Sense strand starting at position 2054 of SEQ ID NO: 1560886
cuggaaaguuacugagauu

SEQ ID NO: 1631660 - RNA, 19 nt, Artificial Sequence
  Description of Artificial Sequence: Synthetic oligonucleotide
  Antisense strand to SEQ ID NO: 1631659
aaucucaguaacuuuccag

SEQ ID NO: 1631661 - RNA, 19 nt, Artificial Sequence
  Description of Artificial Sequence: Synthetic oligonucleotide
  Sense strand starting at position 2057 of SEQ ID NO: 1560886
gaaaguuacugagauucug

SEQ ID NO: 1631662 - RNA, 19 nt, Artificial Sequence
  Description of Artificial Sequence: Synthetic oligonucleotide
  Antisense strand to SEQ ID NO: 1631661
cagaaucucaguaacuuuc

SEQ ID NO: 1631663 - RNA, 19 nt, Artificial Sequence
  Description of Artificial Sequence: Synthetic oligonucleotide
  Sense strand starting at position 2063 of SEQ ID NO: 1560886
uacugagauucugaggauu

SEQ ID NO: 1631664 - RNA, 19 nt, Artificial Sequence
  Description of Artificial Sequence: Synthetic oligonucleotide
  Antisense strand to SEQ ID NO: 1631663
aauccucagaaucucagua

SEQ ID NO: 1631665 - RNA, 19 nt, Artificial Sequence
  Description of Artificial Sequence: Synthetic oligonucleotide
  Sense strand starting at position 2065 of SEQ ID NO: 1560886
cugagauucugaggauuac

SEQ ID NO: 1631666 - RNA, 19 nt, Artificial Sequence
  Description of Artificial Sequence: Synthetic oligonucleotide
  Antisense strand to SEQ ID NO: 1631665
guaauccucagaaucucag

SEQ ID NO: 1631667 - RNA, 19 nt, Artificial Sequence
  Description of Artificial Sequence: Synthetic oligonucleotide
  Sense strand starting at position 2071 of SEQ ID NO: 1560886
uucugaggauuacaauacu

SEQ ID NO: 1631668 - RNA, 19 nt, Artificial Sequence
  Description of Artificial Sequence: Synthetic oligonucleotide
  Antisense strand to SEQ ID NO: 1631667
aguauuguaauccucagaa

SEQ ID NO: 1631669 - RNA, 19 nt, Artificial Sequence
  Description of Artificial Sequence: Synthetic oligonucleotide
  Sense strand starting at position 2162 of SEQ ID NO: 1560886
ccgggcuccuuggaagaua

SEQ ID NO: 1631670 - RNA, 19 nt, Artificial Sequence
  Description of Artificial Sequence: Synthetic oligonucleotide
  Antisense strand to SEQ ID NO: 1631669
uaucuuccaaggagcccgg

SEQ ID NO: 1631671 - RNA, 19 nt, Artificial Sequence
  Description of Artificial Sequence: Synthetic oligonucleotide
  Sense strand starting at position 2170 of SEQ ID NO: 1560886
cuuggaagauacugagaga

SEQ ID NO: 1631672 - RNA, 19 nt, Artificial Sequence
  Description of Artificial Sequence: Synthetic oligonucleotide
  Antisense strand to SEQ ID NO: 1631671
ucucucaguaucuuccaag

SEQ ID NO: 1631673 - RNA, 19 nt, Artificial Sequence
  Description of Artificial Sequence: Synthetic oligonucleotide
  Sense strand starting at position 2181 of SEQ ID NO: 1560886
cugagagaugcuggaauau

SEQ ID NO: 1631674 - RNA, 19 nt, Artificial Sequence
  Description of Artificial Sequence: Synthetic oligonucleotide
  Antisense strand to SEQ ID NO: 1631673
auauuccagcaucucucag

SEQ ID NO: 1631675 - RNA, 19 nt, Artificial Sequence
  Description of Artificial Sequence: Synthetic oligonucleotide
  Sense strand starting at position 2190 of SEQ ID NO: 1560886
gcuggaauauuacugggau

SEQ ID NO: 1631676 - RNA, 19 nt, Artificial Sequence
  Description of Artificial Sequence: Synthetic oligonucleotide
  Antisense strand to SEQ ID NO: 1631675
aucccaguaauauuccagc

SEQ ID NO: 1631677 - RNA, 19 nt, Artificial Sequence
  Description of Artificial Sequence: Synthetic oligonucleotide
  Sense strand starting at position 2191 of SEQ ID NO: 1560886
cuggaauauuacugggauu

SEQ ID NO: 1631678 - RNA, 19 nt, Artificial Sequence
  Description of Artificial Sequence: Synthetic oligonucleotide
  Antisense strand to SEQ ID NO: 1631677
aaucccaguaauauuccag

SEQ ID NO: 1631679 - RNA, 19 nt, Artificial Sequence
  Description of Artificial Sequence: Synthetic oligonucleotide
  Sense strand starting at position 2222 of SEQ ID NO: 1560886
ugaggauguuucugacauc

SEQ ID NO: 1631680 - RNA, 19 nt, Artificial Sequence
  Description of Artificial Sequence: Synthetic oligonucleotide
  Antisense strand to SEQ ID NO: 1631679
gaugucagaaacauccuca

SEQ ID NO: 1631681 - RNA, 19 nt, Artificial Sequence
  Description of Artificial Sequence: Synthetic oligonucleotide
  Sense strand starting at position 2228 of SEQ ID NO: 1560886
uguuucugacaucgcuaga

SEQ ID NO: 1631682 - RNA, 19 nt, Artificial Sequence
  Description of Artificial Sequence: Synthetic oligonucleotide
  Antisense strand to SEQ ID NO: 1631681
ucuagcgaugucagaaaca

SEQ ID NO: 1631683 - RNA, 19 nt, Artificial Sequence
  Description of Artificial Sequence: Synthetic oligonucleotide
  Sense strand starting at position 2231 of SEQ ID NO: 1560886
uucugacaucgcuagaaua

SEQ ID NO: 1631684 - RNA, 19 nt, Artificial Sequence
  Description of Artificial Sequence: Synthetic oligonucleotide
  Antisense strand to SEQ ID NO: 1631683
uauucuagcgaugucagaa

SEQ ID NO: 1631685 - RNA, 19 nt, Artificial Sequence
  Description of Artificial Sequence: Synthetic oligonucleotide
  Sense strand starting at position 2233 of SEQ ID NO: 1560886
cugacaucgcuagaauauu

SEQ ID NO: 1631686 - RNA, 19 nt, Artificial Sequence
  Description of Artificial Sequence: Synthetic oligonucleotide
  Antisense strand to SEQ ID NO: 1631685
aauauucuagcgaugucag

SEQ ID NO: 1631687 - RNA, 19 nt, Artificial Sequence
  Description of Artificial Sequence: Synthetic oligonucleotide
  Sense strand starting at position 2239 of SEQ ID NO: 1560886
ucgcuagaauauuaaugga

SEQ ID NO: 1631688 - RNA, 19 nt, Artificial Sequence
  Description of Artificial Sequence: Synthetic oligonucleotide
  Antisense strand to SEQ ID NO: 1631687
uccauuaauauucuagcga

SEQ ID NO: 1631689 - RNA, 19 nt, Artificial Sequence
  Description of Artificial Sequence: Synthetic oligonucleotide
  Sense strand starting at position 2293 of SEQ ID NO: 1560886
ccgagucguuacuuggaaa

SEQ ID NO: 1631690 - RNA, 19 nt, Artificial Sequence
  Description of Artificial Sequence: Synthetic oligonucleotide
  Antisense strand to SEQ ID NO: 1631689
uuuccaaguaacgacucgg

SEQ ID NO: 1631691 - RNA, 19 nt, Artificial Sequence
  Description of Artificial Sequence: Synthetic oligonucleotide
  Sense strand starting at position 3245 of SEQ ID NO: 1560886
ggaggcucagccugaaagu

SEQ ID NO: 1631692 - RNA, 19 nt, Artificial Sequence
  Description of Artificial Sequence: Synthetic oligonucleotide
  Antisense strand to SEQ ID NO: 1631691
acuuucaggcugagccucc

SEQ ID NO: 1631693 - RNA, 19 nt, Artificial Sequence
  Description of Artificial Sequence: Synthetic oligonucleotide
  Sense strand starting at position 3417 of SEQ ID NO: 1560886
ggauacaagcugugucuuu

SEQ ID NO: 1631694 - RNA, 19 nt, Artificial Sequence
  Description of Artificial Sequence: Synthetic oligonucleotide
  Antisense strand to SEQ ID NO: 1631693
aaagacacagcuuguaucc

SEQ ID NO: 1631695 - RNA, 19 nt, Artificial Sequence
  Description of Artificial Sequence: Synthetic oligonucleotide
  Sense strand starting at position 3501 of SEQ ID NO: 1560886
ugaccucgaugcucagaaa

SEQ ID NO: 1631696 - RNA, 19 nt, Artificial Sequence
  Description of Artificial Sequence: Synthetic oligonucleotide
  Antisense strand to SEQ ID NO: 1631695
uuucugagcaucgagguca

SEQ ID NO: 1631697 - RNA, 19 nt, Artificial Sequence
  Description of Artificial Sequence: Synthetic oligonucleotide
  Sense strand starting at position 3504 of SEQ ID NO: 1560886
ccucgaugcucagaaacca

SEQ ID NO: 1631698 - RNA, 19 nt, Artificial Sequence
  Description of Artificial Sequence: Synthetic oligonucleotide
  Antisense strand to SEQ ID NO: 1631697
ugguuucugagcaucgagg

SEQ ID NO: 1631699 - RNA, 19 nt, Artificial Sequence
  Description of Artificial Sequence: Synthetic oligonucleotide
  Sense strand starting at position 3516 of SEQ ID NO: 1560886
gaaaccaucuauugaguga

SEQ ID NO: 1631700 - RNA, 19 nt, Artificial Sequence
  Description of Artificial Sequence: Synthetic oligonucleotide
  Antisense strand to SEQ ID NO: 1631699
ucacucaauagaugguuuc

SEQ ID NO: 1631701 - RNA, 19 nt, Artificial Sequence
  Description of Artificial Sequence: Synthetic oligonucleotide
  Sense strand starting at position 3523 of SEQ ID NO: 1560886
ucuauugagugagcuggau

SEQ ID NO: 1631702 - RNA, 19 nt, Artificial Sequence
  Description of Artificial Sequence: Synthetic oligonucleotide
  Antisense strand to SEQ ID NO: 1631701
auccagcucacucaauaga

SEQ ID NO: 1631703 - RNA, 19 nt, Artificial Sequence
  Description of Artificial Sequence: Synthetic oligonucleotide
  Sense strand starting at position 3602 of SEQ ID NO: 1560886
gugugaugucuacgugcua

SEQ ID NO: 1631704 - RNA, 19 nt, Artificial Sequence
  Description of Artificial Sequence: Synthetic oligonucleotide
  Antisense strand to SEQ ID NO: 1631703
uagcacguagacaucacac

SEQ ID NO: 1631705 - RNA, 19 nt, Artificial Sequence
  Description of Artificial Sequence: Synthetic oligonucleotide
  Sense strand starting at position 3603 of SEQ ID NO: 1560886
ugugaugucuacgugcuaa

SEQ ID NO: 1631706 - RNA, 19 nt, Artificial Sequence
  Description of Artificial Sequence: Synthetic oligonucleotide
  Antisense strand to SEQ ID NO: 1631705
uuagcacguagacaucaca

SEQ ID NO: 1631707 - RNA, 19 nt, Artificial Sequence
  Description of Artificial Sequence: Synthetic oligonucleotide
  Sense strand starting at position 3652 of SEQ ID NO: 1560886
agucaaugugucuguggga

SEQ ID NO: 1631708 - RNA, 19 nt, Artificial Sequence
  Description of Artificial Sequence: Synthetic oligonucleotide
  Antisense strand to SEQ ID NO: 1631707
ucccacagacacauugacu

SEQ ID NO: 1631709 - RNA, 19 nt, Artificial Sequence
  Description of Artificial Sequence: Synthetic oligonucleotide
  Sense strand starting at position 3705 of SEQ ID NO: 1560886
cccaucugccggugacauu

SEQ ID NO: 1631710 - RNA, 19 nt, Artificial Sequence
  Description of Artificial Sequence: Synthetic oligonucleotide
  Antisense strand to SEQ ID NO: 1631709
aaugucaccggcagauggg

SEQ ID NO: 1631711 - RNA, 19 nt, Artificial Sequence
  Description of Artificial Sequence: Synthetic oligonucleotide
  Sense strand starting at position 3962 of SEQ ID NO: 1560886
gugcaagucagaggcuaaa

SEQ ID NO: 1631712 - RNA, 19 nt, Artificial Sequence
  Description of Artificial Sequence: Synthetic oligonucleotide
  Antisense strand to SEQ ID NO: 1631711
uuuagccucugacuugcac

SEQ ID NO: 1631713 - RNA, 19 nt, Artificial Sequence
  Description of Artificial Sequence: Synthetic oligonucleotide
  Sense strand starting at position 3973 of SEQ ID NO: 1560886
aggcuaaauuugcaauugu

SEQ ID NO: 1631714 - RNA, 19 nt, Artificial Sequence
  Description of Artificial Sequence: Synthetic oligonucleotide
  Antisense strand to SEQ ID NO: 1631713
acaauugcaaauuuagccu

SEQ ID NO: 1631715 - RNA, 19 nt, Artificial Sequence
  Description of Artificial Sequence: Synthetic oligonucleotide
  Sense strand starting at position 79 of SEQ ID NO: 1560887
cugccauugcaggacuauu

SEQ ID NO: 1631716 - RNA, 19 nt, Artificial Sequence
  Description of Artificial Sequence: Synthetic oligonucleotide
  Antisense strand to SEQ ID NO: 1631715
aauaguccugcaauggcag

SEQ ID NO: 1631717 - RNA, 19 nt, Artificial Sequence
  Description of Artificial Sequence: Synthetic oligonucleotide
  Sense strand starting at position 91 of SEQ ID NO: 1560887
gacuauugaucauggagag

SEQ ID NO: 1631718 - RNA, 19 nt, Artificial Sequence
  Description of Artificial Sequence: Synthetic oligonucleotide
  Antisense strand to SEQ ID NO: 1631717
cucuccaugaucaauaguc

SEQ ID NO: 1631719 - RNA, 19 nt, Artificial Sequence
  Description of Artificial Sequence: Synthetic oligonucleotide
  Sense strand starting at position 123 of SEQ ID NO: 1560887
ugaagaaacccuugaggca

SEQ ID NO: 1631720 - RNA, 19 nt, Artificial Sequence
  Description of Artificial Sequence: Synthetic oligonucleotide
  Antisense strand to SEQ ID NO: 1631719
ugccucaaggguuucuuca

SEQ ID NO: 1631721 - RNA, 19 nt, Artificial Sequence
  Description of Artificial Sequence: Synthetic oligonucleotide
  Sense strand starting at position 318 of SEQ ID NO: 1560887
gagacagccuccuuagugu

SEQ ID NO: 1631722 - RNA, 19 nt, Artificial Sequence
  Description of Artificial Sequence: Synthetic oligonucleotide
  Antisense strand to SEQ ID NO: 1631721
acacuaaggaggcugucuc

SEQ ID NO: 1631723 - RNA, 19 nt, Artificial Sequence
  Description of Artificial Sequence: Synthetic oligonucleotide
  Sense strand starting at position 326 of SEQ ID NO: 1560887
cuccuuagugugggaagaa

SEQ ID NO: 1631724 - RNA, 19 nt, Artificial Sequence
  Description of Artificial Sequence: Synthetic oligonucleotide
  Antisense strand to SEQ ID NO: 1631723
uucuucccacacuaaggag

SEQ ID NO: 1631725 - RNA, 19 nt, Artificial Sequence
  Description of Artificial Sequence: Synthetic oligonucleotide
  Sense strand starting at position 353 of SEQ ID NO: 1560887
uccauaacauaggaaagau

SEQ ID NO: 1631726 - RNA, 19 nt, Artificial Sequence
  Description of Artificial Sequence: Synthetic oligonucleotide
  Antisense strand to SEQ ID NO: 1631725
aucuuuccuauguuaugga

SEQ ID NO: 1631727 - RNA, 19 nt, Artificial Sequence
  Description of Artificial Sequence: Synthetic oligonucleotide
  Sense strand starting at position 362 of SEQ ID NO: 1560887
uaggaaagaugccuucuga

SEQ ID NO: 1631728 - RNA, 19 nt, Artificial Sequence
  Description of Artificial Sequence: Synthetic oligonucleotide
  Antisense strand to SEQ ID NO: 1631727
ucagaaggcaucuuuccua

SEQ ID NO: 1631729 - RNA, 19 nt, Artificial Sequence
  Description of Artificial Sequence: Synthetic oligonucleotide
  Sense strand starting at position 383 of SEQ ID NO: 1560887
uacagagaugccugagaua

SEQ ID NO: 1631730 - RNA, 19 nt, Artificial Sequence
  Description of Artificial Sequence: Synthetic oligonucleotide
  Antisense strand to SEQ ID NO: 1631729
uaucucaggcaucucugua

SEQ ID NO: 1631731 - RNA, 19 nt, Artificial Sequence
  Description of Artificial Sequence: Synthetic oligonucleotide
  Sense strand starting at position 439 of SEQ ID NO: 1560887
ccuuuaggagaucguagaa

SEQ ID NO: 1631732 - RNA, 19 nt, Artificial Sequence
  Description of Artificial Sequence: Synthetic oligonucleotide
  Antisense strand to SEQ ID NO: 1631731
uucuacgaucuccuaaagg

SEQ ID NO: 1631733 - RNA, 19 nt, Artificial Sequence
  Description of Artificial Sequence: Synthetic oligonucleotide
  Sense strand starting at position 460 of SEQ ID NO: 1560887
acaauuaccucagugaggu

SEQ ID NO: 1631734 - RNA, 19 nt, Artificial Sequence
  Description of Artificial Sequence: Synthetic oligonucleotide
  Antisense strand to SEQ ID NO: 1631733
accucacugagguaauugu

SEQ ID NO: 1631735 - RNA, 19 nt, Artificial Sequence
  Description of Artificial Sequence: Synthetic oligonucleotide
  Sense strand starting at position 461 of SEQ ID NO: 1560887
caauuaccucagugaggua

SEQ ID NO: 1631736 - RNA, 19 nt, Artificial Sequence
  Description of Artificial Sequence: Synthetic oligonucleotide
  Antisense strand to SEQ ID NO: 1631735
uaccucacugagguaauug

SEQ ID NO: 1631737 - RNA, 19 nt, Artificial Sequence
  Description of Artificial Sequence: Synthetic oligonucleotide
  Sense strand starting at position 491 of SEQ ID NO: 1560887
aaccacucaugugaagaga

SEQ ID NO: 1631738 - RNA, 19 nt, Artificial Sequence
  Description of Artificial Sequence: Synthetic oligonucleotide
  Antisense strand to SEQ ID NO: 1631737
ucucuucacaugagugguu

SEQ ID NO: 1631739 - RNA, 19 nt, Artificial Sequence
  Description of Artificial Sequence: Synthetic oligonucleotide
  Sense strand starting at position 502 of SEQ ID NO: 1560887
ugaagagacucaugaaaua

SEQ ID NO: 1631740 - RNA, 19 nt, Artificial Sequence
  Description of Artificial Sequence: Synthetic oligonucleotide
  Antisense strand to SEQ ID NO: 1631739
uauuucaugagucucuuca

SEQ ID NO: 1631741 - RNA, 19 nt, Artificial Sequence
  Description of Artificial Sequence: Synthetic oligonucleotide
  Sense strand starting at position 564 of SEQ ID NO: 1560887
uggcaagaccucugagaua

SEQ ID NO: 1631742 - RNA, 19 nt, Artificial Sequence
  Description of Artificial Sequence: Synthetic oligonucleotide
  Antisense strand to SEQ ID NO: 1631741
uaucucagaggucuugcca

SEQ ID NO: 1631743 - RNA, 19 nt, Artificial Sequence
  Description of Artificial Sequence: Synthetic oligonucleotide
  Sense strand starting at position 579 of SEQ ID NO: 1560887
gauauugacuugggaacaa

SEQ ID NO: 1631744 - RNA, 19 nt, Artificial Sequence
  Description of Artificial Sequence: Synthetic oligonucleotide
  Antisense strand to SEQ ID NO: 1631743
uuguucccaagucaauauc

SEQ ID NO: 1631745 - RNA, 19 nt, Artificial Sequence
  Description of Artificial Sequence: Synthetic oligonucleotide
  Sense strand starting at position 621 of SEQ ID NO: 1560887
ggagaaggucacugaggua

SEQ ID NO: 1631746 - RNA, 19 nt, Artificial Sequence
  Description of Artificial Sequence: Synthetic oligonucleotide
  Antisense strand to SEQ ID NO: 1631745
uaccucagugaccuucucc

SEQ ID NO: 1631747 - RNA, 19 nt, Artificial Sequence
  Description of Artificial Sequence: Synthetic oligonucleotide
  Sense strand starting at position 633 of SEQ ID NO: 1560887
ugagguagcccucagggaa

SEQ ID NO: 1631748 - RNA, 19 nt, Artificial Sequence
  Description of Artificial Sequence: Synthetic oligonucleotide
  Antisense strand to SEQ ID NO: 1631747
uucccugagggcuaccuca

SEQ ID NO: 1631749 - RNA, 19 nt, Artificial Sequence
  Description of Artificial Sequence: Synthetic oligonucleotide
  Sense strand starting at position 669 of SEQ ID NO: 1560887
gcaugucugguguggaaga

SEQ ID NO: 1631750 - RNA, 19 nt, Artificial Sequence
  Description of Artificial Sequence: Synthetic oligonucleotide
  Antisense strand to SEQ ID NO: 1631749
ucuuccacaccagacaugc

SEQ ID NO: 1631751 - RNA, 19 nt, Artificial Sequence
  Description of Artificial Sequence: Synthetic oligonucleotide
  Sense strand starting at position 694 of SEQ ID NO: 1560887
agaggagaguccagagaug

SEQ ID NO: 1631752 - RNA, 19 nt, Artificial Sequence
  Description of Artificial Sequence: Synthetic oligonucleotide
  Antisense strand to SEQ ID NO: 1631751
caucucuggacucuccucu

SEQ ID NO: 1631753 - RNA, 19 nt, Artificial Sequence
  Description of Artificial Sequence: Synthetic oligonucleotide
  Sense strand starting at position 706 of SEQ ID NO: 1560887
agagaugucucucugaaac

SEQ ID NO: 1631754 - RNA, 19 nt, Artificial Sequence
  Description of Artificial Sequence: Synthetic oligonucleotide
  Antisense strand to SEQ ID NO: 1631753
guuucagagagacaucucu

SEQ ID NO: 1631755 - RNA, 19 nt, Artificial Sequence
  Description of Artificial Sequence: Synthetic oligonucleotide
  Sense strand starting at position 726 of SEQ ID NO: 1560887
ggaagacuuucuucuucuu

SEQ ID NO: 1631756 - RNA, 19 nt, Artificial Sequence
  Description of Artificial Sequence: Synthetic oligonucleotide
  Antisense strand to SEQ ID NO: 1631755
aagaagaagaaagucuucc

SEQ ID NO: 1631757 - RNA, 19 nt, Artificial Sequence
  Description of Artificial Sequence: Synthetic oligonucleotide
  Sense strand starting at position 1064 of SEQ ID NO: 1560887
ugggaagacuuccacaaca

SEQ ID NO: 1631758 - RNA, 19 nt, Artificial Sequence
  Description of Artificial Sequence: Synthetic oligonucleotide
  Antisense strand to SEQ ID NO: 1631757
uguuguggaagucuuccca

SEQ ID NO: 1631759 - RNA, 19 nt, Artificial Sequence
  Description of Artificial Sequence: Synthetic oligonucleotide
  Sense strand starting at position 1087 of SEQ ID NO: 1560887
gguguaagcugauuacuca

SEQ ID NO: 1631760 - RNA, 19 nt, Artificial Sequence
  Description of Artificial Sequence: Synthetic oligonucleotide
  Antisense strand to SEQ ID NO: 1631759
ugaguaaucagcuuacacc

SEQ ID NO: 1631761 - RNA, 19 nt, Artificial Sequence
  Description of Artificial Sequence: Synthetic oligonucleotide
  Sense strand starting at position 1088 of SEQ ID NO: 1560887
guguaagcugauuacucaa

SEQ ID NO: 1631762 - RNA, 19 nt, Artificial Sequence
  Description of Artificial Sequence: Synthetic oligonucleotide
  Antisense strand to SEQ ID NO: 1631761
uugaguaaucagcuuacac

SEQ ID NO: 1631763 - RNA, 19 nt, Artificial Sequence
  Description of Artificial Sequence: Synthetic oligonucleotide
  Sense strand starting at position 1151 of SEQ ID NO: 1560887
gccuuacuucuuggcaaug

SEQ ID NO: 1631764 - RNA, 19 nt, Artificial Sequence
  Description of Artificial Sequence: Synthetic oligonucleotide
  Antisense strand to SEQ ID NO: 1631763
cauugccaagaaguaaggc

SEQ ID NO: 1631765 - RNA, 19 nt, Artificial Sequence
  Description of Artificial Sequence: Synthetic oligonucleotide
  Sense strand starting at position 1245 of SEQ ID NO: 1560887
gauugugacaccugggaga

SEQ ID NO: 1631766 - RNA, 19 nt, Artificial Sequence
  Description of Artificial Sequence: Synthetic oligonucleotide
  Antisense strand to SEQ ID NO: 1631765
ucucccaggugucacaauc

SEQ ID NO: 1631767 - RNA, 19 nt, Artificial Sequence
  Description of Artificial Sequence: Synthetic oligonucleotide
  Sense strand starting at position 1247 of SEQ ID NO: 1560887
uugugacaccugggagaau

SEQ ID NO: 1631768 - RNA, 19 nt, Artificial Sequence
  Description of Artificial Sequence: Synthetic oligonucleotide
  Antisense strand to SEQ ID NO: 1631767
auucucccaggugucacaa

SEQ ID NO: 1631769 - RNA, 19 nt, Artificial Sequence
  Description of Artificial Sequence: Synthetic oligonucleotide
  Sense strand starting at position 1984 of SEQ ID NO: 1560887
gugcaugccgggaaacgua

SEQ ID NO: 1631770 - RNA, 19 nt, Artificial Sequence
  Description of Artificial Sequence: Synthetic oligonucleotide
  Antisense strand to SEQ ID NO: 1631769
uacguuucccggcaugcac

SEQ ID NO: 1631771 - RNA, 19 nt, Artificial Sequence
  Description of Artificial Sequence: Synthetic oligonucleotide
  Sense strand starting at position 2187 of SEQ ID NO: 1560887
cccggaguccugggaaauc

SEQ ID NO: 1631772 - RNA, 19 nt, Artificial Sequence
  Description of Artificial Sequence: Synthetic oligonucleotide
  Antisense strand to SEQ ID NO: 1631771
gauuucccaggacuccggg

SEQ ID NO: 1631773 - RNA, 19 nt, Artificial Sequence
  Description of Artificial Sequence: Synthetic oligonucleotide
  Sense strand starting at position 2778 of SEQ ID NO: 1560887
ccgcggaaggcgucugaua

SEQ ID NO: 1631774 - RNA, 19 nt, Artificial Sequence
  Description of Artificial Sequence: Synthetic oligonucleotide
  Antisense strand to SEQ ID NO: 1631773
uaucagacgccuuccgcgg

SEQ ID NO: 1631775 - RNA, 19 nt, Artificial Sequence
  Description of Artificial Sequence: Synthetic oligonucleotide
  Sense strand starting at position 3010 of SEQ ID NO: 1560887
gaaaguuacugagauucug

SEQ ID NO: 1631776 - RNA, 19 nt, Artificial Sequence
  Description of Artificial Sequence: Synthetic oligonucleotide
  Antisense strand to SEQ ID NO: 1631775
cagaaucucaguaacuuuc

SEQ ID NO: 1631777 - RNA, 19 nt, Artificial Sequence
  Description of Artificial Sequence: Synthetic oligonucleotide
  Sense strand starting at position 3016 of SEQ ID NO: 1560887
uacugagauucugaggauu

SEQ ID NO: 1631778 - RNA, 19 nt, Artificial Sequence
  Description of Artificial Sequence: Synthetic oligonucleotide
  Antisense strand to SEQ ID NO: 1631777
aauccucagaaucucagua

SEQ ID NO: 1631779 - RNA, 19 nt, Artificial Sequence
  Description of Artificial Sequence: Synthetic oligonucleotide
  Sense strand starting at position 3024 of SEQ ID NO: 1560887
uucugaggauuacaauacu

SEQ ID NO: 1631780 - RNA, 19 nt, Artificial Sequence
  Description of Artificial Sequence: Synthetic oligonucleotide
  Antisense strand to SEQ ID NO: 1631779
aguauuguaauccucagaa

SEQ ID NO: 1631781 - RNA, 19 nt, Artificial Sequence
  Description of Artificial Sequence: Synthetic oligonucleotide
  Sense strand starting at position 3123 of SEQ ID NO: 1560887
cuuggaagauacugagaga

SEQ ID NO: 1631782 - RNA, 19 nt, Artificial Sequence
  Description of Artificial Sequence: Synthetic oligonucleotide
  Antisense strand to SEQ ID NO: 1631781
ucucucaguaucuuccaag

SEQ ID NO: 1631783 - RNA, 19 nt, Artificial Sequence
  Description of Artificial Sequence: Synthetic oligonucleotide
  Sense strand starting at position 3134 of SEQ ID NO: 1560887
cugagagaugcuggaauau

SEQ ID NO: 1631784 - RNA, 19 nt, Artificial Sequence
  Description of Artificial Sequence: Synthetic oligonucleotide
  Antisense strand to SEQ ID NO: 1631783
auauuccagcaucucucag

SEQ ID NO: 1631785 - RNA, 19 nt, Artificial Sequence
  Description of Artificial Sequence: Synthetic oligonucleotide
  Sense strand starting at position 3143 of SEQ ID NO: 1560887
gcuggaauauuacugggau

SEQ ID NO: 1631786 - RNA, 19 nt, Artificial Sequence
  Description of Artificial Sequence: Synthetic oligonucleotide
  Antisense strand to SEQ ID NO: 1631785
aucccaguaauauuccagc

SEQ ID NO: 1631787 - RNA, 19 nt, Artificial Sequence
  Description of Artificial Sequence: Synthetic oligonucleotide
  Sense strand starting at position 3181 of SEQ ID NO: 1560887
uguuucugacaucgcuaga

SEQ ID NO: 1631788 - RNA, 19 nt, Artificial Sequence
  Description of Artificial Sequence: Synthetic oligonucleotide
  Antisense strand to SEQ ID NO: 1631787
ucuagcgaugucagaaaca

SEQ ID NO: 1631789 - RNA, 19 nt, Artificial Sequence
  Description of Artificial Sequence: Synthetic oligonucleotide
  Sense strand starting at position 3184 of SEQ ID NO: 1560887
uucugacaucgcuagaaua

SEQ ID NO: 1631790 - RNA, 19 nt, Artificial Sequence
  Description of Artificial Sequence: Synthetic oligonucleotide
  Antisense strand to SEQ ID NO: 1631789
uauucuagcgaugucagaa

SEQ ID NO: 1631791 - RNA, 19 nt, Artificial Sequence
  Description of Artificial Sequence: Synthetic oligonucleotide
  Sense strand starting at position 3186 of SEQ ID NO: 1560887
cugacaucgcuagaauauu

SEQ ID NO: 1631792 - RNA, 19 nt, Artificial Sequence
  Description of Artificial Sequence: Synthetic oligonucleotide
  Antisense strand to SEQ ID NO: 1631791
aauauucuagcgaugucag

SEQ ID NO: 1631793 - RNA, 19 nt, Artificial Sequence
  Description of Artificial Sequence: Synthetic oligonucleotide
  Sense strand starting at position 3246 of SEQ ID NO: 1560887
ccgagucguuacuuggaaa

SEQ ID NO: 1631794 - RNA, 19 nt, Artificial Sequence
  Description of Artificial Sequence: Synthetic oligonucleotide
  Antisense strand to SEQ ID NO: 1631793
uuuccaaguaacgacucgg

SEQ ID NO: 1631795 - RNA, 19 nt, Artificial Sequence
  Description of Artificial Sequence: Synthetic oligonucleotide
  Sense strand starting at position 433 of SEQ ID NO: 1560888
gugcaugccgggaaacgua

SEQ ID NO: 1631796 - RNA, 19 nt, Artificial Sequence
  Description of Artificial Sequence: Synthetic oligonucleotide
  Antisense strand to SEQ ID NO: 1631795
uacguuucccggcaugcac

SEQ ID NO: 1631797 - RNA, 19 nt, Artificial Sequence
  Description of Artificial Sequence: Synthetic oligonucleotide
  Sense strand starting at position 472 of SEQ ID NO: 1560888
gcgcguuaucgccagacca

SEQ ID NO: 1631798 - RNA, 19 nt, Artificial Sequence
  Description of Artificial Sequence: Synthetic oligonucleotide
  Antisense strand to SEQ ID NO: 1631797
uggucuggcgauaacgcgc

SEQ ID NO: 1631799 - RNA, 19 nt, Artificial Sequence
  Description of Artificial Sequence: Synthetic oligonucleotide
  Sense strand starting at position 636 of SEQ ID NO: 1560888
cccggaguccugggaaauc

SEQ ID NO: 1631800 - RNA, 19 nt, Artificial Sequence
  Description of Artificial Sequence: Synthetic oligonucleotide
  Antisense strand to SEQ ID NO: 1631799
gauuucccaggacuccggg

SEQ ID NO: 1631801 - RNA, 19 nt, Artificial Sequence
  Description of Artificial Sequence: Synthetic oligonucleotide
  Sense strand starting at position 671 of SEQ ID NO: 1560888
ccgugcaagucgucaaucu

SEQ ID NO: 1631802 - RNA, 19 nt, Artificial Sequence
  Description of Artificial Sequence: Synthetic oligonucleotide
  Antisense strand to SEQ ID NO: 1631801
agauugacgacuugcacgg

SEQ ID NO: 1631803 - RNA, 19 nt, Artificial Sequence
  Description of Artificial Sequence: Synthetic oligonucleotide
  Sense strand starting at position 1227 of SEQ ID NO: 1560888
ccgcggaaggcgucugaua

SEQ ID NO: 1631804 - RNA, 19 nt, Artificial Sequence
  Description of Artificial Sequence: Synthetic oligonucleotide
  Antisense strand to SEQ ID NO: 1631803
uaucagacgccuuccgcgg

SEQ ID NO: 1631805 - RNA, 19 nt, Artificial Sequence
  Description of Artificial Sequence: Synthetic oligonucleotide
  Sense strand starting at position 1236 of SEQ ID NO: 1560888
gcgucugauacccacguuu

SEQ ID NO: 1631806 - RNA, 19 nt, Artificial Sequence
  Description of Artificial Sequence: Synthetic oligonucleotide
  Antisense strand to SEQ ID NO: 1631805
aaacguggguaucagacgc

SEQ ID NO: 1631807 - RNA, 19 nt, Artificial Sequence
  Description of Artificial Sequence: Synthetic oligonucleotide
  Sense strand starting at position 1456 of SEQ ID NO: 1560888
cuggaaaguuacugagauu

SEQ ID NO: 1631808 - RNA, 19 nt, Artificial Sequence
  Description of Artificial Sequence: Synthetic oligonucleotide
  Antisense strand to SEQ ID NO: 1631807
aaucucaguaacuuuccag

SEQ ID NO: 1631809 - RNA, 19 nt, Artificial Sequence
  Description of Artificial Sequence: Synthetic oligonucleotide
  Sense strand starting at position 1459 of SEQ ID NO: 1560888
gaaaguuacugagauucug

SEQ ID NO: 1631810 - RNA, 19 nt, Artificial Sequence
  Description of Artificial Sequence: Synthetic oligonucleotide
  Antisense strand to SEQ ID NO: 1631809
cagaaucucaguaacuuuc

SEQ ID NO: 1631811 - RNA, 19 nt, Artificial Sequence
  Description of Artificial Sequence: Synthetic oligonucleotide
  Sense strand starting at position 1465 of SEQ ID NO: 1560888
uacugagauucugaggauu

SEQ ID NO: 1631812 - RNA, 19 nt, Artificial Sequence
  Description of Artificial Sequence: Synthetic oligonucleotide
  Antisense strand to SEQ ID NO: 1631811
aauccucagaaucucagua

SEQ ID NO: 1631813 - RNA, 19 nt, Artificial Sequence
  Description of Artificial Sequence: Synthetic oligonucleotide
  Sense strand starting at position 1467 of SEQ ID NO: 1560888
cugagauucugaggauuac

SEQ ID NO: 1631814 - RNA, 19 nt, Artificial Sequence
  Description of Artificial Sequence: Synthetic oligonucleotide
  Antisense strand to SEQ ID NO: 1631813
guaauccucagaaucucag

SEQ ID NO: 1631815 - RNA, 19 nt, Artificial Sequence
  Description of Artificial Sequence: Synthetic oligonucleotide
  Sense strand starting at position 1473 of SEQ ID NO: 1560888
uucugaggauuacaauacu

SEQ ID NO: 1631816 - RNA, 19 nt, Artificial Sequence
  Description of Artificial Sequence: Synthetic oligonucleotide
  Antisense strand to SEQ ID NO: 1631815
aguauuguaauccucagaa

SEQ ID NO: 1631817 - RNA, 19 nt, Artificial Sequence
  Description of Artificial Sequence: Synthetic oligonucleotide
  Sense strand starting at position 1564 of SEQ ID NO: 1560888
ccgggcuccuuggaagaua

SEQ ID NO: 1631818 - RNA, 19 nt, Artificial Sequence
  Description of Artificial Sequence: Synthetic oligonucleotide
  Antisense strand to SEQ ID NO: 1631817
uaucuuccaaggagcccgg

SEQ ID NO: 1631819 - RNA, 19 nt, Artificial Sequence
  Description of Artificial Sequence: Synthetic oligonucleotide
  Sense strand starting at position 1572 of SEQ ID NO: 1560888
cuuggaagauacugagaga

SEQ ID NO: 1631820 - RNA, 19 nt, Artificial Sequence
  Description of Artificial Sequence: Synthetic oligonucleotide
  Antisense strand to SEQ ID NO: 1631819
ucucucaguaucuuccaag

SEQ ID NO: 1631821 - RNA, 19 nt, Artificial Sequence
  Description of Artificial Sequence: Synthetic oligonucleotide
  Sense strand starting at position 1583 of SEQ ID NO: 1560888
cugagagaugcuggaauau

SEQ ID NO: 1631822 - RNA, 19 nt, Artificial Sequence
  Description of Artificial Sequence: Synthetic oligonucleotide
  Antisense strand to SEQ ID NO: 1631821
auauuccagcaucucucag

SEQ ID NO: 1631823 - RNA, 19 nt, Artificial Sequence
  Description of Artificial Sequence: Synthetic oligonucleotide
  Sense strand starting at position 1592 of SEQ ID NO: 1560888
gcuggaauauuacugggau

SEQ ID NO: 1631824 - RNA, 19 nt, Artificial Sequence
  Description of Artificial Sequence: Synthetic oligonucleotide
  Antisense strand to SEQ ID NO: 1631823
aucccaguaauauuccagc

SEQ ID NO: 1631825 - RNA, 19 nt, Artificial Sequence
  Description of Artificial Sequence: Synthetic oligonucleotide
  Sense strand starting at position 1593 of SEQ ID NO: 1560888
cuggaauauuacugggauu

SEQ ID NO: 1631826 - RNA, 19 nt, Artificial Sequence
  Description of Artificial Sequence: Synthetic oligonucleotide
  Antisense strand to SEQ ID NO: 1631825
aaucccaguaauauuccag

SEQ ID NO: 1631827 - RNA, 19 nt, Artificial Sequence
  Description of Artificial Sequence: Synthetic oligonucleotide
  Sense strand starting at position 1624 of SEQ ID NO: 1560888
ugaggauguuucugacauc

SEQ ID NO: 1631828 - RNA, 19 nt, Artificial Sequence
  Description of Artificial Sequence: Synthetic oligonucleotide
  Antisense strand to SEQ ID NO: 1631827
gaugucagaaacauccuca

SEQ ID NO: 1631829 - RNA, 19 nt, Artificial Sequence
  Description of Artificial Sequence: Synthetic oligonucleotide
  Sense strand starting at position 1630 of SEQ ID NO: 1560888
uguuucugacaucgcuaga

SEQ ID NO: 1631830 - RNA, 19 nt, Artificial Sequence
  Description of Artificial Sequence: Synthetic oligonucleotide
  Antisense strand to SEQ ID NO: 1631829
ucuagcgaugucagaaaca

SEQ ID NO: 1631831 - RNA, 19 nt, Artificial Sequence
  Description of Artificial Sequence: Synthetic oligonucleotide
  Sense strand starting at position 1633 of SEQ ID NO: 1560888
uucugacaucgcuagaaua

SEQ ID NO: 1631832 - RNA, 19 nt, Artificial Sequence
  Description of Artificial Sequence: Synthetic oligonucleotide
  Antisense strand to SEQ ID NO: 1631831
uauucuagcgaugucagaa

SEQ ID NO: 1631833 - RNA, 19 nt, Artificial Sequence
  Description of Artificial Sequence: Synthetic oligonucleotide
  Sense strand starting at position 1635 of SEQ ID NO: 1560888
cugacaucgcuagaauauu

SEQ ID NO: 1631834 - RNA, 19 nt, Artificial Sequence
  Description of Artificial Sequence: Synthetic oligonucleotide
  Antisense strand to SEQ ID NO: 1631833
aauauucuagcgaugucag

SEQ ID NO: 1631835 - RNA, 19 nt, Artificial Sequence
  Description of Artificial Sequence: Synthetic oligonucleotide
  Sense strand starting at position 1641 of SEQ ID NO: 1560888
ucgcuagaauauuaaugga

SEQ ID NO: 1631836 - RNA, 19 nt, Artificial Sequence
  Description of Artificial Sequence: Synthetic oligonucleotide
  Antisense strand to SEQ ID NO: 1631835
uccauuaauauucuagcga

SEQ ID NO: 1631837 - RNA, 19 nt, Artificial Sequence
  Description of Artificial Sequence: Synthetic oligonucleotide
  Sense strand starting at position 1695 of SEQ ID NO: 1560888
ccgagucguuacuuggaaa

SEQ ID NO: 1631838 - RNA, 19 nt, Artificial Sequence
  Description of Artificial Sequence: Synthetic oligonucleotide
  Antisense strand to SEQ ID NO: 1631837
uuuccaaguaacgacucgg

SEQ ID NO: 1631839 - RNA, 19 nt, Artificial Sequence
  Description of Artificial Sequence: Synthetic oligonucleotide
  Sense strand starting at position 2647 of SEQ ID NO: 1560888
ggaggcucagccugaaagu

SEQ ID NO: 1631840 - RNA, 19 nt, Artificial Sequence
  Description of Artificial Sequence: Synthetic oligonucleotide
  Antisense strand to SEQ ID NO: 1631839
acuuucaggcugagccucc

SEQ ID NO: 1631841 - RNA, 19 nt, Artificial Sequence
  Description of Artificial Sequence: Synthetic oligonucleotide
  Sense strand starting at position 2819 of SEQ ID NO: 1560888
ggauacaagcugugucuuu

SEQ ID NO: 1631842 - RNA, 19 nt, Artificial Sequence
  Description of Artificial Sequence: Synthetic oligonucleotide
  Antisense strand to SEQ ID NO: 1631841
aaagacacagcuuguaucc

SEQ ID NO: 1631843 - RNA, 19 nt, Artificial Sequence
  Description of Artificial Sequence: Synthetic oligonucleotide
  Sense strand starting at position 2903 of SEQ ID NO: 1560888
ugaccucgaugcucagaaa

SEQ ID NO: 1631844 - RNA, 19 nt, Artificial Sequence
  Description of Artificial Sequence: Synthetic oligonucleotide
  Antisense strand to SEQ ID NO: 1631843
uuucugagcaucgagguca

SEQ ID NO: 1631845 - RNA, 19 nt, Artificial Sequence
  Description of Artificial Sequence: Synthetic oligonucleotide
  Sense strand starting at position 2906 of SEQ ID NO: 1560888
ccucgaugcucagaaacca

SEQ ID NO: 1631846 - RNA, 19 nt, Artificial Sequence
  Description of Artificial Sequence: Synthetic oligonucleotide
  Antisense strand to SEQ ID NO: 1631845
ugguuucugagcaucgagg

SEQ ID NO: 1631847 - RNA, 19 nt, Artificial Sequence
  Description of Artificial Sequence: Synthetic oligonucleotide
  Sense strand starting at position 2918 of SEQ ID NO: 1560888
gaaaccaucuauugaguga

SEQ ID NO: 1631848 - RNA, 19 nt, Artificial Sequence
  Description of Artificial Sequence: Synthetic oligonucleotide
  Antisense strand to SEQ ID NO: 1631847
ucacucaauagaugguuuc

SEQ ID NO: 1631849 - RNA, 19 nt, Artificial Sequence
  Description of Artificial Sequence: Synthetic oligonucleotide
  Sense strand starting at position 2925 of SEQ ID NO: 1560888
ucuauugagugagcuggau

SEQ ID NO: 1631850 - RNA, 19 nt, Artificial Sequence
  Description of Artificial Sequence: Synthetic oligonucleotide
  Antisense strand to SEQ ID NO: 1631849
auccagcucacucaauaga

SEQ ID NO: 1631851 - RNA, 19 nt, Artificial Sequence
  Description of Artificial Sequence: Synthetic oligonucleotide
  Sense strand starting at position 3004 of SEQ ID NO: 1560888
gugugaugucuacgugcua

SEQ ID NO: 1631852 - RNA, 19 nt, Artificial Sequence
  Description of Artificial Sequence: Synthetic oligonucleotide
  Antisense strand to SEQ ID NO: 1631851
uagcacguagacaucacac

SEQ ID NO: 1631853 - RNA, 19 nt, Artificial Sequence
  Description of Artificial Sequence: Synthetic oligonucleotide
  Sense strand starting at position 3005 of SEQ ID NO: 1560888
ugugaugucuacgugcuaa

SEQ ID NO: 1631854 - RNA, 19 nt, Artificial Sequence
  Description of Artificial Sequence: Synthetic oligonucleotide
  Antisense strand to SEQ ID NO: 1631853
uuagcacguagacaucaca

SEQ ID NO: 1631855 - RNA, 19 nt, Artificial Sequence
  Description of Artificial Sequence: Synthetic oligonucleotide
  Sense strand starting at position 3054 of SEQ ID NO: 1560888
agucaaugugucuguggga

SEQ ID NO: 1631856 - RNA, 19 nt, Artificial Sequence
  Description of Artificial Sequence: Synthetic oligonucleotide
  Antisense strand to SEQ ID NO: 1631855
ucccacagacacauugacu

SEQ ID NO: 1631857 - RNA, 19 nt, Artificial Sequence
  Description of Artificial Sequence: Synthetic oligonucleotide
  Sense strand starting at position 3107 of SEQ ID NO: 1560888
cccaucugccggugacauu

SEQ ID NO: 1631858 - RNA, 19 nt, Artificial Sequence
  Description of Artificial Sequence: Synthetic oligonucleotide
  Antisense strand to SEQ ID NO: 1631857
aaugucaccggcagauggg

SEQ ID NO: 1631859 - RNA, 19 nt, Artificial Sequence
  Description of Artificial Sequence: Synthetic oligonucleotide
  Sense strand starting at position 3364 of SEQ ID NO: 1560888
gugcaagucagaggcuaaa

SEQ ID NO: 1631860 - RNA, 19 nt, Artificial Sequence
  Description of Artificial Sequence: Synthetic oligonucleotide
  Antisense strand to SEQ ID NO: 1631859
uuuagccucugacuugcac

SEQ ID NO: 1631861 - RNA, 19 nt, Artificial Sequence
  Description of Artificial Sequence: Synthetic oligonucleotide
  Sense strand starting at position 3375 of SEQ ID NO: 1560888
aggcuaaauuugcaauugu

SEQ ID NO: 1631862 - RNA, 19 nt, Artificial Sequence
  Description of Artificial Sequence: Synthetic oligonucleotide
  Antisense strand to SEQ ID NO: 1631861
acaauugcaaauuuagccu

SEQ ID NO: 1631863 - RNA, 19 nt, Artificial Sequence
  Description of Artificial Sequence: Synthetic oligonucleotide
  Sense strand starting at position 3762 of SEQ ID NO: 1560888
gcuagagacuagugaugga

SEQ ID NO: 1631864 - RNA, 19 nt, Artificial Sequence
  Description of Artificial Sequence: Synthetic oligonucleotide
  Antisense strand to SEQ ID NO: 1631863
uccaucacuagucucuagc

SEQ ID NO: 1631865 - RNA, 19 nt, Artificial Sequence
  Description of Artificial Sequence: Synthetic oligonucleotide
  Sense strand starting at position 3873 of SEQ ID NO: 1560888
acaaguaggucauugguca

SEQ ID NO: 1631866 - RNA, 19 nt, Artificial Sequence
  Description of Artificial Sequence: Synthetic oligonucleotide
  Antisense strand to SEQ ID NO: 1631865
ugaccaaugaccuacuugu

SEQ ID NO: 1631867 - RNA, 19 nt, Artificial Sequence
  Description of Artificial Sequence: Synthetic oligonucleotide
  Sense strand starting at position 3874 of SEQ ID NO: 1560888
caaguaggucauuggucau

SEQ ID NO: 1631868 - RNA, 19 nt, Artificial Sequence
  Description of Artificial Sequence: Synthetic oligonucleotide
  Antisense strand to SEQ ID NO: 1631867
augaccaaugaccuacuug

SEQ ID NO: 1631869 - RNA, 19 nt, Artificial Sequence
  Description of Artificial Sequence: Synthetic oligonucleotide
  Sense strand starting at position 3880 of SEQ ID NO: 1560888
ggucauuggucaugggaug

SEQ ID NO: 1631870 - RNA, 19 nt, Artificial Sequence
  Description of Artificial Sequence: Synthetic oligonucleotide
  Antisense strand to SEQ ID NO: 1631869
caucccaugaccaaugacc

SEQ ID NO: 1631871 - RNA, 19 nt, Artificial Sequence
  Description of Artificial Sequence: Synthetic oligonucleotide
  Sense strand starting at position 3881 of SEQ ID NO: 1560888
gucauuggucaugggaugu

SEQ ID NO: 1631872 - RNA, 19 nt, Artificial Sequence
  Description of Artificial Sequence: Synthetic oligonucleotide
  Antisense strand to SEQ ID NO: 1631871
acaucccaugaccaaugac

SEQ ID NO: 1631873 - RNA, 19 nt, Artificial Sequence
  Description of Artificial Sequence: Synthetic oligonucleotide
  Sense strand starting at position 3981 of SEQ ID NO: 1560888
gaucuuggcccuuagauau

SEQ ID NO: 1631874 - RNA, 19 nt, Artificial Sequence
  Description of Artificial Sequence: Synthetic oligonucleotide
  Antisense strand to SEQ ID NO: 1631873
auaucuaagggccaagauc

SEQ ID NO: 1631875 - RNA, 19 nt, Artificial Sequence
  Description of Artificial Sequence: Synthetic oligonucleotide
  Sense strand starting at position 395 of SEQ ID NO: 1560889
ugagguaauguauacgaau

SEQ ID NO: 1631876 - RNA, 19 nt, Artificial Sequence
  Description of Artificial Sequence: Synthetic oligonucleotide
  Antisense strand to SEQ ID NO: 1631875
auucguauacauuaccuca

SEQ ID NO: 1631877 - RNA, 19 nt, Artificial Sequence
  Description of Artificial Sequence: Synthetic oligonucleotide
  Sense strand starting at position 397 of SEQ ID NO: 1560889
agguaauguauacgaauau

SEQ ID NO: 1631878 - RNA, 19 nt, Artificial Sequence
  Description of Artificial Sequence: Synthetic oligonucleotide
  Antisense strand to SEQ ID NO: 1631877
auauucguauacauuaccu

SEQ ID NO: 1631879 - RNA, 19 nt, Artificial Sequence
  Description of Artificial Sequence: Synthetic oligonucleotide
  Sense strand starting at position 398 of SEQ ID NO: 1560889
gguaauguauacgaauaug

SEQ ID NO: 1631880 - RNA, 19 nt, Artificial Sequence
  Description of Artificial Sequence: Synthetic oligonucleotide
  Antisense strand to SEQ ID NO: 1631879
cauauucguauacauuacc

SEQ ID NO: 1631881 - RNA, 19 nt, Artificial Sequence
  Description of Artificial Sequence: Synthetic oligonucleotide
  Sense strand starting at position 450 of SEQ ID NO: 1560889
uugcuaugaucugcauaau

SEQ ID NO: 1631882 - RNA, 19 nt, Artificial Sequence
  Description of Artificial Sequence: Synthetic oligonucleotide
  Antisense strand to SEQ ID NO: 1631881
auuaugcagaucauagcaa

SEQ ID NO: 1631883 - RNA, 19 nt, Artificial Sequence
  Description of Artificial Sequence: Synthetic oligonucleotide
  Sense strand starting at position 451 of SEQ ID NO: 1560889
ugcuaugaucugcauaauu

SEQ ID NO: 1631884 - RNA, 19 nt, Artificial Sequence
  Description of Artificial Sequence: Synthetic oligonucleotide
  Antisense strand to SEQ ID NO: 1631883
aauuaugcagaucauagca

SEQ ID NO: 1631885 - RNA, 19 nt, Artificial Sequence
  Description of Artificial Sequence: Synthetic oligonucleotide
  Sense strand starting at position 460 of SEQ ID NO: 1560889
cugcauaauuggcacaaca

SEQ ID NO: 1631886 - RNA, 19 nt, Artificial Sequence
  Description of Artificial Sequence: Synthetic oligonucleotide
  Antisense strand to SEQ ID NO: 1631885
uguugugccaauuaugcag

SEQ ID NO: 1631887 - RNA, 19 nt, Artificial Sequence
  Description of Artificial Sequence: Synthetic oligonucleotide
  Sense strand starting at position 493 of SEQ ID NO: 1560889
cgaacuguuuaagcucaga

SEQ ID NO: 1631888 - RNA, 19 nt, Artificial Sequence
  Description of Artificial Sequence: Synthetic oligonucleotide
  Antisense strand to SEQ ID NO: 1631887
ucugagcuuaaacaguucg

SEQ ID NO: 1631889 - RNA, 19 nt, Artificial Sequence
  Description of Artificial Sequence: Synthetic oligonucleotide
  Sense strand starting at position 527 of SEQ ID NO: 1560889
uguggagcgauccaugauu

SEQ ID NO: 1631890 - RNA, 19 nt, Artificial Sequence
  Description of Artificial Sequence: Synthetic oligonucleotide
  Antisense strand to SEQ ID NO: 1631889
aaucauggaucgcuccaca

SEQ ID NO: 1631891 - RNA, 19 nt, Artificial Sequence
  Description of Artificial Sequence: Synthetic oligonucleotide
  Sense strand starting at position 529 of SEQ ID NO: 1560889
uggagcgauccaugauuga

SEQ ID NO: 1631892 - RNA, 19 nt, Artificial Sequence
  Description of Artificial Sequence: Synthetic oligonucleotide
  Antisense strand to SEQ ID NO: 1631891
ucaaucauggaucgcucca

SEQ ID NO: 1631893 - RNA, 19 nt, Artificial Sequence
  Description of Artificial Sequence: Synthetic oligonucleotide
  Sense strand starting at position 534 of SEQ ID NO: 1560889
cgauccaugauugaugcua

SEQ ID NO: 1631894 - RNA, 19 nt, Artificial Sequence
  Description of Artificial Sequence: Synthetic oligonucleotide
  Antisense strand to SEQ ID NO: 1631893
uagcaucaaucauggaucg

SEQ ID NO: 1631895 - RNA, 19 nt, Artificial Sequence
  Description of Artificial Sequence: Synthetic oligonucleotide
  Sense strand starting at position 781 of SEQ ID NO: 1560889
gccuguggucuccauggaa

SEQ ID NO: 1631896 - RNA, 19 nt, Artificial Sequence
  Description of Artificial Sequence: Synthetic oligonucleotide
  Antisense strand to SEQ ID NO: 1631895
uuccauggagaccacaggc

SEQ ID NO: 1631897 - RNA, 19 nt, Artificial Sequence
  Description of Artificial Sequence: Synthetic oligonucleotide
  Sense strand starting at position 858 of SEQ ID NO: 1560889
gaucaaaguuaucugggca

SEQ ID NO: 1631898 - RNA, 19 nt, Artificial Sequence
  Description of Artificial Sequence: Synthetic oligonucleotide
  Antisense strand to SEQ ID NO: 1631897
ugcccagauaacuuugauc

SEQ ID NO: 1631899 - RNA, 19 nt, Artificial Sequence
  Description of Artificial Sequence: Synthetic oligonucleotide
  Sense strand starting at position 949 of SEQ ID NO: 1560889
cuguuacugucgcuaccaa

SEQ ID NO: 1631900 - RNA, 19 nt, Artificial Sequence
  Description of Artificial Sequence: Synthetic oligonucleotide
  Antisense strand to SEQ ID NO: 1631899
uugguagcgacaguaacag

SEQ ID NO: 1631901 - RNA, 19 nt, Artificial Sequence
  Description of Artificial Sequence: Synthetic oligonucleotide
  Sense strand starting at position 950 of SEQ ID NO: 1560889
uguuacugucgcuaccaau

SEQ ID NO: 1631902 - RNA, 19 nt, Artificial Sequence
  Description of Artificial Sequence: Synthetic oligonucleotide
  Antisense strand to SEQ ID NO: 1631901
auugguagcgacaguaaca

SEQ ID NO: 1631903 - RNA, 19 nt, Artificial Sequence
  Description of Artificial Sequence: Synthetic oligonucleotide
  Sense strand starting at position 957 of SEQ ID NO: 1560889
gucgcuaccaaucaagagu

SEQ ID NO: 1631904 - RNA, 19 nt, Artificial Sequence
  Description of Artificial Sequence: Synthetic oligonucleotide
  Antisense strand to SEQ ID NO: 1631903
acucuugauugguagcgac

SEQ ID NO: 1631905 - RNA, 19 nt, Artificial Sequence
  Description of Artificial Sequence: Synthetic oligonucleotide
  Sense strand starting at position 975 of SEQ ID NO: 1560889
ucgagauggcuuugaugga

SEQ ID NO: 1631906 - RNA, 19 nt, Artificial Sequence
  Description of Artificial Sequence: Synthetic oligonucleotide
  Antisense strand to SEQ ID NO: 1631905
uccaucaaagccaucucga

SEQ ID NO: 1631907 - RNA, 19 nt, Artificial Sequence
  Description of Artificial Sequence: Synthetic oligonucleotide
  Sense strand starting at position 982 of SEQ ID NO: 1560889
ggcuuugauggacaggcau

SEQ ID NO: 1631908 - RNA, 19 nt, Artificial Sequence
  Description of Artificial Sequence: Synthetic oligonucleotide
  Antisense strand to SEQ ID NO: 1631907
augccuguccaucaaagcc

SEQ ID NO: 1631909 - RNA, 19 nt, Artificial Sequence
  Description of Artificial Sequence: Synthetic oligonucleotide
  Sense strand starting at position 1593 of SEQ ID NO: 1560889
cucccaugguugcuccaua

SEQ ID NO: 1631910 - RNA, 19 nt, Artificial Sequence
  Description of Artificial Sequence: Synthetic oligonucleotide
  Antisense strand to SEQ ID NO: 1631909
uauggagcaaccaugggag

SEQ ID NO: 1631911 - RNA, 19 nt, Artificial Sequence
  Description of Artificial Sequence: Synthetic oligonucleotide
  Sense strand starting at position 1594 of SEQ ID NO: 1560889
ucccaugguugcuccauaa

SEQ ID NO: 1631912 - RNA, 19 nt, Artificial Sequence
  Description of Artificial Sequence: Synthetic oligonucleotide
  Antisense strand to SEQ ID NO: 1631911
uuauggagcaaccauggga

SEQ ID NO: 1631913 - RNA, 19 nt, Artificial Sequence
  Description of Artificial Sequence: Synthetic oligonucleotide
  Sense strand starting at position 1598 of SEQ ID NO: 1560889
augguugcuccauaaugga

SEQ ID NO: 1631914 - RNA, 19 nt, Artificial Sequence
  Description of Artificial Sequence: Synthetic oligonucleotide
  Antisense strand to SEQ ID NO: 1631913
uccauuauggagcaaccau

SEQ ID NO: 1631915 - RNA, 19 nt, Artificial Sequence
  Description of Artificial Sequence: Synthetic oligonucleotide
  Sense strand starting at position 1788 of SEQ ID NO: 1560889
cagagugagaguuaccgaa

SEQ ID NO: 1631916 - RNA, 19 nt, Artificial Sequence
  Description of Artificial Sequence: Synthetic oligonucleotide
  Antisense strand to SEQ ID NO: 1631915
uucgguaacucucacucug

SEQ ID NO: 1631917 - RNA, 19 nt, Artificial Sequence
  Description of Artificial Sequence: Synthetic oligonucleotide
  Sense strand starting at position 1792 of SEQ ID NO: 1560889
gugagaguuaccgaagcag

SEQ ID NO: 1631918 - RNA, 19 nt, Artificial Sequence
  Description of Artificial Sequence: Synthetic oligonucleotide
  Antisense strand to SEQ ID NO: 1631917
cugcuucgguaacucucac

SEQ ID NO: 1631919 - RNA, 19 nt, Artificial Sequence
  Description of Artificial Sequence: Synthetic oligonucleotide
  Sense strand starting at position 1812 of SEQ ID NO: 1560889
cucugucuccuccaucaga

SEQ ID NO: 1631920 - RNA, 19 nt, Artificial Sequence
  Description of Artificial Sequence: Synthetic oligonucleotide
  Antisense strand to SEQ ID NO: 1631919
ucugauggaggagacagag

SEQ ID NO: 1631921 - RNA, 19 nt, Artificial Sequence
  Description of Artificial Sequence: Synthetic oligonucleotide
  Sense strand starting at position 1893 of SEQ ID NO: 1560889
ggcagaaauguggaucucu

SEQ ID NO: 1631922 - RNA, 19 nt, Artificial Sequence
  Description of Artificial Sequence: Synthetic oligonucleotide
  Antisense strand to SEQ ID NO: 1631921
agagauccacauuucugcc

SEQ ID NO: 1631923 - RNA, 19 nt, Artificial Sequence
  Description of Artificial Sequence: Synthetic oligonucleotide
  Sense strand starting at position 2158 of SEQ ID NO: 1560889
ggcuguuuccuccgucaga

SEQ ID NO: 1631924 - RNA, 19 nt, Artificial Sequence
  Description of Artificial Sequence: Synthetic oligonucleotide
  Antisense strand to SEQ ID NO: 1631923
ucugacggaggaaacagcc

SEQ ID NO: 1631925 - RNA, 19 nt, Artificial Sequence
  Description of Artificial Sequence: Synthetic oligonucleotide
  Sense strand starting at position 2159 of SEQ ID NO: 1560889
gcuguuuccuccgucagac

SEQ ID NO: 1631926 - RNA, 19 nt, Artificial Sequence
  Description of Artificial Sequence: Synthetic oligonucleotide
  Antisense strand to SEQ ID NO: 1631925
gucugacggaggaaacagc

SEQ ID NO: 1631927 - RNA, 19 nt, Artificial Sequence
  Description of Artificial Sequence: Synthetic oligonucleotide
  Sense strand starting at position 2283 of SEQ ID NO: 1560889
gacugaggcuguucggaua

SEQ ID NO: 1631928 - RNA, 19 nt, Artificial Sequence
  Description of Artificial Sequence: Synthetic oligonucleotide
  Antisense strand to SEQ ID NO: 1631927
uauccgaacagccucaguc

SEQ ID NO: 1631929 - RNA, 19 nt, Artificial Sequence
  Description of Artificial Sequence: Synthetic oligonucleotide
  Sense strand starting at position 2338 of SEQ ID NO: 1560889
auccuuccgcggugaaguu

SEQ ID NO: 1631930 - RNA, 19 nt, Artificial Sequence
  Description of Artificial Sequence: Synthetic oligonucleotide
  Antisense strand to SEQ ID NO: 1631929
aacuucaccgcggaaggau

SEQ ID NO: 1631931 - RNA, 19 nt, Artificial Sequence
  Description of Artificial Sequence: Synthetic oligonucleotide
  Sense strand starting at position 2365 of SEQ ID NO: 1560889
gagggauucccuuggauuc

SEQ ID NO: 1631932 - RNA, 19 nt, Artificial Sequence
  Description of Artificial Sequence: Synthetic oligonucleotide
  Antisense strand to SEQ ID NO: 1631931
gaauccaagggaaucccuc

SEQ ID NO: 1631933 - RNA, 19 nt, Artificial Sequence
  Description of Artificial Sequence: Synthetic oligonucleotide
  Sense strand starting at position 2385 of SEQ ID NO: 1560889
guuggaaggcgguaguuaa

SEQ ID NO: 1631934 - RNA, 19 nt, Artificial Sequence
  Description of Artificial Sequence: Synthetic oligonucleotide
  Antisense strand to SEQ ID NO: 1631933
uuaacuaccgccuuccaac

SEQ ID NO: 1631935 - RNA, 19 nt, Artificial Sequence
  Description of Artificial Sequence: Synthetic oligonucleotide
  Sense strand starting at position 2392 of SEQ ID NO: 1560889
ggcgguaguuaauugggaa

SEQ ID NO: 1631936 - RNA, 19 nt, Artificial Sequence
  Description of Artificial Sequence: Synthetic oligonucleotide
  Antisense strand to SEQ ID NO: 1631935
uucccaauuaacuaccgcc

SEQ ID NO: 1631937 - RNA, 19 nt, Artificial Sequence
  Description of Artificial Sequence: Synthetic oligonucleotide
  Sense strand starting at position 2393 of SEQ ID NO: 1560889
gcgguaguuaauugggaag

SEQ ID NO: 1631938 - RNA, 19 nt, Artificial Sequence
  Description of Artificial Sequence: Synthetic oligonucleotide
  Antisense strand to SEQ ID NO: 1631937
cuucccaauuaacuaccgc

SEQ ID NO: 1631939 - RNA, 19 nt, Artificial Sequence
  Description of Artificial Sequence: Synthetic oligonucleotide
  Sense strand starting at position 2414 of SEQ ID NO: 1560889
ggcguugggucauugguua

SEQ ID NO: 1631940 - RNA, 19 nt, Artificial Sequence
  Description of Artificial Sequence: Synthetic oligonucleotide
  Antisense strand to SEQ ID NO: 1631939
uaaccaaugacccaacgcc

SEQ ID NO: 1631941 - RNA, 19 nt, Artificial Sequence
  Description of Artificial Sequence: Synthetic oligonucleotide
  Sense strand starting at position 2560 of SEQ ID NO: 1560889
gccuccuuaguaggauaaa

SEQ ID NO: 1631942 - RNA, 19 nt, Artificial Sequence
  Description of Artificial Sequence: Synthetic oligonucleotide
  Antisense strand to SEQ ID NO: 1631941
uuuauccuacuaaggaggc

SEQ ID NO: 1631943 - RNA, 19 nt, Artificial Sequence
  Description of Artificial Sequence: Synthetic oligonucleotide
  Sense strand starting at position 2561 of SEQ ID NO: 1560889
ccuccuuaguaggauaaau

SEQ ID NO: 1631944 - RNA, 19 nt, Artificial Sequence
  Description of Artificial Sequence: Synthetic oligonucleotide
  Antisense strand to SEQ ID NO: 1631943
auuuauccuacuaaggagg

SEQ ID NO: 1631945 - RNA, 19 nt, Artificial Sequence
  Description of Artificial Sequence: Synthetic oligonucleotide
  Sense strand starting at position 2696 of SEQ ID NO: 1560889
gcugaagagguauggaacu

SEQ ID NO: 1631946 - RNA, 19 nt, Artificial Sequence
  Description of Artificial Sequence: Synthetic oligonucleotide
  Antisense strand to SEQ ID NO: 1631945
aguuccauaccucuucagc

SEQ ID NO: 1631947 - RNA, 19 nt, Artificial Sequence
  Description of Artificial Sequence: Synthetic oligonucleotide
  Sense strand starting at position 3342 of SEQ ID NO: 1560889
cagguuccuuggguguaaa

SEQ ID NO: 1631948 - RNA, 19 nt, Artificial Sequence
  Description of Artificial Sequence: Synthetic oligonucleotide
  Antisense strand to SEQ ID NO: 1631947
uuuacacccaaggaaccug

SEQ ID NO: 1631949 - RNA, 19 nt, Artificial Sequence
  Description of Artificial Sequence: Synthetic oligonucleotide
  Sense strand starting at position 3392 of SEQ ID NO: 1560889
aagauuccauguguuagau

SEQ ID NO: 1631950 - RNA, 19 nt, Artificial Sequence
  Description of Artificial Sequence: Synthetic oligonucleotide
  Antisense strand to SEQ ID NO: 1631949
aucuaacacauggaaucuu

SEQ ID NO: 1631951 - RNA, 19 nt, Artificial Sequence
  Description of Artificial Sequence: Synthetic oligonucleotide
  Sense strand starting at position 3396 of SEQ ID NO: 1560889
uuccauguguuagauccaa

SEQ ID NO: 1631952 - RNA, 19 nt, Artificial Sequence
  Description of Artificial Sequence: Synthetic oligonucleotide
  Antisense strand to SEQ ID NO: 1631951
uuggaucuaacacauggaa

SEQ ID NO: 1631953 - RNA, 19 nt, Artificial Sequence
  Description of Artificial Sequence: Synthetic oligonucleotide
  Sense strand starting at position 3497 of SEQ ID NO: 1560889
ugguccgaguaguucaaga

SEQ ID NO: 1631954 - RNA, 19 nt, Artificial Sequence
  Description of Artificial Sequence: Synthetic oligonucleotide
  Antisense strand to SEQ ID NO: 1631953
ucuugaacuacucggacca

SEQ ID NO: 1631955 - RNA, 19 nt, Artificial Sequence
  Description of Artificial Sequence: Synthetic oligonucleotide
  Sense strand starting at position 134 of SEQ ID NO: 1560890
ucuuauaacugccaagaug

SEQ ID NO: 1631956 - RNA, 19 nt, Artificial Sequence
  Description of Artificial Sequence: Synthetic oligonucleotide
  Antisense strand to SEQ ID NO: 1631955
caucuuggcaguuauaaga

SEQ ID NO: 1631957 - RNA, 19 nt, Artificial Sequence
  Description of Artificial Sequence: Synthetic oligonucleotide
  Sense strand starting at position 1195 of SEQ ID NO: 1560890
cugcaaguguguuccuaua

SEQ ID NO: 1631958 - RNA, 19 nt, Artificial Sequence
  Description of Artificial Sequence: Synthetic oligonucleotide
  Antisense strand to SEQ ID NO: 1631957
uauaggaacacacuugcag

SEQ ID NO: 1631959 - RNA, 19 nt, Artificial Sequence
  Description of Artificial Sequence: Synthetic oligonucleotide
  Sense strand starting at position 1335 of SEQ ID NO: 1560890
uggugauguuguccgggaa

SEQ ID NO: 1631960 - RNA, 19 nt, Artificial Sequence
  Description of Artificial Sequence: Synthetic oligonucleotide
  Antisense strand to SEQ ID NO: 1631959
uucccggacaacaucacca

SEQ ID NO: 1631961 - RNA, 19 nt, Artificial Sequence
  Description of Artificial Sequence: Synthetic oligonucleotide
  Sense strand starting at position 1336 of SEQ ID NO: 1560890
ggugauguuguccgggaac

SEQ ID NO: 1631962 - RNA, 19 nt, Artificial Sequence
  Description of Artificial Sequence: Synthetic oligonucleotide
  Antisense strand to SEQ ID NO: 1631961
guucccggacaacaucacc

SEQ ID NO: 1631963 - RNA, 19 nt, Artificial Sequence
  Description of Artificial Sequence: Synthetic oligonucleotide
  Sense strand starting at position 1338 of SEQ ID NO: 1560890
ugauguuguccgggaacac

SEQ ID NO: 1631964 - RNA, 19 nt, Artificial Sequence
  Description of Artificial Sequence: Synthetic oligonucleotide
  Antisense strand to SEQ ID NO: 1631963
guguucccggacaacauca

SEQ ID NO: 1631965 - RNA, 19 nt, Artificial Sequence
  Description of Artificial Sequence: Synthetic oligonucleotide
  Sense strand starting at position 1339 of SEQ ID NO: 1560890
gauguuguccgggaacacu

SEQ ID NO: 1631966 - RNA, 19 nt, Artificial Sequence
  Description of Artificial Sequence: Synthetic oligonucleotide
  Antisense strand to SEQ ID NO: 1631965
aguguucccggacaacauc

SEQ ID NO: 1631967 - RNA, 19 nt, Artificial Sequence
  Description of Artificial Sequence: Synthetic oligonucleotide
  Sense strand starting at position 1746 of SEQ ID NO: 1560890
aggacuuccuaauggaaac

SEQ ID NO: 1631968 - RNA, 19 nt, Artificial Sequence
  Description of Artificial Sequence: Synthetic oligonucleotide
  Antisense strand to SEQ ID NO: 1631967
guuuccauuaggaaguccu

SEQ ID NO: 1631969 - RNA, 19 nt, Artificial Sequence
  Description of Artificial Sequence: Synthetic oligonucleotide
  Sense strand starting at position 2044 of SEQ ID NO: 1560890
auucguccugucugguauu

SEQ ID NO: 1631970 - RNA, 19 nt, Artificial Sequence
  Description of Artificial Sequence: Synthetic oligonucleotide
  Antisense strand to SEQ ID NO: 1631969
aauaccagacaggacgaau

SEQ ID NO: 1631971 - RNA, 19 nt, Artificial Sequence
  Description of Artificial Sequence: Synthetic oligonucleotide
  Sense strand starting at position 2118 of SEQ ID NO: 1560890
acaggagaguuccgagaag

SEQ ID NO: 1631972 - RNA, 19 nt, Artificial Sequence
  Description of Artificial Sequence: Synthetic oligonucleotide
  Antisense strand to SEQ ID NO: 1631971
cuucucggaacucuccugu

SEQ ID NO: 1631973 - RNA, 19 nt, Artificial Sequence
  Description of Artificial Sequence: Synthetic oligonucleotide
  Sense strand starting at position 2333 of SEQ ID NO: 1560890
gcaucagccuggugguuaa

SEQ ID NO: 1631974 - RNA, 19 nt, Artificial Sequence
  Description of Artificial Sequence: Synthetic oligonucleotide
  Antisense strand to SEQ ID NO: 1631973
uuaaccaccaggcugaugc

SEQ ID NO: 1631975 - RNA, 19 nt, Artificial Sequence
  Description of Artificial Sequence: Synthetic oligonucleotide
  Sense strand starting at position 2337 of SEQ ID NO: 1560890
cagccuggugguuaagagu

SEQ ID NO: 1631976 - RNA, 19 nt, Artificial Sequence
  Description of Artificial Sequence: Synthetic oligonucleotide
  Antisense strand to SEQ ID NO: 1631975
acucuuaaccaccaggcug

SEQ ID NO: 1631977 - RNA, 19 nt, Artificial Sequence
  Description of Artificial Sequence: Synthetic oligonucleotide
  Sense strand starting at position 2345 of SEQ ID NO: 1560890
ugguuaagagugugagcuu

SEQ ID NO: 1631978 - RNA, 19 nt, Artificial Sequence
  Description of Artificial Sequence: Synthetic oligonucleotide
  Antisense strand to SEQ ID NO: 1631977
aagcucacacucuuaacca

SEQ ID NO: 1631979 - RNA, 19 nt, Artificial Sequence
  Description of Artificial Sequence: Synthetic oligonucleotide
  Sense strand starting at position 2461 of SEQ ID NO: 1560890
cccacaguguuguaaggau

SEQ ID NO: 1631980 - RNA, 19 nt, Artificial Sequence
  Description of Artificial Sequence: Synthetic oligonucleotide
  Antisense strand to SEQ ID NO: 1631979
auccuuacaacacuguggg

SEQ ID NO: 1631981 - RNA, 19 nt, Artificial Sequence
  Description of Artificial Sequence: Synthetic oligonucleotide
  Sense strand starting at position 2468 of SEQ ID NO: 1560890
uguuguaaggauuauacga

SEQ ID NO: 1631982 - RNA, 19 nt, Artificial Sequence
  Description of Artificial Sequence: Synthetic oligonucleotide
  Antisense strand to SEQ ID NO: 1631981
ucguauaauccuuacaaca

SEQ ID NO: 1631983 - RNA, 19 nt, Artificial Sequence
  Description of Artificial Sequence: Synthetic oligonucleotide
  Sense strand starting at position 2473 of SEQ ID NO: 1560890
uaaggauuauacgaagugu

SEQ ID NO: 1631984 - RNA, 19 nt, Artificial Sequence
  Description of Artificial Sequence: Synthetic oligonucleotide
  Antisense strand to SEQ ID NO: 1631983
acacuucguauaauccuua

SEQ ID NO: 1631985 - RNA, 19 nt, Artificial Sequence
  Description of Artificial Sequence: Synthetic oligonucleotide
  Sense strand starting at position 2477 of SEQ ID NO: 1560890
gauuauacgaagugugcau

SEQ ID NO: 1631986 - RNA, 19 nt, Artificial Sequence
  Description of Artificial Sequence: Synthetic oligonucleotide
  Antisense strand to SEQ ID NO: 1631985
augcacacuucguauaauc

SEQ ID NO: 1631987 - RNA, 19 nt, Artificial Sequence
  Description of Artificial Sequence: Synthetic oligonucleotide
  Sense strand starting at position 2565 of SEQ ID NO: 1560890
ugaggucaauucucccaga

SEQ ID NO: 1631988 - RNA, 19 nt, Artificial Sequence
  Description of Artificial Sequence: Synthetic oligonucleotide
  Antisense strand to SEQ ID NO: 1631987
ucugggagaauugaccuca

SEQ ID NO: 1631989 - RNA, 19 nt, Artificial Sequence
  Description of Artificial Sequence: Synthetic oligonucleotide
  Sense strand starting at position 3492 of SEQ ID NO: 1560890
gggcucaaguuugagguua

SEQ ID NO: 1631990 - RNA, 19 nt, Artificial Sequence
  Description of Artificial Sequence: Synthetic oligonucleotide
  Antisense strand to SEQ ID NO: 1631989
uaaccucaaacuugagccc

SEQ ID NO: 1631991 - RNA, 19 nt, Artificial Sequence
  Description of Artificial Sequence: Synthetic oligonucleotide
  Sense strand starting at position 3494 of SEQ ID NO: 1560890
gcucaaguuugagguuaca

SEQ ID NO: 1631992 - RNA, 19 nt, Artificial Sequence
  Description of Artificial Sequence: Synthetic oligonucleotide
  Antisense strand to SEQ ID NO: 1631991
uguaaccucaaacuugagc

SEQ ID NO: 1631993 - RNA, 19 nt, Artificial Sequence
  Description of Artificial Sequence: Synthetic oligonucleotide
  Sense strand starting at position 3728 of SEQ ID NO: 1560890
gcucuaagcccaggaguuu

SEQ ID NO: 1631994 - RNA, 19 nt, Artificial Sequence
  Description of Artificial Sequence: Synthetic oligonucleotide
  Antisense strand to SEQ ID NO: 1631993
aaacuccugggcuuagagc

SEQ ID NO: 1631995 - RNA, 19 nt, Artificial Sequence
  Description of Artificial Sequence: Synthetic oligonucleotide
  Sense strand starting at position 3756 of SEQ ID NO: 1560890
cuggucaauaauggugaga

SEQ ID NO: 1631996 - RNA, 19 nt, Artificial Sequence
  Description of Artificial Sequence: Synthetic oligonucleotide
  Antisense strand to SEQ ID NO: 1631995
ucucaccauuauugaccag

SEQ ID NO: 1631997 - RNA, 19 nt, Artificial Sequence
  Description of Artificial Sequence: Synthetic oligonucleotide
  Sense strand starting at position 184 of SEQ ID NO: 1560891
agacaugugaguugaaacu

SEQ ID NO: 1631998 - RNA, 19 nt, Artificial Sequence
  Description of Artificial Sequence: Synthetic oligonucleotide
  Antisense strand to SEQ ID NO: 1631997
aguuucaacucacaugucu

SEQ ID NO: 1631999 - RNA, 19 nt, Artificial Sequence
  Description of Artificial Sequence: Synthetic oligonucleotide
  Sense strand starting at position 193 of SEQ ID NO: 1560891
aguugaaacucccugugaa

SEQ ID NO: 1632000 - RNA, 19 nt, Artificial Sequence
  Description of Artificial Sequence: Synthetic oligonucleotide
  Antisense strand to SEQ ID NO: 1631999
uucacagggaguuucaacu

SEQ ID NO: 1632001 - RNA, 19 nt, Artificial Sequence
  Description of Artificial Sequence: Synthetic oligonucleotide
  Sense strand starting at position 194 of SEQ ID NO: 1560891
guugaaacucccugugaau

SEQ ID NO: 1632002 - RNA, 19 nt, Artificial Sequence
  Description of Artificial Sequence: Synthetic oligonucleotide
  Antisense strand to SEQ ID NO: 1632001
auucacagggaguuucaac

SEQ ID NO: 1632003 - RNA, 19 nt, Artificial Sequence
  Description of Artificial Sequence: Synthetic oligonucleotide
  Sense strand starting at position 227 of SEQ ID NO: 1560891
ugagucuucccugagcgca

SEQ ID NO: 1632004 - RNA, 19 nt, Artificial Sequence
  Description of Artificial Sequence: Synthetic oligonucleotide
  Antisense strand to SEQ ID NO: 1632003
ugcgcucagggaagacuca

SEQ ID NO: 1632005 - RNA, 19 nt, Artificial Sequence
  Description of Artificial Sequence: Synthetic oligonucleotide
  Sense strand starting at position 272 of SEQ ID NO: 1560891
cuaucacugcuccgccaua

SEQ ID NO: 1632006 - RNA, 19 nt, Artificial Sequence
  Description of Artificial Sequence: Synthetic oligonucleotide
  Antisense strand to SEQ ID NO: 1632005
uauggcggagcagugauag

SEQ ID NO: 1632007 - RNA, 19 nt, Artificial Sequence
  Description of Artificial Sequence: Synthetic oligonucleotide
  Sense strand starting at position 297 of SEQ ID NO: 1560891
cgcacucuggacugaaauc

SEQ ID NO: 1632008 - RNA, 19 nt, Artificial Sequence
  Description of Artificial Sequence: Synthetic oligonucleotide
  Antisense strand to SEQ ID NO: 1632007
gauuucaguccagagugcg

SEQ ID NO: 1632009 - RNA, 19 nt, Artificial Sequence
  Description of Artificial Sequence: Synthetic oligonucleotide
  Sense strand starting at position 990 of SEQ ID NO: 1560891
aggagucauccuggacucu

SEQ ID NO: 1632010 - RNA, 19 nt, Artificial Sequence
  Description of Artificial Sequence: Synthetic oligonucleotide
  Antisense strand to SEQ ID NO: 1632009
agaguccaggaugacuccu

SEQ ID NO: 1632011 - RNA, 19 nt, Artificial Sequence
  Description of Artificial Sequence: Synthetic oligonucleotide
  Sense strand starting at position 1184 of SEQ ID NO: 1560891
gggcgaaucguguuguuuc

SEQ ID NO: 1632012 - RNA, 19 nt, Artificial Sequence
  Description of Artificial Sequence: Synthetic oligonucleotide
  Antisense strand to SEQ ID NO: 1632011
gaaacaacacgauucgccc

SEQ ID NO: 1632013 - RNA, 19 nt, Artificial Sequence
  Description of Artificial Sequence: Synthetic oligonucleotide
  Sense strand starting at position 1186 of SEQ ID NO: 1560891
gcgaaucguguuguuucca

SEQ ID NO: 1632014 - RNA, 19 nt, Artificial Sequence
  Description of Artificial Sequence: Synthetic oligonucleotide
  Antisense strand to SEQ ID NO: 1632013
uggaaacaacacgauucgc

SEQ ID NO: 1632015 - RNA, 19 nt, Artificial Sequence
  Description of Artificial Sequence: Synthetic oligonucleotide
  Sense strand starting at position 1432 of SEQ ID NO: 1560891
acaggcucuucgcucauua

SEQ ID NO: 1632016 - RNA, 19 nt, Artificial Sequence
  Description of Artificial Sequence: Synthetic oligonucleotide
  Antisense strand to SEQ ID NO: 1632015
uaaugagcgaagagccugu

SEQ ID NO: 1632017 - RNA, 19 nt, Artificial Sequence
  Description of Artificial Sequence: Synthetic oligonucleotide
  Sense strand starting at position 1498 of SEQ ID NO: 1560891
agagcacugcuuuacugau

SEQ ID NO: 1632018 - RNA, 19 nt, Artificial Sequence
  Description of Artificial Sequence: Synthetic oligonucleotide
  Antisense strand to SEQ ID NO: 1632017
aucaguaaagcagugcucu

SEQ ID NO: 1632019 - RNA, 19 nt, Artificial Sequence
  Description of Artificial Sequence: Synthetic oligonucleotide
  Sense strand starting at position 1543 of SEQ ID NO: 1560891
gucugucuucccgagacag

SEQ ID NO: 1632020 - RNA, 19 nt, Artificial Sequence
  Description of Artificial Sequence: Synthetic oligonucleotide
  Antisense strand to SEQ ID NO: 1632019
cugucucgggaagacagac

SEQ ID NO: 1632021 - RNA, 19 nt, Artificial Sequence
  Description of Artificial Sequence: Synthetic oligonucleotide
  Sense strand starting at position 1559 of SEQ ID NO: 1560891
cagggacuucucugacuug

SEQ ID NO: 1632022 - RNA, 19 nt, Artificial Sequence
  Description of Artificial Sequence: Synthetic oligonucleotide
  Antisense strand to SEQ ID NO: 1632021
caagucagagaagucccug

SEQ ID NO: 1632023 - RNA, 19 nt, Artificial Sequence
  Description of Artificial Sequence: Synthetic oligonucleotide
  Sense strand starting at position 1573 of SEQ ID NO: 1560891
acuuguuccugcuuccaga

SEQ ID NO: 1632024 - RNA, 19 nt, Artificial Sequence
  Description of Artificial Sequence: Synthetic oligonucleotide
  Antisense strand to SEQ ID NO: 1632023
ucuggaagcaggaacaagu

SEQ ID NO: 1632025 - RNA, 19 nt, Artificial Sequence
  Description of Artificial Sequence: Synthetic oligonucleotide
  Sense strand starting at position 1601 of SEQ ID NO: 1560891
ggcacagaguacucaaaca

SEQ ID NO: 1632026 - RNA, 19 nt, Artificial Sequence
  Description of Artificial Sequence: Synthetic oligonucleotide
  Antisense strand to SEQ ID NO: 1632025
uguuugaguacucugugcc

SEQ ID NO: 1632027 - RNA, 19 nt, Artificial Sequence
  Description of Artificial Sequence: Synthetic oligonucleotide
  Sense strand starting at position 2439 of SEQ ID NO: 1560891
ucaguuucccuauacguaa

SEQ ID NO: 1632028 - RNA, 19 nt, Artificial Sequence
  Description of Artificial Sequence: Synthetic oligonucleotide
  Antisense strand to SEQ ID NO: 1632027
uuacguauagggaaacuga

SEQ ID NO: 1632029 - RNA, 19 nt, Artificial Sequence
  Description of Artificial Sequence: Synthetic oligonucleotide
  Sense strand starting at position 2442 of SEQ ID NO: 1560891
guuucccuauacguaaauu

SEQ ID NO: 1632030 - RNA, 19 nt, Artificial Sequence
  Description of Artificial Sequence: Synthetic oligonucleotide
  Antisense strand to SEQ ID NO: 1632029
aauuuacguauagggaaac

SEQ ID NO: 1632031 - RNA, 19 nt, Artificial Sequence
  Description of Artificial Sequence: Synthetic oligonucleotide
  Sense strand starting at position 2473 of SEQ ID NO: 1560891
gcaugauagggacacuugu

SEQ ID NO: 1632032 - RNA, 19 nt, Artificial Sequence
  Description of Artificial Sequence: Synthetic oligonucleotide
  Antisense strand to SEQ ID NO: 1632031
acaagugucccuaucaugc

SEQ ID NO: 1632033 - RNA, 19 nt, Artificial Sequence
  Description of Artificial Sequence: Synthetic oligonucleotide
  Sense strand starting at position 2519 of SEQ ID NO: 1560891
uaaggugaucauugguaac

SEQ ID NO: 1632034 - RNA, 19 nt, Artificial Sequence
  Description of Artificial Sequence: Synthetic oligonucleotide
  Antisense strand to SEQ ID NO: 1632033
guuaccaaugaucaccuua

SEQ ID NO: 1632035 - RNA, 19 nt, Artificial Sequence
  Description of Artificial Sequence: Synthetic oligonucleotide
  Sense strand starting at position 2521 of SEQ ID NO: 1560891
aggugaucauugguaacua

SEQ ID NO: 1632036 - RNA, 19 nt, Artificial Sequence
  Description of Artificial Sequence: Synthetic oligonucleotide
  Antisense strand to SEQ ID NO: 1632035
uaguuaccaaugaucaccu

SEQ ID NO: 1632037 - RNA, 19 nt, Artificial Sequence
  Description of Artificial Sequence: Synthetic oligonucleotide
  Sense strand starting at position 2730 of SEQ ID NO: 1560891
cgugcuguucccucaacuu

SEQ ID NO: 1632038 - RNA, 19 nt, Artificial Sequence
  Description of Artificial Sequence: Synthetic oligonucleotide
  Antisense strand to SEQ ID NO: 1632037
aaguugagggaacagcacg

SEQ ID NO: 1632039 - RNA, 19 nt, Artificial Sequence
  Description of Artificial Sequence: Synthetic oligonucleotide
  Sense strand starting at position 2783 of SEQ ID NO: 1560891
cagcgauugccucuguugu

SEQ ID NO: 1632040 - RNA, 19 nt, Artificial Sequence
  Description of Artificial Sequence: Synthetic oligonucleotide
  Antisense strand to SEQ ID NO: 1632039
acaacagaggcaaucgcug

SEQ ID NO: 1632041 - RNA, 19 nt, Artificial Sequence
  Description of Artificial Sequence: Synthetic oligonucleotide
  Sense strand starting at position 2799 of SEQ ID NO: 1560891
ugugauaccuucccugauu

SEQ ID NO: 1632042 - RNA, 19 nt, Artificial Sequence
  Description of Artificial Sequence: Synthetic oligonucleotide
  Antisense strand to SEQ ID NO: 1632041
aaucagggaagguaucaca

SEQ ID NO: 1632043 - RNA, 19 nt, Artificial Sequence
  Description of Artificial Sequence: Synthetic oligonucleotide
  Sense strand starting at position 2834 of SEQ ID NO: 1560891
cagugccacgcucauuaaa

SEQ ID NO: 1632044 - RNA, 19 nt, Artificial Sequence
  Description of Artificial Sequence: Synthetic oligonucleotide
  Antisense strand to SEQ ID NO: 1632043
uuuaaugagcguggcacug

SEQ ID NO: 1632045 - RNA, 19 nt, Artificial Sequence
  Description of Artificial Sequence: Synthetic oligonucleotide
  Sense strand starting at position 2865 of SEQ ID NO: 1560891
cgagucuugguaggaggau

SEQ ID NO: 1632046 - RNA, 19 nt, Artificial Sequence
  Description of Artificial Sequence: Synthetic oligonucleotide
  Antisense strand to SEQ ID NO: 1632045
auccuccuaccaagacucg

SEQ ID NO: 1632047 - RNA, 19 nt, Artificial Sequence
  Description of Artificial Sequence: Synthetic oligonucleotide
  Sense strand starting at position 2874 of SEQ ID NO: 1560891
guaggaggaugguuaucuu

SEQ ID NO: 1632048 - RNA, 19 nt, Artificial Sequence
  Description of Artificial Sequence: Synthetic oligonucleotide
  Antisense strand to SEQ ID NO: 1632047
aagauaaccauccuccuac

SEQ ID NO: 1632049 - RNA, 19 nt, Artificial Sequence
  Description of Artificial Sequence: Synthetic oligonucleotide
  Sense strand starting at position 2877 of SEQ ID NO: 1560891
ggaggaugguuaucuuguu

SEQ ID NO: 1632050 - RNA, 19 nt, Artificial Sequence
  Description of Artificial Sequence: Synthetic oligonucleotide
  Antisense strand to SEQ ID NO: 1632049
aacaagauaaccauccucc

SEQ ID NO: 1632051 - RNA, 19 nt, Artificial Sequence
  Description of Artificial Sequence: Synthetic oligonucleotide
  Sense strand starting at position 2899 of SEQ ID NO: 1560891
agauguuuccagugccuag

SEQ ID NO: 1632052 - RNA, 19 nt, Artificial Sequence
  Description of Artificial Sequence: Synthetic oligonucleotide
  Antisense strand to SEQ ID NO: 1632051
cuaggcacuggaaacaucu

SEQ ID NO: 1632053 - RNA, 19 nt, Artificial Sequence
  Description of Artificial Sequence: Synthetic oligonucleotide
  Sense strand starting at position 2903 of SEQ ID NO: 1560891
guuuccagugccuagaauu

SEQ ID NO: 1632054 - RNA, 19 nt, Artificial Sequence
  Description of Artificial Sequence: Synthetic oligonucleotide
  Antisense strand to SEQ ID NO: 1632053
aauucuaggcacuggaaac

SEQ ID NO: 1632055 - RNA, 19 nt, Artificial Sequence
  Description of Artificial Sequence: Synthetic oligonucleotide
  Sense strand starting at position 2914 of SEQ ID NO: 1560891
cuagaauugugccuaacug

SEQ ID NO: 1632056 - RNA, 19 nt, Artificial Sequence
  Description of Artificial Sequence: Synthetic oligonucleotide
  Antisense strand to SEQ ID NO: 1632055
caguuaggcacaauucuag

SEQ ID NO: 1632057 - RNA, 19 nt, Artificial Sequence
  Description of Artificial Sequence: Synthetic oligonucleotide
  Sense strand starting at position 2915 of SEQ ID NO: 1560891
uagaauugugccuaacugu

SEQ ID NO: 1632058 - RNA, 19 nt, Artificial Sequence
  Description of Artificial Sequence: Synthetic oligonucleotide
  Antisense strand to SEQ ID NO: 1632057
acaguuaggcacaauucua

SEQ ID NO: 1632059 - RNA, 19 nt, Artificial Sequence
  Description of Artificial Sequence: Synthetic oligonucleotide
  Sense strand starting at position 2921 of SEQ ID NO: 1560891
ugugccuaacuguaguuaa

SEQ ID NO: 1632060 - RNA, 19 nt, Artificial Sequence
  Description of Artificial Sequence: Synthetic oligonucleotide
  Antisense strand to SEQ ID NO: 1632059
uuaacuacaguuaggcaca

SEQ ID NO: 1632061 - RNA, 19 nt, Artificial Sequence
  Description of Artificial Sequence: Synthetic oligonucleotide
  Sense strand starting at position 2931 of SEQ ID NO: 1560891
uguaguuaaugcucuggaa

SEQ ID NO: 1632062 - RNA, 19 nt, Artificial Sequence
  Description of Artificial Sequence: Synthetic oligonucleotide
  Antisense strand to SEQ ID NO: 1632061
uuccagagcauuaacuaca

SEQ ID NO: 1632063 - RNA, 19 nt, Artificial Sequence
  Description of Artificial Sequence: Synthetic oligonucleotide
  Sense strand starting at position 2933 of SEQ ID NO: 1560891
uaguuaaugcucuggaaac

SEQ ID NO: 1632064 - RNA, 19 nt, Artificial Sequence
  Description of Artificial Sequence: Synthetic oligonucleotide
  Antisense strand to SEQ ID NO: 1632063
guuuccagagcauuaacua

SEQ ID NO: 1632065 - RNA, 19 nt, Artificial Sequence
  Description of Artificial Sequence: Synthetic oligonucleotide
  Sense strand starting at position 2935 of SEQ ID NO: 1560891
guuaaugcucuggaaacau

SEQ ID NO: 1632066 - RNA, 19 nt, Artificial Sequence
  Description of Artificial Sequence: Synthetic oligonucleotide
  Antisense strand to SEQ ID NO: 1632065
auguuuccagagcauuaac

SEQ ID NO: 1632067 - RNA, 19 nt, Artificial Sequence
  Description of Artificial Sequence: Synthetic oligonucleotide
  Sense strand starting at position 2946 of SEQ ID NO: 1560891
ggaaacauuuauuggguga

SEQ ID NO: 1632068 - RNA, 19 nt, Artificial Sequence
  Description of Artificial Sequence: Synthetic oligonucleotide
  Antisense strand to SEQ ID NO: 1632067
ucacccaauaaauguuucc

SEQ ID NO: 1632069 - RNA, 19 nt, Artificial Sequence
  Description of Artificial Sequence: Synthetic oligonucleotide
  Sense strand starting at position 2959 of SEQ ID NO: 1560891
gggugaaugucuccaucuc

SEQ ID NO: 1632070 - RNA, 19 nt, Artificial Sequence
  Description of Artificial Sequence: Synthetic oligonucleotide
  Antisense strand to SEQ ID NO: 1632069
gagauggagacauucaccc

SEQ ID NO: 1632071 - RNA, 19 nt, Artificial Sequence
  Description of Artificial Sequence: Synthetic oligonucleotide
  Sense strand starting at position 2960 of SEQ ID NO: 1560891
ggugaaugucuccaucucu

SEQ ID NO: 1632072 - RNA, 19 nt, Artificial Sequence
  Description of Artificial Sequence: Synthetic oligonucleotide
  Antisense strand to SEQ ID NO: 1632071
agagauggagacauucacc

SEQ ID NO: 1632073 - RNA, 19 nt, Artificial Sequence
  Description of Artificial Sequence: Synthetic oligonucleotide
  Sense strand starting at position 3021 of SEQ ID NO: 1560891
aacacuuguuguucggaca

SEQ ID NO: 1632074 - RNA, 19 nt, Artificial Sequence
  Description of Artificial Sequence: Synthetic oligonucleotide
  Antisense strand to SEQ ID NO: 1632073
uguccgaacaacaaguguu

SEQ ID NO: 1632075 - RNA, 19 nt, Artificial Sequence
  Description of Artificial Sequence: Synthetic oligonucleotide
  Sense strand starting at position 3132 of SEQ ID NO: 1560891
ggccucuguccugaacuuu

SEQ ID NO: 1632076 - RNA, 19 nt, Artificial Sequence
  Description of Artificial Sequence: Synthetic oligonucleotide
  Antisense strand to SEQ ID NO: 1632075
aaaguucaggacagaggcc

SEQ ID NO: 1632077 - RNA, 19 nt, Artificial Sequence
  Description of Artificial Sequence: Synthetic oligonucleotide
  Sense strand starting at position 274 of SEQ ID NO: 1560892
ccucguuggcaggaagaga

SEQ ID NO: 1632078 - RNA, 19 nt, Artificial Sequence
  Description of Artificial Sequence: Synthetic oligonucleotide
  Antisense strand to SEQ ID NO: 1632077
ucucuuccugccaacgagg

SEQ ID NO: 1632079 - RNA, 19 nt, Artificial Sequence
  Description of Artificial Sequence: Synthetic oligonucleotide
  Sense strand starting at position 502 of SEQ ID NO: 1560892
cgcugcucaccuggaaaga

SEQ ID NO: 1632080 - RNA, 19 nt, Artificial Sequence
  Description of Artificial Sequence: Synthetic oligonucleotide
  Antisense strand to SEQ ID NO: 1632079
ucuuuccaggugagcagcg

SEQ ID NO: 1632081 - RNA, 19 nt, Artificial Sequence
  Description of Artificial Sequence: Synthetic oligonucleotide
  Sense strand starting at position 650 of SEQ ID NO: 1560892
cguccugggucaccagaua

SEQ ID NO: 1632082 - RNA, 19 nt, Artificial Sequence
  Description of Artificial Sequence: Synthetic oligonucleotide
  Antisense strand to SEQ ID NO: 1632081
uaucuggugacccaggacg

SEQ ID NO: 1632083 - RNA, 19 nt, Artificial Sequence
  Description of Artificial Sequence: Synthetic oligonucleotide
  Sense strand starting at position 812 of SEQ ID NO: 1560892
cacugugugcuccaugaca

SEQ ID NO: 1632084 - RNA, 19 nt, Artificial Sequence
  Description of Artificial Sequence: Synthetic oligonucleotide
  Antisense strand to SEQ ID NO: 1632083
ugucauggagcacacagug

SEQ ID NO: 1632085 - RNA, 19 nt, Artificial Sequence
  Description of Artificial Sequence: Synthetic oligonucleotide
  Sense strand starting at position 870 of SEQ ID NO: 1560892
ccaguaugauccugagagg

SEQ ID NO: 1632086 - RNA, 19 nt, Artificial Sequence
  Description of Artificial Sequence: Synthetic oligonucleotide
  Antisense strand to SEQ ID NO: 1632085
ccucucaggaucauacugg

SEQ ID NO: 1632087 - RNA, 19 nt, Artificial Sequence
  Description of Artificial Sequence: Synthetic oligonucleotide
  Sense strand starting at position 873 of SEQ ID NO: 1560892
guaugauccugagaggcuc

SEQ ID NO: 1632088 - RNA, 19 nt, Artificial Sequence
  Description of Artificial Sequence: Synthetic oligonucleotide
  Antisense strand to SEQ ID NO: 1632087
gagccucucaggaucauac

SEQ ID NO: 1632089 - RNA, 19 nt, Artificial Sequence
  Description of Artificial Sequence: Synthetic oligonucleotide
  Sense strand starting at position 881 of SEQ ID NO: 1560892
cugagaggcucccagagau

SEQ ID NO: 1632090 - RNA, 19 nt, Artificial Sequence
  Description of Artificial Sequence: Synthetic oligonucleotide
  Antisense strand to SEQ ID NO: 1632089
aucucugggagccucucag

SEQ ID NO: 1632091 - RNA, 19 nt, Artificial Sequence
  Description of Artificial Sequence: Synthetic oligonucleotide
  Sense strand starting at position 891 of SEQ ID NO: 1560892
cccagagauguccagccuu

SEQ ID NO: 1632092 - RNA, 19 nt, Artificial Sequence
  Description of Artificial Sequence: Synthetic oligonucleotide
  Antisense strand to SEQ ID NO: 1632091
aaggcuggacaucucuggg

SEQ ID NO: 1632093 - RNA, 19 nt, Artificial Sequence
  Description of Artificial Sequence: Synthetic oligonucleotide
  Sense strand starting at position 1028 of SEQ ID NO: 1560892
ccgugaucccaguacuuag

SEQ ID NO: 1632094 - RNA, 19 nt, Artificial Sequence
  Description of Artificial Sequence: Synthetic oligonucleotide
  Antisense strand to SEQ ID NO: 1632093
cuaaguacugggaucacgg

SEQ ID NO: 1632095 - RNA, 19 nt, Artificial Sequence
  Description of Artificial Sequence: Synthetic oligonucleotide
  Sense strand starting at position 1193 of SEQ ID NO: 1560892
ggcugacaauguuugagga

SEQ ID NO: 1632096 - RNA, 19 nt, Artificial Sequence
  Description of Artificial Sequence: Synthetic oligonucleotide
  Antisense strand to SEQ ID NO: 1632095
uccucaaacauugucagcc

SEQ ID NO: 1632097 - RNA, 19 nt, Artificial Sequence
  Description of Artificial Sequence: Synthetic oligonucleotide
  Sense strand starting at position 1194 of SEQ ID NO: 1560892
gcugacaauguuugaggau

SEQ ID NO: 1632098 - RNA, 19 nt, Artificial Sequence
  Description of Artificial Sequence: Synthetic oligonucleotide
  Antisense strand to SEQ ID NO: 1632097
auccucaaacauugucagc

SEQ ID NO: 1632099 - RNA, 19 nt, Artificial Sequence
  Description of Artificial Sequence: Synthetic oligonucleotide
  Sense strand starting at position 1201 of SEQ ID NO: 1560892
auguuugaggaucggagaa

SEQ ID NO: 1632100 - RNA, 19 nt, Artificial Sequence
  Description of Artificial Sequence: Synthetic oligonucleotide
  Antisense strand to SEQ ID NO: 1632099
uucuccgauccucaaacau

SEQ ID NO: 1632101 - RNA, 19 nt, Artificial Sequence
  Description of Artificial Sequence: Synthetic oligonucleotide
  Sense strand starting at position 1528 of SEQ ID NO: 1560892
gacgcugaaucacagagaa

SEQ ID NO: 1632102 - RNA, 19 nt, Artificial Sequence
  Description of Artificial Sequence: Synthetic oligonucleotide
  Antisense strand to SEQ ID NO: 1632101
uucucugugauucagcguc

SEQ ID NO: 1632103 - RNA, 19 nt, Artificial Sequence
  Description of Artificial Sequence: Synthetic oligonucleotide
  Sense strand starting at position 1869 of SEQ ID NO: 1560892
gcaugauggucuugcggau

SEQ ID NO: 1632104 - RNA, 19 nt, Artificial Sequence
  Description of Artificial Sequence: Synthetic oligonucleotide
  Antisense strand to SEQ ID NO: 1632103
auccgcaagaccaucaugc

SEQ ID NO: 1632105 - RNA, 19 nt, Artificial Sequence
  Description of Artificial Sequence: Synthetic oligonucleotide
  Sense strand starting at position 2036 of SEQ ID NO: 1560892
uggucugucgucggcgaau

SEQ ID NO: 1632106 - RNA, 19 nt, Artificial Sequence
  Description of Artificial Sequence: Synthetic oligonucleotide
  Antisense strand to SEQ ID NO: 1632105
auucgccgacgacagacca

SEQ ID NO: 1632107 - RNA, 19 nt, Artificial Sequence
  Description of Artificial Sequence: Synthetic oligonucleotide
  Sense strand starting at position 2047 of SEQ ID NO: 1560892
cggcgaaugccugaaugca

SEQ ID NO: 1632108 - RNA, 19 nt, Artificial Sequence
  Description of Artificial Sequence: Synthetic oligonucleotide
  Antisense strand to SEQ ID NO: 1632107
ugcauucaggcauucgccg

SEQ ID NO: 1632109 - RNA, 19 nt, Artificial Sequence
  Description of Artificial Sequence: Synthetic oligonucleotide
  Sense strand starting at position 2145 of SEQ ID NO: 1560892
cguaguucucgugugucuu

SEQ ID NO: 1632110 - RNA, 19 nt, Artificial Sequence
  Description of Artificial Sequence: Synthetic oligonucleotide
  Antisense strand to SEQ ID NO: 1632109
aagacacacgagaacuacg

SEQ ID NO: 1632111 - RNA, 19 nt, Artificial Sequence
  Description of Artificial Sequence: Synthetic oligonucleotide
  Sense strand starting at position 2146 of SEQ ID NO: 1560892
guaguucucgugugucuuu

SEQ ID NO: 1632112 - RNA, 19 nt, Artificial Sequence
  Description of Artificial Sequence: Synthetic oligonucleotide
  Antisense strand to SEQ ID NO: 1632111
aaagacacacgagaacuac

SEQ ID NO: 1632113 - RNA, 19 nt, Artificial Sequence
  Description of Artificial Sequence: Synthetic oligonucleotide
  Sense strand starting at position 2184 of SEQ ID NO: 1560892
aguuguaguuuccguucaa

SEQ ID NO: 1632114 - RNA, 19 nt, Artificial Sequence
  Description of Artificial Sequence: Synthetic oligonucleotide
  Antisense strand to SEQ ID NO: 1632113
uugaacggaaacuacaacu

SEQ ID NO: 1632115 - RNA, 19 nt, Artificial Sequence
  Description of Artificial Sequence: Synthetic oligonucleotide
  Sense strand starting at position 2185 of SEQ ID NO: 1560892
guuguaguuuccguucaac

SEQ ID NO: 1632116 - RNA, 19 nt, Artificial Sequence
  Description of Artificial Sequence: Synthetic oligonucleotide
  Antisense strand to SEQ ID NO: 1632115
guugaacggaaacuacaac

SEQ ID NO: 1632117 - RNA, 19 nt, Artificial Sequence
  Description of Artificial Sequence: Synthetic oligonucleotide
  Sense strand starting at position 2381 of SEQ ID NO: 1560892
uggccaggucaggguuaau

SEQ ID NO: 1632118 - RNA, 19 nt, Artificial Sequence
  Description of Artificial Sequence: Synthetic oligonucleotide
  Antisense strand to SEQ ID NO: 1632117
auuaacccugaccuggcca

SEQ ID NO: 1632119 - RNA, 19 nt, Artificial Sequence
  Description of Artificial Sequence: Synthetic oligonucleotide
  Sense strand starting at position 2393 of SEQ ID NO: 1560892
gguuaauucccuugggccu

SEQ ID NO: 1632120 - RNA, 19 nt, Artificial Sequence
  Description of Artificial Sequence: Synthetic oligonucleotide
  Antisense strand to SEQ ID NO: 1632119
aggcccaagggaauuaacc

SEQ ID NO: 1632121 - RNA, 19 nt, Artificial Sequence
  Description of Artificial Sequence: Synthetic oligonucleotide
  Sense strand starting at position 2434 of SEQ ID NO: 1560892
gcaauaaagugucccuacu

SEQ ID NO: 1632122 - RNA, 19 nt, Artificial Sequence
  Description of Artificial Sequence: Synthetic oligonucleotide
  Antisense strand to SEQ ID NO: 1632121
aguagggacacuuuauugc

SEQ ID NO: 1632123 - RNA, 19 nt, Artificial Sequence
  Description of Artificial Sequence: Synthetic oligonucleotide
  Sense strand starting at position 2450 of SEQ ID NO: 1560892
acuuuagacgguuaacuga

SEQ ID NO: 1632124 - RNA, 19 nt, Artificial Sequence
  Description of Artificial Sequence: Synthetic oligonucleotide
  Antisense strand to SEQ ID NO: 1632123
ucaguuaaccgucuaaagu

SEQ ID NO: 1632125 - RNA, 19 nt, Artificial Sequence
  Description of Artificial Sequence: Synthetic oligonucleotide
  Sense strand starting at position 2457 of SEQ ID NO: 1560892
acgguuaacugagagucuu

SEQ ID NO: 1632126 - RNA, 19 nt, Artificial Sequence
  Description of Artificial Sequence: Synthetic oligonucleotide
  Antisense strand to SEQ ID NO: 1632125
aagacucucaguuaaccgu

SEQ ID NO: 1632127 - RNA, 19 nt, Artificial Sequence
  Description of Artificial Sequence: Synthetic oligonucleotide
  Sense strand starting at position 2463 of SEQ ID NO: 1560892
aacugagagucuuaggcau

SEQ ID NO: 1632128 - RNA, 19 nt, Artificial Sequence
  Description of Artificial Sequence: Synthetic oligonucleotide
  Antisense strand to SEQ ID NO: 1632127
augccuaagacucucaguu

SEQ ID NO: 1632129 - RNA, 19 nt, Artificial Sequence
  Description of Artificial Sequence: Synthetic oligonucleotide
  Sense strand starting at position 2465 of SEQ ID NO: 1560892
cugagagucuuaggcaucu

SEQ ID NO: 1632130 - RNA, 19 nt, Artificial Sequence
  Description of Artificial Sequence: Synthetic oligonucleotide
  Antisense strand to SEQ ID NO: 1632129
agaugccuaagacucucag

SEQ ID NO: 1632131 - RNA, 19 nt, Artificial Sequence
  Description of Artificial Sequence: Synthetic oligonucleotide
  Sense strand starting at position 2478 of SEQ ID NO: 1560892
gcaucucucuaggugcuua

SEQ ID NO: 1632132 - RNA, 19 nt, Artificial Sequence
  Description of Artificial Sequence: Synthetic oligonucleotide
  Antisense strand to SEQ ID NO: 1632131
uaagcaccuagagagaugc

SEQ ID NO: 1632133 - RNA, 19 nt, Artificial Sequence
  Description of Artificial Sequence: Synthetic oligonucleotide
  Sense strand starting at position 2482 of SEQ ID NO: 1560892
cucucuaggugcuuauuaa

SEQ ID NO: 1632134 - RNA, 19 nt, Artificial Sequence
  Description of Artificial Sequence: Synthetic oligonucleotide
  Antisense strand to SEQ ID NO: 1632133
uuaauaagcaccuagagag

SEQ ID NO: 1632135 - RNA, 19 nt, Artificial Sequence
  Description of Artificial Sequence: Synthetic oligonucleotide
  Sense strand starting at position 2483 of SEQ ID NO: 1560892
ucucuaggugcuuauuaag

SEQ ID NO: 1632136 - RNA, 19 nt, Artificial Sequence
  Description of Artificial Sequence: Synthetic oligonucleotide
  Antisense strand to SEQ ID NO: 1632135
cuuaauaagcaccuagaga

SEQ ID NO: 1632137 - RNA, 19 nt, Artificial Sequence
  Description of Artificial Sequence: Synthetic oligonucleotide
  Sense strand starting at position 2584 of SEQ ID NO: 1560892
ccagacucuuccugucuuu

SEQ ID NO: 1632138 - RNA, 19 nt, Artificial Sequence
  Description of Artificial Sequence: Synthetic oligonucleotide
  Antisense strand to SEQ ID NO: 1632137
aaagacaggaagagucugg

SEQ ID NO: 1632139 - RNA, 19 nt, Artificial Sequence
  Description of Artificial Sequence: Synthetic oligonucleotide
  Sense strand starting at position 2660 of SEQ ID NO: 1560892
gcaggcuaucaguaacuua

SEQ ID NO: 1632140 - RNA, 19 nt, Artificial Sequence
  Description of Artificial Sequence: Synthetic oligonucleotide
  Antisense strand to SEQ ID NO: 1632139
uaaguuacugauagccugc

SEQ ID NO: 1632141 - RNA, 19 nt, Artificial Sequence
  Description of Artificial Sequence: Synthetic oligonucleotide
  Sense strand starting at position 2682 of SEQ ID NO: 1560892
agugaugcauucguuaauu

SEQ ID NO: 1632142 - RNA, 19 nt, Artificial Sequence
  Description of Artificial Sequence: Synthetic oligonucleotide
  Antisense strand to SEQ ID NO: 1632141
aauuaacgaaugcaucacu

SEQ ID NO: 1632143 - RNA, 19 nt, Artificial Sequence
  Description of Artificial Sequence: Synthetic oligonucleotide
  Sense strand starting at position 2717 of SEQ ID NO: 1560892
accuacagugauggugaau

SEQ ID NO: 1632144 - RNA, 19 nt, Artificial Sequence
  Description of Artificial Sequence: Synthetic oligonucleotide
  Antisense strand to SEQ ID NO: 1632143
auucaccaucacuguaggu

SEQ ID NO: 1632145 - RNA, 19 nt, Artificial Sequence
  Description of Artificial Sequence: Synthetic oligonucleotide
  Sense strand starting at position 2742 of SEQ ID NO: 1560892
ggccaaguaucccuugcau

SEQ ID NO: 1632146 - RNA, 19 nt, Artificial Sequence
  Description of Artificial Sequence: Synthetic oligonucleotide
  Antisense strand to SEQ ID NO: 1632145
augcaagggauacuuggcc

SEQ ID NO: 1632147 - RNA, 19 nt, Artificial Sequence
  Description of Artificial Sequence: Synthetic oligonucleotide
  Sense strand starting at position 3606 of SEQ ID NO: 1560892
ggaggaucccuuuguugua

SEQ ID NO: 1632148 - RNA, 19 nt, Artificial Sequence
  Description of Artificial Sequence: Synthetic oligonucleotide
  Antisense strand to SEQ ID NO: 1632147
uacaacaaagggauccucc

SEQ ID NO: 1632149 - RNA, 19 nt, Artificial Sequence
  Description of Artificial Sequence: Synthetic oligonucleotide
  Sense strand starting at position 3639 of SEQ ID NO: 1560892
aguuguaagucacggacuu

SEQ ID NO: 1632150 - RNA, 19 nt, Artificial Sequence
  Description of Artificial Sequence: Synthetic oligonucleotide
  Antisense strand to SEQ ID NO: 1632149
aaguccgugacuuacaacu

SEQ ID NO: 1632151 - RNA, 19 nt, Artificial Sequence
  Description of Artificial Sequence: Synthetic oligonucleotide
  Sense strand starting at position 3640 of SEQ ID NO: 1560892
guuguaagucacggacuuu

SEQ ID NO: 1632152 - RNA, 19 nt, Artificial Sequence
  Description of Artificial Sequence: Synthetic oligonucleotide
  Antisense strand to SEQ ID NO: 1632151
aaaguccgugacuuacaac

SEQ ID NO: 1632153 - RNA, 19 nt, Artificial Sequence
  Description of Artificial Sequence: Synthetic oligonucleotide
  Sense strand starting at position 3664 of SEQ ID NO: 1560892
acugauauuugagauucuu

SEQ ID NO: 1632154 - RNA, 19 nt, Artificial Sequence
  Description of Artificial Sequence: Synthetic oligonucleotide
  Antisense strand to SEQ ID NO: 1632153
aagaaucucaaauaucagu

SEQ ID NO: 1632155 - RNA, 19 nt, Artificial Sequence
  Description of Artificial Sequence: Synthetic oligonucleotide
  Sense strand starting at position 11 of SEQ ID NO: 1560893
gggucaugggcggaagagu

SEQ ID NO: 1632156 - RNA, 19 nt, Artificial Sequence
  Description of Artificial Sequence: Synthetic oligonucleotide
  Antisense strand to SEQ ID NO: 1632155
acucuuccgcccaugaccc

SEQ ID NO: 1632157 - RNA, 19 nt, Artificial Sequence
  Description of Artificial Sequence: Synthetic oligonucleotide
  Sense strand starting at position 28 of SEQ ID NO: 1560893
gucugaagagcuuggaaua

SEQ ID NO: 1632158 - RNA, 19 nt, Artificial Sequence
  Description of Artificial Sequence: Synthetic oligonucleotide
  Antisense strand to SEQ ID NO: 1632157
uauuccaagcucuucagac

SEQ ID NO: 1632159 - RNA, 19 nt, Artificial Sequence
  Description of Artificial Sequence: Synthetic oligonucleotide
  Sense strand starting at position 40 of SEQ ID NO: 1560893
uggaauagguaccagaaau

SEQ ID NO: 1632160 - RNA, 19 nt, Artificial Sequence
  Description of Artificial Sequence: Synthetic oligonucleotide
  Antisense strand to SEQ ID NO: 1632159
auuucugguaccuauucca

SEQ ID NO: 1632161 - RNA, 19 nt, Artificial Sequence
  Description of Artificial Sequence: Synthetic oligonucleotide
  Sense strand starting at position 410 of SEQ ID NO: 1560893
cauggaaucugguguuuau

SEQ ID NO: 1632162 - RNA, 19 nt, Artificial Sequence
  Description of Artificial Sequence: Synthetic oligonucleotide
  Antisense strand to SEQ ID NO: 1632161
auaaacaccagauuccaug

SEQ ID NO: 1632163 - RNA, 19 nt, Artificial Sequence
  Description of Artificial Sequence: Synthetic oligonucleotide
  Sense strand starting at position 413 of SEQ ID NO: 1560893
ggaaucugguguuuauuac

SEQ ID NO: 1632164 - RNA, 19 nt, Artificial Sequence
  Description of Artificial Sequence: Synthetic oligonucleotide
  Antisense strand to SEQ ID NO: 1632163
guaauaaacaccagauucc

SEQ ID NO: 1632165 - RNA, 19 nt, Artificial Sequence
  Description of Artificial Sequence: Synthetic oligonucleotide
  Sense strand starting at position 414 of SEQ ID NO: 1560893
gaaucugguguuuauuaca

SEQ ID NO: 1632166 - RNA, 19 nt, Artificial Sequence
  Description of Artificial Sequence: Synthetic oligonucleotide
  Antisense strand to SEQ ID NO: 1632165
uguaauaaacaccagauuc

SEQ ID NO: 1632167 - RNA, 19 nt, Artificial Sequence
  Description of Artificial Sequence: Synthetic oligonucleotide
  Sense strand starting at position 507 of SEQ ID NO: 1560893
uggcguccuggcagaaaug

SEQ ID NO: 1632168 - RNA, 19 nt, Artificial Sequence
  Description of Artificial Sequence: Synthetic oligonucleotide
  Antisense strand to SEQ ID NO: 1632167
cauuucugccaggacgcca

SEQ ID NO: 1632169 - RNA, 19 nt, Artificial Sequence
  Description of Artificial Sequence: Synthetic oligonucleotide
  Sense strand starting at position 508 of SEQ ID NO: 1560893
ggcguccuggcagaaauga

SEQ ID NO: 1632170 - RNA, 19 nt, Artificial Sequence
  Description of Artificial Sequence: Synthetic oligonucleotide
  Antisense strand to SEQ ID NO: 1632169
ucauuucugccaggacgcc

SEQ ID NO: 1632171 - RNA, 19 nt, Artificial Sequence
  Description of Artificial Sequence: Synthetic oligonucleotide
  Sense strand starting at position 517 of SEQ ID NO: 1560893
gcagaaaugaugcaugguu

SEQ ID NO: 1632172 - RNA, 19 nt, Artificial Sequence
  Description of Artificial Sequence: Synthetic oligonucleotide
  Antisense strand to SEQ ID NO: 1632171
aaccaugcaucauuucugc

SEQ ID NO: 1632173 - RNA, 19 nt, Artificial Sequence
  Description of Artificial Sequence: Synthetic oligonucleotide
  Sense strand starting at position 519 of SEQ ID NO: 1560893
agaaaugaugcaugguuag

SEQ ID NO: 1632174 - RNA, 19 nt, Artificial Sequence
  Description of Artificial Sequence: Synthetic oligonucleotide
  Antisense strand to SEQ ID NO: 1632173
cuaaccaugcaucauuucu

SEQ ID NO: 1632175 - RNA, 19 nt, Artificial Sequence
  Description of Artificial Sequence: Synthetic oligonucleotide
  Sense strand starting at position 522 of SEQ ID NO: 1560893
aaugaugcaugguuaggaa

SEQ ID NO: 1632176 - RNA, 19 nt, Artificial Sequence
  Description of Artificial Sequence: Synthetic oligonucleotide
  Antisense strand to SEQ ID NO: 1632175
uuccuaaccaugcaucauu

SEQ ID NO: 1632177 - RNA, 19 nt, Artificial Sequence
  Description of Artificial Sequence: Synthetic oligonucleotide
  Sense strand starting at position 827 of SEQ ID NO: 1560893
ggagacgagccucacuuua

SEQ ID NO: 1632178 - RNA, 19 nt, Artificial Sequence
  Description of Artificial Sequence: Synthetic oligonucleotide
  Antisense strand to SEQ ID NO: 1632177
uaaagugaggcucgucucc

SEQ ID NO: 1632179 - RNA, 19 nt, Artificial Sequence
  Description of Artificial Sequence: Synthetic oligonucleotide
  Sense strand starting at position 916 of SEQ ID NO: 1560893
gggacacgucggcgauaau

SEQ ID NO: 1632180 - RNA, 19 nt, Artificial Sequence
  Description of Artificial Sequence: Synthetic oligonucleotide
  Antisense strand to SEQ ID NO: 1632179
auuaucgccgacguguccc

SEQ ID NO: 1632181 - RNA, 19 nt, Artificial Sequence
  Description of Artificial Sequence: Synthetic oligonucleotide
  Sense strand starting at position 926 of SEQ ID NO: 1560893
ggcgauaaucugggucagu

SEQ ID NO: 1632182 - RNA, 19 nt, Artificial Sequence
  Description of Artificial Sequence: Synthetic oligonucleotide
  Antisense strand to SEQ ID NO: 1632181
acugacccagauuaucgcc

SEQ ID NO: 1632183 - RNA, 19 nt, Artificial Sequence
  Description of Artificial Sequence: Synthetic oligonucleotide
  Sense strand starting at position 927 of SEQ ID NO: 1560893
gcgauaaucugggucaguu

SEQ ID NO: 1632184 - RNA, 19 nt, Artificial Sequence
  Description of Artificial Sequence: Synthetic oligonucleotide
  Antisense strand to SEQ ID NO: 1632183
aacugacccagauuaucgc

SEQ ID NO: 1632185 - RNA, 19 nt, Artificial Sequence
  Description of Artificial Sequence: Synthetic oligonucleotide
  Sense strand starting at position 1036 of SEQ ID NO: 1560893
ccacuucgugcgugaucuu

SEQ ID NO: 1632186 - RNA, 19 nt, Artificial Sequence
  Description of Artificial Sequence: Synthetic oligonucleotide
  Antisense strand to SEQ ID NO: 1632185
aagaucacgcacgaagugg

SEQ ID NO: 1632187 - RNA, 19 nt, Artificial Sequence
  Description of Artificial Sequence: Synthetic oligonucleotide
  Sense strand starting at position 1041 of SEQ ID NO: 1560893
ucgugcgugaucuuguuga

SEQ ID NO: 1632188 - RNA, 19 nt, Artificial Sequence
  Description of Artificial Sequence: Synthetic oligonucleotide
  Antisense strand to SEQ ID NO: 1632187
ucaacaagaucacgcacga

SEQ ID NO: 1632189 - RNA, 19 nt, Artificial Sequence
  Description of Artificial Sequence: Synthetic oligonucleotide
  Sense strand starting at position 1048 of SEQ ID NO: 1560893
ugaucuuguugacauagau

SEQ ID NO: 1632190 - RNA, 19 nt, Artificial Sequence
  Description of Artificial Sequence: Synthetic oligonucleotide
  Antisense strand to SEQ ID NO: 1632189
aucuaugucaacaagauca

SEQ ID NO: 1632191 - RNA, 19 nt, Artificial Sequence
  Description of Artificial Sequence: Synthetic oligonucleotide
  Sense strand starting at position 1142 of SEQ ID NO: 1560893
acggaaggauuccagacaa

SEQ ID NO: 1632192 - RNA, 19 nt, Artificial Sequence
  Description of Artificial Sequence: Synthetic oligonucleotide
  Antisense strand to SEQ ID NO: 1632191
uugucuggaauccuuccgu

SEQ ID NO: 1632193 - RNA, 19 nt, Artificial Sequence
  Description of Artificial Sequence: Synthetic oligonucleotide
  Sense strand starting at position 1177 of SEQ ID NO: 1560893
cagggugaucccggaggau

SEQ ID NO: 1632194 - RNA, 19 nt, Artificial Sequence
  Description of Artificial Sequence: Synthetic oligonucleotide
  Antisense strand to SEQ ID NO: 1632193
auccuccgggaucacccug

SEQ ID NO: 1632195 - RNA, 19 nt, Artificial Sequence
  Description of Artificial Sequence: Synthetic oligonucleotide
  Sense strand starting at position 1180 of SEQ ID NO: 1560893
ggugaucccggaggauaug

SEQ ID NO: 1632196 - RNA, 19 nt, Artificial Sequence
  Description of Artificial Sequence: Synthetic oligonucleotide
  Antisense strand to SEQ ID NO: 1632195
cauauccuccgggaucacc

SEQ ID NO: 1632197 - RNA, 19 nt, Artificial Sequence
  Description of Artificial Sequence: Synthetic oligonucleotide
  Sense strand starting at position 1433 of SEQ ID NO: 1560893
ggguuaguucuggagccau

SEQ ID NO: 1632198 - RNA, 19 nt, Artificial Sequence
  Description of Artificial Sequence: Synthetic oligonucleotide
  Antisense strand to SEQ ID NO: 1632197
auggcuccagaacuaaccc

SEQ ID NO: 1632199 - RNA, 19 nt, Artificial Sequence
  Description of Artificial Sequence: Synthetic oligonucleotide
  Sense strand starting at position 1489 of SEQ ID NO: 1560893
cucaccauuccuggcagaa

SEQ ID NO: 1632200 - RNA, 19 nt, Artificial Sequence
  Description of Artificial Sequence: Synthetic oligonucleotide
  Antisense strand to SEQ ID NO: 1632199
uucugccaggaauggugag

SEQ ID NO: 1632201 - RNA, 19 nt, Artificial Sequence
  Description of Artificial Sequence: Synthetic oligonucleotide
  Sense strand starting at position 2666 of SEQ ID NO: 1560893
ggcgauggucauugaugca

SEQ ID NO: 1632202 - RNA, 19 nt, Artificial Sequence
  Description of Artificial Sequence: Synthetic oligonucleotide
  Antisense strand to SEQ ID NO: 1632201
ugcaucaaugaccaucgcc

SEQ ID NO: 1632203 - RNA, 19 nt, Artificial Sequence
  Description of Artificial Sequence: Synthetic oligonucleotide
  Sense strand starting at position 2885 of SEQ ID NO: 1560893
ggacucucuaucugggaca

SEQ ID NO: 1632204 - RNA, 19 nt, Artificial Sequence
  Description of Artificial Sequence: Synthetic oligonucleotide
  Antisense strand to SEQ ID NO: 1632203
ugucccagauagagagucc

SEQ ID NO: 1632205 - RNA, 19 nt, Artificial Sequence
  Description of Artificial Sequence: Synthetic oligonucleotide
  Sense strand starting at position 2949 of SEQ ID NO: 1560893
gggcuuugcccucagucau

SEQ ID NO: 1632206 - RNA, 19 nt, Artificial Sequence
  Description of Artificial Sequence: Synthetic oligonucleotide
  Antisense strand to SEQ ID NO: 1632205
augacugagggcaaagccc

SEQ ID NO: 1632207 - RNA, 19 nt, Artificial Sequence
  Description of Artificial Sequence: Synthetic oligonucleotide
  Sense strand starting at position 2960 of SEQ ID NO: 1560893
ucagucauacccgagauag

SEQ ID NO: 1632208 - RNA, 19 nt, Artificial Sequence
  Description of Artificial Sequence: Synthetic oligonucleotide
  Antisense strand to SEQ ID NO: 1632207
cuaucucggguaugacuga

SEQ ID NO: 1632209 - RNA, 19 nt, Artificial Sequence
  Description of Artificial Sequence: Synthetic oligonucleotide
  Sense strand starting at position 2962 of SEQ ID NO: 1560893
agucauacccgagauaggu

SEQ ID NO: 1632210 - RNA, 19 nt, Artificial Sequence
  Description of Artificial Sequence: Synthetic oligonucleotide
  Antisense strand to SEQ ID NO: 1632209
accuaucucggguaugacu

SEQ ID NO: 1632211 - RNA, 19 nt, Artificial Sequence
  Description of Artificial Sequence: Synthetic oligonucleotide
  Sense strand starting at position 3151 of SEQ ID NO: 1560893
ggaugucugagcugaggga

SEQ ID NO: 1632212 - RNA, 19 nt, Artificial Sequence
  Description of Artificial Sequence: Synthetic oligonucleotide
  Antisense strand to SEQ ID NO: 1632211
ucccucagcucagacaucc

SEQ ID NO: 1632213 - RNA, 19 nt, Artificial Sequence
  Description of Artificial Sequence: Synthetic oligonucleotide
  Sense strand starting at position 3152 of SEQ ID NO: 1560893
gaugucugagcugagggau

SEQ ID NO: 1632214 - RNA, 19 nt, Artificial Sequence
  Description of Artificial Sequence: Synthetic oligonucleotide
  Antisense strand to SEQ ID NO: 1632213
aucccucagcucagacauc

SEQ ID NO: 1632215 - RNA, 19 nt, Artificial Sequence
  Description of Artificial Sequence: Synthetic oligonucleotide
  Sense strand starting at position 3225 of SEQ ID NO: 1560893
aggccuagaaugugaggua

SEQ ID NO: 1632216 - RNA, 19 nt, Artificial Sequence
  Description of Artificial Sequence: Synthetic oligonucleotide
  Antisense strand to SEQ ID NO: 1632215
uaccucacauucuaggccu

SEQ ID NO: 1632217 - RNA, 19 nt, Artificial Sequence
  Description of Artificial Sequence: Synthetic oligonucleotide
  Sense strand starting at position 3228 of SEQ ID NO: 1560893
ccuagaaugugagguaggu

SEQ ID NO: 1632218 - RNA, 19 nt, Artificial Sequence
  Description of Artificial Sequence: Synthetic oligonucleotide
  Antisense strand to SEQ ID NO: 1632217
accuaccucacauucuagg

SEQ ID NO: 1632219 - RNA, 19 nt, Artificial Sequence
  Description of Artificial Sequence: Synthetic oligonucleotide
  Sense strand starting at position 3290 of SEQ ID NO: 1560893
acaggaucucuuugugcau

SEQ ID NO: 1632220 - RNA, 19 nt, Artificial Sequence
  Description of Artificial Sequence: Synthetic oligonucleotide
  Antisense strand to SEQ ID NO: 1632219
augcacaaagagauccugu

SEQ ID NO: 1632221 - RNA, 19 nt, Artificial Sequence
  Description of Artificial Sequence: Synthetic oligonucleotide
  Sense strand starting at position 3768 of SEQ ID NO: 1560893
uuuaaagugucaguauucu

SEQ ID NO: 1632222 - RNA, 19 nt, Artificial Sequence
  Description of Artificial Sequence: Synthetic oligonucleotide
  Antisense strand to SEQ ID NO: 1632221
agaauacugacacuuuaaa

SEQ ID NO: 1632223 - RNA, 19 nt, Artificial Sequence
  Description of Artificial Sequence: Synthetic oligonucleotide
  Sense strand starting at position 3774 of SEQ ID NO: 1560893
gugucaguauucuagugaa

SEQ ID NO: 1632224 - RNA, 19 nt, Artificial Sequence
  Description of Artificial Sequence: Synthetic oligonucleotide
  Antisense strand to SEQ ID NO: 1632223
uucacuagaauacugacac

SEQ ID NO: 1632225 - RNA, 19 nt, Artificial Sequence
  Description of Artificial Sequence: Synthetic oligonucleotide
  Sense strand starting at position 3777 of SEQ ID NO: 1560893
ucaguauucuagugaaguc

SEQ ID NO: 1632226 - RNA, 19 nt, Artificial Sequence
  Description of Artificial Sequence: Synthetic oligonucleotide
  Antisense strand to SEQ ID NO: 1632225
gacuucacuagaauacuga

SEQ ID NO: 1632227 - RNA, 19 nt, Artificial Sequence
  Description of Artificial Sequence: Synthetic oligonucleotide
  Sense strand starting at position 3808 of SEQ ID NO: 1560893
aguguuaacguuuaccuca

SEQ ID NO: 1632228 - RNA, 19 nt, Artificial Sequence
  Description of Artificial Sequence: Synthetic oligonucleotide
  Antisense strand to SEQ ID NO: 1632227
ugagguaaacguuaacacu

SEQ ID NO: 1632229 - RNA, 19 nt, Artificial Sequence
  Description of Artificial Sequence: Synthetic oligonucleotide
  Sense strand starting at position 3810 of SEQ ID NO: 1560893
uguuaacguuuaccucauu

SEQ ID NO: 1632230 - RNA, 19 nt, Artificial Sequence
  Description of Artificial Sequence: Synthetic oligonucleotide
  Antisense strand to SEQ ID NO: 1632229
aaugagguaaacguuaaca

SEQ ID NO: 1632231 - RNA, 19 nt, Artificial Sequence
  Description of Artificial Sequence: Synthetic oligonucleotide
  Sense strand starting at position 3898 of SEQ ID NO: 1560893
uuucucucaucugguuuau

SEQ ID NO: 1632232 - RNA, 19 nt, Artificial Sequence
  Description of Artificial Sequence: Synthetic oligonucleotide
  Antisense strand to SEQ ID NO: 1632231
auaaaccagaugagagaaa

SEQ ID NO: 1632233 - RNA, 19 nt, Artificial Sequence
  Description of Artificial Sequence: Synthetic oligonucleotide
  Sense strand starting at position 3943 of SEQ ID NO: 1560893
ugcccugaggguggaaauu

SEQ ID NO: 1632234 - RNA, 19 nt, Artificial Sequence
  Description of Artificial Sequence: Synthetic oligonucleotide
  Antisense strand to SEQ ID NO: 1632233
aauuuccacccucagggca

SEQ ID NO: 1632235 - RNA, 19 nt, Artificial Sequence
  Description of Artificial Sequence: Synthetic oligonucleotide
  Sense strand starting at position 44 of SEQ ID NO: 1560894
cuagcaacagauugagaau

SEQ ID NO: 1632236 - RNA, 19 nt, Artificial Sequence
  Description of Artificial Sequence: Synthetic oligonucleotide
  Antisense strand to SEQ ID NO: 1632235
auucucaaucuguugcuag

SEQ ID NO: 1632237 - RNA, 19 nt, Artificial Sequence
  Description of Artificial Sequence: Synthetic oligonucleotide
  Sense strand starting at position 53 of SEQ ID NO: 1560894
gauugagaauccgucucaa

SEQ ID NO: 1632238 - RNA, 19 nt, Artificial Sequence
  Description of Artificial Sequence: Synthetic oligonucleotide
  Antisense strand to SEQ ID NO: 1632237
uugagacggauucucaauc

SEQ ID NO: 1632239 - RNA, 19 nt, Artificial Sequence
  Description of Artificial Sequence: Synthetic oligonucleotide
  Sense strand starting at position 103 of SEQ ID NO: 1560894
gcgugauguccgccuucag

SEQ ID NO: 1632240 - RNA, 19 nt, Artificial Sequence
  Description of Artificial Sequence: Synthetic oligonucleotide
  Antisense strand to SEQ ID NO: 1632239
cugaaggcggacaucacgc

SEQ ID NO: 1632241 - RNA, 19 nt, Artificial Sequence
  Description of Artificial Sequence: Synthetic oligonucleotide
  Sense strand starting at position 104 of SEQ ID NO: 1560894
cgugauguccgccuucaga

SEQ ID NO: 1632242 - RNA, 19 nt, Artificial Sequence
  Description of Artificial Sequence: Synthetic oligonucleotide
  Antisense strand to SEQ ID NO: 1632241
ucugaaggcggacaucacg

SEQ ID NO: 1632243 - RNA, 19 nt, Artificial Sequence
  Description of Artificial Sequence: Synthetic oligonucleotide
  Sense strand starting at position 838 of SEQ ID NO: 1560894
ggcugucccucccaaguuu

SEQ ID NO: 1632244 - RNA, 19 nt, Artificial Sequence
  Description of Artificial Sequence: Synthetic oligonucleotide
  Antisense strand to SEQ ID NO: 1632243
aaacuugggagggacagcc

SEQ ID NO: 1632245 - RNA, 19 nt, Artificial Sequence
  Description of Artificial Sequence: Synthetic oligonucleotide
  Sense strand starting at position 847 of SEQ ID NO: 1560894
ucccaaguuucgcagucau

SEQ ID NO: 1632246 - RNA, 19 nt, Artificial Sequence
  Description of Artificial Sequence: Synthetic oligonucleotide
  Antisense strand to SEQ ID NO: 1632245
augacugcgaaacuuggga

SEQ ID NO: 1632247 - RNA, 19 nt, Artificial Sequence
  Description of Artificial Sequence: Synthetic oligonucleotide
  Sense strand starting at position 1003 of SEQ ID NO: 1560894
ucaccuaugucccuggaaa

SEQ ID NO: 1632248 - RNA, 19 nt, Artificial Sequence
  Description of Artificial Sequence: Synthetic oligonucleotide
  Antisense strand to SEQ ID NO: 1632247
uuuccagggacauagguga

SEQ ID NO: 1632249 - RNA, 19 nt, Artificial Sequence
  Description of Artificial Sequence: Synthetic oligonucleotide
  Sense strand starting at position 1004 of SEQ ID NO: 1560894
caccuaugucccuggaaag

SEQ ID NO: 1632250 - RNA, 19 nt, Artificial Sequence
  Description of Artificial Sequence: Synthetic oligonucleotide
  Antisense strand to SEQ ID NO: 1632249
cuuuccagggacauaggug

SEQ ID NO: 1632251 - RNA, 19 nt, Artificial Sequence
  Description of Artificial Sequence: Synthetic oligonucleotide
  Sense strand starting at position 1005 of SEQ ID NO: 1560894
accuaugucccuggaaagu

SEQ ID NO: 1632252 - RNA, 19 nt, Artificial Sequence
  Description of Artificial Sequence: Synthetic oligonucleotide
  Antisense strand to SEQ ID NO: 1632251
acuuuccagggacauaggu

SEQ ID NO: 1632253 - RNA, 19 nt, Artificial Sequence
  Description of Artificial Sequence: Synthetic oligonucleotide
  Sense strand starting at position 1098 of SEQ ID NO: 1560894
gcccaugagcggugcaaga

SEQ ID NO: 1632254 - RNA, 19 nt, Artificial Sequence
  Description of Artificial Sequence: Synthetic oligonucleotide
  Antisense strand to SEQ ID NO: 1632253
ucuugcaccgcucaugggc

SEQ ID NO: 1632255 - RNA, 19 nt, Artificial Sequence
  Description of Artificial Sequence: Synthetic oligonucleotide
  Sense strand starting at position 1492 of SEQ ID NO: 1560894
cgggcuuaaguuggaaaga

SEQ ID NO: 1632256 - RNA, 19 nt, Artificial Sequence
  Description of Artificial Sequence: Synthetic oligonucleotide
  Antisense strand to SEQ ID NO: 1632255
ucuuuccaacuuaagcccg

SEQ ID NO: 1632257 - RNA, 19 nt, Artificial Sequence
  Description of Artificial Sequence: Synthetic oligonucleotide
  Sense strand starting at position 1493 of SEQ ID NO: 1560894
gggcuuaaguuggaaagaa

SEQ ID NO: 1632258 - RNA, 19 nt, Artificial Sequence
  Description of Artificial Sequence: Synthetic oligonucleotide
  Antisense strand to SEQ ID NO: 1632257
uucuuuccaacuuaagccc

SEQ ID NO: 1632259 - RNA, 19 nt, Artificial Sequence
  Description of Artificial Sequence: Synthetic oligonucleotide
  Sense strand starting at position 1573 of SEQ ID NO: 1560894
gaggguuccucgcacucga

SEQ ID NO: 1632260 - RNA, 19 nt, Artificial Sequence
  Description of Artificial Sequence: Synthetic oligonucleotide
  Antisense strand to SEQ ID NO: 1632259
ucgagugcgaggaacccuc

SEQ ID NO: 1632261 - RNA, 19 nt, Artificial Sequence
  Description of Artificial Sequence: Synthetic oligonucleotide
  Sense strand starting at position 1608 of SEQ ID NO: 1560894
gguuaagagcccuaaacac

SEQ ID NO: 1632262 - RNA, 19 nt, Artificial Sequence
  Description of Artificial Sequence: Synthetic oligonucleotide
  Antisense strand to SEQ ID NO: 1632261
guguuuagggcucuuaacc

SEQ ID NO: 1632263 - RNA, 19 nt, Artificial Sequence
  Description of Artificial Sequence: Synthetic oligonucleotide
  Sense strand starting at position 1658 of SEQ ID NO: 1560894
ccacgagucaaaggucaga

SEQ ID NO: 1632264 - RNA, 19 nt, Artificial Sequence
  Description of Artificial Sequence: Synthetic oligonucleotide
  Antisense strand to SEQ ID NO: 1632263
ucugaccuuugacucgugg

SEQ ID NO: 1632265 - RNA, 19 nt, Artificial Sequence
  Description of Artificial Sequence: Synthetic oligonucleotide
  Sense strand starting at position 1683 of SEQ ID NO: 1560894
ggaggagccucagucgaaa

SEQ ID NO: 1632266 - RNA, 19 nt, Artificial Sequence
  Description of Artificial Sequence: Synthetic oligonucleotide
  Antisense strand to SEQ ID NO: 1632265
uuucgacugaggcuccucc

SEQ ID NO: 1632267 - RNA, 19 nt, Artificial Sequence
  Description of Artificial Sequence: Synthetic oligonucleotide
  Sense strand starting at position 1837 of SEQ ID NO: 1560894
gccgucucccuuuguguua

SEQ ID NO: 1632268 - RNA, 19 nt, Artificial Sequence
  Description of Artificial Sequence: Synthetic oligonucleotide
  Antisense strand to SEQ ID NO: 1632267
uaacacaaagggagacggc

SEQ ID NO: 1632269 - RNA, 19 nt, Artificial Sequence
  Description of Artificial Sequence: Synthetic oligonucleotide
  Sense strand starting at position 1889 of SEQ ID NO: 1560894
ggccguagggcucguuuga

SEQ ID NO: 1632270 - RNA, 19 nt, Artificial Sequence
  Description of Artificial Sequence: Synthetic oligonucleotide
  Antisense strand to SEQ ID NO: 1632269
ucaaacgagcccuacggcc

SEQ ID NO: 1632271 - RNA, 19 nt, Artificial Sequence
  Description of Artificial Sequence: Synthetic oligonucleotide
  Sense strand starting at position 1928 of SEQ ID NO: 1560894
cagcaaagugccgacauua

SEQ ID NO: 1632272 - RNA, 19 nt, Artificial Sequence
  Description of Artificial Sequence: Synthetic oligonucleotide
  Antisense strand to SEQ ID NO: 1632271
uaaugucggcacuuugcug

SEQ ID NO: 1632273 - RNA, 19 nt, Artificial Sequence
  Description of Artificial Sequence: Synthetic oligonucleotide
  Sense strand starting at position 2016 of SEQ ID NO: 1560894
ugguuucauggucgacgga

SEQ ID NO: 1632274 - RNA, 19 nt, Artificial Sequence
  Description of Artificial Sequence: Synthetic oligonucleotide
  Antisense strand to SEQ ID NO: 1632273
uccgucgaccaugaaacca

SEQ ID NO: 1632275 - RNA, 19 nt, Artificial Sequence
  Description of Artificial Sequence: Synthetic oligonucleotide
  Sense strand starting at position 2156 of SEQ ID NO: 1560894
agagcuguugccguggcaa

SEQ ID NO: 1632276 - RNA, 19 nt, Artificial Sequence
  Description of Artificial Sequence: Synthetic oligonucleotide
  Antisense strand to SEQ ID NO: 1632275
uugccacggcaacagcucu

SEQ ID NO: 1632277 - RNA, 19 nt, Artificial Sequence
  Description of Artificial Sequence: Synthetic oligonucleotide
  Sense strand starting at position 2454 of SEQ ID NO: 1560894
agagauuccuguccgcaac

SEQ ID NO: 1632278 - RNA, 19 nt, Artificial Sequence
  Description of Artificial Sequence: Synthetic oligonucleotide
  Antisense strand to SEQ ID NO: 1632277
guugcggacaggaaucucu

SEQ ID NO: 1632279 - RNA, 19 nt, Artificial Sequence
  Description of Artificial Sequence: Synthetic oligonucleotide
  Sense strand starting at position 2457 of SEQ ID NO: 1560894
gauuccuguccgcaaccuu

SEQ ID NO: 1632280 - RNA, 19 nt, Artificial Sequence
  Description of Artificial Sequence: Synthetic oligonucleotide
  Antisense strand to SEQ ID NO: 1632279
aagguugcggacaggaauc

SEQ ID NO: 1632281 - RNA, 19 nt, Artificial Sequence
  Description of Artificial Sequence: Synthetic oligonucleotide
  Sense strand starting at position 2498 of SEQ ID NO: 1560894
ggguaagagucauuaggau

SEQ ID NO: 1632282 - RNA, 19 nt, Artificial Sequence
  Description of Artificial Sequence: Synthetic oligonucleotide
  Antisense strand to SEQ ID NO: 1632281
auccuaaugacucuuaccc

SEQ ID NO: 1632283 - RNA, 19 nt, Artificial Sequence
  Description of Artificial Sequence: Synthetic oligonucleotide
  Sense strand starting at position 2516 of SEQ ID NO: 1560894
ugccgucuaucauggagga

SEQ ID NO: 1632284 - RNA, 19 nt, Artificial Sequence
  Description of Artificial Sequence: Synthetic oligonucleotide
  Antisense strand to SEQ ID NO: 1632283
uccuccaugauagacggca

SEQ ID NO: 1632285 - RNA, 19 nt, Artificial Sequence
  Description of Artificial Sequence: Synthetic oligonucleotide
  Sense strand starting at position 2517 of SEQ ID NO: 1560894
gccgucuaucauggaggaa

SEQ ID NO: 1632286 - RNA, 19 nt, Artificial Sequence
  Description of Artificial Sequence: Synthetic oligonucleotide
  Antisense strand to SEQ ID NO: 1632285
uuccuccaugauagacggc

SEQ ID NO: 1632287 - RNA, 19 nt, Artificial Sequence
  Description of Artificial Sequence: Synthetic oligonucleotide
  Sense strand starting at position 2741 of SEQ ID NO: 1560894
gaaauaaaccucggagccu

SEQ ID NO: 1632288 - RNA, 19 nt, Artificial Sequence
  Description of Artificial Sequence: Synthetic oligonucleotide
  Antisense strand to SEQ ID NO: 1632287
aggcuccgagguuuauuuc

SEQ ID NO: 1632289 - RNA, 19 nt, Artificial Sequence
  Description of Artificial Sequence: Synthetic oligonucleotide
  Sense strand starting at position 2779 of SEQ ID NO: 1560894
gcgugauccugccuaggag

SEQ ID NO: 1632290 - RNA, 19 nt, Artificial Sequence
  Description of Artificial Sequence: Synthetic oligonucleotide
  Antisense strand to SEQ ID NO: 1632289
cuccuaggcaggaucacgc

SEQ ID NO: 1632291 - RNA, 19 nt, Artificial Sequence
  Description of Artificial Sequence: Synthetic oligonucleotide
  Sense strand starting at position 2805 of SEQ ID NO: 1560894
gcgggagcuuuagaaugga

SEQ ID NO: 1632292 - RNA, 19 nt, Artificial Sequence
  Description of Artificial Sequence: Synthetic oligonucleotide
  Antisense strand to SEQ ID NO: 1632291
uccauucuaaagcucccgc

SEQ ID NO: 1632293 - RNA, 19 nt, Artificial Sequence
  Description of Artificial Sequence: Synthetic oligonucleotide
  Sense strand starting at position 2911 of SEQ ID NO: 1560894
gggugagaauaggaauauc

SEQ ID NO: 1632294 - RNA, 19 nt, Artificial Sequence
  Description of Artificial Sequence: Synthetic oligonucleotide
  Antisense strand to SEQ ID NO: 1632293
gauauuccuauucucaccc

SEQ ID NO: 1632295 - RNA, 19 nt, Artificial Sequence
  Description of Artificial Sequence: Synthetic oligonucleotide
  Sense strand starting at position 2935 of SEQ ID NO: 1560894
guaacuguguuccaggcua

SEQ ID NO: 1632296 - RNA, 19 nt, Artificial Sequence
  Description of Artificial Sequence: Synthetic oligonucleotide
  Antisense strand to SEQ ID NO: 1632295
uagccuggaacacaguuac

SEQ ID NO: 1632297 - RNA, 19 nt, Artificial Sequence
  Description of Artificial Sequence: Synthetic oligonucleotide
  Sense strand starting at position 2937 of SEQ ID NO: 1560894
aacuguguuccaggcuaau

SEQ ID NO: 1632298 - RNA, 19 nt, Artificial Sequence
  Description of Artificial Sequence: Synthetic oligonucleotide
  Antisense strand to SEQ ID NO: 1632297
auuagccuggaacacaguu

SEQ ID NO: 1632299 - RNA, 19 nt, Artificial Sequence
  Description of Artificial Sequence: Synthetic oligonucleotide
  Sense strand starting at position 2940 of SEQ ID NO: 1560894
uguguuccaggcuaauauc

SEQ ID NO: 1632300 - RNA, 19 nt, Artificial Sequence
  Description of Artificial Sequence: Synthetic oligonucleotide
  Antisense strand to SEQ ID NO: 1632299
gauauuagccuggaacaca

SEQ ID NO: 1632301 - RNA, 19 nt, Artificial Sequence
  Description of Artificial Sequence: Synthetic oligonucleotide
  Sense strand starting at position 72 of SEQ ID NO: 1560895
agaagaugagguugguauu

SEQ ID NO: 1632302 - RNA, 19 nt, Artificial Sequence
  Description of Artificial Sequence: Synthetic oligonucleotide
  Antisense strand to SEQ ID NO: 1632301
aauaccaaccucaucuucu

SEQ ID NO: 1632303 - RNA, 19 nt, Artificial Sequence
  Description of Artificial Sequence: Synthetic oligonucleotide
  Sense strand starting at position 73 of SEQ ID NO: 1560895
gaagaugagguugguauua

SEQ ID NO: 1632304 - RNA, 19 nt, Artificial Sequence
  Description of Artificial Sequence: Synthetic oligonucleotide
  Antisense strand to SEQ ID NO: 1632303
uaauaccaaccucaucuuc

SEQ ID NO: 1632305 - RNA, 19 nt, Artificial Sequence
  Description of Artificial Sequence: Synthetic oligonucleotide
  Sense strand starting at position 135 of SEQ ID NO: 1560895
acaucuaugcuagaaguuc

SEQ ID NO: 1632306 - RNA, 19 nt, Artificial Sequence
  Description of Artificial Sequence: Synthetic oligonucleotide
  Antisense strand to SEQ ID NO: 1632305
gaacuucuagcauagaugu

SEQ ID NO: 1632307 - RNA, 19 nt, Artificial Sequence
  Description of Artificial Sequence: Synthetic oligonucleotide
  Sense strand starting at position 244 of SEQ ID NO: 1560895
acccuagauccugaguguu

SEQ ID NO: 1632308 - RNA, 19 nt, Artificial Sequence
  Description of Artificial Sequence: Synthetic oligonucleotide
  Antisense strand to SEQ ID NO: 1632307
aacacucaggaucuagggu

SEQ ID NO: 1632309 - RNA, 19 nt, Artificial Sequence
  Description of Artificial Sequence: Synthetic oligonucleotide
  Sense strand starting at position 250 of SEQ ID NO: 1560895
gauccugaguguuuaacau

SEQ ID NO: 1632310 - RNA, 19 nt, Artificial Sequence
  Description of Artificial Sequence: Synthetic oligonucleotide
  Antisense strand to SEQ ID NO: 1632309
auguuaaacacucaggauc

SEQ ID NO: 1632311 - RNA, 19 nt, Artificial Sequence
  Description of Artificial Sequence: Synthetic oligonucleotide
  Sense strand starting at position 383 of SEQ ID NO: 1560895
gauauagcugucuaggaug

SEQ ID NO: 1632312 - RNA, 19 nt, Artificial Sequence
  Description of Artificial Sequence: Synthetic oligonucleotide
  Antisense strand to SEQ ID NO: 1632311
cauccuagacagcuauauc

SEQ ID NO: 1632313 - RNA, 19 nt, Artificial Sequence
  Description of Artificial Sequence: Synthetic oligonucleotide
  Sense strand starting at position 494 of SEQ ID NO: 1560895
gguguccugaacugauaaa

SEQ ID NO: 1632314 - RNA, 19 nt, Artificial Sequence
  Description of Artificial Sequence: Synthetic oligonucleotide
  Antisense strand to SEQ ID NO: 1632313
uuuaucaguucaggacacc

SEQ ID NO: 1632315 - RNA, 19 nt, Artificial Sequence
  Description of Artificial Sequence: Synthetic oligonucleotide
  Sense strand starting at position 676 of SEQ ID NO: 1560895
ugguuuaugagcuaaauag

SEQ ID NO: 1632316 - RNA, 19 nt, Artificial Sequence
  Description of Artificial Sequence: Synthetic oligonucleotide
  Antisense strand to SEQ ID NO: 1632315
cuauuuagcucauaaacca

SEQ ID NO: 1632317 - RNA, 19 nt, Artificial Sequence
  Description of Artificial Sequence: Synthetic oligonucleotide
  Sense strand starting at position 683 of SEQ ID NO: 1560895
ugagcuaaauagcuagaaa

SEQ ID NO: 1632318 - RNA, 19 nt, Artificial Sequence
  Description of Artificial Sequence: Synthetic oligonucleotide
  Antisense strand to SEQ ID NO: 1632317
uuucuagcuauuuagcuca

SEQ ID NO: 1632319 - RNA, 19 nt, Artificial Sequence
  Description of Artificial Sequence: Synthetic oligonucleotide
  Sense strand starting at position 742 of SEQ ID NO: 1560895
ucuuguacuucccugagaa

SEQ ID NO: 1632320 - RNA, 19 nt, Artificial Sequence
  Description of Artificial Sequence: Synthetic oligonucleotide
  Antisense strand to SEQ ID NO: 1632319
uucucagggaaguacaaga

SEQ ID NO: 1632321 - RNA, 19 nt, Artificial Sequence
  Description of Artificial Sequence: Synthetic oligonucleotide
  Sense strand starting at position 744 of SEQ ID NO: 1560895
uuguacuucccugagaaug

SEQ ID NO: 1632322 - RNA, 19 nt, Artificial Sequence
  Description of Artificial Sequence: Synthetic oligonucleotide
  Antisense strand to SEQ ID NO: 1632321
cauucucagggaaguacaa

SEQ ID NO: 1632323 - RNA, 19 nt, Artificial Sequence
  Description of Artificial Sequence: Synthetic oligonucleotide
  Sense strand starting at position 749 of SEQ ID NO: 1560895
cuucccugagaauguuuga

SEQ ID NO: 1632324 - RNA, 19 nt, Artificial Sequence
  Description of Artificial Sequence: Synthetic oligonucleotide
  Antisense strand to SEQ ID NO: 1632323
ucaaacauucucagggaag

SEQ ID NO: 1632325 - RNA, 19 nt, Artificial Sequence
  Description of Artificial Sequence: Synthetic oligonucleotide
  Sense strand starting at position 758 of SEQ ID NO: 1560895
gaauguuugaugcaaggug

SEQ ID NO: 1632326 - RNA, 19 nt, Artificial Sequence
  Description of Artificial Sequence: Synthetic oligonucleotide
  Antisense strand to SEQ ID NO: 1632325
caccuugcaucaaacauuc

SEQ ID NO: 1632327 - RNA, 19 nt, Artificial Sequence
  Description of Artificial Sequence: Synthetic oligonucleotide
  Sense strand starting at position 1273 of SEQ ID NO: 1560895
ggaagucuuucugcaacaa

SEQ ID NO: 1632328 - RNA, 19 nt, Artificial Sequence
  Description of Artificial Sequence: Synthetic oligonucleotide
  Antisense strand to SEQ ID NO: 1632327
uuguugcagaaagacuucc

SEQ ID NO: 1632329 - RNA, 19 nt, Artificial Sequence
  Description of Artificial Sequence: Synthetic oligonucleotide
  Sense strand starting at position 1369 of SEQ ID NO: 1560895
acuuaugugcaugagcaaa

SEQ ID NO: 1632330 - RNA, 19 nt, Artificial Sequence
  Description of Artificial Sequence: Synthetic oligonucleotide
  Antisense strand to SEQ ID NO: 1632329
uuugcucaugcacauaagu

SEQ ID NO: 1632331 - RNA, 19 nt, Artificial Sequence
  Description of Artificial Sequence: Synthetic oligonucleotide
  Sense strand starting at position 1394 of SEQ ID NO: 1560895
cucagacaugccgagacaa

SEQ ID NO: 1632332 - RNA, 19 nt, Artificial Sequence
  Description of Artificial Sequence: Synthetic oligonucleotide
  Antisense strand to SEQ ID NO: 1632331
uugucucggcaugucugag

SEQ ID NO: 1632333 - RNA, 19 nt, Artificial Sequence
  Description of Artificial Sequence: Synthetic oligonucleotide
  Sense strand starting at position 1396 of SEQ ID NO: 1560895
cagacaugccgagacaauc

SEQ ID NO: 1632334 - RNA, 19 nt, Artificial Sequence
  Description of Artificial Sequence: Synthetic oligonucleotide
  Antisense strand to SEQ ID NO: 1632333
gauugucucggcaugucug

SEQ ID NO: 1632335 - RNA, 19 nt, Artificial Sequence
  Description of Artificial Sequence: Synthetic oligonucleotide
  Sense strand starting at position 1528 of SEQ ID NO: 1560895
ggaccaaagcuuuggguua

SEQ ID NO: 1632336 - RNA, 19 nt, Artificial Sequence
  Description of Artificial Sequence: Synthetic oligonucleotide
  Antisense strand to SEQ ID NO: 1632335
uaacccaaagcuuuggucc

SEQ ID NO: 1632337 - RNA, 19 nt, Artificial Sequence
  Description of Artificial Sequence: Synthetic oligonucleotide
  Sense strand starting at position 1533 of SEQ ID NO: 1560895
aaagcuuuggguuagugau

SEQ ID NO: 1632338 - RNA, 19 nt, Artificial Sequence
  Description of Artificial Sequence: Synthetic oligonucleotide
  Antisense strand to SEQ ID NO: 1632337
aucacuaacccaaagcuuu

SEQ ID NO: 1632339 - RNA, 19 nt, Artificial Sequence
  Description of Artificial Sequence: Synthetic oligonucleotide
  Sense strand starting at position 1577 of SEQ ID NO: 1560895
uuugcaucagguuaagagu

SEQ ID NO: 1632340 - RNA, 19 nt, Artificial Sequence
  Description of Artificial Sequence: Synthetic oligonucleotide
  Antisense strand to SEQ ID NO: 1632339
acucuuaaccugaugcaaa

SEQ ID NO: 1632341 - RNA, 19 nt, Artificial Sequence
  Description of Artificial Sequence: Synthetic oligonucleotide
  Sense strand starting at position 1583 of SEQ ID NO: 1560895
ucagguuaagagugugaaa

SEQ ID NO: 1632342 - RNA, 19 nt, Artificial Sequence
  Description of Artificial Sequence: Synthetic oligonucleotide
  Antisense strand to SEQ ID NO: 1632341
uuucacacucuuaaccuga

SEQ ID NO: 1632343 - RNA, 19 nt, Artificial Sequence
  Description of Artificial Sequence: Synthetic oligonucleotide
  Sense strand starting at position 1818 of SEQ ID NO: 1560895
uccuguagcgguucuguua

SEQ ID NO: 1632344 - RNA, 19 nt, Artificial Sequence
  Description of Artificial Sequence: Synthetic oligonucleotide
  Antisense strand to SEQ ID NO: 1632343
uaacagaaccgcuacagga

SEQ ID NO: 1632345 - RNA, 19 nt, Artificial Sequence
  Description of Artificial Sequence: Synthetic oligonucleotide
  Sense strand starting at position 2074 of SEQ ID NO: 1560895
aagggauucggcuacugag

SEQ ID NO: 1632346 - RNA, 19 nt, Artificial Sequence
  Description of Artificial Sequence: Synthetic oligonucleotide
  Antisense strand to SEQ ID NO: 1632345
cucaguagccgaaucccuu

SEQ ID NO: 1632347 - RNA, 19 nt, Artificial Sequence
  Description of Artificial Sequence: Synthetic oligonucleotide
  Sense strand starting at position 2313 of SEQ ID NO: 1560895
gucuuugucgucccuaauc

SEQ ID NO: 1632348 - RNA, 19 nt, Artificial Sequence
  Description of Artificial Sequence: Synthetic oligonucleotide
  Antisense strand to SEQ ID NO: 1632347
gauuagggacgacaaagac

SEQ ID NO: 1632349 - RNA, 19 nt, Artificial Sequence
  Description of Artificial Sequence: Synthetic oligonucleotide
  Sense strand starting at position 2413 of SEQ ID NO: 1560895
ccgugucugcugcuaacua

SEQ ID NO: 1632350 - RNA, 19 nt, Artificial Sequence
  Description of Artificial Sequence: Synthetic oligonucleotide
  Antisense strand to SEQ ID NO: 1632349
uaguuagcagcagacacgg

SEQ ID NO: 1632351 - RNA, 19 nt, Artificial Sequence
  Description of Artificial Sequence: Synthetic oligonucleotide
  Sense strand starting at position 2546 of SEQ ID NO: 1560895
ucagaaagcuuucuugaga

SEQ ID NO: 1632352 - RNA, 19 nt, Artificial Sequence
  Description of Artificial Sequence: Synthetic oligonucleotide
  Antisense strand to SEQ ID NO: 1632351
ucucaagaaagcuuucuga

SEQ ID NO: 1632353 - RNA, 19 nt, Artificial Sequence
  Description of Artificial Sequence: Synthetic oligonucleotide
  Sense strand starting at position 2763 of SEQ ID NO: 1560895
caacuacucggguaucuga

SEQ ID NO: 1632354 - RNA, 19 nt, Artificial Sequence
  Description of Artificial Sequence: Synthetic oligonucleotide
  Antisense strand to SEQ ID NO: 1632353
ucagauacccgaguaguug

SEQ ID NO: 1632355 - RNA, 19 nt, Artificial Sequence
  Description of Artificial Sequence: Synthetic oligonucleotide
  Sense strand starting at position 2984 of SEQ ID NO: 1560895
cccaguguugggcagaacu

SEQ ID NO: 1632356 - RNA, 19 nt, Artificial Sequence
  Description of Artificial Sequence: Synthetic oligonucleotide
  Antisense strand to SEQ ID NO: 1632355
aguucugcccaacacuggg

SEQ ID NO: 1632357 - RNA, 19 nt, Artificial Sequence
  Description of Artificial Sequence: Synthetic oligonucleotide
  Sense strand starting at position 3089 of SEQ ID NO: 1560895
cucaacuuugaguacagua

SEQ ID NO: 1632358 - RNA, 19 nt, Artificial Sequence
  Description of Artificial Sequence: Synthetic oligonucleotide
  Antisense strand to SEQ ID NO: 1632357
uacuguacucaaaguugag

SEQ ID NO: 1632359 - RNA, 19 nt, Artificial Sequence
  Description of Artificial Sequence: Synthetic oligonucleotide
  Sense strand starting at position 3094 of SEQ ID NO: 1560895
cuuugaguacaguauacau

SEQ ID NO: 1632360 - RNA, 19 nt, Artificial Sequence
  Description of Artificial Sequence: Synthetic oligonucleotide
  Antisense strand to SEQ ID NO: 1632359
auguauacuguacucaaag

SEQ ID NO: 1632361 - RNA, 19 nt, Artificial Sequence
  Description of Artificial Sequence: Synthetic oligonucleotide
  Sense strand starting at position 3297 of SEQ ID NO: 1560895
gcauauguaguacacuuau

SEQ ID NO: 1632362 - RNA, 19 nt, Artificial Sequence
  Description of Artificial Sequence: Synthetic oligonucleotide
  Antisense strand to SEQ ID NO: 1632361
auaaguguacuacauaugc

SEQ ID NO: 1632363 - RNA, 19 nt, Artificial Sequence
  Description of Artificial Sequence: Synthetic oligonucleotide
  Sense strand starting at position 3394 of SEQ ID NO: 1560895
uguaauuuaugggacugau

SEQ ID NO: 1632364 - RNA, 19 nt, Artificial Sequence
  Description of Artificial Sequence: Synthetic oligonucleotide
  Antisense strand to SEQ ID NO: 1632363
aucagucccauaaauuaca

SEQ ID NO: 1632365 - RNA, 19 nt, Artificial Sequence
  Description of Artificial Sequence: Synthetic oligonucleotide
  Sense strand starting at position 3469 of SEQ ID NO: 1560895
uacaauaugguuugaaaug

SEQ ID NO: 1632366 - RNA, 19 nt, Artificial Sequence
  Description of Artificial Sequence: Synthetic oligonucleotide
  Antisense strand to SEQ ID NO: 1632365
cauuucaaaccauauugua

SEQ ID NO: 1632367 - RNA, 19 nt, Artificial Sequence
  Description of Artificial Sequence: Synthetic oligonucleotide
  Sense strand starting at position 3496 of SEQ ID NO: 1560895
uuguguaauggcuaaauga

SEQ ID NO: 1632368 - RNA, 19 nt, Artificial Sequence
  Description of Artificial Sequence: Synthetic oligonucleotide
  Antisense strand to SEQ ID NO: 1632367
ucauuuagccauuacacaa

SEQ ID NO: 1632369 - RNA, 19 nt, Artificial Sequence
  Description of Artificial Sequence: Synthetic oligonucleotide
  Sense strand starting at position 3580 of SEQ ID NO: 1560895
ucagguuauuaacugaaau

SEQ ID NO: 1632370 - RNA, 19 nt, Artificial Sequence
  Description of Artificial Sequence: Synthetic oligonucleotide
  Antisense strand to SEQ ID NO: 1632369
auuucaguuaauaaccuga

SEQ ID NO: 1632371 - RNA, 19 nt, Artificial Sequence
  Description of Artificial Sequence: Synthetic oligonucleotide
  Sense strand starting at position 3732 of SEQ ID NO: 1560895
agaccucugugauuaugga

SEQ ID NO: 1632372 - RNA, 19 nt, Artificial Sequence
  Description of Artificial Sequence: Synthetic oligonucleotide
  Antisense strand to SEQ ID NO: 1632371
uccauaaucacagaggucu

SEQ ID NO: 1632373 - RNA, 19 nt, Artificial Sequence
  Description of Artificial Sequence: Synthetic oligonucleotide
  Sense strand starting at position 3760 of SEQ ID NO: 1560895
gaagaccugugucuuugaa

SEQ ID NO: 1632374 - RNA, 19 nt, Artificial Sequence
  Description of Artificial Sequence: Synthetic oligonucleotide
  Antisense strand to SEQ ID NO: 1632373
uucaaagacacaggucuuc

SEQ ID NO: 1632375 - RNA, 19 nt, Artificial Sequence
  Description of Artificial Sequence: Synthetic oligonucleotide
  Sense strand starting at position 3762 of SEQ ID NO: 1560895
agaccugugucuuugaaag

SEQ ID NO: 1632376 - RNA, 19 nt, Artificial Sequence
  Description of Artificial Sequence: Synthetic oligonucleotide
  Antisense strand to SEQ ID NO: 1632375
cuuucaaagacacaggucu

SEQ ID NO: 1632377 - RNA, 19 nt, Artificial Sequence
  Description of Artificial Sequence: Synthetic oligonucleotide
  Sense strand starting at position 3857 of SEQ ID NO: 1560895
cucgaauucccugauggug

SEQ ID NO: 1632378 - RNA, 19 nt, Artificial Sequence
  Description of Artificial Sequence: Synthetic oligonucleotide
  Antisense strand to SEQ ID NO: 1632377
caccaucagggaauucgag

SEQ ID NO: 1632379 - RNA, 19 nt, Artificial Sequence
  Description of Artificial Sequence: Synthetic oligonucleotide
  Sense strand starting at position 3885 of SEQ ID NO: 1560895
gucguccuugaguugcaau

SEQ ID NO: 1632380 - RNA, 19 nt, Artificial Sequence
  Description of Artificial Sequence: Synthetic oligonucleotide
  Antisense strand to SEQ ID NO: 1632379
auugcaacucaaggacgac

SEQ ID NO: 1632381 - RNA, 19 nt, Artificial Sequence
  Description of Artificial Sequence: Synthetic oligonucleotide
  Sense strand starting at position 17 of SEQ ID NO: 1560896
cugggcuguucugugagaa

SEQ ID NO: 1632382 - RNA, 19 nt, Artificial Sequence
  Description of Artificial Sequence: Synthetic oligonucleotide
  Antisense strand to SEQ ID NO: 1632381
uucucacagaacagcccag

SEQ ID NO: 1632383 - RNA, 19 nt, Artificial Sequence
  Description of Artificial Sequence: Synthetic oligonucleotide
  Sense strand starting at position 18 of SEQ ID NO: 1560896
ugggcuguucugugagaaa

SEQ ID NO: 1632384 - RNA, 19 nt, Artificial Sequence
  Description of Artificial Sequence: Synthetic oligonucleotide
  Antisense strand to SEQ ID NO: 1632383
uuucucacagaacagccca

SEQ ID NO: 1632385 - RNA, 19 nt, Artificial Sequence
  Description of Artificial Sequence: Synthetic oligonucleotide
  Sense strand starting at position 248 of SEQ ID NO: 1560896
ccgccuuugcuugcucaua

SEQ ID NO: 1632386 - RNA, 19 nt, Artificial Sequence
  Description of Artificial Sequence: Synthetic oligonucleotide
  Antisense strand to SEQ ID NO: 1632385
uaugagcaagcaaaggcgg

SEQ ID NO: 1632387 - RNA, 19 nt, Artificial Sequence
  Description of Artificial Sequence: Synthetic oligonucleotide
  Sense strand starting at position 740 of SEQ ID NO: 1560896
accugucuguacugucauu

SEQ ID NO: 1632388 - RNA, 19 nt, Artificial Sequence
  Description of Artificial Sequence: Synthetic oligonucleotide
  Antisense strand to SEQ ID NO: 1632387
aaugacaguacagacaggu

SEQ ID NO: 1632389 - RNA, 19 nt, Artificial Sequence
  Description of Artificial Sequence: Synthetic oligonucleotide
  Sense strand starting at position 745 of SEQ ID NO: 1560896
ucuguacugucauugguga

SEQ ID NO: 1632390 - RNA, 19 nt, Artificial Sequence
  Description of Artificial Sequence: Synthetic oligonucleotide
  Antisense strand to SEQ ID NO: 1632389
ucaccaaugacaguacaga

SEQ ID NO: 1632391 - RNA, 19 nt, Artificial Sequence
  Description of Artificial Sequence: Synthetic oligonucleotide
  Sense strand starting at position 747 of SEQ ID NO: 1560896
uguacugucauuggugaca

SEQ ID NO: 1632392 - RNA, 19 nt, Artificial Sequence
  Description of Artificial Sequence: Synthetic oligonucleotide
  Antisense strand to SEQ ID NO: 1632391
ugucaccaaugacaguaca

SEQ ID NO: 1632393 - RNA, 19 nt, Artificial Sequence
  Description of Artificial Sequence: Synthetic oligonucleotide
  Sense strand starting at position 763 of SEQ ID NO: 1560896
acaggucugucuucuccaa

SEQ ID NO: 1632394 - RNA, 19 nt, Artificial Sequence
  Description of Artificial Sequence: Synthetic oligonucleotide
  Antisense strand to SEQ ID NO: 1632393
uuggagaagacagaccugu

SEQ ID NO: 1632395 - RNA, 19 nt, Artificial Sequence
  Description of Artificial Sequence: Synthetic oligonucleotide
  Sense strand starting at position 765 of SEQ ID NO: 1560896
aggucugucuucuccaaua

SEQ ID NO: 1632396 - RNA, 19 nt, Artificial Sequence
  Description of Artificial Sequence: Synthetic oligonucleotide
  Antisense strand to SEQ ID NO: 1632395
uauuggagaagacagaccu

SEQ ID NO: 1632397 - RNA, 19 nt, Artificial Sequence
  Description of Artificial Sequence: Synthetic oligonucleotide
  Sense strand starting at position 767 of SEQ ID NO: 1560896
gucugucuucuccaauaaa

SEQ ID NO: 1632398 - RNA, 19 nt, Artificial Sequence
  Description of Artificial Sequence: Synthetic oligonucleotide
  Antisense strand to SEQ ID NO: 1632397
uuuauuggagaagacagac

SEQ ID NO: 1632399 - RNA, 19 nt, Artificial Sequence
  Description of Artificial Sequence: Synthetic oligonucleotide
  Sense strand starting at position 862 of SEQ ID NO: 1560896
gauacauguugguggagga

SEQ ID NO: 1632400 - RNA, 19 nt, Artificial Sequence
  Description of Artificial Sequence: Synthetic oligonucleotide
  Antisense strand to SEQ ID NO: 1632399
uccuccaccaacauguauc

SEQ ID NO: 1632401 - RNA, 19 nt, Artificial Sequence
  Description of Artificial Sequence: Synthetic oligonucleotide
  Sense strand starting at position 989 of SEQ ID NO: 1560896
ggcugagugcuugccaugu

SEQ ID NO: 1632402 - RNA, 19 nt, Artificial Sequence
  Description of Artificial Sequence: Synthetic oligonucleotide
  Antisense strand to SEQ ID NO: 1632401
acauggcaagcacucagcc

SEQ ID NO: 1632403 - RNA, 19 nt, Artificial Sequence
  Description of Artificial Sequence: Synthetic oligonucleotide
  Sense strand starting at position 993 of SEQ ID NO: 1560896
gagugcuugccauguucca

SEQ ID NO: 1632404 - RNA, 19 nt, Artificial Sequence
  Description of Artificial Sequence: Synthetic oligonucleotide
  Antisense strand to SEQ ID NO: 1632403
uggaacauggcaagcacuc

SEQ ID NO: 1632405 - RNA, 19 nt, Artificial Sequence
  Description of Artificial Sequence: Synthetic oligonucleotide
  Sense strand starting at position 1021 of SEQ ID NO: 1560896
cuaagcaugcuacauguau

SEQ ID NO: 1632406 - RNA, 19 nt, Artificial Sequence
  Description of Artificial Sequence: Synthetic oligonucleotide
  Antisense strand to SEQ ID NO: 1632405
auacauguagcaugcuuag

SEQ ID NO: 1632407 - RNA, 19 nt, Artificial Sequence
  Description of Artificial Sequence: Synthetic oligonucleotide
  Sense strand starting at position 1072 of SEQ ID NO: 1560896
agugauagccaucaccaua

SEQ ID NO: 1632408 - RNA, 19 nt, Artificial Sequence
  Description of Artificial Sequence: Synthetic oligonucleotide
  Antisense strand to SEQ ID NO: 1632407
uauggugauggcuaucacu

SEQ ID NO: 1632409 - RNA, 19 nt, Artificial Sequence
  Description of Artificial Sequence: Synthetic oligonucleotide
  Sense strand starting at position 1174 of SEQ ID NO: 1560896
acugacauuugguggagaa

SEQ ID NO: 1632410 - RNA, 19 nt, Artificial Sequence
  Description of Artificial Sequence: Synthetic oligonucleotide
  Antisense strand to SEQ ID NO: 1632409
uucuccaccaaaugucagu

SEQ ID NO: 1632411 - RNA, 19 nt, Artificial Sequence
  Description of Artificial Sequence: Synthetic oligonucleotide
  Sense strand starting at position 1238 of SEQ ID NO: 1560896
agugauacgugccgugaag

SEQ ID NO: 1632412 - RNA, 19 nt, Artificial Sequence
  Description of Artificial Sequence: Synthetic oligonucleotide
  Antisense strand to SEQ ID NO: 1632411
cuucacggcacguaucacu

SEQ ID NO: 1632413 - RNA, 19 nt, Artificial Sequence
  Description of Artificial Sequence: Synthetic oligonucleotide
  Sense strand starting at position 1240 of SEQ ID NO: 1560896
ugauacgugccgugaagaa

SEQ ID NO: 1632414 - RNA, 19 nt, Artificial Sequence
  Description of Artificial Sequence: Synthetic oligonucleotide
  Antisense strand to SEQ ID NO: 1632413
uucuucacggcacguauca

SEQ ID NO: 1632415 - RNA, 19 nt, Artificial Sequence
  Description of Artificial Sequence: Synthetic oligonucleotide
  Sense strand starting at position 1291 of SEQ ID NO: 1560896
caggaucagugccaguuua

SEQ ID NO: 1632416 - RNA, 19 nt, Artificial Sequence
  Description of Artificial Sequence: Synthetic oligonucleotide
  Antisense strand to SEQ ID NO: 1632415
uaaacuggcacugauccug

SEQ ID NO: 1632417 - RNA, 19 nt, Artificial Sequence
  Description of Artificial Sequence: Synthetic oligonucleotide
  Sense strand starting at position 1342 of SEQ ID NO: 1560896
ggugacaucugaggugaau

SEQ ID NO: 1632418 - RNA, 19 nt, Artificial Sequence
  Description of Artificial Sequence: Synthetic oligonucleotide
  Antisense strand to SEQ ID NO: 1632417
auucaccucagaugucacc

SEQ ID NO: 1632419 - RNA, 19 nt, Artificial Sequence
  Description of Artificial Sequence: Synthetic oligonucleotide
  Sense strand starting at position 1691 of SEQ ID NO: 1560896
agagaagauguuggaaguu

SEQ ID NO: 1632420 - RNA, 19 nt, Artificial Sequence
  Description of Artificial Sequence: Synthetic oligonucleotide
  Antisense strand to SEQ ID NO: 1632419
aacuuccaacaucuucucu

SEQ ID NO: 1632421 - RNA, 19 nt, Artificial Sequence
  Description of Artificial Sequence: Synthetic oligonucleotide
  Sense strand starting at position 1712 of SEQ ID NO: 1560896
ggugccugauguggaaaga

SEQ ID NO: 1632422 - RNA, 19 nt, Artificial Sequence
  Description of Artificial Sequence: Synthetic oligonucleotide
  Antisense strand to SEQ ID NO: 1632421
ucuuuccacaucaggcacc

SEQ ID NO: 1632423 - RNA, 19 nt, Artificial Sequence
  Description of Artificial Sequence: Synthetic oligonucleotide
  Sense strand starting at position 1781 of SEQ ID NO: 1560896
gggaguugcuagaguacag

SEQ ID NO: 1632424 - RNA, 19 nt, Artificial Sequence
  Description of Artificial Sequence: Synthetic oligonucleotide
  Antisense strand to SEQ ID NO: 1632423
cuguacucuagcaacuccc

SEQ ID NO: 1632425 - RNA, 19 nt, Artificial Sequence
  Description of Artificial Sequence: Synthetic oligonucleotide
  Sense strand starting at position 2338 of SEQ ID NO: 1560896
gagagagggcuuugccgau

SEQ ID NO: 1632426 - RNA, 19 nt, Artificial Sequence
  Description of Artificial Sequence: Synthetic oligonucleotide
  Antisense strand to SEQ ID NO: 1632425
aucggcaaagcccucucuc

SEQ ID NO: 1632427 - RNA, 19 nt, Artificial Sequence
  Description of Artificial Sequence: Synthetic oligonucleotide
  Sense strand starting at position 2344 of SEQ ID NO: 1560896
gggcuuugccgaugccuga

SEQ ID NO: 1632428 - RNA, 19 nt, Artificial Sequence
  Description of Artificial Sequence: Synthetic oligonucleotide
  Antisense strand to SEQ ID NO: 1632427
ucaggcaucggcaaagccc

SEQ ID NO: 1632429 - RNA, 19 nt, Artificial Sequence
  Description of Artificial Sequence: Synthetic oligonucleotide
  Sense strand starting at position 2645 of SEQ ID NO: 1560896
caauaagucgccggccaaa

SEQ ID NO: 1632430 - RNA, 19 nt, Artificial Sequence
  Description of Artificial Sequence: Synthetic oligonucleotide
  Antisense strand to SEQ ID NO: 1632429
uuuggccggcgacuuauug

SEQ ID NO: 1632431 - RNA, 19 nt, Artificial Sequence
  Description of Artificial Sequence: Synthetic oligonucleotide
  Sense strand starting at position 3293 of SEQ ID NO: 1560896
agggcacuucuacacauau

SEQ ID NO: 1632432 - RNA, 19 nt, Artificial Sequence
  Description of Artificial Sequence: Synthetic oligonucleotide
  Antisense strand to SEQ ID NO: 1632431
auauguguagaagugcccu

SEQ ID NO: 1632433 - RNA, 19 nt, Artificial Sequence
  Description of Artificial Sequence: Synthetic oligonucleotide
  Sense strand starting at position 3472 of SEQ ID NO: 1560896
acuggcaguucucauauau

SEQ ID NO: 1632434 - RNA, 19 nt, Artificial Sequence
  Description of Artificial Sequence: Synthetic oligonucleotide
  Antisense strand to SEQ ID NO: 1632433
auauaugagaacugccagu

SEQ ID NO: 1632435 - RNA, 19 nt, Artificial Sequence
  Description of Artificial Sequence: Synthetic oligonucleotide
  Sense strand starting at position 3482 of SEQ ID NO: 1560896
cucauauaugcacacgaga

SEQ ID NO: 1632436 - RNA, 19 nt, Artificial Sequence
  Description of Artificial Sequence: Synthetic oligonucleotide
  Antisense strand to SEQ ID NO: 1632435
ucucgugugcauauaugag

SEQ ID NO: 1632437 - RNA, 19 nt, Artificial Sequence
  Description of Artificial Sequence: Synthetic oligonucleotide
  Sense strand starting at position 3528 of SEQ ID NO: 1560896
cacaacaucccguaucgua

SEQ ID NO: 1632438 - RNA, 19 nt, Artificial Sequence
  Description of Artificial Sequence: Synthetic oligonucleotide
  Antisense strand to SEQ ID NO: 1632437
uacgauacgggauguugug

SEQ ID NO: 1632439 - RNA, 19 nt, Artificial Sequence
  Description of Artificial Sequence: Synthetic oligonucleotide
  Sense strand starting at position 3610 of SEQ ID NO: 1560896
gagggucuucccgacagca

SEQ ID NO: 1632440 - RNA, 19 nt, Artificial Sequence
  Description of Artificial Sequence: Synthetic oligonucleotide
  Antisense strand to SEQ ID NO: 1632439
ugcugucgggaagacccuc

SEQ ID NO: 1632441 - RNA, 19 nt, Artificial Sequence
  Description of Artificial Sequence: Synthetic oligonucleotide
  Sense strand starting at position 3646 of SEQ ID NO: 1560896
acuggagccuugucucaaa

SEQ ID NO: 1632442 - RNA, 19 nt, Artificial Sequence
  Description of Artificial Sequence: Synthetic oligonucleotide
  Antisense strand to SEQ ID NO: 1632441
uuugagacaaggcuccagu

SEQ ID NO: 1632443 - RNA, 19 nt, Artificial Sequence
  Description of Artificial Sequence: Synthetic oligonucleotide
  Sense strand starting at position 3664 of SEQ ID NO: 1560896
agcgacauuuacgcaguaa

SEQ ID NO: 1632444 - RNA, 19 nt, Artificial Sequence
  Description of Artificial Sequence: Synthetic oligonucleotide
  Antisense strand to SEQ ID NO: 1632443
uuacugcguaaaugucgcu

SEQ ID NO: 1632445 - RNA, 19 nt, Artificial Sequence
  Description of Artificial Sequence: Synthetic oligonucleotide
  Sense strand starting at position 3665 of SEQ ID NO: 1560896
gcgacauuuacgcaguaag

SEQ ID NO: 1632446 - RNA, 19 nt, Artificial Sequence
  Description of Artificial Sequence: Synthetic oligonucleotide
  Antisense strand to SEQ ID NO: 1632445
cuuacugcguaaaugucgc

SEQ ID NO: 1632447 - RNA, 19 nt, Artificial Sequence
  Description of Artificial Sequence: Synthetic oligonucleotide
  Sense strand starting at position 3668 of SEQ ID NO: 1560896
acauuuacgcaguaagcuu

SEQ ID NO: 1632448 - RNA, 19 nt, Artificial Sequence
  Description of Artificial Sequence: Synthetic oligonucleotide
  Antisense strand to SEQ ID NO: 1632447
aagcuuacugcguaaaugu

SEQ ID NO: 1632449 - RNA, 19 nt, Artificial Sequence
  Description of Artificial Sequence: Synthetic oligonucleotide
  Sense strand starting at position 3924 of SEQ ID NO: 1560896
guauacgcucccugagaga

SEQ ID NO: 1632450 - RNA, 19 nt, Artificial Sequence
  Description of Artificial Sequence: Synthetic oligonucleotide
  Antisense strand to SEQ ID NO: 1632449
ucucucagggagcguauac

SEQ ID NO: 1632451 - RNA, 19 nt, Artificial Sequence
  Description of Artificial Sequence: Synthetic oligonucleotide
  Sense strand starting at position 3929 of SEQ ID NO: 1560896
cgcucccugagagaugaaa

SEQ ID NO: 1632452 - RNA, 19 nt, Artificial Sequence
  Description of Artificial Sequence: Synthetic oligonucleotide
  Antisense strand to SEQ ID NO: 1632451
uuucaucucucagggagcg

SEQ ID NO: 1632453 - RNA, 19 nt, Artificial Sequence
  Description of Artificial Sequence: Synthetic oligonucleotide
  Sense strand starting at position 252 of SEQ ID NO: 1560897
cagcgaguacuguaggaca

SEQ ID NO: 1632454 - RNA, 19 nt, Artificial Sequence
  Description of Artificial Sequence: Synthetic oligonucleotide
  Antisense strand to SEQ ID NO: 1632453
uguccuacaguacucgcug

SEQ ID NO: 1632455 - RNA, 19 nt, Artificial Sequence
  Description of Artificial Sequence: Synthetic oligonucleotide
  Sense strand starting at position 602 of SEQ ID NO: 1560897
gagggcgucuacucacaaa

SEQ ID NO: 1632456 - RNA, 19 nt, Artificial Sequence
  Description of Artificial Sequence: Synthetic oligonucleotide
  Antisense strand to SEQ ID NO: 1632455
uuugugaguagacgcccuc

SEQ ID NO: 1632457 - RNA, 19 nt, Artificial Sequence
  Description of Artificial Sequence: Synthetic oligonucleotide
  Sense strand starting at position 850 of SEQ ID NO: 1560897
gaucuuagccuuuagaguc

SEQ ID NO: 1632458 - RNA, 19 nt, Artificial Sequence
  Description of Artificial Sequence: Synthetic oligonucleotide
  Antisense strand to SEQ ID NO: 1632457
gacucuaaaggcuaagauc

SEQ ID NO: 1632459 - RNA, 19 nt, Artificial Sequence
  Description of Artificial Sequence: Synthetic oligonucleotide
  Sense strand starting at position 879 of SEQ ID NO: 1560897
agauuugaguucuaacucu

SEQ ID NO: 1632460 - RNA, 19 nt, Artificial Sequence
  Description of Artificial Sequence: Synthetic oligonucleotide
  Antisense strand to SEQ ID NO: 1632459
agaguuagaacucaaaucu

SEQ ID NO: 1632461 - RNA, 19 nt, Artificial Sequence
  Description of Artificial Sequence: Synthetic oligonucleotide
  Sense strand starting at position 957 of SEQ ID NO: 1560897
uuaaguaacuugcaucaga

SEQ ID NO: 1632462 - RNA, 19 nt, Artificial Sequence
  Description of Artificial Sequence: Synthetic oligonucleotide
  Antisense strand to SEQ ID NO: 1632461
ucugaugcaaguuacuuaa

SEQ ID NO: 1632463 - RNA, 19 nt, Artificial Sequence
  Description of Artificial Sequence: Synthetic oligonucleotide
  Sense strand starting at position 1322 of SEQ ID NO: 1560897
agauuccagucuuaacugu

SEQ ID NO: 1632464 - RNA, 19 nt, Artificial Sequence
  Description of Artificial Sequence: Synthetic oligonucleotide
  Antisense strand to SEQ ID NO: 1632463
acaguuaagacuggaaucu

SEQ ID NO: 1632465 - RNA, 19 nt, Artificial Sequence
  Description of Artificial Sequence: Synthetic oligonucleotide
  Sense strand starting at position 1343 of SEQ ID NO: 1560897
ggcuuaggcgacuaucuau

SEQ ID NO: 1632466 - RNA, 19 nt, Artificial Sequence
  Description of Artificial Sequence: Synthetic oligonucleotide
  Antisense strand to SEQ ID NO: 1632465
auagauagucgccuaagcc

SEQ ID NO: 1632467 - RNA, 19 nt, Artificial Sequence
  Description of Artificial Sequence: Synthetic oligonucleotide
  Sense strand starting at position 1350 of SEQ ID NO: 1560897
gcgacuaucuaucucccaa

SEQ ID NO: 1632468 - RNA, 19 nt, Artificial Sequence
  Description of Artificial Sequence: Synthetic oligonucleotide
  Antisense strand to SEQ ID NO: 1632467
uugggagauagauagucgc

SEQ ID NO: 1632469 - RNA, 19 nt, Artificial Sequence
  Description of Artificial Sequence: Synthetic oligonucleotide
  Sense strand starting at position 2251 of SEQ ID NO: 1560897
agggaaugacuguggcaau

SEQ ID NO: 1632470 - RNA, 19 nt, Artificial Sequence
  Description of Artificial Sequence: Synthetic oligonucleotide
  Antisense strand to SEQ ID NO: 1632469
auugccacagucauucccu

SEQ ID NO: 1632471 - RNA, 19 nt, Artificial Sequence
  Description of Artificial Sequence: Synthetic oligonucleotide
  Sense strand starting at position 2252 of SEQ ID NO: 1560897
gggaaugacuguggcaauc

SEQ ID NO: 1632472 - RNA, 19 nt, Artificial Sequence
  Description of Artificial Sequence: Synthetic oligonucleotide
  Antisense strand to SEQ ID NO: 1632471
gauugccacagucauuccc

SEQ ID NO: 1632473 - RNA, 19 nt, Artificial Sequence
  Description of Artificial Sequence: Synthetic oligonucleotide
  Sense strand starting at position 2254 of SEQ ID NO: 1560897
gaaugacuguggcaaucau

SEQ ID NO: 1632474 - RNA, 19 nt, Artificial Sequence
  Description of Artificial Sequence: Synthetic oligonucleotide
  Antisense strand to SEQ ID NO: 1632473
augauugccacagucauuc

SEQ ID NO: 1632475 - RNA, 19 nt, Artificial Sequence
  Description of Artificial Sequence: Synthetic oligonucleotide
  Sense strand starting at position 2383 of SEQ ID NO: 1560897
ggcgggcguuucgugaaua

SEQ ID NO: 1632476 - RNA, 19 nt, Artificial Sequence
  Description of Artificial Sequence: Synthetic oligonucleotide
  Antisense strand to SEQ ID NO: 1632475
uauucacgaaacgcccgcc

SEQ ID NO: 1632477 - RNA, 19 nt, Artificial Sequence
  Description of Artificial Sequence: Synthetic oligonucleotide
  Sense strand starting at position 2385 of SEQ ID NO: 1560897
cgggcguuucgugaauaac

SEQ ID NO: 1632478 - RNA, 19 nt, Artificial Sequence
  Description of Artificial Sequence: Synthetic oligonucleotide
  Antisense strand to SEQ ID NO: 1632477
guuauucacgaaacgcccg

SEQ ID NO: 1632479 - RNA, 19 nt, Artificial Sequence
  Description of Artificial Sequence: Synthetic oligonucleotide
  Sense strand starting at position 2639 of SEQ ID NO: 1560897
guaacuuugucucugucau

SEQ ID NO: 1632480 - RNA, 19 nt, Artificial Sequence
  Description of Artificial Sequence: Synthetic oligonucleotide
  Antisense strand to SEQ ID NO: 1632479
augacagagacaaaguuac

SEQ ID NO: 1632481 - RNA, 19 nt, Artificial Sequence
  Description of Artificial Sequence: Synthetic oligonucleotide
  Sense strand starting at position 2652 of SEQ ID NO: 1560897
ugucaucaguugucucuuu

SEQ ID NO: 1632482 - RNA, 19 nt, Artificial Sequence
  Description of Artificial Sequence: Synthetic oligonucleotide
  Antisense strand to SEQ ID NO: 1632481
aaagagacaacugaugaca

SEQ ID NO: 1632483 - RNA, 19 nt, Artificial Sequence
  Description of Artificial Sequence: Synthetic oligonucleotide
  Sense strand starting at position 2875 of SEQ ID NO: 1560897
cugucugacucucuguauu

SEQ ID NO: 1632484 - RNA, 19 nt, Artificial Sequence
  Description of Artificial Sequence: Synthetic oligonucleotide
  Antisense strand to SEQ ID NO: 1632483
aauacagagagucagacag

SEQ ID NO: 1632485 - RNA, 19 nt, Artificial Sequence
  Description of Artificial Sequence: Synthetic oligonucleotide
  Sense strand starting at position 2877 of SEQ ID NO: 1560897
gucugacucucuguauucu

SEQ ID NO: 1632486 - RNA, 19 nt, Artificial Sequence
  Description of Artificial Sequence: Synthetic oligonucleotide
  Antisense strand to SEQ ID NO: 1632485
agaauacagagagucagac

SEQ ID NO: 1632487 - RNA, 19 nt, Artificial Sequence
  Description of Artificial Sequence: Synthetic oligonucleotide
  Sense strand starting at position 2901 of SEQ ID NO: 1560897
cccucucugugacuuauga

SEQ ID NO: 1632488 - RNA, 19 nt, Artificial Sequence
  Description of Artificial Sequence: Synthetic oligonucleotide
  Antisense strand to SEQ ID NO: 1632487
ucauaagucacagagaggg

SEQ ID NO: 1632489 - RNA, 19 nt, Artificial Sequence
  Description of Artificial Sequence: Synthetic oligonucleotide
  Sense strand starting at position 3080 of SEQ ID NO: 1560897
cgaguuacucgggagcuca

SEQ ID NO: 1632490 - RNA, 19 nt, Artificial Sequence
  Description of Artificial Sequence: Synthetic oligonucleotide
  Antisense strand to SEQ ID NO: 1632489
ugagcucccgaguaacucg

SEQ ID NO: 1632491 - RNA, 19 nt, Artificial Sequence
  Description of Artificial Sequence: Synthetic oligonucleotide
  Sense strand starting at position 3200 of SEQ ID NO: 1560897
ggcucuaugugaguuucuu

SEQ ID NO: 1632492 - RNA, 19 nt, Artificial Sequence
  Description of Artificial Sequence: Synthetic oligonucleotide
  Antisense strand to SEQ ID NO: 1632491
aagaaacucacauagagcc

SEQ ID NO: 1632493 - RNA, 19 nt, Artificial Sequence
  Description of Artificial Sequence: Synthetic oligonucleotide
  Sense strand starting at position 3204 of SEQ ID NO: 1560897
cuaugugaguuucuuugua

SEQ ID NO: 1632494 - RNA, 19 nt, Artificial Sequence
  Description of Artificial Sequence: Synthetic oligonucleotide
  Antisense strand to SEQ ID NO: 1632493
uacaaagaaacucacauag

SEQ ID NO: 1632495 - RNA, 19 nt, Artificial Sequence
  Description of Artificial Sequence: Synthetic oligonucleotide
  Sense strand starting at position 3228 of SEQ ID NO: 1560897
gggaaaugacugcaugguu

SEQ ID NO: 1632496 - RNA, 19 nt, Artificial Sequence
  Description of Artificial Sequence: Synthetic oligonucleotide
  Antisense strand to SEQ ID NO: 1632495
aaccaugcagucauuuccc

SEQ ID NO: 1632497 - RNA, 19 nt, Artificial Sequence
  Description of Artificial Sequence: Synthetic oligonucleotide
  Sense strand starting at position 3260 of SEQ ID NO: 1560897
ccguccucgugugauuuga

SEQ ID NO: 1632498 - RNA, 19 nt, Artificial Sequence
  Description of Artificial Sequence: Synthetic oligonucleotide
  Antisense strand to SEQ ID NO: 1632497
ucaaaucacacgaggacgg

SEQ ID NO: 1632499 - RNA, 19 nt, Artificial Sequence
  Description of Artificial Sequence: Synthetic oligonucleotide
  Sense strand starting at position 3262 of SEQ ID NO: 1560897
guccucgugugauuugacu

SEQ ID NO: 1632500 - RNA, 19 nt, Artificial Sequence
  Description of Artificial Sequence: Synthetic oligonucleotide
  Antisense strand to SEQ ID NO: 1632499
agucaaaucacacgaggac

SEQ ID NO: 1632501 - RNA, 19 nt, Artificial Sequence
  Description of Artificial Sequence: Synthetic oligonucleotide
  Sense strand starting at position 3269 of SEQ ID NO: 1560897
ugugauuugacuuguguga

SEQ ID NO: 1632502 - RNA, 19 nt, Artificial Sequence
  Description of Artificial Sequence: Synthetic oligonucleotide
  Antisense strand to SEQ ID NO: 1632501
ucacacaagucaaaucaca

SEQ ID NO: 1632503 - RNA, 19 nt, Artificial Sequence
  Description of Artificial Sequence: Synthetic oligonucleotide
  Sense strand starting at position 3271 of SEQ ID NO: 1560897
ugauuugacuugugugaaa

SEQ ID NO: 1632504 - RNA, 19 nt, Artificial Sequence
  Description of Artificial Sequence: Synthetic oligonucleotide
  Antisense strand to SEQ ID NO: 1632503
uuucacacaagucaaauca

SEQ ID NO: 1632505 - RNA, 19 nt, Artificial Sequence
  Description of Artificial Sequence: Synthetic oligonucleotide
  Sense strand starting at position 3340 of SEQ ID NO: 1560897
uagguuuccgggugucaac

SEQ ID NO: 1632506 - RNA, 19 nt, Artificial Sequence
  Description of Artificial Sequence: Synthetic oligonucleotide
  Antisense strand to SEQ ID NO: 1632505
guugacacccggaaaccua

SEQ ID NO: 1632507 - RNA, 19 nt, Artificial Sequence
  Description of Artificial Sequence: Synthetic oligonucleotide
  Sense strand starting at position 3381 of SEQ ID NO: 1560897
gugcacuacugugugauca

SEQ ID NO: 1632508 - RNA, 19 nt, Artificial Sequence
  Description of Artificial Sequence: Synthetic oligonucleotide
  Antisense strand to SEQ ID NO: 1632507
ugaucacacaguagugcac

SEQ ID NO: 1632509 - RNA, 19 nt, Artificial Sequence
  Description of Artificial Sequence: Synthetic oligonucleotide
  Sense strand starting at position 3385 of SEQ ID NO: 1560897
acuacugugugaucacaag

SEQ ID NO: 1632510 - RNA, 19 nt, Artificial Sequence
  Description of Artificial Sequence: Synthetic oligonucleotide
  Antisense strand to SEQ ID NO: 1632509
cuugugaucacacaguagu

SEQ ID NO: 1632511 - RNA, 19 nt, Artificial Sequence
  Description of Artificial Sequence: Synthetic oligonucleotide
  Sense strand starting at position 3484 of SEQ ID NO: 1560897
gugaccauauuuggaacau

SEQ ID NO: 1632512 - RNA, 19 nt, Artificial Sequence
  Description of Artificial Sequence: Synthetic oligonucleotide
  Antisense strand to SEQ ID NO: 1632511
auguuccaaauauggucac

SEQ ID NO: 1632513 - RNA, 19 nt, Artificial Sequence
  Description of Artificial Sequence: Synthetic oligonucleotide
  Sense strand starting at position 3485 of SEQ ID NO: 1560897
ugaccauauuuggaacaua

SEQ ID NO: 1632514 - RNA, 19 nt, Artificial Sequence
  Description of Artificial Sequence: Synthetic oligonucleotide
  Antisense strand to SEQ ID NO: 1632513
uauguuccaaauaugguca

SEQ ID NO: 1632515 - RNA, 19 nt, Artificial Sequence
  Description of Artificial Sequence: Synthetic oligonucleotide
  Sense strand starting at position 3502 of SEQ ID NO: 1560897
uacaguuguugccugaaac

SEQ ID NO: 1632516 - RNA, 19 nt, Artificial Sequence
  Description of Artificial Sequence: Synthetic oligonucleotide
  Antisense strand to SEQ ID NO: 1632515
guuucaggcaacaacugua

SEQ ID NO: 1632517 - RNA, 19 nt, Artificial Sequence
  Description of Artificial Sequence: Synthetic oligonucleotide
  Sense strand starting at position 3503 of SEQ ID NO: 1560897
acaguuguugccugaaacu

SEQ ID NO: 1632518 - RNA, 19 nt, Artificial Sequence
  Description of Artificial Sequence: Synthetic oligonucleotide
  Antisense strand to SEQ ID NO: 1632517
aguuucaggcaacaacugu

SEQ ID NO: 1632519 - RNA, 19 nt, Artificial Sequence
  Description of Artificial Sequence: Synthetic oligonucleotide
  Sense strand starting at position 3605 of SEQ ID NO: 1560897
gaagucaagcuuuaugguu

SEQ ID NO: 1632520 - RNA, 19 nt, Artificial Sequence
  Description of Artificial Sequence: Synthetic oligonucleotide
  Antisense strand to SEQ ID NO: 1632519
aaccauaaagcuugacuuc

SEQ ID NO: 1632521 - RNA, 19 nt, Artificial Sequence
  Description of Artificial Sequence: Synthetic oligonucleotide
  Sense strand starting at position 3621 of SEQ ID NO: 1560897
guuauauauuaggauaggu

SEQ ID NO: 1632522 - RNA, 19 nt, Artificial Sequence
  Description of Artificial Sequence: Synthetic oligonucleotide
  Antisense strand to SEQ ID NO: 1632521
accuauccuaauauauaac

SEQ ID NO: 1632523 - RNA, 19 nt, Artificial Sequence
  Description of Artificial Sequence: Synthetic oligonucleotide
  Sense strand starting at position 3646 of SEQ ID NO: 1560897
ccaauaugacaauguuuag

SEQ ID NO: 1632524 - RNA, 19 nt, Artificial Sequence
  Description of Artificial Sequence: Synthetic oligonucleotide
  Antisense strand to SEQ ID NO: 1632523
cuaaacauugucauauugg

SEQ ID NO: 1632525 - RNA, 19 nt, Artificial Sequence
  Description of Artificial Sequence: Synthetic oligonucleotide
  Sense strand starting at position 3652 of SEQ ID NO: 1560897
ugacaauguuuagcacuaa

SEQ ID NO: 1632526 - RNA, 19 nt, Artificial Sequence
  Description of Artificial Sequence: Synthetic oligonucleotide
  Antisense strand to SEQ ID NO: 1632525
uuagugcuaaacauuguca

SEQ ID NO: 1632527 - RNA, 19 nt, Artificial Sequence
  Description of Artificial Sequence: Synthetic oligonucleotide
  Sense strand starting at position 3679 of SEQ ID NO: 1560897
uguuaaagcucugauuccu

SEQ ID NO: 1632528 - RNA, 19 nt, Artificial Sequence
  Description of Artificial Sequence: Synthetic oligonucleotide
  Antisense strand to SEQ ID NO: 1632527
aggaaucagagcuuuaaca

SEQ ID NO: 1632529 - RNA, 19 nt, Artificial Sequence
  Description of Artificial Sequence: Synthetic oligonucleotide
  Sense strand starting at position 3739 of SEQ ID NO: 1560897
uggugugcuuggcuucuua

SEQ ID NO: 1632530 - RNA, 19 nt, Artificial Sequence
  Description of Artificial Sequence: Synthetic oligonucleotide
  Antisense strand to SEQ ID NO: 1632529
uaagaagccaagcacacca

SEQ ID NO: 1632531 - RNA, 19 nt, Artificial Sequence
  Description of Artificial Sequence: Synthetic oligonucleotide
  Sense strand starting at position 3948 of SEQ ID NO: 1560897
gcuaucacuguacauauga

SEQ ID NO: 1632532 - RNA, 19 nt, Artificial Sequence
  Description of Artificial Sequence: Synthetic oligonucleotide
  Antisense strand to SEQ ID NO: 1632531
ucauauguacagugauagc

SEQ ID NO: 1632533 - RNA, 19 nt, Artificial Sequence
  Description of Artificial Sequence: Synthetic oligonucleotide
  Sense strand starting at position 252 of SEQ ID NO: 1560898
cagcgaguacuguaggaca

SEQ ID NO: 1632534 - RNA, 19 nt, Artificial Sequence
  Description of Artificial Sequence: Synthetic oligonucleotide
  Antisense strand to SEQ ID NO: 1632533
uguccuacaguacucgcug

SEQ ID NO: 1632535 - RNA, 19 nt, Artificial Sequence
  Description of Artificial Sequence: Synthetic oligonucleotide
  Sense strand starting at position 602 of SEQ ID NO: 1560898
gagggcgucuacucacaaa

SEQ ID NO: 1632536 - RNA, 19 nt, Artificial Sequence
  Description of Artificial Sequence: Synthetic oligonucleotide
  Antisense strand to SEQ ID NO: 1632535
uuugugaguagacgcccuc

SEQ ID NO: 1632537 - RNA, 19 nt, Artificial Sequence
  Description of Artificial Sequence: Synthetic oligonucleotide
  Sense strand starting at position 850 of SEQ ID NO: 1560898
gaucuuagccuuuagaguc

SEQ ID NO: 1632538 - RNA, 19 nt, Artificial Sequence
  Description of Artificial Sequence: Synthetic oligonucleotide
  Antisense strand to SEQ ID NO: 1632537
gacucuaaaggcuaagauc

SEQ ID NO: 1632539 - RNA, 19 nt, Artificial Sequence
  Description of Artificial Sequence: Synthetic oligonucleotide
  Sense strand starting at position 879 of SEQ ID NO: 1560898
agauuugaguucuaacucu

SEQ ID NO: 1632540 - RNA, 19 nt, Artificial Sequence
  Description of Artificial Sequence: Synthetic oligonucleotide
  Antisense strand to SEQ ID NO: 1632539
agaguuagaacucaaaucu

SEQ ID NO: 1632541 - RNA, 19 nt, Artificial Sequence
  Description of Artificial Sequence: Synthetic oligonucleotide
  Sense strand starting at position 957 of SEQ ID NO: 1560898
uuaaguaacuugcaucaga

SEQ ID NO: 1632542 - RNA, 19 nt, Artificial Sequence
  Description of Artificial Sequence: Synthetic oligonucleotide
  Antisense strand to SEQ ID NO: 1632541
ucugaugcaaguuacuuaa

SEQ ID NO: 1632543 - RNA, 19 nt, Artificial Sequence
  Description of Artificial Sequence: Synthetic oligonucleotide
  Sense strand starting at position 1322 of SEQ ID NO: 1560898
agauuccagucuuaacugu

SEQ ID NO: 1632544 - RNA, 19 nt, Artificial Sequence
  Description of Artificial Sequence: Synthetic oligonucleotide
  Antisense strand to SEQ ID NO: 1632543
acaguuaagacuggaaucu

SEQ ID NO: 1632545 - RNA, 19 nt, Artificial Sequence
  Description of Artificial Sequence: Synthetic oligonucleotide
  Sense strand starting at position 1343 of SEQ ID NO: 1560898
ggcuuaggcgacuaucuau

SEQ ID NO: 1632546 - RNA, 19 nt, Artificial Sequence
  Description of Artificial Sequence: Synthetic oligonucleotide
  Antisense strand to SEQ ID NO: 1632545
auagauagucgccuaagcc

SEQ ID NO: 1632547 - RNA, 19 nt, Artificial Sequence
  Description of Artificial Sequence: Synthetic oligonucleotide
  Sense strand starting at position 1350 of SEQ ID NO: 1560898
gcgacuaucuaucucccaa

SEQ ID NO: 1632548 - RNA, 19 nt, Artificial Sequence
  Description of Artificial Sequence: Synthetic oligonucleotide
  Antisense strand to SEQ ID NO: 1632547
uugggagauagauagucgc

SEQ ID NO: 1632549 - RNA, 19 nt, Artificial Sequence
  Description of Artificial Sequence: Synthetic oligonucleotide
  Sense strand starting at position 2251 of SEQ ID NO: 1560898
agggaaugacuguggcaau

SEQ ID NO: 1632550 - RNA, 19 nt, Artificial Sequence
  Description of Artificial Sequence: Synthetic oligonucleotide
  Antisense strand to SEQ ID NO: 1632549
auugccacagucauucccu

SEQ ID NO: 1632551 - RNA, 19 nt, Artificial Sequence
  Description of Artificial Sequence: Synthetic oligonucleotide
  Sense strand starting at position 2252 of SEQ ID NO: 1560898
gggaaugacuguggcaauc

SEQ ID NO: 1632552 - RNA, 19 nt, Artificial Sequence
  Description of Artificial Sequence: Synthetic oligonucleotide
  Antisense strand to SEQ ID NO: 1632551
gauugccacagucauuccc

SEQ ID NO: 1632553 - RNA, 19 nt, Artificial Sequence
  Description of Artificial Sequence: Synthetic oligonucleotide
  Sense strand starting at position 2254 of SEQ ID NO: 1560898
gaaugacuguggcaaucau

SEQ ID NO: 1632554 - RNA, 19 nt, Artificial Sequence
  Description of Artificial Sequence: Synthetic oligonucleotide
  Antisense strand to SEQ ID NO: 1632553
augauugccacagucauuc

SEQ ID NO: 1632555 - RNA, 19 nt, Artificial Sequence
  Description of Artificial Sequence: Synthetic oligonucleotide
  Sense strand starting at position 2383 of SEQ ID NO: 1560898
ggcgggcguuucgugaaua

SEQ ID NO: 1632556 - RNA, 19 nt, Artificial Sequence
  Description of Artificial Sequence: Synthetic oligonucleotide
  Antisense strand to SEQ ID NO: 1632555
uauucacgaaacgcccgcc

SEQ ID NO: 1632557 - RNA, 19 nt, Artificial Sequence
  Description of Artificial Sequence: Synthetic oligonucleotide
  Sense strand starting at position 2385 of SEQ ID NO: 1560898
cgggcguuucgugaauaac

SEQ ID NO: 1632558 - RNA, 19 nt, Artificial Sequence
  Description of Artificial Sequence: Synthetic oligonucleotide
  Antisense strand to SEQ ID NO: 1632557
guuauucacgaaacgcccg

SEQ ID NO: 1632559 - RNA, 19 nt, Artificial Sequence
  Description of Artificial Sequence: Synthetic oligonucleotide
  Sense strand starting at position 2639 of SEQ ID NO: 1560898
guaacuuugucucugucau

SEQ ID NO: 1632560 - RNA, 19 nt, Artificial Sequence
  Description of Artificial Sequence: Synthetic oligonucleotide
  Antisense strand to SEQ ID NO: 1632559
augacagagacaaaguuac

SEQ ID NO: 1632561 - RNA, 19 nt, Artificial Sequence
  Description of Artificial Sequence: Synthetic oligonucleotide
  Sense strand starting at position 2652 of SEQ ID NO: 1560898
ugucaucaguugucucuuu

SEQ ID NO: 1632562 - RNA, 19 nt, Artificial Sequence
  Description of Artificial Sequence: Synthetic oligonucleotide
  Antisense strand to SEQ ID NO: 1632561
aaagagacaacugaugaca

SEQ ID NO: 1632563 - RNA, 19 nt, Artificial Sequence
  Description of Artificial Sequence: Synthetic oligonucleotide
  Sense strand starting at position 2875 of SEQ ID NO: 1560898
cugucugacucucuguauu

SEQ ID NO: 1632564 - RNA, 19 nt, Artificial Sequence
  Description of Artificial Sequence: Synthetic oligonucleotide
  Antisense strand to SEQ ID NO: 1632563
aauacagagagucagacag

SEQ ID NO: 1632565 - RNA, 19 nt, Artificial Sequence
  Description of Artificial Sequence: Synthetic oligonucleotide
  Sense strand starting at position 2877 of SEQ ID NO: 1560898
gucugacucucuguauucu

SEQ ID NO: 1632566 - RNA, 19 nt, Artificial Sequence
  Description of Artificial Sequence: Synthetic oligonucleotide
  Antisense strand to SEQ ID NO: 1632565
agaauacagagagucagac

SEQ ID NO: 1632567 - RNA, 19 nt, Artificial Sequence
  Description of Artificial Sequence: Synthetic oligonucleotide
  Sense strand starting at position 2901 of SEQ ID NO: 1560898
cccucucugugacuuauga

SEQ ID NO: 1632568 - RNA, 19 nt, Artificial Sequence
  Description of Artificial Sequence: Synthetic oligonucleotide
  Antisense strand to SEQ ID NO: 1632567
ucauaagucacagagaggg

SEQ ID NO: 1632569 - RNA, 19 nt, Artificial Sequence
  Description of Artificial Sequence: Synthetic oligonucleotide
  Sense strand starting at position 3080 of SEQ ID NO: 1560898
cgaguuacucgggagcuca

SEQ ID NO: 1632570 - RNA, 19 nt, Artificial Sequence
  Description of Artificial Sequence: Synthetic oligonucleotide
  Antisense strand to SEQ ID NO: 1632569
ugagcucccgaguaacucg

SEQ ID NO: 1632571 - RNA, 19 nt, Artificial Sequence
  Description of Artificial Sequence: Synthetic oligonucleotide
  Sense strand starting at position 3200 of SEQ ID NO: 1560898
ggcucuaugugaguuucuu

SEQ ID NO: 1632572 - RNA, 19 nt, Artificial Sequence
  Description of Artificial Sequence: Synthetic oligonucleotide
  Antisense strand to SEQ ID NO: 1632571
aagaaacucacauagagcc

SEQ ID NO: 1632573 - RNA, 19 nt, Artificial Sequence
  Description of Artificial Sequence: Synthetic oligonucleotide
  Sense strand starting at position 3204 of SEQ ID NO: 1560898
cuaugugaguuucuuugua

SEQ ID NO: 1632574 - RNA, 19 nt, Artificial Sequence
  Description of Artificial Sequence: Synthetic oligonucleotide
  Antisense strand to SEQ ID NO: 1632573
uacaaagaaacucacauag

SEQ ID NO: 1632575 - RNA, 19 nt, Artificial Sequence
  Description of Artificial Sequence: Synthetic oligonucleotide
  Sense strand starting at position 3228 of SEQ ID NO: 1560898
gggaaaugacugcaugguu

SEQ ID NO: 1632576 - RNA, 19 nt, Artificial Sequence
  Description of Artificial Sequence: Synthetic oligonucleotide
  Antisense strand to SEQ ID NO: 1632575
aaccaugcagucauuuccc

SEQ ID NO: 1632577 - RNA, 19 nt, Artificial Sequence
  Description of Artificial Sequence: Synthetic oligonucleotide
  Sense strand starting at position 3260 of SEQ ID NO: 1560898
ccguccucgugugauuuga

SEQ ID NO: 1632578 - RNA, 19 nt, Artificial Sequence
  Description of Artificial Sequence: Synthetic oligonucleotide
  Antisense strand to SEQ ID NO: 1632577
ucaaaucacacgaggacgg

SEQ ID NO: 1632579 - RNA, 19 nt, Artificial Sequence
  Description of Artificial Sequence: Synthetic oligonucleotide
  Sense strand starting at position 3262 of SEQ ID NO: 1560898
guccucgugugauuugacu

SEQ ID NO: 1632580 - RNA, 19 nt, Artificial Sequence
  Description of Artificial Sequence: Synthetic oligonucleotide
  Antisense strand to SEQ ID NO: 1632579
agucaaaucacacgaggac

SEQ ID NO: 1632581 - RNA, 19 nt, Artificial Sequence
  Description of Artificial Sequence: Synthetic oligonucleotide
  Sense strand starting at position 3269 of SEQ ID NO: 1560898
ugugauuugacuuguguga

SEQ ID NO: 1632582 - RNA, 19 nt, Artificial Sequence
  Description of Artificial Sequence: Synthetic oligonucleotide
  Antisense strand to SEQ ID NO: 1632581
ucacacaagucaaaucaca

SEQ ID NO: 1632583 - RNA, 19 nt, Artificial Sequence
  Description of Artificial Sequence: Synthetic oligonucleotide
  Sense strand starting at position 3271 of SEQ ID NO: 1560898
ugauuugacuugugugaaa

SEQ ID NO: 1632584 - RNA, 19 nt, Artificial Sequence
  Description of Artificial Sequence: Synthetic oligonucleotide
  Antisense strand to SEQ ID NO: 1632583
uuucacacaagucaaauca

SEQ ID NO: 1632585 - RNA, 19 nt, Artificial Sequence
  Description of Artificial Sequence: Synthetic oligonucleotide
  Sense strand starting at position 3340 of SEQ ID NO: 1560898
uagguuuccgggugucaac

SEQ ID NO: 1632586 - RNA, 19 nt, Artificial Sequence
  Description of Artificial Sequence: Synthetic oligonucleotide
  Antisense strand to SEQ ID NO: 1632585
guugacacccggaaaccua

SEQ ID NO: 1632587 - RNA, 19 nt, Artificial Sequence
  Description of Artificial Sequence: Synthetic oligonucleotide
  Sense strand starting at position 3381 of SEQ ID NO: 1560898
gugcacuacugugugauca

SEQ ID NO: 1632588 - RNA, 19 nt, Artificial Sequence
  Description of Artificial Sequence: Synthetic oligonucleotide
  Antisense strand to SEQ ID NO: 1632587
ugaucacacaguagugcac

SEQ ID NO: 1632589 - RNA, 19 nt, Artificial Sequence
  Description of Artificial Sequence: Synthetic oligonucleotide
  Sense strand starting at position 3385 of SEQ ID NO: 1560898
acuacugugugaucacaag

SEQ ID NO: 1632590 - RNA, 19 nt, Artificial Sequence
  Description of Artificial Sequence: Synthetic oligonucleotide
  Antisense strand to SEQ ID NO: 1632589
cuugugaucacacaguagu

SEQ ID NO: 1632591 - RNA, 19 nt, Artificial Sequence
  Description of Artificial Sequence: Synthetic oligonucleotide
  Sense strand starting at position 3484 of SEQ ID NO: 1560898
gugaccauauuuggaacau

SEQ ID NO: 1632592 - RNA, 19 nt, Artificial Sequence
  Description of Artificial Sequence: Synthetic oligonucleotide
  Antisense strand to SEQ ID NO: 1632591
auguuccaaauauggucac

SEQ ID NO: 1632593 - RNA, 19 nt, Artificial Sequence
  Description of Artificial Sequence: Synthetic oligonucleotide
  Sense strand starting at position 3485 of SEQ ID NO: 1560898
ugaccauauuuggaacaua

SEQ ID NO: 1632594 - RNA, 19 nt, Artificial Sequence
  Description of Artificial Sequence: Synthetic oligonucleotide
  Antisense strand to SEQ ID NO: 1632593
uauguuccaaauaugguca

SEQ ID NO: 1632595 - RNA, 19 nt, Artificial Sequence
  Description of Artificial Sequence: Synthetic oligonucleotide
  Sense strand starting at position 3502 of SEQ ID NO: 1560898
uacaguuguugccugaaac

SEQ ID NO: 1632596 - RNA, 19 nt, Artificial Sequence
  Description of Artificial Sequence: Synthetic oligonucleotide
  Antisense strand to SEQ ID NO: 1632595
guuucaggcaacaacugua

SEQ ID NO: 1632597 - RNA, 19 nt, Artificial Sequence
  Description of Artificial Sequence: Synthetic oligonucleotide
  Sense strand starting at position 3503 of SEQ ID NO: 1560898
acaguuguugccugaaacu

SEQ ID NO: 1632598 - RNA, 19 nt, Artificial Sequence
  Description of Artificial Sequence: Synthetic oligonucleotide
  Antisense strand to SEQ ID NO: 1632597
aguuucaggcaacaacugu

SEQ ID NO: 1632599 - RNA, 19 nt, Artificial Sequence
  Description of Artificial Sequence: Synthetic oligonucleotide
  Sense strand starting at position 3605 of SEQ ID NO: 1560898
gaagucaagcuuuaugguu

SEQ ID NO: 1632600 - RNA, 19 nt, Artificial Sequence
  Description of Artificial Sequence: Synthetic oligonucleotide
  Antisense strand to SEQ ID NO: 1632599
aaccauaaagcuugacuuc

SEQ ID NO: 1632601 - RNA, 19 nt, Artificial Sequence
  Description of Artificial Sequence: Synthetic oligonucleotide
  Sense strand starting at position 3621 of SEQ ID NO: 1560898
guuauauauuaggauaggu

SEQ ID NO: 1632602 - RNA, 19 nt, Artificial Sequence
  Description of Artificial Sequence: Synthetic oligonucleotide
  Antisense strand to SEQ ID NO: 1632601
accuauccuaauauauaac

SEQ ID NO: 1632603 - RNA, 19 nt, Artificial Sequence
  Description of Artificial Sequence: Synthetic oligonucleotide
  Sense strand starting at position 3646 of SEQ ID NO: 1560898
ccaauaugacaauguuuag

SEQ ID NO: 1632604 - RNA, 19 nt, Artificial Sequence
  Description of Artificial Sequence: Synthetic oligonucleotide
  Antisense strand to SEQ ID NO: 1632603
cuaaacauugucauauugg

SEQ ID NO: 1632605 - RNA, 19 nt, Artificial Sequence
  Description of Artificial Sequence: Synthetic oligonucleotide
  Sense strand starting at position 3652 of SEQ ID NO: 1560898
ugacaauguuuagcacuaa

SEQ ID NO: 1632606 - RNA, 19 nt, Artificial Sequence
  Description of Artificial Sequence: Synthetic oligonucleotide
  Antisense strand to SEQ ID NO: 1632605
uuagugcuaaacauuguca

SEQ ID NO: 1632607 - RNA, 19 nt, Artificial Sequence
  Description of Artificial Sequence: Synthetic oligonucleotide
  Sense strand starting at position 3679 of SEQ ID NO: 1560898
uguuaaagcucugauuccu

SEQ ID NO: 1632608 - RNA, 19 nt, Artificial Sequence
  Description of Artificial Sequence: Synthetic oligonucleotide
  Antisense strand to SEQ ID NO: 1632607
aggaaucagagcuuuaaca

SEQ ID NO: 1632609 - RNA, 19 nt, Artificial Sequence
  Description of Artificial Sequence: Synthetic oligonucleotide
  Sense strand starting at position 3739 of SEQ ID NO: 1560898
uggugugcuuggcuucuua

SEQ ID NO: 1632610 - RNA, 19 nt, Artificial Sequence
  Description of Artificial Sequence: Synthetic oligonucleotide
  Antisense strand to SEQ ID NO: 1632609
uaagaagccaagcacacca

SEQ ID NO: 1632611 - RNA, 19 nt, Artificial Sequence
  Description of Artificial Sequence: Synthetic oligonucleotide
  Sense strand starting at position 3948 of SEQ ID NO: 1560898
gcuaucacuguacauauga

SEQ ID NO: 1632612 - RNA, 19 nt, Artificial Sequence
  Description of Artificial Sequence: Synthetic oligonucleotide
  Antisense strand to SEQ ID NO: 1632611
ucauauguacagugauagc

SEQ ID NO: 1632613 - RNA, 19 nt, Artificial Sequence
  Description of Artificial Sequence: Synthetic oligonucleotide
  Sense strand starting at position 396 of SEQ ID NO: 1560899
ggaggaggcuccugcaguu

SEQ ID NO: 1632614 - RNA, 19 nt, Artificial Sequence
  Description of Artificial Sequence: Synthetic oligonucleotide
  Antisense strand to SEQ ID NO: 1632613
aacugcaggagccuccucc

SEQ ID NO: 1632615 - RNA, 19 nt, Artificial Sequence
  Description of Artificial Sequence: Synthetic oligonucleotide
  Sense strand starting at position 686 of SEQ ID NO: 1560899
ucuggaaccucaguguuga

SEQ ID NO: 1632616 - RNA, 19 nt, Artificial Sequence
  Description of Artificial Sequence: Synthetic oligonucleotide
  Antisense strand to SEQ ID NO: 1632615
ucaacacugagguuccaga

SEQ ID NO: 1632617 - RNA, 19 nt, Artificial Sequence
  Description of Artificial Sequence: Synthetic oligonucleotide
  Sense strand starting at position 690 of SEQ ID NO: 1560899
gaaccucaguguugacuga

SEQ ID NO: 1632618 - RNA, 19 nt, Artificial Sequence
  Description of Artificial Sequence: Synthetic oligonucleotide
  Antisense strand to SEQ ID NO: 1632617
ucagucaacacugagguuc

SEQ ID NO: 1632619 - RNA, 19 nt, Artificial Sequence
  Description of Artificial Sequence: Synthetic oligonucleotide
  Sense strand starting at position 706 of SEQ ID NO: 1560899
ugaacuguggugugcucaa

SEQ ID NO: 1632620 - RNA, 19 nt, Artificial Sequence
  Description of Artificial Sequence: Synthetic oligonucleotide
  Antisense strand to SEQ ID NO: 1632619
uugagcacaccacaguuca

SEQ ID NO: 1632621 - RNA, 19 nt, Artificial Sequence
  Description of Artificial Sequence: Synthetic oligonucleotide
  Sense strand starting at position 718 of SEQ ID NO: 1560899
ugcucaagcuuccagcaua

SEQ ID NO: 1632622 - RNA, 19 nt, Artificial Sequence
  Description of Artificial Sequence: Synthetic oligonucleotide
  Antisense strand to SEQ ID NO: 1632621
uaugcuggaagcuugagca

SEQ ID NO: 1632623 - RNA, 19 nt, Artificial Sequence
  Description of Artificial Sequence: Synthetic oligonucleotide
  Sense strand starting at position 854 of SEQ ID NO: 1560899
ggcuguuguaagggaaaug

SEQ ID NO: 1632624 - RNA, 19 nt, Artificial Sequence
  Description of Artificial Sequence: Synthetic oligonucleotide
  Antisense strand to SEQ ID NO: 1632623
cauuucccuuacaacagcc

SEQ ID NO: 1632625 - RNA, 19 nt, Artificial Sequence
  Description of Artificial Sequence: Synthetic oligonucleotide
  Sense strand starting at position 855 of SEQ ID NO: 1560899
gcuguuguaagggaaaugu

SEQ ID NO: 1632626 - RNA, 19 nt, Artificial Sequence
  Description of Artificial Sequence: Synthetic oligonucleotide
  Antisense strand to SEQ ID NO: 1632625
acauuucccuuacaacagc

SEQ ID NO: 1632627 - RNA, 19 nt, Artificial Sequence
  Description of Artificial Sequence: Synthetic oligonucleotide
  Sense strand starting at position 863 of SEQ ID NO: 1560899
aagggaaauguuuguuauu

SEQ ID NO: 1632628 - RNA, 19 nt, Artificial Sequence
  Description of Artificial Sequence: Synthetic oligonucleotide
  Antisense strand to SEQ ID NO: 1632627
aauaacaaacauuucccuu

SEQ ID NO: 1632629 - RNA, 19 nt, Artificial Sequence
  Description of Artificial Sequence: Synthetic oligonucleotide
  Sense strand starting at position 874 of SEQ ID NO: 1560899
uuguuauuugcauguugcu

SEQ ID NO: 1632630 - RNA, 19 nt, Artificial Sequence
  Description of Artificial Sequence: Synthetic oligonucleotide
  Antisense strand to SEQ ID NO: 1632629
agcaacaugcaaauaacaa

SEQ ID NO: 1632631 - RNA, 19 nt, Artificial Sequence
  Description of Artificial Sequence: Synthetic oligonucleotide
  Sense strand starting at position 888 of SEQ ID NO: 1560899
uugcuuaguuccuggcaua

SEQ ID NO: 1632632 - RNA, 19 nt, Artificial Sequence
  Description of Artificial Sequence: Synthetic oligonucleotide
  Antisense strand to SEQ ID NO: 1632631
uaugccaggaacuaagcaa

SEQ ID NO: 1632633 - RNA, 19 nt, Artificial Sequence
  Description of Artificial Sequence: Synthetic oligonucleotide
  Sense strand starting at position 889 of SEQ ID NO: 1560899
ugcuuaguuccuggcauac

SEQ ID NO: 1632634 - RNA, 19 nt, Artificial Sequence
  Description of Artificial Sequence: Synthetic oligonucleotide
  Antisense strand to SEQ ID NO: 1632633
guaugccaggaacuaagca

SEQ ID NO: 1632635 - RNA, 19 nt, Artificial Sequence
  Description of Artificial Sequence: Synthetic oligonucleotide
  Sense strand starting at position 940 of SEQ ID NO: 1560899
caccauaggugcucaggaa

SEQ ID NO: 1632636 - RNA, 19 nt, Artificial Sequence
  Description of Artificial Sequence: Synthetic oligonucleotide
  Antisense strand to SEQ ID NO: 1632635
uuccugagcaccuauggug

SEQ ID NO: 1632637 - RNA, 19 nt, Artificial Sequence
  Description of Artificial Sequence: Synthetic oligonucleotide
  Sense strand starting at position 1024 of SEQ ID NO: 1560899
gggucuccuuccggaggua

SEQ ID NO: 1632638 - RNA, 19 nt, Artificial Sequence
  Description of Artificial Sequence: Synthetic oligonucleotide
  Antisense strand to SEQ ID NO: 1632637
uaccuccggaaggagaccc

SEQ ID NO: 1632639 - RNA, 19 nt, Artificial Sequence
  Description of Artificial Sequence: Synthetic oligonucleotide
  Sense strand starting at position 1025 of SEQ ID NO: 1560899
ggucuccuuccggagguaa

SEQ ID NO: 1632640 - RNA, 19 nt, Artificial Sequence
  Description of Artificial Sequence: Synthetic oligonucleotide
  Antisense strand to SEQ ID NO: 1632639
uuaccuccggaaggagacc

SEQ ID NO: 1632641 - RNA, 19 nt, Artificial Sequence
  Description of Artificial Sequence: Synthetic oligonucleotide
  Sense strand starting at position 1027 of SEQ ID NO: 1560899
ucuccuuccggagguaaga

SEQ ID NO: 1632642 - RNA, 19 nt, Artificial Sequence
  Description of Artificial Sequence: Synthetic oligonucleotide
  Antisense strand to SEQ ID NO: 1632641
ucuuaccuccggaaggaga

SEQ ID NO: 1632643 - RNA, 19 nt, Artificial Sequence
  Description of Artificial Sequence: Synthetic oligonucleotide
  Sense strand starting at position 1051 of SEQ ID NO: 1560899
uggccucugcugugagaug

SEQ ID NO: 1632644 - RNA, 19 nt, Artificial Sequence
  Description of Artificial Sequence: Synthetic oligonucleotide
  Antisense strand to SEQ ID NO: 1632643
caucucacagcagaggcca

SEQ ID NO: 1632645 - RNA, 19 nt, Artificial Sequence
  Description of Artificial Sequence: Synthetic oligonucleotide
  Sense strand starting at position 1114 of SEQ ID NO: 1560899
gauagaauuccagggccau

SEQ ID NO: 1632646 - RNA, 19 nt, Artificial Sequence
  Description of Artificial Sequence: Synthetic oligonucleotide
  Antisense strand to SEQ ID NO: 1632645
auggcccuggaauucuauc

SEQ ID NO: 1632647 - RNA, 19 nt, Artificial Sequence
  Description of Artificial Sequence: Synthetic oligonucleotide
  Sense strand starting at position 1115 of SEQ ID NO: 1560899
auagaauuccagggccauu

SEQ ID NO: 1632648 - RNA, 19 nt, Artificial Sequence
  Description of Artificial Sequence: Synthetic oligonucleotide
  Antisense strand to SEQ ID NO: 1632647
aauggcccuggaauucuau

SEQ ID NO: 1632649 - RNA, 19 nt, Artificial Sequence
  Description of Artificial Sequence: Synthetic oligonucleotide
  Sense strand starting at position 2500 of SEQ ID NO: 1560899
cgacuuuccuccucaggga

SEQ ID NO: 1632650 - RNA, 19 nt, Artificial Sequence
  Description of Artificial Sequence: Synthetic oligonucleotide
  Antisense strand to SEQ ID NO: 1632649
ucccugaggaggaaagucg

SEQ ID NO: 1632651 - RNA, 19 nt, Artificial Sequence
  Description of Artificial Sequence: Synthetic oligonucleotide
  Sense strand starting at position 2529 of SEQ ID NO: 1560899
cgccgugugcgccuggaaa

SEQ ID NO: 1632652 - RNA, 19 nt, Artificial Sequence
  Description of Artificial Sequence: Synthetic oligonucleotide
  Antisense strand to SEQ ID NO: 1632651
uuuccaggcgcacacggcg

SEQ ID NO: 1632653 - RNA, 19 nt, Artificial Sequence
  Description of Artificial Sequence: Synthetic oligonucleotide
  Sense strand starting at position 3379 of SEQ ID NO: 1560899
cuagcucccgucggaauua

SEQ ID NO: 1632654 - RNA, 19 nt, Artificial Sequence
  Description of Artificial Sequence: Synthetic oligonucleotide
  Antisense strand to SEQ ID NO: 1632653
uaauuccgacgggagcuag

SEQ ID NO: 1632655 - RNA, 19 nt, Artificial Sequence
  Description of Artificial Sequence: Synthetic oligonucleotide
  Sense strand starting at position 3392 of SEQ ID NO: 1560899
gaauuaggauugugagggu

SEQ ID NO: 1632656 - RNA, 19 nt, Artificial Sequence
  Description of Artificial Sequence: Synthetic oligonucleotide
  Antisense strand to SEQ ID NO: 1632655
acccucacaauccuaauuc

SEQ ID NO: 1632657 - RNA, 19 nt, Artificial Sequence
  Description of Artificial Sequence: Synthetic oligonucleotide
  Sense strand starting at position 3395 of SEQ ID NO: 1560899
uuaggauugugaggguucu

SEQ ID NO: 1632658 - RNA, 19 nt, Artificial Sequence
  Description of Artificial Sequence: Synthetic oligonucleotide
  Antisense strand to SEQ ID NO: 1632657
agaacccucacaauccuaa

SEQ ID NO: 1632659 - RNA, 19 nt, Artificial Sequence
  Description of Artificial Sequence: Synthetic oligonucleotide
  Sense strand starting at position 3483 of SEQ ID NO: 1560899
ccugucugcaaaugaguga

SEQ ID NO: 1632660 - RNA, 19 nt, Artificial Sequence
  Description of Artificial Sequence: Synthetic oligonucleotide
  Antisense strand to SEQ ID NO: 1632659
ucacucauuugcagacagg

SEQ ID NO: 1632661 - RNA, 19 nt, Artificial Sequence
  Description of Artificial Sequence: Synthetic oligonucleotide
  Sense strand starting at position 3580 of SEQ ID NO: 1560899
aaggaaaggcgguguucuu

SEQ ID NO: 1632662 - RNA, 19 nt, Artificial Sequence
  Description of Artificial Sequence: Synthetic oligonucleotide
  Antisense strand to SEQ ID NO: 1632661
aagaacaccgccuuuccuu

SEQ ID NO: 1632663 - RNA, 19 nt, Artificial Sequence
  Description of Artificial Sequence: Synthetic oligonucleotide
  Sense strand starting at position 3589 of SEQ ID NO: 1560899
cgguguucuucauugagca

SEQ ID NO: 1632664 - RNA, 19 nt, Artificial Sequence
  Description of Artificial Sequence: Synthetic oligonucleotide
  Antisense strand to SEQ ID NO: 1632663
ugcucaaugaagaacaccg

SEQ ID NO: 1632665 - RNA, 19 nt, Artificial Sequence
  Description of Artificial Sequence: Synthetic oligonucleotide
  Sense strand starting at position 201 of SEQ ID NO: 1560900
gggaaauaaucuggugaag

SEQ ID NO: 1632666 - RNA, 19 nt, Artificial Sequence
  Description of Artificial Sequence: Synthetic oligonucleotide
  Antisense strand to SEQ ID NO: 1632665
cuucaccagauuauuuccc

SEQ ID NO: 1632667 - RNA, 19 nt, Artificial Sequence
  Description of Artificial Sequence: Synthetic oligonucleotide
  Sense strand starting at position 203 of SEQ ID NO: 1560900
gaaauaaucuggugaagaa

SEQ ID NO: 1632668 - RNA, 19 nt, Artificial Sequence
  Description of Artificial Sequence: Synthetic oligonucleotide
  Antisense strand to SEQ ID NO: 1632667
uucuucaccagauuauuuc

SEQ ID NO: 1632669 - RNA, 19 nt, Artificial Sequence
  Description of Artificial Sequence: Synthetic oligonucleotide
  Sense strand starting at position 662 of SEQ ID NO: 1560900
ggaggaggcuccugcaguu

SEQ ID NO: 1632670 - RNA, 19 nt, Artificial Sequence
  Description of Artificial Sequence: Synthetic oligonucleotide
  Antisense strand to SEQ ID NO: 1632669
aacugcaggagccuccucc

SEQ ID NO: 1632671 - RNA, 19 nt, Artificial Sequence
  Description of Artificial Sequence: Synthetic oligonucleotide
  Sense strand starting at position 952 of SEQ ID NO: 1560900
ucuggaaccucaguguuga

SEQ ID NO: 1632672 - RNA, 19 nt, Artificial Sequence
  Description of Artificial Sequence: Synthetic oligonucleotide
  Antisense strand to SEQ ID NO: 1632671
ucaacacugagguuccaga

SEQ ID NO: 1632673 - RNA, 19 nt, Artificial Sequence
  Description of Artificial Sequence: Synthetic oligonucleotide
  Sense strand starting at position 956 of SEQ ID NO: 1560900
gaaccucaguguugacuga

SEQ ID NO: 1632674 - RNA, 19 nt, Artificial Sequence
  Description of Artificial Sequence: Synthetic oligonucleotide
  Antisense strand to SEQ ID NO: 1632673
ucagucaacacugagguuc

SEQ ID NO: 1632675 - RNA, 19 nt, Artificial Sequence
  Description of Artificial Sequence: Synthetic oligonucleotide
  Sense strand starting at position 972 of SEQ ID NO: 1560900
ugaacuguggugugcucaa

SEQ ID NO: 1632676 - RNA, 19 nt, Artificial Sequence
  Description of Artificial Sequence: Synthetic oligonucleotide
  Antisense strand to SEQ ID NO: 1632675
uugagcacaccacaguuca

SEQ ID NO: 1632677 - RNA, 19 nt, Artificial Sequence
  Description of Artificial Sequence: Synthetic oligonucleotide
  Sense strand starting at position 984 of SEQ ID NO: 1560900
ugcucaagcuuccagcaua

SEQ ID NO: 1632678 - RNA, 19 nt, Artificial Sequence
  Description of Artificial Sequence: Synthetic oligonucleotide
  Antisense strand to SEQ ID NO: 1632677
uaugcuggaagcuugagca

SEQ ID NO: 1632679 - RNA, 19 nt, Artificial Sequence
  Description of Artificial Sequence: Synthetic oligonucleotide
  Sense strand starting at position 1120 of SEQ ID NO: 1560900
ggcuguuguaagggaaaug

SEQ ID NO: 1632680 - RNA, 19 nt, Artificial Sequence
  Description of Artificial Sequence: Synthetic oligonucleotide
  Antisense strand to SEQ ID NO: 1632679
cauuucccuuacaacagcc

SEQ ID NO: 1632681 - RNA, 19 nt, Artificial Sequence
  Description of Artificial Sequence: Synthetic oligonucleotide
  Sense strand starting at position 1121 of SEQ ID NO: 1560900
gcuguuguaagggaaaugu

SEQ ID NO: 1632682 - RNA, 19 nt, Artificial Sequence
  Description of Artificial Sequence: Synthetic oligonucleotide
  Antisense strand to SEQ ID NO: 1632681
acauuucccuuacaacagc

SEQ ID NO: 1632683 - RNA, 19 nt, Artificial Sequence
  Description of Artificial Sequence: Synthetic oligonucleotide
  Sense strand starting at position 1129 of SEQ ID NO: 1560900
aagggaaauguuuguuauu

SEQ ID NO: 1632684 - RNA, 19 nt, Artificial Sequence
  Description of Artificial Sequence: Synthetic oligonucleotide
  Antisense strand to SEQ ID NO: 1632683
aauaacaaacauuucccuu

SEQ ID NO: 1632685 - RNA, 19 nt, Artificial Sequence
  Description of Artificial Sequence: Synthetic oligonucleotide
  Sense strand starting at position 1140 of SEQ ID NO: 1560900
uuguuauuugcauguugcu

SEQ ID NO: 1632686 - RNA, 19 nt, Artificial Sequence
  Description of Artificial Sequence: Synthetic oligonucleotide
  Antisense strand to SEQ ID NO: 1632685
agcaacaugcaaauaacaa

SEQ ID NO: 1632687 - RNA, 19 nt, Artificial Sequence
  Description of Artificial Sequence: Synthetic oligonucleotide
  Sense strand starting at position 1154 of SEQ ID NO: 1560900
uugcuuaguuccuggcaua

SEQ ID NO: 1632688 - RNA, 19 nt, Artificial Sequence
  Description of Artificial Sequence: Synthetic oligonucleotide
  Antisense strand to SEQ ID NO: 1632687
uaugccaggaacuaagcaa

SEQ ID NO: 1632689 - RNA, 19 nt, Artificial Sequence
  Description of Artificial Sequence: Synthetic oligonucleotide
  Sense strand starting at position 1155 of SEQ ID NO: 1560900
ugcuuaguuccuggcauac

SEQ ID NO: 1632690 - RNA, 19 nt, Artificial Sequence
  Description of Artificial Sequence: Synthetic oligonucleotide
  Antisense strand to SEQ ID NO: 1632689
guaugccaggaacuaagca

SEQ ID NO: 1632691 - RNA, 19 nt, Artificial Sequence
  Description of Artificial Sequence: Synthetic oligonucleotide
  Sense strand starting at position 1206 of SEQ ID NO: 1560900
caccauaggugcucaggaa

SEQ ID NO: 1632692 - RNA, 19 nt, Artificial Sequence
  Description of Artificial Sequence: Synthetic oligonucleotide
  Antisense strand to SEQ ID NO: 1632691
uuccugagcaccuauggug

SEQ ID NO: 1632693 - RNA, 19 nt, Artificial Sequence
  Description of Artificial Sequence: Synthetic oligonucleotide
  Sense strand starting at position 1290 of SEQ ID NO: 1560900
gggucuccuuccggaggua

SEQ ID NO: 1632694 - RNA, 19 nt, Artificial Sequence
  Description of Artificial Sequence: Synthetic oligonucleotide
  Antisense strand to SEQ ID NO: 1632693
uaccuccggaaggagaccc

SEQ ID NO: 1632695 - RNA, 19 nt, Artificial Sequence
  Description of Artificial Sequence: Synthetic oligonucleotide
  Sense strand starting at position 1291 of SEQ ID NO: 1560900
ggucuccuuccggagguaa

SEQ ID NO: 1632696 - RNA, 19 nt, Artificial Sequence
  Description of Artificial Sequence: Synthetic oligonucleotide
  Antisense strand to SEQ ID NO: 1632695
uuaccuccggaaggagacc

SEQ ID NO: 1632697 - RNA, 19 nt, Artificial Sequence
  Description of Artificial Sequence: Synthetic oligonucleotide
  Sense strand starting at position 1293 of SEQ ID NO: 1560900
ucuccuuccggagguaaga

SEQ ID NO: 1632698 - RNA, 19 nt, Artificial Sequence
  Description of Artificial Sequence: Synthetic oligonucleotide
  Antisense strand to SEQ ID NO: 1632697
ucuuaccuccggaaggaga

SEQ ID NO: 1632699 - RNA, 19 nt, Artificial Sequence
  Description of Artificial Sequence: Synthetic oligonucleotide
  Sense strand starting at position 1317 of SEQ ID NO: 1560900
uggccucugcugugagaug

SEQ ID NO: 1632700 - RNA, 19 nt, Artificial Sequence
  Description of Artificial Sequence: Synthetic oligonucleotide
  Antisense strand to SEQ ID NO: 1632699
caucucacagcagaggcca

SEQ ID NO: 1632701 - RNA, 19 nt, Artificial Sequence
  Description of Artificial Sequence: Synthetic oligonucleotide
  Sense strand starting at position 1380 of SEQ ID NO: 1560900
gauagaauuccagggccau

SEQ ID NO: 1632702 - RNA, 19 nt, Artificial Sequence
  Description of Artificial Sequence: Synthetic oligonucleotide
  Antisense strand to SEQ ID NO: 1632701
auggcccuggaauucuauc

SEQ ID NO: 1632703 - RNA, 19 nt, Artificial Sequence
  Description of Artificial Sequence: Synthetic oligonucleotide
  Sense strand starting at position 1381 of SEQ ID NO: 1560900
auagaauuccagggccauu

SEQ ID NO: 1632704 - RNA, 19 nt, Artificial Sequence
  Description of Artificial Sequence: Synthetic oligonucleotide
  Antisense strand to SEQ ID NO: 1632703
aauggcccuggaauucuau

SEQ ID NO: 1632705 - RNA, 19 nt, Artificial Sequence
  Description of Artificial Sequence: Synthetic oligonucleotide
  Sense strand starting at position 2766 of SEQ ID NO: 1560900
cgacuuuccuccucaggga

SEQ ID NO: 1632706 - RNA, 19 nt, Artificial Sequence
  Description of Artificial Sequence: Synthetic oligonucleotide
  Antisense strand to SEQ ID NO: 1632705
ucccugaggaggaaagucg

SEQ ID NO: 1632707 - RNA, 19 nt, Artificial Sequence
  Description of Artificial Sequence: Synthetic oligonucleotide
  Sense strand starting at position 2795 of SEQ ID NO: 1560900
cgccgugugcgccuggaaa

SEQ ID NO: 1632708 - RNA, 19 nt, Artificial Sequence
  Description of Artificial Sequence: Synthetic oligonucleotide
  Antisense strand to SEQ ID NO: 1632707
uuuccaggcgcacacggcg

SEQ ID NO: 1632709 - RNA, 19 nt, Artificial Sequence
  Description of Artificial Sequence: Synthetic oligonucleotide
  Sense strand starting at position 3645 of SEQ ID NO: 1560900
cuagcucccgucggaauua

SEQ ID NO: 1632710 - RNA, 19 nt, Artificial Sequence
  Description of Artificial Sequence: Synthetic oligonucleotide
  Antisense strand to SEQ ID NO: 1632709
uaauuccgacgggagcuag

SEQ ID NO: 1632711 - RNA, 19 nt, Artificial Sequence
  Description of Artificial Sequence: Synthetic oligonucleotide
  Sense strand starting at position 3658 of SEQ ID NO: 1560900
gaauuaggauugugagggu

SEQ ID NO: 1632712 - RNA, 19 nt, Artificial Sequence
  Description of Artificial Sequence: Synthetic oligonucleotide
  Antisense strand to SEQ ID NO: 1632711
acccucacaauccuaauuc

SEQ ID NO: 1632713 - RNA, 19 nt, Artificial Sequence
  Description of Artificial Sequence: Synthetic oligonucleotide
  Sense strand starting at position 3661 of SEQ ID NO: 1560900
uuaggauugugaggguucu

SEQ ID NO: 1632714 - RNA, 19 nt, Artificial Sequence
  Description of Artificial Sequence: Synthetic oligonucleotide
  Antisense strand to SEQ ID NO: 1632713
agaacccucacaauccuaa

SEQ ID NO: 1632715 - RNA, 19 nt, Artificial Sequence
  Description of Artificial Sequence: Synthetic oligonucleotide
  Sense strand starting at position 3749 of SEQ ID NO: 1560900
ccugucugcaaaugaguga

SEQ ID NO: 1632716 - RNA, 19 nt, Artificial Sequence
  Description of Artificial Sequence: Synthetic oligonucleotide
  Antisense strand to SEQ ID NO: 1632715
ucacucauuugcagacagg

SEQ ID NO: 1632717 - RNA, 19 nt, Artificial Sequence
  Description of Artificial Sequence: Synthetic oligonucleotide
  Sense strand starting at position 3846 of SEQ ID NO: 1560900
aaggaaaggcgguguucuu

SEQ ID NO: 1632718 - RNA, 19 nt, Artificial Sequence
  Description of Artificial Sequence: Synthetic oligonucleotide
  Antisense strand to SEQ ID NO: 1632717
aagaacaccgccuuuccuu

SEQ ID NO: 1632719 - RNA, 19 nt, Artificial Sequence
  Description of Artificial Sequence: Synthetic oligonucleotide
  Sense strand starting at position 3855 of SEQ ID NO: 1560900
cgguguucuucauugagca

SEQ ID NO: 1632720 - RNA, 19 nt, Artificial Sequence
  Description of Artificial Sequence: Synthetic oligonucleotide
  Antisense strand to SEQ ID NO: 1632719
ugcucaaugaagaacaccg

SEQ ID NO: 1632721 - RNA, 19 nt, Artificial Sequence
  Description of Artificial Sequence: Synthetic oligonucleotide
  Sense strand starting at position 85 of SEQ ID NO: 1560901
gaaagaaauuuguauggca

SEQ ID NO: 1632722 - RNA, 19 nt, Artificial Sequence
  Description of Artificial Sequence: Synthetic oligonucleotide
  Antisense strand to SEQ ID NO: 1632721
ugccauacaaauuucuuuc

SEQ ID NO: 1632723 - RNA, 19 nt, Artificial Sequence
  Description of Artificial Sequence: Synthetic oligonucleotide
  Sense strand starting at position 88 of SEQ ID NO: 1560901
agaaauuuguauggcagca

SEQ ID NO: 1632724 - RNA, 19 nt, Artificial Sequence
  Description of Artificial Sequence: Synthetic oligonucleotide
  Antisense strand to SEQ ID NO: 1632723
ugcugccauacaaauuucu

SEQ ID NO: 1632725 - RNA, 19 nt, Artificial Sequence
  Description of Artificial Sequence: Synthetic oligonucleotide
  Sense strand starting at position 104 of SEQ ID NO: 1560901
gcagguagcuucuagaucu

SEQ ID NO: 1632726 - RNA, 19 nt, Artificial Sequence
  Description of Artificial Sequence: Synthetic oligonucleotide
  Antisense strand to SEQ ID NO: 1632725
agaucuagaagcuaccugc

SEQ ID NO: 1632727 - RNA, 19 nt, Artificial Sequence
  Description of Artificial Sequence: Synthetic oligonucleotide
  Sense strand starting at position 114 of SEQ ID NO: 1560901
ucuagaucuccuuaugagc

SEQ ID NO: 1632728 - RNA, 19 nt, Artificial Sequence
  Description of Artificial Sequence: Synthetic oligonucleotide
  Antisense strand to SEQ ID NO: 1632727
gcucauaaggagaucuaga

SEQ ID NO: 1632729 - RNA, 19 nt, Artificial Sequence
  Description of Artificial Sequence: Synthetic oligonucleotide
  Sense strand starting at position 161 of SEQ ID NO: 1560901
ugauguguguucggcucau

SEQ ID NO: 1632730 - RNA, 19 nt, Artificial Sequence
  Description of Artificial Sequence: Synthetic oligonucleotide
  Antisense strand to SEQ ID NO: 1632729
augagccgaacacacauca

SEQ ID NO: 1632731 - RNA, 19 nt, Artificial Sequence
  Description of Artificial Sequence: Synthetic oligonucleotide
  Sense strand starting at position 173 of SEQ ID NO: 1560901
ggcucauuggccugggaga

SEQ ID NO: 1632732 - RNA, 19 nt, Artificial Sequence
  Description of Artificial Sequence: Synthetic oligonucleotide
  Antisense strand to SEQ ID NO: 1632731
ucucccaggccaaugagcc

SEQ ID NO: 1632733 - RNA, 19 nt, Artificial Sequence
  Description of Artificial Sequence: Synthetic oligonucleotide
  Sense strand starting at position 186 of SEQ ID NO: 1560901
gggagaguguacuuggaga

SEQ ID NO: 1632734 - RNA, 19 nt, Artificial Sequence
  Description of Artificial Sequence: Synthetic oligonucleotide
  Antisense strand to SEQ ID NO: 1632733
ucuccaaguacacucuccc

SEQ ID NO: 1632735 - RNA, 19 nt, Artificial Sequence
  Description of Artificial Sequence: Synthetic oligonucleotide
  Sense strand starting at position 188 of SEQ ID NO: 1560901
gagaguguacuuggagaag

SEQ ID NO: 1632736 - RNA, 19 nt, Artificial Sequence
  Description of Artificial Sequence: Synthetic oligonucleotide
  Antisense strand to SEQ ID NO: 1632735
cuucuccaaguacacucuc

SEQ ID NO: 1632737 - RNA, 19 nt, Artificial Sequence
  Description of Artificial Sequence: Synthetic oligonucleotide
  Sense strand starting at position 370 of SEQ ID NO: 1560901
gagugaugaggcugugaag

SEQ ID NO: 1632738 - RNA, 19 nt, Artificial Sequence
  Description of Artificial Sequence: Synthetic oligonucleotide
  Antisense strand to SEQ ID NO: 1632737
cuucacagccucaucacuc

SEQ ID NO: 1632739 - RNA, 19 nt, Artificial Sequence
  Description of Artificial Sequence: Synthetic oligonucleotide
  Sense strand starting at position 464 of SEQ ID NO: 1560901
acuccugaauccuugugga

SEQ ID NO: 1632740 - RNA, 19 nt, Artificial Sequence
  Description of Artificial Sequence: Synthetic oligonucleotide
  Antisense strand to SEQ ID NO: 1632739
uccacaaggauucaggagu

SEQ ID NO: 1632741 - RNA, 19 nt, Artificial Sequence
  Description of Artificial Sequence: Synthetic oligonucleotide
  Sense strand starting at position 467 of SEQ ID NO: 1560901
ccugaauccuuguggaggu

SEQ ID NO: 1632742 - RNA, 19 nt, Artificial Sequence
  Description of Artificial Sequence: Synthetic oligonucleotide
  Antisense strand to SEQ ID NO: 1632741
accuccacaaggauucagg

SEQ ID NO: 1632743 - RNA, 19 nt, Artificial Sequence
  Description of Artificial Sequence: Synthetic oligonucleotide
  Sense strand starting at position 468 of SEQ ID NO: 1560901
cugaauccuuguggaggua

SEQ ID NO: 1632744 - RNA, 19 nt, Artificial Sequence
  Description of Artificial Sequence: Synthetic oligonucleotide
  Antisense strand to SEQ ID NO: 1632743
uaccuccacaaggauucag

SEQ ID NO: 1632745 - RNA, 19 nt, Artificial Sequence
  Description of Artificial Sequence: Synthetic oligonucleotide
  Sense strand starting at position 469 of SEQ ID NO: 1560901
ugaauccuuguggagguaa

SEQ ID NO: 1632746 - RNA, 19 nt, Artificial Sequence
  Description of Artificial Sequence: Synthetic oligonucleotide
  Antisense strand to SEQ ID NO: 1632745
uuaccuccacaaggauuca

SEQ ID NO: 1632747 - RNA, 19 nt, Artificial Sequence
  Description of Artificial Sequence: Synthetic oligonucleotide
  Sense strand starting at position 471 of SEQ ID NO: 1560901
aauccuuguggagguaaau

SEQ ID NO: 1632748 - RNA, 19 nt, Artificial Sequence
  Description of Artificial Sequence: Synthetic oligonucleotide
  Antisense strand to SEQ ID NO: 1632747
auuuaccuccacaaggauu

SEQ ID NO: 1632749 - RNA, 19 nt, Artificial Sequence
  Description of Artificial Sequence: Synthetic oligonucleotide
  Sense strand starting at position 515 of SEQ ID NO: 1560901
ugaggucuuguuuggagag

SEQ ID NO: 1632750 - RNA, 19 nt, Artificial Sequence
  Description of Artificial Sequence: Synthetic oligonucleotide
  Antisense strand to SEQ ID NO: 1632749
cucuccaaacaagaccuca

SEQ ID NO: 1632751 - RNA, 19 nt, Artificial Sequence
  Description of Artificial Sequence: Synthetic oligonucleotide
  Sense strand starting at position 516 of SEQ ID NO: 1560901
gaggucuuguuuggagaga

SEQ ID NO: 1632752 - RNA, 19 nt, Artificial Sequence
  Description of Artificial Sequence: Synthetic oligonucleotide
  Antisense strand to SEQ ID NO: 1632751
ucucuccaaacaagaccuc

SEQ ID NO: 1632753 - RNA, 19 nt, Artificial Sequence
  Description of Artificial Sequence: Synthetic oligonucleotide
  Sense strand starting at position 542 of SEQ ID NO: 1560901
ggcagacagccucaguaaa

SEQ ID NO: 1632754 - RNA, 19 nt, Artificial Sequence
  Description of Artificial Sequence: Synthetic oligonucleotide
  Antisense strand to SEQ ID NO: 1632753
uuuacugaggcugucugcc

SEQ ID NO: 1632755 - RNA, 19 nt, Artificial Sequence
  Description of Artificial Sequence: Synthetic oligonucleotide
  Sense strand starting at position 761 of SEQ ID NO: 1560901
aggcuaagucugugugucu

SEQ ID NO: 1632756 - RNA, 19 nt, Artificial Sequence
  Description of Artificial Sequence: Synthetic oligonucleotide
  Antisense strand to SEQ ID NO: 1632755
agacacacagacuuagccu

SEQ ID NO: 1632757 - RNA, 19 nt, Artificial Sequence
  Description of Artificial Sequence: Synthetic oligonucleotide
  Sense strand starting at position 793 of SEQ ID NO: 1560901
ggguucuaagcagagcaaa

SEQ ID NO: 1632758 - RNA, 19 nt, Artificial Sequence
  Description of Artificial Sequence: Synthetic oligonucleotide
  Antisense strand to SEQ ID NO: 1632757
uuugcucugcuuagaaccc

SEQ ID NO: 1632759 - RNA, 19 nt, Artificial Sequence
  Description of Artificial Sequence: Synthetic oligonucleotide
  Sense strand starting at position 822 of SEQ ID NO: 1560901
caggauuccuaggugcuga

SEQ ID NO: 1632760 - RNA, 19 nt, Artificial Sequence
  Description of Artificial Sequence: Synthetic oligonucleotide
  Antisense strand to SEQ ID NO: 1632759
ucagcaccuaggaauccug

SEQ ID NO: 1632761 - RNA, 19 nt, Artificial Sequence
  Description of Artificial Sequence: Synthetic oligonucleotide
  Sense strand starting at position 1077 of SEQ ID NO: 1560901
ccggguauucccgggucaa

SEQ ID NO: 1632762 - RNA, 19 nt, Artificial Sequence
  Description of Artificial Sequence: Synthetic oligonucleotide
  Antisense strand to SEQ ID NO: 1632761
uugacccgggaauacccgg

SEQ ID NO: 1632763 - RNA, 19 nt, Artificial Sequence
  Description of Artificial Sequence: Synthetic oligonucleotide
  Sense strand starting at position 1078 of SEQ ID NO: 1560901
cggguauucccgggucaaa

SEQ ID NO: 1632764 - RNA, 19 nt, Artificial Sequence
  Description of Artificial Sequence: Synthetic oligonucleotide
  Antisense strand to SEQ ID NO: 1632763
uuugacccgggaauacccg

SEQ ID NO: 1632765 - RNA, 19 nt, Artificial Sequence
  Description of Artificial Sequence: Synthetic oligonucleotide
  Sense strand starting at position 2372 of SEQ ID NO: 1560901
ggcuaaagguuggauuuca

SEQ ID NO: 1632766 - RNA, 19 nt, Artificial Sequence
  Description of Artificial Sequence: Synthetic oligonucleotide
  Antisense strand to SEQ ID NO: 1632765
ugaaauccaaccuuuagcc

SEQ ID NO: 1632767 - RNA, 19 nt, Artificial Sequence
  Description of Artificial Sequence: Synthetic oligonucleotide
  Sense strand starting at position 2408 of SEQ ID NO: 1560901
ggaaagacgcgcuguguuu

SEQ ID NO: 1632768 - RNA, 19 nt, Artificial Sequence
  Description of Artificial Sequence: Synthetic oligonucleotide
  Antisense strand to SEQ ID NO: 1632767
aaacacagcgcgucuuucc

SEQ ID NO: 1632769 - RNA, 19 nt, Artificial Sequence
  Description of Artificial Sequence: Synthetic oligonucleotide
  Sense strand starting at position 2749 of SEQ ID NO: 1560901
ucggacuagucucuuggaa

SEQ ID NO: 1632770 - RNA, 19 nt, Artificial Sequence
  Description of Artificial Sequence: Synthetic oligonucleotide
  Antisense strand to SEQ ID NO: 1632769
uuccaagagacuaguccga

SEQ ID NO: 1632771 - RNA, 19 nt, Artificial Sequence
  Description of Artificial Sequence: Synthetic oligonucleotide
  Sense strand starting at position 2751 of SEQ ID NO: 1560901
ggacuagucucuuggaagc

SEQ ID NO: 1632772 - RNA, 19 nt, Artificial Sequence
  Description of Artificial Sequence: Synthetic oligonucleotide
  Antisense strand to SEQ ID NO: 1632771
gcuuccaagagacuagucc

SEQ ID NO: 1632773 - RNA, 19 nt, Artificial Sequence
  Description of Artificial Sequence: Synthetic oligonucleotide
  Sense strand starting at position 2789 of SEQ ID NO: 1560901
gaccuagggagaggucuua

SEQ ID NO: 1632774 - RNA, 19 nt, Artificial Sequence
  Description of Artificial Sequence: Synthetic oligonucleotide
  Antisense strand to SEQ ID NO: 1632773
uaagaccucucccuagguc

SEQ ID NO: 1632775 - RNA, 19 nt, Artificial Sequence
  Description of Artificial Sequence: Synthetic oligonucleotide
  Sense strand starting at position 2802 of SEQ ID NO: 1560901
gucuuaaccucuguucuca

SEQ ID NO: 1632776 - RNA, 19 nt, Artificial Sequence
  Description of Artificial Sequence: Synthetic oligonucleotide
  Antisense strand to SEQ ID NO: 1632775
ugagaacagagguuaagac

SEQ ID NO: 1632777 - RNA, 19 nt, Artificial Sequence
  Description of Artificial Sequence: Synthetic oligonucleotide
  Sense strand starting at position 3154 of SEQ ID NO: 1560901
acaguagguuccguaucuu

SEQ ID NO: 1632778 - RNA, 19 nt, Artificial Sequence
  Description of Artificial Sequence: Synthetic oligonucleotide
  Antisense strand to SEQ ID NO: 1632777
aagauacggaaccuacugu

SEQ ID NO: 1632779 - RNA, 19 nt, Artificial Sequence
  Description of Artificial Sequence: Synthetic oligonucleotide
  Sense strand starting at position 3162 of SEQ ID NO: 1560901
uuccguaucuugggaugga

SEQ ID NO: 1632780 - RNA, 19 nt, Artificial Sequence
  Description of Artificial Sequence: Synthetic oligonucleotide
  Antisense strand to SEQ ID NO: 1632779
uccaucccaagauacggaa

SEQ ID NO: 1632781 - RNA, 19 nt, Artificial Sequence
  Description of Artificial Sequence: Synthetic oligonucleotide
  Sense strand starting at position 3163 of SEQ ID NO: 1560901
uccguaucuugggauggaa

SEQ ID NO: 1632782 - RNA, 19 nt, Artificial Sequence
  Description of Artificial Sequence: Synthetic oligonucleotide
  Antisense strand to SEQ ID NO: 1632781
uuccaucccaagauacgga

SEQ ID NO: 1632783 - RNA, 19 nt, Artificial Sequence
  Description of Artificial Sequence: Synthetic oligonucleotide
  Sense strand starting at position 3635 of SEQ ID NO: 1560901
cugagaugucaaugccuca

SEQ ID NO: 1632784 - RNA, 19 nt, Artificial Sequence
  Description of Artificial Sequence: Synthetic oligonucleotide
  Antisense strand to SEQ ID NO: 1632783
ugaggcauugacaucucag

SEQ ID NO: 1632785 - RNA, 19 nt, Artificial Sequence
  Description of Artificial Sequence: Synthetic oligonucleotide
  Sense strand starting at position 3660 of SEQ ID NO: 1560901
ccucgugggagucauuaac

SEQ ID NO: 1632786 - RNA, 19 nt, Artificial Sequence
  Description of Artificial Sequence: Synthetic oligonucleotide
  Antisense strand to SEQ ID NO: 1632785
guuaaugacucccacgagg

SEQ ID NO: 1632787 - RNA, 19 nt, Artificial Sequence
  Description of Artificial Sequence: Synthetic oligonucleotide
  Sense strand starting at position 3709 of SEQ ID NO: 1560901
ccaggauucccaugucagg

SEQ ID NO: 1632788 - RNA, 19 nt, Artificial Sequence
  Description of Artificial Sequence: Synthetic oligonucleotide
  Antisense strand to SEQ ID NO: 1632787
ccugacaugggaauccugg

SEQ ID NO: 1632789 - RNA, 19 nt, Artificial Sequence
  Description of Artificial Sequence: Synthetic oligonucleotide
  Sense strand starting at position 3977 of SEQ ID NO: 1560901
ugaguuuaucccuggcuca

SEQ ID NO: 1632790 - RNA, 19 nt, Artificial Sequence
  Description of Artificial Sequence: Synthetic oligonucleotide
  Antisense strand to SEQ ID NO: 1632789
ugagccagggauaaacuca

SEQ ID NO: 1632791 - RNA, 19 nt, Artificial Sequence
  Description of Artificial Sequence: Synthetic oligonucleotide
  Sense strand starting at position 3978 of SEQ ID NO: 1560901
gaguuuaucccuggcucac

SEQ ID NO: 1632792 - RNA, 19 nt, Artificial Sequence
  Description of Artificial Sequence: Synthetic oligonucleotide
  Antisense strand to SEQ ID NO: 1632791
gugagccagggauaaacuc

SEQ ID NO: 1632793 - RNA, 19 nt, Artificial Sequence
  Description of Artificial Sequence: Synthetic oligonucleotide
  Sense strand starting at position 8 of SEQ ID NO: 1560902
ggcacacaguucugagaaa

SEQ ID NO: 1632794 - RNA, 19 nt, Artificial Sequence
  Description of Artificial Sequence: Synthetic oligonucleotide
  Antisense strand to SEQ ID NO: 1632793
uuucucagaacugugugcc

SEQ ID NO: 1632795 - RNA, 19 nt, Artificial Sequence
  Description of Artificial Sequence: Synthetic oligonucleotide
  Sense strand starting at position 9 of SEQ ID NO: 1560902
gcacacaguucugagaaag

SEQ ID NO: 1632796 - RNA, 19 nt, Artificial Sequence
  Description of Artificial Sequence: Synthetic oligonucleotide
  Antisense strand to SEQ ID NO: 1632795
cuuucucagaacugugugc

SEQ ID NO: 1632797 - RNA, 19 nt, Artificial Sequence
  Description of Artificial Sequence: Synthetic oligonucleotide
  Sense strand starting at position 32 of SEQ ID NO: 1560902
aagaguuaggcugggcaca

SEQ ID NO: 1632798 - RNA, 19 nt, Artificial Sequence
  Description of Artificial Sequence: Synthetic oligonucleotide
  Antisense strand to SEQ ID NO: 1632797
ugugcccagccuaacucuu

SEQ ID NO: 1632799 - RNA, 19 nt, Artificial Sequence
  Description of Artificial Sequence: Synthetic oligonucleotide
  Sense strand starting at position 570 of SEQ ID NO: 1560902
ggcagagcuucccaacaau

SEQ ID NO: 1632800 - RNA, 19 nt, Artificial Sequence
  Description of Artificial Sequence: Synthetic oligonucleotide
  Antisense strand to SEQ ID NO: 1632799
auuguugggaagcucugcc

SEQ ID NO: 1632801 - RNA, 19 nt, Artificial Sequence
  Description of Artificial Sequence: Synthetic oligonucleotide
  Sense strand starting at position 659 of SEQ ID NO: 1560902
cucucuuacugggaccaaa

SEQ ID NO: 1632802 - RNA, 19 nt, Artificial Sequence
  Description of Artificial Sequence: Synthetic oligonucleotide
  Antisense strand to SEQ ID NO: 1632801
uuuggucccaguaagagag

SEQ ID NO: 1632803 - RNA, 19 nt, Artificial Sequence
  Description of Artificial Sequence: Synthetic oligonucleotide
  Sense strand starting at position 688 of SEQ ID NO: 1560902
ggcgcucccaauugagaga

SEQ ID NO: 1632804 - RNA, 19 nt, Artificial Sequence
  Description of Artificial Sequence: Synthetic oligonucleotide
  Antisense strand to SEQ ID NO: 1632803
ucucucaauugggagcgcc

SEQ ID NO: 1632805 - RNA, 19 nt, Artificial Sequence
  Description of Artificial Sequence: Synthetic oligonucleotide
  Sense strand starting at position 699 of SEQ ID NO: 1560902
uugagagaacaaugccuuu

SEQ ID NO: 1632806 - RNA, 19 nt, Artificial Sequence
  Description of Artificial Sequence: Synthetic oligonucleotide
  Antisense strand to SEQ ID NO: 1632805
aaaggcauuguucucucaa

SEQ ID NO: 1632807 - RNA, 19 nt, Artificial Sequence
  Description of Artificial Sequence: Synthetic oligonucleotide
  Sense strand starting at position 2140 of SEQ ID NO: 1560902
gaauuacacuucugggucu

SEQ ID NO: 1632808 - RNA, 19 nt, Artificial Sequence
  Description of Artificial Sequence: Synthetic oligonucleotide
  Antisense strand to SEQ ID NO: 1632807
agacccagaaguguaauuc

SEQ ID NO: 1632809 - RNA, 19 nt, Artificial Sequence
  Description of Artificial Sequence: Synthetic oligonucleotide
  Sense strand starting at position 2183 of SEQ ID NO: 1560902
ggguuugggaucugaauca

SEQ ID NO: 1632810 - RNA, 19 nt, Artificial Sequence
  Description of Artificial Sequence: Synthetic oligonucleotide
  Antisense strand to SEQ ID NO: 1632809
ugauucagaucccaaaccc

SEQ ID NO: 1632811 - RNA, 19 nt, Artificial Sequence
  Description of Artificial Sequence: Synthetic oligonucleotide
  Sense strand starting at position 2237 of SEQ ID NO: 1560902
ggcaaacuauuacauagua

SEQ ID NO: 1632812 - RNA, 19 nt, Artificial Sequence
  Description of Artificial Sequence: Synthetic oligonucleotide
  Antisense strand to SEQ ID NO: 1632811
uacuauguaauaguuugcc

SEQ ID NO: 1632813 - RNA, 19 nt, Artificial Sequence
  Description of Artificial Sequence: Synthetic oligonucleotide
  Sense strand starting at position 2253 of SEQ ID NO: 1560902
guacuaaugugucacacac

SEQ ID NO: 1632814 - RNA, 19 nt, Artificial Sequence
  Description of Artificial Sequence: Synthetic oligonucleotide
  Antisense strand to SEQ ID NO: 1632813
gugugugacacauuaguac

SEQ ID NO: 1632815 - RNA, 19 nt, Artificial Sequence
  Description of Artificial Sequence: Synthetic oligonucleotide
  Sense strand starting at position 2260 of SEQ ID NO: 1560902
ugugucacacacuguuaua

SEQ ID NO: 1632816 - RNA, 19 nt, Artificial Sequence
  Description of Artificial Sequence: Synthetic oligonucleotide
  Antisense strand to SEQ ID NO: 1632815
uauaacagugugugacaca

SEQ ID NO: 1632817 - RNA, 19 nt, Artificial Sequence
  Description of Artificial Sequence: Synthetic oligonucleotide
  Sense strand starting at position 2263 of SEQ ID NO: 1560902
gucacacacuguuauacau

SEQ ID NO: 1632818 - RNA, 19 nt, Artificial Sequence
  Description of Artificial Sequence: Synthetic oligonucleotide
  Antisense strand to SEQ ID NO: 1632817
auguauaacagugugugac

SEQ ID NO: 1632819 - RNA, 19 nt, Artificial Sequence
  Description of Artificial Sequence: Synthetic oligonucleotide
  Sense strand starting at position 2291 of SEQ ID NO: 1560902
caguuuacauauggaagaa

SEQ ID NO: 1632820 - RNA, 19 nt, Artificial Sequence
  Description of Artificial Sequence: Synthetic oligonucleotide
  Antisense strand to SEQ ID NO: 1632819
uucuuccauauguaaacug

SEQ ID NO: 1632821 - RNA, 19 nt, Artificial Sequence
  Description of Artificial Sequence: Synthetic oligonucleotide
  Sense strand starting at position 2310 of SEQ ID NO: 1560902
gaaacagagucacagaagu

SEQ ID NO: 1632822 - RNA, 19 nt, Artificial Sequence
  Description of Artificial Sequence: Synthetic oligonucleotide
  Antisense strand to SEQ ID NO: 1632821
acuucugugacucuguuuc

SEQ ID NO: 1632823 - RNA, 19 nt, Artificial Sequence
  Description of Artificial Sequence: Synthetic oligonucleotide
  Sense strand starting at position 2323 of SEQ ID NO: 1560902
agaaguaaccgguguucca

SEQ ID NO: 1632824 - RNA, 19 nt, Artificial Sequence
  Description of Artificial Sequence: Synthetic oligonucleotide
  Antisense strand to SEQ ID NO: 1632823
uggaacaccgguuacuucu

SEQ ID NO: 1632825 - RNA, 19 nt, Artificial Sequence
  Description of Artificial Sequence: Synthetic oligonucleotide
  Sense strand starting at position 2330 of SEQ ID NO: 1560902
accgguguuccagggaaac

SEQ ID NO: 1632826 - RNA, 19 nt, Artificial Sequence
  Description of Artificial Sequence: Synthetic oligonucleotide
  Antisense strand to SEQ ID NO: 1632825
guuucccuggaacaccggu

SEQ ID NO: 1632827 - RNA, 19 nt, Artificial Sequence
  Description of Artificial Sequence: Synthetic oligonucleotide
  Sense strand starting at position 2332 of SEQ ID NO: 1560902
cgguguuccagggaaacua

SEQ ID NO: 1632828 - RNA, 19 nt, Artificial Sequence
  Description of Artificial Sequence: Synthetic oligonucleotide
  Antisense strand to SEQ ID NO: 1632827
uaguuucccuggaacaccg

SEQ ID NO: 1632829 - RNA, 19 nt, Artificial Sequence
  Description of Artificial Sequence: Synthetic oligonucleotide
  Sense strand starting at position 2343 of SEQ ID NO: 1560902
ggaaacuaauucuagaauc

SEQ ID NO: 1632830 - RNA, 19 nt, Artificial Sequence
  Description of Artificial Sequence: Synthetic oligonucleotide
  Antisense strand to SEQ ID NO: 1632829
gauucuagaauuaguuucc

SEQ ID NO: 1632831 - RNA, 19 nt, Artificial Sequence
  Description of Artificial Sequence: Synthetic oligonucleotide
  Sense strand starting at position 2353 of SEQ ID NO: 1560902
ucuagaaucuguguucuca

SEQ ID NO: 1632832 - RNA, 19 nt, Artificial Sequence
  Description of Artificial Sequence: Synthetic oligonucleotide
  Antisense strand to SEQ ID NO: 1632831
ugagaacacagauucuaga

SEQ ID NO: 1632833 - RNA, 19 nt, Artificial Sequence
  Description of Artificial Sequence: Synthetic oligonucleotide
  Sense strand starting at position 2361 of SEQ ID NO: 1560902
cuguguucucaacacaaca

SEQ ID NO: 1632834 - RNA, 19 nt, Artificial Sequence
  Description of Artificial Sequence: Synthetic oligonucleotide
  Antisense strand to SEQ ID NO: 1632833
uguuguguugagaacacag

SEQ ID NO: 1632835 - RNA, 19 nt, Artificial Sequence
  Description of Artificial Sequence: Synthetic oligonucleotide
  Sense strand starting at position 2904 of SEQ ID NO: 1560902
ccuggaaucgccuggaauc

SEQ ID NO: 1632836 - RNA, 19 nt, Artificial Sequence
  Description of Artificial Sequence: Synthetic oligonucleotide
  Antisense strand to SEQ ID NO: 1632835
gauuccaggcgauuccagg

SEQ ID NO: 1632837 - RNA, 19 nt, Artificial Sequence
  Description of Artificial Sequence: Synthetic oligonucleotide
  Sense strand starting at position 2943 of SEQ ID NO: 1560902
ugaauaauucccuguugcu

SEQ ID NO: 1632838 - RNA, 19 nt, Artificial Sequence
  Description of Artificial Sequence: Synthetic oligonucleotide
  Antisense strand to SEQ ID NO: 1632837
agcaacagggaauuauuca

SEQ ID NO: 1632839 - RNA, 19 nt, Artificial Sequence
  Description of Artificial Sequence: Synthetic oligonucleotide
  Sense strand starting at position 3068 of SEQ ID NO: 1560902
cucagagcauuagaaucuu

SEQ ID NO: 1632840 - RNA, 19 nt, Artificial Sequence
  Description of Artificial Sequence: Synthetic oligonucleotide
  Antisense strand to SEQ ID NO: 1632839
aagauucuaaugcucugag

SEQ ID NO: 1632841 - RNA, 19 nt, Artificial Sequence
  Description of Artificial Sequence: Synthetic oligonucleotide
  Sense strand starting at position 281 of SEQ ID NO: 1560903
caaacaugcuguccugaag

SEQ ID NO: 1632842 - RNA, 19 nt, Artificial Sequence
  Description of Artificial Sequence: Synthetic oligonucleotide
  Antisense strand to SEQ ID NO: 1632841
cuucaggacagcauguuug

SEQ ID NO: 1632843 - RNA, 19 nt, Artificial Sequence
  Description of Artificial Sequence: Synthetic oligonucleotide
  Sense strand starting at position 593 of SEQ ID NO: 1560903
ggagacauccgucggagaa

SEQ ID NO: 1632844 - RNA, 19 nt, Artificial Sequence
  Description of Artificial Sequence: Synthetic oligonucleotide
  Antisense strand to SEQ ID NO: 1632843
uucuccgacggaugucucc

SEQ ID NO: 1632845 - RNA, 19 nt, Artificial Sequence
  Description of Artificial Sequence: Synthetic oligonucleotide
  Sense strand starting at position 594 of SEQ ID NO: 1560903
gagacauccgucggagaag

SEQ ID NO: 1632846 - RNA, 19 nt, Artificial Sequence
  Description of Artificial Sequence: Synthetic oligonucleotide
  Antisense strand to SEQ ID NO: 1632845
cuucuccgacggaugucuc

SEQ ID NO: 1632847 - RNA, 19 nt, Artificial Sequence
  Description of Artificial Sequence: Synthetic oligonucleotide
  Sense strand starting at position 777 of SEQ ID NO: 1560903
aaggaagugcuccggaaag

SEQ ID NO: 1632848 - RNA, 19 nt, Artificial Sequence
  Description of Artificial Sequence: Synthetic oligonucleotide
  Antisense strand to SEQ ID NO: 1632847
cuuuccggagcacuuccuu

SEQ ID NO: 1632849 - RNA, 19 nt, Artificial Sequence
  Description of Artificial Sequence: Synthetic oligonucleotide
  Sense strand starting at position 779 of SEQ ID NO: 1560903
ggaagugcuccggaaagag

SEQ ID NO: 1632850 - RNA, 19 nt, Artificial Sequence
  Description of Artificial Sequence: Synthetic oligonucleotide
  Antisense strand to SEQ ID NO: 1632849
cucuuuccggagcacuucc

SEQ ID NO: 1632851 - RNA, 19 nt, Artificial Sequence
  Description of Artificial Sequence: Synthetic oligonucleotide
  Sense strand starting at position 2236 of SEQ ID NO: 1560903
aguggaaaucgccagauga

SEQ ID NO: 1632852 - RNA, 19 nt, Artificial Sequence
  Description of Artificial Sequence: Synthetic oligonucleotide
  Antisense strand to SEQ ID NO: 1632851
ucaucuggcgauuuccacu

SEQ ID NO: 1632853 - RNA, 19 nt, Artificial Sequence
  Description of Artificial Sequence: Synthetic oligonucleotide
  Sense strand starting at position 2325 of SEQ ID NO: 1560903
guguguagcaccggguaaa

SEQ ID NO: 1632854 - RNA, 19 nt, Artificial Sequence
  Description of Artificial Sequence: Synthetic oligonucleotide
  Antisense strand to SEQ ID NO: 1632853
uuuacccggugcuacacac

SEQ ID NO: 1632855 - RNA, 19 nt, Artificial Sequence
  Description of Artificial Sequence: Synthetic oligonucleotide
  Sense strand starting at position 2697 of SEQ ID NO: 1560903
cuguaauccugcugggaug

SEQ ID NO: 1632856 - RNA, 19 nt, Artificial Sequence
  Description of Artificial Sequence: Synthetic oligonucleotide
  Antisense strand to SEQ ID NO: 1632855
caucccagcaggauuacag

SEQ ID NO: 1632857 - RNA, 19 nt, Artificial Sequence
  Description of Artificial Sequence: Synthetic oligonucleotide
  Sense strand starting at position 2698 of SEQ ID NO: 1560903
uguaauccugcugggauga

SEQ ID NO: 1632858 - RNA, 19 nt, Artificial Sequence
  Description of Artificial Sequence: Synthetic oligonucleotide
  Antisense strand to SEQ ID NO: 1632857
ucaucccagcaggauuaca

SEQ ID NO: 1632859 - RNA, 19 nt, Artificial Sequence
  Description of Artificial Sequence: Synthetic oligonucleotide
  Sense strand starting at position 2793 of SEQ ID NO: 1560903
ccacgagagcgggaucuuu

SEQ ID NO: 1632860 - RNA, 19 nt, Artificial Sequence
  Description of Artificial Sequence: Synthetic oligonucleotide
  Antisense strand to SEQ ID NO: 1632859
aaagaucccgcucucgugg

SEQ ID NO: 1632861 - RNA, 19 nt, Artificial Sequence
  Description of Artificial Sequence: Synthetic oligonucleotide
  Sense strand starting at position 2831 of SEQ ID NO: 1560903
guccucgguucuuagaaca

SEQ ID NO: 1632862 - RNA, 19 nt, Artificial Sequence
  Description of Artificial Sequence: Synthetic oligonucleotide
  Antisense strand to SEQ ID NO: 1632861
uguucuaagaaccgaggac

SEQ ID NO: 1632863 - RNA, 19 nt, Artificial Sequence
  Description of Artificial Sequence: Synthetic oligonucleotide
  Sense strand starting at position 2856 of SEQ ID NO: 1560903
gagagaaccugaucgcaaa

SEQ ID NO: 1632864 - RNA, 19 nt, Artificial Sequence
  Description of Artificial Sequence: Synthetic oligonucleotide
  Antisense strand to SEQ ID NO: 1632863
uuugcgaucagguucucuc

SEQ ID NO: 1632865 - RNA, 19 nt, Artificial Sequence
  Description of Artificial Sequence: Synthetic oligonucleotide
  Sense strand starting at position 2857 of SEQ ID NO: 1560903
agagaaccugaucgcaaau

SEQ ID NO: 1632866 - RNA, 19 nt, Artificial Sequence
  Description of Artificial Sequence: Synthetic oligonucleotide
  Antisense strand to SEQ ID NO: 1632865
auuugcgaucagguucucu

SEQ ID NO: 1632867 - RNA, 19 nt, Artificial Sequence
  Description of Artificial Sequence: Synthetic oligonucleotide
  Sense strand starting at position 2859 of SEQ ID NO: 1560903
agaaccugaucgcaaauau

SEQ ID NO: 1632868 - RNA, 19 nt, Artificial Sequence
  Description of Artificial Sequence: Synthetic oligonucleotide
  Antisense strand to SEQ ID NO: 1632867
auauuugcgaucagguucu

SEQ ID NO: 1632869 - RNA, 19 nt, Artificial Sequence
  Description of Artificial Sequence: Synthetic oligonucleotide
  Sense strand starting at position 3001 of SEQ ID NO: 1560903
aaaugaaauuugcggugaa

SEQ ID NO: 1632870 - RNA, 19 nt, Artificial Sequence
  Description of Artificial Sequence: Synthetic oligonucleotide
  Antisense strand to SEQ ID NO: 1632869
uucaccgcaaauuucauuu

SEQ ID NO: 1632871 - RNA, 19 nt, Artificial Sequence
  Description of Artificial Sequence: Synthetic oligonucleotide
  Sense strand starting at position 3002 of SEQ ID NO: 1560903
aaugaaauuugcggugaaa

SEQ ID NO: 1632872 - RNA, 19 nt, Artificial Sequence
  Description of Artificial Sequence: Synthetic oligonucleotide
  Antisense strand to SEQ ID NO: 1632871
uuucaccgcaaauuucauu

SEQ ID NO: 1632873 - RNA, 19 nt, Artificial Sequence
  Description of Artificial Sequence: Synthetic oligonucleotide
  Sense strand starting at position 3157 of SEQ ID NO: 1560903
aaugguaaucccugagcca

SEQ ID NO: 1632874 - RNA, 19 nt, Artificial Sequence
  Description of Artificial Sequence: Synthetic oligonucleotide
  Antisense strand to SEQ ID NO: 1632873
uggcucagggauuaccauu

SEQ ID NO: 1632875 - RNA, 19 nt, Artificial Sequence
  Description of Artificial Sequence: Synthetic oligonucleotide
  Sense strand starting at position 3549 of SEQ ID NO: 1560903
cucugaaguccuuggguuu

SEQ ID NO: 1632876 - RNA, 19 nt, Artificial Sequence
  Description of Artificial Sequence: Synthetic oligonucleotide
  Antisense strand to SEQ ID NO: 1632875
aaacccaaggacuucagag

SEQ ID NO: 1632877 - RNA, 19 nt, Artificial Sequence
  Description of Artificial Sequence: Synthetic oligonucleotide
  Sense strand starting at position 3562 of SEQ ID NO: 1560903
ggguuugcgcggagacgua

SEQ ID NO: 1632878 - RNA, 19 nt, Artificial Sequence
  Description of Artificial Sequence: Synthetic oligonucleotide
  Antisense strand to SEQ ID NO: 1632877
uacgucuccgcgcaaaccc

SEQ ID NO: 1632879 - RNA, 19 nt, Artificial Sequence
  Description of Artificial Sequence: Synthetic oligonucleotide
  Sense strand starting at position 3641 of SEQ ID NO: 1560903
ugcugcugcuguuacgaaa

SEQ ID NO: 1632880 - RNA, 19 nt, Artificial Sequence
  Description of Artificial Sequence: Synthetic oligonucleotide
  Antisense strand to SEQ ID NO: 1632879
uuucguaacagcagcagca

SEQ ID NO: 1632881 - RNA, 19 nt, Artificial Sequence
  Description of Artificial Sequence: Synthetic oligonucleotide
  Sense strand starting at position 3691 of SEQ ID NO: 1560903
ugaaacauccggcgacuca

SEQ ID NO: 1632882 - RNA, 19 nt, Artificial Sequence
  Description of Artificial Sequence: Synthetic oligonucleotide
  Antisense strand to SEQ ID NO: 1632881
ugagucgccggauguuuca

SEQ ID NO: 1632883 - RNA, 19 nt, Artificial Sequence
  Description of Artificial Sequence: Synthetic oligonucleotide
  Sense strand starting at position 3692 of SEQ ID NO: 1560903
gaaacauccggcgacucaa

SEQ ID NO: 1632884 - RNA, 19 nt, Artificial Sequence
  Description of Artificial Sequence: Synthetic oligonucleotide
  Antisense strand to SEQ ID NO: 1632883
uugagucgccggauguuuc

SEQ ID NO: 1632885 - RNA, 19 nt, Artificial Sequence
  Description of Artificial Sequence: Synthetic oligonucleotide
  Sense strand starting at position 3759 of SEQ ID NO: 1560903
aguagagcaacuugucagu

SEQ ID NO: 1632886 - RNA, 19 nt, Artificial Sequence
  Description of Artificial Sequence: Synthetic oligonucleotide
  Antisense strand to SEQ ID NO: 1632885
acugacaaguugcucuacu

SEQ ID NO: 1632887 - RNA, 19 nt, Artificial Sequence
  Description of Artificial Sequence: Synthetic oligonucleotide
  Sense strand starting at position 3762 of SEQ ID NO: 1560903
agagcaacuugucaguagu

SEQ ID NO: 1632888 - RNA, 19 nt, Artificial Sequence
  Description of Artificial Sequence: Synthetic oligonucleotide
  Antisense strand to SEQ ID NO: 1632887
acuacugacaaguugcucu

SEQ ID NO: 1632889 - RNA, 19 nt, Artificial Sequence
  Description of Artificial Sequence: Synthetic oligonucleotide
  Sense strand starting at position 3764 of SEQ ID NO: 1560903
agcaacuugucaguaguuu

SEQ ID NO: 1632890 - RNA, 19 nt, Artificial Sequence
  Description of Artificial Sequence: Synthetic oligonucleotide
  Antisense strand to SEQ ID NO: 1632889
aaacuacugacaaguugcu

SEQ ID NO: 1632891 - RNA, 19 nt, Artificial Sequence
  Description of Artificial Sequence: Synthetic oligonucleotide
  Sense strand starting at position 12 of SEQ ID NO: 1560904
gucugacgcccagguuaau

SEQ ID NO: 1632892 - RNA, 19 nt, Artificial Sequence
  Description of Artificial Sequence: Synthetic oligonucleotide
  Antisense strand to SEQ ID NO: 1632891
auuaaccugggcgucagac

SEQ ID NO: 1632893 - RNA, 19 nt, Artificial Sequence
  Description of Artificial Sequence: Synthetic oligonucleotide
  Sense strand starting at position 67 of SEQ ID NO: 1560904
ggagaucugccucgguguu

SEQ ID NO: 1632894 - RNA, 19 nt, Artificial Sequence
  Description of Artificial Sequence: Synthetic oligonucleotide
  Antisense strand to SEQ ID NO: 1632893
aacaccgaggcagaucucc

SEQ ID NO: 1632895 - RNA, 19 nt, Artificial Sequence
  Description of Artificial Sequence: Synthetic oligonucleotide
  Sense strand starting at position 68 of SEQ ID NO: 1560904
gagaucugccucgguguuu

SEQ ID NO: 1632896 - RNA, 19 nt, Artificial Sequence
  Description of Artificial Sequence: Synthetic oligonucleotide
  Antisense strand to SEQ ID NO: 1632895
aaacaccgaggcagaucuc

SEQ ID NO: 1632897 - RNA, 19 nt, Artificial Sequence
  Description of Artificial Sequence: Synthetic oligonucleotide
  Sense strand starting at position 215 of SEQ ID NO: 1560904
ccuuaauucugcucagaga

SEQ ID NO: 1632898 - RNA, 19 nt, Artificial Sequence
  Description of Artificial Sequence: Synthetic oligonucleotide
  Antisense strand to SEQ ID NO: 1632897
ucucugagcagaauuaagg

SEQ ID NO: 1632899 - RNA, 19 nt, Artificial Sequence
  Description of Artificial Sequence: Synthetic oligonucleotide
  Sense strand starting at position 216 of SEQ ID NO: 1560904
cuuaauucugcucagagac

SEQ ID NO: 1632900 - RNA, 19 nt, Artificial Sequence
  Description of Artificial Sequence: Synthetic oligonucleotide
  Antisense strand to SEQ ID NO: 1632899
gucucugagcagaauuaag

SEQ ID NO: 1632901 - RNA, 19 nt, Artificial Sequence
  Description of Artificial Sequence: Synthetic oligonucleotide
  Sense strand starting at position 234 of SEQ ID NO: 1560904
ccuagaagaucggucgaga

SEQ ID NO: 1632902 - RNA, 19 nt, Artificial Sequence
  Description of Artificial Sequence: Synthetic oligonucleotide
  Antisense strand to SEQ ID NO: 1632901
ucucgaccgaucuucuagg

SEQ ID NO: 1632903 - RNA, 19 nt, Artificial Sequence
  Description of Artificial Sequence: Synthetic oligonucleotide
  Sense strand starting at position 504 of SEQ ID NO: 1560904
aacggaguuuccuucuaag

SEQ ID NO: 1632904 - RNA, 19 nt, Artificial Sequence
  Description of Artificial Sequence: Synthetic oligonucleotide
  Antisense strand to SEQ ID NO: 1632903
cuuagaaggaaacuccguu

SEQ ID NO: 1632905 - RNA, 19 nt, Artificial Sequence
  Description of Artificial Sequence: Synthetic oligonucleotide
  Sense strand starting at position 507 of SEQ ID NO: 1560904
ggaguuuccuucuaaggau

SEQ ID NO: 1632906 - RNA, 19 nt, Artificial Sequence
  Description of Artificial Sequence: Synthetic oligonucleotide
  Antisense strand to SEQ ID NO: 1632905
auccuuagaaggaaacucc

SEQ ID NO: 1632907 - RNA, 19 nt, Artificial Sequence
  Description of Artificial Sequence: Synthetic oligonucleotide
  Sense strand starting at position 822 of SEQ ID NO: 1560904
acuuguagucccggaggga

SEQ ID NO: 1632908 - RNA, 19 nt, Artificial Sequence
  Description of Artificial Sequence: Synthetic oligonucleotide
  Antisense strand to SEQ ID NO: 1632907
ucccuccgggacuacaagu

SEQ ID NO: 1632909 - RNA, 19 nt, Artificial Sequence
  Description of Artificial Sequence: Synthetic oligonucleotide
  Sense strand starting at position 1197 of SEQ ID NO: 1560904
ugggaauuguaguccugga

SEQ ID NO: 1632910 - RNA, 19 nt, Artificial Sequence
  Description of Artificial Sequence: Synthetic oligonucleotide
  Antisense strand to SEQ ID NO: 1632909
uccaggacuacaauuccca

SEQ ID NO: 1632911 - RNA, 19 nt, Artificial Sequence
  Description of Artificial Sequence: Synthetic oligonucleotide
  Sense strand starting at position 1257 of SEQ ID NO: 1560904
aaggaaaccgucuggagau

SEQ ID NO: 1632912 - RNA, 19 nt, Artificial Sequence
  Description of Artificial Sequence: Synthetic oligonucleotide
  Antisense strand to SEQ ID NO: 1632911
aucuccagacgguuuccuu

SEQ ID NO: 1632913 - RNA, 19 nt, Artificial Sequence
  Description of Artificial Sequence: Synthetic oligonucleotide
  Sense strand starting at position 1367 of SEQ ID NO: 1560904
ggaguaggauccuaaaucu

SEQ ID NO: 1632914 - RNA, 19 nt, Artificial Sequence
  Description of Artificial Sequence: Synthetic oligonucleotide
  Antisense strand to SEQ ID NO: 1632913
agauuuaggauccuacucc

SEQ ID NO: 1632915 - RNA, 19 nt, Artificial Sequence
  Description of Artificial Sequence: Synthetic oligonucleotide
  Sense strand starting at position 1593 of SEQ ID NO: 1560904
uccugaaagucaucgaggu

SEQ ID NO: 1632916 - RNA, 19 nt, Artificial Sequence
  Description of Artificial Sequence: Synthetic oligonucleotide
  Antisense strand to SEQ ID NO: 1632915
accucgaugacuuucagga

SEQ ID NO: 1632917 - RNA, 19 nt, Artificial Sequence
  Description of Artificial Sequence: Synthetic oligonucleotide
  Sense strand starting at position 1594 of SEQ ID NO: 1560904
ccugaaagucaucgagguu

SEQ ID NO: 1632918 - RNA, 19 nt, Artificial Sequence
  Description of Artificial Sequence: Synthetic oligonucleotide
  Antisense strand to SEQ ID NO: 1632917
aaccucgaugacuuucagg

SEQ ID NO: 1632919 - RNA, 19 nt, Artificial Sequence
  Description of Artificial Sequence: Synthetic oligonucleotide
  Sense strand starting at position 1595 of SEQ ID NO: 1560904
cugaaagucaucgagguuu

SEQ ID NO: 1632920 - RNA, 19 nt, Artificial Sequence
  Description of Artificial Sequence: Synthetic oligonucleotide
  Antisense strand to SEQ ID NO: 1632919
aaaccucgaugacuuucag

SEQ ID NO: 1632921 - RNA, 19 nt, Artificial Sequence
  Description of Artificial Sequence: Synthetic oligonucleotide
  Sense strand starting at position 1606 of SEQ ID NO: 1560904
cgagguuucccacgcauga

SEQ ID NO: 1632922 - RNA, 19 nt, Artificial Sequence
  Description of Artificial Sequence: Synthetic oligonucleotide
  Antisense strand to SEQ ID NO: 1632921
ucaugcgugggaaaccucg

SEQ ID NO: 1632923 - RNA, 19 nt, Artificial Sequence
  Description of Artificial Sequence: Synthetic oligonucleotide
  Sense strand starting at position 1608 of SEQ ID NO: 1560904
agguuucccacgcaugaga

SEQ ID NO: 1632924 - RNA, 19 nt, Artificial Sequence
  Description of Artificial Sequence: Synthetic oligonucleotide
  Antisense strand to SEQ ID NO: 1632923
ucucaugcgugggaaaccu

SEQ ID NO: 1632925 - RNA, 19 nt, Artificial Sequence
  Description of Artificial Sequence: Synthetic oligonucleotide
  Sense strand starting at position 1854 of SEQ ID NO: 1560904
ccagucaaguucugaacuu

SEQ ID NO: 1632926 - RNA, 19 nt, Artificial Sequence
  Description of Artificial Sequence: Synthetic oligonucleotide
  Antisense strand to SEQ ID NO: 1632925
aaguucagaacuugacugg

SEQ ID NO: 1632927 - RNA, 19 nt, Artificial Sequence
  Description of Artificial Sequence: Synthetic oligonucleotide
  Sense strand starting at position 2570 of SEQ ID NO: 1560904
ggguuggaucggugaaauu

SEQ ID NO: 1632928 - RNA, 19 nt, Artificial Sequence
  Description of Artificial Sequence: Synthetic oligonucleotide
  Antisense strand to SEQ ID NO: 1632927
aauuucaccgauccaaccc

SEQ ID NO: 1632929 - RNA, 19 nt, Artificial Sequence
  Description of Artificial Sequence: Synthetic oligonucleotide
  Sense strand starting at position 2571 of SEQ ID NO: 1560904
gguuggaucggugaaauug

SEQ ID NO: 1632930 - RNA, 19 nt, Artificial Sequence
  Description of Artificial Sequence: Synthetic oligonucleotide
  Antisense strand to SEQ ID NO: 1632929
caauuucaccgauccaacc

SEQ ID NO: 1632931 - RNA, 19 nt, Artificial Sequence
  Description of Artificial Sequence: Synthetic oligonucleotide
  Sense strand starting at position 2643 of SEQ ID NO: 1560904
uggagugcucacgagguua

SEQ ID NO: 1632932 - RNA, 19 nt, Artificial Sequence
  Description of Artificial Sequence: Synthetic oligonucleotide
  Antisense strand to SEQ ID NO: 1632931
uaaccucgugagcacucca

SEQ ID NO: 1632933 - RNA, 19 nt, Artificial Sequence
  Description of Artificial Sequence: Synthetic oligonucleotide
  Sense strand starting at position 2645 of SEQ ID NO: 1560904
gagugcucacgagguuaag

SEQ ID NO: 1632934 - RNA, 19 nt, Artificial Sequence
  Description of Artificial Sequence: Synthetic oligonucleotide
  Antisense strand to SEQ ID NO: 1632933
cuuaaccucgugagcacuc

SEQ ID NO: 1632935 - RNA, 19 nt, Artificial Sequence
  Description of Artificial Sequence: Synthetic oligonucleotide
  Sense strand starting at position 2883 of SEQ ID NO: 1560904
aauggugaguggucuuguu

SEQ ID NO: 1632936 - RNA, 19 nt, Artificial Sequence
  Description of Artificial Sequence: Synthetic oligonucleotide
  Antisense strand to SEQ ID NO: 1632935
aacaagaccacucaccauu

SEQ ID NO: 1632937 - RNA, 19 nt, Artificial Sequence
  Description of Artificial Sequence: Synthetic oligonucleotide
  Sense strand starting at position 2890 of SEQ ID NO: 1560904
aguggucuuguugacggaa

SEQ ID NO: 1632938 - RNA, 19 nt, Artificial Sequence
  Description of Artificial Sequence: Synthetic oligonucleotide
  Antisense strand to SEQ ID NO: 1632937
uuccgucaacaagaccacu

SEQ ID NO: 1632939 - RNA, 19 nt, Artificial Sequence
  Description of Artificial Sequence: Synthetic oligonucleotide
  Sense strand starting at position 2932 of SEQ ID NO: 1560904
aagagcggguucuugaauu

SEQ ID NO: 1632940 - RNA, 19 nt, Artificial Sequence
  Description of Artificial Sequence: Synthetic oligonucleotide
  Antisense strand to SEQ ID NO: 1632939
aauucaagaacccgcucuu

SEQ ID NO: 1632941 - RNA, 19 nt, Artificial Sequence
  Description of Artificial Sequence: Synthetic oligonucleotide
  Sense strand starting at position 2942 of SEQ ID NO: 1560904
ucuugaauuugucacagga

SEQ ID NO: 1632942 - RNA, 19 nt, Artificial Sequence
  Description of Artificial Sequence: Synthetic oligonucleotide
  Antisense strand to SEQ ID NO: 1632941
uccugugacaaauucaaga

SEQ ID NO: 1632943 - RNA, 19 nt, Artificial Sequence
  Description of Artificial Sequence: Synthetic oligonucleotide
  Sense strand starting at position 2944 of SEQ ID NO: 1560904
uugaauuugucacaggaaa

SEQ ID NO: 1632944 - RNA, 19 nt, Artificial Sequence
  Description of Artificial Sequence: Synthetic oligonucleotide
  Antisense strand to SEQ ID NO: 1632943
uuuccugugacaaauucaa

SEQ ID NO: 1632945 - RNA, 19 nt, Artificial Sequence
  Description of Artificial Sequence: Synthetic oligonucleotide
  Sense strand starting at position 2998 of SEQ ID NO: 1560904
acaaguuuauuggaaacua

SEQ ID NO: 1632946 - RNA, 19 nt, Artificial Sequence
  Description of Artificial Sequence: Synthetic oligonucleotide
  Antisense strand to SEQ ID NO: 1632945
uaguuuccaauaaacuugu

SEQ ID NO: 1632947 - RNA, 19 nt, Artificial Sequence
  Description of Artificial Sequence: Synthetic oligonucleotide
  Sense strand starting at position 3013 of SEQ ID NO: 1560904
acuacuccuuuacagagua

SEQ ID NO: 1632948 - RNA, 19 nt, Artificial Sequence
  Description of Artificial Sequence: Synthetic oligonucleotide
  Antisense strand to SEQ ID NO: 1632947
uacucuguaaaggaguagu

SEQ ID NO: 1632949 - RNA, 19 nt, Artificial Sequence
  Description of Artificial Sequence: Synthetic oligonucleotide
  Sense strand starting at position 3069 of SEQ ID NO: 1560904
cuuuguuaguauuucuacu

SEQ ID NO: 1632950 - RNA, 19 nt, Artificial Sequence
  Description of Artificial Sequence: Synthetic oligonucleotide
  Antisense strand to SEQ ID NO: 1632949
aguagaaauacuaacaaag

SEQ ID NO: 1632951 - RNA, 19 nt, Artificial Sequence
  Description of Artificial Sequence: Synthetic oligonucleotide
  Sense strand starting at position 3127 of SEQ ID NO: 1560904
ugcagauaagcucacuaaa

SEQ ID NO: 1632952 - RNA, 19 nt, Artificial Sequence
  Description of Artificial Sequence: Synthetic oligonucleotide
  Antisense strand to SEQ ID NO: 1632951
uuuagugagcuuaucugca

SEQ ID NO: 1632953 - RNA, 19 nt, Artificial Sequence
  Description of Artificial Sequence: Synthetic oligonucleotide
  Sense strand starting at position 3158 of SEQ ID NO: 1560904
ugguguuauccacgaccau

SEQ ID NO: 1632954 - RNA, 19 nt, Artificial Sequence
  Description of Artificial Sequence: Synthetic oligonucleotide
  Antisense strand to SEQ ID NO: 1632953
auggucguggauaacacca

SEQ ID NO: 1632955 - RNA, 19 nt, Artificial Sequence
  Description of Artificial Sequence: Synthetic oligonucleotide
  Sense strand starting at position 3159 of SEQ ID NO: 1560904
gguguuauccacgaccauu

SEQ ID NO: 1632956 - RNA, 19 nt, Artificial Sequence
  Description of Artificial Sequence: Synthetic oligonucleotide
  Antisense strand to SEQ ID NO: 1632955
aauggucguggauaacacc

SEQ ID NO: 1632957 - RNA, 19 nt, Artificial Sequence
  Description of Artificial Sequence: Synthetic oligonucleotide
  Sense strand starting at position 3162 of SEQ ID NO: 1560904
guuauccacgaccauuaau

SEQ ID NO: 1632958 - RNA, 19 nt, Artificial Sequence
  Description of Artificial Sequence: Synthetic oligonucleotide
  Antisense strand to SEQ ID NO: 1632957
auuaauggucguggauaac

SEQ ID NO: 1632959 - RNA, 19 nt, Artificial Sequence
  Description of Artificial Sequence: Synthetic oligonucleotide
  Sense strand starting at position 3194 of SEQ ID NO: 1560904
cuugcucauuuauguuaua

SEQ ID NO: 1632960 - RNA, 19 nt, Artificial Sequence
  Description of Artificial Sequence: Synthetic oligonucleotide
  Antisense strand to SEQ ID NO: 1632959
uauaacauaaaugagcaag

SEQ ID NO: 1632961 - RNA, 19 nt, Artificial Sequence
  Description of Artificial Sequence: Synthetic oligonucleotide
  Sense strand starting at position 3228 of SEQ ID NO: 1560904
cugcauucuuaggacauuu

SEQ ID NO: 1632962 - RNA, 19 nt, Artificial Sequence
  Description of Artificial Sequence: Synthetic oligonucleotide
  Antisense strand to SEQ ID NO: 1632961
aaauguccuaagaaugcag

SEQ ID NO: 1632963 - RNA, 19 nt, Artificial Sequence
  Description of Artificial Sequence: Synthetic oligonucleotide
  Sense strand starting at position 3264 of SEQ ID NO: 1560904
gguggaacauguucuguau

SEQ ID NO: 1632964 - RNA, 19 nt, Artificial Sequence
  Description of Artificial Sequence: Synthetic oligonucleotide
  Antisense strand to SEQ ID NO: 1632963
auacagaacauguuccacc

SEQ ID NO: 1632965 - RNA, 19 nt, Artificial Sequence
  Description of Artificial Sequence: Synthetic oligonucleotide
  Sense strand starting at position 3273 of SEQ ID NO: 1560904
uguucuguauggccauaaa

SEQ ID NO: 1632966 - RNA, 19 nt, Artificial Sequence
  Description of Artificial Sequence: Synthetic oligonucleotide
  Antisense strand to SEQ ID NO: 1632965
uuuauggccauacagaaca

SEQ ID NO: 1632967 - RNA, 19 nt, Artificial Sequence
  Description of Artificial Sequence: Synthetic oligonucleotide
  Sense strand starting at position 3299 of SEQ ID NO: 1560904
uaauuauaauuggugguca

SEQ ID NO: 1632968 - RNA, 19 nt, Artificial Sequence
  Description of Artificial Sequence: Synthetic oligonucleotide
  Antisense strand to SEQ ID NO: 1632967
ugaccaccaauuauaauua

SEQ ID NO: 1632969 - RNA, 19 nt, Artificial Sequence
  Description of Artificial Sequence: Synthetic oligonucleotide
  Sense strand starting at position 3346 of SEQ ID NO: 1560904
aagcaugaaccuuguaagu

SEQ ID NO: 1632970 - RNA, 19 nt, Artificial Sequence
  Description of Artificial Sequence: Synthetic oligonucleotide
  Antisense strand to SEQ ID NO: 1632969
acuuacaagguucaugcuu

SEQ ID NO: 1632971 - RNA, 19 nt, Artificial Sequence
  Description of Artificial Sequence: Synthetic oligonucleotide
  Sense strand starting at position 2 of SEQ ID NO: 1560905
ucuacuugggcuuguuauu

SEQ ID NO: 1632972 - RNA, 19 nt, Artificial Sequence
  Description of Artificial Sequence: Synthetic oligonucleotide
  Antisense strand to SEQ ID NO: 1632971
aauaacaagcccaaguaga

SEQ ID NO: 1632973 - RNA, 19 nt, Artificial Sequence
  Description of Artificial Sequence: Synthetic oligonucleotide
  Sense strand starting at position 84 of SEQ ID NO: 1560905
ggguaugaggauugaguga

SEQ ID NO: 1632974 - RNA, 19 nt, Artificial Sequence
  Description of Artificial Sequence: Synthetic oligonucleotide
  Antisense strand to SEQ ID NO: 1632973
ucacucaauccucauaccc

SEQ ID NO: 1632975 - RNA, 19 nt, Artificial Sequence
  Description of Artificial Sequence: Synthetic oligonucleotide
  Sense strand starting at position 91 of SEQ ID NO: 1560905
aggauugagugacauaauu

SEQ ID NO: 1632976 - RNA, 19 nt, Artificial Sequence
  Description of Artificial Sequence: Synthetic oligonucleotide
  Antisense strand to SEQ ID NO: 1632975
aauuaugucacucaauccu

SEQ ID NO: 1632977 - RNA, 19 nt, Artificial Sequence
  Description of Artificial Sequence: Synthetic oligonucleotide
  Sense strand starting at position 108 of SEQ ID NO: 1560905
uuuauaagccgugauuaga

SEQ ID NO: 1632978 - RNA, 19 nt, Artificial Sequence
  Description of Artificial Sequence: Synthetic oligonucleotide
  Antisense strand to SEQ ID NO: 1632977
ucuaaucacggcuuauaaa

SEQ ID NO: 1632979 - RNA, 19 nt, Artificial Sequence
  Description of Artificial Sequence: Synthetic oligonucleotide
  Sense strand starting at position 116 of SEQ ID NO: 1560905
ccgugauuagaacaaugca

SEQ ID NO: 1632980 - RNA, 19 nt, Artificial Sequence
  Description of Artificial Sequence: Synthetic oligonucleotide
  Antisense strand to SEQ ID NO: 1632979
ugcauuguucuaaucacgg

SEQ ID NO: 1632981 - RNA, 19 nt, Artificial Sequence
  Description of Artificial Sequence: Synthetic oligonucleotide
  Sense strand starting at position 129 of SEQ ID NO: 1560905
aaugcagugcgcgaaauaa

SEQ ID NO: 1632982 - RNA, 19 nt, Artificial Sequence
  Description of Artificial Sequence: Synthetic oligonucleotide
  Antisense strand to SEQ ID NO: 1632981
uuauuucgcgcacugcauu

SEQ ID NO: 1632983 - RNA, 19 nt, Artificial Sequence
  Description of Artificial Sequence: Synthetic oligonucleotide
  Sense strand starting at position 174 of SEQ ID NO: 1560905
accagauguccuuggcugu

SEQ ID NO: 1632984 - RNA, 19 nt, Artificial Sequence
  Description of Artificial Sequence: Synthetic oligonucleotide
  Antisense strand to SEQ ID NO: 1632983
acagccaaggacaucuggu

SEQ ID NO: 1632985 - RNA, 19 nt, Artificial Sequence
  Description of Artificial Sequence: Synthetic oligonucleotide
  Sense strand starting at position 175 of SEQ ID NO: 1560905
ccagauguccuuggcuguu

SEQ ID NO: 1632986 - RNA, 19 nt, Artificial Sequence
  Description of Artificial Sequence: Synthetic oligonucleotide
  Antisense strand to SEQ ID NO: 1632985
aacagccaaggacaucugg

SEQ ID NO: 1632987 - RNA, 19 nt, Artificial Sequence
  Description of Artificial Sequence: Synthetic oligonucleotide
  Sense strand starting at position 290 of SEQ ID NO: 1560905
ucauacaagcccugaguuu

SEQ ID NO: 1632988 - RNA, 19 nt, Artificial Sequence
  Description of Artificial Sequence: Synthetic oligonucleotide
  Antisense strand to SEQ ID NO: 1632987
aaacucagggcuuguauga

SEQ ID NO: 1632989 - RNA, 19 nt, Artificial Sequence
  Description of Artificial Sequence: Synthetic oligonucleotide
  Sense strand starting at position 377 of SEQ ID NO: 1560905
gagucuggccagugaucac

SEQ ID NO: 1632990 - RNA, 19 nt, Artificial Sequence
  Description of Artificial Sequence: Synthetic oligonucleotide
  Antisense strand to SEQ ID NO: 1632989
gugaucacuggccagacuc

SEQ ID NO: 1632991 - RNA, 19 nt, Artificial Sequence
  Description of Artificial Sequence: Synthetic oligonucleotide
  Sense strand starting at position 589 of SEQ ID NO: 1560905
augcgagcuuuccuaccua

SEQ ID NO: 1632992 - RNA, 19 nt, Artificial Sequence
  Description of Artificial Sequence: Synthetic oligonucleotide
  Antisense strand to SEQ ID NO: 1632991
uagguaggaaagcucgcau

SEQ ID NO: 1632993 - RNA, 19 nt, Artificial Sequence
  Description of Artificial Sequence: Synthetic oligonucleotide
  Sense strand starting at position 617 of SEQ ID NO: 1560905
cagcucugagcuugguaca

SEQ ID NO: 1632994 - RNA, 19 nt, Artificial Sequence
  Description of Artificial Sequence: Synthetic oligonucleotide
  Antisense strand to SEQ ID NO: 1632993
uguaccaagcucagagcug

SEQ ID NO: 1632995 - RNA, 19 nt, Artificial Sequence
  Description of Artificial Sequence: Synthetic oligonucleotide
  Sense strand starting at position 652 of SEQ ID NO: 1560905
ggcaaccacgguuauuauu

SEQ ID NO: 1632996 - RNA, 19 nt, Artificial Sequence
  Description of Artificial Sequence: Synthetic oligonucleotide
  Antisense strand to SEQ ID NO: 1632995
aauaauaaccgugguugcc

SEQ ID NO: 1632997 - RNA, 19 nt, Artificial Sequence
  Description of Artificial Sequence: Synthetic oligonucleotide
  Sense strand starting at position 720 of SEQ ID NO: 1560905
gggaaacacuccucucuca

SEQ ID NO: 1632998 - RNA, 19 nt, Artificial Sequence
  Description of Artificial Sequence: Synthetic oligonucleotide
  Antisense strand to SEQ ID NO: 1632997
ugagagaggaguguuuccc

SEQ ID NO: 1632999 - RNA, 19 nt, Artificial Sequence
  Description of Artificial Sequence: Synthetic oligonucleotide
  Sense strand starting at position 978 of SEQ ID NO: 1560905
ggcagaagguuagucagaa

SEQ ID NO: 1633000 - RNA, 19 nt, Artificial Sequence
  Description of Artificial Sequence: Synthetic oligonucleotide
  Antisense strand to SEQ ID NO: 1632999
uucugacuaaccuucugcc

SEQ ID NO: 1633001 - RNA, 19 nt, Artificial Sequence
  Description of Artificial Sequence: Synthetic oligonucleotide
  Sense strand starting at position 979 of SEQ ID NO: 1560905
gcagaagguuagucagaaa

SEQ ID NO: 1633002 - RNA, 19 nt, Artificial Sequence
  Description of Artificial Sequence: Synthetic oligonucleotide
  Antisense strand to SEQ ID NO: 1633001
uuucugacuaaccuucugc

SEQ ID NO: 1633003 - RNA, 19 nt, Artificial Sequence
  Description of Artificial Sequence: Synthetic oligonucleotide
  Sense strand starting at position 1054 of SEQ ID NO: 1560905
gcagaauccugacccuaca

SEQ ID NO: 1633004 - RNA, 19 nt, Artificial Sequence
  Description of Artificial Sequence: Synthetic oligonucleotide
  Antisense strand to SEQ ID NO: 1633003
uguagggucaggauucugc

SEQ ID NO: 1633005 - RNA, 19 nt, Artificial Sequence
  Description of Artificial Sequence: Synthetic oligonucleotide
  Sense strand starting at position 1073 of SEQ ID NO: 1560905
aacucuacugccuguguga

SEQ ID NO: 1633006 - RNA, 19 nt, Artificial Sequence
  Description of Artificial Sequence: Synthetic oligonucleotide
  Antisense strand to SEQ ID NO: 1633005
ucacacaggcaguagaguu

SEQ ID NO: 1633007 - RNA, 19 nt, Artificial Sequence
  Description of Artificial Sequence: Synthetic oligonucleotide
  Sense strand starting at position 1112 of SEQ ID NO: 1560905
ccuuccucuccguguaaug

SEQ ID NO: 1633008 - RNA, 19 nt, Artificial Sequence
  Description of Artificial Sequence: Synthetic oligonucleotide
  Antisense strand to SEQ ID NO: 1633007
cauuacacggagaggaagg

SEQ ID NO: 1633009 - RNA, 19 nt, Artificial Sequence
  Description of Artificial Sequence: Synthetic oligonucleotide
  Sense strand starting at position 1130 of SEQ ID NO: 1560905
gguuaaaugcccggcuaug

SEQ ID NO: 1633010 - RNA, 19 nt, Artificial Sequence
  Description of Artificial Sequence: Synthetic oligonucleotide
  Antisense strand to SEQ ID NO: 1633009
cauagccgggcauuuaacc

SEQ ID NO: 1633011 - RNA, 19 nt, Artificial Sequence
  Description of Artificial Sequence: Synthetic oligonucleotide
  Sense strand starting at position 1169 of SEQ ID NO: 1560905
agccgcuuuccggaauucu

SEQ ID NO: 1633012 - RNA, 19 nt, Artificial Sequence
  Description of Artificial Sequence: Synthetic oligonucleotide
  Antisense strand to SEQ ID NO: 1633011
agaauuccggaaagcggcu

SEQ ID NO: 1633013 - RNA, 19 nt, Artificial Sequence
  Description of Artificial Sequence: Synthetic oligonucleotide
  Sense strand starting at position 1307 of SEQ ID NO: 1560905
gucugacgcccagguuaau

SEQ ID NO: 1633014 - RNA, 19 nt, Artificial Sequence
  Description of Artificial Sequence: Synthetic oligonucleotide
  Antisense strand to SEQ ID NO: 1633013
auuaaccugggcgucagac

SEQ ID NO: 1633015 - RNA, 19 nt, Artificial Sequence
  Description of Artificial Sequence: Synthetic oligonucleotide
  Sense strand starting at position 1362 of SEQ ID NO: 1560905
ggagaucugccucgguguu

SEQ ID NO: 1633016 - RNA, 19 nt, Artificial Sequence
  Description of Artificial Sequence: Synthetic oligonucleotide
  Antisense strand to SEQ ID NO: 1633015
aacaccgaggcagaucucc

SEQ ID NO: 1633017 - RNA, 19 nt, Artificial Sequence
  Description of Artificial Sequence: Synthetic oligonucleotide
  Sense strand starting at position 1510 of SEQ ID NO: 1560905
ccuuaauucugcucagaga

SEQ ID NO: 1633018 - RNA, 19 nt, Artificial Sequence
  Description of Artificial Sequence: Synthetic oligonucleotide
  Antisense strand to SEQ ID NO: 1633017
ucucugagcagaauuaagg

SEQ ID NO: 1633019 - RNA, 19 nt, Artificial Sequence
  Description of Artificial Sequence: Synthetic oligonucleotide
  Sense strand starting at position 1511 of SEQ ID NO: 1560905
cuuaauucugcucagagac

SEQ ID NO: 1633020 - RNA, 19 nt, Artificial Sequence
  Description of Artificial Sequence: Synthetic oligonucleotide
  Antisense strand to SEQ ID NO: 1633019
gucucugagcagaauuaag

SEQ ID NO: 1633021 - RNA, 19 nt, Artificial Sequence
  Description of Artificial Sequence: Synthetic oligonucleotide
  Sense strand starting at position 1529 of SEQ ID NO: 1560905
ccuagaagaucggucgaga

SEQ ID NO: 1633022 - RNA, 19 nt, Artificial Sequence
  Description of Artificial Sequence: Synthetic oligonucleotide
  Antisense strand to SEQ ID NO: 1633021
ucucgaccgaucuucuagg

SEQ ID NO: 1633023 - RNA, 19 nt, Artificial Sequence
  Description of Artificial Sequence: Synthetic oligonucleotide
  Sense strand starting at position 1799 of SEQ ID NO: 1560905
aacggaguuuccuucuaag

SEQ ID NO: 1633024 - RNA, 19 nt, Artificial Sequence
  Description of Artificial Sequence: Synthetic oligonucleotide
  Antisense strand to SEQ ID NO: 1633023
cuuagaaggaaacuccguu

SEQ ID NO: 1633025 - RNA, 19 nt, Artificial Sequence
  Description of Artificial Sequence: Synthetic oligonucleotide
  Sense strand starting at position 2117 of SEQ ID NO: 1560905
acuuguagucccggaggga

SEQ ID NO: 1633026 - RNA, 19 nt, Artificial Sequence
  Description of Artificial Sequence: Synthetic oligonucleotide
  Antisense strand to SEQ ID NO: 1633025
ucccuccgggacuacaagu

SEQ ID NO: 1633027 - RNA, 19 nt, Artificial Sequence
  Description of Artificial Sequence: Synthetic oligonucleotide
  Sense strand starting at position 2492 of SEQ ID NO: 1560905
ugggaauuguaguccugga

SEQ ID NO: 1633028 - RNA, 19 nt, Artificial Sequence
  Description of Artificial Sequence: Synthetic oligonucleotide
  Antisense strand to SEQ ID NO: 1633027
uccaggacuacaauuccca

SEQ ID NO: 1633029 - RNA, 19 nt, Artificial Sequence
  Description of Artificial Sequence: Synthetic oligonucleotide
  Sense strand starting at position 2552 of SEQ ID NO: 1560905
aaggaaaccgucuggagau

SEQ ID NO: 1633030 - RNA, 19 nt, Artificial Sequence
  Description of Artificial Sequence: Synthetic oligonucleotide
  Antisense strand to SEQ ID NO: 1633029
aucuccagacgguuuccuu

SEQ ID NO: 1633031 - RNA, 19 nt, Artificial Sequence
  Description of Artificial Sequence: Synthetic oligonucleotide
  Sense strand starting at position 2662 of SEQ ID NO: 1560905
ggaguaggauccuaaaucu

SEQ ID NO: 1633032 - RNA, 19 nt, Artificial Sequence
  Description of Artificial Sequence: Synthetic oligonucleotide
  Antisense strand to SEQ ID NO: 1633031
agauuuaggauccuacucc

SEQ ID NO: 1633033 - RNA, 19 nt, Artificial Sequence
  Description of Artificial Sequence: Synthetic oligonucleotide
  Sense strand starting at position 2888 of SEQ ID NO: 1560905
uccugaaagucaucgaggu

SEQ ID NO: 1633034 - RNA, 19 nt, Artificial Sequence
  Description of Artificial Sequence: Synthetic oligonucleotide
  Antisense strand to SEQ ID NO: 1633033
accucgaugacuuucagga

SEQ ID NO: 1633035 - RNA, 19 nt, Artificial Sequence
  Description of Artificial Sequence: Synthetic oligonucleotide
  Sense strand starting at position 2889 of SEQ ID NO: 1560905
ccugaaagucaucgagguu

SEQ ID NO: 1633036 - RNA, 19 nt, Artificial Sequence
  Description of Artificial Sequence: Synthetic oligonucleotide
  Antisense strand to SEQ ID NO: 1633035
aaccucgaugacuuucagg

SEQ ID NO: 1633037 - RNA, 19 nt, Artificial Sequence
  Description of Artificial Sequence: Synthetic oligonucleotide
  Sense strand starting at position 2890 of SEQ ID NO: 1560905
cugaaagucaucgagguuu

SEQ ID NO: 1633038 - RNA, 19 nt, Artificial Sequence
  Description of Artificial Sequence: Synthetic oligonucleotide
  Antisense strand to SEQ ID NO: 1633037
aaaccucgaugacuuucag

SEQ ID NO: 1633039 - RNA, 19 nt, Artificial Sequence
  Description of Artificial Sequence: Synthetic oligonucleotide
  Sense strand starting at position 2901 of SEQ ID NO: 1560905
cgagguuucccacgcauga

SEQ ID NO: 1633040 - RNA, 19 nt, Artificial Sequence
  Description of Artificial Sequence: Synthetic oligonucleotide
  Antisense strand to SEQ ID NO: 1633039
ucaugcgugggaaaccucg

SEQ ID NO: 1633041 - RNA, 19 nt, Artificial Sequence
  Description of Artificial Sequence: Synthetic oligonucleotide
  Sense strand starting at position 2903 of SEQ ID NO: 1560905
agguuucccacgcaugaga

SEQ ID NO: 1633042 - RNA, 19 nt, Artificial Sequence
  Description of Artificial Sequence: Synthetic oligonucleotide
  Antisense strand to SEQ ID NO: 1633041
ucucaugcgugggaaaccu

SEQ ID NO: 1633043 - RNA, 19 nt, Artificial Sequence
  Description of Artificial Sequence: Synthetic oligonucleotide
  Sense strand starting at position 3865 of SEQ ID NO: 1560905
ggguuggaucggugaaauu

SEQ ID NO: 1633044 - RNA, 19 nt, Artificial Sequence
  Description of Artificial Sequence: Synthetic oligonucleotide
  Antisense strand to SEQ ID NO: 1633043
aauuucaccgauccaaccc

SEQ ID NO: 1633045 - RNA, 19 nt, Artificial Sequence
  Description of Artificial Sequence: Synthetic oligonucleotide
  Sense strand starting at position 3866 of SEQ ID NO: 1560905
gguuggaucggugaaauug

SEQ ID NO: 1633046 - RNA, 19 nt, Artificial Sequence
  Description of Artificial Sequence: Synthetic oligonucleotide
  Antisense strand to SEQ ID NO: 1633045
caauuucaccgauccaacc

SEQ ID NO: 1633047 - RNA, 19 nt, Artificial Sequence
  Description of Artificial Sequence: Synthetic oligonucleotide
  Sense strand starting at position 3938 of SEQ ID NO: 1560905
uggagugcucacgagguua

SEQ ID NO: 1633048 - RNA, 19 nt, Artificial Sequence
  Description of Artificial Sequence: Synthetic oligonucleotide
  Antisense strand to SEQ ID NO: 1633047
uaaccucgugagcacucca

SEQ ID NO: 1633049 - RNA, 19 nt, Artificial Sequence
  Description of Artificial Sequence: Synthetic oligonucleotide
  Sense strand starting at position 3940 of SEQ ID NO: 1560905
gagugcucacgagguuaag

SEQ ID NO: 1633050 - RNA, 19 nt, Artificial Sequence
  Description of Artificial Sequence: Synthetic oligonucleotide
  Antisense strand to SEQ ID NO: 1633049
cuuaaccucgugagcacuc

SEQ ID NO: 1633051 - RNA, 19 nt, Artificial Sequence
  Description of Artificial Sequence: Synthetic oligonucleotide
  Sense strand starting at position 75 of SEQ ID NO: 1560906
aaacucaagugaugaagua

SEQ ID NO: 1633052 - RNA, 19 nt, Artificial Sequence
  Description of Artificial Sequence: Synthetic oligonucleotide
  Antisense strand to SEQ ID NO: 1633051
uacuucaucacuugaguuu

SEQ ID NO: 1633053 - RNA, 19 nt, Artificial Sequence
  Description of Artificial Sequence: Synthetic oligonucleotide
  Sense strand starting at position 84 of SEQ ID NO: 1560906
ugaugaaguaccugugugu

SEQ ID NO: 1633054 - RNA, 19 nt, Artificial Sequence
  Description of Artificial Sequence: Synthetic oligonucleotide
  Antisense strand to SEQ ID NO: 1633053
acacacagguacuucauca

SEQ ID NO: 1633055 - RNA, 19 nt, Artificial Sequence
  Description of Artificial Sequence: Synthetic oligonucleotide
  Sense strand starting at position 152 of SEQ ID NO: 1560906
guggguucugcaguuguau

SEQ ID NO: 1633056 - RNA, 19 nt, Artificial Sequence
  Description of Artificial Sequence: Synthetic oligonucleotide
  Antisense strand to SEQ ID NO: 1633055
auacaacugcagaacccac

SEQ ID NO: 1633057 - RNA, 19 nt, Artificial Sequence
  Description of Artificial Sequence: Synthetic oligonucleotide
  Sense strand starting at position 154 of SEQ ID NO: 1560906
ggguucugcaguuguaugu

SEQ ID NO: 1633058 - RNA, 19 nt, Artificial Sequence
  Description of Artificial Sequence: Synthetic oligonucleotide
  Antisense strand to SEQ ID NO: 1633057
acauacaacugcagaaccc

SEQ ID NO: 1633059 - RNA, 19 nt, Artificial Sequence
  Description of Artificial Sequence: Synthetic oligonucleotide
  Sense strand starting at position 179 of SEQ ID NO: 1560906
guuccuauagcuuacaguu

SEQ ID NO: 1633060 - RNA, 19 nt, Artificial Sequence
  Description of Artificial Sequence: Synthetic oligonucleotide
  Antisense strand to SEQ ID NO: 1633059
aacuguaagcuauaggaac

SEQ ID NO: 1633061 - RNA, 19 nt, Artificial Sequence
  Description of Artificial Sequence: Synthetic oligonucleotide
  Sense strand starting at position 505 of SEQ ID NO: 1560906
uaugucuggguguaguuau

SEQ ID NO: 1633062 - RNA, 19 nt, Artificial Sequence
  Description of Artificial Sequence: Synthetic oligonucleotide
  Antisense strand to SEQ ID NO: 1633061
auaacuacacccagacaua

SEQ ID NO: 1633063 - RNA, 19 nt, Artificial Sequence
  Description of Artificial Sequence: Synthetic oligonucleotide
  Sense strand starting at position 519 of SEQ ID NO: 1560906
guuauaaauucuguugggu

SEQ ID NO: 1633064 - RNA, 19 nt, Artificial Sequence
  Description of Artificial Sequence: Synthetic oligonucleotide
  Antisense strand to SEQ ID NO: 1633063
acccaacagaauuuauaac

SEQ ID NO: 1633065 - RNA, 19 nt, Artificial Sequence
  Description of Artificial Sequence: Synthetic oligonucleotide
  Sense strand starting at position 521 of SEQ ID NO: 1560906
uauaaauucuguuggguuu

SEQ ID NO: 1633066 - RNA, 19 nt, Artificial Sequence
  Description of Artificial Sequence: Synthetic oligonucleotide
  Antisense strand to SEQ ID NO: 1633065
aaacccaacagaauuuaua

SEQ ID NO: 1633067 - RNA, 19 nt, Artificial Sequence
  Description of Artificial Sequence: Synthetic oligonucleotide
  Sense strand starting at position 820 of SEQ ID NO: 1560906
gggccaauuucuguuguuu

SEQ ID NO: 1633068 - RNA, 19 nt, Artificial Sequence
  Description of Artificial Sequence: Synthetic oligonucleotide
  Antisense strand to SEQ ID NO: 1633067
aaacaacagaaauuggccc

SEQ ID NO: 1633069 - RNA, 19 nt, Artificial Sequence
  Description of Artificial Sequence: Synthetic oligonucleotide
  Sense strand starting at position 872 of SEQ ID NO: 1560906
gcuugaagguggucaguuu

SEQ ID NO: 1633070 - RNA, 19 nt, Artificial Sequence
  Description of Artificial Sequence: Synthetic oligonucleotide
  Antisense strand to SEQ ID NO: 1633069
aaacugaccaccuucaagc

SEQ ID NO: 1633071 - RNA, 19 nt, Artificial Sequence
  Description of Artificial Sequence: Synthetic oligonucleotide
  Sense strand starting at position 913 of SEQ ID NO: 1560906
gccguaacuugagucauuu

SEQ ID NO: 1633072 - RNA, 19 nt, Artificial Sequence
  Description of Artificial Sequence: Synthetic oligonucleotide
  Antisense strand to SEQ ID NO: 1633071
aaaugacucaaguuacggc

SEQ ID NO: 1633073 - RNA, 19 nt, Artificial Sequence
  Description of Artificial Sequence: Synthetic oligonucleotide
  Sense strand starting at position 1048 of SEQ ID NO: 1560906
gcuuguguccuuguggguu

SEQ ID NO: 1633074 - RNA, 19 nt, Artificial Sequence
  Description of Artificial Sequence: Synthetic oligonucleotide
  Antisense strand to SEQ ID NO: 1633073
aacccacaaggacacaagc

SEQ ID NO: 1633075 - RNA, 19 nt, Artificial Sequence
  Description of Artificial Sequence: Synthetic oligonucleotide
  Sense strand starting at position 1327 of SEQ ID NO: 1560906
gacccaagucuuugugugu

SEQ ID NO: 1633076 - RNA, 19 nt, Artificial Sequence
  Description of Artificial Sequence: Synthetic oligonucleotide
  Antisense strand to SEQ ID NO: 1633075
acacacaaagacuuggguc

SEQ ID NO: 1633077 - RNA, 19 nt, Artificial Sequence
  Description of Artificial Sequence: Synthetic oligonucleotide
  Sense strand starting at position 1328 of SEQ ID NO: 1560906
acccaagucuuuguguguu

SEQ ID NO: 1633078 - RNA, 19 nt, Artificial Sequence
  Description of Artificial Sequence: Synthetic oligonucleotide
  Antisense strand to SEQ ID NO: 1633077
aacacacaaagacuugggu

SEQ ID NO: 1633079 - RNA, 19 nt, Artificial Sequence
  Description of Artificial Sequence: Synthetic oligonucleotide
  Sense strand starting at position 1941 of SEQ ID NO: 1560906
cacgcagucgugcgaaguu

SEQ ID NO: 1633080 - RNA, 19 nt, Artificial Sequence
  Description of Artificial Sequence: Synthetic oligonucleotide
  Antisense strand to SEQ ID NO: 1633079
aacuucgcacgacugcgug

SEQ ID NO: 1633081 - RNA, 19 nt, Artificial Sequence
  Description of Artificial Sequence: Synthetic oligonucleotide
  Sense strand starting at position 1943 of SEQ ID NO: 1560906
cgcagucgugcgaaguuga

SEQ ID NO: 1633082 - RNA, 19 nt, Artificial Sequence
  Description of Artificial Sequence: Synthetic oligonucleotide
  Antisense strand to SEQ ID NO: 1633081
ucaacuucgcacgacugcg

SEQ ID NO: 1633083 - RNA, 19 nt, Artificial Sequence
  Description of Artificial Sequence: Synthetic oligonucleotide
  Sense strand starting at position 2558 of SEQ ID NO: 1560906
ugcuuuacgcuccagggau

SEQ ID NO: 1633084 - RNA, 19 nt, Artificial Sequence
  Description of Artificial Sequence: Synthetic oligonucleotide
  Antisense strand to SEQ ID NO: 1633083
aucccuggagcguaaagca

SEQ ID NO: 1633085 - RNA, 19 nt, Artificial Sequence
  Description of Artificial Sequence: Synthetic oligonucleotide
  Sense strand starting at position 2618 of SEQ ID NO: 1560906
gacaguuguagccgggaua

SEQ ID NO: 1633086 - RNA, 19 nt, Artificial Sequence
  Description of Artificial Sequence: Synthetic oligonucleotide
  Antisense strand to SEQ ID NO: 1633085
uaucccggcuacaacuguc

SEQ ID NO: 1633087 - RNA, 19 nt, Artificial Sequence
  Description of Artificial Sequence: Synthetic oligonucleotide
  Sense strand starting at position 2621 of SEQ ID NO: 1560906
aguuguagccgggauacau

SEQ ID NO: 1633088 - RNA, 19 nt, Artificial Sequence
  Description of Artificial Sequence: Synthetic oligonucleotide
  Antisense strand to SEQ ID NO: 1633087
auguaucccggcuacaacu

SEQ ID NO: 1633089 - RNA, 19 nt, Artificial Sequence
  Description of Artificial Sequence: Synthetic oligonucleotide
  Sense strand starting at position 2646 of SEQ ID NO: 1560906
cacaguaaguacgguauua

SEQ ID NO: 1633090 - RNA, 19 nt, Artificial Sequence
  Description of Artificial Sequence: Synthetic oligonucleotide
  Antisense strand to SEQ ID NO: 1633089
uaauaccguacuuacugug

SEQ ID NO: 1633091 - RNA, 19 nt, Artificial Sequence
  Description of Artificial Sequence: Synthetic oligonucleotide
  Sense strand starting at position 2648 of SEQ ID NO: 1560906
caguaaguacgguauuaua

SEQ ID NO: 1633092 - RNA, 19 nt, Artificial Sequence
  Description of Artificial Sequence: Synthetic oligonucleotide
  Antisense strand to SEQ ID NO: 1633091
uauaauaccguacuuacug

SEQ ID NO: 1633093 - RNA, 19 nt, Artificial Sequence
  Description of Artificial Sequence: Synthetic oligonucleotide
  Sense strand starting at position 2679 of SEQ ID NO: 1560906
auauaagugcuuuggagaa

SEQ ID NO: 1633094 - RNA, 19 nt, Artificial Sequence
  Description of Artificial Sequence: Synthetic oligonucleotide
  Antisense strand to SEQ ID NO: 1633093
uucuccaaagcacuuauau

SEQ ID NO: 1633095 - RNA, 19 nt, Artificial Sequence
  Description of Artificial Sequence: Synthetic oligonucleotide
  Sense strand starting at position 2681 of SEQ ID NO: 1560906
auaagugcuuuggagaaau

SEQ ID NO: 1633096 - RNA, 19 nt, Artificial Sequence
  Description of Artificial Sequence: Synthetic oligonucleotide
  Antisense strand to SEQ ID NO: 1633095
auuucuccaaagcacuuau

SEQ ID NO: 1633097 - RNA, 19 nt, Artificial Sequence
  Description of Artificial Sequence: Synthetic oligonucleotide
  Sense strand starting at position 3683 of SEQ ID NO: 1560906
ucaugaaacucauaaggug

SEQ ID NO: 1633098 - RNA, 19 nt, Artificial Sequence
  Description of Artificial Sequence: Synthetic oligonucleotide
  Antisense strand to SEQ ID NO: 1633097
caccuuaugaguuucauga

SEQ ID NO: 1633099 - RNA, 19 nt, Artificial Sequence
  Description of Artificial Sequence: Synthetic oligonucleotide
  Sense strand starting at position 1156 of SEQ ID NO: 1560907
ccaugugucugggcuggaa

SEQ ID NO: 1633100 - RNA, 19 nt, Artificial Sequence
  Description of Artificial Sequence: Synthetic oligonucleotide
  Antisense strand to SEQ ID NO: 1633099
uuccagcccagacacaugg

SEQ ID NO: 1633101 - RNA, 19 nt, Artificial Sequence
  Description of Artificial Sequence: Synthetic oligonucleotide
  Sense strand starting at position 1224 of SEQ ID NO: 1560907
gggcgugacuaugagucau

SEQ ID NO: 1633102 - RNA, 19 nt, Artificial Sequence
  Description of Artificial Sequence: Synthetic oligonucleotide
  Antisense strand to SEQ ID NO: 1633101
augacucauagucacgccc

SEQ ID NO: 1633103 - RNA, 19 nt, Artificial Sequence
  Description of Artificial Sequence: Synthetic oligonucleotide
  Sense strand starting at position 1226 of SEQ ID NO: 1560907
gcgugacuaugagucauag

SEQ ID NO: 1633104 - RNA, 19 nt, Artificial Sequence
  Description of Artificial Sequence: Synthetic oligonucleotide
  Antisense strand to SEQ ID NO: 1633103
cuaugacucauagucacgc

SEQ ID NO: 1633105 - RNA, 19 nt, Artificial Sequence
  Description of Artificial Sequence: Synthetic oligonucleotide
  Sense strand starting at position 1228 of SEQ ID NO: 1560907
gugacuaugagucauagca

SEQ ID NO: 1633106 - RNA, 19 nt, Artificial Sequence
  Description of Artificial Sequence: Synthetic oligonucleotide
  Antisense strand to SEQ ID NO: 1633105
ugcuaugacucauagucac

SEQ ID NO: 1633107 - RNA, 19 nt, Artificial Sequence
  Description of Artificial Sequence: Synthetic oligonucleotide
  Sense strand starting at position 1230 of SEQ ID NO: 1560907
gacuaugagucauagcaac

SEQ ID NO: 1633108 - RNA, 19 nt, Artificial Sequence
  Description of Artificial Sequence: Synthetic oligonucleotide
  Antisense strand to SEQ ID NO: 1633107
guugcuaugacucauaguc

SEQ ID NO: 1633109 - RNA, 19 nt, Artificial Sequence
  Description of Artificial Sequence: Synthetic oligonucleotide
  Sense strand starting at position 1236 of SEQ ID NO: 1560907
gagucauagcaacggaaau

SEQ ID NO: 1633110 - RNA, 19 nt, Artificial Sequence
  Description of Artificial Sequence: Synthetic oligonucleotide
  Antisense strand to SEQ ID NO: 1633109
auuuccguugcuaugacuc

SEQ ID NO: 1633111 - RNA, 19 nt, Artificial Sequence
  Description of Artificial Sequence: Synthetic oligonucleotide
  Sense strand starting at position 1237 of SEQ ID NO: 1560907
agucauagcaacggaaaua

SEQ ID NO: 1633112 - RNA, 19 nt, Artificial Sequence
  Description of Artificial Sequence: Synthetic oligonucleotide
  Antisense strand to SEQ ID NO: 1633111
uauuuccguugcuaugacu

SEQ ID NO: 1633113 - RNA, 19 nt, Artificial Sequence
  Description of Artificial Sequence: Synthetic oligonucleotide
  Sense strand starting at position 1248 of SEQ ID NO: 1560907
cggaaauaguaacacaacu

SEQ ID NO: 1633114 - RNA, 19 nt, Artificial Sequence
  Description of Artificial Sequence: Synthetic oligonucleotide
  Antisense strand to SEQ ID NO: 1633113
aguuguguuacuauuuccg

SEQ ID NO: 1633115 - RNA, 19 nt, Artificial Sequence
  Description of Artificial Sequence: Synthetic oligonucleotide
  Sense strand starting at position 1349 of SEQ ID NO: 1560907
ucucaauagccaggagucu

SEQ ID NO: 1633116 - RNA, 19 nt, Artificial Sequence
  Description of Artificial Sequence: Synthetic oligonucleotide
  Antisense strand to SEQ ID NO: 1633115
agacuccuggcuauugaga

SEQ ID NO: 1633117 - RNA, 19 nt, Artificial Sequence
  Description of Artificial Sequence: Synthetic oligonucleotide
  Sense strand starting at position 1376 of SEQ ID NO: 1560907
aguucugccuuagauccaa

SEQ ID NO: 1633118 - RNA, 19 nt, Artificial Sequence
  Description of Artificial Sequence: Synthetic oligonucleotide
  Antisense strand to SEQ ID NO: 1633117
uuggaucuaaggcagaacu

SEQ ID NO: 1633119 - RNA, 19 nt, Artificial Sequence
  Description of Artificial Sequence: Synthetic oligonucleotide
  Sense strand starting at position 1504 of SEQ ID NO: 1560907
gcucucucauucugcugaa

SEQ ID NO: 1633120 - RNA, 19 nt, Artificial Sequence
  Description of Artificial Sequence: Synthetic oligonucleotide
  Antisense strand to SEQ ID NO: 1633119
uucagcagaaugagagagc

SEQ ID NO: 1633121 - RNA, 19 nt, Artificial Sequence
  Description of Artificial Sequence: Synthetic oligonucleotide
  Sense strand starting at position 1507 of SEQ ID NO: 1560907
cucucauucugcugaagau

SEQ ID NO: 1633122 - RNA, 19 nt, Artificial Sequence
  Description of Artificial Sequence: Synthetic oligonucleotide
  Antisense strand to SEQ ID NO: 1633121
aucuucagcagaaugagag

SEQ ID NO: 1633123 - RNA, 19 nt, Artificial Sequence
  Description of Artificial Sequence: Synthetic oligonucleotide
  Sense strand starting at position 1508 of SEQ ID NO: 1560907
ucucauucugcugaagauu

SEQ ID NO: 1633124 - RNA, 19 nt, Artificial Sequence
  Description of Artificial Sequence: Synthetic oligonucleotide
  Antisense strand to SEQ ID NO: 1633123
aaucuucagcagaaugaga

SEQ ID NO: 1633125 - RNA, 19 nt, Artificial Sequence
  Description of Artificial Sequence: Synthetic oligonucleotide
  Sense strand starting at position 1514 of SEQ ID NO: 1560907
ucugcugaagauugacaaa

SEQ ID NO: 1633126 - RNA, 19 nt, Artificial Sequence
  Description of Artificial Sequence: Synthetic oligonucleotide
  Antisense strand to SEQ ID NO: 1633125
uuugucaaucuucagcaga

SEQ ID NO: 1633127 - RNA, 19 nt, Artificial Sequence
  Description of Artificial Sequence: Synthetic oligonucleotide
  Sense strand starting at position 1517 of SEQ ID NO: 1560907
gcugaagauugacaaauca

SEQ ID NO: 1633128 - RNA, 19 nt, Artificial Sequence
  Description of Artificial Sequence: Synthetic oligonucleotide
  Antisense strand to SEQ ID NO: 1633127
ugauuugucaaucuucagc

SEQ ID NO: 1633129 - RNA, 19 nt, Artificial Sequence
  Description of Artificial Sequence: Synthetic oligonucleotide
  Sense strand starting at position 1584 of SEQ ID NO: 1560907
cccuacuuggcagaugauu

SEQ ID NO: 1633130 - RNA, 19 nt, Artificial Sequence
  Description of Artificial Sequence: Synthetic oligonucleotide
  Antisense strand to SEQ ID NO: 1633129
aaucaucugccaaguaggg

SEQ ID NO: 1633131 - RNA, 19 nt, Artificial Sequence
  Description of Artificial Sequence: Synthetic oligonucleotide
  Sense strand starting at position 1617 of SEQ ID NO: 1560907
ccaagaaucuggcuuccag

SEQ ID NO: 1633132 - RNA, 19 nt, Artificial Sequence
  Description of Artificial Sequence: Synthetic oligonucleotide
  Antisense strand to SEQ ID NO: 1633131
cuggaagccagauucuugg

SEQ ID NO: 1633133 - RNA, 19 nt, Artificial Sequence
  Description of Artificial Sequence: Synthetic oligonucleotide
  Sense strand starting at position 2020 of SEQ ID NO: 1560907
ugcugacgucacgaagaga

SEQ ID NO: 1633134 - RNA, 19 nt, Artificial Sequence
  Description of Artificial Sequence: Synthetic oligonucleotide
  Antisense strand to SEQ ID NO: 1633133
ucucuucgugacgucagca

SEQ ID NO: 1633135 - RNA, 19 nt, Artificial Sequence
  Description of Artificial Sequence: Synthetic oligonucleotide
  Sense strand starting at position 2087 of SEQ ID NO: 1560907
caggacuucucgcggagau

SEQ ID NO: 1633136 - RNA, 19 nt, Artificial Sequence
  Description of Artificial Sequence: Synthetic oligonucleotide
  Antisense strand to SEQ ID NO: 1633135
aucuccgcgagaaguccug

SEQ ID NO: 1633137 - RNA, 19 nt, Artificial Sequence
  Description of Artificial Sequence: Synthetic oligonucleotide
  Sense strand starting at position 2088 of SEQ ID NO: 1560907
aggacuucucgcggagauu

SEQ ID NO: 1633138 - RNA, 19 nt, Artificial Sequence
  Description of Artificial Sequence: Synthetic oligonucleotide
  Antisense strand to SEQ ID NO: 1633137
aaucuccgcgagaaguccu

SEQ ID NO: 1633139 - RNA, 19 nt, Artificial Sequence
  Description of Artificial Sequence: Synthetic oligonucleotide
  Sense strand starting at position 2089 of SEQ ID NO: 1560907
ggacuucucgcggagauuc

SEQ ID NO: 1633140 - RNA, 19 nt, Artificial Sequence
  Description of Artificial Sequence: Synthetic oligonucleotide
  Antisense strand to SEQ ID NO: 1633139
gaaucuccgcgagaagucc

SEQ ID NO: 1633141 - RNA, 19 nt, Artificial Sequence
  Description of Artificial Sequence: Synthetic oligonucleotide
  Sense strand starting at position 3313 of SEQ ID NO: 1560907
gccacaaugccuggguaau

SEQ ID NO: 1633142 - RNA, 19 nt, Artificial Sequence
  Description of Artificial Sequence: Synthetic oligonucleotide
  Antisense strand to SEQ ID NO: 1633141
auuacccaggcauuguggc

SEQ ID NO: 1633143 - RNA, 19 nt, Artificial Sequence
  Description of Artificial Sequence: Synthetic oligonucleotide
  Sense strand starting at position 3750 of SEQ ID NO: 1560907
uggaauuacaguugugauc

SEQ ID NO: 1633144 - RNA, 19 nt, Artificial Sequence
  Description of Artificial Sequence: Synthetic oligonucleotide
  Antisense strand to SEQ ID NO: 1633143
gaucacaacuguaauucca

SEQ ID NO: 1633145 - RNA, 19 nt, Artificial Sequence
  Description of Artificial Sequence: Synthetic oligonucleotide
  Sense strand starting at position 3752 of SEQ ID NO: 1560907
gaauuacaguugugaucca

SEQ ID NO: 1633146 - RNA, 19 nt, Artificial Sequence
  Description of Artificial Sequence: Synthetic oligonucleotide
  Antisense strand to SEQ ID NO: 1633145
uggaucacaacuguaauuc

SEQ ID NO: 1633147 - RNA, 19 nt, Artificial Sequence
  Description of Artificial Sequence: Synthetic oligonucleotide
  Sense strand starting at position 3811 of SEQ ID NO: 1560907
agccuagagucucccauuu

SEQ ID NO: 1633148 - RNA, 19 nt, Artificial Sequence
  Description of Artificial Sequence: Synthetic oligonucleotide
  Antisense strand to SEQ ID NO: 1633147
aaaugggagacucuaggcu

SEQ ID NO: 1633149 - RNA, 19 nt, Artificial Sequence
  Description of Artificial Sequence: Synthetic oligonucleotide
  Sense strand starting at position 15 of SEQ ID NO: 1560908
guguguucaguuuccaguu

SEQ ID NO: 1633150 - RNA, 19 nt, Artificial Sequence
  Description of Artificial Sequence: Synthetic oligonucleotide
  Antisense strand to SEQ ID NO: 1633149
aacuggaaacugaacacac

SEQ ID NO: 1633151 - RNA, 19 nt, Artificial Sequence
  Description of Artificial Sequence: Synthetic oligonucleotide
  Sense strand starting at position 267 of SEQ ID NO: 1560908
gcccuauggcuccaacaca

SEQ ID NO: 1633152 - RNA, 19 nt, Artificial Sequence
  Description of Artificial Sequence: Synthetic oligonucleotide
  Antisense strand to SEQ ID NO: 1633151
uguguuggagccauagggc

SEQ ID NO: 1633153 - RNA, 19 nt, Artificial Sequence
  Description of Artificial Sequence: Synthetic oligonucleotide
  Sense strand starting at position 439 of SEQ ID NO: 1560908
uuucuuugagccggaguuu

SEQ ID NO: 1633154 - RNA, 19 nt, Artificial Sequence
  Description of Artificial Sequence: Synthetic oligonucleotide
  Antisense strand to SEQ ID NO: 1633153
aaacuccggcucaaagaaa

SEQ ID NO: 1633155 - RNA, 19 nt, Artificial Sequence
  Description of Artificial Sequence: Synthetic oligonucleotide
  Sense strand starting at position 479 of SEQ ID NO: 1560908
aguacaaugucgugaucuu

SEQ ID NO: 1633156 - RNA, 19 nt, Artificial Sequence
  Description of Artificial Sequence: Synthetic oligonucleotide
  Antisense strand to SEQ ID NO: 1633155
aagaucacgacauuguacu

SEQ ID NO: 1633157 - RNA, 19 nt, Artificial Sequence
  Description of Artificial Sequence: Synthetic oligonucleotide
  Sense strand starting at position 480 of SEQ ID NO: 1560908
guacaaugucgugaucuua

SEQ ID NO: 1633158 - RNA, 19 nt, Artificial Sequence
  Description of Artificial Sequence: Synthetic oligonucleotide
  Antisense strand to SEQ ID NO: 1633157
uaagaucacgacauuguac

SEQ ID NO: 1633159 - RNA, 19 nt, Artificial Sequence
  Description of Artificial Sequence: Synthetic oligonucleotide
  Sense strand starting at position 735 of SEQ ID NO: 1560908
ccaauucuuucucaggaag

SEQ ID NO: 1633160 - RNA, 19 nt, Artificial Sequence
  Description of Artificial Sequence: Synthetic oligonucleotide
  Antisense strand to SEQ ID NO: 1633159
cuuccugagaaagaauugg

SEQ ID NO: 1633161 - RNA, 19 nt, Artificial Sequence
  Description of Artificial Sequence: Synthetic oligonucleotide
  Sense strand starting at position 772 of SEQ ID NO: 1560908
guagccaugucccaaacau

SEQ ID NO: 1633162 - RNA, 19 nt, Artificial Sequence
  Description of Artificial Sequence: Synthetic oligonucleotide
  Antisense strand to SEQ ID NO: 1633161
auguuugggacauggcuac

SEQ ID NO: 1633163 - RNA, 19 nt, Artificial Sequence
  Description of Artificial Sequence: Synthetic oligonucleotide
  Sense strand starting at position 789 of SEQ ID NO: 1560908
auccucugcuccugaauga

SEQ ID NO: 1633164 - RNA, 19 nt, Artificial Sequence
  Description of Artificial Sequence: Synthetic oligonucleotide
  Antisense strand to SEQ ID NO: 1633163
ucauucaggagcagaggau

SEQ ID NO: 1633165 - RNA, 19 nt, Artificial Sequence
  Description of Artificial Sequence: Synthetic oligonucleotide
  Sense strand starting at position 1380 of SEQ ID NO: 1560908
ucuuuaauugcucaucguu

SEQ ID NO: 1633166 - RNA, 19 nt, Artificial Sequence
  Description of Artificial Sequence: Synthetic oligonucleotide
  Antisense strand to SEQ ID NO: 1633165
aacgaugagcaauuaaaga

SEQ ID NO: 1633167 - RNA, 19 nt, Artificial Sequence
  Description of Artificial Sequence: Synthetic oligonucleotide
  Sense strand starting at position 2117 of SEQ ID NO: 1560908
gcgacuugcacguagaguu

SEQ ID NO: 1633168 - RNA, 19 nt, Artificial Sequence
  Description of Artificial Sequence: Synthetic oligonucleotide
  Antisense strand to SEQ ID NO: 1633167
aacucuacgugcaagucgc

SEQ ID NO: 1633169 - RNA, 19 nt, Artificial Sequence
  Description of Artificial Sequence: Synthetic oligonucleotide
  Sense strand starting at position 2130 of SEQ ID NO: 1560908
agaguugucccgcggguga

SEQ ID NO: 1633170 - RNA, 19 nt, Artificial Sequence
  Description of Artificial Sequence: Synthetic oligonucleotide
  Antisense strand to SEQ ID NO: 1633169
ucacccgcgggacaacucu

SEQ ID NO: 1633171 - RNA, 19 nt, Artificial Sequence
  Description of Artificial Sequence: Synthetic oligonucleotide
  Sense strand starting at position 2655 of SEQ ID NO: 1560908
cccugucucaacgaaagga

SEQ ID NO: 1633172 - RNA, 19 nt, Artificial Sequence
  Description of Artificial Sequence: Synthetic oligonucleotide
  Antisense strand to SEQ ID NO: 1633171
uccuuucguugagacaggg

SEQ ID NO: 1633173 - RNA, 19 nt, Artificial Sequence
  Description of Artificial Sequence: Synthetic oligonucleotide
  Sense strand starting at position 3026 of SEQ ID NO: 1560908
gugguaacggcaugaagaa

SEQ ID NO: 1633174 - RNA, 19 nt, Artificial Sequence
  Description of Artificial Sequence: Synthetic oligonucleotide
  Antisense strand to SEQ ID NO: 1633173
uucuucaugccguuaccac

SEQ ID NO: 1633175 - RNA, 19 nt, Artificial Sequence
  Description of Artificial Sequence: Synthetic oligonucleotide
  Sense strand starting at position 3075 of SEQ ID NO: 1560908
ucaauauaugagugcaguu

SEQ ID NO: 1633176 - RNA, 19 nt, Artificial Sequence
  Description of Artificial Sequence: Synthetic oligonucleotide
  Antisense strand to SEQ ID NO: 1633175
aacugcacucauauauuga

SEQ ID NO: 1633177 - RNA, 19 nt, Artificial Sequence
  Description of Artificial Sequence: Synthetic oligonucleotide
  Sense strand starting at position 3077 of SEQ ID NO: 1560908
aauauaugagugcaguuga

SEQ ID NO: 1633178 - RNA, 19 nt, Artificial Sequence
  Description of Artificial Sequence: Synthetic oligonucleotide
  Antisense strand to SEQ ID NO: 1633177
ucaacugcacucauauauu

SEQ ID NO: 1633179 - RNA, 19 nt, Artificial Sequence
  Description of Artificial Sequence: Synthetic oligonucleotide
  Sense strand starting at position 3094 of SEQ ID NO: 1560908
gauggaugcugacagggau

SEQ ID NO: 1633180 - RNA, 19 nt, Artificial Sequence
  Description of Artificial Sequence: Synthetic oligonucleotide
  Antisense strand to SEQ ID NO: 1633179
aucccugucagcauccauc

SEQ ID NO: 1633181 - RNA, 19 nt, Artificial Sequence
  Description of Artificial Sequence: Synthetic oligonucleotide
  Sense strand starting at position 3144 of SEQ ID NO: 1560908
agucucuaguccuccauuu

SEQ ID NO: 1633182 - RNA, 19 nt, Artificial Sequence
  Description of Artificial Sequence: Synthetic oligonucleotide
  Antisense strand to SEQ ID NO: 1633181
aaauggaggacuagagacu

SEQ ID NO: 1633183 - RNA, 19 nt, Artificial Sequence
  Description of Artificial Sequence: Synthetic oligonucleotide
  Sense strand starting at position 3250 of SEQ ID NO: 1560908
gcccaugagcgguaucaua

SEQ ID NO: 1633184 - RNA, 19 nt, Artificial Sequence
  Description of Artificial Sequence: Synthetic oligonucleotide
  Antisense strand to SEQ ID NO: 1633183
uaugauaccgcucaugggc

SEQ ID NO: 1633185 - RNA, 19 nt, Artificial Sequence
  Description of Artificial Sequence: Synthetic oligonucleotide
  Sense strand starting at position 3258 of SEQ ID NO: 1560908
gcgguaucauaggccugau

SEQ ID NO: 1633186 - RNA, 19 nt, Artificial Sequence
  Description of Artificial Sequence: Synthetic oligonucleotide
  Antisense strand to SEQ ID NO: 1633185
aucaggccuaugauaccgc

SEQ ID NO: 1633187 - RNA, 19 nt, Artificial Sequence
  Description of Artificial Sequence: Synthetic oligonucleotide
  Sense strand starting at position 3304 of SEQ ID NO: 1560908
agaaauuccaaaggcgaga

SEQ ID NO: 1633188 - RNA, 19 nt, Artificial Sequence
  Description of Artificial Sequence: Synthetic oligonucleotide
  Antisense strand to SEQ ID NO: 1633187
ucucgccuuuggaauuucu

SEQ ID NO: 1633189 - RNA, 19 nt, Artificial Sequence
  Description of Artificial Sequence: Synthetic oligonucleotide
  Sense strand starting at position 3322 of SEQ ID NO: 1560908
agacgaaucugccaaccua

SEQ ID NO: 1633190 - RNA, 19 nt, Artificial Sequence
  Description of Artificial Sequence: Synthetic oligonucleotide
  Antisense strand to SEQ ID NO: 1633189
uagguuggcagauucgucu

SEQ ID NO: 1633191 - RNA, 19 nt, Artificial Sequence
  Description of Artificial Sequence: Synthetic oligonucleotide
  Sense strand starting at position 3334 of SEQ ID NO: 1560908
caaccuaaauccuggguga

SEQ ID NO: 1633192 - RNA, 19 nt, Artificial Sequence
  Description of Artificial Sequence: Synthetic oligonucleotide
  Antisense strand to SEQ ID NO: 1633191
ucacccaggauuuagguug

SEQ ID NO: 1633193 - RNA, 19 nt, Artificial Sequence
  Description of Artificial Sequence: Synthetic oligonucleotide
  Sense strand starting at position 3336 of SEQ ID NO: 1560908
accuaaauccugggugaca

SEQ ID NO: 1633194 - RNA, 19 nt, Artificial Sequence
  Description of Artificial Sequence: Synthetic oligonucleotide
  Antisense strand to SEQ ID NO: 1633193
ugucacccaggauuuaggu

SEQ ID NO: 1633195 - RNA, 19 nt, Artificial Sequence
  Description of Artificial Sequence: Synthetic oligonucleotide
  Sense strand starting at position 3337 of SEQ ID NO: 1560908
ccuaaauccugggugacaa

SEQ ID NO: 1633196 - RNA, 19 nt, Artificial Sequence
  Description of Artificial Sequence: Synthetic oligonucleotide
  Antisense strand to SEQ ID NO: 1633195
uugucacccaggauuuagg

SEQ ID NO: 1633197 - RNA, 19 nt, Artificial Sequence
  Description of Artificial Sequence: Synthetic oligonucleotide
  Sense strand starting at position 3338 of SEQ ID NO: 1560908
cuaaauccugggugacaag

SEQ ID NO: 1633198 - RNA, 19 nt, Artificial Sequence
  Description of Artificial Sequence: Synthetic oligonucleotide
  Antisense strand to SEQ ID NO: 1633197
cuugucacccaggauuuag

SEQ ID NO: 1633199 - RNA, 19 nt, Artificial Sequence
  Description of Artificial Sequence: Synthetic oligonucleotide
  Sense strand starting at position 3542 of SEQ ID NO: 1560908
aaggcaacucgagagcuaa

SEQ ID NO: 1633200 - RNA, 19 nt, Artificial Sequence
  Description of Artificial Sequence: Synthetic oligonucleotide
  Antisense strand to SEQ ID NO: 1633199
uuagcucucgaguugccuu

SEQ ID NO: 1633201 - RNA, 19 nt, Artificial Sequence
  Description of Artificial Sequence: Synthetic oligonucleotide
  Sense strand starting at position 95 of SEQ ID NO: 1560909
cgcccuaugaacuagguaa

SEQ ID NO: 1633202 - RNA, 19 nt, Artificial Sequence
  Description of Artificial Sequence: Synthetic oligonucleotide
  Antisense strand to SEQ ID NO: 1633201
uuaccuaguucauagggcg

SEQ ID NO: 1633203 - RNA, 19 nt, Artificial Sequence
  Description of Artificial Sequence: Synthetic oligonucleotide
  Sense strand starting at position 97 of SEQ ID NO: 1560909
cccuaugaacuagguaauu

SEQ ID NO: 1633204 - RNA, 19 nt, Artificial Sequence
  Description of Artificial Sequence: Synthetic oligonucleotide
  Antisense strand to SEQ ID NO: 1633203
aauuaccuaguucauaggg

SEQ ID NO: 1633205 - RNA, 19 nt, Artificial Sequence
  Description of Artificial Sequence: Synthetic oligonucleotide
  Sense strand starting at position 232 of SEQ ID NO: 1560909
agugauauaccaggaaccu

SEQ ID NO: 1633206 - RNA, 19 nt, Artificial Sequence
  Description of Artificial Sequence: Synthetic oligonucleotide
  Antisense strand to SEQ ID NO: 1633205
agguuccugguauaucacu

SEQ ID NO: 1633207 - RNA, 19 nt, Artificial Sequence
  Description of Artificial Sequence: Synthetic oligonucleotide
  Sense strand starting at position 422 of SEQ ID NO: 1560909
gugucauaauucguucagu

SEQ ID NO: 1633208 - RNA, 19 nt, Artificial Sequence
  Description of Artificial Sequence: Synthetic oligonucleotide
  Antisense strand to SEQ ID NO: 1633207
acugaacgaauuaugacac

SEQ ID NO: 1633209 - RNA, 19 nt, Artificial Sequence
  Description of Artificial Sequence: Synthetic oligonucleotide
  Sense strand starting at position 503 of SEQ ID NO: 1560909
gacccaaagcggugaagua

SEQ ID NO: 1633210 - RNA, 19 nt, Artificial Sequence
  Description of Artificial Sequence: Synthetic oligonucleotide
  Antisense strand to SEQ ID NO: 1633209
uacuucaccgcuuuggguc

SEQ ID NO: 1633211 - RNA, 19 nt, Artificial Sequence
  Description of Artificial Sequence: Synthetic oligonucleotide
  Sense strand starting at position 562 of SEQ ID NO: 1560909
aguucuaacuguucucaau

SEQ ID NO: 1633212 - RNA, 19 nt, Artificial Sequence
  Description of Artificial Sequence: Synthetic oligonucleotide
  Antisense strand to SEQ ID NO: 1633211
auugagaacaguuagaacu

SEQ ID NO: 1633213 - RNA, 19 nt, Artificial Sequence
  Description of Artificial Sequence: Synthetic oligonucleotide
  Sense strand starting at position 606 of SEQ ID NO: 1560909
ugggucaccucaucccaua

SEQ ID NO: 1633214 - RNA, 19 nt, Artificial Sequence
  Description of Artificial Sequence: Synthetic oligonucleotide
  Antisense strand to SEQ ID NO: 1633213
uaugggaugaggugaccca

SEQ ID NO: 1633215 - RNA, 19 nt, Artificial Sequence
  Description of Artificial Sequence: Synthetic oligonucleotide
  Sense strand starting at position 713 of SEQ ID NO: 1560909
ucaagaguucccgaccaag

SEQ ID NO: 1633216 - RNA, 19 nt, Artificial Sequence
  Description of Artificial Sequence: Synthetic oligonucleotide
  Antisense strand to SEQ ID NO: 1633215
cuuggucgggaacucuuga

SEQ ID NO: 1633217 - RNA, 19 nt, Artificial Sequence
  Description of Artificial Sequence: Synthetic oligonucleotide
  Sense strand starting at position 800 of SEQ ID NO: 1560909
ccgguaaucgcagcuaauu

SEQ ID NO: 1633218 - RNA, 19 nt, Artificial Sequence
  Description of Artificial Sequence: Synthetic oligonucleotide
  Antisense strand to SEQ ID NO: 1633217
aauuagcugcgauuaccgg

SEQ ID NO: 1633219 - RNA, 19 nt, Artificial Sequence
  Description of Artificial Sequence: Synthetic oligonucleotide
  Sense strand starting at position 802 of SEQ ID NO: 1560909
gguaaucgcagcuaauuag

SEQ ID NO: 1633220 - RNA, 19 nt, Artificial Sequence
  Description of Artificial Sequence: Synthetic oligonucleotide
  Antisense strand to SEQ ID NO: 1633219
cuaauuagcugcgauuacc

SEQ ID NO: 1633221 - RNA, 19 nt, Artificial Sequence
  Description of Artificial Sequence: Synthetic oligonucleotide
  Sense strand starting at position 1548 of SEQ ID NO: 1560909
cgcugagucuucuccgcga

SEQ ID NO: 1633222 - RNA, 19 nt, Artificial Sequence
  Description of Artificial Sequence: Synthetic oligonucleotide
  Antisense strand to SEQ ID NO: 1633221
ucgcggagaagacucagcg

SEQ ID NO: 1633223 - RNA, 19 nt, Artificial Sequence
  Description of Artificial Sequence: Synthetic oligonucleotide
  Sense strand starting at position 2039 of SEQ ID NO: 1560909
agcaguaguuucuagccaa

SEQ ID NO: 1633224 - RNA, 19 nt, Artificial Sequence
  Description of Artificial Sequence: Synthetic oligonucleotide
  Antisense strand to SEQ ID NO: 1633223
uuggcuagaaacuacugcu

SEQ ID NO: 1633225 - RNA, 19 nt, Artificial Sequence
  Description of Artificial Sequence: Synthetic oligonucleotide
  Sense strand starting at position 2042 of SEQ ID NO: 1560909
aguaguuucuagccaauga

SEQ ID NO: 1633226 - RNA, 19 nt, Artificial Sequence
  Description of Artificial Sequence: Synthetic oligonucleotide
  Antisense strand to SEQ ID NO: 1633225
ucauuggcuagaaacuacu

SEQ ID NO: 1633227 - RNA, 19 nt, Artificial Sequence
  Description of Artificial Sequence: Synthetic oligonucleotide
  Sense strand starting at position 2043 of SEQ ID NO: 1560909
guaguuucuagccaaugag

SEQ ID NO: 1633228 - RNA, 19 nt, Artificial Sequence
  Description of Artificial Sequence: Synthetic oligonucleotide
  Antisense strand to SEQ ID NO: 1633227
cucauuggcuagaaacuac

SEQ ID NO: 1633229 - RNA, 19 nt, Artificial Sequence
  Description of Artificial Sequence: Synthetic oligonucleotide
  Sense strand starting at position 2121 of SEQ ID NO: 1560909
gcgugcgucggugguaaua

SEQ ID NO: 1633230 - RNA, 19 nt, Artificial Sequence
  Description of Artificial Sequence: Synthetic oligonucleotide
  Antisense strand to SEQ ID NO: 1633229
uauuaccaccgacgcacgc

SEQ ID NO: 1633231 - RNA, 19 nt, Artificial Sequence
  Description of Artificial Sequence: Synthetic oligonucleotide
  Sense strand starting at position 2247 of SEQ ID NO: 1560909
gagugagacuuugauuugu

SEQ ID NO: 1633232 - RNA, 19 nt, Artificial Sequence
  Description of Artificial Sequence: Synthetic oligonucleotide
  Antisense strand to SEQ ID NO: 1633231
acaaaucaaagucucacuc

SEQ ID NO: 1633233 - RNA, 19 nt, Artificial Sequence
  Description of Artificial Sequence: Synthetic oligonucleotide
  Sense strand starting at position 2253 of SEQ ID NO: 1560909
gacuuugauuugugcuuga

SEQ ID NO: 1633234 - RNA, 19 nt, Artificial Sequence
  Description of Artificial Sequence: Synthetic oligonucleotide
  Antisense strand to SEQ ID NO: 1633233
ucaagcacaaaucaaaguc

SEQ ID NO: 1633235 - RNA, 19 nt, Artificial Sequence
  Description of Artificial Sequence: Synthetic oligonucleotide
  Sense strand starting at position 2264 of SEQ ID NO: 1560909
gugcuugauuuaugccaag

SEQ ID NO: 1633236 - RNA, 19 nt, Artificial Sequence
  Description of Artificial Sequence: Synthetic oligonucleotide
  Antisense strand to SEQ ID NO: 1633235
cuuggcauaaaucaagcac

SEQ ID NO: 1633237 - RNA, 19 nt, Artificial Sequence
  Description of Artificial Sequence: Synthetic oligonucleotide
  Sense strand starting at position 2457 of SEQ ID NO: 1560909
cgccucagccugcagaaau

SEQ ID NO: 1633238 - RNA, 19 nt, Artificial Sequence
  Description of Artificial Sequence: Synthetic oligonucleotide
  Antisense strand to SEQ ID NO: 1633237
auuucugcaggcugaggcg

SEQ ID NO: 1633239 - RNA, 19 nt, Artificial Sequence
  Description of Artificial Sequence: Synthetic oligonucleotide
  Sense strand starting at position 2467 of SEQ ID NO: 1560909
ugcagaaauagcugggacu

SEQ ID NO: 1633240 - RNA, 19 nt, Artificial Sequence
  Description of Artificial Sequence: Synthetic oligonucleotide
  Antisense strand to SEQ ID NO: 1633239
agucccagcuauuucugca

SEQ ID NO: 1633241 - RNA, 19 nt, Artificial Sequence
  Description of Artificial Sequence: Synthetic oligonucleotide
  Sense strand starting at position 2468 of SEQ ID NO: 1560909
gcagaaauagcugggacua

SEQ ID NO: 1633242 - RNA, 19 nt, Artificial Sequence
  Description of Artificial Sequence: Synthetic oligonucleotide
  Antisense strand to SEQ ID NO: 1633241
uagucccagcuauuucugc

SEQ ID NO: 1633243 - RNA, 19 nt, Artificial Sequence
  Description of Artificial Sequence: Synthetic oligonucleotide
  Sense strand starting at position 2469 of SEQ ID NO: 1560909
cagaaauagcugggacuau

SEQ ID NO: 1633244 - RNA, 19 nt, Artificial Sequence
  Description of Artificial Sequence: Synthetic oligonucleotide
  Antisense strand to SEQ ID NO: 1633243
auagucccagcuauuucug

SEQ ID NO: 1633245 - RNA, 19 nt, Artificial Sequence
  Description of Artificial Sequence: Synthetic oligonucleotide
  Sense strand starting at position 2623 of SEQ ID NO: 1560909
gcgcgucucccaucuguuu

SEQ ID NO: 1633246 - RNA, 19 nt, Artificial Sequence
  Description of Artificial Sequence: Synthetic oligonucleotide
  Antisense strand to SEQ ID NO: 1633245
aaacagaugggagacgcgc

SEQ ID NO: 1633247 - RNA, 19 nt, Artificial Sequence
  Description of Artificial Sequence: Synthetic oligonucleotide
  Sense strand starting at position 2652 of SEQ ID NO: 1560909
aucugauguccuggagaau

SEQ ID NO: 1633248 - RNA, 19 nt, Artificial Sequence
  Description of Artificial Sequence: Synthetic oligonucleotide
  Antisense strand to SEQ ID NO: 1633247
auucuccaggacaucagau

SEQ ID NO: 1633249 - RNA, 19 nt, Artificial Sequence
  Description of Artificial Sequence: Synthetic oligonucleotide
  Sense strand starting at position 2722 of SEQ ID NO: 1560909
caagcugugcguucugcua

SEQ ID NO: 1633250 - RNA, 19 nt, Artificial Sequence
  Description of Artificial Sequence: Synthetic oligonucleotide
  Antisense strand to SEQ ID NO: 1633249
uagcagaacgcacagcuug

SEQ ID NO: 1633251 - RNA, 19 nt, Artificial Sequence
  Description of Artificial Sequence: Synthetic oligonucleotide
  Sense strand starting at position 2761 of SEQ ID NO: 1560909
uucugagaucucugcauaa

SEQ ID NO: 1633252 - RNA, 19 nt, Artificial Sequence
  Description of Artificial Sequence: Synthetic oligonucleotide
  Antisense strand to SEQ ID NO: 1633251
uuaugcagagaucucagaa

SEQ ID NO: 1633253 - RNA, 19 nt, Artificial Sequence
  Description of Artificial Sequence: Synthetic oligonucleotide
  Sense strand starting at position 2763 of SEQ ID NO: 1560909
cugagaucucugcauaaau

SEQ ID NO: 1633254 - RNA, 19 nt, Artificial Sequence
  Description of Artificial Sequence: Synthetic oligonucleotide
  Antisense strand to SEQ ID NO: 1633253
auuuaugcagagaucucag

SEQ ID NO: 1633255 - RNA, 19 nt, Artificial Sequence
  Description of Artificial Sequence: Synthetic oligonucleotide
  Sense strand starting at position 2958 of SEQ ID NO: 1560909
cugggcugugacuauguau

SEQ ID NO: 1633256 - RNA, 19 nt, Artificial Sequence
  Description of Artificial Sequence: Synthetic oligonucleotide
  Antisense strand to SEQ ID NO: 1633255
auacauagucacagcccag

SEQ ID NO: 1633257 - RNA, 19 nt, Artificial Sequence
  Description of Artificial Sequence: Synthetic oligonucleotide
  Sense strand starting at position 2965 of SEQ ID NO: 1560909
gugacuauguauucgaauu

SEQ ID NO: 1633258 - RNA, 19 nt, Artificial Sequence
  Description of Artificial Sequence: Synthetic oligonucleotide
  Antisense strand to SEQ ID NO: 1633257
aauucgaauacauagucac

SEQ ID NO: 1633259 - RNA, 19 nt, Artificial Sequence
  Description of Artificial Sequence: Synthetic oligonucleotide
  Sense strand starting at position 2967 of SEQ ID NO: 1560909
gacuauguauucgaauuug

SEQ ID NO: 1633260 - RNA, 19 nt, Artificial Sequence
  Description of Artificial Sequence: Synthetic oligonucleotide
  Antisense strand to SEQ ID NO: 1633259
caaauucgaauacauaguc

SEQ ID NO: 1633261 - RNA, 19 nt, Artificial Sequence
  Description of Artificial Sequence: Synthetic oligonucleotide
  Sense strand starting at position 2977 of SEQ ID NO: 1560909
ucgaauuuguuuccuccau

SEQ ID NO: 1633262 - RNA, 19 nt, Artificial Sequence
  Description of Artificial Sequence: Synthetic oligonucleotide
  Antisense strand to SEQ ID NO: 1633261
auggaggaaacaaauucga

SEQ ID NO: 1633263 - RNA, 19 nt, Artificial Sequence
  Description of Artificial Sequence: Synthetic oligonucleotide
  Sense strand starting at position 2983 of SEQ ID NO: 1560909
uuguuuccuccauagagug

SEQ ID NO: 1633264 - RNA, 19 nt, Artificial Sequence
  Description of Artificial Sequence: Synthetic oligonucleotide
  Antisense strand to SEQ ID NO: 1633263
cacucuauggaggaaacaa

SEQ ID NO: 1633265 - RNA, 19 nt, Artificial Sequence
  Description of Artificial Sequence: Synthetic oligonucleotide
  Sense strand starting at position 3007 of SEQ ID NO: 1560909
aggauuggaucugacuaau

SEQ ID NO: 1633266 - RNA, 19 nt, Artificial Sequence
  Description of Artificial Sequence: Synthetic oligonucleotide
  Antisense strand to SEQ ID NO: 1633265
auuagucagauccaauccu

SEQ ID NO: 1633267 - RNA, 19 nt, Artificial Sequence
  Description of Artificial Sequence: Synthetic oligonucleotide
  Sense strand starting at position 3013 of SEQ ID NO: 1560909
ggaucugacuaaucucugu

SEQ ID NO: 1633268 - RNA, 19 nt, Artificial Sequence
  Description of Artificial Sequence: Synthetic oligonucleotide
  Antisense strand to SEQ ID NO: 1633267
acagagauuagucagaucc

SEQ ID NO: 1633269 - RNA, 19 nt, Artificial Sequence
  Description of Artificial Sequence: Synthetic oligonucleotide
  Sense strand starting at position 3164 of SEQ ID NO: 1560909
gagcuagcacucugacaga

SEQ ID NO: 1633270 - RNA, 19 nt, Artificial Sequence
  Description of Artificial Sequence: Synthetic oligonucleotide
  Antisense strand to SEQ ID NO: 1633269
ucugucagagugcuagcuc

SEQ ID NO: 1633271 - RNA, 19 nt, Artificial Sequence
  Description of Artificial Sequence: Synthetic oligonucleotide
  Sense strand starting at position 3284 of SEQ ID NO: 1560909
gcccgaucucggcauacua

SEQ ID NO: 1633272 - RNA, 19 nt, Artificial Sequence
  Description of Artificial Sequence: Synthetic oligonucleotide
  Antisense strand to SEQ ID NO: 1633271
uaguaugccgagaucgggc

SEQ ID NO: 1633273 - RNA, 19 nt, Artificial Sequence
  Description of Artificial Sequence: Synthetic oligonucleotide
  Sense strand starting at position 3723 of SEQ ID NO: 1560909
ggcugucuuuggucucgaa

SEQ ID NO: 1633274 - RNA, 19 nt, Artificial Sequence
  Description of Artificial Sequence: Synthetic oligonucleotide
  Antisense strand to SEQ ID NO: 1633273
uucgagaccaaagacagcc

SEQ ID NO: 1633275 - RNA, 19 nt, Artificial Sequence
  Description of Artificial Sequence: Synthetic oligonucleotide
  Sense strand starting at position 3853 of SEQ ID NO: 1560909
uuaggaaacugcugcucau

SEQ ID NO: 1633276 - RNA, 19 nt, Artificial Sequence
  Description of Artificial Sequence: Synthetic oligonucleotide
  Antisense strand to SEQ ID NO: 1633275
augagcagcaguuuccuaa

SEQ ID NO: 1633277 - RNA, 19 nt, Artificial Sequence
  Description of Artificial Sequence: Synthetic oligonucleotide
  Sense strand starting at position 3856 of SEQ ID NO: 1560909
ggaaacugcugcucauaaa

SEQ ID NO: 1633278 - RNA, 19 nt, Artificial Sequence
  Description of Artificial Sequence: Synthetic oligonucleotide
  Antisense strand to SEQ ID NO: 1633277
uuuaugagcagcaguuucc

SEQ ID NO: 1633279 - RNA, 19 nt, Artificial Sequence
  Description of Artificial Sequence: Synthetic oligonucleotide
  Sense strand starting at position 139 of SEQ ID NO: 1560910
gcaccagcuccuuguucua

SEQ ID NO: 1633280 - RNA, 19 nt, Artificial Sequence
  Description of Artificial Sequence: Synthetic oligonucleotide
  Antisense strand to SEQ ID NO: 1633279
uagaacaaggagcuggugc

SEQ ID NO: 1633281 - RNA, 19 nt, Artificial Sequence
  Description of Artificial Sequence: Synthetic oligonucleotide
  Sense strand starting at position 141 of SEQ ID NO: 1560910
accagcuccuuguucuaga

SEQ ID NO: 1633282 - RNA, 19 nt, Artificial Sequence
  Description of Artificial Sequence: Synthetic oligonucleotide
  Antisense strand to SEQ ID NO: 1633281
ucuagaacaaggagcuggu

SEQ ID NO: 1633283 - RNA, 19 nt, Artificial Sequence
  Description of Artificial Sequence: Synthetic oligonucleotide
  Sense strand starting at position 142 of SEQ ID NO: 1560910
ccagcuccuuguucuagaa

SEQ ID NO: 1633284 - RNA, 19 nt, Artificial Sequence
  Description of Artificial Sequence: Synthetic oligonucleotide
  Antisense strand to SEQ ID NO: 1633283
uucuagaacaaggagcugg

SEQ ID NO: 1633285 - RNA, 19 nt, Artificial Sequence
  Description of Artificial Sequence: Synthetic oligonucleotide
  Sense strand starting at position 245 of SEQ ID NO: 1560910
ccauuuggguucuguccua

SEQ ID NO: 1633286 - RNA, 19 nt, Artificial Sequence
  Description of Artificial Sequence: Synthetic oligonucleotide
  Antisense strand to SEQ ID NO: 1633285
uaggacagaacccaaaugg

SEQ ID NO: 1633287 - RNA, 19 nt, Artificial Sequence
  Description of Artificial Sequence: Synthetic oligonucleotide
  Sense strand starting at position 276 of SEQ ID NO: 1560910
agacccucuuacuagauga

SEQ ID NO: 1633288 - RNA, 19 nt, Artificial Sequence
  Description of Artificial Sequence: Synthetic oligonucleotide
  Antisense strand to SEQ ID NO: 1633287
ucaucuaguaagagggucu

SEQ ID NO: 1633289 - RNA, 19 nt, Artificial Sequence
  Description of Artificial Sequence: Synthetic oligonucleotide
  Sense strand starting at position 362 of SEQ ID NO: 1560910
cuuaaugugucuucuugua

SEQ ID NO: 1633290 - RNA, 19 nt, Artificial Sequence
  Description of Artificial Sequence: Synthetic oligonucleotide
  Antisense strand to SEQ ID NO: 1633289
uacaagaagacacauuaag

SEQ ID NO: 1633291 - RNA, 19 nt, Artificial Sequence
  Description of Artificial Sequence: Synthetic oligonucleotide
  Sense strand starting at position 690 of SEQ ID NO: 1560910
ccaaacuggucuuuguaau

SEQ ID NO: 1633292 - RNA, 19 nt, Artificial Sequence
  Description of Artificial Sequence: Synthetic oligonucleotide
  Antisense strand to SEQ ID NO: 1633291
auuacaaagaccaguuugg

SEQ ID NO: 1633293 - RNA, 19 nt, Artificial Sequence
  Description of Artificial Sequence: Synthetic oligonucleotide
  Sense strand starting at position 691 of SEQ ID NO: 1560910
caaacuggucuuuguaaug

SEQ ID NO: 1633294 - RNA, 19 nt, Artificial Sequence
  Description of Artificial Sequence: Synthetic oligonucleotide
  Antisense strand to SEQ ID NO: 1633293
cauuacaaagaccaguuug

SEQ ID NO: 1633295 - RNA, 19 nt, Artificial Sequence
  Description of Artificial Sequence: Synthetic oligonucleotide
  Sense strand starting at position 741 of SEQ ID NO: 1560910
guccuaaucucaucuuguu

SEQ ID NO: 1633296 - RNA, 19 nt, Artificial Sequence
  Description of Artificial Sequence: Synthetic oligonucleotide
  Antisense strand to SEQ ID NO: 1633295
aacaagaugagauuaggac

SEQ ID NO: 1633297 - RNA, 19 nt, Artificial Sequence
  Description of Artificial Sequence: Synthetic oligonucleotide
  Sense strand starting at position 840 of SEQ ID NO: 1560910
gcuuuaccucccuggaaca

SEQ ID NO: 1633298 - RNA, 19 nt, Artificial Sequence
  Description of Artificial Sequence: Synthetic oligonucleotide
  Antisense strand to SEQ ID NO: 1633297
uguuccagggagguaaagc

SEQ ID NO: 1633299 - RNA, 19 nt, Artificial Sequence
  Description of Artificial Sequence: Synthetic oligonucleotide
  Sense strand starting at position 867 of SEQ ID NO: 1560910
caguucucccucugugagu

SEQ ID NO: 1633300 - RNA, 19 nt, Artificial Sequence
  Description of Artificial Sequence: Synthetic oligonucleotide
  Antisense strand to SEQ ID NO: 1633299
acucacagagggagaacug

SEQ ID NO: 1633301 - RNA, 19 nt, Artificial Sequence
  Description of Artificial Sequence: Synthetic oligonucleotide
  Sense strand starting at position 869 of SEQ ID NO: 1560910
guucucccucugugaguuu

SEQ ID NO: 1633302 - RNA, 19 nt, Artificial Sequence
  Description of Artificial Sequence: Synthetic oligonucleotide
  Antisense strand to SEQ ID NO: 1633301
aaacucacagagggagaac

SEQ ID NO: 1633303 - RNA, 19 nt, Artificial Sequence
  Description of Artificial Sequence: Synthetic oligonucleotide
  Sense strand starting at position 1226 of SEQ ID NO: 1560910
gugauacuauucuuaagga

SEQ ID NO: 1633304 - RNA, 19 nt, Artificial Sequence
  Description of Artificial Sequence: Synthetic oligonucleotide
  Antisense strand to SEQ ID NO: 1633303
uccuuaagaauaguaucac

SEQ ID NO: 1633305 - RNA, 19 nt, Artificial Sequence
  Description of Artificial Sequence: Synthetic oligonucleotide
  Sense strand starting at position 1227 of SEQ ID NO: 1560910
ugauacuauucuuaaggau

SEQ ID NO: 1633306 - RNA, 19 nt, Artificial Sequence
  Description of Artificial Sequence: Synthetic oligonucleotide
  Antisense strand to SEQ ID NO: 1633305
auccuuaagaauaguauca

SEQ ID NO: 1633307 - RNA, 19 nt, Artificial Sequence
  Description of Artificial Sequence: Synthetic oligonucleotide
  Sense strand starting at position 1986 of SEQ ID NO: 1560910
gccgcacaagugucguaaa

SEQ ID NO: 1633308 - RNA, 19 nt, Artificial Sequence
  Description of Artificial Sequence: Synthetic oligonucleotide
  Antisense strand to SEQ ID NO: 1633307
uuuacgacacuugugcggc

SEQ ID NO: 1633309 - RNA, 19 nt, Artificial Sequence
  Description of Artificial Sequence: Synthetic oligonucleotide
  Sense strand starting at position 2212 of SEQ ID NO: 1560910
cgguucugaaagugggauu

SEQ ID NO: 1633310 - RNA, 19 nt, Artificial Sequence
  Description of Artificial Sequence: Synthetic oligonucleotide
  Antisense strand to SEQ ID NO: 1633309
aaucccacuuucagaaccg

SEQ ID NO: 1633311 - RNA, 19 nt, Artificial Sequence
  Description of Artificial Sequence: Synthetic oligonucleotide
  Sense strand starting at position 2454 of SEQ ID NO: 1560910
gagggucaguguuugaguu

SEQ ID NO: 1633312 - RNA, 19 nt, Artificial Sequence
  Description of Artificial Sequence: Synthetic oligonucleotide
  Antisense strand to SEQ ID NO: 1633311
aacucaaacacugacccuc

SEQ ID NO: 1633313 - RNA, 19 nt, Artificial Sequence
  Description of Artificial Sequence: Synthetic oligonucleotide
  Sense strand starting at position 2455 of SEQ ID NO: 1560910
agggucaguguuugaguuu
